United States Patent Application Publication US 2026/0103690 A1 - sequence listing, part 37

SEQ ID NO: 172768 - protein, 336 aa, unidentified
MFIIGCDFHTRFQQIAMLDTQTGELVERRLEHENGEARAFYAALPGAVRVGMEATGYSQWFETMLTEQGHELWVGDAAEIRAAVVRKQKTDTRDAYHLLDLLVKDKFPRIWIASPSERDVRQLLRHRHKLVCWRTSVRNQLHALAMGQGVCRKGKLWTAAGRKELEGLALGPWASRRRQELLQMQDWLEVPIRALDQAVIQEAEGRPAARRLMEQRGVGPVTALAFVATIGSIDRFRNSKQVVSYLGLNPRESSSGGKQRLGSISKQGNSMLRFLLVEAAQTASRGDPELRRDYLRLKFRRGSAVAKVAIARKLAVRLYWKLREAGQPGAAGSYAG

SEQ ID NO: 172769 - protein, 341 aa, unidentified
MKLYGGIDLHSNNSVFNLIDENANVVLKKRINNYLEAILLLMEPYYDAVEGLVVESTYNWYWLVDGLMDAGFKVHLANTAAIQQYSGLKYGDDYSDANWLANMLRLGILPEGYIYPKEERMIRDLLRKRLQLVQQRTQNLLSMQGLYARHLNMKLNSDQVKRLSEKQLMIDFSDLNVRLAVNANLVMLLCLTKQIKQIERTLKKQLKLRTEFVNLTTIDGIGLILALTIMLETGDISRFNKVGQYASYCRCVNGGRYSNGKKKSKTNTKNGNKYLAWAFIEAANFAIRFNDTVKRFYQRKLAKKSIVIARKTVAHKLARACYYVMRDQVEFDVNKAFGYSK

SEQ ID NO: 172770 - protein, 344 aa, unidentified
MNIASIGIDLGKTTFHLVALGERNKILLRRKFSRTQLLAYTANLPASLIGIEACAGSHFIGAVLREQGHQVRLIPAQFVKPYRKSNKNDFIDAEAIAEAVTKQNMRFVQIKTQEQLDWQAMHRVRDRLMQRRTALINEIRGFLLERGLTFAARPIYLRKNLPTVIEDAEQNLTPRLRWLLDRLWQEWKQTEIDIKTITDEIERISNEDARCRQLRQIPGFGPLVSTATVAAIGNGAAFRRGRDFAAWVGVVPRQFSTGGKQKLYGISKRGNVYLRRMLIHGARAVLLRVKYDTGGFGQWVHRLAQRAPRNKVVVAIANKLARMAWAVLSSGKDYRHQPLQPAAA

SEQ ID NO: 172771 - protein, 326 aa, unidentified
MPNTERGFAQLVDMFTAHHVQRVGIEGSGSFGRAVAVHLALCWQSGQPVAVVEVPTLMTSRERHGQLGKGKTDPVDALAIARITTREQQLPPVRLTVGAAADLRALLDYREDLVRERGALVNRAHAELGGLRPGYQQQIPIMTTRARVRAAVDLLGDDSSIRATLCRRRLERVIAIDAETAELKQQITRLVAAADTTLTDLYGVGPLVAARFLAEVVDIRRYPNRNAFAAANGTAPLPASSGRTVRHRFNPGGNRQPNRSLYTIALTQIRGDTEGRAYYERKRAAGKSKREALRCLIGEVSVMRPGIGLDRGFSVVSGDGLVAEPL

SEQ ID NO: 172772 - protein, 320 aa, unidentified
MSQHSLRNEVSVGIDVSKDFLDVDVAPARQPLRVPNTPEGHTTLVNHLKSLKVDIIVVEATGCYELAITAELLAAGLPVRVMNPRQIRDFARATGRLAKTDRIDAAVLADFGLAVQPEPRPLPDAQTQQMREKLARRRQLVEMITAETNRHHRATAEGVRRSIEVVLNVLKDELRRLDEDLDQAIRQSPAWREKVELLQSVPGIGPQNARVLAVELPELGQCSRQQIAALVGVAPMNRDSGQFRGRRTIRGGRGRVRHCLYMATLTATRWNPKIRHFYQRLLAAGKPKKLALVACMRKFLTILNAMLRERKPWTETAVTT

SEQ ID NO: 172773 - protein, 409 aa, unidentified
MDVVIERGAGLDIHKKSVLACVRVPNPEGGRRQEARTFGTTAAQLLALRDWLHAHGVTHVAMESTGVYWKPVYYVLESTLTCLLVNAAHISRVPGRKTDVSDGEWLAQLLEHGLLRGSFVPPVPIRELRDLTRYRAALVQDRTREANRLHKVLTDAGIQLASVASNVLGTSGRAMLAALVEGTTDPVVLAALAQGKLRRQLPALRDALAGHFRGHHAFLVSQLLAHLDYLDEALATLTEQIQAALAPFAAEAARLDAIPGVGPRTAEVLIAELGVDMRQFPTPRHLASWAGLCPGTHESAGKRRPVRTRKGNRWLRAALIEAALAAINVRDGALAARYHRLVRHRGHKKAIVAVAHKMLTTAYLLLAEGRTYQEPGAAYYDAERKDRVVRRAVQTLERQGYRVSLDLAA

SEQ ID NO: 172774 - protein, 305 aa, unidentified
MISWVGIDISKSNLVVWVQPQKDGFEVPNTVEGFDVLVARLGQYTVGRVLLEATGGYERKVMAALQQASFSVLRINPRRARAFAVAMGKNAKTDPIDAAVLADFAEALHASREKPISPEREALRELIQLREHFVQQRDDNKRRLQQAQLPAVVEAIRDHIRYLQTQIKQLGKAIDQSMRELDAEKADRLISVKGIGTVATASLMVYLPELGELDRREIAALAGIAPYNDDSGNHSGKRQIYGGRARVRRALYMSCWVVIRCQADFKARYESLRERGKSAKVALIACMRILLIRLNAMLRDGTEWR

SEQ ID NO: 172775 - protein, 365 aa, unidentified
MNEATITPSTLTIGIDLGDRKSHVCVLDGDGAVVEESRIATTPQALRARFESRAPTRIALEVGGHSAWVCELLKELGHEVLVANARKLRMIFQSDSKNDRLDAEQLARVARMDPRLLYPIEHRERSARADLAVMRSRDALVTTRTRLVNHIHGVLKSFGHRVKKYPAPGFHRQVAGQIPEELQPALQPLLDTLEAIAERVLHFDREIRRLSTKEYPETALLNQVGGVGPLTALCYVLTIEDPERIQRSRNVGAYLGLRPRQRQSGQRDPELRITKAGDRDLRRLLVQCAQYILGPFGRDSDLRRWGLELAGRGGATAKKKAVIAVARKLSVLLHRLWLTGEVYEPLRNTNRRAAAQAPEPAALAG

SEQ ID NO: 172776 - protein, 368 aa, unidentified
MESYVGLDVHSKRSVFVIEAADGRVVARGDIPTTPAGFRQLREQPALAAETPVALETGTVAFYAARELARVGLRPVVIDAHEVRVKAHRPRQKSDRRDAFELCEGLRRGQYRAIVHVPPARIGALRETLSRRRHFVAVRVAEGNAVKRLLRAAGLGHLSKSLGTDAAWAKLLAALATEPALRTYVVRHQALWRCAQEQIAALETTLATQPTTITTVAARLQTVPGVGPIVSLTAVAVFSDVHRFPSAKHAASYAGLVPSTDQSGDRDTTATSPSAARARCARCSAKRRTMRSGRAILCIRTSRACVRSAATRWPSSPSPIASAASSSRCCATAQSSTSPSSPSRRAVPAHDGAALPAQARGRGPRVSG

SEQ ID NO: 172777 - protein, 451 aa, unidentified
MAKKKLEMDIINPYCAGIDIGSRSHFVAVGQALEDVKEFGVYADDLTDICLHLKEHEVTSVAMESTGNYWQNLYVELIKHGFDVTLANGKFTKNIKGKKTDVKDARWIQKLHSIGLLTSSFLPDETTEKLRTYCRQRQNMLDLAAEASHKMQKYLKILNFRLDVVVRDICGLTGMAIITDICKGNLDPEKLSEHRHGNCRKSKEEIAKALKGNSREDYIFGLKQELESYQFYQKKIAECDKQIGMFLKTQINTDPEKKKLKTSDKTHKRINKNALKGIDLNQASYQYFGGVDLMNIEGISHATILSIISEIGPEGFHKFETAKHFTSWLRLAPNNKVSGGKLLSSKTPKGSNRLKIALRNAANAIGNLKDTHLSNFFNRVCYRKGRTVAVSVTARKLAVILWNMVVKKLPYKPPTNYLFLDEKRKLGLVKRIRKQIDKFALTNEDLELLKT

SEQ ID NO: 172778 - protein, 393 aa, unidentified
MQGQQEFHMSTRHAPSRQCGMIYDEMVSPRYPNRRLCAMMEVSQTINGVREETKMNITTVGLDLAKNVFHVVCLNEHNKEVKKRMLRRNQVRQFFAQLSPCKVGMEACATSHYWGRELIALGHDVKLIPPQQVKPMVQGNKNDYNDALAIAETVNRPKVTFVAVKTVEEHDIQAIHRMRSQCIRDRTALSNSTRGLLGEYGISFSKGLATLRRTIPELLEDAENGLSLRFRNLLARRYEQLAELDEHIAFYTKELELLSQQDEACQRLQTIPGFGPIVASAFRSTIGNGSAYTRGRHAAASLGLVPRQYSSGGNTLLLGISKRGDRYLRKLLVHGARTVVRHAIDREDPFSRWINRVSERRGKNRAAVAVANKLARVGWAVLRYNTQYDPTLT

SEQ ID NO: 172779 - protein, 351 aa, unidentified
MILASDADVIIGVDTHQDTHAAALCDARGRVLAQLQVPATAAGYARLLAWARSAAGRSPAMWAIEGTRHYGLGLARHLVGAGEQVTEIDNNHHLGKRRGGKTDAIDAVRAARELLARPHPAQMRADGDREALRLLMIDRDHAVQSAKTARTTLASVLVTAPAPLREQLRHRSSDRRARECAGLTCPPGADRHTQVLHQTLARLGQRITALTATAADLETQIAAIVEDMAPGLVAAEPGLGPLSAAQILLSWSHPGRIRTEAAFAMLSGTAPIPVSSGRTDRHRLNRLGDRQLNRALHVVIITRLRCHPATRAYAQRRRAEGKTDREIRRCLKRYLARHLYRTLNNQTPLTA

SEQ ID NO: 172780 - protein, 362 aa, unidentified
MKKTIRERESEWKEKPDRTVGVDLGDRFSHYCVLNGDGEVMEEGRIRTSEEAFRRHWEAEPRQRIVMETGTHSPWISRLLRGFGHQVIVANARKVRAISENESKNDRQDAEMLARLGYCNPRLLKPIQHRSAERQRDLNLIRARDTLVRARTMLINTMRGLVKSAGGRLPPASSESFAARVSAAVPAELGTATQPLLRQIAGLTAEIRDLDQVIEKLTERYPEIRILRTVPGVGPVIAAAYVLTLDGVDAVEHSRSVGAFLGLRPKQSQSGDSDPEHNISKTGNIYLRRLLVQAAQYILGRYGPDSALRRWGLKLAQGGKRTKKRAVVAVARKLAVLLHHLWRTGQNYRPFPEAAVAAGSAA

SEQ ID NO: 172781 - protein, 335 aa, unidentified
MYYLGIDLHKDESHVAVLDDDAEVVEEIRVANANLDEVAEEYAGAKAALEATSNYYTVYDTLDEHLDVVVADPTQTKAIGYAEVKNDRLDAKLLAQLRRAGMIAESYVPSEELRERRALVRGRKRLVEKRTDFKNEVHALLDKHGITYDWDPFSVNGRDILAGEDVSLGVVGDQLMESFLSIIDELTAQIEELESLIEETAASLEETQLLMTIPGVSFYSSLLITSEIGEIDRFDEAKQVVSYAGLDPVVRESGDSRTEGSISKRGSGDLRWILVQCVQTAVHRCNDPYLGRFYARLKQRKNHQIAIVATARKLLVSIFHMLEREEVYDPPEVSA

SEQ ID NO: 172782 - protein, 336 aa, unidentified
MISGLGVLLGTRSFPTTASGYRQLLDRAGGFGTIRRAGVECTGSYGAALARHLSANHIEVIEVNQPDKASRRRRGKTDTVDAEAAARAVLSGRARATAKAGDGPVEMLRIFKLAKTSAIKSRTQAINQLKAVLVSADPQLRESLSGLRNPTLIRRCAQPRHQPPHDAPTVAAYTLALLARRILELTTEIDDLNQQITAILTRHAPTLLQRNGVGPDTAAALLIAAGDNPERLHSEASFAALCGVSPVEASSGKTHRRRLNRGGDRRANSALHTIVLSRLRWDRPTRAYPTRAYLARRLTEGKTRREAIRCLKRYVARELYRLIAPPTEPQRQTPAA

SEQ ID NO: 172783 - protein, 346 aa, unidentified
MAYYVGLDVSVKETSICIMDDKGVIAARTDVSTDPDLIAQFISKHASEVERVVHESGILAIWLTRELEKRGVPIICIDARLAHKALSGRINKSDQGDAEGLAQLARTGWFTQVHIRSEASERMRVLIGARERLIRMRKDLEGHVRGVLKVFGICMTSVATGKLRKGFRDQLVAAADTDPAIAMMAETFIPLHKTLCIARDALDEEVGTIARESDLARRLMTVPGVGPIVALAYIATLDDEKRFRKSIDVGAFLGLTPKRHQSGEMDWSGKISKCGDCDMRRLLYSAASTLISCTRKQSRLKEWATKLAERKGHKKAAVAASRKIAVILHSLWRNETVFEPGMEGAR

SEQ ID NO: 172784 - protein, 312 aa, unidentified
MEKLSYGGIDVSKDRLDVVVLPEGWFFSVSNDTAGWTELVARLRPLAVCAIGLEPSGGYERGIIRALLVARLSVRRINPNKLRQFARARGVLAKNDRLDARLMAEYVAIMPTRAVQRDDAVDRLAEVVTMRRQLCDEHVTVENQTAHLEDAMLRRLSKRRLVRLEADIRLLDKRLAEMVATNAAFARLYELLTSMPGVGPVLAFTLIALLPELGKMGRKQIAALVGLAPYDFDSGKLRGHRSIYGGRMPIRNVLYMAALSASRYNPALKTFSNRLAHANKKSKVIIVAVMRKMITTLNAMLRDNAAWQPQSN

SEQ ID NO: 172785 - protein, 414 aa, unidentified
MALKIVYQICCGIDVHKTFVVACIASTNKQGVTTYKRHRFSTFTQGLKELLQWLLDNHCKDVCMESTGKYWIPIYNVLEKDCNIVLAHPKYVKAIRGKKTDKKDAKWIADLFKHDLVAGSFMPPADIRQLRDLMRYRFKLTCFMSSENRLQNCLTVSNIQLASVVSDTFGKSSQRILDKILENPDDTSFDIEPLIHGSMKKKLPELELAIDGFITPEQAGKLKVIKKHFEDLESRKAELEKLILALASPYQQELDLILTAPSFKNKFTAIGIISEIGVNMEAFPSAKHLCSWAGLTPTNNESAGKKKSVRVSKAGCYIKPLLVQCANSVVKSEKHPEIRNRYLRLRKRRGHKKAIIAIARMLLTALYNMLKNKEPYNAELYRKSDVLPVNREITIEQAILMAQFQGYKIKSAAE

SEQ ID NO: 172786 - protein, 340 aa, unidentified
MEKRYIGIDLHRNRFTCCLRLENERTYMTEWELEDLGKFVKKLRASDEIAVEITGNTRLFFDAVRGHVARVVVVNTNQFKVIRQSVKKTDPNDARTLALYLSKNMLPEVRMKDKEHGQLASLTQTRDTLVKLRTALKNKINNILSGRGLNLPKEALSSEKRLAEVLTLPFDEIVQIELRVIVEQIRSLNKSISDLEKTISDAGSKLEGHEGLSSIKGIGKITSAILLSVIGDVNDFADEAHLASYFGIVPRVSNSNETERSGRIHKRGSKLGRTALVQSALIAANYSPYLKRFYEQVKARRGAGKAIIALAKKFLGVIYQTLKNKWVFADFPNFVLAEAS

SEQ ID NO: 172787 - protein, 408 aa, unidentified
MQVLHPRCAGLDVHKDTIVACVRCVSPPLHQEVRSFGSTTTGLLALADWLAEHDCTHVAMEATGVYWKPVWHILEADFELVLANAAHIKNVPGRKTDVNDAMWIADLLAHGLIRSSFVPPQAIQQLRDLTRTRKQLVREVSRHSLRIQKVLEDANLKLGSVLSNVLGKSGRAMLDAIVAGQSDPGQLAELAQGTARNKSAELREALRGRITEHYRTMLKLHLQVVDALERTLAELDTAVGKALAPIQQRARLLTTMPGVSDLTASVLVAEIGVDMSRFPSAGHLVSWAGLCPRSDESAGKRRSTRVRKSGTWIKTTPVTAAWAAVRVKTSYLRAQFLRIKARRGAKKAILAVAASMLTAAFHVLRDGTEYHDLGSEHFDRHDRSKTIRRLLKRLQDLGCDVPVAAHVA

SEQ ID NO: 172788 - protein, 344 aa, unidentified
MEHYAGIDVSLESASVCIVDATGRIVREAKIASEPEVLIGWFSRSGLAVTRIGLEAGPLSQWLYAAMRNAGLAVELLETRHVRDAFKAMPVKTDRKDARGIAQLMRLGWFRPVHCKSLPAQEVRALLTARKLLQSKNHDVEMSLRGVLRGFGLKVGPTPPRTFASRVRNLVAGHSTLSMVAEAMLAARETLFGEWQKLEKHLRFLAREDSRVRQLMTTPGVGTIVALTYVSAIDDPGRFRSSKTVGAHFGLTPRKYQSGETDVTGRISKVGDGAVRTALYEAANVILTRPVKGSTLKSWGMRLAARAGMRKAKVALARKLAVVLHRMLADGTSFLADKAAAAAT

SEQ ID NO: 172789 - protein, 339 aa, unidentified
MERSCVGVDLHRNNFTYCVRVNGKETQMGKCAINELAGFAKMPGPATEMAVEATGNTIMFCSLLKAHVGRLVVVNPSQFKVISMSTKKMDKHDAKVLAEFLEKDMLPEVRVKDELQAKISSLTQTREKLVQLRTVLKNKVNNLLAANFVVLNREELSSENGLLKALSFHFDVITDTEMQVIVDQIRSLNKSIEKLDNAIEDHGSKMDGFDNLKSIKGIGSKGAAILLSAIGNIHDFRSSKHLAAYLGIVPRVSNSNDTVCHGRITKNGSKIARSALVQCSLIAKRYNSYLKNFHESVKSRRGGAKTNIALARKFLDIVYRTLKNKWMFEDFTQFKLVKN

SEQ ID NO: 172790 - protein, 342 aa, unidentified
MREVTTVGLDIAKSVFQVHGVDAEGTVVVQRRLTRARVLLFFEKLTPCMVGIEACASAHHWARQLRGFGHEVRLMPPAYVKPYVKRQKNDAADAEAICEAVTRPNMRFVEVKTPEQQSVLVLHRTRQVLIRQRTQISNAIRGHMSEFGLVAPIGRYGLQVLIEIIGHEADQRVPEAARTCLAMLVDQLRLVNGQILETDRRIMASARATEVGRRLMGIPGVGPLLASALVATVPDPHAFRSGRNLAAWIGLVPRQNSSGGKERLGGISKQGDRYLRQMLVVGALAVIRHAERHGSRRPWLVQLMARRTTKVAAVALANKTARIVWAIMTSGQPYREPQLVTA

SEQ ID NO: 172791 - protein, 375 aa, unidentified
MNTTTFVGLDVHARSIKAVALDAMTGEVRSAPFGYDAAEVAGWVSSVDPSAKCVYESGVTGFDLQKRLSSMGIDCVVGAVSKMIKPSADRRRKNDRNDAEFLARMLSVGNVVEVWVPDDECEAARDLTRALDDAREDLKRCKQRLSKFLLRHGLVFSETNAKGQRRKNWTAAHWAWIRSISFPDKADDEVLAYYIDAARQAMEDKARLERLVEAEASKPRWKKRVDSVRCLKGIDVTSAADLVFEAGEFSRFKNARSFAAWIGLTPSEHSSGESVRQGGITKAGNKHLRRVLVESAWHYLGCSPHSKDLAKGQAPDPGARRQGREKARRQTSRDARARRPQEQGQRRDRPRARMLVLGDRPHGRERLALGKAAPA

SEQ ID NO: 172792 - protein, 344 aa, unidentified
MKVSTVGLDLAKNVFQVHAIDDAGEVIVRRSLRRRQVMPFFGKLAPCLIGVEACGTSHFWARELQGLGHEVKLMPPIYVKPYVKRGKTDAGDAEAIAEAVRRPTMRFVAIKSAEQQSVVALHRTRDMLVGQRTQLVNMIRSQLAEYGIVLAKGIHHALRLVDQLVEGVVPDIPPLGCKIVIALAEQIRELQARIAMLEGEIKTWFRGNELARRLETIPGIGYITASALAASVTDPHRFTSARQFAASLGLTPKADSSAGRERMGRISKMGDRYLRRLLVIGMTSQLQSARRKPEAHPWVAGLLASKPNKLVAVAMANKAARIAWVVMTRGEVYRARRPATEGTV

SEQ ID NO: 172793 - protein, 334 aa, unidentified
MKQVNQVGVDVDSEELVSMMRRGGQRLPLARFANSAGGHKKFIRWATKGARPVRVCLEATGIYSLEFALALHHAKNVEVMVVNPRAMKDFGRASMQRAKTDAVDAGVILDYLERMPFTEWQPPTPEILELQAINRRIVQLNTELTREKNRHHASEFAGASADAIAHDIEVNIHHLERRIARMQDSGLQLVRGVPALAAKLAHLVSAKGIGEASAMRILAELLVLPDDLAAPQWVAHAGLDPRPYESGTSVHPPRRISKVGNSHQRAALYMSALVAIRHEPNVKAFYDKLIAAGKKPLQAVVAVMRKLLHAIWGMLKHDQDFDGNKFFKLTEKTA

SEQ ID NO: 172794 - protein, 344 aa, unidentified
MEISTVGLDLAKNVFQVHGINSAGEVVVRKTLRRAQMRRFFEQLAPCLVGIEACGTSHYWAREIIKCGHEVRLMPPAYVKPYVKRGKNDASDAEAICEAVTRPTTRYVAIKSPEQQAALALHRTRDLFVKQRTQLVNMIRSQLAEFGIEIRRGIEQALMVARHIAVHELPDVPPLAAKVIAGLSEQVLDLQSKLGDLERELLVWHRSSDVAKRLATIPGIGTVCATALAASVSDPHQFRSGRQFAAWLGLTPLQHSSGGKERLGRISKMGDKYLRRLLIVGMTSLIRRAKYKPATVDPWLAELMSRKPARLVTVALANKAARVVWAIMVRGGVYQRPTGAATSA

SEQ ID NO: 172795 - protein, 334 aa, unidentified
MAIGVDTHKEVHVAVALDALGAELDSRQIATTPAGYRCLLSWAQELGVPAFAVEGTGSYGAGLVRFLERAGVSVYECERPRRQERRRGKSDLIDAALAARRLLSGERLSIPRGGGRREDLRLLLLERRSAMQARNAALNQLSALLVTAPDHMRERLGALSGERLAQAAARLRPRGEVMNGVLRRLGRRVERLSKEVADAERALAALLAEVAPDLLEECGVGPVCGAQLLVSSGDPSRMTSEASFAALAGTSPVDASSGKQRRHRLNRGGDRQLNWALHVIALARIRHHAETTAYYQRLLAAGKTTREARRCVKRALARHFYRRLREMPTVLLTT

SEQ ID NO: 172796 - protein, 322 aa, unidentified
MAMLSFGGIDVSKDRLDIMVLPDEQCSWVSNDAAGWAELVEQLRGSSITAIGVEASGGYERGVVRALLAAGMSVRQINPFKLRQFAKASGTLAKNDRLDARMIASFVAIMPTRPAQRQAPMIEQLAAMLTVRRQLCDHTAATENASRLLEGAMLQRLSRRRIAGLTADIDLLDQRLVEIVTADPALAHRFCLLTSMPGVGAVLACTLIALLPELGQMSRKQVAALVGLAPYDFDSGKLKGRRCIWGGRARVRHVLYMAALSASNWNPGLKAFHDRLKATGKKPKVVIVAVMRKMITTLNAMLRDGTTWVDRYSGRRSASTAR

SEQ ID NO: 172797 - protein, 346 aa, unidentified
MELHTIGIDLGKTVFHLVGLNPCGEVVVRKKFSRKQLLHFTANLQVKVIGMEACGGSHFLGRALREQGHEVRLMPAQYVKPYVKTNKSDYIDAEAIAEAVGRPKMRFVPIKSDDQLDLQSLHRVRERWVMRRTAVINQIRGLLLERGITLRQGRCHVDAALPGILEDASAKLSGAVRLLLAQLRLELDHLQMRIDEADAVIQKIAGENEACRRLVAIPGIGPVTATAIIAAIGNGAAFKKGREFAAWLGIVPGEYTTGGKQKLLGISKRGNSYLRRLFVQGARAVLQQSAKQSSGLSAWLAQLTARTHRNVAAVALANKLARMAWAVLAKNEEYRPPKLAGGAATA

SEQ ID NO: 172798 - protein, 406 aa, unidentified
MKIVIGVDPHKLSVTIEVLDDREQVLATGRFATDNAGYAAMRKRVAAWPERTWAVEGSNGAGRPLAQRLLADGEHVVDVPAKLAARIRMLDTGHGRKTDAHDAHSVAVAAVRAKELRVLALDPQLEALRMLVDRRAELARQRTQTANRLQRLLAELTPGKAKKDITSQQAKTILASVRPRDLVGKTRRRLAAEQLADLVAVEKKIKALTKELKALVQESGSTLMDLPGVGPIVAARILADVGDVARFADRNRFASWTGTAPLDASSGEQIRHRLSRAGNRRMNHMLHIAAATQIRLDTEGRRYYRRKIATGKTRMEAMRCLKRRISDAVYRQLLADARRAALSNARASSQADPGGHCGATHQSSAVDLPPHIDTSDQPLPGPAQPTLQPAKRPRKTTAKKSLKRAG

SEQ ID NO: 172799 - protein, 377 aa, unidentified
MTTTDAATEARETVYVAIELSKKTWVLGIAHPDRDRPSIHRVSGGNIAELVSRLRVAARNNRRILVCYEAGYDGFWLARALARMGIECRVLDPASIQVNRRARRVKTDRIDVLALLRALIATDRGERHVCAIVRVPSVEEEDARRSHRERQRLVRERTGHINRIKGLLFAQGIRDIKPKLRRSRIDFAALETAEGHPLPDRLRRELEREYARLSLIATQLREVEKERDTADAQDPVVEQRRQLLVALHGVGATSAAILAREVFARSFASRRQLGSYLGLTPSAYDSGSTTRCQGISKAGNSWARRILIEVAWLWQKYQPASPLSIWYIQRTAGQSSRIRRIMLIALARKLAISLWRYVETGLVPEGVAIAKAKLRPA

SEQ ID NO: 172800 - protein, 418 aa, unidentified
MTDTSRRQWFAGVDWASDKHDVVLTGDSDEIVGHRIFEHSGAGLAQMADWLLSETKAAAQDIHVAIETPHGAVVETLLERGFKVYSINPKQLDRFRDRFTVAGAKDDRRDGHVLASSLRTDARAFRLLTPADPEIVELREFSRIVEELGHDLRRHMNRLHDQLRRYFPAFLRLGGDADALWKLELLALAPTPAMARSLPRAKVARLVKTHRVRCHDADGLLAVLRAPAPAVSEATVAAAKVHVLVLLKQIRLAAEQLGEAKATLGRLVDALAEPGDSAPGQTVQRDAAILHSSPGMGRIILATLLAEAPQAVRERDYHALRTHGGIAPVTRQSGKSRYVVRRLACNKRLRNALYHWARVAIQKDARYRAKYEALHARGKSWGRALRTIADRLLYVACAMLEAGTLYDANHGAEATKSP

SEQ ID NO: 172801 - protein, 393 aa, unidentified
MERPMSQPFDASRSLTVLEQDSTIIAVIEMSQSKWLVSAVVPGVERQPLKKLDPDEEALRKLLHRWRNEAGQAGHEIKRIVVAYEAGRDGFWLARWLQARDVEAYVIHPASVAVSREHRRAKTDRLDTELLMRAFLGWLRGEKRHCSMAAIPTAEEEDAKRPNRERGNLVTDQTRIVNQIKAILARFGIRTFRPTLRKAAEKLDGLRTAEGTPLLENTRAELRRHLARLRVVREQIRAIEHERLRKFAAAPAGVKGPHAMVRLIARVVGVGVETADMLVNEVLSRHLRDRKAVARYAGLTGSPDESGRRRRERGLARAGNARVRCGMIQLAWRFLRFQKDSALAQWFDARTADGRGSTRKTMIVALARKLLIALWQLVTTGEMPRGVVLRPAS

SEQ ID NO: 172802 - protein, 348 aa, unidentified
MTFYVGLDVSLEETAICIVDVGGKIHREGKAESDPEAIAIWLGSAAEAYERVGLEAGPLSPWLCEGLLAAGLPAICIETRRMKGATAAMAVKTDRNDARAIAQAMRVGWFTAVHLKTLRSQELRMLLTNRRALLTSRVAIENEIRGTLRAFGLKVGPVKVDAFKDRVIELTADHPRLGEMMRPMLAAREALQLQCEALHSMLLKAVRTDPVCRRLQSVPGVGPVTALAYATAIDDPGRFAHSRDVGAHLGLTPRKYATGEIDRNGSISKSGDRLAREALFLAAHTLLTRVTRWSMLKAWGMALAKRRGLRRATIAVARKLAVIMHRIWVDATDFRSTREENTPVPAAT

SEQ ID NO: 172803 - protein, 452 aa, unidentified
MRKPQLIKDEGHQQVHERVAGIDVAKASAAVCLRTPGKPGCSQVWTEVAATMGSVTELGRMLLKERTELVVMEATSDYWKIWFYVLESLGLMVQLVDPAQVRQLRGRPKTDKLDAQWLARLAGWGMLRPCFVPAAPVRVLREYTRARADLVRDRTRCWQRLEKLLEGALIKVSSVASKINTESVKDMIRAMTEGERDPQVLAGLARTRMKAKHGALVQALTGMWQDHHGVLARQLLDQAAYLDTLIGEVEGQIAVTVAAIPAAWGVDADGVTGPGAGHGPDAARLDAVTRLDEITGISAQMAMAVIGEIGLDMTRFPTPAHLVSWTGLCQAANQSGPRPRKGKKKHGNHYLRSILCQAATGTRDTSTFLGERYRRIRRRRGAAIAQTAVARSILVIIWHLLADPDARYTDLGEDYYTSRISREKKIRGHLSQLRALGVDLITAPPKDSAPAA

SEQ ID NO: 172804 - protein, 377 aa, unidentified
MKKATQFVGLDVHAESIAVAVAGSDGTVRSLGQIPATEDAVRRLVKKLGTPRELRVCYEAGPCGYGLYWQLASLGVACDVVAPTLIPVRSGDRVKTDRRDAVKLARLHRSGELTAVWVPDKATEALRDIVRTREAAKKDQLRCRHRLSKFLLRQGRRYPEAKKWTGRFMDWAKAQRFESGAHQAVLADYVGEVERVAERIARLEQAIDDAVEQMPSTPKSVIAALQALRGVAKTTAATIVAEAGLLSRFPRPKQLMGYSGVVPREYSSGNRIQRGGITKTGNAHLRRVLVEAAWAYQHRPAISLKLRQRHQGLSEEIKAIAWKAQHRLHRRYCRLLAKGKPRPHVVTAVGRELLGFIWAVGTEAERQARPESIRAAA

SEQ ID NO: 172805 - protein, 353 aa, unidentified
MVRLAAPLCDRLCVGIDLHKDTLTAAVLDPRTGEVAYRKLACKCRGQIAEYFQALPRPHAVAIESVGFYRWLWDLLEPIVDELHLADAARCRALAAARPKTDRQDALNVADLLAAGRLPIAYAPPMHVRELRDWTRHRNGLSRSHARVLTRVQSLMDANNRPGPRRAKADALIRYLQAHHTLLPERHVRMLWLAVDQLTVIERQTADAERVIAGLIAHERFAAIDALLRSVPGVGPITSATAIAEIGDFTRFTDRKQITRYAGLNPRTFDSADKQRTGRIAKAGPRQLRWVLQQAAWCARRDHPIFRKRFGQLSRRVGKPKAGVAIARKLLLCMWAVVRDGQPYRPIADAAMN

SEQ ID NO: 172806 - protein, 454 aa, unidentified
MAQRNRNVMPKPGKSRAAALTITHPNAAGIDIGSASHFVAVPPDRDDEPVREFASFTVDLNALADWLQASGIDTVAMESTGVYWIPLFELLESRGFTVLLVNARHVKNVSGRKSDVLDCQWLQQLMTYGLLRGAFRPAEQVCMLRALYRQRGMLLRSQGRHVQHMQKALTQMNIQLTNVLSDVVGESGQKILRAIVAGERDGQVLGAMKNVRVRASVDEIAKSLQGNWRAEHLFALKQALGAFDFVGTQLAECDSEIELQLQRLQVHDGEPAKGKKRGRARNAPKFDLRTQLFRMCGVDLTRIDGVDVTTALAVVSEVGADMSRFPTVKHFTSWLGLCPGTKITGGKVMSGKTKRVVNRAAQALRLAAAALRSSKSALGAYFRRMCSRMDKPKAVTAAAHKIARLIYTMLTKGQEYTDQGQDYYEERYRERVLRALSQRAAKLGMQMVPIAQPV

SEQ ID NO: 172807 - protein, 355 aa, unidentified
MKKVLKQVLGVDVAQGELVVTLGRMFDDLRVDLYAHKVFRNTENGILTLLDWVKKLTDPSVNVRFVMEATGVYHQKFAFYLYAQNYEVSIVLPNKISNYMRTLENKTITDKSCSEAIAQFGLERNLDRWHKPKKTYRSLQQLTRERDQIVMERVMVKNQLHAEQAEAEPNERSVARLNERMRLLNKHEKEIKSDLTEIINSDLILKNEITNICSIPGIGELTATIVLAETNGFELIRNKKQLTSYAGLDVKEKLSGTSVKGKPSISKKGNRHLRKAMHLPALSAVKYDENFRNLYVRIVSRQGIKMKGLVAVQRKLLEMIYVIYKSKNKYNKDYTDIKRSSALSQKDQYATQTGS

SEQ ID NO: 172808 - protein, 394 aa, unidentified
MIYVGIDIAKDKHDCFIISSEGEVLFDVFTIQNNIDGFEDLLFKIKAVEKNPDKVKVGLEATGHYSYNILGFLINKQLPTIVINPLYTSLCRKSISLRKTKTDKVDARTIANMIMSDVSLKPYSSELYHIEELKSLTRYRFDKVSQRAKLKQSVSRLVNILFPEIEMMFSTIHLNTVYELFSVFPSAHHIATANLKRLTSLLFKASKGRFGRDKANEIRETARKSIGSYFSAQSLELKHTIKLIREISIDIKEIELEIKKIMDDIDSPILSVPGIGYNLGAMIIAEIGDFSRFGSPDKILAFAGCSPSTYQSGQLYSTHAKMEKRGSKYLRWALINAASYVCKWEPTFAAYLAKKRSEGKHYFVALSHATKKLVRLLYHLEITGEKYQPEKLSS

SEQ ID NO: 172809 - protein, 345 aa, unidentified
MESMYYIGLDVHKKTISYCVKDGSGRIHAEGKIPATRFDLDLWMKTLPRPWTVAMEATIFTGWIYDHLRPHAAAVKVAHPLMLRAIAAAKKKNDRIDANKIADGIRCDFLPECYMAPTEIRERRRTLHYRNLLVRQTVQLKNRISGLLMEAGVSYNKQKLHKVGYFRELLKTSPDIDERLRPLLQLCRETLVRLQKTESALIRSLARDRFLVERVERLMTIPAVGPITALTWALEVGEVSRFSSIKKAISYCGLCGAEKCSGEHIQRTPLSKQRNKHLQCVLVEAAHMAPRLSPELALLYDRERQKGNANRATLAVARKLVAYLVAIDRRQRDFLVVEKKNQAAA

SEQ ID NO: 172810 - protein, 345 aa, unidentified
MTNNIQFSSVCGIDIAKSVMQVYKVTSDGVVSNKAVKRADFLNEFRNIPPSLIGMEACGGSQHWAHELQNLGHTVRLMPPKLVKPYVTGLKNDKNDARGIYTALVMDVREVPVKSAAIRDLALLQTMRTKRQREKVAKINHIRGILSEYGLIMGKSVNAFLAKAGSLIVELKERADVSPYIVSELEALFQEVKGAIAKIKELETNIESIAKTLKHYDLFQSAPGVGPITAATMLVLLCNPEVFKNGREFAAYIGLAPKSTGSGGKNVVTHIPKKYECNNEVRTLLVQCAHAICRSKHKSDWVSLILARKPKKVAIIAVANKLARQLWVMAKKGEKFERRLILAAA

SEQ ID NO: 172811 - protein, 555 aa, unidentified
MKNTYSTQNKVRYRTHIQKPKGSRFTEEAKQIGPEKVGTVPIDVHKDKHCVTICDYYGKILKDEFEIPNTLTGFQVLLSCILEIIDKFKLEKVYTVMEYTGNYHKNLANRLREAKIPVTFVFPNSAYHLRQGQLNWSKTDSIDLCAIGQAFVNGWVSSSPPLDNFYENWQTLTRARRNEINLQTQAKNRITNLLDELMPGFQELFGNFWEHNAPPVILQLAHSPKQLTCLNRSSLLQKLTQAKVQKPGDLADKILIWAKTSIGTSQDFPSKIQQLNVEWQRFLTLKENIASYHISIAQYLAQNPALLFLSIPWINVPSASEYASEVGHFDNFISPKQITAFLGIAPKKFKTGKVSFENGHITKKGKNQGRSAVITIANNLVQGNDYYAPLYLSLIARGKAKQQAKVAIANKFIRNSFRMVENSQLFEPPAWTGPTLKNDPISKLKDFLHNNTNDKTLIEQIVAQAQQTLDTILKQNNCPQEKENEVIKQIPQPSKTIYRRLKRESIGSNVVFSRIKPSNYKGPTPIGNVLENMVTSGKLPSWILTGKGPQYAQLD

SEQ ID NO: 172812 - protein, 465 aa, unidentified
MRTDTKQWRSRKEKKELLRRLQSENPGLEVVHPHAAGIDVGNSAHYVAVRPDRDPQPVRRFECFTADLHRLADWLEICGVKTVALQSTGVYWIPLYDILEEREFEVYLVNARHTKNLPGRKSDVQESQWLLKLHTYGLLNNSFQPPSKIRVLRTYWRQRLQHVTGAATCVQRMQKALTQMNVQLANVISDLSGLTGPLIVRAIVGGERNPRKLAELSHPRIQASRGEIAKSLEGNWRQELIFVLQQEIEMYDTYQRRVAECDQELQKHLTAFADTVPPPAKEELPPKKKGKQNKNNPHFHLADELERITGVDLTRIDGVDVMVAQTLVSEVGLDMSRWKTEAHFASWLGLCPDNRISGDKVLARGTRHVLNRAATALRLGASTLLRSQTYLGAQYRRLRSKLGAPKAITAMAHRLARLVYRMLKYGQHYVDKGAEYYERRNRQHQLEFVRRKAAQLGLQVTPIQA

SEQ ID NO: 172813 - protein, 344 aa, unidentified
MDHFAGLDVSVKETSVCILDDAGKIVKEVKVASEPQALLKVLGNPAYRFKRIGLEAGPLSQWLFCALAEAQLPVICVETRHMQAVLKAQINKTDRNDARGIAQMMRVGLYRVVHVKTPRSQKLRMLLTHRKLLQSKAIAIENDLRGTLRNFGLKVGMVGTVRFEARIQELVETIPDLMVLVEPMLVVRRALREQIVILHRRLLAIVRDDEVCRRLMTTPGVGPVVALTYRATVDVPARFRKSKSVGAVFGLTSSRYQSGEIDWNGRISRCGDEMMRTMLYEAAQSMLHSKKWSWLKAWALQIARRRGMKKATVALARRLAVIMHRIWVDGTAFRWTREPTAAAA

SEQ ID NO: 172814 - protein, 316 aa, unidentified
MAATPCFVGIDVAKAQLDIALRPTGERWAVANDDVGIAALVAQLQAMPPTLIVLEATGGYQRAVVAALAAAGLPVAVVNPRQARDFAKATGQLAKTDALDARALAHFAEAVRPTPRPLPDAQADELRALLARRRQLVAMRTAEQNRLASTPARLQADIQAHITWLDTRLAVLDHDLDTTLRTSPVWREREELLRSVPGIGPVCTRTLLLDLPELGTLSRQRLAALVGVAPLNRDSGTLRGSRTIWGGRAHVRATLYMSTLVAVRYNAVLKVFYERLRAAGKAAKVALTACMRKLLTILNAMVKHHTPWQPKEVSIA

SEQ ID NO: 172815 - protein, 174 aa, unidentified
MTPPTRQRIVIGLDVGKSAHWACVVTRKGELLASGPIPNRENAIDGLYAQYQGALVVVDQVRNIGSLALSRAKLTEMPRAYLPGLAAHGASKLFAGDAKTDERDAMVISIDIADFADHDKLASYCGLAPRNKQSASISSVSASRQGNKRLKNLLIFSCSRLTRSRNQWGEYYAH

SEQ ID NO: 172816 - protein, 341 aa, unidentified
MKLRTIGIDLAKNVFQACGVNEHMKSQFNKRLKRNELLDFMRQQAPTMVVMEACYSSHYWGREMAKLGHDVKLIPAQHVTPFVRGNKNDPNDSFAITEASQRPYIRFVPVKTEFQQEILCLHRIRERLIKNKGALSNQARGLLSEFGVVFPCGHKALLNGLNGVIDNAQYSHRLQNMMIDMLSEYETTLKRLKGIEQQLGIFVEGSESGRILLSIPGIGIINASALLASIDKGQAFNNPKEFAVWLGLTPKQHASGNISKMGGITKRGDRYLRKQLVHGARSVVSRAAKKTDPLLLWATKLRVTKPFNKVAVAMAHRLARLIWILLTRQEHYSATPTGVSA

SEQ ID NO: 172817 - protein, 343 aa, unidentified
MQVVTTIGLDIAKSVFQVHGVDAAGQVLIRRQLKRRAVLAFFQKLPVCLVGIEACASSHYWSRELQALGHSVRLMPPAYVKPYVKRQKNDMADAEAICEAVARANMRFVPTKMPEQQSCLMLHRTRHLFIRQQTAVINSIRAHLAEFGIVAPVGRKGVTELLHIVADPSDKRVPEVARACLAALGNQLLSLKEQIVEFDRMIMVWHRSNETSKRLHYIPGVGPMLATALVASVADPRTFRSGRNFSAWIGLVPKQHSSGGKDRLGSISKQGDRYLRSLFVAGALAVIRYAKVHGTKHRPWLTALLARRPAKVAAIALANKLARMAWAMMAKGERYRQPVALAA

SEQ ID NO: 172818 - protein, 431 aa, unidentified
MAKVFIGVDPHKLSATIEVVDDRERVLATGRFGTDKAGYAAMRRHVAGWRERVWAVEGSNGAGRPLAQRLLADGEDVVDVPAKLSARARLFDTGHNRKTDAHDAHAVSVVAVRTQGLRVLSYDEQLEALRMLADRREELTRQRVQTVNRLHRLLAELTPGKGKKDLTALQAKGILASARPRDLAGKTRRRLAVEQLAELVAVEKKIKALTKELKAMVIASGSGLMDLRGVGPVVAARVLADVGAVARFADRNRFASWTGTAPIEASSGEIVRHRLSRAGNRRMNHMIHIAATTQIRLDTPGRAYYRRKQTAGKTRAEAMRCLKRRISDALYRQLVADARAARTGPGGHCGATLTSSAADLPPHIDTSDQPLPGPVPTPLPATTADATPRPGSAPQTTRRRAGAVKVQRPTGRTTLTATSAGAHSKEPIPAS

SEQ ID NO: 172819 - protein, 424 aa, unidentified
MNQNQYFAAFIGLDKSDKKINVSLQQCAGTRIERSVIKGGAEALHAWVAMLCARFPGQRVAICVEQPAAGLIHALMGYAFVVLYPINPVTLARYREAFTTSRAKDDPTDADFLCELVSLHREQLQAWQPDDVCTRKLRHLTQARRSSVNMRTRLSNQLKALLKTYFPQALELCGEDLTAPMACALLQKWPSLQQLKNARKETLRRFYYAHNARRGQVIEKRLALIEKSVPLSNDPALIESSIITLQALILGLRAVHTANARFDREIARTFNEHPDAPLFAALPGSGTCYSARLLAAFGSRRELFQSAQAMLNFSGIAPVLKRSGQSTTIHRRYARPLFLHQSFIEYANQSIRHSLWARAFYQKQQAAKKSHWVIIRALAYKWIRILFRCWQERTPYDELRYLRSLQKCRSPLLQYLVPQTTQPA

SEQ ID NO: 172820 - protein, 384 aa, unidentified
MMFDPRDARQEFEKFLSGRNLNERNLNLANGCEAFFLVPGVERQPLKKLKTDEHALLALLERWRGEAMRSGNAITRIVVACEAGRDGFWLARWLRAQGIEAHVIHAASIAVSREHRRAKTDRLDTELLKRAFLGWLRGERDHCKMVAIPTVAEEDARRPGRERESLVGDATRIINRIKSALARLGIRTFKPTLKKATALLNDLRTPDGDPIPPNTLDEIKRDMERRQLICEQIRRIEQERVKRLEQAPDTGPNVMVHLLARVMGIGIETADTLVREVLTRNLRDRRARYGGLTGAPSRSGNINREKGLARSGNPRVRRCMIGLAWRFVRLQKDSPLVKWFELHTANARGSRKTMIVAVARKLLIALWGLVHEGVVSEGMVMRPA

SEQ ID NO: 172821 - protein, 373 aa, unidentified
MKKHGEAFIGIDAAKARNAVAIAEEGRDGEVRYLGEFDAAPESMRRLVLKLAGKYERLHFCYEAGPTGYGLHRLVVSLGHGCTVVAPSLIPRKPGDRVKTNRRDATTLARLLRAGELTAVWVPDPAHEAMRNLVRARTAAVQAVRVHKQQVGAFMLRHGRAAPVKKSWGARYRRWLQEQRFEHPADQIVLQEYVEAVRLAEERLGRLEAAIAEFLPGWSLAPVVEALMALRGVDLVVAATFAVEIGDIRRFESPRRLMGHIGLVPEERSTGESIRRGSITKMGNARLRQLLVESAWTYRHPPRIGKRKMALVARVPPKVREIAWKAQSRLTARFRALSARGKKLTVACTAIARELAGFMWAVALEAQPRGQAA

SEQ ID NO: 172822 - protein, 358 aa, unidentified
MGIIAANTVIGMDIGLHHSWCEARSTASGPPLKEARLPNRPEEFRAFVEDLPHPIRVVMEATGNWPYLYECWEPLVEEVQLAHPLKTKAIASARIKTDRIDKRILAQLGLADLVPQAYIPPREVRDLRDVLRHRAFLVRLQTKVKNRIHSSLWKLGIEHGRSDLFGKAGLAWLQTVELRAPFRTLVRQDLTVLDTLQQEIKHATQTINRLAKEDLRVALLVPIRGIGLYSALLILAEIGDVTRFPEPKKLVAFAGLCPSTHQSGAVTYHGRLTKQGSTWLRWVLVEAAQRYAHAPGRLGTFYRRLARKKGPNTAKVAVARKLLVAIYHCLSHNVVFQEHPPTRVSVGGPPTPRMIPGR

SEQ ID NO: 172823 - protein, 336 aa, unidentified
MEHCAIDLGGRKSQVCVRASDGTIVHESRPETLALKEFLQGRPKSRVIVETCAEAFGVADAALALGHEVRVVSATLVRTLGVGARRTKTDRRDAQTLSEVSCRIDLPSVHVPGQRSREVKTICGMRDGLVTARAKLINTVRGWLRGQAVRISSGATPGFTARVREIGDLPEHLAAQLRAIDSLSREIKMADERVQRLADADPVCRRLMTVPGVGAQSALRFTAALDNITRFPDSHRVEAYLGLVPGERSSSEREQRLSITKAGATSVRWLLVQAAWAVRRCKSAEARPLQLWTLEIEKRRGKQIATVALARKLTGILYALWRNGTTYDPTRTTQTH

SEQ ID NO: 172824 - protein, 376 aa, unidentified
MREKLRFLGLDVHAETIAVAAAEPDGEVRSLGTIANREDSIRKFIRKLGSPQQLRACYEAGPTGFVLYWQLTQLGVECAVVAPSLVPKKPGDRVKTDRRDALKLARSHRSGDLTAVWVPDEDSEALRDLVRQREAAKQDQLRARHRLTKFLLRTGRRPPLGLKAWTERYLAWLEQIRYTQPAQQATLVDCLNEVEHMSARVKRLEAAILEVVKLAPQSMQEVIRGLQALRGVAHISAVTIAAELGNISSRFESARKLMGYSGVFPSENSSGKRIRKGGITKAGNAHLRRIVVESAWSYRHLPRVGAKLRKRQQGVPAEITEIAWKAQNRLHKRYMKLTMAGKDQRKIMTAVGRELLGFIWAIAIKAEAASKQQMAA

SEQ ID NO: 172825 - protein, 382 aa, unidentified
MKRIRFIEEQIIGVLREAEAGAKTSDLARKHGVSEATLYNWKSKYGGLEVSEAKRLRSLEAENKRMWRGKCASDPKVIAELVRKRAPAVELIVFETGPLSVWFYHALILEGLPAICIDARHAAGALGMAPNKTDANDADGLAQLAEIGYYKAVRVKGFDSMLARTLVTVRTRLVRITVELSNQIRGIMKTFGLVVPAGQGNVFDQNVRHLVDDQDELAKIILPLLAAWRNMRARTAELSRKLVADARQSEACQILMSIPGVGTITATSFVAAIEDPDNFRKSRSVAAWLGLTTRRYQSGEIDYDGHISRRGDKHLRGLLYEAAVVILTRSFAQSGLRIWGLKLKERIGFKRAATALARKLAVTMHAMLKSGELFNPSIGAEA

SEQ ID NO: 172826 - protein, 460 aa, unidentified
MKKRKESTDKPTQKFSSISIINPNAAGIDIGDKMHVVAVPEGRSELSVREFGTMTCDLELIATWLKECGIDTVSMESTGVYWKPLFSLLLQYNIKVYLVNTRHVRNVTGRKNDQQDAQWLQQLHSFGLLKSSYLPEEEQEGLRALVRYRHTLIQDSSRFVLRMQKSLELMNIKIHTIISDLMGKTGRAIIDAIINGERDSENFLPLIDHRIRTDKATIVKSMQGSWREEYLFTLKESYRFYTFYLQEIKACDAAIENQLIQYEAFIQDGDIEAQQYQPQPKSKIKKTSKNGPAFNMAHYLQRIHGVNVMAIYGLSDISALEILAETGTDMSKWKDEKHFVSWLNLCPNNKISGGKIISSNILKKKPNLASQAFRTAANSICKSNNWLGDYFRRMRSKGGHKYAIVATANKIATIYYKMLSLKKEFSPVDLAVYQEKYKTAKIAYLERKLQQLKIQHDEVI

SEQ ID NO: 172827 - protein, 360 aa, unidentified
MKKSSRKMEWRERPEKTVGIDLGDRFSRYCVLNSDGEILEEGRVRTNEEAFRLHWEGEGRQRMVIETGTHSPWVSRLLKELGHQVIVANARKVRAIWDNESKNDRRDAEMLAQLGYSNPRLLAPVQHRSVERQRDLNLLRARDTLVRARTMLINAVRGLVKSAGGRLPSCDANYFAAKVSSSLPAELERAMVPLVEQITALTVQIRGLDQEVENLVKRYAEIRILRSAPGVGPLIAAAYVLTLDGVDAVEHSRSVGAFLGLRPKQSQSGEADPEHNISKTGNRYLRCLLVQAAHYILGRFGPDSALRRWGCKLAVGGKRAKKRAIVAVARKLAVILHRMWRTGQSYQPFPASSATTVGVA

SEQ ID NO: 172828 - protein, 402 aa, unidentified
MTESPTRFFGLDIHKEYFMAVGVNVQREVIFGPQKVSNYQLDIWASRILTPQDSVVLEMTTNTYLFYDTLMPYVHSIIAVHPPSVALVTNAQVKTDKKAALALAQLHAAGMLTGVWIPPHEVRDLRALIARREKMVHLSTMAKNRLHSLLHRNHLVLPEKPFDPDQRTWWENLPISATEQFLVRSDLETLAFARKQVEQAEECLKKESAKDERILLLVQLPGVAMLTAITILAAIGDISRFSTAKKLVGYAGLGARVHESGMTHATGRISKAGRKDLRRAMVNAANHAIEHHVHWKKEFERLEPHLGRSKAVVAISRKLLVAVWHVLSKEVADRFADPRDVASSFLRYAYRVGVRNLPDEQPALAFTRDQLDRLGVGKDLKEIPWGSKRFKLPPSKILHEKE

SEQ ID NO: 172829 - protein, 346 aa, unidentified
MTMVETTRPVTGGVDTHLDVHVAAAVDASGGVLGVQPFATTTAGFVELHAWLETFGSLERVGVEGTGAYGAGLARYLRSRDLEVIEVDRPNRQLRRRAGKSDTIDAIEAARAALSGRASGIAKTADGNVEAIRVLLIAKRSARDTRIKCLNQVRHLGFTGPDELRERLRGVPRGRLAGTAAGLRPTAGSDPVVYATKLALQTLGRRVVDLETTTQRLDATLDQLVCATAPNLVAVAGVGIDTAAILLVAAGDNPERIRSEAAFAHLCGVAPIEASSGKTVRHRLNRGGNRQANHALWRIVFTRMSADARTRAYVARRLEQGRSKPEIMRILKRYVAREIYKHLPRD

SEQ ID NO: 172830 - protein, 468 aa, unidentified
MSSRVRSTTRQKKSRKAGRRGLRVIREQAAGIDLGSREHWVCCPGHSEQEPEVRTFGTTTPELEKLLKWLQAEGIESVAMEATGIYWIPPYELLESRGIEVVLVNARQLSHVPGRKTDMLDCQWLQLLHSCGLLRGSFRPVESICQLRALQRERANMVSEATRAVQRMQKALDQMNVQVHRALTDLTGKTGLRMVRAMVEGERDPYRLAAFRDNRCKKSEAQIAEYLTGNWRDEHLFNLKMALQLYEKVQDILAAYDQEILHLLAELQVPERAQLELPPHPNPAKEKAIRRRGEQPLRTALWRFAGVDLTRIDGISAGTAQVILSEVGLDLQAFPSEKHFVSWLRLSPKTGFSAGKPLPKKNKGTGATRVAGSLRMAALSLCHSSCALGAYFRRLARRKGGATAVFATARKLASYIYRMLRFGQDYVDEGAQAYEVRFQQKRLRSITSVAKQMGYQLVPLDDTVQVSG

SEQ ID NO: 172831 - protein, 375 aa, unidentified
MEHHSEAFVALDTAKLRNAVAIADAGRNGEIRYLGEFDNTEVGTRKLVAQLAGKHARFTFCYEAGPTGYGLHRLIKSLGHDCMVVAPSLIPSKPGDRVKTNRRDAVNLAKLLRAGELTAVWVPDERHEAMRDLVRARDAAAKDYRIKRQNVSSLLLRVGRHYPGKKTWGRAHTNWLTSLKLEHREQRIAFEEMLLAVRQVRERIERLEQAMREAVADWSLAPVVEAVQALRGIDMVGAVAFLAELGDLSRFENPRQLMAYLGLTPSERSTGESVKRGGITKAGNTRARRLLIEAAWSYRFPPRVSKDMQTRIGAAPRTAREIAWKAQMRLCGRFRILTRKGKRPTIVVTAIARELSAFIWAIGREVVGSHATANQ

SEQ ID NO: 172832 - protein, 465 aa, unidentified
MRTDKTLWRNRNARKELTRRLQSENPGLEVVHPHAAGIDVGNSAHYVAVRPDRDLQPVRRFECFTADLHRLANWLQNCGVKSVALQSTGVYWIPLYDILEEHGFEVYLVNARHTKNLPGRKSDVQESQWLLKLHTYGLLNNSFQPLSKIRILRTYWRQRLLHVTGAGTCVQRMQKALTQMNIQLANVISDLSGVTGQLIVRAIVAGERDPHKLAELSHPRIQASRAEIAKSLEGNWRQELIFVLQQEMEMYDTYQRRVAECDQELQKHLRAFATTAPTPVKEALPPKKKKKQNKNNPHFHLADELQRITGVDLTRIDGVDVIVAQTLVSEVGLDMSRWKTEAHFASWLGLCPDNRISGDKVLSRGTRHVLNRAANALRLGASTLLKSQTYLGAQYRRLRSKLGAPKAITAMAHRLARLVYRMLKYGQHYVDKGAEYYEQRNRQQQIEFLRKKAAQLGLQVTVPHA

SEQ ID NO: 172833 - protein, 388 aa, unidentified
MVIAPLRGGDAGGALEVVVGLATVAILNPAGVAVAHAYGSGGSRPKAIRRVDPNLTLTENAVANKLFIGIDVSKDWIDIASAAPAVAGAQRPRRNEQHWRIENSAAAIAAWLAAFGPERIALAAFEPTGGYERPLRACLLDAHVRFARVHPAEVVSFRARRGCKAKTDRIDAELLAAFAADELRHRGLAAVSDNDETLRELIARRRQLCDVLHAERCRAALATEAHVADSLAAVIMAVERALEAIEQALEAHVAADATLAASARNLRSLKGIGPITVYTLLGELPELGRLNGKEIAALGGLAPRTRESGKRSWRASTGHGRVGVRRVLFNAARAAIRHNGVMRAFYHRLVTQNQRAGTVALVAVMRKLLVTLNAIARDGKPWHHAQAG

SEQ ID NO: 172834 - protein, 408 aa, unidentified
MYNAVGIDASKLKSTITIIQPAGVVIRKPFDVLHTSDELNTLVTYLKSLEGETRAVIECTGHYHEPVVKSLSEAGIFISAVNPKLIKGQKQNTLRKVKSDPADARKIAKYALDNWAELREYSSMDTTREQLKTLNSQFTFFMKQKVAAKTNLISLLDNTYPGVNKLFDSPTRDDGSEKWVDYAYSFWHVDCVRKIGLKAFTERYEAFCKKHHYNYQKNKPALLFEESRQLVAVFPKEKSYKLLIQQSIQQLRLASEHIEIIRKEMNELASTLPEYETVMSMYGVGETYGPQLIAEIGDVSRFTHREAITAFAGVDPGVNESGQFKQRSNRASKNGSTRLRKTLFQVMSTYLQNKPVNEPVYQFLDRKRAEGKPYLVYMTAGANKFLRIYYGKVKECLRNLEQSQIEES

SEQ ID NO: 172835 - protein, 398 aa, unidentified
MTRKNTLKSLPTDTEFRVVGLDLAKSDVSVAAIPVDDNTPSLVDRMTYADLLDWAGKISPTLFAMEPCNGYSLLCLQLENLGHEIKVISGSTVSMWINTHLSGQKTDLNDAIALARLAVSDAELTPIRHKSITEIRIQTVQAVRQQLMSQRSKSIVSFKALAQQWGIPCAAGHRNLKKLRESIEAKVDLITRPVANAMLFLLDAVKSLDRQIGQLNQTLQELVMSDERGRLLQSVLGVGTQISARVITVVGNVERFNSPRSLVAYVGVAPRNFITGHKNLTKKKHGNCPDLSHKGQGKISRRGDKLLRSLFIQGAACLYMQFCKDQLPECQLKRWILKQLAMQKPYGKLMVSLAAKLIRIVWAVLTYREKFNIQKAGMTRSMWSEMALETPLNKEVPA

SEQ ID NO: 172836 - protein, 425 aa, unidentified
MATQPHPTPAATWVAIDIAKRYHAVLIEGPDSKQQRFRMASSREDHQRLVDLLHSMPTPIRIAMEPTGDCHRTLAFRLLQEGFEVCLVSSVAGARYREALFNSWDKNDPKDASVILAMLKQGMTMRYVDPLLAGHHGLQELSKTHYQISLARTRLQHSLMTHYLPLYFPEIERYFDGAHADWFARFMLRFPTAASIRQLTWDAFRKEAWELVGRKVNKQTWLTELYQCALGSIGLPVDDDSIEVQSFRLQLRRYQLLVEQRDALAAQAHHVLADNPDYESLRSLPGIGPVLALTILAEAGDLRRFAHHRQFLKYCGLDLATCQSGQYRGHERLSKRGNARLRFAFWFAATIAVRMRENSFRDKYERYVKNDPNNADRKRKALTAVAAKMARVAYGLVKRQTQYRCYFENALPRGSIPLSRAIGTS

SEQ ID NO: 172837 - protein, 324 aa, unidentified
MADNVLGIDVAKGKCDVVLMGADGKERWRTFANTGQGFEVLLRWLGKQQALPVHACLEATGTYGLALATFLHEAGQQVSVVNPACIKAFADSELTRTKTDKVDAGLIARFCKAMRPARWQPPAPELAQLQGLLRRLESLQEMAVQERNRLGGPGLSGLVRESVERTLGMLEAEMKRLRSQIDDHIESHPRLKQQRELLTTIKGVGRSTANFLLAELAGRDFQKARELAAYAGLVPQERQSGTSLRGKARLSKKGNRRLRKLLYWPAIVAIRHNPLLAAFARRLREAGKPKMVVIAAVMRKLLHLVFGVLKHQRPFDPNWTACRT

SEQ ID NO: 172838 - protein, 412 aa, unidentified
MAAVTCGGRSRRAGGRSSASNSVGQARAVAVRAAGDSKRRTDLAHGTSWAGLILLVFFGREVVVLHVGLDLSRKRVDVCLVSGEGELVEHFRAPADRDGLYGLTRRVAVYDEAVRGVVESMNGARFVHDELVKCGWEVLVADAQRVKGLAPLACKTDKVDARVLAELSFRDLVPAIWLPTPELRAERERARWRLHLVKHRAILKNRVHASLIAFGHQVPMADLFGVAGRRLLAELDFPEPWLGHVQASLELIDDLDHRIGEIERWLRRSGADHRYIPLLMSAPGIGWITGFTIAAEIGDISRFSSPVKLTGYTGLCPRVSQSGEVDRRGPLSKHGPRYLRWGLMEAAIAASSHPLYRERYQRTKRRLGRQRGAKVAQIELARKLTEAIWYMLTRNQPFKPFAPAGAIIRLTA

SEQ ID NO: 172839 - protein, 367 aa, unidentified
MKGEVQDKKVLIRGKEGFIGVDVHKESWHVTARTEGEEVFHGGIPSQYHAFQRLFDHFKDCKVKVAYEAGPCGFWLYDRLTEDGIETIVVPPSLIPIESGNRVKTDKRDSRKLAKLLEGNLLKRVYVLREEDREDRELLRTRRQIVEHRNDVARQIKSKLLFYGIRSPFSAKERWTKQYLRWVKGLLFEREVLKVSFQSLMELYEYLSVQLVKMNKKVIELSQNEKYLDKVRLLRSVPGIGILIAMEILVELPEMERFKSGDELASYIGLTPSEYSTGQYVRQGRITRCGNKRVRTCAVEGSWILITKDPLMRLRYKKLKAMKGAKRAIIAIARRMMIQVRRILLSREPYRVGAPGVIRQQFVVSRA

SEQ ID NO: 172840 - protein, 306 aa, unidentified
MIVIGLDVHKQTVAAVAVDAAGRPLDEQTIVVGSDELLGWASALGGERLWAVEDCRQLTGWLERQLLDLGELLVRVPPKLTVPERRAGRTRGKSDPIDALAIARAALRERDLSRPRPGEQAYREIKLLVDHRDDLVDERRRTQQRLRWHLHRLDPTFVPLRMLARSSHLERVSRWLGRQEEQLQVRLARELVARCRSLNRAISELDQELEQRTAQTAPALLDLPGCAAVTAAKLLAEIGPIDRFRSDAQLARHGGVAPLEASSGRVQRHRLDRGGNRQLNAALYRIAITQSRYHPAARCLPRTQEG

SEQ ID NO: 172841 - protein, 429 aa, unidentified
MKKIINSSNGKKLQKVGKNATKIEKTERKHECNKGSRTGKAATKELMVEVQSQHRLGVRCLLQKLELGKNEPQEAAPKDNAVYWIGIDLGDRKSNYCIMDKNADIVAEGSLATTVTEFDLYFKAIPRSRIALEVGTHSPWTSSLLEELGHSVCVANPRKMGGGKKKRNRKNDKLDARMLARLLKADPNLLYRIQHRGEKARHALVLLRARQAAVSVRTKLICAVRGLVKSDGKRLSRCSTDSFHKIERTEVPESLRDALEPLFKQIESLTEHIKGYDKEVKRMCKEAYPETELLRQVDGVGAIVALAFILTLDNPRRFAKSRDVGAYLGLIPRQYDSGDSHPQMRITKTGDRMLRALLVQSAQYILGPFGKDSDLRRHGLKLAARGGKNAKKRAVTAVARKLSVLLHSLWVTAEVYEPLRNSCPKEKVA

SEQ ID NO: 172842 - protein, 395 aa, unidentified
MRSVGLDLGVRHIAYCEVSDGKVIDRVTVRSLSELKSRLGPERPAARVAFEACREGWHVHDTLEQWCHEPFMLDSTRIRQIGVGHHRRKNDPIDAEAIAQAVDAGRLPIAHVLSPKRRALRAQLSVRGALVETRSQYVTTIRGLARAAGTLLPSCAAEDFVSKLRQVELDQLTRTLIAPLVKLLEALEIELVAVEKLLADFANKEPILQLCATVPGVGLIVAATFVSVIDEAKRFNNAHAVGSYLGLVPSEATTGGPNKRRLGSITKQGNTMARTMLVQSAWLIMRSRDHEDPLRNWALHIAKTRGKKIAAVALARKLAGVLWAMWRDGTVYDRAWQAQKSAQGIKSSAREQEHRAQAMARAARKLQRNGPAAGTTASRPRAKPRKPSSEMSAKQ

SEQ ID NO: 172843 - protein, 338 aa, unidentified
MNIVFLGIDLAKNVFQLCGLNQAGKPVYTKRTGRKELLQTLANIPACLIGIEASTGAFYWQREFEKLGHKVKVISPQYVKPFVRGQKNDGNDAQAIAVALMQPTMQFVPPKSPEQQDIQALHRARQRIVNHRTATVCQIRGLLLDRGIPIGSAVSRARRAIPLILEDAENGLSSRMRRTIAELYDLFNDPGRRIHFFDKEIETVFRQSEACQRIAKVKGIGPETATAVVAAIGKGTEFKNGRHFAAWPGLVPRQHSSGDRQVLMNMTKKGDKHLRTLFIHGARAVVRVATNNNDGHMNQWVNQLKERRGFNKTTVAVANKNARIIWSMLRNDTGYQVV

SEQ ID NO: 172844 - protein, 367 aa, unidentified
MKKHSSKQGSPSSTDVELCTTICVDLAKQVFQLAGEDATGRVIYEDRIKSRQAFHDFLLRLPATVTVLRECGPGAQAWARLLQAKGNAVRILPAQRVAEHRSGAKNDRNDTHAILRAGRDTSIASISIKSTTALAIQALHRIRRGNIKRHTALGNQIRGLLLEHGVSMPQGDAAISKHVPRSLEDASLPLPDLLRELLDELLTDWLSLGERIAGLSRRLETTAQQDKVAQRLITIRGVGPIIATAIVAKQTEPSRFASGRMYSAFFGIVPDQHSSGNKVRLGRMSKRGDGYIRSLMIQGAHAVLSQLRPDSDQPDDRRLLRWLSRLGRKEAAIRLANRNLRIIWALLQNDQVYQHKPNSNSEAAMSL

SEQ ID NO: 172845 - protein, 385 aa, unidentified
MLYIGIDIAKNKHDLACINENGEIMIANFKFANSYQGFVQLKLRLEQLSPLTQDIQIALESTGHYNYNIVTFLRELGYNVFTYNPLIIKEFAKSQSLRKTKTDRKDALLIARKLRSDVTPKRYQTDSIVDELKELTRYQNRLIQSRSKCKNLYVRLLDIIFPELHGIVSNLHNQFIYELLTHYPSPQKIARARFSSLLKIKRLTADKAHQIQEEAKKTIGKASPALVLELGQLIETIKHYDKQINQTQEEINRLMNDLNSPITSITGIGTRLGAIILAEIKNIHNFKNPNQLQAFAGLDPAIYQSGQMDNTGYMVKRGSSYLRYALIQAAKLISIYSPHFKAYLKLKISQGKHYNVAVTHVAKKLTRIIFHLLKTNQQFDETKLR

SEQ ID NO: 172846 - protein, 399 aa, unidentified
MRKVAGIDVHKEFLEVAYRLPSGRIETKQVEYTPKGISRLIKLLRRHGITDVYMESTGDYYLPLYYALKGAGIRPHVMNAYKIRRPEPNKTDKKDAIWLLEIGESEFFSDSYVPDEDIQALRFLIRKRMKLVDRISDIKREINSILWRLGLQVAHYAKKLRSKKKRVLLLALLEGRLRPDSINDSDVKHLYDILSRPEFRAYVFVLRSRLVDLAHLESQLEEFDREIAALARKFEDTIRILMSVPGISFILVVGILAEIGDINRFPSPAHLASYAGLVPTARNSGGKRRSGRPSKKSNKYLRRYMFLAGMAATRSNSRVVREFFTRLLGRGKHYKVAVVAVARKLLCVIWYLLRRDKFWCEDGYFKHPRRLPRWRRIRISVREAIVILVRAGYEVRRKV

SEQ ID NO: 172847 - protein, 353 aa, unidentified
MTGTKYIGMDVHKESISIAVRNDAGKLVMECVIETKANVILDFIHGLRGELHVTFEEGTWATWLYDLLKPHVTKLVVCDPRKNSRQGNKNDRIDARELADRLYMNKLSSVYHGGAGVRTLKELARSYLTISKDLGRVMSRVKAIYRSWGIPCAGKQVYAPRHRAEWLAKIAEVGVLRRAEFYYQQLDALRVLRQAVRRDLLGESQKHKASQLLRQIPSIGPIRAALLIALIQTPHRFRTQRPFWKYSGFAIETHSSADYRSVKGELQKSRKQISVRGLNRDCNHDLKNLFKSAATIASVKPGPFQEFYTALLAKGMRPEMARLTLARKIATIVLIVWKRGVSFDAQYLKSQTA

SEQ ID NO: 172848 - protein, 363 aa, unidentified
MNYVGVDIHKKYSVLCALDESGRKLREGRVEGNSARGFAQFFAGLEGPSKAVVEACWNWGLIHDELEELEPVEEVVLAHPYKTRLIADAQIKTDRLDAHALGTLLRGNLVARAHVPGRETRARKNLLRQRLYWARLRTMLRNRIHALLDRQRELELPQCSDVFGVRGLGFLRRLELGEPDATLLREQLALHDLIAQQMKAQEKRIAAEFKTEAVHQHLLSVPGIGITLAAVIGCEIDQIGRFNSAEKLCAYAGVVPTTHASGGKTSHGRLLPFCNKWLRWALVEASWVAVGCSPYFGSLYRQHRARGKKANTAILIVARRMCRIIWQLLEQKRDFEKRAPRPKLYSFPGCSALALTVNPALAS

SEQ ID NO: 172849 - protein, 411 aa, unidentified
METTYQVVGIDVHKSMLAVVVADAAAEGEFQFERRKFGTTESELRQLAQWLAERNVREAVMESTALYWRPVWQQLEGQCDLYLAQAQSNRAPRGRKRDFVDAERLLRRHVAGELILSFVPGPEQRMWRTMTRAKHQLTRDRVRIHNQLESLLEDGRIKLSGCVSDLLGLSSRRMLKALAEGERDAARLASLADPKLRATPEQLQDALYAAPTLSTLHRQILGLFLSRLELIEHQIEVLDKSVGQALLAHQDAVLRLAEVPGYGVDSAQQVIAEVGPAAATFPSPEQLSSWVGTCPGREESAEISKNNRSPKGNRMMRRVLNQVAHAAVKTKGSVFQALYRRLVIRLGHNKAIWAIAHRLCRLTWKILHQGVRYDKLGTRSNSRTIKARANKLIRELRSLGYQVQLPQMPTP

SEQ ID NO: 172850 - protein, 392 aa, unidentified
MYIVGIDIGKNHHEASIVSPEGKQIGRSLRFATTHKGADSLMSFIFKNIGNSPCVFGMEATGHYWYPIYSFLKAKGYTIYVINPIQSDSLRKMYIRQTKNDSIDSFLIAEVIRFGQFGTTSMADENILAMRQLCRYRDSVISSRTEIKLRIGTIMEQIFPEYEKQFSSLWVSTSMGILEKYLTPENIENAPIDELFEIIKDKSHNRLTRAKAISIKEAAADTFGIKIAQDAFSFQLKQLIDRMNFLDKQIEALDCQILEYYEKFDCYLHTIPGIGIIGAATILAEIGDISRFKNSSSLIAFAGIDPTVRQSGEFNSTHNHMSKRGSPYLRHAIFLVATTCSFHNSPLNAYYKKKRDQGKHHLTATGAVARKLTTVIYAVLRDSKPYEPKKFC

SEQ ID NO: 172851 - protein, 430 aa, unidentified
MTFAGLDLHKKEVEAAVLSEDGRILHRSRFPATRVALEAFAGTHLSQDSTIVALEATTNTWPVAAILQPLVHKVVVSNPLRTKAIACAKIKTDKVDALALAQLVRTGYLPEVWIPDEETRLMRRRSTERAMLSADRTRIKNRIHSVLHQRLIEAPSSDLFSRKNLHWLKQLPLDPFGRDSLDRHLRQLDRVEQELAALTAQIALHAHQTPAVKLLMTLPGVDFTVAETILAALGDLSRFATPDKAASYLGLVPSTRQSGDHCYHGPITKQGARHARWLLVQAAQHAALHPGPIGAFFRRIAKKKNRNVAVVAAAHKLVLLAWHMLKNNEPYRYAQPKTLQAKLSRLRILATKQKRKGGIAKGQPRPLQYGKGRTQAVPGLDDLYKTEGLPPLSKGLKPGEQAMLAQQGMAAFASAVRVPRRVPRGAKPEA

SEQ ID NO: 172852 - protein, 346 aa, unidentified
MHYIGMDCHITTLEFAVVNEAGRLVKAHRVDTSVNGFMEFVKTVTPPRTIYMEEGTLAAWALETCVRFREKLVVTDAKKNHWIGSSGQKNDSIDALKLAQLARGGYIKEIHHPVGHRRRFRELMIAYHDTVRSTTRIKNKIKARFRQNGIQCTGATVYSETHREEWKGKLPQEATLLLILDGLWRQLKQSEQTEEELLAAARAQAKQYPEIKLFKDIPGIGFISAATISAILETPYRFADKRKVWMYAGLGIMTRSSGGKTYSEKLSTDYNRLLKYTLKQAAEAAIQAKDNPFRRKYLDMTLLRGIAPHRAKLTIARDMLATMWAMWRKGEKYSPEIREKAVCKQG

SEQ ID NO: 172853 - protein, 351 aa, unidentified
MSRKTDAVIARTIGIDTGKNTLHLIGLDDNGAIVLREKVARGRIAARLTNVPRCLIGIEAGMATHYVARELIALGHDVKQVPPAYARPFRQGHKNDFRDAHAIAEAVQRPSTRCVPIKSDDQLDLQALHRVRSRLIGDRTAAINQLRGFLLEHGIPVRQGPRFLRQQLPQLLATRTDVLSPRMLRIIGDIVDDWKYLDDRIDRVTDEIEALARTDVSCEQLMTVPGIGPIIASAAVAAIGNGAAFAKGRDFAAWLGLVPKQMSTGDRTILGRITKRGNRYLRMLFVQGARAILLRPKSWAKHSFGPWLTTAARRLHRNILTIALANKLARIALSVLIQGRSYETRIVPAAA

SEQ ID NO: 172854 - protein, 359 aa, unidentified
MELTPLYRCVAALDVHQAKLTVCVLREEEDGELKVELREFGGFKRDRREMARWVGSFAPESVVMESTGIYWKSPYAALEQEGLRALVVNARHVKQVPGRKTDLADAQWLAILARSGLLRGGFVPPENFRRLRLIARQMQKLTGILAGEKNRLHKVLTDGGIRLGVVVSDIHGKSGRAMVKALVAGDSADALLVHADRRLKASEEELLDALDGDLSEEHRLVLGQLLTHIDDVDGQITELRLALLAGLAPQQGLLEALQSIPGLDETGAAMLLVEIGDDMQAFGSPEKLASWAGLCPGNHESAGKRKSGQPRKGNPYVRRILCEAAHAASRTRCALADKLKGLLVRRGRKRAIFALAHKL

SEQ ID NO: 172855 - protein, 390 aa, unidentified
MIYVGIDVAKDKHDCCILGSDGEILFSPFTIQNTLQGFDELYEKIWSLTKDLHEIKVGLEATGHYHLNLLRSLLDNGLASYVINPLHTNLFRKGQSLRKTKTDKVDAASIAMMLLTDRTLKPYSDTSYHNEELKSLTRYRFDKVQERAKLKTSVSRLVSILFPELEKLVPTLHTATVYALLSEFPGASFVAAAHLTRLKHLLCEASKGHYGRDEAILIRDAAISSVGTVMSAKSMELKHTIHLIEVLSEEINEIETAINSIMNTLESPITTIPGIKNRMGAMILAEIGDFSRFENADQILAYAGLSPSTYQSGQLTSSYAHMEKRGSRYLRYALFNATIYVCNWDPVFNSYLAKKRAEGKHYYVAISHACKKLVRMIYRMQLTGEPYRAA

SEQ ID NO: 172856 - protein, 452 aa, unidentified
MQQPVEVQVDEHEPIVERVAAIDVAKASGMVCLRIPHETIPDRRVTKVWPVAATTAALVELGDHLRCERVTRVVVESTSDYWRPFYYLLEAAGLMVWLVNAAQVKNVPGRPKTDKIDAVWLAKLAERSMLSPSLVPTEPMRRVRDLARARYDLVEDRTRVKQRIEKLLEDALIKISSVLTDVLGVSGRAMIEALIAGQRSPKALAELARGRARTRRADLERALHGRFTEHHARLARLLLGQLDELTARINQVTTLLDAAINELPAPAATRPTGADERDQTQAQPPQAGYTSAVARLCAVPGGGPDSVRAVLGEIGLDMSVFGTPQRLCSWAKVAPRTVQSGRRTGRARTGKGNPYLKSALAQIATGAAKTDTFLGDRYRRLIKRMPKAKALVALQRSILVVFFHLLNDPAAEFTDLGADFYQRRIDRARRTTHLLRQLHALGYEVQLTEPAA

SEQ ID NO: 172857 - protein, 357 aa, unidentified
MKIVGCDLHAKQQSIAMVDTETGEFIEKKLLHEGNSVREFYAALEGPVVVGIEATGAMQWFLELLEELGIECRVGHPAKIRAAETRKQKHDRRDARLELELLVEDRFPTIWMPSTEQRDLRTLLRDRHQWVKIRTRVQNTLQAIALNHALRRGHGLWSQAGQRALRALPLPPYTSQRRDELLRLHAQLHKRIQELDRQVEEQARQRSQALRLLTHPGVGPVTALATEVFLGDAQRFANGKAVASYIGMIPCEHSSGKRQRLGKLSKEGNSLLRYLWTEAVMHAVRKDPELKRFYRRKLIQKGMGKARIAAARKLGIRLWIMLRDQIDYEEFCRRGTLRQSGEAHAGMPDCNNGPAAQ

SEQ ID NO: 172858 - protein, 308 aa, unidentified
MKRIVYIGMDVHSTNFTFCSLEPKLGGEDKVFGCTQSEADVRNVLKYIEGLKKELGDDVEFLCGYEAGCLGFSLYQQLKKQGVECVILAPSTMMASKGKRIKTDARDAKRIAQCLAYGTYSSVHIPSSDDDAIKEFIRMRDDHKIALKKLKQQINALCLRNGRHFTRTKWTLAHLRWLREMDWQEAVLKETLQEYLMTFEQMTNKLEALDRRIEELAQGEKYKEDVKKLVCLLGVKTRTALASIVEVGDFRRFEKGSTYAAYLGMTPGESSSGDTVRRGGLSKAGNAHLRTLYIEAAQGICKGRIGHK

SEQ ID NO: 172859 - protein, 354 aa, unidentified
MRTYYVGMDVHRASIMIVVLNGAGKVVMQAVIETGAERVRGFLQQLKGRVYVTFEEGTQATWLHDVVRPLVTTVVVCDPRHNKLIGSGNKSDRIDAQKLAELLRNGSLKPVYHQDYRTRDLKELVRVYDSLVQDTTRVMNRLKAIFRGRAISYRGRDIYRKDRRAQWLAKLCQPGARYRAEFLYQQLEALKPLRHEAKRLMIKEARRHPAYRILISVPLLGPVSVAQLIAIVSTPHRFRSKRQFWTYVGLAVVTLSTADHEVVNGVLRRSRRPIATRGLNRNHNHTLKRVFKNAATSACHRAPFKAGYQLRLAQGMNASLARLAIARELSAITLAIWKRGEQFNPERMKQPATV

SEQ ID NO: 172860 - protein, 379 aa, unidentified
MRRVCGLDVHKDSVFMCILSENGEKIQEKYGVLTKELDTLRDVLVANNVGEVAMESTSIYWMPIWRVLESDFDLKLVNPYFIKQLPGKKSDVKDAEWIATCLQKELIKGSFVPDAAIQRLRQYNRRIFDLNKDISYKLTKLDMALQRCNIRISNYVSKTDSKSYKKVVDKLAGGITDPQELEKCIHGRTVNRFGKDIITASLTGVINETDIDIMSQLKSEIDLAERHKSECLMKMREICMENYPKQLENIKSMPGVKEQSATAIIAEIGVDMKMFLTASAIVSWCGLRPRNEESAGKIKSRKIVHGNKYLRRTLIECAWAASKTQGCFYNKFSYTQVSIRKKNVLKVRVAVARKMLVTIWNILSKGEAYREILDCTQPQ

SEQ ID NO: 172861 - protein, 409 aa, unidentified
MRIIGLDIHRAFAEAVAWDDGKLKRLGRVDMRRPLLEAFAKKLSKEDVVIVEATGNAASVAAVIAPHVKRVVIANPKQVRIIAHAKIKTDTIDASVLAQLYASGFLPEVWIPDEPTQALRRQVTRRNQIVRQRSRLKNIIQSILHSHLIPSCPHADLCGASGRAWLFHQVLPEDERLAVERHLREFDRLGDDLKVIERDLARSALGDEGVKRLMTIPGVDMVVALAIVAAIGDVGRFEQSQKLVSYLGLNPSVRQSGPGPAYHGRITKQGRGHARGMLVEAAWAAARAPGPLRAFFLRVRARRGQHVAAVATARKLAVLIWHLLSKGESYVWARPALHARKLRDLELKAGYKAARGQRGAAHAYNIKSHRDQERRWVEQAETAYARFVSGWNPRGPKRVRTGAATEVRR

SEQ ID NO: 172862 - protein, 367 aa, unidentified
MKEQENKRNKITIGLDLGDRRHRFCVLGEKGEVLEEGSVGNNRAALSELGGRYPEALVVMEAGCHSPWVSRHLEQAGCEVVVSNPRKTRAIYQHERKSDRRDALMLARIARMEPALLYPVRHGSEEAQQDLLRIKLRDSLVRARVALINSLRFTLKSLGYSIANPSTERFHKVIQSALPQSVAQVIAPSVQALEELTLRIKLLEREISDQARSKYPDTAWLEQIPGVGPITALYFVLKIEDPARFKRARDVGAFLGLCPRRDQSGENDPQLRISKRGDAYLRRLLVSSAHYILGPFAPPSALRQYGLALASGATARAKKRAVVAVARKLAVLLLTLWKNKSSYEAFPQRNSREKMRTNDLERLRSIA

SEQ ID NO: 172863 - protein, 510 aa, unidentified
MILRPNHGNPPSPKARQRLPVVKRKQVQKPQAAPQKKPQKSSRKSRASRSLPVTAPSMPAELKQVNLNAAGIDVGATVHFVCVPEGRDPQPVRSFGAFTADLEAIADWLTQCGVTTVAMEATGVYWIPLFELLERRGFEMKLVEPSRLKHVPGRKSDVLDCQWIQQLHTFGLLSGSFRPEDSICVLRSFVRQRQTLVRSAARCVQHMQKALTQMNLKLQHVLSDITGVTGMAILNAILAGERDPRRLAELRDGRCSNDEATIALALQGNWREDHLFALKQAMDAYRFYHQQLTEVDEKIQAHLETFEDKSQGKPLERPTGTKKPRVNGPAFDVQKHLYTMTGVDLTEVDGLEARTVLTVISEIGLDMSRWPTEKHFTSWLTLCPGVNKTGGRSESKSGRTRPSSNRAAAALRMAASTLLRADCALGAFARRMRARLGAPKAITATAHKLAIIIYNMLKYGKAYVDRGAEYYQEQYRATMVKNLKRRAKQLGFEVVEVTAQPVAPETTPRA

SEQ ID NO: 172864 - protein, 338 aa, unidentified
MKAYAGIDLHSSNNYIGIMDHDHKRLFGKRLPNNLEKVLMVLEPFKSDLKGVVVESTYNWYWLVDGLHEQGYKVHLANPSAIKQYEGIKHTDDKWDAFWLAHMKHLNILPEGYIYPKEQRAVRDLLRRRLFFIKHRTSNILSLQSTITRNLGIKMSGNEIKKLDMDDACGLFNSSDLVLMAQNNISTIKHLGKIVKDIEKKVKSQVQLRKEFVLLTTIPGIGLILGLTIMLEVGDIGRFPKVGNYSSYCRCVGSNRLSNGKKKGENNRKNGNKYLSWAYVEAAHFAIRHSPKALRFYQRKMARANGAVATKALANKLARASYFIMRDQVPFDENMLFR

SEQ ID NO: 172865 - protein, 355 aa, unidentified
MNEAKYIGMDVHTATISAAVRDSSGSLVMEATLETKAETILEFVHGLRGSLHVSFEEGTCAAWLHDLLKPHVSEVLVCDSRKNALLRVGNKNDREDARKLSELLFLNKLHSVYHGETGIRTLKELARSYLTITRDLTRVMNRLKAIYRGWGIACAGQQVYASRYRTEWLAKITEPGVRRRAEIYYQQFDALAALRQEVRRELLAESRKHPTTRLLRQIPSIGPIRAALLIALMQTPHRFRTKRQLWAYGGLALRTYDSGEYRFVGGQLKRSKKAVTIRGLNRNHNHDLKNIFKGAATRAAATAGPLQNFYQARIASGMKPPMARLTLARKIAAITLLVWKKGVCFDAEQLKQQAA

SEQ ID NO: 172866 - protein, 351 aa, unidentified
MLIIGCDLHPRYQVIALLNSETGELVTRRLQHENGEAGAFYASLPAPAQVGIEATGYTQWFERLMAELNYELWVGDAAQIRARAVRRQKTDSRDAEHLLELLSTQRFPRLWIPSPEQRDLRQLLKHRHKLVTMVTTLKNQLHFLAMSQGLCRKSKLWSERGREELESLSLGPWARRRRQELLALLDQLQPQIAELDVAVAQAAAADPAAVDLMTQKGVGPVTALAFVLTLGPVERFQNSRQVVSYLGLNPREHSSGGRQRLGGISKQGNPMMRWLLVEAAQTAVRFDPELRRKYQRLKFRRGGSVAKVALARRLAVRLYWRLRQRKAETQPVRMPGSSGSAVVLPRAGSRH

SEQ ID NO: 172867 - protein, 391 aa, unidentified
MLAGIDIASERHTLARLDDSGTSIGKPIAITEDREGYDVLLKALGAPPVLVVMEATGHYWKNLFAILTAAGHEVTLLSPLVARRFQDSSLERTKTDAIDAHGLARLGFEKRPASTRLHDEAAESLRELVRHRDRLRQDFDDRVRQLHRLVDLGFPEFTRYVRGLDSMLATCLLAEYPTAQAFARANPRRLARLRYDGRHLVGAELAEQLVEAAKRSIGQHHGPAYTLQARHICQDLDLWRRRLAEIERDIEDLLDTHEVGKLLTTIEGIGPQSAARIIAAVGDPALFKSAGAFAAYVGVVPGLKQSGKRTGERARLAPLGNARLRMALWMPVLGAVRRNAWLRSFYERLRAAGKPPKLALVAAMRKLLHAVYSVAKNRAPFTIHTQQTRPA

SEQ ID NO: 172868 - protein, 346 aa, unidentified
MLYAGLDLSRKRLDFHLLDAEGATVDVGASPPDANGLDRLTERLERHGAPIRAAIESMNGARFVHDRLELHGWQVEIADAQKVKGLAPLACKTDRIDAWVLAELARRDLVPAIWLPDPRVRAERERARWRLHVVRHRSSLKQRVHAVLLTHGKPCPVSDLFGVRGRQLLAQLGLPEPWQGTIEASLRLIDELDREISDCERELRRLGADHRYVPLLCTVPGISWVLAYTIAAEIGDIGRFASPRKLAGYSGLCPRVYQSGDRDLRGPLSKQGPRYLRWALVEAATHACTAPVYRDRYQQTKARIGKQRGAKVAQIDLARRLSEAIWHMLSRGEAFAPKGATDPLAA

SEQ ID NO: 172869 - protein, 268 aa, unidentified
MSLFDGESFRDFSVPSSPEEFLERVTPYLLEDTSEVLFVMEATGIYHLKLALSPKKRGYPVSVVNPFVVKKYAEMLQKRAKTDPVDARTLAQFGCFASPPPFVPKDKKAYLLKEIQETIEDYTRRRTEILNHLEALRHHPFPHPRLQKLYEEELRRIEETLKTLEKEAEDPALQYAPREYELLLSIPGVGKRLACAFLGILSPLTRFRRSKELASFLSLAPQIDQSGKRKEQAWLSKRGIPSCGSSLSFQPSVLPGSTSGVRYSMNAW

SEQ ID NO: 172870 - protein, 425 aa, unidentified
MHHKRNQRVNQVTENSLVVGIDIAKHTHYGLAIDDRGQELGKAFPFKQSLEGFHKLLMQLNQLKEDHQKTEVLVGFEPTGHYWKNLAAFLIEHEIPFVTVNPMHVNRTKELDDNLQTKNDQKDARVIAKLVTSGNFSFPRKLEGIEHELREGATLRNRIKDDIASTKNRITGFMDLYFPEFSHVFKGYGKQACAVLKNTPFPSDLKGQRPEELAAWIKECSKSTYSPKKKTERLCKLAEQSIGLTEGTVMARKQITTLVHQLELLQEQLYEVEQQLEELVKEMPEFEYLTSIRGIGEQTVVELLAYTGSLSGYDHPRQIIKLAGLTLRENSSGLMRGTKRLSKRGRKDLRSLLFKAILPLIQNNQSFYDLYQYYITRSENPLRKKEAMVVLCSKLIKVMHGLAKHETHFDPERMSEDIPFLQEVA

SEQ ID NO: 172871 - protein, 359 aa, unidentified
MTNDKYVGLDVHQASTSIAVIDGNGRSVAEGVVRTSADAIRDFISGLSGTVHVTLEEGTQAAWLYEIIKPLVAEVVVCDPRQNKVLAVGNKGDRVDANKLAQLLRSGLLKSVYHNNQHTKTLKQLAHNYGSIMGDCTRVMNRIKAVYRGQAIACSGRDVYYKRNRDQWLAKLKEPGLRTRAQFLFDEFDTLKALRRAAKNVLLREARSYEAFKLLSKIPTLGPIRVAQIIAAVGSPHRFRTRRQFWAYCGLAVVTRSTDDYRFNENGALRRTRPPATRGLNRNFNRKLKHVFKSAALDGIKRDPFKSFYQARVTAGIRPEMARLTLARKIANLTLTLWKKGDQFDEHRMREHQTFSAGS

SEQ ID NO: 172872 - protein, 372 aa, unidentified
MSIVGGFDVHRRQLTFEYLDTVTGELRRGRVAPADREHLRDWLARFAGQEDAHFALEGCTGWRYVVEELLAAGVEPHLAEPADTAALRGRKRHAKTDKTDSRHLRIHLLAGDLPECWIPPQHVLEVRAVVRLYKDLLDERGAWHQRIAATLFHQGVPAGIGSMCTAEGRAAVAEVDLSAAGRQAVQTGLRQIDRLTGELDPLRRQLGMLSRRQPGCAALRAAHFGIGPVTSVAIWAELGDVRRFPSSDDVVRHTGLDITVYSSDTKRSGTCPGRAPPCCAGRCMRPPRAPPGLPRPITRTTSRPGTGATPGWPPCRWPASSPAASTTPCATSGRTPCGPQPKPSQSARHPRQGTPSPMNVRPAPGQRSAART

SEQ ID NO: 172873 - protein, 343 aa, unidentified
MDHFAGLDVSVKETSVCIVDETGRIVREAKVASEPEALLAVLTNPAYHFKRIGLEAGPLSQWLFSTLAEAGLPVICVETRHMQAVLKAQINKTDRNDARGIAQMMRVGLYRPVHVKTLRSQKLRMLLTHRKLLQSKAIAIENDLRATLRNFGLKVGMVGTVKFEARIKELVKNLPDLVVLVEPLLIVRRVLREQIGILHRRLLAIVRDDDVCRRLMTTPGVGPVVALTYRATVDVPARFRNSKAVGAVFGLTPSKYQSGEIDRSGGISRCGDEMMRMMLYEAAQSMLTRTIKWSWLKAWAMKIARHRGMKKAIVALARRLAVIMHRIWVDGTEFRWTREVAAA

SEQ ID NO: 172874 - protein, 339 aa, unidentified
MKEVTTIGLDLAKNVFQVHGVDRAGAVVVRRALRRSQVLAWFAKLAPCLVGMEACATAHYWGRELQKRGHEVRLIPPAYARAYVRRNKNDPADAAAICEAVGRPSMRFVAIKTEPQQAVAGIHRVRELLMKQHTMLRNQLRGLMAEFGVVAAKGRRGLNELLAILCDPEDRCIPSPLRAGLIAIMETLQAVERKLEGIDRQMVAAGRADATCRHLVTAPGYGPLLSSAMAALVIDPGAFRRSSDFAASLGLVPRQDGSGGKVRLGPISKRGNGYLRRLLVNGATSLIKAQHVRQDPWVAKLLASKPRKVVAVALANKLARIGWALMTRQEDFRGRAVAA

SEQ ID NO: 172875 - protein, 370 aa, unidentified
MTKSSKSYIGLDVHKDSIDIAVAETGGHAEVRHFGTIPGDLTSLDKALRKLRRKGVSQHVVYEAGPCGFGIYRHLFEQGADCIVVAPSLIPKRAGDRVKTDRRDAIKLARLLRAGELVPIYVPDTEDEAIRDLVRARTDARQAQGRARHQLKAFLLRNGIHYQGKSSWTPAHMRWLSEIQMPHPAQHVTFQEYIKAVEEPTLRIIRITEHIRHLVQDWRWRPVVEALQALRGVQLINAVTLVAELGDLSRFDNPRQLMHFLGLTHSEYSSGPSTHRGAITKTGNTHARKALIEAAWHYRWPPRVSRIILLRQQKLHASINTIAWDAQLRLYRRYKTLRARGKCSQKAVVAVARELAAFVWAIARQVERLA

SEQ ID NO: 172876 - protein, 349 aa, unidentified
MRFFQPPADVRFYAGVDLHARSLFLVVLDCDGKTRLSRNLSAAPEPFLHAVQPFRDGIVVGCECMHCWYWLADLCRDHHLPFALGHAWAMKAVHGSKTKGDRHDAEAIARLLRGGNFPLAYAYPKERRGLRDLLRARLRLVRQRAELYGHVHTARRQANLPPVSNDVKYKSKRAGVTADIADPFVRRRVETHLALLEPLDTTIRRLEADIEDAAKEHYPTELAVLQTTPGVGSVLSLTILLEIDAIDRFDTRQQFCSYARLCGAVQESAGKRVGVGNRKAGNAWLKWAFSEAAVLSAQKDERIGALLERLASRLGKPKAYSALAHKLGRAFYHMLHTKEVFDIQRFVRH

SEQ ID NO: 172877 - protein, 434 aa, unidentified
MSQRLQVGIDFSQKRADFCLLLPDGRFIEPHHGFDNSAPGYSLAKQLLLQTLDQHHFDGLDVSGEATGYYWLPFFLQLAADPDLEPYDLKLFALNPRWVHWFKKCFAQDDKSDQKDPFYIAERTRTRPPQAAWSPQLGILALRFYTRLRFHLVQDLAREKCYFSAFLFLKASAYRRLQPFSDLFGVTSRLILTQPPSLEQLATLPVESIATQLYELSGHHLRAPENNAYKLKQVAQESFALSPTLALPVERILNLTLEHIRFLEGQLHQVETWIASEVESRPTVATLTTIPGIGPVFSAGIAAEVGDTHRYLQGSKWDKKRKQERPRNLRDAEDAVAKIAGLWWPRSASGDFEAEDRRMAKTGNRYLRYYFIQAADRMRQSIPEYAAFYSRKYQEAAKHPHKRALVLTARKGIGLVIGLLHRNEPYRPGGASKP

SEQ ID NO: 172878 - protein, 349 aa, unidentified
MTMVGGFDVHRKQITFDYVDNDGLVRWGQIRPATRTTLRGWLREHCPDGDGEFALEGCTGWRYVSEELAAADVGVHLGDPAEIATLRGPKKRAKTDRADARLLRTLLLEGRFPESWIPPAHVLETRTLGRLYCTLMDERRAWQQRIHAELFHQGCPPVKGLLSTAGRETLAGAELSATGRQYVDTALRRIDELTAEIDPMRRQLISFARRQVGCQALQARQYGVGWLCAAIMWAEIGDARRFHSSDQLVRFAGMDITEYSSDGKRSPGRLSRQGSPELRWATFEAAKCAARRGSPDYAYYRRLAAAPDSGKNPTLAVQRKILRRSYHTLRELGDAALAMPVPEAKGVAA

SEQ ID NO: 172879 - protein, 402 aa, unidentified
MYNAVGIDVSKGKSTVAVLQPAGVIIRKPFNVNHTSSELDELAKYIGSLEGETRVVLECTGRYHEPVVKTLSEAGLFVSAVNPHLIKNFGNNSIRKVKSDPADAKKIARYTLDNWIELRQYSSMDNTCTQLKTLNSQFSFFMKQKVAAKANLIALLDNTYPGVNKLFDSPVRDDGSEKWVDYAYSFWHVDCVRKIGLKTFTERYQAFCKKHHYNFQPAKPAELFLASKDLIAVFPKEASYKLLIQQSIQQLNLASSHVEELRSKMNELASTLPEYATVMGMYGVGKTFGPQLIAEIGDISNFSHREALTAFAGVDPGVDQSGTHNSKSNKASKCGSNRLRKTLFQIMSTLLQTAPEDDKVYQFLVKKRAEGKPYYVYMTAGANKFLRIYYGKVKECIRNLEQ

SEQ ID NO: 172880 - protein, 333 aa, unidentified
MNYIGLDIHKKNTQACVKNDMGKVLMNVRFPSDSKDINEFLDKIEPLGAASIVMEATGFCMYIYDIIEARGHDVKVAHPFKVKALTAGRAKTDKNDAEMLAELLRLNAIPESYIPPKELRELRELTRFRQSLVRSSASIKNQVHAILAMRGIKTPPPLRSHFSKKHVKWLRSLEIVQLDDFLDIMALIDTKTAKADEDIGRICHDDEDVQRLKTIPGIGDVTATSFVAEIGDIHRFDSPEKLASYAGLTPIVRQSGEKTWAGPISKRGNATLRYLLIEAAYSHVNSSKESKLTRFFERKSQAKGRKKAIVATSRKMLEVIYYMLKRGEVYHAH

SEQ ID NO: 172881 - protein, 377 aa, unidentified
MNNNSTLYVGLDVHKESISVAYAINSEQVEFMGKISSTPTEIERLCKRLQSKSSQVSIVYEAGPCGYGLYRRLVKFGFDCMVCAPSLMPKKPGERIKTDRRDAIRLVRSLRAGDLSAVYVPGIEDEAFRDLARAWASARDDLRHARQRLKSFLLVHGIHYVGRADWGPAHRRWLSKYSFESPWRQLAFDEHRRTIEDRLAQCERLESALREAVTEWRLYPVVEALQAMRGIQFITAIGLISELGDLTRFEHPRQLMSWFGITPSEYSSGGNRHQGSITKAGNSFARKLLVEAAWSYRHPARISPAIQNRQEHLPRPVIDRAWDAQVRLCRRYRKLQAKGKHVNITIVAVARELAGFIWDIGRIAMSLTRQSQHQKPA

SEQ ID NO: 172882 - protein, 333 aa, unidentified
MVEGTEGSHHKEGSKKMSKDSTVCAGIDTGKYKLDVAIDASADRLQVDNSPEGYRSLSVWLRQRGVERIGIEASGGYEQAVVSFLRADGFVVIVFQPVQVRAYAKFVLQHAKNDNIDAALIARCTAAATDIHEPPDTRLAPLAQRLTMIEQLTQDVAQLKTRREACRDQRIREFWKQEIDRLKRLLQAELKQLVAAIGEHRDLATRLDLIASVDGVGLRTAVAILVRMPEIGRVTREQAAAIAGLAPYDDESGKRRGLRHIKGGRQRLRQSLYAATLPAVFYWNAQLKALYKRLITAGKTHKLVLVACARKLLIFVNTVVARGTPWTSAPATT

SEQ ID NO: 172883 - protein, 332 aa, unidentified
MNMHLQGGVASGVQRPNAGVDVSKQHLDVCLHSSSGRLGNDAQGWSELVAMLKAAEVDLVVIEATGGYERGAVCALQAAGVAVARVNPRQARDFAKSMGILAKTDQVDARTLRDFADVLARHDKRGQYTTPIEEPARRELGELMDRRRQLVEMRVAEHNRSEHAGPRARRSIDSVIKLLDKQLGLIEGQIDDHMDRHFKRQRELLDSVKGVGPVTILTLTAALPELGRLGRRQIAKLVGVAPLADDSGSRQGKRRVWGGRANVRAVVYMAAIVAIRHNAVMRAFYERLLAAGKPKKVAIVAAMRKLLTILNAMLRDQRLWDATRHLNIAQPG

SEQ ID NO: 172884 - protein, 337 aa, unidentified
MTGVGIGRKAGNPVPYFSSLLMATYVGLDVSKDVFDAHLPQGVVRFAQTPTGYAQLLAALPAEAIVVLEATGPYGLRLLEALQAANQDVSVVNPLAVRRFAQSRLRRSKTDRLDAQLLTAFGHAMTPPLTPATNPELAQLRQRQALLELLRRQLGALRNHQHALQLSPWPDPVSEAALEEEIAQLEKRIGELEAGLDQAVAAREEAQRLRAIPGIGPRIVAALVLLGPGLKAFTSWRQAVAYAGLCPRHYESGSSVRSRPRLSKLGEGRLRRLLYLGACSAARFNPACQALYARLLARGKAKQQALCAVAARLLRQAWALVKFDRKFDPAYHLKAGN

SEQ ID NO: 172885 - protein, 400 aa, unidentified
MDGPVISFDVSKGSSHMRAFISLDKPLGKVIVIKHDFDGYQQVRDLYQKLREKTGREPVVIYEYTGVYAFPLLTFFVSEGYTIYQIAPLESAKKRKSEIRSTKNDSMDTRTIASIYYGDRKKPLTPFRIQDQKYEDLKEMSRRYQFEVSIAVTEKNRYHRCLDAVWPCFDEVIDYESDISLDVIIEFGHPANIKTAKGVLSAMKKNQPGRSGKREKTAERIVEYTKNHNSGVSMNSYMVRELQEFARRVKEGKRRIDAILDDLIALALTTDEFRLLQTIPSVKARSAVSIVAEIGDISRFATAKGLIAFAGLDPTVNESGKKDGKHLQITKKGNKYLRTSLYLSVSSICHWHPESFISKFVDSKIKDGLPKKAAKVAGSAKLLRLIYSMFSNGTCYSEKE

SEQ ID NO: 172886 - protein, 345 aa, unidentified
MKILKQVLGIDVAQKELVVSLGRMHEDLTAEIYAGKVFANTEKGFSALLEWVERSTDSNLPVRFVMEATGVYHESFAYFLDERLRQVSIVLPNKINHYFKTLDVKTVTDYTAAEAIARFGLERKLTVWKRPNAVFKNLKQLTRERDQIVDARTVTKNQLHAESCEAEPSKNTIKRLNALIAFLDKQEKEIMQEITAVVKKDQPARDTIKLLTSIPGVGVLTAAIVLAETNGFELIRNKRQLTSYAGLDVREKQSGTSIKGKPRISKRGNRYLRKAMHLPALSAIQCNERFKTVFARLVSRHGIKMKAAVAVQRKMLELMYILYKTNTRFDAEFTREIKKEKQLLQ

SEQ ID NO: 172887 - protein, 499 aa, unidentified
MAPCPANRRLVVRGRIEECSSTGHGLCHLSINKSNDITMAKKAKKVKTAKGAELRIVNPDAAGIDIADGIMQVCVPADRSKDNNRAFRAYTSDLHAISAWLRECGIKTVAMESTGVYWIPLFCRLQEDGLDVVLTNARDVKNITERKTDESDAEWLMLLHQYGLLKASFQPHNDAKRMRTLTRHRDTLSREASSIVLRMQKAMQQMNIKLTLVLSDITGKSGIRIIEAILAGERDPKRLADLADIQCKTPKEEIAKALEGNWEEDLMFVLRQNYDTFKHYCTQLGECDAELEKLMENYRAEVAKVEDTSYSPAKKRRDYKKTRHTVGFDVERKAYEMWGVNVFEIPGISHLTALELMSELGHDFTRKFPSSKQFCCWCNISPNTKISGGKRISSHVPHRRNNVGLIFRSIASSLANAKNQLGNFYRRIRSRAGGKAAVIATAHKVAEIFFAMVANQTTYNPERVGIDEKVLLEKRITRYKRELERITGTHIEIGNACVP

SEQ ID NO: 172888 - protein, 362 aa, unidentified
MQKHIFVGIDLGDKNSVARIGVDLEKSERFGFVNTGVGRARLFDEVKRRADRAGGATIVMAYEASSCGFVLRDQAQAAGIDCKVLAPTKMEKSVEQKRNKNDDRDADDVLEKLRGHVLAGNRLPTVWVPDLETRDDREVLRTRLALSERQTQVKTQIQMLLKRHGLEKPSDLGSTRSKPYRRWLESLSQWESLGWGTRQSLASLLRQLSGIEVEMENLEKLVRELGSQPRHKPIVEALMKEKGVGLLAAMVFRTEIGQARRFHRGRHVGKFVGLTPTSHESGQQSDRKGHISRQGPPRLRKVLCQASWVHVRYDPHSREAYQRLVAKNPKKKKIALVAVMRRLAVRLWHRMREVELQQATPS

SEQ ID NO: 172889 - protein, 347 aa, unidentified
MLYVGVDHHKHYSYLTAVDAGGKVRKSCRLPNEREVLAQVLADLGEPCCSVLEAGRSWGVMYDLLEELEAQPVLANPYQVRAIAQAKVKTDRIDSHTLAQLLRGDLIPRAHVPTRATRYLKDILRQRLFLVRMRTMIKNRVHALLDRNHVITPHLSDLFGRAGRTYLAALELPAYEGALLQGHLRLLGTLDEHLKETEGWLSEALQEDRRVSLLRTVPGLGPILGALVALEIDDISRFPVSAKLCAYAGLVPSVHSSGGKTYCGRLLFQSNHHLRWAMIEAAWLALGRSPYCRAYYERIRRHKNHNVAITALARRLLEIVHAILTEDRPYQERPVPTHVAPAALAFA

SEQ ID NO: 172890 - protein, 369 aa, unidentified
MNKVVYVGLDVHADTIAVAVADEGRLGEIRFFGTISNTADSVLRLTKRLAEAGKVPTFCYEAGPCGYGLFRHLTKLGFECAVVAPAMIPRKAGDRVKTDRRDAEMLARLWRARELTPIWTPDEEQEAMRDLIRTRKQALDALKIAKQQLLSFLLRHGLRYQHGSYWTMRHRRWLAEMRRFRYAHQQLAFEELKRAIDQIETRIATLDKAIEDAVPRWHFAPVVDALRALRGVNTTIAATVVAEIGDITRFGNPRQLMAWLGLVPSEHSSGSTTRRGRLTKTGNALARTMLVEAGWSYRHMPKEGQPYLKRSAHLPQEIRDIGWKAQTRLCKRFRHLSNTGKPQPRVLAAIARELAGFIWDIARKTPLST

SEQ ID NO: 172891 - protein, 407 aa, unidentified
MNQDSGFDIWCGLDVGKQAHHACALDAAGKRVFDKPLPQDQKRLEELFDKLQSHGRVLVVVDQPNTIGALPIAVARSMGIQVAYLPGLAMRRAADLYPGNAKTDARDAFIIADAARTMPHTLRRVDAGEETLAELKVLVGFDEDLAAEATRLSNRIRGLLTQIHPALERVVGPRLTTKQGLAVVEQLGGPQGMAAASKSKLLRVITKAYPRNAQDFADAITQALTEQTVTVAGTAAAEQVLPKLAASLRATLDQRAELAVQVEKVVDAHPLAEVLTSMPGVGVRTAARILLDVGDASQFPTAGHLAAYAGLAPVTRRSGTSIRGEFPARSGNKHLKRALFLSAFAALKDPTSRAYYDRKRAQGKKHNAALICLSRRRCDVLFAMIKNREPYRAPAPTPEPSPMPLAA

SEQ ID NO: 172892 - protein, 480 aa, unidentified
MNIKAKKAKVQPLSKKSVINVLSQDEIKKKVQVIEQELKASTWRELETKGKFEKNDKLSFISEEMLIVGCDIGSETHYIRAIDTRGRELSKGAFEFSNSSEGFASAKAWVLKLAAKNDKKQIVLGLEPTGHYWFAIAAWMVSNGISVVQVNPYAVKQSKEIEDNSQLKDDRKDPKIIANLVKDGNYGMPYLPEDIYADMRRLSMFRDQLTEDRIRNINRLHREMKIYFPEYMDAFGKIDGAFTLEILKVAPIPSDIVELDEEGLKSLWHEAKLRGRGYSRARVIVDYAKKSVGLTGGTDAGRESIKWFVEQIIQLDEQLAEIENVLHQKCMEIPHAENILEINGVGENILAGILAEMGDISRFDDVKEIQKLSGMGLVACSSGKHKGQTKISHRGRKRLRYWLFQAAKSAVAHAVEFKQLHAYYTTRSMNPLKKMQSLVVIACKILRVIYTILNTGMKYDPERMLREISYPQGNTVQAAA

SEQ ID NO: 172893 - protein, 423 aa, unidentified
MSSDLEIAAFIGLDWADQQHVIRLRMAGSASVEAQLLDQKPETLQTWIGQLRQRFGGRPVAIALEQSRGSLLYALMNVDFLRLYPVNPQNLAQFPKAFYPSGAKDDPQDALLLLEMLEKHRDRLRVWVPDDASTRCLRLLAENRRKLVNRRTALTNQLTSLLKESFPQALDWAGPLDSLRACDFLQHWPSLQILQKTSTSRLRRFYRVHTRLDSQAIHQRLDQIRQAQPLTSDSAVLAAAELMIPALVRQLRCLIESIQQFDQQLKDRFQQHDDYTLFHSFPGAGPALGPRLLSAFGSNRNRFECAAEVQMLSGIAPVTERSGKSHWVHWRLACPKFLRQSFHEFAAQSILFSTWARAFYDQLRSRGTSHHAAVRTLAFKWIRILFRCWKNRTPYQEQIYLASLQRHGSPLCAALSPPTGANL

SEQ ID NO: 172894 - protein, 357 aa, unidentified
MTTYYIGADVHSNSTELAIERNKKIVQRYNLPTSIAALSNVLDSLKGEKHLAIEEGPMAGWLYRNLSKKVDKLIICDPRRNKLIDSDGDKDDKIDAAKLACLLRGNFLRPVYHSDDVGRTELKHWVSLYHDRVHDAVRNINKIRSRCRMHGISIARVVVRQEKARDKWLSKTNNQTLARQLELLWIGYDATSRQVRMARCHLSRLSGRYKIIKFWSDLPGIGLIRATTLFAYLDTPWRFRKKNKLWKYCGVGLQRTTSGTDSKGRPKPARLQLPWAVNRTLKNAILGAAASVIKQKNNLFREYYERMLEDGIMPSNARHAIARKLLTVMWAMWKTNSRFDESMCHKPDTETALVLSR

SEQ ID NO: 172895 - protein, 424 aa, unidentified
MRAIGIDVHRDFCEVAISEGGRLRSAGRVPSTPEALELLGASLSDDDEVALEATGNALAIARILEPHVARVVVASARELHAISGAKAKTDRRDARTLAKLLAAGMFAGTWLPGEEVRALRRRLAQRAQLVRARSRLKNEVQAALMRNLVGAPSATDLFGAAGRRWLADLVLPADERETLDSCLRTIAFLDGEVERFEVAIARYAMHSVEIRRLVTIPGVGLISAATLVAVVDDVHRFRSARKLVGYLGLDPRVRQSGSTPARMGHISKEGPAAARAALCEAAHAAMRTPGPLRAFGERVAARRGRQVAIVAVARKLATIAWRLLTSGEDYVYANPGQVRLKWRRVELLAGEPSQKGRRTGVSLASQHERELALTAERAYQRLVADRQAAGSRRKGAGAAPGRAPDGSSQDQAARQAQQPHRSAL

SEQ ID NO: 172896 - protein, 375 aa, unidentified
MKEKLRFLGLDVHAETIAVAVAEPEGEVRSLGTIPNRAESIRKLIKKLGPAAKLRACYEAGPTGYVVYWQLAELGVECEVVAPTLVPVKAGDRVKTDRRDAEKLARCYRSGDLTAVWVPDAGSEALRDLVRAREAARQDQTRARHRLSKFLLRSGQRPPTGVRPWTRPYLIWVAQLRFTQIAQESTRQDYLHEVEHMRGRVERLEQAIMEAVKLASPAMQQVINDLQALRGIADISAVTIASELGQVSRFESARQLMGYCGVVPSEDSSGKRTRRGGITKTGNAHLRRIVVEAAWSYRRPPGIWYGLRRRQESISEEAKEIAWKAQHRLHKRYVKLGAAGKDQRKIVTAIARELLGFIWAIGTRAETISRQHAAA

SEQ ID NO: 172897 - protein, 366 aa, unidentified
MQKLSTRRVMGNKILGGHQLTIGLDLGDRWSFYCVLNELGEVVREEKLPTTPEAMKRTFEKFPSSRIVLETGTHSPWISRLLTELGHEVIVAHAQKVQLITKSSRKDDRHDARTLARLARIDPQLLGPVRHRSAKAQIHLTVIRARAELVSARTALINAARGLAKSYGERLPRRGTQQVGRELAAALSTALREVLEPLLREVESLNERIREYDQRLERIAKEVYPEVALLKQVKGVGTQIALTYLLTIEDPHRFAKSRDVGCFLGLRPGRRNSGQSEPQKKISKEGDRYLRTMLVQGAHYILGPFGEDSDLRRWGLKLAERGGKNAKKRAVVAVARKLAVLLHRLWVGGEVYEPLRNTHRAMSAAA

SEQ ID NO: 172898 - protein, 354 aa, unidentified
MKGQIQNKKVLVRGKEVYIGVDVHKESWHVTARTEGEEVFHGGIPSQYHALRRLLDRFKDRRIKVAYEAGPCGFWLHDNLSRDGIEVLVVPPSLIPIESGNKVKTDKRDSRKLAKLLESNLLKRVYVLTEEERIDRELLRTRRQMVEHRNDVARQIKSKLLFYGVTSPFAPRHGWGQSYLRWLKGLDLKREELRACFESLIELYEYLTEQLLRMNQRVKELSQSLKYRERVRLLCTVPGIGTLIAMEILVELQDMERFKRADELASYIGLTPSEFSTGQYVRQGRITRCGNKRVRTCLVESSWILIQKDPLMRLKYNQLKQFKGAKRAIIAIARNLMIRIRRILLDKEPYVIGA

SEQ ID NO: 172899 - protein, 397 aa, unidentified
MIAVGIDVSKSKSTVAILNGDGSIRAKPFDVHHVADELQALVDYIKRTSEPPTILMEPTSHYHYPLLKAFTEAELPVCLINPYQMKKYGDTELRKAKTDKRDSLRIAQYALEKSYSLIPYTPQDQKYEDLRFLSRQYSQRISTLTVAKVQLLSLLDETMSGITTILPLKSRDPDNCVLLRFIKRFKSFDVIRKMGKTRFLDSYQVLVKKTKDRFAGSKGLAIYELVLNSVTTRGENPLSAMTQDQCVDLVSTSQKAADEINLQMRIIAETMPEYKVLRSMAGVGDRLGPIILGEIGDIRRFHSGKALNAYAGNDAPPYQSGQFESRNRHISKRGNPALRKACFEVMQALKLTKPQDDPVYLFLLKKEQEGKPYNVAKMAAVNKFLRIYYARAMELYK

SEQ ID NO: 172900 - protein, 390 aa, unidentified
MVNNSLTGKAGVGEVSEASRADTSRRREFGRVRASEAVTEREPRRPRGTSPNSRLNRPSVFLSKTRAGASSHLQVREKTMSEPVYVGIDVAKDTFHVATCPNILKTQLPNTPQGHRQLSRALKDHSIALIVLEATGGYERPLAAELLSDSLPVVVVNPRQVRDFAKGMGQWAKTDPIDAQVLAKFAQIVKPSPKTHSTPQTAELSELVRRRRQLNDLRVQESNRLLMIHHPKVKKSIRKMIKTLDFQINEIDQLVREHIDTDDNFKNKDRILRSTPGVGPQTSAMLIANLPELGKLNRQEIAALAGLAPWDRSSGKSDGKAHIWGGRKDVRSVLYMAAFTACRFNPVIRTLAERLRQKGKAYKVVITACMRKLLIILNTMVRNQTVWTIK

SEQ ID NO: 172901 - protein, 373 aa, unidentified
MPRYSTAFGMDVHLRSTTVCALDAETGEAVARRFRGNPWGEVAEWMSGFPGPSLAAYESGYLGFAPQRELSGLGVDCVVAAVSKVPRSAADLSSKNDRNDAARMAKAILSHDVTPVWVPSPEIEGLRDLAAAHDAATARLAAAKQRLLAFLARRGYAYGGTTPAGNPRKYWTYGFLRWLDKVRPADDGGIRALAALRNEVEAADETREALLAEYRGAAAAGPLSAEVEALQSIKGCGFVLAAAFASEVGDFSRFRSGRQVTAYFGLAPRQRSSADSVRLGGISGAGNALVRRLAVEGSWRYAQAGHQPKLMPNGSGVPLEIRMHGRKGSERLLRRREEMLARGMPQAKANAATAAELVRWLWALGMMCREAGE

SEQ ID NO: 172902 - protein, 411 aa, unidentified
MEAAVITAVGIDVSKSKSTVAVRRPGGEIALRPFEVHHTNSDLKKLASTLKKLGGDIRIVMEHTSTYWRPIALTLKEAGFFVSVVNAMLIHDFSDNTIRKLKTDRADALKIANYALTFWDTLPPFNNEEETRLLLKMQSRANERITATATALRNGLIALADQIFPGVNIAFDPNIKNANGHEKWVDFFLRYWHKDCVCQYSMEAFTESYRGWCKRKNYKFRTDTAHKIYLLAQEGVATLPKCESTKMLITQACKSLNAVCEAKQSTQLEMQRLAAMLPEYEVVMQMEGAGPITGPALMAEIGDVRRFKNKKALVAFAGIDAPPFQSGAFESKSRHVSKRGSPHLRRTIFIVSNIILTRSNPENAVYCFMDKKRSEGKHYYVYTVAGSAKFLRVYYARVTEFLRSQPSPGAC

SEQ ID NO: 172903 - protein, 346 aa, unidentified
MKKIAYLGMDLHAKNFTLGQMDNDGYFRGNIEFPTSENNIIHGLKSIKAKEKYLTIEAGTLTYWAAQVANPFVSQVIVCDPRENALIYKNPYKKDKVDTRNLCRLLRLGELHHVYQSENDDRAIFKTSAQHYIDLRNQLIRFKQKIKAMYRYWGVINVFTDAVYSNSGRDKYLKQVKHLPIRHQLSRLYYLMDQTEAMRKSALKSMKQLGRRYAEIRQFVKIPGIADISAHVFDAFIQTPHRFAKKSRLWKYCRLSVTDRSSDGKPLGFQRIDPSGIGELKALSYRAFMAAMKGDNEVKRFYLHSLKRTHNQKHARLNTQRKILAVMYSIWRKRAAYQPELFAGSV

SEQ ID NO: 172904 - protein, 354 aa, unidentified
MDVSKDSISVAVLSPDRDTAEVDKIFHDADSVRRLVKRLGKPKGIWACYEAGPTGYDLQRLLTSMGVRCDVVAPSLIPKSSGDRVKTDRRDARRLAGLHRAGELTPVAVPTPAQEGVRDLCRTRGDMVQDLTRARNRLSGFLLRHSVVWRGGSKWTERHRRWLATLSFDDPAIATTYSHYLATVKLRDTELESVEADLVPWCTKDPFGDQVTRLAAYRGVTTIGALCLAAEVFDWRRFPRARPFMSFTGLVPGENSTGLTQRRGSITRAGNAHLRGQLCEAAWAYQHSPNVGVAIKERQVNVPPETVARSWAAQVRLSRRFRQLGAHKNVRSVVAAAIARELAGFLWAEMVAQG

SEQ ID NO: 172905 - protein, 440 aa, unidentified
MNQEDRSRLEEFRQFRKEIRGSAEYLLVGIDVAKDKHYAFFGTATGKTLFRRLVFENNLEGFRKLLVQAEAMKVQHGLKRVVFGMEPTGNYHKPLGEHLIRCGHGVVLVSGVAAHENRKTLDGRWDTNDTRDAANVGDLMSQGKCLFYEFPVGVLQDLRNLLSLKRRLKRMEHGHRVRIRNHLVAKYFPELDRYYEQSESTALAIVRWCLDPSEIAGLEYQRFVQMVSSVRGRSSQEKRLQTIWEMAVDSVGCEAGPTVEFEAQVMVEGLKQIRESVRQIDEKIQEVCSRFPEYEFLLSIPGFGPDVSSKVLGAIGDPFRFQNGRQVLKMAGLDLSAERSGKTSQSAIPVISKRGKADLRYALYQAALIASIRNQDFIVYYTDKLRGREREPGIRTKMRVKLAAKLLLIAWTLMKKKEPFHPSYLRSACQSFSAGAGRER

SEQ ID NO: 172906 - protein, 374 aa, unidentified
MADYSEVFVGIDTSKLRNAVAIAEGGRSGEVRYLGEIETTEAATSKLVKKLAAPHRRLTFCYEAGPTGYGLHRLIKTLGHECVVVAPSLIPKKPGDRVKTNRRDALNLAKLLRAGELTAVWVPDARHEAMRDLVRTREAAVDDLKSKRQQVLSLLLRLGRHFTGKRTWTRAHMNWLVSQKLVHREQRIAFEEMLLAVRQADQRVIRLEQAIAAAVPDWSLAKVVTALMAVRGLDLISATIFLAEIGDLSRFASPRQLMAYLGLVPGEESTGDRVWRGGITKAGNHRARRILVECSWSYRHPPRVGKKKLAKVEAAPAAVQEIAWKAQARLTARYRALARRGKRPTLVVTAIARELSGFIWAVNRAVGAPATAAV

SEQ ID NO: 172907 - protein, 412 aa, unidentified
MLFVGDDWAEDHHDIKIVNEEGRRLARRRLPEGLDGVTRLHALIASVMPEQWPDLPAGEAVARVKVGIETERGPWVTSLVAAGYEVFAINPMSTPRYRERHSTSKAKSDPGDAHVLAEIVRLDRSHHRPIAGDSAHGEAMKLVARSHQSMIWDRTRHVLRLRSALREYFPAALNAFDDLDAPDALALLAAAPDPDRAARLSTGRISTALRKANRRDVPTKAVQIQAILQAPALRQPPAVQHAFAAIVTGEVRLIEALNAEIDALGEAVAEHFGRHPDADLYTSQPGLGVILGARVLAEFGDDPKRYTDAKARKNYAGTSPITRASGTKKTVLARHVHNDRLADAVHQWAMGALRGSPGARAYYDAMRTRNIGHHAALSQLGNRLVGILHGCLKTRTAYNETRAWAHHSTASS

SEQ ID NO: 172908 - protein, 346 aa, unidentified
MTYSTTVGVDLAKNVIQISVVSSRGKELSNRSLTRKKFAEFLGKQKRSLVAFESCATAHYWARAAERHGHEARIIPAKAVTPFRQGHKTDSNDALAVAEAARRPKIKEAPMKTVEQQGLQAIHRSRELLNQECTALSNHLRGLLMEFGIVIPRGFASLLRAVPEILEDGENELPDLYRPTLHRMYHRLLELREDIEAMTKEVERLAKAHPICSKLMALEGVGPISALLLYATMGSGVAFSGSREFAAYLGLAPKQYSSGGKTNIVGLSKKIGNSRLRSVLILGARAYTYKLREPKSSKDKWLKAIIERNGESRAAIALANKNVRTAWAMVTQGTEYQRRQQLEMAA

SEQ ID NO: 172909 - protein, 376 aa, unidentified
MNQDSTLYVGLDVHKDSITVAYAMGLDEVELFGKIGTTQMEVDRLCKRLQSKARHVHVVYEAGPCGYGLNRRLVEKGFDSMVCAPSLIPRKPGDRVKTDRRDAFKLVRSLRAGDLSAVHVPTVEDEAFRDLARAWSSARDDLKQARQRLKSFLLSHGVQYSGRANWGPAHRRWLSTLSFNSAWQQLAFNEHRRTIEDRLAQCARLEVALREAVVGWRFYPVVLALQAMRGIQFTSAVGLVSELGDLSRFDHPRQLMAWLGVTPSEHSSGSKRRQGSITKAGNSCARKLLVESAWSYQHPARVSKDIQSRQEGIPKPIVDRAWDAQLRLCGRYRRLVARGKSRQVAIIAVARELAAFIWDIGRMGMTLAVPQSEQPA

SEQ ID NO: 172910 - protein, 406 aa, unidentified
MRLFIGDDWAEDHHDVEVMDAAGRVLAKKRLPEGAAGMARLHELVGSQLGEDAQDAEVLVGIETDRGPWVAALVAAGYVVFPVNPLQASRYRERRGVSGAKSDGADAHMLADMVRTDWHQLRPAAGDSAEAGAIKALARMHKTLIWDRTRQLQRLRHQLREYFPGALEAFDDLAAPDALELLAKAPDPARAARLTRAQVSAALKRARRRNIADKTVAIISALRSAQLGQPPAVTSAYAATVRSLIAVITALEEQVTVLQVQVEAHFGQHPDAEIYLSQPGLGSLLGARVLAEFGDDPHRYASSKARKNYAGTSPITRASGKKKTVMARYIRNDRLIDALMAQAFTALNVSPGARAFYDQQRAGGAGHNDALRRLANRLVGILHGCLKTQTLYNEATAWSHRRKLAA

SEQ ID NO: 172911 - protein, 476 aa, unidentified
MTAAAESTTKAKANRKQRRERNRRIWTDNPGLDVVHPDAAGIDIGNSEHYVAIAPDKSDEPVRTFACFTHSLRELAQFLKAHGIRSVAMQSTGVYWIPLYDVLEEEGFEVFLINARDTKNLPGRKSDVQESQWLLKLHTYGLLRNSFRPTSEIRVLRTFWRQRGEHVQTAGACVQRMQKSLTQMNLQLANVISDIMGVTGQKILRAILAGERDAEKLAGMRHAGIQASREEIVASLTGNWRAELLFALKQEMDRYDFCQWQIAECDAEIEGHLGTLPAKPQKTDSPDQPAPTQKKKRASGNSPSFALDKELVRITGVDFTRIEGINVMTAQTILSEVGLDMSKWKSEAHFASWLGLCPNNSVTGGKVLRRGTRKVVNRAATAFRIAASTLRRSDSYLGAQFRRFRTRLGAPKAITAMAHKMSRLFYRMLRYGQEYVDRGQQFYQDKYRQQQIALLNKQAAQLGLVVTAAISVPVSA

SEQ ID NO: 172912 - protein, 377 aa, unidentified
MGSKQRDERIEQLSVGVDLHKSQLTICVMREDGELVQQGMYRTTEDGYQAFVQKMHEWEQELGCSVAMAVETTGNARYFKNRMEAEGFCVVVVNTNKFKVISQSTKKNDSNDATTLAYYLGKGMLPESYLADQSSEELRRMIKCRSLLVGSTVKMKNQIHGMLLGYGITTKAAQLQSKKKRQALVKDLVDQGFTEAAASLEVMLGIIECVQEQIKVLEKRLHEMVGDNEDVDLLMSIPGVGFLTASTIAAYTKDLDRRFCGDFKRFASYVGIVPSVHNSNERVHMGRITKHGPQELRTAFVQATMGMIRLSKVTGDWRLMTDYRAMKTGKGSGKSIIATTRKLARIIFAMLHNREPFNPSLMVRDKCLFTVEEVIGA

SEQ ID NO: 172913 - protein, 328 aa, unidentified
MIMVGCDVSKATLDAAWFDEARQRWEQHAPFANNGRGFRALRTWLKKSTGQDRRSLMLVIEATGVYHLPLAQWAYRQGLRVIVTNPGRAAENARSHNRLHKSDSLDARGLARYGRELDSPREYVPDAPEISRLKALLSRLRQLDSDLQRERNRLEKCPFLPDSAPLAASLRRGIKQRQREQKRIQGAIEALILGHPELSHLHRLLCSIRGVGKITSQWLLPLLYRRQFASARQLAAFLGLTPIRRSSGTSLRQRGRLSGLGNPYLRSRLYLPAVTAITYNPDLKAFHDRLIHRGKTPKQALTAVMRKLVHIAYGVVKNDEPYRCPTPA

SEQ ID NO: 172914 - protein, 353 aa, unidentified
MSQDITLTVDYHDRACVIRRYDHATRREQLLTEVLTTKEELLRVVDQARRDVGRHGCVTWIQESTTGWARVKELLGTRVKFQLANVLQMPLPPKARRRKTDKVDTARIQREHLAGNLPLAYQPPPECRQLRRVVAYREGLVNRRTALRNWINRYLAHETWYDRTGLWSPKGQRRLRAFLEKLPRRDAMVIGQKLDELARLEEQWDVALTELLAAYQASPEAKRLDAIRGIDVISAVSIVARIGPVERINSAEALIGFAGLAPGVQESDRTRRDGHIGGGGTDTHLRHYLIEASVWVRKLPRYQPTYERVRLRKGSKVGRLVVARMLLRSIYKILKEGIAFNPERTPVTAVAAH

SEQ ID NO: 172915 - protein, 353 aa, unidentified
MITVGVDAHKTVHVGVALNEAGEVVGRWSGGNTVAEWERFQAWLADLGDERQVGIEGAGSYGYGLAQALVAVGETVLEVNSRLTALGRRHARRQGKSDALDAQAVAEIVRREGTSLPHVGYDEQASILAHLAEERESLVSEATRVRNRLHALLLKVDPEYKRNAPSLRSKRVIAELRTYESGSAPTGLKSELVASVRRQASRLNDLLIAIEELGEQIEARAVRYQPLTQITGISYLTAGTLAGILGKHTAFRTDAQLASYAGVAPLEASSAGNGRYRLSRAGNRRLNAIIYRIAVAQLRYPGRAKTFVEKKVSQGHSKREAIRSLKRYIVRAIWQQWKLCPPSVAPQTSCACL

SEQ ID NO: 172916 - protein, 428 aa, unidentified
MNCNTQNAKIASITEKTLIVGIDVGSETHFARAFDWRNYEYTKKPLEFSNTEAGFLTFKAWVEDIAEKQGKTAVIPGMEPTGHYWFALGKFLQDNGMKPVHVNPHHVKKSKELDDNNPNKNDRKDPKTIAALVNEGRFSYPYIPTGIYAEIRSLSNLRFQTQEELTRIKNRIARWFAIYFPEYKDVYGDLKAVSGRMVLKVAPLPEDIGKLGVEGVNQIWRSAKLRGAGIKRAKTLVSAAEHSVGSKEAPEAARMELKNLLDDMDVYVSRLDELLVNIEEKLKEIPYVDKLMEIKGIGLVTVSGFIAEVGDIGRFDNPKQLQKLAGYAIVANDSGKHNGESRISYRGRKRLRYVLYEAAISLIGKNAEFKSIHEYYRTRKENPLKKMQSVVAVACKILRVFYTILTKGVDYDPVKLLGDIKRPQLQVA

SEQ ID NO: 172917 - protein, 368 aa, unidentified
MSTAQARTAAKVKQQPIGWKRVVTVGIDLGDRFSHFCALADDGSVVAEGRVATRPAAMELEFKTETPKRIAIEAGMHSPWLSRLLKRLGHEVLVANPRKLRLIYENQRKSDRVDAEYLARLARLDPKLLCALEHRSESGQCHLAIIRARDTVVRSRGRLIQHIRSAIKAIGERVPSGTAECFHKRAAACLPDGLREALLPLIEMVEQFTTRIREFDRKVQQLAEDRYPDTEALTQVCGVGSLTALAYILTLEDEGRFRRSRSVGAWLGLVPGQHDSGESQPQWHITKEGDPYLRRLLVGSAQYILGPFAKDCDLRRYGLAIAARGGANAEKRAVVAVARKLAVLLHRLWRTREVYEPFFNSRSEHVAA

SEQ ID NO: 172918 - protein, 347 aa, unidentified
MRKIAYLAMDVHARNCVLGEMDGNGEFHGNRSFKTCEINIIKALKTIKAKRKYLVIEAGPLSNWVAQVANDHVTRVIICDPRENALIYKSSQKRDKVDTKKLCRLLRLNEFKEVYRPENDQRAIFKAAVQHYLDLRDQLKALKQKIKAMYRQWGVIDVFTESVYSVSGRDKFLNQLKHRPIYLQLKRLYTLLDTTADMKQDAQKSMTSLGRKYPEIKEFKKMPGMGIVGPHTFDAYIQTPHRFAKSSRLWKYCRLGITDHTSDGKPLGYRRLDKSGISELKAVSYRAFLSAIKGDNEIRRFYLSSLKRTHDKKHARLNTQRKILSVMLSIWKKGSAYRAELFLDPST

SEQ ID NO: 172919 - protein, 337 aa, unidentified
MSKVTVFVGVDYHQDSIQVCVMDAAGTTLANRRVGNSTEEVAAVVLPHGNDVRLAVEACSGSAALADELVTRWGWSVDMAHPGYVARIKQSPDKTDFCDARLLADLERVGYLPRVWLAPFAIQELRRLVRFRQQLVGQARNAKLRVQALLRENRTKCQDMHPWTKRWVAWVRAEAELSAESRWVAERWLREIEHLAREIRLVEKRLARLTSDDPVVEFLAGQKCVGLVTAATIRAEIGRFDRFRNGKQLSRFCGLAPRNASSGNRQADAGLIKAGNPQLRAVLVELAHRLKRWEPRWAKLALTMRMRGKKGSVIAAAIANRWVRWLFHQMQTVSQTT

SEQ ID NO: 172920 - protein, 410 aa, unidentified
MERLIDRCCGLDVHKKTVTACVRVPGANGAREQHVRTFGTTTADLLSLRDWLEAFQVTQVAMESTGVYWKPVFYVLEETAICVLANAAQIAQVPGRKTDVKDCVWIAQLLEHGLIRESFVPPAPIRELRDLTRYRKAVIQERTREANRLHKVLEDAGIKLASVASRVLGVSGRTMLDALVAGTTDPAVLADLARGRLRKKLPALRQALVGRFRGHHAFLVAQILAHLDYLDEAIEAVSTQIDTVIVPFADDLTRLDTIPGVNKRTAEVLIAELGVDMRVFPTAGHLASSAGLCPGNNESAGKHRSGRTRKGNRWLRGALIEAALSAGTHSATGALAARYRRVMQHRGHKKAVVAVAHAILVTVYHLLARQTNYKNLGADYYDRRDAEHVRRRAIHTLERQGFRVTLEPAA

SEQ ID NO: 172921 - protein, 346 aa, unidentified
MQNDTLAAVDIAKEIFEVGVSDRPGRVVLRKRLPRDGFLEFFAQLPRAMVVMEACGSAHYWARRIEELRHVVVLLPPQYVRPYVMRNKTDRTDVDALLEAFRNEQIRPVPIKTVTQQILATLHRLRSGWLADRVRAINTLRGLLRELGFFIPEGRKHVLPEAWEIIQDHRHGLPDALKPSLAALCEEIASLSTRIEDVEAQLEALARQIPALARLRSVPGIGLLSATALYAFIGDPSRFPSGRHMASFVGLTPREYSSGLRRHLGRISKRGNAYLRMLLIHGARSVLWHAKRMKHRDRLRSWALRLEPKVGHNKAAAALANKLARITWAVWKNDRDFEIVPEPQAA

SEQ ID NO: 172922 - protein, 414 aa, unidentified
MEKERINIYHKRNTCFVGIDMHKDTHCAVVIDCWMNKLGEINFENRPSRFSAFVEDVRKICGTKEIVFGLEDTRGFGRNLAAYLVGRKFEVKHVNPAYTSAVRLANPIIYKDDSYDAYCVARVLRDMVDTLQDAKHEDIFWTIRQIVKRRDLIVKSNVMNKNQLHSQLAYSYPSYRKFFAIIDSKSALCFWENYPSPEYIWNTTPEEIYHTIKPVHQALKIQRIHEIISMIERDGDTRKDYQPERDFIVRNIVKDIRHNKELIAEIDGELRKLIPLTGYKLHTMPGIDLVTEAQIISEIGDINRFPDSDKLARFMGLAPVQFSSAGKGKDQRCRNGNRALNAIFHFLAIQMVAVSASGKPRHPVFREYFEQKVKEGKNKPQALVCVARRLVRIIYGMMKTRTEYRPYEKTDDKN

SEQ ID NO: 172923 - protein, 319 aa, unidentified
MNPTLLFVGIDVAKAECVVAVRPTGTTWTVPQTEAGWRALATRLQALAPTLVLCEATGGLELPLASVLAAAGLPLAVVNPRQVRDFAKAKGLLAKTDALDAAVLAHFADAIRPVPRPVPDATTQTLAALVTRRRQLVEMCSAEENRVGSAPPPLRAGLRAHIRWLQRQLAALDTDLDQAIRTHPGWRVQENLLRSAPGVGPILSATLLGGLPELGTLSRGPIAALVGVAPWARDSGRHHGARRCWGGRADVRAVLYMATLAAVRCNPVLRAFYQRLLAAGKLKKVALVACMRKLLTILNAMVKTQTPWTPRLASAAANG

SEQ ID NO: 172924 - protein, 340 aa, unidentified
MRKYIRIGVDIAKNSFQVHALESEDCSATKRKLSRSGIVKFLADVEPCAIGMEACGSAHYWARRFRAMGHEVKLTPPIYVKPYVKRGKNDAADAAAICEAMSRPNMRFVAVKSEDQQATLMAHKTRELLIKQRTMSVNALRGHLAEFGVIAAKGIGHVEELVERAAAADLPAMVQATLGVLLAQLRSLDAAIDELERAIAADHRRDPVSRLAASVPGVGALAASAILASAPDPHVFKSGRDFAAWLGVTPKQNSTGGKEKLGSITKQGNRYIRRLLVLGAISVLRAAPKRKGALCDWLAALRARKPAKVVAVALANKLARIVWAIITTGEAFRSSIYAKA

SEQ ID NO: 172925 - protein, 344 aa, unidentified
MMKHFVGLDVSLDLTSVCVLDEAGAVVWRGKVASTPEALTEAIRKHAASVVKIGLETGPLCTWHWHALRENGLPVVCLDARHAKAALSVQLNKTDDNDAYGLAQIIRSGWYKEVAVKSLDSHRVRSLLSSRAQLVNMRRDLGTKIRGLLKTFGRIVGKVGGRKYEESVRELCAGEPGLEVAVAALLAVRARIEQEIGALEERILGFAKHSNACRRLMTVPGIGVLTAVSFVTAVDDPARFVRSSGVGAYFGLTPRRYQSGEVDRDGSVSKCGDALTRTYLFEAAGTLLSRVARWSALKAWGARLARRIGSKKARVALARKLAVIMHRIWIDGSEFRWSKEGANA

SEQ ID NO: 172926 - protein, 344 aa, unidentified
MEHYAGIDVSLEQSSVCVVDETGRIVRETKVPSEPEALVRFFGQLGVVVARIGLEAGPLSQWLHAGLTKAGFETVLLETRQVKAALSAMVVKTDRKDARGIAQLLRMGWFRPVHCKSPPAQEIRALLVGRKLLQGKLLDVELSIRGILRGFGLKVGVVSKGRFAPRIRELIGGQTMLERVIEPMLRAREALRAEYHALHRAVLGIVREDTTCRRLMTVPGVGALVAITFTSAVDEPGRFTRSRTVGAHFGLTPKKYQSGETAVTGGISKVGDAMVRSVLYEAANVMLTRASRFSSLKRWALEVAGRRGMKRAKVALARKLATILHRMWVDGTSFGFGKEVVAAA

SEQ ID NO: 172927 - protein, 348 aa, unidentified
MFADQLDYVVGVDPHRDMHALAVVHVLSGAVVLETTVAASSDGYAQALKLAEVHASGRRAFAVEGTGSFGAGLTRFLSGRGERVLEVSRLRRERRSGGKTDALDAIRAARSVLGQERPATPRAGGERQALQALVAAREGAVDAKCAALGQLRDLLVTTPEPLRGELRLLTPARLLKRLAATRPDGRRDPELRGTMLALRSIARRVLQVTAEERELAREIETIIRKLAPQLLDQSGVGPHSAAQLVLSWSHRGRISSEAAFARLAGVAPIPASSGQTVRYRLDRSGDRKLNRALHMILVTRKRAHPATIAYIERRIQEGKTRREATRCLKRYLARSLYRLLERGAPLAT

SEQ ID NO: 172928 - protein, 370 aa, unidentified
MQEISKFHVGLDVHKDSISVAVAEPGRTAGRLVGKVVHDVNKLLKLLTKIGTAEQLHLVYEAGPTGFGLQRALSTKGYSCEIIAPSQVPRRAGDRIKTDGRDSIELAECSRAGQLSAIWIPDPGDEAIRDLSRAREDAVNARVQARHQLKGFLLRHDVRYTGKTSWCGAYYRWLATLNFGAGPAQTAFTEYWLAVTSADERVERLTQSLQACITNWRFAPVVAALQALRGVAEITAIGLVAEIGDLSRFEHPRKLMGYLGLVPSEHSSGARLSRGSITKTGNSHARRLLTEAAWNYRFKARIGKEALQRQQELPEQLRTIAWKAQLRLTQRFAALSARGVQVNKVCIAVARELVGFVWAIGRQALHANKT

SEQ ID NO: 172929 - protein, 440 aa, unidentified
MSKRAYRATRVNDVNWDQLAQGKDGLDIALGVDVGKYSLWAVCRWADGRFERPWRVQNPGEIPTLLTLLKRVSAGRKLVVAMESSGTYGDALRQALADNQIEVQRVGGKAAHDYAEVFDGVPSQHDGKDAAVVAELAALGKAMPWEYQPADPWEQELAYWVEWMVAHRQMLTIWQGRLEGLLARHWPEATQVLKLSSGTLLRVLKRYGTPQALAADGEAAKLLARWGGAFLAPEKIEQLLAGAGASVGVRLGEWQQRQIQNYAQQALAARQEANRAQRRLRSLAAGHAVLQAQGKVVGVPTACVLWVSTGDPRKYHAAGAYRKAMGLNLVERSSGTYQGRLRISKRGSPRTRQWLYFAVLRLVQKCGVRPWYEAKKAHDEADARRAVVAVMRKLAVALYYVGVHNEEFQPRRLFGRIRRRSGSPGEQKSRTKRRSRAEQI

SEQ ID NO: 172930 - protein, 356 aa, unidentified
MPRIAEQELLVTGGVDTHADTHMAAAVDQVGRVLGTEQFPATAAGYRAALAWLRGHGELAKVGVEGTGSYGAGLACYLAGQGAEVVEVIRPNRQARRRRGKSDAADAVAAALAALNGEASGQPKSHDGAAESIRMLRVARCGAVKARTKAGNQLRDLVVTAPETLRQQLAGLPRERQVELAARFRPGDLAGPAEGAKAAMASIARRYQELTAEIARLDAALGELLTRAAPKEFMAKKGVATQVAATLLATVGDNPGRVRKETSFAALCGASPVDASSGKQERHRLNRGGDRQANSALWRIVMTRMSCDPRTKTYVARRSAEGKTKKEIIRCLKRYVAREIYKALCRRGQPGRPPAA

SEQ ID NO: 172931 - protein, 405 aa, unidentified
MVTSIDRYDDVDVFIGLDVGKGEHHAVALDRSGKRLFDKALPNDESRLRAVLTPLQEHGLVLLVVDQPATIGALPVAVAQAAGVLVGYLPGLAMRRIADLHPGEAKTDARDAGIIAETARTMPHTLRSVAVADEQVAELSMLCGFDDDLAGQITQVSNRIRGLLTQIHPALERVIGPRLDHPAILDLLQHYPSPAAMRAAGVKRLGNRLLKNAPRKGRVWAGEIITALGEQTVVVTGTDAAALVLPRLAEQLQALRRQRDDIAAEVEKLVDAHPLSLVLTSMPGVGVRTAARLLTEVTTRTFPTSGHLAAYAGLAPVTRRSGSSIRGEHPSRRGNKTLKRAMFLSAFAALRDPDSRAYYDRKIAQGKRHNQALIALARRRSDVLFAMLRDGTLYQPHPAERAAAA

SEQ ID NO: 172932 - protein, 414 aa, unidentified
MPNTLIVGIDISSQSNSIFFIDDAGNHLIKKPFSLPNHQEGANELIKRVIDCLSQYNLSYVKFGMEATSHYGWHLHLYLASSSELLPYKPTFYVLNPSIVKGFKKIYTFLPKTDNIDAVVIAECVRFSKLNPTPLPDFKYAALQRLTRMRYHLVHNLTREKNRALNLIYLKFSTYSQDCPFSDIFGKASCAIIENFTPDDIASMPLEDLIKFVSDNGNNRLSDVNKIAEILKTAANRSYRLHPLLAEANDLALSMTLENIRFMQEQLKKLDKEISKLLKAFSQTLTTIPGIGDVLAAGIIAEIGDIKRFKNEAALAKYSGLVWTQYQSGNFNAQETSLAKCGNQYLRYYLVEAANCVRVHTVRYKAFYNKKFSEVTKHQHKRALVLTARRLIPLIFAMLSKGQIYQERGDVYNT

SEQ ID NO: 172933 - protein, 342 aa, unidentified
MQISTIGLDIAKNVFQVHGIDAAEKVVVRKRLRRRQVLEFFKALPRCLIGMEACATAHYWARELTKLGHEVRLMPAKDVKAYVKRNKNDAADAEAICEAVRRPTMRFVRIKSAEQQGQLMQHRTRDVLIRQRTQIINALRAHLAELGLVAAQGNAGVNELRAIVTDEQDTRLPIDARASVIVLAAQLEALESVIGAIEKRIKMQHRSSEASQRVEAIPGIGVIGASAIVATVADPTIFRSGRDFAAWIGLVPRQDSTGGKQKLGPISKQGDRYLRRILVVGAIAVLRRAQENPGKYPWLTQLLARRPFKVVAVALANKMARMAWALLAHGGTYRAPELAETA

SEQ ID NO: 172934 - protein, 410 aa, unidentified
MRLFVGDDWAEDHHDVEVMNEAGKVLAKKRLPEGAAGMAGLHELIGRQLGDDDAAEVVIGTETDHGPWVAALVAAGYLVFAVNPLQASRYRERHGVSGAKSDSADAHMLTDMVRTDSHQLRAVAGDSAEAAGIKIVARTHKTLIWERTRQVQRLRHQLLDYFPAALEAFDDLDAPDTLELLARAPEPARAAKLTRAQVSAVLKRAGRRKITERATVILTALRGERLDQPPAVTAAYAVTVRSLTAVITVLNEQVKALQGQVEADFGRHPDAEIYRSQPGMGAVLGARVLGEFGDAPDRYADGKARRNYAGTSPLTRASGKKKTVTARFISNSRLADALNAQAFASLRASPGARALYDELRARGIDHNDALRRLANRLVGILHGCLKTRTLYDEATAWGHRQNLPQSSEAA

SEQ ID NO: 172935 - protein, 418 aa, unidentified
MSKINERCAGIDVGKRFLLCCVLTAAANEEPSPRTLRFDTTVAALIRLREWLVTERITHVVMESTGSYWIPIFNILEDHFVVVLANPEEVKNRKGHKTDRKDAEHLADLLRHNHLRASYIPPKAVRELRDLTRRRLQLTQDATRERNRVEKLLEHVNVKIGNVLSDVFGASRQSMLLALIDGNATPEQIARLARGQAKRKIPQLTEALNGHGMSDHERFLIRSCLRHLACLEEELEEVDGEILRRMQTPLFQRPFLLLQTVPGIGQLAAATILAETGADLSSFPTVEQIASWAGLCPGNRESAGIRKGSQTTHGNPYLRTALVQCAWAAVRKQGSVFQARFHQLLSRRGPKRAIVAVAHQILTILYWMLKRGVPFRGSETAPQQRRRQRRAHHHLKCLRRLGLAVQILAGTDILSENG

SEQ ID NO: 172936 - protein, 376 aa, unidentified
MESNTFIGLDVHKASISVAVARGERGGEVRHWGSVPNRPDHIRKLVENLAASGAQLRFCYEAGPCGYGLHRQLVEMGHDCIVVAPSLIPLKAGDRVKTDRRDALMLAKLHRAGELTAVWVPDAAHEAMRDLVRARATAMRVAGKARQHLQGFLLRHGRVYPGKKGWTGAYRRWLAMVRFTHPAQQIVLQDYIDAVADAEARVERLTGQIADLLPQWSLAPVVAAVQAMRGVGFIVAVTVVAEVGDFHRFDSPRQLMAYLGLTPSEHSTGASVRRGGITKAGSGLARRALIEGAWSYRMQARISVKLLARLEALPQVVRDIAWKGQLRMCQRYRHLVAAGKAKVVVVTAVAREMLGFVWAIARAVTAPPVSPVATAV

SEQ ID NO: 172937 - protein, 479 aa, unidentified
MGKGSGGSGMTRGDRRRNARRERLRALLPRDGAVIGIDLAEDKQALAVIDHDVRVLARKTARVKAFRLGEALDWAAGQARARGFDQVAVACEPTGARWMQVQRLCRERGLPLVCIQPLVSHIAREQQDYTTHKTDESDCVMIARLAVELHCYVPEELDEVWGQLRHLGRRRAQLITAATASVQRIADFLSVAWPVVTEACVHPFDSLTWLAALQVVTSRCGADPGKLAAMGLEEFTALVRVAMAGWGGQRPWGPACARVFAALASTEGVVTWSRRGLLRRCADELGDLQRTRAQLRQAEADMAAVLGELGLSRLGGIPGLTAVGAAAILAESGDPRRYDSSSSLVKHAGLAPSDNASGAFEGQAHISRRGRPGLRLAVWRAVWPLLRHNPVLAAKYAAMTAAADAAAHAAQAQPGARSQQASARSQQASAAAAARARRAKARVACAASLLRWIYVIVVHGTAWDPAAASGTAASSAEAA

SEQ ID NO: 172938 - protein, 375 aa, unidentified
MSDHSEAFVAFDTSKLRNAVAIADGGRAGEVRFLGAIENTGPATAKLVRKLAAKYERLTFCYEAGPTGYGLHRQIKSLGYECVVVAPSLIPKRPGDKVKTNRRDAISLAKLLRADELTAVWVPDRHHEAMRDLTRARETTVMDLRSKRQQISAFLLRQGRHYPENKKTWTKAHMSWLASQKLEYPEQRLVFEEMMLAIRQAQERRERLEQEIRVAVPDWSLAEVVTALMAMRGIDLIAAATLLAEIGDLARFRTPRELMAYLGLVPSEDSTGETIIRGPITKAGNRRARRMLVECSWSYQHPPRVGPAKQPKVDAAPRAVREIAWKAQCRLHRRYRALIRRGKLKTVAITAVARELAGFIWAAGRAITPAPAAAK

SEQ ID NO: 172939 - protein, 451 aa, unidentified
MPITILEVGKMKEQKTFRKEQMKLPKHLQHINQHAAGIDIGSRSHFVAVPEGTDEQPVREFSTFTGDLERLAEWLIACGVTTVAMESTGVYWIPVFEILEGHGLEVKLVNARHVKNVPGRKSDVLDCQWLQQLHTYGLLRGAFRPVEQVCTLRAYVRQRATLVRSAASYIQRMQKALAQMNLQVHNVVTDITGVTGMRIIKAILGGERNPNILAAMRDQRCKNSEATIARSLKGSYRPEHLFSLRQAVELYEFHQAKIADCDHQILEQLKSFDAQDILPPANVGEALQRMSGVDLTSIDGINTNTALKILAEIGTDMSRWKTAKHFASWLGLSPGTKISGGKVLSSATKPANKAAAALRMAAFTLFNSKSALGAYLRRQRARLGSPKAITATAHKLARLVYAMLKHGTAYVDAGQAYYEERYRSRVVQNLKRKAQELGFELVTIQGATAAV

SEQ ID NO: 172940 - protein, 340 aa, unidentified
MGEITTIGLDLAKQVFQVHGIDADGTTVLRKQLRRSQVLSFFSRLAPCLVGMEACATAHYWGRELAALGHEVRLMPAQYVKAYVKRNKNDAADAEAICEAVARPTMRFVPAKTAEQQAAMLLHRGRERLVRQRTMLVNALRGHLAEFGVIAPQGLRNVGRLIAIIRDEKDARLPGLARQVLQVLAVQIEQLEAAIAALEKQLMGWHKSNPVSQRLATIPGIGPIIATAIAAMVAEPSGFRSGREFAAWLGLVPRQNSTGGKNRLGGISKRGNQYLRRLLINGASANLLRSKATNADPWVIGLRRRRPSLVVAVALANKTARIAWAVMHRQENYQRMATAA

SEQ ID NO: 172941 - protein, 419 aa, unidentified
MSCLTGPAGADPSDRKGITHHGNQNHRVGGVDSHKDTIHVAVLTAVGQPVADREFATTTAGYRRAVAWLIEHGPLRAVGIEGTSSYGVGIAAAVTAAGITVVEVNRTRPAERRKQGKTDCLDAYRAARSVLSGEASTDPKRASIEPLRALTVARRSAVKAQQAAWRQIGALLVNARSQLRDRFRDLPDATLVVTLASTRPDQVHDQTDADTLHALRCLARRHRDLGAEITDLEQRMLTRATRANPALLAVKGIGPVVGAQLLITAGDNPDRLRSSASFAALCGTAPIPVSSGRTDRHRLSRGGDRHANAALHHIVKNRMTNDDRTRRYRDAHLAKGWTTKAVYRTLRRAVAREVYAALTGHCSVPDYTDLRPARRAKNITLTTVATALDVWPARVGELELGRRRDDAFAERYRQWLNAA

SEQ ID NO: 172942 - protein, 447 aa, unidentified
MVQRSGLTRGDRRRNERIEQLRLVVRADRAILAIDLGEDKQVAALMDHDGRVLGRRTVTVKAYGLGALLGWAAGQAARHGFVSVVVGCEPTGHRWRSVMQLADDAGMGFVCVQSLKVHRAREADDYTRDKTDHKDAVLIGKLIARLEGYLPERADADWARLRHLGARRARLVTEATRCQQQIADLLGCCWPAALAAAAKPLDSTTWLACLSVVVDAGADLAALAAAGADAFTAACRARLARFGVSRLYHRIVRAFFAALSDPGGVAAQRPGALERAGLVLDDWQHTKTRLADVEARMVGVLDALGLRTLVTSIPGLSAVGAAVILAETGDLSRFASARSVVKHAGLNPAENTSATFRGQTRLSRRGRPGLRVAAWRAVWGALPHNPVLHAKFTHLTRRDTDRLVAAQARAACAATLLRWLHAIVTHRRPFDPGIAAGLRHTTAAMAA

SEQ ID NO: 172943 - protein, 322 aa, unidentified
MDIIHTSCAGLDVHKMSVTACIMCLVDGELIRETRRFGTMTSDLLALSDWLAEHEVRQVAMESTGVYWKPIFHILEDRFEVILVNARHIKRVPGRKTDVSDAEWIADLLLHGLLSPSFIPPKPIRELRDLTRSRTLLIRERAAMANRIQKVLEDANIKLAGVASDILGASGQDMIRALIRGRTDPVELADLARERLRKKIPALQEALHGRVTEHHRFLLRSLMDQVRHLDGQIRRFDGRIAKLMAPFREAAERLRTIPGIGQASAEVIVGEIGVDMGRFPTPGHLASWAGMCPGNNESAGKRRTGRTTKGSQWLRSTLVQVA

SEQ ID NO: 172944 - protein, 389 aa, unidentified
MFFLGIDIGKYSHVASLIDDNKKVIFKAFSFSNSTEGANSLIKKLEPFCDSLDIAMEATGHYWINLYSFLLQKDFSVHLINPIQTDGWRNSTEIRKRKNDTIDSILIADLLRYGNFIDSSLSNEDYLSLKNLTRFRSYLISSTGDLKRKTIALLDQVFPEYQKCFSDVFGKTSKEILLSFTTPQDFENISSSKLSKTLKNITMKKFAKKKIEELSQKAKTTIGVKFCLDSFSLQIKMLIEQISFIENQVESVEEEISTIMAKLDSPIITIPGIGPVIGATILGELGDISRFSNASKIVAYAGLDSVISQSGNYEAKSMPISKRGSSYLRKVLFQAALIAEFCDPVFSDYYQKKIAQGKHHLVATNAVARKLCYTIFAVLTKNEAYKMQQ

SEQ ID NO: 172945 - protein, 443 aa, unidentified
MSNLAVLDPRAAFVDVGSEKMHVSIAGGPPAVFGTVTSQLHALRDYLAEHQVRSVAMEATGVYWLPLYGVLEAAGLEVVMVDGRQTRNLPGRKTDMKDCQWGATLHAHGLLRAGFVPPANIRRLQDYLRLRGEHIAAAAGHVQHMQKALERMNIKLHEVISSLTGASGLAVIRAILAGERDPQVLLGLCDIRIRNVKAERVVESLRGDWAGEHLFALAQAVQSWDHYQGLIAACDRQIAVVLRQMPDAKAPPSTASTKTGKPRTRPGVNAPDIADLREILAQICGAKDLTTLPAHSEYSVLQLIGEVGTDLTKWRTEKHFTSWLGLAPGSAQSGKRKASVKRRRNRAGQIFCVMARALARSKYVALGGFYRRMAARRGGLVANKALARKLATLFWRVMVKGIDFVETGVAQYEAKVLETKHRMLRRLARQLGQQIVPNPAAVV

SEQ ID NO: 172946 - protein, 341 aa, unidentified
MKQFIRIGVDLAKNYFQIHALPSEGAPAIKRKATRRKMREFFSQIAPCCVGMEACASAHYWARELKAIGHEVRLMPPAYTKPYVKRGKNDAVDAEAICEAVSRPGMRFVPIKTAEQQAALMLHKTRELLVKQRTMSVNAVRSHLAEFGIVAAKGIGRVDELLELAKEDATLPSATMMAVKVLGRQIEELEKGIEDLEKEIAKAHARSETSQSLSEIPGIGKLVASVIAASIPDPSVFRSGRDFAAWLGLTPRQNSTGGKQSLGAITKAGNRYIRKLLVLGATSLLNVVSKRKGGLRDWIVGLLAKKPARLVTVALANKLARIIWAMMKNGECFRTEMFAKA

SEQ ID NO: 172947 - protein, 377 aa, unidentified
MDNDSTVYVGLDVHKESITVAYAIDAGEVELMGKIGTTPTEIDRLCKRLRSKGRHIRVVYEAGPCGYGLYRRLVKQGFDCMVCAPSLIPRKPGERVKTDRRDAIKLARSLRAGDLSAVYVPSVEDEAFRDLARAWASARDDLRHARQRLKSFLLSHGVHYVGRADWGAAHRRWLSKYSFETAWRQLAFEEHRRTIEDRLAQCERLEVALREAVVEWGFYPAVLALQAMRGIQFITAVGMISELGDLSRFEHPRQLMAWLGITPSEHSSGGTRRQGGVTKAGNSYARKLLVEAAWSYRHPARVGKTLQPRHEGIPKAIIDRAWDAQLRLCKKYRKLATRGKNVNVAVVAVARELAGFIWDIGRLAMSLALPRRAAQQA

SEQ ID NO: 172948 - protein, 453 aa, unidentified
MKKDKKKEQKVVELDAFEQINHNAAGIDIGAEEFYVAVPKGRDTESVRRFPTFTADIHRLADWLAQCSVRTVAIESTGVYWIPLYEILEKRGFEVYLVNARHLKNVTGRKTDVLDCQWLQQLHTYGLLRASFRPSEQICAIRSLVRHRDMLVAYRSAHIQHMQKALNLMNVRLTNVLSDITGVTGMKIIRAIVSGERNRKVLASYRDAKCAKSEEEIEKSLEGNYKLEHLFVLKQALELYDFYDQQIKQCDQELETLYNEFEEPDQPGTPAPEKRKRKRRKNQPHFDLSESLYRMTGGIDLTKIDGLESLTVQEILSETGTDMSKWRTVKHFCSWLCLAPNNKITGGKVRSSHTPHTKNRASNAFRIAAQSLMKSKSALGAYCRRMAALHDAPTAITATAHKLAKIFYFMLKRREAYRPLATDYYEKEHRDKVVRSLQRRAATLGFRLETVTS

SEQ ID NO: 172949 - protein, 397 aa, unidentified
MKGFCISLDVSKGSSFYQGFKGFDEPITKPKKIEHNLEGFKELLKLKETIRKEYNEDCIVVFESTGVYHRSLQTYLDEHNFKYTIISPLLSAKVRKSDIRGTKTDAKDCESIAKVFYLKELRIYSKIDEIYDDLKEKSRYYDFLMDEMKRWKIEFRRLLDIIYPGFDRVYDDLYGDFIQAFLLEYSHPEIIRKRRLDTIAKFLEKHTCHKEAYCIRQAQTLKEYAENCASGCSSKSYLVRQFDTVIHNLNAQIKHLEIVLEEIVELAKALPNYDSIRSIPGIGNNLAARILAEIGDVNRFNNASQLVAYAGIDPQIYQSGQISGLHLKISKKGNKKLRCLLYLAVTCMIKTSRNTVIVDFYKKKKADGLASKSALVASMNKLVRIIYSLCKNGCLFK

SEQ ID NO: 172950 - protein, 413 aa, unidentified
MFKIFRKNCCGLDVHKTWIYACIGITDANGRTVYKQARFSSFTKGLNELAEWLAKYNCKDVCLESSGKFWIPVFNILEKTCFVTLAHPKYTKPQKGNKTDRKDAKWICDLFMCDMIKPSFIPGLEIRQLRDLMRYRTKLTNMKTSEKNRALNCLTVSNLKLDDVFSDVFGKSSTSIIQYLLEHPGESFDVRPFIHARCKTPVEEIQAAVEGAISVPQAIKLRQCLNHINEIEKHREEINLEIQALAEPFSPVLELLRTIPGLDTQPITAIAILSEIGPDMSVFPTSKHFISWAGSCPRNDRSARRTKSTRISRAGQSLKPLLVQIANALLRSKEHPEFKNRYRRIKANRGHKKAIIAICKMLLTAIWNVLSKVEPYSAKGYLEPKPAKEEKVLTQSQALDLLRKRGYTIIDSA

SEQ ID NO: 172951 - protein, 266 aa, unidentified
MTSSKYIGMDVHKESMSIAVRNAAGKIVMESVIETKANMILEFIDGLRGDVHVTLEEGTWSAWLYDLLKPHVTELVVCDPRRNALLKEGNQNDRVDARKLAELLQNNQLRPVYHGDHGLRTLKELVRSYLTISKDLSRVMTRVKAIYRSWGIPCSGTQVYSARHRAEWLGKIREPGVRRRGEHSYQQLDALRLLRLEVRKDLLAESKKHQVWKRLGQIPCVGPIRAAVLLGIVQTAHRFRTNRQLWTYSGLGIEVHSSADHQVVKG

SEQ ID NO: 172952 - protein, 502 aa, unidentified
MTEYSTCTVGIDLGDRKSVACIYSPGVVVDWFEFAMTPDGVRAAFAGKGYRTVAMEAGAQSGWVTRLLQDLGYKPLVANPRKLKAISANERKSDRNDALILAKLVTADASLLHPIEHRSEARELGMTVLRSRDTLVRTRTKLISTVRAMCKGVGARLKSGGADGFASREAEVPEVLAPATAGLFAALRVLNEQIAVYDTQLEVMLETQFPEGRLVRQVRGVGPVTALAFVLTIEDPKRFPDGRTAAAYLGLVPRRDQSGAVDKQLSISKTGNTFVRRLLTQCAQYILGPLGHDCDLRRWGHTLMERGGKSAKKRAITATARKLVVLLFRLWKRDEVWIPLYNADSSSAPPADADRPKPAVLADCACDFDDTGDRGRRRIDCSATDGSDPSMHQPQAGQPKSANRSVGNGTTSSAKKAPKKNPARHAGLPAPHPATANGDRGGPKPGDGVAPSPGPTTPSSAAGSHGGPQNKDRGPVRPATCVGPQPPRGKLTPRSEKDHPHP

SEQ ID NO: 172953 - protein, 348 aa, unidentified
MALTIVETRAVTGGVDTHADTHVAAALDPVGGLLGVREFPATTAGYAGLLGWLGGFGTVCLVGIEGTGSYGAGLARHITAAGIRIVEVDRSDRQDRRRQGKSDPLDAVSAARAAQSGRARGAPKGRDGAVEAIRALMVAKRSAAGERTRTINQARALILTGPDDLRARLTRHAPAALVTALASMRPRPGDTVGYATRIALRELGRRAQFLDSQIERLDELIVPLVTARAPGLLALYGIGPNTAALLLIAAGDHPGRLRSEAAWAHLCGVAPIPASSGKTIRHRLNPGGDRQANHALWRIVFTRLGSHPATRAYAERRTGEGKSKAEIIRCLKRYVAREVYPHLRPQAG

SEQ ID NO: 172954 - protein, 370 aa, unidentified
MMGWTPRRRHRCAKVEVSSTTLREASVSEVSIIGLDIAKHVFHAHGADERGRVIFSKRIGRGKLLDFFAAQPSCTVALEACGGAHHWARQLTQLGHDVRLIPPAYVKAFVKRQKNDAIDAEAICEAAQRPSMRFVAVKSEEQQAAGLVFRTRDLLVRQRTQLINAIRGHLTEYGWIAPKGPSHVAMLADLIEEDEMANALPEAAHAMFRLMLDLLAGLNGKIADLDKEIARRAREDEVSRRLMTVPGIGPISATAIAALAPPVETFAKGRDFAAWLGLTPLQRSTGGKQKLGATSKMGERTLRRLLIIGSSAVVQQASKRGAPKGSWLEQMLARKPRMLVTVALANKMARIVWALLVKQENYRAPVAAKA

SEQ ID NO: 172955 - protein, 328 aa, unidentified
MCTLGIDVSKNKIDLCLLTAGHGGKKKHKVLTNEPAVARKVVDWLNAQRCVPESVTVVLEATGIYHENLAYGLHEAGVSVCMANPCRVREFAHGMDILNKNDAVDAFVLACYGELKSPAVWVPPSPEVRKLRALLRQRDALREDVQRTVNRLEKANSTSTPQEVIRSLERTKSWLNEELARIEKLITDHTDNDPGLKADLDLLKSIKGVKDQVGREMLALLKDGTFKSASQVAAYLGLTPVEKTSGSSVRGRPHMSKTGPSGVRAKLYVAALTASRWNKQAKAIYERLVAKGKAKKAALGAVMRKLVHLCFGVLKTRLPWDENYVATA

SEQ ID NO: 172956 - protein, 390 aa, unidentified
MTKRKTETVNDLSRCLDPLDMDATVIAVIEMSQSSWLVAGIVPGVERQPLKKIAIDEHALLTLLSRWREEAEKKGHKITRVTVAFEAGHDGFWLARRLATLGIEVHVIHASSVAVTREHRRAKTDRLDTELLKRGFLGWLRGERGHCKMVVVPTLAEEDAKRPSRERETLVGEASRIITRLKAAFVRLGIRSFNPKLKAAAERLGTLRTPEGEPIPPNTLAALKRDLERHQIIKRQIREIEQTRLDRLAQAPAKGPHAMVLLLARVVGIGVETADMLVQEVLSRNMRDRRAVARYAGLTGSPDESGAKRREKGLARSGNARVRRGMIQLAWRFLWLQKDSALAEWYRQRTQTAPATRKTLIVALARKLLIALWRLVHDGIVPNGVQMRPA

SEQ ID NO: 172957 - protein, 397 aa, unidentified
MYIVGIDIAKRKHEAAVIDGEGTVIIKPFSFTNNCSGYNRLLAMLAKAKLPLDEVSFAMEATGHYWLALFTRLQKEGFRVQVINPVQTNSIRSFYIRQAKTDPRDALLIAEVIRFGHFSESTLHPENIYELRELCRGRHAIVSMQADVKRKVVALLDQVFPEYETAFTNMFSDTSMAILQTCPTPKELSEMPLEELCHLIEVSSHKRFRMAKAQELQELARNSFGFAMAGDVFSTMIRLYAKHLDFLKQQVQEMDRKIAEIMDTLDTPITTITGIGPTLGAYILSEIGDINRFSSAAKLAAYAGIDPTMRQSGEYNGVRNRMSKRGSPYLRHAIWLAASSAVLHDPALKLYFQKKRDEGKPYMASVGHACRKMVSIIYAVMRDNKAYTPYIPNEISA

SEQ ID NO: 172958 - protein, 374 aa, unidentified
MGTQGITFVGMDAHKKAINVAMLLPGQLEPVEWQVANEPAAIRRLAKKLEREAPGEVRCCYEAGPCGYVLMRQLEAAGGVVCEVVAPSLIPVKPGERIKTDRRDAHKLARLLRSDDLTMVHPPTAADEAVRDLCRCREDARRDLLRTRHRLATFLLRRACLYTLTRRTWGQPYRAWLQGLKFEHAPDQVTLADYVTGIEQLEQRLASLDQQLAGFAEQAPYREPVAWLRCFRGIDTVTAIALVSELHDFRRFETARALMAYLGLVPSEYSSGEQRRQGAITKAGNTHVRRLLIEAAWHYRHRPHVGVALRQRRQGQPSAIIAIADRAQHRLYHRFHKLIQRGKPSPKVVVAIARELVGFVWAALYPAASGASAR

SEQ ID NO: 172959 - protein, 325 aa, unidentified
MQGKEVSEQETRNCTAGIDVSKSWLDAHVLPVAQSLRVANTTAGLRQLKRWLLRLKVERVVVEATGKWHRQAVRSLRASAITIGVVDPYRVRMFAKAQGIVAKTDRLDAKVLAMFAAVMSFDIRQGVPQALEAMQELVTARAGAVDEQVALKNQRSAAEQPFLKRQLERRIHQLDTHIQAIEKECLRQIKADPALARRFAILTSVPSFGPVVAITLIACLGELGSLSDKQVAALGGLAPVADDSGQRIGPRVIWGGRATVRRILYLAAVSAKSCNNDMKPFYQRLIANGKKPKQALIAVARKLLVLANLLIAKDRLWMQSAPKSA

SEQ ID NO: 172960 - protein, 354 aa, unidentified
MSQTPSTAIAVIGIDIGKNSFHVVGHDTRGAVVLRQKWSRGQVEARLANMPPCLIGMEACVGAHHLSRKLASLGHDARLMPAKYVRPYSKGPKNDFNDAEAIAEAVQRPTMKFVATKTAEQLDLQALHRVRERLVSQRTGIINQIRAFMLERGIAVRQGIGFLRTELPTILATRTDALSPRMLCVIEELAGDWRRLDQRIDRLSGEIEALARQDQACSRLMTVPGIGPIISSAMVAAIGTGDVFSKGRDFGAWLGLVPKQISTGDRTILGKISRRGNRYLRVLFVQAAWVVLVRIKNWERYGLRSWIEAAKKRLHHNVLAIALANKLARIAWAVLAKGRAFELTRTNDAGVRPA

SEQ ID NO: 172961 - protein, 408 aa, unidentified
MQVTFGIDVSKSTSTVCELIGESKNELTITNNRPGFIQLLHELTAFSKHPQIIFEATGVYSRTLQSFLEDYGYDYVILNPLKAKKEMDMGLRHNKTDKTDAYHLALIQRLYHHPINQLQSQTYKQLNALSRFYDQLTADLVMAKNRLHQALQSTFPEIENLFSSAKGKNYWQIVVRYPHCDLVRREDKKQLINWLMSLKGIAFKHALRTADKLIELAYQAYPVVSCSSIEVEQVQYYAHRLLNLSDQRENLIARMVKLAKSLPNHDLENLESIPGFAQTTAVRVLAELGDLRRFSNPNKINAFIGIDPGRYQSGEMDSNLSITKHGNAVARKLLYQAIGQIDNAAKTNPCHIADYYESKKLSSQTKGFKKIAIASIHKLIRTIYALIINDQPYDYNVATHNQKDFSRN

SEQ ID NO: 172962 - protein, 399 aa, unidentified
MIAVGIDVSKSKSTVAILNGDGSIRAKPFDVHHVADELQALVDYIKRTSEPPTILMEPTSHYHYPLLKAFTEAELPVCLINPYQMKKYGDTELRKAKTDKRDSLRIAQYALEKSYSLIPYTPQDQKYEDLRFLSRQYSQRISTLTVAKVQLLSLLDETMPGITTILPLKSRDPDNCVLLRFIKRFKSFDVIRKMGKTRFLDSYQVLVKKTKDRFAGSKGLAIYELVLNSVTTRGENPLSAMTQDQCVDLVSTSQKAADEINLQMRIIAETMPEYKVLRSMAGVGNRLGPIILGEIGDIRRFHSGKALNAYAGNDAPPYQSGQFESRNRHISKRGNPALRKACFEVMQALKLTKPQDDPVYLFLLKKEQEGNPYNVAKMAGVDKFLRIYYARAMETLKQQ

SEQ ID NO: 172963 - protein, 313 aa, unidentified
MKKTICGVDVSKAKLDVCIEPGHRLASFNNDTAGIAELAAFCREHAVTLVVMEASGGYERQAFVELWEKGISCALTNPRNVRRYAEAMGILEKTDRIDASVIARFADAKNLVPTPLPSQAQQRLKALVTRLQQVTGDLTVQKQRRSGLVDNPEILASLDEVIALLKRQSRSLEGEIASMIDDDPLWAKLAEVWREVKGVAGRTIARLHAQLPEIGLLSNKAAGKLVGLAPIANDSGKRKGKRSTRGGRADVRSILFIVAAIAARYHPGLREFRDRLRKAGKEKMVIRVALARKLLVILNAKARDARAQYANAT

SEQ ID NO: 172964 - protein, 338 aa, unidentified
MNYVGVDLHKKSISVCVVSQSREVLQSRRFWCVEPDRIEAFFGELGPHEVVVEATVGYEWFLRLVEPHAQRAVLAHPGKLRVIAQSTRKSDKLDARVLAEFLALGMIPEAHRPTPRVRDHRSLVRHRQFVQQRITATKSKIRRVLWDYNADRADLFTRLGREFLDEFELSPADRFRIDQLREQLEFLQARLKDANEQLRSFAQEGADWERRARELLRTIPGVGEVTSEVVLAELGDASRFGSTKKAVAYAGLAPGYRESAGKRKELSIEKKGSRLLRWVLVESAWQVVRYDAHWRSRFEQLAKRTGKKKAITAIARRLLTVMVAILHSGEPYQTNPAV

SEQ ID NO: 172965 - protein, 410 aa, unidentified
MSEEAPEIIYVGLDWAAATHAVCVLSAVGKILVQFMIDHTAHGVATLIRKLAEFGDPADVHIGIERPNGRLVDLLLDAGHPIVPVSPNAIKTWRDGEVVSGAKSDAGDALVIAEYLRLRHHRLRPVAPYSAQTKALRTVVRTRDDLVAMRVSATNQLSALLDDHWPGAKVIFADVESAISLAFLRQYPSAASASRLGEKRLAAFLAKHGYSGRRPASELLARLRRAPAGTTDPILRPAITDAVIALVTVLEALNSAGKALDRSVITRLGEHPDAEIFTSLPRSGQINAAQVLAEWGDSRAAYDGPDAVAALAGATPVTKASGKQHAVHFRWACNKRFRRALTTFADNSRHQSPWAADIYARARARGHDHPHAVRILTRAWIRVIYRCWHDQRPYDPNLHGGTQRLLPKTA

SEQ ID NO: 172966 - protein, 441 aa, unidentified
MAAPVMEPNAAGVDIGATEIYIAVPPDRDMQPVRRFAAFTEDLKAAADWLERCRIETVAMESTGLYWIPLFQILEARGMKVCLVNARHVKNVPGRKTDVSDCQWLQYLHAVGLLRASFRPSGQVCAVRSLMRYRESLVGMAAVHLQHMQKALDQMNLQLHHVISDLSGTTGMAILDAILGGERNPLKLAQLRDPRIKASPETIAKSLVGDYRREHLFTLRQSVTAYRSYQQLLACCDVEIEQMLGEFSDGAGPDTPVLADPKDRHRPRRNEMKFDLRGHLYRIFGVDLTEVPGLNALTAHTLLTEVGPDLSAFPNVGAFASWMGLCPDNRVSGGKVLSSRTRKVNNRVARALRMAAQSLFRSQSWLGQYYRRMRAKLGAPKAITASAHKLARIVFHMLTNPHAYDETVFAQQEIQNQHRLQQKLLQQAKKYGFQLIAITQN

SEQ ID NO: 172967 - protein, 361 aa, unidentified
MEKASSQVGKINMPVDEVTMTQILSFVGVDIASTSFMGCAGTAPWKVTVKPAKFENVEDGFISFLGWLKEHNLMPETTVVCMEATGVYSEGLAYFLYASGYTVAVEPPLNIQRKFPVNGSKTDELDCQYIAEYACRYVDKLSFWKPRAEILEQVKLLLTTRQHFSVQLTGHKNALHAVNRKKVSSALAKQVHQNMIEQITKHIKSIDQEIRRLIESDPTFKQTVLLLLSVPGIGLQLAAHLLIVMQETLDPKTLAAFIGICPIKHESGTSVYSAPTSRHYGPSVLRKLLYLAACSVRTHKKQFQQYFFRKVAEGKHKKLVLNNIQNKILKIACAVVRSQKPFVPNYVSVNPLVFQKTLTLS

SEQ ID NO: 172968 - protein, 482 aa, unidentified
MGHVGDIGESVATDIPFERVSTTTYLNQRDIPIEIMEDVMAKFKQSKLELIHPNAAGIDIGSASHFVAVPPDRDNKPVREFKSFTADLNGLADWLEACEIDTVAMESTGVYWIPLYELLESRGLTVYLVNARHVRNVSGRKSDVLDCQWLQQLMSFGLMSGAFRPKDEICALRAISRQRDMLIRYQARHVQHMQKALAQMNIQLANVISDIVGETGQKIVRAIITGERDGHILANLKSNRIRAGKDEIEKSLVGNWREEHLFALKQAMSLYDAYSERLTECDRQLETMLAALQVHKVEICQKKRRSNVKNAPKFDLRAHLIGMCGVDLTRIDGIEVTTAMKVLSEVGADMSRFKSAKQFASWLGLCPGTKISGGKVLSGASKRTANRAAQALRMAAVSLKSSQSALGAYYRRLCGRLDKAKAITATAHKLARLIYTMLTKGTEYVDKGQEYYEERYRQRVLHHLTVRARKLGFNLTPVPEAT

SEQ ID NO: 172969 - protein, 415 aa, unidentified
MVEVIVERCAGLDVHKDTVMACVRRPGDGTRRGQEVREFRTWTSSLRELRAWLAAEDVTQVAMEATGVYWRPVWAELETLDAVELLLVNAHHVKNLPGRKTDVADACWLAQLLECGLLRGSFVPPPVISRLRDLTRYRTKLVQDRVREIQRVQKVLETAGIKLDSVVSDVTGKAARRMIDALVTGERDVEVMAEMALTRMRPKIAELQLALEGRFEDHHALMLSLHLAHIDQLTATIDRLDREVERELVPFDEQVQLLCTIPGIGPRTAEVVIAEIGVDMGRFPTAQHLASWAGLCPGHHESAGKHRSGRARKGDAALRVTLCEAAWSAARTRDTYLAAQFRRFSRRMGKRNEGKAIFAVAHTMIVIIWHVLANNVAYDELGGDYFDQRDTETETRRHVAALRRLGHDVNLTPAA

SEQ ID NO: 172970 - protein, 354 aa, unidentified
MGGLKHQEKRSMDHFAGLDVSVKETSLCIVDGTGKIVREVKVASEPDTLLAVLTNSAYHFKRIGLEAGPLSQWLFTALAEADLPVICVETRHMRAVLKAQINKTDRNDARGIAQMMRVGLYRPVHVKTLRSQKLRMLLIHRKLLQSKAIAVENDLRATLRNFGLKIGIVGTAGFEARIKELVENVADLTVLVEPLLVVRRALREQIGVLHRRLLAIVRDDDVCRRLMTVPGVGPVVALTYRATVDVPARFRKSKSVGAVFGLTCSRDQSGERDRPGAISRCGDEMMRAMLYEAAQAMLLRSAKWSWLKAWAMQIARRRGMKRAIVALARRLAVILHRIWVDGTEFRWTRETAVA

SEQ ID NO: 172971 - protein, 401 aa, unidentified
MKYVLAIDVAKNKSMVSLFASGGVAFIEPYEINHSLSDFKNIVERIKDLDISDDEVTVFMESTSTFHYPVKRYFKEETNCEVMVINPLHSAAHKRNLRKTKTDKQDCYNLADLYFTGKVKNYNDHEQYYLNLNVLARQYDFLLFDNVRFKNRYKTLVNLCFPEYENLFKGQLIYSGTALSFIEKYPHPDIIKETRVDALSNFMAKLNNRHENYYLRKANSIKEVAKVSYPSVSKDDDIVTNLVTTTRMLKYQIKEIEQLREIIISKAKECYLFETINSIFGFGELTTALVIAELKDINRFKNIKELTAYCGLDPSIKQSGSSVNGKGHISKTGNSYIRRILFNTIQNIIMQASRSNKENEILLYYRKKRNEGKHHYVAVISCTTKLLRLILAKCKNIQNNM

SEQ ID NO: 172972 - protein, 408 aa, unidentified
MNQDSGFDIWCGLDVGKTGHHACPLDAAGRKVFDKPLPQDQKRLEELFDKLQTHGRVLVIVDQPNTIGALPIAVARSMGIQVAYLPGLAMRRAADLYPGNAKTDARDAFVIADTARTMPHTLRRVDAGEETLAELKVLVGFDEDLAAEATRLSNRIRGLLTQIHPALERVVGPRLTTKQGLAVIEQLGGPQAMAAASKSKLLRVISKAYPRGAQEFADAITTALAEQTVIVAGTAAAEQVLPQLAASLRQTLDQRHALAAQIEQVVDAHPLAEVLTSMPGVGVRTAARILLDVGDASQFPTAGHLAAYAGLAPVTRRSGTSIRGEFPARAGNKHLKRALFLSAFAALRSDPTSKAYYDRKRAQGKKHNAALICLSRRRCDVLFAMLKNREPYRAPTPTREPSPLPLAA

SEQ ID NO: 172973 - protein, 311 aa, unidentified
MTHDTIGIDISKLHFDAHRRATGSHARFDNTAAGFRAFSHWIGADHPDLVVFEPTGPYHRDFEAAFAGRLPLAKVNPLQARRFAQSQGTRAKTDAVDAAMLARMGRALELVPDRPAEEIQTVLRELRVARSGLVRDRTALMNRLSAARLPLVRRLVKARLAQAERQIATLDAEIDGHLEACPKRRRAAQILTSIPGIGRITARSILAECPEIGTLRHKQIAALAGLAPMTRQSGTWCGKARIEGGRRHLREALFMPALVAMKKNPELSAKYDQMRAAGKPHKVALTALMRKLIQLANTLIREDRTWHPKCA

SEQ ID NO: 172974 - protein, 413 aa, unidentified
MDVVYRCCAGIDVHKERVLVNLRRKGVEGKANLEEVRTYATMTRDLLDLCEWLQSEGCTHIAMESTGVYWKPIYNILGDSFQVILVNARHMKALPGRKSDVMDCQWIAQLLQHGLLKGSFIPSEPIRQLRDLTRQRRKLVDQRAAAINRIQKVLEDANIQLASVASDVTGKSGWAMLTRIVEGETDPTALADLALRRLKSKKPALQRALDGRITDHHRFLLRQHMRQIRFLEQMIGEYEKRIEEIVRPFEGAIPLLDTIPGINQTAAVAILAEIGPDMRQFPDHRHLCSWAGICPGNNESAGKHKSGVTRKGSKYLRAVLVECAWAASRTKDTYFRAQFRRIASRRGTKRALVALAHTMLTVVYHVLRDGMIYQELGVDFFDRLNHGRLRSYYVKRLKSLGYTVEIKESPTAA

SEQ ID NO: 172975 - protein, 426 aa, unidentified
MKSNTQNAKIEAITETTLVLGSETHYARAFDFRGIEYSKKPFKFSNNEAGFMTFKAWILNIREKHGKDKVVPGMEPTGHYWFNLGKFLQDNEMKPVLVNPHHVKKSKELDDNNPTKNDRKDPKVIAGLVREGRYMIPYLPDGVYADLRTASNMRFQLQAELTRIQNRISRWFNIYFPEYKTVYGQPDAKSGMLILKIAPLPEDILTLGIDGVNQIWRNAKLRAVGKARAKTLIEAAEHSVGSKEGALSARMEIRMLLEDYESRNVRLQEVMALIEELVKQIPMAEKLLEIKGVGIKTVSGFLAEVGDISRFDNPKELQKLAGLALVENSSGKHKGETTISRRGRKRLRYLLFEVAMSLVAKNPEFRELHVYYTTRKRNPLKKMQSLMAVATKLIRVFYAMLTKGVDYDPKKMISDIKRPAVYLQAA

SEQ ID NO: 172976 - protein, 371 aa, unidentified
MFHSDYTIGCDAHKHFSLFAVLGGNGDPAQRTRVDHVPGAIGAFLSQFPESTPVALETVGNWYWIVDEIEQAGCIPLLAHAAKAKVMMGNVHKTDKLDAQGLATLLYLGKLPSVWIPPAEVRDERELPRTRMALSKVRTMLKNRMHSTLAKYALSLDTQSDIYAPKWRPQLMQLICSFPDETRRCMEQELELLDQVQEQIHRLEARIVERVQMTPTIQLIQSLPGPAKILSIVIDREVGSSDRFPSPHHFASYSGLVPKLSASAGRAHYGHMVKQCNTYLKWAFIEAANVIVAHRDHPNWRRKYVVHLYESTRRRKGHSVAVGATARYLAESTYWVLKKSEPYREPPHWAPSGKRSPISLSQEQARAQHGS

SEQ ID NO: 172977 - protein, 427 aa, unidentified
MAYRVAGIDVHKRMLAVVVTDIAVEGEYQFQRRMIGTSPGQLRALAAWLLEHEVEEVVMESTAQYWRPVWETLERYWQPRRRAREGAGPVSGTLHLAQALSNRGARGRKQDFPDAERLVRRLVAQELTLSFVPEAEQRLWRTVTRRKYQLTCNRVQLQNRLECLLEEAHLKLSSLVSDLLGASARRMLQAVADGNTSPAAVAALASQRLRATPEQLCDALGACTDLHPVYRRLLHMALDELRLIEEQIRQLDQELAHLLAVHQPAVQRLAAVPGLGVDSAQQIIAEVGPTAATFPSPKHLSSWVGACPGNEESAGVNYSRRSPNGNRQMRRLLNQAANAAVKTKGSIFELVYRRLVVRLGHAQTIGAIAHRLCRLVWKILHESVVYEERGPAVTKQRAHRRAAKMIRELRSLGYRVELAPSPSGTPA

SEQ ID NO: 172978 - protein, 354 aa, unidentified
MLYLGCDVHKNYTTVSFVDENGNTRETRSFFNNIDELKHLLSLFPEEEFSAVLEAGLNWGVIYDMLDSLSEVKNVSLAHPPKVKAIASAKIKTDKIDSKILGQLLKANLIPEVWVPCKETRLLKDIVRFRAFNVKIKTMIKNRIHDILRKSHINPPEVKDIFGKYGRMWLEEIELSDERADKLLRYHLKLKGIFEEMETELKKWINKEMKTNEDLRLIKTIPGIREVFGPIIVLEIDDINRFPDPAHLHSYSGLVPSTHVSGNTSYHGRLIRGNRWLRWAFIEGAHTSVRVSPYFREYYGRVRRKAGTQAASVASGRKLATIVYKVLKEKRSYIENKIGRLPSVRYSGGISSRS

SEQ ID NO: 172979 - protein, 338 aa, unidentified
MAITTTIGIDLGKSSFHAIGHDSSGKETFRKKLSRTKLLQMLSVHEPVNVAMESCGGSHWLARKCKSYGHVVKLIPAQYVKPYVKTNKNDFIDADAIAEASTRPSMRFTSPKAEEAQVASMIRKIRSSFMKERTACMNRIGAMLLEFGLSLPRGHSHLKKLFAWIELQNEVLPNSLICELKAQVEYYQYLSEKIESQEKKLRLINKEDIRYNLLQTIPGVGPLTAACCVASVADPKDFSNGRNFAAWIGLVPHQHSTGGKNRLLGISKRGNSELRELFIHAARSILKRTETAEKHFGEWVVNLKRTKPFNVAVVALANKLARIAWSVMVTNKEFSLKI

SEQ ID NO: 172980 - protein, 333 aa, unidentified
MSLEQSSVCVVDASGKIIREGKVASEPQPLIDWFGALGFDLVRIGLEAGPLSQWLYAGMKQAGLAVELLETRHVRDAFKAMPVKSDRNDARNIAQLMRLGWFRPVHCKSISAQEVRAMLTARKLVQSKLRDIEMSLRGTLRGFGLKVGNTTLTRFAARIRELVGENATLQVIAESLLAVHAVLLREFRGFEKRLRLMARCNVEAQLLMSAPGVGAIVSLTVASAIDDPARFKSSKQVGAHFGMTPKKYQSGETDITGRISKIGDKAVRTALYQAAHIVLTRPVKGSALKSWAMRLAKRVGMRKAKVALARKLAVILHRMLADRKPFAFAATAA

SEQ ID NO: 172981 - protein, 311 aa, unidentified
MPANADPHYVGLDISKDQLDYCLSETDEGFLANTSEARAGFIKQLRLLGSARVVCEASGGYEKIVVAELLEAGIEVCVVQPGRVRAFAYAEGLLAKTDRIDARLLRRYGQKVQLRLAEPIAAVLATLRELLEHRRQLTTQLSELEGRLPLAGPTRAKLLGRQRAFLRKQIERVEKMIDQHIDRDPDLRHKSERLQQIKGVGPILASTLLAYVPELGEIESLQLSALIGVAPHPKDSGKTRAPRHIRGGRAQVRRVLYMAALAAARSNPILAVFYQRLLANGKPAKVCLVAVMRKLVCLMNRLIQEPHFVLV

SEQ ID NO: 172982 - protein, 328 aa, unidentified
MTKRTTICAGIDTGKRKLDVGLDGSGKQLQVENTPEGHKILLAWLRQHRVKRVGIEASGGYEQPVVAELRRKRFVVVVFQPAQVRAYAKFHLQRAKNDKIDAALIAACTAAVRKIYAAPDPRLLPFAEQLTMIDQINEDTARLKNRIESCRNAQIKKLWKEDIARLEKREKAELKALVASIRKHPDLAKRLGLINSVHGIGLPTAVAILVRLPEIGRITREQAVALAGLAPYDDDSGEQVGVRHIEGGRKRLRRALYTASLAASFRWNQQLIQLYQRLTAAGKEHKRALVACARKMLIFANTVVARGTPWCDEPLAVKASMAGSLSVS

SEQ ID NO: 172983 - protein, 368 aa, unidentified
MKSVNVNPKVSVKGLILGIDLGKYKSVVCVYEPAEPSWQLTSFTTNREELVKVLEKHRPAVVVIEACALCGWVRDLCAERGLACKVANTSSEAWKFKHTKRKTDKDDALRLAQLEALGQLPTTTIPPKPVREWRALIAFRQKLVGRRTAVQNRLRSILVGQGLTAPRGAKAWSEPGLQGIGQFARPLAECGPEDLWRGMLDLALTDYRQIGALVVQAEKRLDALGKVNDDVKRLQTIDGVGPRTAEVVTAYLHEPKRFQTGKQVSAYAGLVPRQYQSGETDHRGRISKRGPALLRKLLVECTWCLLRYNSWARSIWQRLTRNGKVRRKQAVVALARKLLVRCWAMLRDGTEWRDDPAGAVARVMGVPK

SEQ ID NO: 172984 - protein, 346 aa, unidentified
MKILALDLGKYKTVGCDYEAESGAHQFKRGFTTPAGLTSMVQEVKPDRVVIEICSIAGWVCDLLWSLGIEVQVANTSDDAWRWRKVKQKDDRRDALKSARLSAVNQLREVYIPAIEVRQWRALITYRQQLVRRRTKIKNHIRDLLLREGQILGRGSSCWSQLGLKQLEEQARPFNECGAAELWRGELQVELEQLKEIQRQVAVVTVQLDKIGAGEARVQLLRTVPGVGPRLAEAIVALLDQPQRFRKASQVSGYIGMVPKALDSGETERRGHITRQGSRLVRSLLVEVAWAGLRHNVWVRQTYQRLSGGKKARKKIAIVAVGRKLLVKCWAMLRDNRAWDWQPQIT

SEQ ID NO: 172985 - protein, 406 aa, unidentified
MTSVFCGIDWATDHHDIALLDETGTLLAKLRIDDNPQGLTQLLDLLAHHGDKPNNPIPVAIETSHGLLVACLRATGRPIYVINPLTAARYRDRYALSRKKSDHLDAKVLAHILRTDPTEHRPLPADSHLAQAITVLARAQQDAVWDRVQTGNRLRSHLREYFPAFLTVFRHFREGLASPVSRTLLAAASTPTQAAQLTRPQLRAILKKAGRQREITGEVERLHGLLREPQMHQGPLVEQAMGIKTLALLRQFEAACTSADELEAAVVDAFTTHEDAEIITSFPGLGHLTGARVLAELGDDHTRFATARALKAYAGSAPITRSSGRKTTVLARHIKNQRLASAGYIWAFAALTASAGARAHYDRRRTAEERHVAAQRNLFNRLLGCLHHCLTHHIPYDEQTAFPDNA

SEQ ID NO: 172986 - protein, 321 aa, unidentified
MNKSTIFVGIDISKDVFDVYDFEEGHFQFSNDEKGFSLFRKQLTSDHWCVMEATGCYHQRLAIDLFEKGLRVSVINPLIIKRFIQMKLNQVKTDRSDAKMICRYGEEQALDLWSPEPDYIVECKTLQGVVRLYFKQRTALKNTLHSMSTSKRGKGKLTRSIVRQLKCLDKEISLLESEIENLIRAHEQDLFTRLNTIPGVGKKTSMLLIVSTNGFRDFESSRQLSSYFGLAPNERSSGSSIRGKSRISKMGDPLVRNHLFLCSFTACVHNPQCKALFDRIVLKGKSKKLALIAVCNKLIKQAYGIAKSGLDYDRNYVGRLS

SEQ ID NO: 172987 - protein, 421 aa, unidentified
MKPNGNLAEGPEYAALAAIDWADRKHFFQIGQADGKQVKSGKIDNTPEAIEEWVVGLEKQYEGRPIAVAIEQRRGAVVTMLAKYSILHIYPIHPLSLAKYRETWYPSHSKSDPGDTKLLWEMLAKHPERLDCLKPQEEPIRLLQGLTENRRELVDQKTAVSNRLRDGLKTCFPQILQWHKDPSSELVRETLLKWQDLEAMKQAKPAKLSAFYRQHGCNEQEIQTRLEQIQQAVVSTKDQAILGAAQPMIIVWVRQIQLLLQTVEAIEEKIETLAKAQKDWAIYDSLPGVGAALGPRLMVAMGTDRDRFQNAGEVQNFAGIAPVTKASGNSKLVSMRRACPQFTRQTFHEWAACSIPYSGWAKAYYDDAIQRGKKHHTIVRAIAFKWMRILFRCWKDGKPYDEAAYLARLAKHGSKYAVKIL

SEQ ID NO: 172988 - protein, 415 aa, unidentified
MEVLFSRCCGLDVHKSTITACVRIQDVGAKPRKIVRRFGAMTGDLRALANWLIEQGVTHVAMESTGVYWKPVWNILEGQFTLVLANAQHVKNVPGRKTDTKDSEWLAELLQHGLLAGSFVPPRLIRDLRDLTRTRAVLTQESSRLASRIQKVLEDANIKLASVASDTLGKSGQAMLEALIAGQDDPEQLADLALGTLRGKIPQLRRALEGLIREHHRFLLKRLLAQWRFVESETELIDQRLEQIGREEAPIAEAVARWDTVPGVDRIAAWGLVAEMGIDMEQFPSAKHAASWGGVCPGNHESAGKRLGGRTRKGNPWLRRILGQSAWAAARTKNTYVAVQFRRLAAKRGRKRAIVAVGHNLLVSGYYLLRKQCFYQDLGADYFDRLNAEGLKRYLVKRLESLGQKVTLEPRERIA

SEQ ID NO: 172989 - protein, 366 aa, unidentified
MSFARADGEGPTETEVHALMNVLIGVDPHKRSLAVAAVDEAKGELLERASFPQSRTGLRSLERWAKRFPERRWAVENAGGLGRHLAGRLAAASESVVDVPPKLSARVRVLSTGNARKNDGLDALATALAASRNEQLAPVDPEVGSEVLRLLSERREDLVAERTSALNRLHALLRDLVPGGVARMLSAERAARILRGIRPKGGASARLRRRLASEVLRDVRTLDRKIADLERRIEAEVEASGTTLTEIFGIGPILAARIIGTVGDVTRFPTKAHFASYCGTAPLEASSGEVVRHRLSLVGNRKLNYALHMIAICQARSDARGGAYYRKKIDEGKSRKEALRCLKRRVSDAVFRSLMADSLVPSSSAA

SEQ ID NO: 172990 - protein, 362 aa, unidentified
MNYVGIDIHKRYSVCVAQDERGRRLGEARIEGNLAAGFAQFFRSLGGKSRVVIEACWNWQAIYDRLERVEQIESISVANPYKTRLIAEAQIKTDRLDANWLATLLRGNFIAPVHVPGRQARARKNVLRQRLYWARLRTRIRNRTHALLDRQQEIQLPQCSDVFGARGRSFLRQLELAKPDAYLLGEDMELLELIGRQIKEQEKRIGAGNQHDALSRRLQSLPGMGLILSAVAAAEIDSIERFNSAEKLCAYAGLVPSTYSSGGNTWHGRMLPFCNKWLRWAFIEAAWVAVGCSGYFGSFYRRQRARGKKSNTAITIVARRMCRIAWSLLREGRDYNAQPPPKHATNSPVAPREDWRLRSATT

SEQ ID NO: 172991 - protein, 409 aa, unidentified
MQVMHVRCAGLDVHKKTVVACVLISLPEGGVERHGVTFGTMTPDILALSDWLKNCGVTHVAMESTGVYWRPIYQLLEGQFTLLVANAQQIHRMPGRKTDVTDAEWLADLLRHGLIAPSFVPSQPQRELRELTRHRSNVAGRRAQCINELHRTLEGTNIKLSSVATDITGVSATDMLQHLLAGQTDPDFLAELARGVLRKKIPQLRQALQGVVRAHQQLIMSQLLADIEACDEQILALNAEIAARLAEEQKLIERLDVITGVNRKVAEVVLAELGTDMKRFGSSKRAAAWGGMCPANRQSGGRSYPARSRFGDKYLKSALIEAGRAAGRSKGTYLGAQFRRIAARKGSNRAALAVGHSILTICYHMIDRGTEFIELGADYFDRRNPERVKERLVAKLEKLGYKVSLEKAA

SEQ ID NO: 172992 - protein, 360 aa, unidentified
MAKSILAGLREFVSGIGEELVWIGVDVHKARYSAAIKLADGRSRTWSCPADPEGFVKQVMGFGLKVAQMAYEAGPTGFGLARALEAAGLPVLVVAPSRVVRPVSSGAKTDRLDCLKLAEYAMRGMLKPIAIPSETEEAERSLVRRRHRVVDEVRRTKQRIKSLLLQFGCPEPRGLKNWSHKAVVELKELELPSVTGLTLASLIRELEWHQLELRQLDGHIDEVLSAEKHQEEVACLRSVPGVGPGVARAFRLELYRPDRFRRAEEVASYLGLAPMVRHSGQGKAQGRIRPVGQKRLRSLLIEAAWVWKSKDDYAAAWYGKLLSRHGLPQKAITALARKLAITLWRLSLEKRPYRPKEIVA

SEQ ID NO: 172993 - protein, 462 aa, unidentified
MPICKNKKSSPTRKRAQRVNVLTIKTKHITQKPLTIGELMGYFIGLDVSDASTNVCILDKTGVIIKKFMTATDPTSLDSVFHQLNMPIDKIGLETGPKSNWIVRELRKKGWTVVLQDSFKMAKLIETKVNKTDDNDAHLIAETTLAGSLIPGFLNMGVHLKSPESEDIRTLIRTRQAILRQNIDIYNRVRGILKAYGKAIPVANPGAFSRVVSKAIEGMSFEVQLSLSSLIQPYDANIKLIDAMDKHLSILADRDETVQRLKTIPEVGNITALYLRTTIDDPLRFTDSRSVGAYFGLSPLQYSSGEKQQQGKISKRGDEIARSLLIGAANRILRPSAKPNALKTKGQELMKRCGKGKATVAIARKLAIIIHRIMVNKKTYIEKVQYLPKNKKDPIKLTIEEIQRLASLAEKTGYVEFRSAQHIKKLTTKFDSFNQSGSVNTNKLSRRFVNKHKRHKKESVCC

SEQ ID NO: 172994 - protein, 409 aa, unidentified
MIIVGVDWARSKHDLILMHPSGEVIRRMQVTHDAEGLDAIAAAIARHEPQPERVRIAIEMHDGALLCWLLQQGYTVFGINPKSAQRARDRYRPAGGKDDASDAFILADMLRTDRGTLRAIQPDSERTLELRSLVELRAARVHERTALFHRLRCRLEEWCPDLSRLCDDFTRIWQRRLLQRFPLQHDLHQAHGQTLHAFIRQHRLGEEAAQRIKATRQARPLPIPDALVTALKLDITHLLEQIERLTEAIDELNGMIQQKLDEHPDAQIFQSLPIKGTNTIATLLAGFGENREHAPRADQLAGAWGVAPLTIQSGKHRSVRRRHAADQTMNQALLHFAFNTAFTAGCWAKDFYRRKRDEGKAHYTALRCLAQRWLKILHRMWKDRVAYNEQLHRKNQQQTENQPISTTPA

SEQ ID NO: 172995 - protein, 388 aa, unidentified
MQVIGDRPEAASAIRTNLGAIFVSLELSQSTWLITSLSPGSGEKMSKHVVHGGDIAGLLERFARLQEKARARTGRNFPIIVIHEAGLDGFWIDRVLKNEGIESHIVDPASVATSRRRRRAKTDKIDGEALVRTLLAYKRGEPRVCAMVKAPTPEEEDRRRLCRERKVLITERVKHVNRLKGLLFSQGVCGYEPLRRNRRRRLDELRTGDGRPLPKHLKAQISRELDRLELLLEQIKVVETERDALLAAQQIAAPTSAAMLLAIKGIGPDFAAILWSEGLFRHFDNRRQIASYAGLAPTPWKSGSIDREQGVSKAGNPRLRTTLIQLAWLWLRHQPQSALALWFEERVVRNGGRLKKVTIVALARKLLVALWKYVTAGVVIEGAVMKVA

SEQ ID NO: 172996 - protein, 345 aa, unidentified
MDVAAIGIDLGKTTFHLVALDAAGHVIIRRKLTKPKLVALMATLPPALIGMEACGGAHHLGRLLQAQGHDARLIPAQFVKPFVKSQKNDFLDAEAIAEAVQRRSMRFVPIKTEEQLDMQTLHRARDRLVGCRTALINQVRAILLERGLIFAKGRGGMARLLPELLTANTEEISSSMRELLTASWEEWQSIQRHIDKLTDRIEAVAKQNEVCRQLSAVPGIGPLGATALVAAVADGSMFKRARDLSAWLGLVPQQRSTGGKTKLGGISKRGNPYLRRILVLGAQSARLNIDRERHPRLGKWLTQLEKRVHRNTAVVALANKLARIAWTILRLGRHYDPAFTPSAVA

SEQ ID NO: 172997 - protein, 349 aa, unidentified
MKQVTYVGLDVHKKSITAVFAPARTKSESMKVSNDPKGWNRLADRLKTFDIQAVYEASSCGFEVYDELTAREWSVAVVAPSLMPKSPKERKNKTDEKDAIELRSRLVAARVAGATLPTVWIPPVELREDRELVRRRLGLGASVCRVKTRILSLLQIHKVRDPEKSEWTQAHLKWLDGLCGEKGKLGAPVKRALESLLRELRFLLEEEKRLEKELEALAGEPRHQAQVEELRTVKGVGLLTAMTFLTELGDVRRFGNRRQLGNYLGLTPSSYESGEATDRKGHITRQGPPRIRKVLNQAAWSHIRWHPETKKSFGKVAARRGVKKAIVAVMRKLGIELWHRACAVVESAA

SEQ ID NO: 172998 - protein, 363 aa, unidentified
MTVQKRFIGIDMSKRSFEVAIVNNADSKILRKKYKATHKGRQVFISSLRKDDVVALETGNSSFVLAKLIQKQVECTVYVLNAGKLHIIFKSLKKTDKEDALRIAKFVQRIPEEELPTVTIPSDEEMAMRSSATEQIRVDRSRTQSINALHSLLWNSGITEYGRNDLKYKKNRDKVIENLPEEYRAQGIRLLKLIDVYEQCLGEIGEEQKEVLMKNKDETTISISMPGIGPKTAFVLLAYLGNMERFSNSAQVGYFSGFTPSVDMSGQQEHYGSITKRGPKQLRRVMNQAAWAAIRSQDGIILRDFYDRVRSTKGKKKAIVAVARKMLEILYVLHIRKELYQSPVVADHSRIIAKLKRYGLIFE

SEQ ID NO: 172999 - protein, 428 aa, unidentified
MTVKDCTNVKEFWQLKKKIRGSKDHLIVGIDVAKDDHKAFFGTANGKTLLKRLIFKNDIEGFEKLLARVKEMKVRHRLDELVLGVEPTANYHKALGDYLVKCGHMVVLVSGVSVKRNRELLDGRWDKNDTKDSANVADLISQGKCLYYEYAPLVLKDLRGLLSLKRRLKKQEHGLRIRIRNSLLAQYFPELDKYYRKWEPEILSVVRWCLDPSVVAGLEYDQFVSLVSPGRKNIRQQGRLEWIWKKAIDSIGCDAGEAAEFEAKVMVEELRHIREVIKETDAKIKDVCVKFPEYDYLLTIPGFGPDVSSKVLAAIGNPFRFNSGKQVLKMSGYDLSAKRSGKTSESAVPVISKKGKASLRYALYQAAFIASCKNKYFIAYYTNTLRGREREKGIKTKMKVKLAAKMLVIAWTLMKKKEPFDPGYLKID

SEQ ID NO: 173000 - protein, 410 aa, unidentified
MTETSIAQNAPILVAIDIAKARHEVFIAIPGKKRRRRLTILNQLNDFERLVASLTGYDLPVRVAFEATGNYHRAITYHLAAAGFEVKLVSSVSLARTREALHNSWDKNDPKDAQVILHMMQIGNTQFYHDPLQCGTNDIQELSKTHDIVSKSKTELWHRVLTHYLPLYFPEADCFHRSSRGDWFFAFLERYPSPHLISAIDRDAFIAEAWDVVGRKVAKERLLIDIYETAKTSVGLPVGPDSDAVGMFRLVLGEGRGLIAQRNQIERRAVELLKDLPDYQLLTSVPGIGPINALTILAEAGDLRRFKHHRQFLKFCGMDLATIQSGTFRGQTKLSKYGNARLRRTLWMAGQVAILQKTNSFRDKFERYIAKDRHNTHLRRKAYTAIAAKMARTVHGIIKNGEPYRPFFEG

SEQ ID NO: 173001 - protein, 281 aa, unidentified
MRYVGIDYHKRYSVLCATDERGQELKQRRISGNSATGFAQFFSELGEESKVVMEACWNWGWLYDLLAKIDGIDEVMLAHPYKTRLIAEAQIKTDRLDAQMLAKLLRGDLIAQSHAPSAATRARKHLLRQRLFWVRLRTMLRNRMHAILDRQQGLERPQLKNFFSRRGQTWLEEVQLPCAEDQPLLTQDLEVAELLEEKIKQLDRSIGQSQSEEEKLLESIPGIGPLFSSVIATEIDGVGRFNSATKLAAYAGVVPTTHTPAADAYSMVACSGSAINGCAGH

SEQ ID NO: 173002 - protein, 320 aa, unidentified
MMAQNDLVVVGIDVAKDKVDACIRRFTLWQTFPNTAQGHRKLVAWLRKYQVGKAVMEASGGYEREWRNVLHNAGIEVRIVDPKRVRSFAQSAGRLAKNDPIDAEMIAWFAETFSQAPGQIPDAAREELAALAKARKALVDVKIRLQAQDEHAAPEPARKAYARVSKSLAAEIDRLEAAISAKVKATPEFAERAEIIESVPGLAQATSAILIAGMPELGQVSDEVAAALIGLAPYDDDSGKRRGERYIKGGRRWVRNAIYMPCLGAATQYNPVLKAFYQRLLAKGKEPKVALVACMRKLIIILNTMLARRQKWNPGRHAMA

SEQ ID NO: 173003 - protein, 408 aa, unidentified
MNPLYVGIDVSSKSNVVYFMLPDGSKHCNFSVANSHTGSSQLVKRILSAMTSCSLNSVLIGLEATSVYGDNLVYFLREDAALARFNSKIHVLNPKQVSKFKEAYNDLPKNDLIDSFVIADCLRFGRINKEVYIGDYRYKALQNLTRARYFAVSNLIKEKQRFMNILFKKYSTMTQEKVFSDTFSTTALAVYDEFESAEALADMDLHELTAFIMEKGKNRFPNPNAVAKAIQKAARSSYRLPKTVNDSVNQVLSISITSIKALEAQIKEFDKAIATQMELLPNVLISIPGIGPVFSAGIMAEIGDINRFHNQAQLAKYAGLAWKQHQSGDFEAQTTRLINSGNRFLKYYLCEAVFSLVRCDKEYSDFYHLKYKEVNRYQHKRALALTARKFVRLVFRLLKDNRLYTSAE

SEQ ID NO: 173004 - protein, 350 aa, unidentified
MYAGIDVAKEELVVAVHPAVHPAVHPAVHVSDTAASAASAASERWSVANDEHGIRSLVRSLVERLGSESQALVVLEATGGYEIACVAALAAAGLPVVVVNPRQVRDFARATGQLAKTDRIDADVLALFGERVKPEIRSLPTEEARELDTMVARRRQLLEMLTAEKNRLHQIIAQAKGKSRVRRNTPVTHSLKCHIRYLEHEIEEADTGLGQRVRASALWREEDDLLRSVPGVGPVLSLTLLAELPELGHLSRREIAKLVGVAPLSRDSGTLRGHRTVYGGRASVRGVLYMGALVATKYNPVIRCFYERLLAAGKPKKLALVACMRKLLTILNAIARTRIAWNQDHHFVTT

SEQ ID NO: 173005 - protein, 426 aa, unidentified
MKKIDFLSTLFIGIDVSSSSNVVCVIDFNSTKHLQFSVSNNHIGAVKIVETLVSFLHKNKFKYLFIALESTSFYSIHIANFLSSEERLLAFNPYVYCLNPKMISNYRKSFIGMSKTDPLDAFIIADFARVGRINTQPWRGSQFLALQRLTRHRLHLVDSLTREKTYMVSNIFLKFSEFSVLKEEEHPFCSNYGSTAAAVLTEFLSTEDIVNIPVEELVDFICKKGKNRFSDPLHTATLLQEAARNSYRLDKCLYEPLTISIASSFNCIKAYETEIKALNTAIEKTIKGINTTEYQSLLSIPGIGPVYASGILAEIGSVSAFNSQDALAKYSGLTWTQHQSGNYSADDTQMSKAGNSYLRYYLIEAANSVKNNIPEYSAFYHKKFNEVKTHQHKRALALTSRKLIRLIFGLLANNQLYSAKRVNTTE

SEQ ID NO: 173006 - protein, 460 aa, unidentified
MKGISNTVFEEVRRNVAGIDVAWRADHYVCGPRREDGECEIAAFGTTTPELHRMRQWLQERQVESVAMESTSVYWIPAADVLEASGIEVVLVDTREVRMVPGRKSDVQDCQWLQKLHSCGLLHGAFRPPQAVAAVRSILREKESLQTMRTQTIQQMQKSLDQMNIRVHHAVSDIDGKTGTEIIKAIVGGERNPAKLASFRDKRCKKSEKEIADHLTGTWREEHLFTLGQAFKTMQFLDERIAEYDLKASQLFSSLAASAGTPDNPPPPPSPDKKLTAKERSDAAGKATVCQFMGFDMTLIPGIGYDTARIIASEMGTMFDRFPDERHFASYIGLAPSLGKSAGKNVRQKKWCKNTSRVGRVLRMAASTLYRSQTELGAFFRTVARRSDKKTAVKATARRMAHMIYRGVKYGKDYIDYGAQAYEARLRERTVKTVNRLIKSFNITNSEMTEAVALASLAIL

SEQ ID NO: 173007 - protein, 463 aa, unidentified
MAASELVVLLGCPVDPRLGLRSRIGVYHSQPENPRPNLQNQGESSMNEDGNTRGARRYVGLDIHKQYCVVAGVDREGRVLLQAVRVEHADLEGWLKKNLRASDHVVIESTTNAWHVYDLLFPLVERVVVANPIQVKQIAKARVKTDIRDTLILARLLAANLVPEVWVPPAHVREMRQLLSQRRQFVETHTQILNRMHSVAHRHHLQHERGKRFNEKNTLWQKDKRLSKVEQFQLELEMENRVYIEKQISRIGKEVAKMSHQKPWAQSMVYLMQLPGFGVITGMTVLAAIGEIQRFDSARHLASYSGLTPGLEQSGTKYREKGITKEGRKELRWALVEVAQRAVKSDPLWKHRFEGLQKRMHRNQAIVAVARRLLELVWYVLTRHQPYRHFSHERIAYKYLTWAWQMDEAARDGLTRQQFTRYYLMRLGIGHDLTRIALDPKHPRKISSEAELLAIRPELQHIE

SEQ ID NO: 173008 - protein, 386 aa, unidentified
MEGETFTPRDYDVFAGLDVDKKSIAATFSSQQGFIRSLHMPYSIDYLLNHVRKHFGDQKVAFVYEAGPTGYGLYDGLVAQGYRCLVAAPSMIPRAPGQRVKTNRLDSRGLSESLRGGQLKSIHVPSPIYRELRHLTQLRDTVVREAAAHKQRIKALLLLEGIGFPPATAGRQWTLRVKAQLRKLRCSRTVRFKLDQLLDSLEFCEKQVVSSTKEIRRFCKEDVELFQSIEYLMSIPGIGWIVASQLLARMGDWREIDNVRQLGSFLGLVPTENSTGDSVDRGSITRAGDGRLRSKMIQAAWSAIRQDGELREFYRSVCQRNPRGKGARIAIVAVARKLSTRIYAVLKKQRPYIVRKQVHSAPLTQEETSPQGTTRRCAEPGETDNS

SEQ ID NO: 173009 - protein, 415 aa, unidentified
MDVIVDRCAGLDVHKNTVMAAVRSPDGAGGRAEVVREFSTFTADLARLRDWLVEAGVTQVVMEATGVYWRPVWHVLDDHVGYELMLVNPRHVKNVPGRKTDAGDASWLTQLLECGLLRGSFVPTKDMARLRDLTRYRTKLIQERTREIQRVQKLLEDANIKLDSVITDVMGKSAREMLDALIAGQDDVEAMAQMARTRMRPKIPELRLALDGRFDDHHRLMLSMHLEHIDHLTAMITGLDAKVDELMAPFDEPATRLLSIPGVGKRTVETIVAEIGVDMSRFPTSGHLASWAGLCPGNDESAGKRRSGKARKGNEALRTAMCEAAWAASHTRDTYLSAQYRRFKRRMGTKSEGKAIFAVAHTMIVIVWHLLHDETVYAELGPDYFDKRNDADARRRYLVRELEKLGNAVTLEPAA

SEQ ID NO: 173010 - protein, 391 aa, unidentified
MIYVGIDVAKDKHDCFVTSSDGKVLFPVFTIQNNREGFDDLFSKIQSVSSEVSNIKVGLEATGHYSYNLLGYLIDKGLTTYVINPLHTNLYRKSLSLRKTKTDKVDARTIAMMLMSDVNLKSYSDTSYHNEALKSLTRYRFDKVQERARLKQSVSRLVTILFPELEKLVPSLHSASVYALLSELPSAEKIASCHLTHLTKLLENASKSRYRREKAIEIRDAARISIGSNMPAKSLELRHTLRLIGELDSEITEIESEIKRIMDQISSPILTIPGISYRMGAMILAEIGDFSRFDSPDKILAYAGASPSTYQSGQLKSSYSHMEKRGSRYLRFALINAAKYVCHWDETFGAYLQKKISEGKHYNVAITHAAKKLVRLIYAMEKSGMPYIKTA

SEQ ID NO: 173011 - protein, 338 aa, unidentified
MALYAGIDLHSNNNVIVIQDEQDNVVGRKCLPNDLKRVCPWLESYRKDLAGIVVESTYNWYWLVDGLMEQGYSVHLANTVAIQQYSGLKYRDDDSDARWLATLLRLGLLPEAHVYPRTERAIRDLLRKRSRFVRQATMNMLSIENLFARNQGQRLSANRVRQLTAEAVDATFEDANVALAIKSSLNVLDCLLEQIYTLEVAIRDQVRLRQSYKRLLTVPGIGEILAFTIMLETGDINRFDDVGNYVSYGRLVGSSHWTNGKRKGSGNTKNGNAFLCWAFMEAANFAIRYEPKICVYYQRKQAKTKRIIALKAVAHKLARACYHMIKEDVAFDITRAFG

SEQ ID NO: 173012 - protein, 320 aa, unidentified
METPRFVGIDVAKGELVVAALPGEDRWTVENDEQGIRTLVERLERETVALIVLEATGGYELRAVSALASASLPVVVVNPRQVRDFARSTGQLAKTDRIDARMLALFGERVRPEVRVLADEDQQALDELLTRRRQLIEMLSAERNRLGQPLGRGTKLVKKSLKSHITYLERELRVSDTDLAEMIRSSALWRERGDLLQSVPGVGRVVSLTLLAELPELGRLNRKEIAKLVGVAPLARDSGTMRGKRVVYGGRASVRAALYMGALVATKYNPVIRALYQRLLQAGKAKKLALVACMRKLLTILNAMAKNNERWRADTPLTTA

SEQ ID NO: 173013 - protein, 324 aa, unidentified
MHRQSIFNRKLRRAEVLRFFEKLPPCLVGMEACGGSHYWAREIAAFGHDERLIPPIYVKPFVKRGKTDAADAEAISEALTRKTMRFVPVKSADQQAAAMVLKTRALLVRQHTQAINALRAHLSEFGVIAAIGTATVVALIEIVRDEADMRLPKAAHFALAEIANQIEALTRQIEKLEREIVAEAKRDEDMRRLVTIPGVGAITAASIKALVPDPDGFKSSRHFAAWLGLTPKPHSSGGKERLGGISKMGNPMLRSLLVLGATSVLRRARGNANAPQWLIALLARRPFKVVAVALANKMARIIWALLTKGGTYRNTGPARGAASA

SEQ ID NO: 173014 - protein, 357 aa, unidentified
MLSSNVKYIGLDVHKEAIAIVVLNGAGKLVMESIVETKASALLDFLHGLRGELHVTLEEGTWAAWLYDVLKPHVQEIVVCNPRRNALLKEGSKGDKIDARKLAELLRSGMLRAVYHGENGLRTLRELARSYQVVSKDLKRVMNRVKALYRSWGIACTGTQVYTRRYRELWLNKIAQAGVRRRAELFYQQLDGLQVLRRMVRGELLAESRKHQSLKLLRQIPCIGPLRAALLLALMQTPHRFRTKRQLWTYSGLGVETHDSAQYRYVDGQLQRSRKPQQIRGLNHNHNHAMKEIFKSTAMSASHRAGPFQDFYAGLLAKGMKPEMAQLTLARKIATIALTLLKKGGCFDAKYLKPQAA

SEQ ID NO: 173015 - protein, 428 aa, unidentified
MEIKDRTRLEEFRQLKKEIRGSERHLIVGIDIAKDKHHAYFGTATGKTLLRRLVFENHKDGFEKLVTYVDAEKTKNALESVVFGLEPTANYHKPLAQYLIERSLTVVLVSPQAVKNNRQSLDGRWDKNDTKDSANVADLISQGKCLYYDYPCIELRDLRNLLSLKRRLKKQEHGAKVRIRNHLLALYFPEFDRYYARAGSEGLAIVKWCLDPSRIAGLEYDEFAHLVAPRIKTLGQAKRLKAIWELAVDSIGCEAGQAMDFEAKLMVEDLNQVKDSIGAVDDHVEEICLGFPEYNCLLTIPGFGPDVSAKVLGAIGSPFRFDNGKQVLKLAGYDLSASRSGNSSDRAVPVISKKGKASLRYALYQAAFIASIRNRRFIIYYTNKLRGREREKGIKTKMRVKLAAKMLIIAWTLMKNKEPFNPEYLNID

SEQ ID NO: 173016 - protein, 355 aa, unidentified
MSRDIKYIGMDVHKEATVIAVVNANGNLVMESIVETKAGSLLQFIHGLRGELHVTWEEGTWAAWLYDLLKPQAQVLVCDPRRNALLKEGNKSDKVDARKLADWLRTGMLRPVYHGENGLRTLRELGRSYQTISQDLNRVMNRLKALYRGWGIACAGTQVYAPRYREEWLQKIEHAGVRRRAELLYQQLDGLQALRRTLRPELLAESRKHKATKLLRQIPCIGPIRAARLLALMQTPHRFRSKRQLWTYCGLGIETRDSAQYRFVRGQLQRAKKPQQIRGLNRNHNHEMKEIFKGAATRASCGVGPLRDFYVALLDKGMKAEMARLTLARKIAAIALTLWKKEEPFDAEQLKTQAA

SEQ ID NO: 173017 - protein, 343 aa, unidentified
MELNTIGLDLAKNVFQVHAVAPTGKILVRQQLRRSAVLKFFGKQPKSLVGMEACASAHYWARELSALGHEVRLMPPPRVKAYVPRGKKNDAADAAAIAEAVTRPSMSFVPVKTVEQQSALMLHRTRRLLVEARTRTSNAIRGQLGELGICAAQGATGIAALLAIIDDAGDARLPEVARQALMALASHLRSCDAQVAAMDKTIAGWHSCSDESRRVATIPQIGPITASALVATAGEVNRFDNARQFAAWLGLVPSQNSSGGKASLGRITKSGDRYLRQLLVVSAIGMIRLVRKDPARSPWFARLLARKPPKLAAVALANKMARIAWVILARGESYRAPAAEAAA

SEQ ID NO: 173018 - protein, 413 aa, unidentified
MISLSNSLLVGIDVSLRDNKVRILHPNGDSLSKFVVNNSISGAKTLSDKITNIATNNNFDSIVIGLESTSVYGDPLVYFLKQDTVVNSFKTKIHVLNPTQVNKFKLMYPDLPKTDDIDAWVIAEHLRFGRINKEVYMDDKYKALQKLTRARFHTVQNLAREKNWFLNNLFLKFSSLAQEDIFSDRFGATCCSIIEEFFSVDEISYMPIEELVEFINKKGKGHFEDPDKIAAAVQKAARSSYRLPKTVTESVNQVLAVSYSAIRAYKEQLKILDKAIEEQIKLIPNTLTSIKGIGPVYSAGIVAEIGDINRFKDQAALAKFAGIAWTKYQSGNFTAANTHLIKSGNRYLRYYIMEATNKVRMHDPELKRFYELKYSQTPKTAHKRALALTARKFVRLVYALLHSNRLYIPPKEE

SEQ ID NO: 173019 - protein, 352 aa, unidentified
MNTQRKDWTGQTLYAGIDVHKVKWVITVRTRDTQLKTFVTVSDKEVLLKSFHNLFSGATIKAVYEAGCFGYHLADFLNANGIETIIVAPHTIPVAPGQFVKTDIIDSRKLAAELAKENISGIYLRPEENLYDRGLLRKRAQLVKRRIQLQHQIASDLRFYGLDSHITIRTYWSRWLITDLKGLSLPNKYYLEAFQMLVTEHEMIRGQILQLDRLLITIADSEKYRDQVKLLRTIPGFGVLSALTFIIEIGDIKRFTSAEKFASYLGLTPSEYSSGEQIHKGSLTGMGHSSLRALLVQIAWRSIKKDPVLLMKFQRLCAGKSKCRAIIPVAKSLANRLRRVLLSNEPYVIGVA

SEQ ID NO: 173020 - protein, 281 aa, unidentified
MTVIIGIDPHKATHTAVAIGCDEAELATGTIRATRQQVDKLLGWAAPFEQRTWAIESAGGLGYLLAQQLVDAGEHVLDVPATLASRVRVLGTGKSDKNDPNDARSVAIAALRSPGLRSVQAADHAELLRLLAKRNQDIGSLRTKLVCRLHAQIADISAGGFAKELNASDADGLLGSFEPRSPVEVTRHQWALELLEDIRHLDHQLKESHKRIKLAVRASGTSLTEVYGIGPVLACALIGYTGDVTRFASRDQFAAYNGTAPIEVSSGGRVVHRLSRRGTVS

SEQ ID NO: 173021 - protein, 348 aa, unidentified
MARILSIDLGKFKSVACFYQAPTEDHVFQTVPTRPQALHDLIVAYSPDRVVIEVGNQAGWVKDLCVGLEVPIEVANPNHEGWRWKNVKRKTDRDDALKLAKLSAVGQLPTVQLPDAATRQWRALITYRSKLVSRRTAIKNSIRSLLDRQGYWTTVGRGAWSMAGLKRLRELSGDLNEVEAHDLWRSQLSMELSALDQVQGMIDQVSQRLDAIGSQDARVERLRTIPGVGPRLAEVVVATLDDPHRFKSRREVAAYAGLVPRQFESGTMSRQGRITGSGSKLMRALLVEVSWMMKQHNPAMHQIATKVARGSKTRKKIAIIALARRLLIVCWAMLRDQTDWREPAAKAA

SEQ ID NO: 173022 - protein, 343 aa, unidentified
MQITTIGIDLAKNVFQVHGIDGHGKVVMARRLRRKQVIDFFGKIPSCLVGMEACATSHHWARELTGLGHTVRLVPPSYVKGYVKRSKNDAADAAAICEAVTRPSMRFVPVKTAEQQSILMLHRTRDLLIRQRIQLVNALRAHLAEFGLVAEKGREGVAELAAIVTDENNARALPPAMKRALQALLNQFAALQQQIGGLDRAIQSQHRASEMSRRLESIPGVGVIVATAIAATVTDPSAFKSGRDLAAWIGLVPRQNSTGGKQRLGGISKQGDRYLRRLLVNGATAVVRQARSHPEKHLWIMSLLAKKPAKKVAVAVANKMARIAWAIMAKGGTYRMPALSVAA

SEQ ID NO: 173023 - protein, 305 aa, unidentified
MALYGGIDLHSSSSHFGIIDDQDRRVFKKKLRNEPQLILKTLEPFKEELFGVVVESTFNWYWLVDLLMEEGYQVHLANPSAVKRYEGLKHSDDNHDAFWLAHLLRLGILPEGYIYPKEERPIRDLLRKRGHLMKLRTSVILSLQNIVERNCGCRINANTIKRIKENHVAPFLSGQEDLELSGSISKETIDFLTRKIRQIERSIETKVKLKEQFIYLQTICGIGKILSLTIMLETGSVERFPTVGDYVSYCRKVPTTWTSNGKRKGKGNKKNGNKYLAWAFSEAAELARRYDSNARAYYQRKAART

SEQ ID NO: 173024 - protein, 367 aa, unidentified
MQPTTFVGLDVHADSITVAIVPSEGPSAEVIKLSSDLMKVRRLFRRLSDNGPVRSCYEASGAGFVLQRVLARDGFHCEVIAPSLIPRRPGDHRKTDRLDAIMLARLYRSGHLTPVHVPTEDHEALRRLLRLRYTYHTYCTATMHRISGILRNHGHIFTQGKSTWTKKHRQWLASLRQILDGPLQTALAIELEHLEYLEAQQRSIDADLERCAQSDQFRAQTEALCCLRGVKTLTALTLVCEVDDVRRFRSPRTLMAYFGLVPSEHSSGNKEYRGSITKAGNIHVRRLLVEAAWNNRHRAGADLILNRRRQGQPPDIVAIALKAQHRLYKKFWHLDQRKHRHVAITAVARELCGFIWAILNQLQPSHH

SEQ ID NO: 173025 - protein, 346 aa, unidentified
MIVIGCDYHPSWQQICFLDTLTGESIEKKLEHASGEAEKYYRGLPGPALIGMESTGNCQWFVEMATTAGHDVWVGDAARIRASEVRQQKTDRRDAALILKLLMEGRFPRIWTPSGQEKDLRQLLIHRYKLVRIRTQVKNELQHLAMNQGVTKKRKLWSKAGEKVLRELPLKPWASRRREDLFQLREMLTGQIDLLDRSVVEVAEKSEKARLLMTQPGVGPITSMAFVLTMGDVNRFQRGKQVASYLGLIPREYSSGGHQRYGSISKQGNRFMRMLLVEAAQSAVRCDPGFRNEYLHRCHRKAKGIAKVAAARKLAVRLYWMLRTNRGYPEVVRVESSSRVPLVSES

SEQ ID NO: 173026 - protein, 319 aa, unidentified
MNPNPSPVYVGVDVAKARLDLDRPAPHHTVPNTAAGHATALTALAQVPGVHIVLEASGGYERAFVAALQQAGVPVTVTDPLRVRQFARSKGLRAKTDPLDARLLSAFGRAHQPAPTPPDTEAERRLAALVQRRRQWQALLQAEQSQAVGLRDKDLQQRSAKLQRLLTKELATLEAAIAAHLQASAALQERAAKLDALIGVGPATVAVMLGELPELGRLNRRQAAALAGVAPYDRQSGGWDGARHIAGGRTPVRNALYMAALSAARCKGPLRDFYQRLRQAGKAVKVALVAVMRKLVMLMNHVLKPENLKATPKNEPQPA

SEQ ID NO: 173027 - protein, 386 aa, unidentified
MQKLNDLSRCLTPLEPDGTLIAVIEMSQSSWLVAGIVPGIERQPLKKLKVDESTLLNLLHRWREEAEKAGHRIKRISVAFEAGRDGFWLARWLRARDIEAHVIHASSVAVSREHRRAKTDRLDTELLKRAFLGWLRGERDHCKMVAIPTIKDEDAKRPNRERESLVGEQNRIINRMKATLIRLGIRGFNPKLKKAAERLEGLRTPEGEPIPLNTLAELHRDMVRRRLVSDQIRQIENVRLEHLKQAPSDGPHAMVRLLARVIGVGIETADMLVQEVLSRNMRDRRAIARYAGLTGSPDESGTKRREKGLARSGNARVRRGMIQLAWRFLMFQKNSALAQWFQTRTKNARGTRKPMIVALARKLLIALWRFVREGVVPDGVVLRPAS

SEQ ID NO: 173028 - protein, 311 aa, unidentified
MRMTLEKYVGIDVSKDKLDVASWGEKNCPEFSNSKRGMAKLVKQMLALDPKLIVVEATGGYEEALVLALFEGGLPVALVSPQRVRQYARAKGLLAKTDQIDAHLLAEFGKQLQPRLFVGKSEARRRLSVLVGRRKQLNEMLQAEKNRLRTRDLSLQRSLERVIHCLKAEMKEVEDEIHQFMKAHEDLGDQEELLRSAISIGPVTAATLIADLPELGKLDRKEIAALVGVAPMNQDSGRKRGYRKTKGGRPAVRNALYMSTLTGIRYNPILKAQYEQLVKRGKEKKVAITACMRKMLTILNAMMRDQQPFRV

SEQ ID NO: 173029 - protein, 353 aa, unidentified
MPVYVAVDFHAREQTISWCDTADGEVHRTKLRHQHDDVRKFYEQFSGEVIVAFEASGYSAWFEQMLAELGHTVWLGNAAEIRRKAPRKQKNDRRDADLMLELMLKSDFPRVHTFSAESRTVLRQLRYRHKLVKIRTIAKNSVHAIGINAGLPLRGRLLTQTGLEQLQALPLSPVLSQQRDEWLALIRLMNKQIGAVEESLAQRAKDDEAVELLRTHPGIGLLTALALRYTLDPIARFTSPRCVVGYAGLDCVEEQSSERRRMGSISKQGSRLLRFLLNEAGQTAARQDPQLKQFYRRLLRRRDKPKAKVAVARKLLVRSFIMLRDQIDYAEFVRRGVAARVARETHSPKVTDL

SEQ ID NO: 173030 - protein, 470 aa, unidentified
MGKGSGISRSDRRRNARKERLRALLPRDGAVMGIDLGEDKQALCVIDHDERVVWRKTVRVRAHQLGGAVDLGVAAALGRGFGRVTVACEPTGPRWMQVQRLCRDRALDLVCVQPLMSHIAREQQDYTAHKRDESDCVLVARLAADLHCYVPEVLDETWAFLRDLGRRREQLVRAATASVLRIRSFLSVAWPSAGTAAACPFDSVTWLAALQVAAELGPARLAGTAEEEFLALVAEAARAWGASRVVKRIARKMLAAAGDPDAVGWSRRGLFRRIGDELGDLQRARRLRRAAEADMRGVLAGELGLARLGDIPGLTLTGAAVILAEAGDPRRYETSSSLVKHAGLSPADQSSGAFEGQSRISRRGRPALRTAAWRMICPLLRHNPVMAAKYQAMTAAAEKAAAASAARAKPGSVQAAQAVRAVRSARAKARVACAASLLRWIYFMTVHGACWDPAAASGGRLAPGQPAAAA

SEQ ID NO: 173031 - protein, 392 aa, unidentified
MEELIKYSLGIDVSKDKIDVCFSEMDNSQRVKIKSSHHFLNNNKGFKDLELWITKHKKLALPLIIIIEATGVYYERLAIYLHQKNYSLAVVLPNRSKKYMQALGLKSKNDKIDASGLSRMGAEQSLNVWKPMGAFFYELRQLTRHHEQLQESKTHFNNQLHALEHSAFEVKEVLKQQRKLIALLEKQIHDTFQAIQSHINSNEDIRRRVENICKIKGVGLLTVATVIAETNGFELFENIRQLVSYSGYDVIENQSGNHSGKTKISKKGNSHIRRILHMSSLGVVRFNQAPFVDLYNRVNDKTGIKMKGYVAVQKKLLIYIYTLWKKNEAYNPDQNKTSGNDEPKPLFLSVFENSSNLNDNIKNEIVPIETGTIQDELPFKESPEALFLSRQK

SEQ ID NO: 173032 - protein, 337 aa, unidentified
MSYLGVDLHTNSFTVCRRTKQGKNSIGTFQIVRIADFRKTLRKRDLVAVEATGNTAWFVSQICDRVKKVTVVNPYQFEVIRRSVKKTDKHDAKTLAFFLSKDMLPEARMKTKENAQLHSLATTRDKLVKQRTALINKIHNVLNSYGIKFKKESLGSEKGLKSVWAYEWDEIVRIELVALVEQIRSLNKSIKTLDKEMTDHGQKLKGHKSLMSIKGIAGRSATVLLSVIGDVNDFADGNKLAAYFGIVPRVSDSNETVRHGRITKHGSKLGRTTLVQCTLVAKRYSPYLRQYYERIKSHRGTGKAIIATARKFLGIIYNTLKNGWVFEDFPNFVIANS

SEQ ID NO: 173033 - protein, 320 aa, unidentified
MSDCLVIGLDVDSKELVPAVVDCKAGDRIPNTKAGIAKWLKTLPPRCRIGMEATGKHHELVARMAGQAGHVVYVINPRLIKSYAKATGARGKTDAMDAQVIARYVKKESDRLREYVPRSDEQQQMHDLLRKRKTLVETRARLEQSFEVTKSAPGELAGILQAMASTLSELESQLQQLGRDGEHGALYKRLLTIPGIGPAVAAHLVYYMTRWPVANANAWIACTGLDPRPNESGGRTGRRRLSKQGAPVLRQMLYMAAMGLKRCRGGQPLYDDLSGRGHSSTAVFNILARKLARIAWGVFKSGKDFDPAMLKVGQACFQQA

SEQ ID NO: 173034 - protein, 400 aa, unidentified
MISVGIDVSKEKSTVCILKPYGEIVSKPFEVYHVEQELSELATMLLRLNDEVRIIMEATGTYHLPVLSYFKERGFFVAVINPFEMKEYRCQGLRRVKTDKQDAIAISHYGIDHWYRLKEYEAQENIYTELKLLGRQYCHYMRMRVESVLELTHLLDYTMPGIKTLLQGWNEKNGKDKLGDFAEEYWHYDNITKKSEKQFIDSYLKWAKKKGYHQNQDKAIKIYALAKEGIPTVSSNTPSTKMLVQEAVRVLREVDHTLMTILTQMRSLAKSLPEYPIVRAMGGVGDVLAPKLIAEIGDVRRFHSGKALIAYAGIDAPPYQSGRLVGTERKISKRGSSNLRKIGYEVMRSLKTHKAPEDAAVYEFILKKEREGKSKRAAKIAGLNKFLRIYYARVMEVYRK

SEQ ID NO: 173035 - protein, 340 aa, unidentified
MQISTIGLDIAKNVFQVHGVDSEGHAVLCRKVRRDRLLKLFESIGPCLIGIEACATAHYWARQLTALGHEVKLMPPAYVKAYVKRNKNDAADAEAICEAVRRPTMRFVPVKSADAQSILMLHRARHLLVRQRTAQVSAMRAHLAEYGVVAPRGLAHVRDLLTVLETGSPMLPDVARQTLLLIAQMIDTLSQQVRKIEIELLSWHRTSPVSQRLETIPGVGFITATALAATVGDARAFRSGRQFAAWLGLVPRQNSSGGKERLGGISKMGDRYLRSLLVIGATAIVRYTKRKATAVSIWANRLLERKPPRLVTVAVANKMARIAWAVMARQEVYRSARLAA

SEQ ID NO: 173036 - protein, 308 aa, unidentified
MVSSEEPDVYLRPMGKAMKVANTKEDISKLVETLKSYTVNLIVLEATGGLETELVIQLQAADLPVALINPRQGRDFAKATGKLAKTDAIDAQILAHFGEAMQPQILAVESEESRQLGDLISRRRQLVEMRTAEKNRRERARGKALVDIEAHLEYLDNCLEKLNQEIEELTQANQQWLEKVNLLKTVPGIGQVISTTLVSDLPELGQLTAKQISRLVGVAPINHDSGQHKGKRMIQGGRAQIRATLYMGAVVAMRHNPVIKTFYERLVGRGKSKKLALTACVRKILVILNAMVRQNQPWQLADNLPPCS

SEQ ID NO: 173037 - protein, 327 aa, unidentified
MRTIIGIDVSKRKIDCAWLRDINTGKVKTKVFQNNAAGFQSLIQWVENNTQQSISATCFVMEATGVYHEGLAYTLHGADAAVCVVNPSYIHDYAKSLGVRSKTDKKDSVLIARFGATHDPVFWQPEPPEIRHLKALIARYEAMEKDLQREMNRLEKAEIAQVTVEVIRSINTVINELTKEKNRIRDMIDDHIDQHPSLKQDAILLKSIPGVGPVISQRMIALIRSRNFVSARQCAAFIGLNPVIRESGTSVRGRSRLSKIGDAKIRAKLYMAAVVAIQHNPDIKQQYERLLKNGKTKMVALGAAMRKLVQICFGVLKHQTPYQPQGI

SEQ ID NO: 173038 - protein, 329 aa, unidentified
MTHDSSAPSSPANALFVGIDVAKAKLDLARSDTGSLTTVANDSRGITQIVQWFTAQRPTCIVVESTGGLERPLVDALLDANVPVALVNPGRVRHLAIGLGIIAKTDPIDAGVLMKFARLAEPRLAQKRPQQQAELDALITCRRQLIGARTDQANCRLTTRSKSALASIDAVLKTLEKQIDLLDEKIRRLIDSDDDFKHLDQLLRSVPGVGPVLSSTLLAELSELGSIDRREIGALAGVAPFNRDSGKFRGKRSIRGGRASVRSVLYMAALAATRRNPVLRVFAERLKKAGKASKVIIVACMRKLLTLLNAMVRDGLRWEELEVVKATVG

SEQ ID NO: 173039 - protein, 405 aa, unidentified
MLYLGIDLHRVQMTVSLRNENGDVILRRQVSTRWAKLDEFRGQLQQAGAAGEKFIAIVEVCGFHDWLVKWLQQDDGCQRVLVVQPLRRSAAKTDRRDANALSELLWVNRDRLLRGDRVQGVRTVLVPGAEEQADRHLTQLRERLVRKRTQTLNQIHKILRRHNLEWERPTKTFQTRKVAEWLRTLHLAPMDRLALNQLLVQWKLWEEQLAVADAQIVERFHANRHAQLLATIPGVSMFIALAIVCRILPIERFPRGRSLANFLGLTPGCSSSGETERLGSITKEGSRMVRFLLGQVVLHVLRRDPTVRAWYQRIKRRRGAKIARVAVMRRTATIMWRMLSKGERWRPGAASAETPAAAGDPRQASLWQPRRTMLLALAARESEAVGSSTGSSSLLPGEEVTRCPA

SEQ ID NO: 173040 - protein, 427 aa, unidentified
MSVTQNEKIRQVTDTTMVIGVDIASELHWARAFDWRGLELGKTVKFENSAEGFNFFLRWVSELTVEQKKDSVMVGLEPTGHYWFTLAAHLQGGDFKLVLVNPYHVKRSKELDDGHPSKSDKKDPKTIAKLVLEGRYVYPYIPQGLYAELRVAMNCRWRIRKELASLQNQIQRWLKIYFPEHSKVFGRFTGAGSMALLHSAPFPSDLISLGVEGISGIWKQMKLRGIGRKRAQRIYEAAQTSVGCTTGMEAARMELQILLEDYDAKLQQYERVMQVVENLCSQIPAVAELLKIQGLGLVTVAGLFAEIGDIRRFESPRQIQKLAGLAITENSSGKHKGPTELSRRGRSRLSSILLRSAIPLLAKNREFQLLHRYYTTRQNNPLQKIQSVIAICCKLLRVFYALATKDCAYSPEKVLADIQRNQPLKAA

SEQ ID NO: 173041 - protein, 308 aa, unidentified
MEKKNEIKFPQVVKVGCGIDVHKNIIVATIRKSNEEYETRKFTSYTGSLTSLRDWCKSEGVTHIAMESTGIYWKPVFNVLEEDFEIILVNARHVKNVPGHKTDKKDSIWLSKLLLSGLLKGSFIPPKDIRELRDLVRYKKKLVAQVASEKNRIIKILEDANIKLSSVLSNVDGAVGTKIINSLIEGQTDVNELAKFYHGKMKVSKGEFKMALEGRITQHHRFMLQLHKDSIAEKERLIARIEAEIDEATKAYQVEIELLETIPGVGKDSAISIISEIGTDMSKFPDEKHLSSWAGMSPGNNESGGKKK

SEQ ID NO: 173042 - protein, 353 aa, unidentified
MKALKAVVGIDVSKDHFMICYKSRDSKVIKGTRSFNNNESGFLELLDWCSKRSDIKPDFVMEATGVYHEKLTDYLYKNGCQVSVVLANKIKHYAKSQNIKTKTDKSDASVIADYGLERNPAAWKPMTPKFFLLRQMCREMLSFKQDLTRAKNQRHALEYAYGISEQVLKVKDEQILFLNKSIRIMEEEICRVSQEDKAFDARVKLLTSIPGLRAITIITILCETDGFASFNNLRQVVSFAGLDISEKESGQMKGRSKISKTGNSHLRQCLYMPALSACSCNKPIKVLYERIVERNPTIKRKGIIAGMRKLLILVFVLWKKGEAYDPDFQWGKTKTSGNDETKSSYCSSSKSCL

SEQ ID NO: 173043 - protein, 345 aa, unidentified
MKYYFIGIDVSKEKLDATLIRYESESDSEQQLAYTTVENNPKGFRSLVSWSKKNAGRGVKTDTMLFCCETTGGYDRALCDWLYDNGLNIWRESALQIKRSMGLRKGKDDKADSEMIAYYALRFRSQATLYKPLDGNMRSLRDLFLYRQSLVAERQAKMVSSKEKQHISSKSKVDNFIYRDAQKSIDIMTKSIKECERRMLEIIKEDEEMYRNYLHLISCKGVGLITSVMLIIYTDNFKSWNAKKMASYCGIAPFYESSGSSVFHKANTSGYSNRRLKGILTQAARSAITHNPTLRQYYLRMKAQGKPYGVILNNVNNKLLHILFSLVLHDCDFELDHEAKRALRA

SEQ ID NO: 173044 - protein, 323 aa, unidentified
MTKHGEAFVGIDTAKARNAVAIAEGDRNGEVRYLGEFDNTPDGVAKLIRKLADRYETLHICYEAGPTGYGLYRQILALGHACIVVAPSLIPRRPGDRVKTNRRDAQGLARLLRAGELTAVWVPDETHEAVRDLVRTRAMTIEDYRRKRQHVTSFLLRHGRAYEGGATWKGRHLRWLDSQNFPHPAQRLAYQEMLNAARTAAERIGRLEAALIEIVPAWTMAPVVSAFQAMRGIQFLTAVTMVAEAGDLRRFDHPRQLMAFLGLVPSERSTGETKRQGGITKTGNVSARKALVEAAWTYRNVSTTLIHPVLAFRLGCQPCGWVD

SEQ ID NO: 173045 - protein, 481 aa, unidentified
MSKPKKHSKKPGAGKIAAGQGKRGRKRKGMCLEDRPILEANAAGIDIGAREIFVAVPPDRDEHPVRVFSTFTEDLEEMAQWLVSCGITTVAMESTGVYWIPPYDVLERHGVKPCLVDARGMRNVPGRRTDWHECQWLQFLHSVGLLRAAFRPDGEVCAVRSLMRHRSGLVEMTSQHIQHMHKALTQMNLQIHHAISDITGLTGLAIVDAILKGQRDPVELAKLRDPHIRASEETIRKSLVGTWRPEHLFTLKQSRQMYQHYQEQIAACDAEIEKLVVAFQPRVDPAEKPLPPDRKRRRRRGRKKSTHPKTGFDLRTESYKLFGVDLTQIPGLMAMVLMLFSELGRDMSRWPTAGQFVSWLALCPDNDISGGRVLWRGRRRVHNRAGDLFRMAAYSLHHDQSPLGDYLRRMKSKLGPAGATVATAHKIAIIFYTMVKKQVEYDETLWAQRDAEREKRFEAKLKRQAQQLGYKLVPIEEKPAA

SEQ ID NO: 173046 - protein, 326 aa, unidentified
MEHELHYIGIDTAKEKLDVDVLRPDGRHRTKKFANTTKGHDELVSWLKGHKIDYAHICIEATGTYMEPVAECLYDAGYIVSVINPALGKAFAQSEGLRNKTDTVDARMLAEFCRQKRPAAWEAPHPLERALRALVVRHQALTDMHTQELNRTETAREVQRPSIDAHLLWLEAELKRLEKQIKDLTDDDPDMKHRRKLLESIPGIGEKTSAVLLAYIGLKDRFAHARQFAAFAGLTPRRYESGSSVRGASRMSKAGHVSLRRALYMPAMVATSKTEWGRAFRDRLAANGKKGKVILGAMMRKLAQVAYGVLKSGVPFDASRHNPVAA

SEQ ID NO: 173047 - protein, 344 aa, unidentified
MEHFAGLDVSVKETSVCIVDDAGRIVREAKVASEPEALRAVLNNPSYRFRRIGLEAGPLSQWLYSALGEANLPVICVETRHMRAVLKAQINKTDRNDARGIAQMMRVGLYRPVHVKTLRSQKLRMLLTHRKLLQSKAIAIENDLRGTLRNFGLKVGVVGAAKFEARIKQLVDNLPDLALLVEPLLVVRRVLREQIAILHRRLLDIVRDDEVCRRLMTIPGVGPVVALTFRATVDVPARFRNSRAVGAVLGLTPCRHQSGESDRTGAISKCGDEMMRVMLYEAAQILLVRSTRWSWLKAWAMQIARRRGLKKAIVALARRLAVIMHRIWVDGTEFRWARQEAAAA

SEQ ID NO: 173048 - protein, 341 aa, unidentified
MVIKAIGIDLAKSVFSLYGIDDHGKCVLRKTVKRHQLLNEIAKQPACLIGMEACSSAQHWAREFIKLGHDARIMAARFVIPYRKSQKNDSNDAEAICEAVTRPNMRFVAIKSAEQQAVLCLHRLRRGLIKDRTARINRLRGLLAEYGFSAPNGRYPGQATMYALLEDAENSLPDLVRRLLKECWDSIEALNQEIQNYDRQLSELAKQSAAAKRLMTIPGIGEITATGLVATICDGKQYDNGRQLAAWLGLVPRQYSTGGKPRLGRISKQGDSYLRTLLIHGARAVIRTCKDKEDKLSLWVKSLLLRVGFAKTAVALAAKNARIVWAILTKETEFKIEIVTS

SEQ ID NO: 173049 - protein, 389 aa, unidentified
MFYLGIDIGKNTHVASLIDSKKKVLFKAFSFSNSIDGAESLICKLEPFKNQLEIGMEATGHYWLSLYSYLSEKNFTVRVINPIQTDGWRQGIEIRKRKTDIIDSLLIADLLRYGDFVETSLSNEDYLSLRNLSRFRSYLVSSIGDLKRKTIALLDQVFPEYASSFSNIFAKTSKEILANFSSPSDFEDINSEDLQSFLDNVTMKKFAARKLEELSKKASKSFGVNFCMDSFSLQIKMLIGQISFIQNQVLDVEKEIKSLLEKLNSPITTIPGIGAVNAATILGEIGDIKRFSNPSKLVAYAGLDSTVSQSGKFESTSNHMTKRGSPYLRRALFQSALRAEFCDPVFSDYYQKKITEGKHHLVATNAVARKLVHTIFAVLTKDKPYQVQS

SEQ ID NO: 173050 - protein, 410 aa, unidentified
MVKENFIYVGIDLHKETHTAVMIDCYNQKLGEITFPNRPADFPKLVTKVKKCNTDAKEVVYGLENAYGYGRPLAVWLIDKGYFVKDVNTAISHRQAKHRGAMYRKSDSDDAEAIALATLNMLDKLPDACPNDAYWSLGQLVHRRDNIMKQRTRLVNQLHEQLCIAYPSYKQFFNDISRPTALYFWEHYPSRKYLKGKSVEDLRTELVPVSHNRCSTKNCEKILDAVASDKVKNNAYQDARDMVTLSIVSDLQHYDSQLAEVDKMLEQMYKMLGCTLTTIPGVNVITAVKILAEIGDIKRFSNANKLAQFAGIAPLHLSSSGKGKNVATKQGNRRLQATIYFLAIQMVQVSSKGTPRNSVVRAYYEKRKAEGKTSQQALICISRRLISSIYGMLKHGTEYRMPVVESAGEK

SEQ ID NO: 173051 - protein, 372 aa, unidentified
MNSIVYVGMDVHKESFTVCCYTFDEDKIQYQQKIAADYKMVLKYIDQVRKNYPKDAEYICGYEAGCLGYTLYHHLTRCGIKCIILAPTTMGVTNTNRVKTDRKDAGNVARCLAFHTYSEVYVPTDEDNAVKEYIRMRDDQKKMLKSTKQQILALVLRQGQHYGGGRTHWTMAHVKWLKSLKLKEEMLQETLVEYLVTYEYLTQKIERLDNRIEELATEEMYEEKVNRLSCFIGIKAHTALSLIVEIGDFKRFAKAKNFSAFLGLVPSEDSSGDNQNRYSITKAGNNHLRRLLVEAAQGYTRGSIGHKSKALKRRQHGNTSRDIAYADKANERLRRRFYTMTLKKRISRNKAVIAIARELACFVWGMMTENIA

SEQ ID NO: 173052 - protein, 410 aa, unidentified
MNGKGRKAKKQAKINNSLNILSKEELGRRIAEVEADLKSSTWKDLEVGIKFDKNAKLTFISEDMLILGCDIGSETHYMRAIDIRGRELSEDAFPFSNNAEGFQSAKAWAVQIAAVHGKRQIVLGLEPTGHYWFCLAAWMITNGISVVQVNPYAVKQTKELEDNSQAKNDAKDPKLIADLVKNGNYGMPYLPEDVYAALRVLCMLRDQLMEDRIRNVNRLHRELKIVFPEYMSAFGKIDGIFAMSVLATTSIPSELVSLGETGIRDIWHAKKLRGGTYSKAKEIVRLAKGSTGLTHGAEARKIAVASFVSKIMELDAEIESVEAQMAQKCREIPCADNVLEIKGLGETIVSGILSEMGDIDRFDTAREIQKLNGLSLIACSSGMHKGQTKISHRGRKRLRYWLFKGTMSEV

SEQ ID NO: 173053 - protein, 378 aa, unidentified
MNRIIKIGMDVHTTNYTLCIFEPSFEHDGTVHCITQVKPEIKKIIHVIETFKKKHENEELNIVCGYEAGCLGYSLYHELKEKGVECVILAPTTMKTEKGGRKLKNDYRDAKMIAECLAYGGYSAVHVPTELDNSVKEFIRMRDDIKENLKSIKQQIIAFLTRNGKQFNGKSYWTRKHIDWINTVSFSEPLLQDTLKEYMIEYNHLCDRVETLDKQIEEVSLKEEYVEKVQQLQCLIGIKTHTALSLIVETSDFNRFKKGNMYSAYLGLIPGDDSSGGHENKLGITKAGNSHLRKLLVEAAQGYTRGKVGFKSKDLKARQEKCGSEVVAYADRANERLRRKYYRMILRGKKYNVAKTAIARELACFVWGIMTDHIDLCS

SEQ ID NO: 173054 - protein, 345 aa, unidentified
MSQIKRIGLDTSKAVFTLHCVDQTGRAVLRTNLRRAQMATFFKNLAPAEIALEACASSHHWARELSTLGHEVRLIPPQYVKPFVKRAKNDRNDAEAICEAAGRPGMRFVPVKTAAQQAQGMVLKVRETLVNQRTQLVNALRGHAAEFGIIAAKGISQIAPLLEAIEAVATIPSEAREMLALLGQEIEHLDSRLNEMEVKLTAAHKANALSQRLATIPGVGRIIALTFATEVDPTAFESGRHLAAWIGLTPKEHSTGGKQRMGGISRAGNERLRRLLVTGATAVIRFATRPGNKHASEWLLKLLQHKPRKLVAVALANKMARIAWAMMKSGEAYRRPTAIAATVAA

SEQ ID NO: 173055 - protein, 406 aa, unidentified
MRDYLGVDWADAEHAVWVEDEAGTKILSRTVAQTVEGLSEFGRWLDERRAGGRELWAAIEKPEGRIVDFLLDHGVLVYPINPKAVDRARDRFRMSGAKSDPFDARVLATFLRTDHGHLAPLRPSSEAAQELKGLTRDYTRQVRQQTRLLNQLTAALKAYYPRALEVVDDLKSRWGQAFLRDYPTPDALTPLTERPWQRWARAHRLRAERTTELWALIQRPQLPVPAHVVRVHARLVGARLEQLGVTVAAVDTYREVIADFFARMPAAEWATSLPGGRSGTTVPRLYAELGDAAGRWESFQHLQGHAGAVPVTDRSGKQLIVRFRFACNAHLRDAMQQFALHSLTTSEWARAAYDRCRQRGHHHHHALRVLAAKWLKIIFALWRRRVAYDETYHLATMARQHLRQTA

SEQ ID NO: 173056 - protein, 296 aa, unidentified
MDTSKHVFQLHGVNAAEEPVLRKKLRRKEMTAFFGKLAPTVIAIEACGGSHHWARLLESLGHSVKLIAPQLVKPYVKRGKNDAADAEALCEAMSRPTMRFVPMKTAEQQAALMLVGVRDRLIRNRTRLANAIRGYAAEFGLTAAKGMAHVDPLLERVQADASLPALARELFAVQVKEHAQLRAQIDEIDIKLMAWHRANECSRRLAQIPGVGPIGAALLLMKTPAPETFRSGRQFAAWIGLTPKDHSTAGKVRLGVITRAGDEALRSVLVTGATALLRFVRNGKRRAGSHRGLSSF

SEQ ID NO: 173057 - protein, 350 aa, unidentified
MLIIGCDYHPAFQQIAFVDTATGDCGERRLEHREGAEKFYRDLAAQGMKVRVGMEASGHARWFERLLGELNFELWIGDATEIARKRERKQKTDRQDAQHILRLLLKDDFPRIWVASWENRDLRQLLWHRHRMVQARTRIMNQLQSVALNEGLRCKKRLWREHGREQLESFRLAPWASRRRQDLLELLDRLNPTITELSQAIEQEAEKFPEARWLMTHPGVGPLTALAFVLIIGKADRFQCGKQIASYLGLVPLEDSSGNRRRLGHITKQGSSMLRFLMVEAAQVTVRSLPEWRSKYFHLMMRRGRKIAKVAMARRLAIRLYWMWRKGWDYEQVKKFGSHAGPLGTGDGVQ

SEQ ID NO: 173058 - protein, 324 aa, unidentified
MSDSILGIDVSKETLDAYCARGQRKQGRTFANSPDGWKLVRAWLKAMGSKQAHVCMEATGRHSLGVALALHEAGHVVSVVNPAQIRDFARTKLGRNKTDKVDAALICEYAELFKPEPWTPPSPAMRRLCELQTMRAGIIGSRAEWKNRIGSGLGDSTATKLAAATIDHFTSQLEAIDRAIGETIEQDAELRGRRDLLLSVIGVGETLAASLMAEMPEPGVLRRSGEMVAYAGLNPSHHRSGTSIDRPTRISKIGNATLRSSLYMPALSAMRFNPAVAILVARLKSAGRLKPKQIVVAAMRKLLVLCFGVLKTGKRFDLAIAMPA

SEQ ID NO: 173059 - protein, 391 aa, unidentified
MIFVGIDVAKDKHDCFILNSEGTVLADVFTIANNRIGFETLLSRIQSCSQGESKIKVGLEATGHYSYNLLGFLLDSGLATYVINPLHTNLYRKSLSLRRTKTDRIDARTIAMMLMSDVDLKSYSNTAYHNEELKSLTRYRFDKVKERAKLKSSVTRLVNILFPELEKLVSSLHIAVVYALLSNYPGASYIANANTEELAETLCTASKGRYTKSKTAEIQVAAGVSIGSKMPAKSMELKHTIALIRELDKEISEVESAIDKITSQMDSPIFTIPGIGRHMGAMILAEVGDFSNFASADKLLAYAGLSPSTYQSGQLQNCYAHMEKRGSRYLRYALFNAAKYVCLWCPTFSAYLEKKRSEGKHYNVAISHAAKKLVRLIFAMQRSGKAFLADY

SEQ ID NO: 173060 - protein, 352 aa, unidentified
MVNGIIESQEIFVGLEDSKKTWKVCVRANKQIVNEASMPAKYDTLKAYFDNNFPRCKVHVIYEAGFKGFGLYYALTTDGHACTVVPPHTVVQAKCSRVKNDRSDARLLAKNLEDGNCGACHVPDQERLADRQVVRSLNMVNKDIKQAKNRVRSFLFMYGIETGIVVATWTDNHYKRLRQIEVANPVLREYLDDLLDRLFFLWVQRDKYVKKLRELSKKERYVRFVKIAKTLPGVGVLTAIRLVLELGEDLTRFTSGEEIASFVGLGGVEHSTGETEKKGGISKQGNKMVRAWLVESAWVAIRKDPALQVFYSRIRQNSGHYNKAIVAVARKLITRLRSCVVNDTNYVFGVVQ

SEQ ID NO: 173061 - protein, 345 aa, unidentified
MELHTIGIDLGKTVFHLVGLNLRGEVVVRKKFSRKQLLHFTANLQVELIGMEACGGAHFLGRALREQGHEERLMPAQYVKPYVKTNKSDYIDAEAIAEAVGRPKMRFVPIKSDDQLDLQSLHRVRERWVMRRTAVINQIRGLLLERGITLRKGRCHVDEALPGILEDASAKLSGALRVLLAQLKLELDHLQMRIDEADAVIKKTAGENEACRRLVAIPGIGPITATAIIAAIGNGAAFKKGREFSAWLGIVPGEYTTGGKQKLLGISKRGNSYLRRLFVHGARAVLQQSAKQSSGLSSWLAQLTTRTHRNVAAVALANKLARMAWAVLAKNEPYRPPMLADAATA

SEQ ID NO: 173062 - protein, 433 aa, unidentified
MIKINYMSTLFVGIDVSSKSNVVYAMDFDENKYIDVSFGNNQPGADELAGKIADCMQKHPHINTIIVALESTSVYSIHIANFLASCELLMPYRPYVYCLNPKMTANYRKTYVGMDKTDHMDAFLISDFARVGRTKKCEPWRGCQYLALKRLTRHRLHLAECITREKTYMVSNLYLKFSELQLLDNDSQPFSNIYGATSSAVLTEFMSLQEIIDSPEEELLQFLASKSRNRIADISRTSELLKKAARDSYRLDKCMYEPLNVSLASSFNCIQTYQKEIKLIDQAIEKCINGMNPNAFIILKSIPGIGPVWAAGILSEIGDITAFHSSDALAKYAGLTWLKNDSGDFVSEDNRVSKAGNTYLRYYLGEAANSVRRHVPEYAEFYSRKYAEVTKHQHKRALALTSRKFVRLVFGLLVKNQLYTGEKLDAELNTEFE

SEQ ID NO: 173063 - protein, 346 aa, unidentified
MTTKATRNTQAKTSEGPLFMAFELSEKTWKLGFTTGPGQKPRERNVTARDQERVLDEIIQAKHRLGLPETAPVVSCYEAGREGFWLHRFLEAHGITNHVVDSSAIEVSRRQRRAKSDGLDVRKLLSMLIRYHEGERQVWQVVHVPSVEAEDQRHLHRDLETLKQERGDTTRRIKGLLSSQGLRVKNLTRLPEQLDALRLWDGSPIPPGVRQRVLRVYAHHQFLSEQIAVVEAERGTQLQDANDASSEQVRQLMLLKGIGINGAWLLVMEFFAWRGFKNRREVGGLAGFTPTPSQSGASAREQGMTKSGNPHVRWMITELAWGWLRFQPQRALSVWLRERYGSGGKR

SEQ ID NO: 173064 - protein, 368 aa, unidentified
MPSMQLRRDDVIVGVDTHKDEHVAVLLDGLGGRLAELFIPATITGFGALLSFCRDHVGPDGTIIAFGVEGTGSYGIGLARFLRRHGLIVQEVHRPPRKGERRLSGKSDTIDAEHAARQVLAGRRNPIPKTAAGAVEALRLIKVARDTAVKARTSAIITLKATLVTAVDELRAELEPLTDHKLITACAALEPGGELDDPDAAMRHVLRSLARRWLELHEEIKTHSRHLKVQTKAAAPRLVEAVGVGLDIAAEMLVTAGDNSDRVRSESAFAKLCGASPIPAGSGKTNGRHRLNRGGNRQANAALYRAIVVRMRWHQPTIDYVARRTAEGLSKREIIRCLKRYLAREIYRLLPPPSVPREARVDPLPQAA

SEQ ID NO: 173065 - protein, 388 aa, unidentified
MIYVGIDIAKLNHFASAISSDGEILIEPFKFTNDNDGFQLLLSKLDPLDKDSIIIGLESTAHYGDNLVRYLVACNYKVCVLNPIKTSTMRKNNIRKTKTDKVDTYIICKTLMMQESLRFVTFYDLDLMDLKALGRFRQKTIKQRTRLKIQLTSYVDEIFPELQYFFKSGLHQKSVYALLKEAPTPEAIASMHMTHLAHLLKVNSHGRFNKEMAQQLRVLAQKSVGASDSSLSIQVTHTIQQIELLDSQLERVEAEMTEIMKFNDSVIMTIPGIGYINGGMILGEIGDIHRFSSPNKLLAYAGLDPSVYQSGNFQAKKTRMSKRGSKVLRYALVNAALNVVKNNATFKAYYEAKMAEGRTHYNALGHCAGKLVRIIWKMMTDNVKFNLG

SEQ ID NO: 173066 - protein, 416 aa, unidentified
MDIEHTHCAGLDVHKKTVVAAIIVPDGQGGLRKEVRTFATMTADLLMLSDWLLSFGVTHVAMESTGEYWKPIHNILEENFEVLLVNARHIKQVPGRKTDVMDAEWIADLLRHGLLRGSFIPPVGQRELRELTRHRANFVRERATLVNRIQKTLESANIKLASVASDVMGVSGRAMLDAIITGTANATEMAGLAKGRLREKREQLDKALQGRVKPHHQFVLSEYLCQVDNLDETIARFDAEIEKYCRPFEEAVELLDTIPGVARRTAEVVVSEIGSDMSRFPTANHLAAWAGVAPGNNESAGKRYSGTTRHGNRALTVALVQAAHAAARSRNTYLSAQYHRLAGRRGKKRAIVAVAHSILVISYHIIQRKEPFRELGGDYFDQRRPEATAKRLLGRLQQLGYDISRIEKPCILPVAA

SEQ ID NO: 173067 - protein, 338 aa, unidentified
MENFVGIDLHKYVSQLAVLRESKSPSQLRFANDVVTVERVLKKLPEGSKIAVEAMGSWWWLVELAQKSGHEVFLSHPKQTKAIASARLKSDKVDALMLAKLLKADLLPTVWIPPATQRHIRELLSHRGRLVRQRTAVINELRAVYAKRNIDPEAKLQRARPIVSGAEDLSGYGPRIVEEDLKLLEFINRQIGGLDKELIKIALEDTQAQRLMTIEGVGPVSAVAISSWIGEIGRFSNAKKLASYFGLAPRVRQSGDTERHGHITKEGNRMVRMLLIQAALVHTRRGKGPSRKHYLGVVKRRGKQIARVAVANKLIGAIFHMMKEGMDYSDFIRRSGAQ

SEQ ID NO: 173068 - protein, 372 aa, unidentified
MEKVCGLDVHKDSVFMCILTASGEKIEDVFGTLTPELDRLRDLLVFHGVGKVAMESTSIYWIPIWRVLEVDFDVKLVNPYFIRQLPGRKTDVKDAQWIATVLQKDLIRGSYVPEAKIQELRQYSRRIFNLNRSKQRAEVSIDLTLQRCNIHLSNYVSDIGGKSMQKVVHALIRGEADAEKLLLLVHKRTRNKHTDEIIRDSLIGMISPTDQDMLAMDMEEVQLFSSQIEECKKKMLLICQEYYQEEIQLLETIPGIKKQSAMRIIAEIGVDMKAFLTASALVGWAGLRPRNDESAGKIKGRKTLHGNKYLRILLVQCAWGASRTVDSRFQSRFNTLKKRMNHNKALVANARKLLVIIWNILQKKQCYTPLVA

SEQ ID NO: 173069 - protein, 412 aa, unidentified
MSPMLIGIDVSLKSHHVQFMDGTGTSLASFAVPNDQTGADSLIQKMLDTASKAQVQELRIGMEATSNLGWHLAHYLKTELQGYEPNVRSQIYVLNARKVSRFKKGYEALPKNDRVDAWVIADHLRFGRLPHEMKDIIQYEALQRLTRTRFYLMNNIKRDKTYFLNQVFLKFSGMRQDNPFSNTFGNTSLAVIQELEPEQVMTMSIEELIAFLQDKGKNRFENPEEIANYLKKIARSSFRLDKAMADPVNISMATTLSVINHLESEVKKLDKEIAKIMKGIPQTLISVKGIGPVFAAGILAEIGGIDRFHDHNDLAKYAGLVWSQHQSGEFEADETSRMRTGNKYLRYYLVQAADSIRKHDAEYKAFYQKKYDEVPKHKHKRALVLSARKLVRLVFMLLKTNTLYTPPERRNP

SEQ ID NO: 173070 - protein, 346 aa, unidentified
MQTLYCGMDLHSTDCDVAVIDKDGEVLHERSFQISRENLVEVFSSFEGKLMIHLEAGELAGWARMALLEEVPQAREVVVSDPKSFRWIAQDPQKRDPIDAWKLAEYMRVGRTHPVYYPEEEDLAVFKKTVQHYEDLTDQQAALKQKIKARFRVEGVAAEMKILFSEGGRKEALRAVENTFRRQAITHLYCLLDHALICQQNALELMAQQAERFPVIGRFQAVPGIRLKLGSRFVAYVQNPHRFATKQKLWTYSRLGITDRNSNGKPLGYSRLNPNGNGKLKDLSRKAFRAAVLRRKDNNGFKRFYEASLRRTHDQVNARLNTQRKILETLWVMWKKGTEYDDSYMG

SEQ ID NO: 173071 - protein, 413 aa, unidentified
MQVEHERCCGVDVHKATVVACVIVPGAEGKPVKTTCTFNTMTGDLKALAQWLTEQGVTHVAMESTGVYWKPVYNLLEGQFQILVVNAEHLKKVAGRKTDVADAEWIADLLRHGLLKGSFIPSTQQRVWRDLTRYRTTLTDERSREVNRVQKVLEDANIKLASVASNVMGVSGRAMLEQLIQGTTDPATLADLAKGRLREKRDLLEKALTGTCQPHHRFMLVQHLSHIDFLDDQIAQLDAELAEQMRPFQAELARWDQIPGINLRVAQVILAEVGTDLKQFEDAEHLASWAGMCPGNHESGGKRHSGRTRKGSTWLRRALVEAAHGAARTKDKYFKTLYHRLAGRRGKKRAIVAVGHSLLVTGYYMITRGQDYEDLGANYFDERNQEMVKRQAVKRLEKLGFQVELKTALAPVG

SEQ ID NO: 173072 - protein, 371 aa, unidentified
MEHTRFVGLDIHKERISIAVAESGRSGAVEYLGEIANDPGAIRKLCERLGRSGTPLTFCYEAGPCGYGVHRQLTGLGHRCDVVAPSLIPKRSGDRVKTNRRDATMLARLHRAGELTSVWVPDADHEAMRDLVRLRSVVRQIVTHARQHLQGFLLRHGRKHGLGTAWRMAYRRWLSTLAFDHPAQQIAFQDYVDAVTDAERRLQRVEEQISSLLPEWTLRPVVDALQAMRGIALINAVVLVAEVGDFTRFSNPRQLMAYFGLVPAERSSGETARRGGITKTGNSHVRHALVEGAWAYRMRARIGRHKVDRIEALPKAVRDIGWKAQVRLCARYRRLTARGKTANVVNVAIAREMVGFIWSIACTIQSAPKAA

SEQ ID NO: 173073 - protein, 385 aa, unidentified
MQKNDLSRSLVAFEQNSTLVAVVELSLKTWLVCGLVPGLTRQPLKKQGADPGALAALLDRWRNEAIKTGRKITRTVVAFEAGRDGFWLARWLLAHGIEASVIHPNSIPVSREHRRAKTDRLDTQLLLRALLGWLRGEAKHCSMAAIPTLAEEDARRPNRAHEMLVGECTRIVSRMKAILIRFGVRNFNVKLSKAAQRIEALRGPEGQLPPNTLAELRREMARLAFVKKQIKEIENARLTELKQAPREGTHPMLLMLARVKCIGVETADMLVHEALSRNLRDQRAVARYGGITGAPDESGSKRREKGLARAGNARVRRGMIQLAWRWLMFQKDSALAQWFQARTAGAKPGVRKSMIVALARKLLIALWRFVTTGEVPAGAVLRPAT

SEQ ID NO: 173074 - protein, 331 aa, unidentified
MLITYYGVDVSKDLLHIACQSGFDAKGQPQWSYQKLSNELSDIEQWATQLPTGSQVIFEHTGTYSARLAWILALLNRPFSILTPGQSKGFAATLKSISKTDRSDALMLTRYGQTLRPIPTVLADETLHQLRQRHKHFNDLKVSYQGLNNQLHALSYDPRASNKVKDSLLLLVESYQTQIALFEDDLDQMSQQELQAISERMQRVKGIGPASAQALCTATNGLRGFESAKAVVKFVGIAPTQTQSGSSVHRRGRMARTGAGYVRGMLYMAARSARKYNVGCKALYDRLRAKGKCHKVAMIAVINKLVHQIFVIVKNDVDFINGFGLSKESLV

SEQ ID NO: 173075 - protein, 425 aa, unidentified
MTKRTIDDFAALVGIDWADRKHDICLQPGRDGKREYLVLEHRPEAIDDWANGLRTRFGNRAVAVCLEQRKGALIHALLKYEHLVLYPVNPQMLARLRKAFAPSGAKDDPTDAALAVDILLQHLDKLRPWVPEDARTRQLQALVQGRRRLVEQRVRVTNRLLANLKGYFPQALDCFDSLDSVLACDFLTRWPSLGQAKRARASTLRDFFQQHGVRGAELIEGRIGMLAKALALTTDAGVLLPGLVATRTLVAELRALMSGIETYDEEIKRKFDKHPDAFIFASLPGAGPAFAPRLLAAVGSDRERYDSVASMQKYLGIAPVTERSGKSKWVHWRYACPTFLRQSIIEWAGMSIRYSYWAAAYYRQQREKGKRHHIAVRALAFKWLRILYRCWKAKMPYDEAKYLLALKKRKSPLLQYIGEPSQAAA

SEQ ID NO: 173076 - protein, 427 aa, unidentified
MSYRIAGIDVHKRMIVVVVADVDVAGDYEFERRQYGSSPAQLRLLAAWLVEQGVEEVVMESTAQYWKPVWASLERYWKPICEKWEGTSPMSGSLHLAQAQSNRGARGRKNDFADAERLVRRLVAEELTLSFVPDAEQRLWRTVMRTRYQLRCNQVQLQNRLEALLEEAHLKLSSLVSDLLGLSGRRMLQAMAEGETDPAVVAARADCRLRATQEQLCDALGAYQELHPVYRRLLKTALEEWERIEAQIAQLGQEMASLIGPQQEQVQRLAEVPGLGVDSGQQILAEVGASAATFPSGRALASWVGACPGEEETAGVNRNRRSPKGNRHLRRILNQAAHAAVKLKGSIFALLYRRYVVRLGHNQTIAVIAHRLCRLIWKILHEGVRYEERGPAVSQRAKQRRTARMIRQLRSLGYSVELLHAAAGVPA

SEQ ID NO: 173077 - protein, 333 aa, unidentified
MTQEYVGIDLHKRFFQACAISVAGDRLWEQRFPRTADGIGRFAMRVTSESALAVEAMGPTWAFVDALAPTGAALCVVDPRKTKLKAGHAAKTDRLDARRLADALRRDSVVSIYIPPPEIRALREVCRGRHQLVRLRTRLAQMIRALLLRCDAGEPPSTTLFAARALAWLATVELAPEPMGQLRRLERLYRAVHADAIAATADVKARAACDPIARALATITGIGPVLGLTLRAEIGDGMRFSGGPALASYAGLVPRVESSGEHVYHGRITRQGSPWIRWALVEAARYAMRQPDPRGRWARRLAVRKGLAKARVAMARRLCDEVIAVWRARQQCA

SEQ ID NO: 173078 - protein, 369 aa, unidentified
MGEDSTVFVGLDVAKNRHAVAVAEAGREGEVRYLGEIGADTVSVRRLVARLAKRHGKLYFCYEAGPTGYGLYRMLRAMGHGCSVIAPSLMPRKPGDRIKTNRRDAVQLARLLRAGELTEVWVPDGAHEAMRDLVRLRDGAVNDVRRKRQGISSMMLRNGRVFEGKKTWTQKHRQWLRRQRFDYPAQDLVLQDMLVALQQAEERLEQVEDSVREFVPQWSLAPVVAALQALRGMRLVGAANIMAEVGDLGRFATARQFMGYIGLVPGEHSTGDKVRRQGITKAGNTRARRTLIESAWSYRHLPRTSPRQRRAQEGLSPAIRAIALKAQSRLCGRFRKLAAKGKPLTVANTAVARELAGFVWAIGRAALAV

SEQ ID NO: 173079 - protein, 394 aa, unidentified
MIFVGIDVASTKHDIFIMSYHGEILVKGFTILNNLMGYKKLQHIILNVMESSVDSKVRIGLESTGLYHLNIMNFLTSEGFLVQEINPLLTSMAVKANSLRKTKTDQIDAKAICMFLFQNQTNFKPYTPKLYNTEALKSLARYRFSLVHDLSQVKVKLYTLVARTFPEYLGFFSSLYIKTSLNLLHKYAIPSNLVSARIDGLTNLLLKSSKGKIGKLKALKIRELAAESIGDTSAFYAVQIRSSIDLIRNYQSQIALIESDIKPIIDAHFKFILSVPGVGYNMAAIIIGEIGDIHQFKSFDALLAFAGMDPVVYQSGNYNAANTRPSKRGSKYLRWAIHRASMIIVLRDNKFAMYFHKKVEIDKKHYYVALGHVGKKLLRVLYSIIKYRQVYVSQ

SEQ ID NO: 173080 - protein, 399 aa, unidentified
MNSVGIDVSKGKSTVAIMRPFGEIIASPFEINHTEEDFEKLVLQIKSLKGESRIVMEYTGRYYEPLANYLYNSGLYISVVNAILIHDYDNSSIRRVKTDKKDAIKIANYGLNRWLDLPEYIPEEELRQALKIYNRQFTQYTKLKVAMINNLIALSDQTFPGIDGLFGKTPRKDGHHKWIDFIKDYWHKDCITTKTIKSLERSYQKWCSKNGYHYQSNKVNDIYQLANQTVASMPANANTKLIITETAKELISLIDALEKIRQEMNRIASQLPEYPAVMSLPGVGITLGPQLIAEIGDIRRFHSRKALIAYAGIDSSPYQSGTIDIKSRGISKRGSSALRKTLFTVMDCILRHQQIDDPVYQFLDKKRAEGKHYYVYMIAGCNKFLRIYYARINAYLNSI

SEQ ID NO: 173081 - protein, 461 aa, unidentified
MSKKAKVISALPVIRRDVAGVDIGSTQHWVAAPQADPDTPNVRVFGSTTGALEELIDWLVSLGVKSVAMESTSVYWIPLYELLEARGLEAVLVNARHLRSVPGRKTDMRDCQWLQTLHSCGLLRGSFRPPEQIARIRAIHRQQGNLVRERTRAVQWMQKALDQMNVQVHRAVTDITGTTGMAIVRAIVDGVRDPNKLAELRDVRCAKPQAVIAQYLKGTWREEHLFNLGSALRLHDFVTSEIERYDRMLEAELARLESEEHRDQSPPALPSKVKEKKIIREGKGKRRDQLFRVAGVDLTRIDGLGVDAASTIIDELGPDLSAFPTEHHFVSWLRLCPNRAYSAGVPLPKKRQNGAGSSRVGAVLRMAATALARSQTALGAYYRHIAKRKDAAVAAFATARKLACLVYRALRYGTEYTDQGAEAYERAYHERRLKSLKHAAISLGFDLVPATPTGASAPSAG

SEQ ID NO: 173082 - protein, 350 aa, unidentified
MRFYTGQHRFHCGIDLHAHTMAVCVLDATGEVVLERNLATTPEAFLEAIAPYRGDLAVACECLFTWYWLADLCAREQIPFVLGHALYMKAIHGGKAKNDRIDARKIAVLLRGGMLPQAYVYPPGMRETRDLLRRRLHLVRKRGQLLAHLQNLRHTYNRGAFEKRIAYPSNRAGVVAHFAGEPMVQANAALDLSLLDHYDQLLVDLERRLVRQAKREAPRGFHLLLSIPGIGKVLAMTIVYELHDVKRFERVQQFASYARLVKCAKESAGKRKGTSGAKMGNVHLKWAFSEAAVLFVRHSAEGRVLLARLTKRHGKGKALSILAHKIGRAAYYVLVREKPFDAAKFFAHAS

SEQ ID NO: 173083 - protein, 386 aa, unidentified
MHDGTNLPVPERTSIPGDCATLFVSLELSRSTWVATSLAPGSKKMSKHTLVGGDGRALLDLLARLKTRAEQRIAAPVKVVAIHEVGLDGFWIHRLLEANGVESHVVDPASIAVPRRHRRAKTDAIDGETLLRTLMAWQRGEPRVCAMTVPPSPSEEDCRRVSRERATLLRERIQHTNRIRGLLFGQGITNYNPLHKNRRECLEELRTGDGRSLPTHVKAEILREIDRLELVLRQIGEVEAERDEILRPAEASSPAALLMRLKGIGAEFATVLYFEGLFRHFENRRQLAAYAGLAPSPWKSGSIDHEQGISKAGNPRLRTTMVELAWMWVRYQPDSALSGWFRQRVGSERGRTRRISIVALARKLLIALWRYVTHGEIPAGAVMKPV

SEQ ID NO: 173084 - protein, 426 aa, unidentified
MKNTQNEKISQIKFSTLVVGIDVAKETHYARAFDFRGIELSKLLRFSNTAEGFQRLEEWMQNICHQHNKTEIIVGFEPTGHYWFNLGDYLKDKGHKLAIVNPFHVKRTKELDDNSPTKNDRKDPKTIAMLVKDGRYREVYIPQDVYQELREVVSERDRLVQRMSSISNQVTRWLDIHFPEFNTIFKDWQRKAALQVLRNFPTPDKIVTAGAVKIEETWKLTMKRTAGLKRAQELVKVAGKSIGRKTGLVAAEASLQNLLNEYDLYSQQYQQLEQLMLELLQQVPNAEKLLDIKGVGLITAATFVGEVGDIRRFQDPRQIQKLAGFNLVENSSGKHKGKTKISRRGRRRLRHGLFMAMITILATNPEFRQLHKKNITRENNPLNKMQSIIALCGKLIRVFYALLRTGTNYSADKMLGDIELGMKAAA

SEQ ID NO: 173085 - protein, 347 aa, unidentified
MLYAGLDLSRHRLDVHLMNDVGEPVQVTTAPPDVDGLRGLVRQTAGFQQPVVAAIESMNGARFIHDQLELAGWQVEIADAQKAKGLAPLACKTDRIDAWVLAELCRRDLVPAIWLPAPAVRAERERARWRLHLVRHRVALKNRIHATLLAFGRPCPVSDLFGPGGRALLAGLGLPEPWAGTTAAAVALIDDLDAQVHGCEQELRHLGADHAYVPLLMSAPGIAWILGYTIAAELGDIGRFASPKKLVGYTGLCPRVDQSGGRDHRGPLAKNGPTYLRWALIEAATHAARHPCYHDHYQRTKQRLGRQRGPAVARVEIARKLAEAIWHMLTKQERFAPARPHTRALVA

SEQ ID NO: 173086 - protein, 401 aa, unidentified
MKYGVGIDISKGKSTVAILSIEGEVIEEPFEINHDIEGLNLLEEKIKDIPKEDLKIVMEETGTYHLPVLGYLLDKGYFVSAENALKIKKYLDRGLRKAKTDKKDSLKIAEYACDNWYKLKKVRENDKIYNNLRFLSRQYLGYIAVQTKQKINFSNLCDLLFPGYYQLLDENNFVLGLKIFKKYHHPEIVINKKQPQFVNEIDKLAKKLGHKGAGITLANKIYLLAQKTISPCPNNEYAQLSAISCADALILTIKTTTTIISEMDKLARELPEYDVISEIPGCGKKLISRVIAEIGDVRRFKNAGSIIAYAGIDAPPYQSGQFESKNRHISKRGNKYLRKTGYEVMKCIKSSCKSDNELKSYIIKKENEGKLRKVAKIAGLNKFLRMYYGIVKKKYKELEIW

SEQ ID NO: 173087 - protein, 466 aa, unidentified
MKPFYMGIDVSKGYADFMIINAQKKPVIQSFQLDDTFEGHQTLYNIVGRFLAKHPNSMLFAGMESTGGYENNWYNSLVAFQGSLNIQTSRLNPLGVKRNSQADLKKNTTDKISAQNIAEYLVAHPEKVAYQQQDQLAGLRKQWGFIQMLTKQRTQFLNQFKGLLYTSNPELLGYCQSETPAWVLKLAIKYPSAARLKRANVKSVAKIPFVSKEKAQQLATNAKRSVASATDTETEQLIIATARQIIHLNQTIDTQSQRMINTCKLPEVELLKTFDGISDKSAIGLIIEIQTVKRFATAKKLASFFGAHPVYKISGDGVGGIKMSKQGRKQPRHILYMITLAAIKCNPLIKQIYEKHQRNGKHNMAAMGICMHKILRIIYGMLKHNKPFDPRIDIANRQLSAQAKEAVPKKNTSRRFQEYDTKAPVSRRQKKKRLERGRSHSVPDTKSGITAPVPLRNIIANILPEL

SEQ ID NO: 173088 - protein, 391 aa, unidentified
MPQPNDLSRSLAALDQDSTLLAVIEMSRSSWLVAGIVPGVERHPAKKLEAGETLLLALLHRWRDEAAKAGHTIDRIAVAFEAGRDGFWLARWLRARGIEAHVMHATSIAVSREHRRAKTDRLDAGLLQRAFLGWLRGERGHCSMVAIPSLEEEDAKRPSREREALVGERTRIGNRMKSALARLGIRGFRPGLRKAAERLDLLRAPEGVPLPPSTLAELRRDLARLRLINDQIAEIEAARIERLRQQPGQARHPMILLLARVIGIGIETADMLVQEVLSRKLRDRRAVARYGGLTGSPEESGARRREKGLAKAGNSRVRRGMLQLAWRFLIFQKDSALAQWYRARTADARGATRKTMIVALARKLLIALWRLVTIGEVPRGVVLRPAIPSSV

SEQ ID NO: 173089 - protein, 361 aa, unidentified
MKRVQSNTLDFSGQNIYVGIDVHLKSWSVAILSKHSVLRRFRQDPEPEALHKYLVSNYPGANYFSVYEAGFCGFWIHEKLTDLGINNIVVNPADVPTMSKEKLRKTDAVDCNKLARELRSGSLEGIYVPGTDILEMRSLIRLRNLIVKDSTRAKNRIKSLLRFHGVEIPEEFTRSSIGCWSKRFLNWLHCLELSTEYGKKTLELHLEQFIRLRKMLLQETRAIREISRKAPFDKPIRLLTSVPGIGVTTAATLMVEIDDIVRFSNADHLASFIGLVPMCHSSGDNDNVGDITPRRHFMLRCLLVEAAWVAIRKDPAMTMAYTEYRKRMNPQKAIVKIARRLVNRVYSVLKHEKEYVPCVIK

SEQ ID NO: 173090 - protein, 351 aa, unidentified
MNILAMDLGKSKTVFCEYNSNNGEYEFGKVKTTPQQIHDLIVEHSPDRVVFEICTIAGWVFDIAKALKVEVEVANVNHDAWRWKNVKRKNDRDDALKLARLSAMKQLPTVHIPKLEVRQKRAMIQYRHKLVRRRTQIKNTIRAILDKQGLVIPKGKNGWTQACLQWLDEQSLALDKVSIEDMWRGQLWMELKMLESVSKAVKQTENKLDNLAKSDDQIKRLETIAGVGPRLAEAIVAFLDEPQRFASGKQVGSYAGLTPKQYQSGQIYRQGRISCQGNKLLRHLLVEISWISLRYNPWARQTYQRLLRGSPSRKNIAIVGLARKLLVRCWAMLRDEQPWRNLKVEREKCAA

SEQ ID NO: 173091 - protein, 327 aa, unidentified
MDAILERCAGLDVHQDTIVACFLSGPLDQRPSKEIESFGTTTKELLRLQDWLQDRECTHVAMESTGVYWKPVWNILENTCELTLANPTRIKNVPGKKTDYSDAEWIARLHRSGLIEKSFVPNEEIRDLRDLTRYRRKLLQNVTQEKNRVHKILQDANLKLTTYMSDVFGVSGRALLESIVNGEVLDAEQVRDMVKSTLKRKVPELIEALNGRLRLHHRKMIRRHLEHIAFLEREIQELEAEIEQLLAPYQREKELLETIPGIKQDAAASILAELGPDMSHFPSDAHLASWAGVCPANHESNGKKNEKRTNVEIKDLNPCSVNVAGQP

SEQ ID NO: 173092 - protein, 427 aa, unidentified
MDEIIEEPAELVERLCAIDIGKIGLVACVRVPHDVKPGRRVQEVREYATVTSALLELADWLRCQQVQKVAMESTSTYWKPVYYLLEAEGFDCELLNAKHVKNVPGRPKTDKLDAVWLAKVVERGMCRPSLVHPQPIRRLRDLTRYRRSLVRERTREKQRMEKLLDDAQIKLSSVINDIFGVSGRKMLQAVIDGERNPTVLAELAHGSMRAKIPLLKEALRGHFDDHHAFLCRTMLGRIDALSGDIAEVTARIEELIAPFAAAAERLDEITGVGVTSAQELIAEIGVNMAAFPSAGHLVSWAKFAPIDKNSAGTKKGGSTGKGNPWLAATLGEVVAAAARTDTFLGARYRRLIRRRGKKRAIVALGNSILTIVWHLLSDPDARYQDLGADFYESKISKQRRERDSVRQLERLTGKKVTLDQSNEQPAA

SEQ ID NO: 173093 - protein, 351 aa, unidentified
MRNLTIGMDLGDKNHVITILDKDGVIVKSCSLDNVRASIIKFFKKYKRSTVAIEASSHSSWISRELKALGCNVLVGNPRKLRAIWNSDDKTDVHDSEMLARIARFDSELLYPITHRSEQAQADLELLKARDMLVKTRTGLINHVRGAVKSFGERLPKCSADSFHKQCRDFLPEDLKAVLQIILEMIEHITSRIKEFGKRIEEINRDVYPETELLKAIGGVGPLTALAYVLILEEPKRFGKGRQVGKFLGLTPRLDQSGETDKQLRITKAGNRFLRRLLVGAAQYILGPFGSDCNLRRFGLRLTARGGKNAKKRAVVAVARKLAVLMHHLWRNGEVYDPFYKSHKVVMKNAA

SEQ ID NO: 173094 - protein, 348 aa, unidentified
MLTYCGVDFHSRQQKVVYCDTATGEVRRQELKHQSDEVRQFYAQLPKPVIVGLEATGSSQWFEKLLAELGHEVWIGNATEIRRRARSRQKNDWRDAELVLDLMIKDEFPRIYRLSEESQEILRRLRYRHRLVKMRTMAKNGLHAIALSAGLSMRAKLLTKPGRVKLERLDLSPALREQRDEWLDLIDQLNHRIARLDSEVQQAGQTDPRVQRLRTHRGLGPLTALALVHTLEPVTRFSTSRKVTAFVGLEPCEESSADKVRWRGISKAGSRLLRFLLIEAAGVAIKYDEELKRFYLHLLHRRDWRKAKVAVARKLLVRAWIMLRDQIDYAEFLKRGVAARSARTGRRS

SEQ ID NO: 173095 - protein, 345 aa, unidentified
MNIIRVGVDIAKSVFHVHGVDRHGQTQWQGKYARNKWLTALSRKVPAGAEIGMEACASSHYWARELQKRGYFVRLIAAQFVKPYVKSNKNDRVDAEAICEAMSRPNMRYVAPKTVAQQDVQAAHRIREELVGQRTAKANQIRGLVGEYGVVAPVGIQQLRHALPEWLEDAENGLSESFRVLLHGLADDLRYLDDRITALDERITESVKQDPVARRLMTLRGVGPLTASSLSGALGDGKAFRKGRDFAASLGLTPRQHSTGGRDRLLGISKRGDSYLRKLLVHGARAVLRHIGGKDDGLSHWLQALVSRKHVNVATVALANKTARIAWALVHNEAAYDEGLAAAGV

SEQ ID NO: 173096 - protein, 345 aa, unidentified
MKNINAIGIDLAKNVFQICAVDEKHWVVFNRQVKRSVVVSILRDIEPTTVAMEACASSHYWAEQIEALGHRVRLIPTQHVKAFVRGHKHDANDAAALAEAATREDLPESVRKTPWQRQLQLLIRRRERRVRNRTQLINQLRGMLYEHGITIGRSVTTLRRRLPEVMLDLEHQDPALLAMATDLIDELNQLQQRIVRDEKQLKAQAQANATCCRLMAIPGIGYLNAVSLVTAVGMNSTLRNGRHMAAWLGLTPRMHGTGGKVRHGSITHRGNAAMRTLLIHGARAAMNAKYEDPLVLWAKGLAKRNGHNKAVVALANRLARIAWVIIHRHEHYQPGHRSVVATATL

SEQ ID NO: 173097 - protein, 459 aa, unidentified
MTRKKKMELDIINPNAAGIDVGSRSHYAAVGQDLEDVKEFGVYAEDLTALCEWLLSYGITSVAMESTGDYWQNLYAELMKHGLEVILCNGKFTKHAKGKKTDVKDCRYIQKLHALGLLTSSFLPDETTEKLRTYCRQRNNLISQASGASRKMQKYLKFLNFRLDVVVKDVCGLTGLAIIKDICKGNLDPESLSEHRHYNCRKSKEEIAKALHGNNRVDFLFGLKQEFQIYQFFQKQIETCDKEIDRFVKEELRKSPEKKKLKTTDKPYKRQNKNAVSIKNFNQIAFQYFGGVDLMAIEGLSHATVLSIMSEIGPDGFKKFGTSKQFVSWARLAPNNKVSGGKVLSSRIPKGSNRLKIALRQAANAIGNQKDTHLSDFFKRVAFRKGRQAAVSATARKLGVIIWTMVTKQVPYNPPREYLFLDQKRKMGLAKRITKQIAKFDLKPEDVGFSNSLILNTNF

SEQ ID NO: 173098 - protein, 343 aa, unidentified
MQIAVLGIDLGKNSCSVAGLDATGRVVLRRRLCRNRVIKLAADLPRCVMAMEACCGAHHLGRALQDQGHQVRLMSPEYVRPYVKAQKNDDRDAEAIAEAATRPTMRFVDLKSVDQLDMQSLHRVRDRLVGERTALINQMRGILLERGVIVPQGRRKLERYLETMMVDETVALSMRTRALVEDMRAEWRELDRRIAAFDEEFAMRARTDETTRLLTSIPGIGALNATALTAAIGNAQTFGRARDLAAWLGLVPKQMTTGGKPRLLGITKRGNVYLRKMLIHGARAAVPSLAKSDTPLGVWLRGLLTRAHKNTAVVALAAKLARIAWAVLRSHRKFEMRAVMPTA

SEQ ID NO: 173099 - protein, 339 aa, unidentified
MTLWTVAIGVDTHKQAHVAVALDRLGRLIDSLTVPATMVGYRQLLVWAHGLGQPTFGIEGCGSYGAGLARFLTDHDETVFECERPRRHERHGDKNDLIDATLAARHVISGDGLSLPRGSGQREQLRVLLLERRGAVRARTAALNQLDAAIMTAPAELRQRLDGVPKRRLVMTVARLRPRPDGVTQVLRRIARRIQLLSSEITEIDQTLDHLVAATAPDLLTECGVGPVCAAQLLVSSGDPARMTTEASFAALAGTNPLEASSGKQRRHRLNRGGDRQLNWALHVIALQRVHHHDQTKAYYQRLLADGKTTKEAKRCIKRALARHFYHRLRELHPPALTT

SEQ ID NO: 173100 - protein, 350 aa, unidentified
MAGGDVPNTERGFAQLVDMFTAHHVQRVGIEGSGSFGRAVAVHLALCWQSGQPVAVVEVPTLMTSRERHGQLGKGKTDPVDALAIARITTREQQLPPVRLTVGAAADLRALLDYREDLVRERGALVNRAHAELGGLRPGYQQQIPIMTTRARVRAAVDLLGDDSSIRATLCRRRLERVIAIDAETAELKQQITRLVAAADTTLTDLYGVGPLVAARFLAEVVDIRRYPNRNAFAAANGTAPLPASSGRTVRHRFNPGGNRQLNRSLYTIALTQIRGDTEGRAYYERKRAAGKSKREALRCLKRRLSDIVFTTMRHDAASADASCDQASPPAWPLLVGVGAVDANEARLTA

SEQ ID NO: 173101 - protein, 471 aa, unidentified
MAAKNGKAEDAGVPGHGGDGAEVAEDSTQVVEYAAAIDVAKGFGMVCTRVPGSRPDRRRQRTWRAEATFTEVTALMDHLRAEGIQRLVLESTSDYWRIWYYLAEAAGLEVWLVNARDVKHLPGRGKSDKADCVWLCKLNERGMLRRSFVPPQPVRDLRALTRTRSRLAQDQARHQARVEKILEDALLKISVVISDLFGASGRRFLDALVAGERSPAALAALGDKRLKATRAELAEALTGRFRDIHAFEISVHLRLTDAICAEITALDEQIGQQLALVPRTAPACVACGLAGGGHTPGCAGEDVPVLDLATRLEEITGVGAVNGRALIAELGTGPSQFPTPGHAAGWARLTPRSQQSGETAKPGRTGKGNRYLRGALGQAAMTAVRTDTRLGAMYRRIARKRGKQKAIVAVSRVICETAWMLICDPSARYNELGPDYYHPLSPARQTQARIREIERLNPGKKVILADAGAAA

SEQ ID NO: 173102 - protein, 414 aa, unidentified
MKIVYPICCGVDVHKRMLVATIASTDSNNMTMYTTETFLTSNSELEQFRNWLISNQCFHVCMESTGKYWIPVFNILEKDIHVILTHPKYVRAIKGKKTDKKDSKWIADLFKFDMVRSSFIPPAEVRAMREIARYRFKLICMRSSERNRYQNSMTISNISLANILSDPFGKTSTLIMDYILSSDTFNEDYCRSLIQKSAKKKTDLILDSLNGFKIQSDQHLKMKVAKAHMDYLDQKIIATETELFTRVHPHYPLVQHLAEIPGITELSAALILAEIGVDMTVFEDAKHLTSWAGLTPANNESAGKKKSVRISKAGQYIKPLLVQCALAATKSAKEPYFASKYLNLKKHRGHKKAIIAIARMMLVCIYHMILTGETFNPSDYEELQNPKPARQEMTVSNALAFLEAQGFDISKLVV

SEQ ID NO: 173103 - protein, 341 aa, unidentified
MKHEMHVLGIDIAKRVFHAVGMDDRGHIVYRKRLARHDLMPCIAKLPPVRIGIEACGGAHYWARRFRACGHEVKLMAPQFVKPYVKSNKNDSRDAEAIAEAVTRPTMRFVPIKDVDQQDIQALHRVRERLIGERTALVNEVHGLMQEYGMVLPKGVAKFRQAVVGKLEAEKDKLTSLSQEMFWKLVEEFAALEKQLAYYQEKLDTLAQTHPECQRLMTIPGIGPLTATALVAAVSDASAFKNGRQFAAWLGLVPRQHTTGGKERLLGISKRGDTYLRKLLVHGARTTIRWVGRKTDRRSQWMRHLVERRGKNRTAVAVANKNARIVWALLTSHQDYQPATS

SEQ ID NO: 173104 - protein, 343 aa, unidentified
MQAITTIGLDIAKSVFQVHGVDADGQVVVRRQLKRRYVLAFFEKLAPCLIGIEACASSHHWSRQLRALGHTVRLMPPSYVKPYVKRQKNDATDAEAICEAVGRANMRFVPTKTPEQQSGLVLHRTRHLFIRQQTSVINAIRSHCAEFGIVAPVGRQGVEELLNVIANANDEQIPEIARACLSALGDQLHRIKAQILEFDRMIGAWHRSCEASRRLDEIPGVGPALATALVASIADPRTFRSGRDFSAWIGLVPKQSSSGGKPRLGSISKQGDRYLRGLFTAGALAVIRYAKTHRIGHRPWLTALLARRPTKVAAIALANKIARMAWAMMARGEHYREPVALAA

SEQ ID NO: 173105 - protein, 401 aa, unidentified
MEFNTDRSSLDKFAAWCRERDPSIILMESTGVLWISPYEALENVGFGSDRLALINARDAKAAVGRKTDRKDASRLAELARSGHFRRSFVPPKDFRIQRFISREYQKIKSELSVAKNRHQKLLNSTGCRASIVFSDVHGKAASAILEAKINNDPQLSKIISANCGRLRATPEMIEDALNFEIEPLVAEQLRRSSEHLKELHQYAENTFNRLRKLQQPYEAQIKLLRTIPGVQEISARLIFAELCGNLKDYFVDSEHFTSWLGICPGDNTSAGKQKSGSCPKGNKWLRRTLVECVRGYSLSGRCPSKEKFQALKLRRGYKRAVVAMAHLLARIVYSVLLNNKAFEPQETNAHRDAVVVRILSALKEAKRFPKSGIGIVDGRYLMVESTGAIIADLYGIGIKPV

SEQ ID NO: 173106 - protein, 457 aa, unidentified
MMEAKRRREQRSMLPVHPDAAAIDVGATVHVAAVGPARDAEPVRSFGTFTGDLYRLTDWFAQCGIKTVVMESTGVYWIPIYEILEQRGFEVRVVNARDAKHVPGRKTDVSDAAWLQRLHEFGLLRGSFRPQGAIAALRAYLRQRERLLDYAAAHIQHMQKALTQMNLQIHHVISDITGATGMRIIRAIVAGERDPDTLASYRDIRCHSSEETVRQALIGNYREEHLFALAQAVELYEVYQAKVATCDEKIAVVLERLKQTCRAPAKPLRAARHKTRQPNAPAFDARGALYAVLGVDLTQIHGLGPYLALKLISECGTDLSAWPSAKHFTSWLSLAPRNKISGGKILSSRTRPSGNRAAALLRLAATTVGRTETALGAFYRRLSARIGKAKAVTATARKIAVLFYNAVRHGMDYADPGASYYEERYRQRVLTNLQRRAKAFGYVLQPTEINVVSMAVS

SEQ ID NO: 173107 - protein, 407 aa, unidentified
MRLFVGDDWAEDHHDVEVMDEQGKVLAKRRLPEGVAGMARLHELVGQHLGEDGGEADVAVGIETDRGPWVAALIAAGYIVYPVNPLQASRYRERHGVSGAKSDGGDSHMLADMVRTDSHQLRPAAGDSPDAGAVKVVARAHKTLIWDRTRQVQRLRHQLREYFPAALAAFEDLDAADALELLARAPDPARAARLTRAQVTAALKRARRRDIAGKTDAILAALRSEQLGLPAAVTAAYAAAARSLIALITTLNQQIKALEEQVGAHFGRHPDAEIYRSQPGLGAILGARVLGEFGDDPHRYASAKARKNYAATSPITRASGKRKVVAARWIHNDRLVDALRAWAFASLTASPGARAFYDELRARGIDHNDALRRLANRLVGILHGCLTTRTLYDEATAWSHRESSLAA

SEQ ID NO: 173108 - protein, 392 aa, unidentified
MERPMSQDFDASRSLTALEQDNTLIVVIEMGQAKWLVRAVVPGIERQPLKRLDADEEALLKLLYRWHAEASQAGHAIKRIVVAYEAGRDGFWLARWLRARDIEAHVIHPSSIAVSREHRRAKTDRLDTELLLRAFLGWLRGEKRHCSMAAIPTVEEEDSRRPNRERENLVREQTRTVNGIKAILVRFGIRTFKPTLRKAEDKLEALRTAEGIQLPENTRAELRRNLARLRVIREQTRAIEHERLRKLAAAPAESGPHAMVRLIARVIGIGVETADMLVNEILSRGLRDHKAVARYAGLTGSPEESGKRRREKGLARAGNARVRRGMIQLAWRFLMFQKNSALAQWFRARTADGRGTTRKTMIVALARKLLIALWRLATAGEVPAGVLLRPAA

SEQ ID NO: 173109 - protein, 392 aa, unidentified
MYIVGIDIGKNHHEASIVSPEGKQIGRSLRFATTHKGADSLMSFIFKNIGNSPCVFGMEATGHYWYPIYSFLKAKGYTIYVINPIQSDSLRKMYIRQTKNDSIDSFLIAEVIRFGQFGTTSMADENILAMRQLCRYRDSVISSRTEIKLRIGTIMEQIFPEYEKQFSSLWVSTSMGILEKYLTPENIENAPIDELFEIIKDKSHNRLTRAKAISIKEAAADTFGIKIAQDAFSFQLKQLIDRMNFLDKQIEALDCQILEYYEKFDCYLHTIPGIGMIAAATILAEIGDINRFKSSSALVAFAGIDPTVRQSGEFSNTHNHMSKRGSPYLRHAIFLAATTCSFHNSPLNAYYKKKREQGKHHLTATGAVARKLTTVIYAVLRDGKPYEPKKFC

SEQ ID NO: 173110 - protein, 347 aa, unidentified
MRFYTRQHRHYCGVDLHARSMYVCVLDRDGNVLVSKNIPSAPEPFLELIAPYREDLAVAAECMFTWYWLADLCAREGIVFVLGHALYMRAIHGGKAKNDRIDAHKIAGLLRGGMLPQAYVYPQAMRATRDLMRRRNYLMRQRAELLAHITNTNHQYNLPALGVRPARPAERSGLLEHFTEPQVRRSVAVDLSFIEHYDRELPALERYLESNAQAHDPLALAIVRTVHGMGKVLGLSILYEIQDIGRFARVQQFLSYGRLVKPTKSSAGKVLGHSGKKIGNAHLKWAFSEAAVCFLRANKPAQALRARLMAKHGKGKSLAIIAAKLARAVYFMLKRGEAFDAERFFAH

SEQ ID NO: 173111 - protein, 366 aa, unidentified
MKKISTMAIEGIQIFKDNQLTIGLDLGDRTSHYCVLDESGQVILEQELPTTPKGFEQVFSKIPRSRVALETGTHSPWVSRQLTELGQEVIVAHARNVRLIGESSRKDDRLDARTLARLARIDPGLLGPVRHRSAKAQIHLTVIRARAALVSSRTALVNAARGLAKSYGARLPKCGTEQMNREITKELKPELREALNPLVREIESLNERIAEYDTRIEQIAKEIYPEVARLKQVKGVGPLIALTYVLTLDDPHRFRRSRDVGCFVGLRPGRRNSGMSEPQLHISKEGDRYLRTLLVQGAHYILGPFGQDSDLRRWGLKLSERGGRNAKKRAVVAVARKLAVLLHKLWVSKEIYEPLRNNRQAMARVA

SEQ ID NO: 173112 - protein, 417 aa, unidentified
MAEETEWFVGIDWASQTHQVCLVDAHGECLGERAVAHGGPGIEELCDWLITRTGATPEVIGVAIEMTQGPIVEALLERGFCVYGINPKQLDRFRDRFTVAGAKDDRRDAHVLGDSLRTDRHAFRRLSNDEPVIVKLREWSRMADDLQQERNRLASRMREQLWRYYPQMLELADDLAADWFLDLWSRAPTPAMAVRLRETTIERFVKAHRLRRWQASEVLSILKQKPLSVAPGVVEAASDHIRTLTVRIRLVNQQLKAAHRKLDELCAQLIPSEEDEPGQQCEQRDVVILRSMPGLGRIILAVLLAEVWQPLRRRDYHALRSLSGVAPVTRRSGKTRVVVRRYACNKRLANALYHWARLATQHDALSRRRYAALRRRGHSHGRALRTVADRLLSVACTLLEQQTLFDPTYEVRDAASG

SEQ ID NO: 173113 - protein, 346 aa, unidentified
MMIIGCDFHPSWQQVSWLNTETGEAGEQKLVHGTGEAKRFYQQLAAPVLIGMEATGNSQWFVELVEDVGHQIWIGDAAQIRASYVRKQKTDKRDAAHILKLVVQGRFPRLWMPDREQRDLRQLVLHRHKLAEIRSRVKNELQHLSMNKGMQKKRTLWSQAGQKMLRQLPLKPWAACRREDLLGLLSTLNQQIGVLDAAVQTAAEENPQAKLLMTQPGVGPNTALAYVLTIGEVSRFPRGKQVASYLGLIPREHSSGGRQKLGVITKQGNRMLRSLLVEAAQTAVRLDPGMKKEYLHRCHQKPKGVAKVAAARKLAVRLYWMLRTNLSYPEIVRIESSPRVPLVGAS

SEQ ID NO: 173114 - protein, 436 aa, unidentified
MTSHCLSYNYFFRRLSVLPFKILKLNCCGLDVHKTWIYACIGITDSKRRTEYKQARFSSFSKGLKELCNWLAKYNCNDVCMESTGKYWIPVFNVLEKNNIWVTLSNPKYTKPQKGNKTDRKDARWICDLYMCGMVQPSFIPPADIRQLRDLVRYRFKLTCMITSEKNRAHNCLTVSNFKLDEVFSDIFGKSSRSITEQILQHPGESFDVAPFVDRRCKTPVEEIQAAVDGAISPEQAVKLRQCLNHIDELGKHKAEIEREIFRLSDKYEDALTLIRTIPGFDKNPMTAIQVLSEIGGDMSVFPTAKNLVSWAGCCPRNDQSNHKIKSTRISRAGSYFKPVLVQIANALIKSKKHPEFTTRYRRIKTRRGHKKAIIAICRMLLTAIWHILTDLKPYTPEGFLKQHPLKESKVLTTSQALNLLKQRGYIIKDEAVSAT

SEQ ID NO: 173115 - protein, 339 aa, unidentified
MKLYAGNDLHANNNHWGVIDETSKRVFYKKLPNSPEKILSTLEPFKPDLAAIAVESTYNWYWIVDLLMEQGYTVCLANPAAMNKYSGLKHSDDKHDAFWLAEMTRLGILPQGYIYPKQERPTRDLCRKRLQLVNMRTAIILSLKSLIARNIGQRISAENIKKLSQEDITEMLSGHEDLMLRAAMDKVAIDNFSGQIKFVESSLKNKIKSNTTYLNLMTMPGIGPILSLTILLETGPIERFEQVGNYASYCRKVDSKWTSNNKNKGKGNKKNGNRYLAWAFSEAAEHARRCNQQAKSFFEKKMSKTNRMIAHGALAHKMSRAAYFIMRDNVPFEPKKMFS

SEQ ID NO: 173116 - protein, 336 aa, unidentified
MNIIGCDFHTRFQQIAMLDAETGEMAERRLEHETGKARAFYAGLPGPSRVGMEATGYSRWFERMLGEQGHELWVGDAAAIRAAMVRKQKTDSRDALHILNLLLTDRFPRIWIPSPQEQDVRQLLRHRYKLVCFRTSVRNQLHAQAMGEGSCRKRKLWTAKGRRELESLVLGSWASRRRQELLELLDRLDSSIGELDQAVIEEARSRPLAVRLMEHPGVGPVTALAFVLTIGPVGRFRRSKQVVSYVGLNSKESSSGGKQRLGSISKQGNSMLRFLLVEAAQTAARFDPELQRDYQRLKFRRGPGVAKVAIARKLVVRLYWKLRATEQSSAAGSHAG

SEQ ID NO: 173117 - protein, 347 aa, unidentified
MKIIGCDFHPSFQQIAMLDTETGEHIEKRLTREEAVAFYRGLTGPVVVGIEACGNTLWLERLLAECGHELRMGDAAKIRAMEVRKQKTDRRDAELLLQLLLEDRFPQIWVPSLEQRDARQLLLHRHKLVNVRRQIKNQLQHLALNQGIQQKQKLWSKTGRKLLEELPLTGWTARRRADDLQLLDELNRSIVELDTAVEQVAAQDPIARLLQTHPGVGPITALAFVLTLGRVDRFAHSKNVVSYLGLNPAEHSSGGRQKLGSISKQGNPFLRSLLVEAGQSAARLVPELKRAYQRLKHRKHSGVAKVMVARKLAVRLYWMWRTQQPYSAPRMQGSPSHLVGGTLHPVA

SEQ ID NO: 173118 - protein, 423 aa, unidentified
MMKLKYSICCGLDVHKNVIVATIVTTNKDGISEYLQKSFSTINSDIQRFHNWLIENNCYHVCMESTGKYWIPIFNYLENDIDVCLTHPKYVKAIKGKKTDKKDSKWIADLYKFDLVRCSFIPPKDFRQLRELSRYRFKLVCMKSSEKNRIQNCMTISNVGIASVLSDPFGKTATEIMSYLLEHTADSMDEKAVRKLIKKGAKSKSDEIIEAIKGYTIETDQAKKLELARGHLEYLDDMITQTEVELYVRIKPYYEFVEFVSTMPGMTELSSTIVLAETGVDMDIFDDAKHLCSWCGLSPANNESAGKKKSVRIAKAGDYLKPMMVQCALAAIKSKKQPYFAIKYGRIKKRRGHKKAIIAIARMMMVCIYHMVSEKKPFTPTDYEELMNPQNHVERVVLNENNVFAYLESLGYDSSKLVKRNDN

SEQ ID NO: 173119 - protein, 427 aa, unidentified
MNYNQNHKISQVTPSTLVVGIDIAKDKHVARAQDDRGYEFGKRLIFENRIEGFELLIDWISKLQKENDKTHVIIGAEPTGHYWMGLGYYFASKDYDFVLVNPMHVKKSKELDDNSPTKNDTKDARVIAQLVKDGRYSIPNLLDGIYAELREAIKLRDQLIKQQGITEGRIQNNIQRYSPEFNDVFKDWDGKTALYTLRAFPFPSDIRDKTPEDILAEWKTVVKRGVGIKRAASLVEKAKKSIGIEIGLRFAKRELHSLLDQYELYADQLEELNQEIKTLLEEIPGAKEMLAIKGLGVTTVAAFFAEVGDLSNYHHPQQLVNMAGLSLREHSSGKFKGETKITKRGRKKLRKAIYLAIRPLVANNPTFQALHKYYTTRPENPLKKQQSLIALCGKLLRVLFVIGQKQCEFDGSKLLKGLPQIETLQAA

SEQ ID NO: 173120 - protein, 408 aa, unidentified
MNPLFVGIDVSSRNNVAYLMKPDGSKYSSFSVQNNIGGAKLLAERIVSALRSMQLSDVVIGLEATSIYGDSLVYALRENGSLGQFQRKIHVLNPKQVRKFKEAYPDLPKNDSVDAFVIADHLRFGRIAREVYMDDYRYQALRTLTRARFDVIQNLTREKQRFANYLFLKCSGIAQDKDISNTSATTIALMEHFETVDDLANADLEELTSFITETGRGRFADPNATAKAVQAAAMASYRLPKTVNDTVNQAMAVSIASMRALEKQVKVLDKAIEQQFEIIPNTLTSIPGIGKVYSAGIIAEIGDIHRFDSQASVAKFAGLVWHKDQSGEFEAEHSHMIKSGNRYLRYYLLEAANSVRRCDSEFRRYYDLKFHEVNKYQHKRALAFTARKLVRLIFRLLKDNRLYIPPEG

SEQ ID NO: 173121 - protein, 408 aa, unidentified
MKDSGKRYIGLDVHKHYLIAIGVDDELHVVLPARRVELSHLEAWMKKTLTRQDVVVLEMTTNTWQLYDELCEYAGRVLVVHPPHVALITRSQVMNDKIAASILARLLAKGLLVGIWVPPQEVRELRGLVAQRKKMTGLATQAKNRLHAVLQRHHLVPPEGNLFHESQQDWWLTLPLGPLEKVNVQSDLETLRFAQAQQMRLTCMMEEITNQQEQVTRLLQVPGFGVVTAVTVWAAIGTIQRFEDPQHLVGYAGLGTRVHNSGMSTRTGRITKAGRRDLRVVLIEAAQIAANTHPHWKAELARLQPRLGRNKAIVAIARKLLIAVWYILAQYKTDRFAEPQAIAQKLLKFAYQLGKANRPPGQSAAQFVRQRLDALQLGQELTSIAWGSKKPIPLPSSTNKVSDVPNTK

SEQ ID NO: 173122 - protein, 356 aa, unidentified
MSSKLNTAIAVAGIDIGKNSFHVIGLDKRGAIVLRQKCSRGQVEARLANTPHCLIGMEACVGAHHLSRKLQALGHDARLMPAKYVRPYSKGQKNDFRDAEAIAEAVQRPTMRFVATKTGDQLDLQALHRVRERLVGQRTGIINQIRAFLLERGVAVRQGLRFLRIELPGILAKRTDVLSPRMLHLIEGLADDWHRLDERIEVLSSEIGALACGDPACDRLMTVPGIGPIISSATVAAIGNGAAFSKGRDFGAWLGLVPKQISTGDRTILGKISRRGNRYLRSLFVQAAWVVLVRVGPKHWDRYGLKSWIEAAKKRLHHNVLAIALANKLARIAWAVLNKERKFECIRTNKMSPRAA

SEQ ID NO: 173123 - protein, 481 aa, unidentified
MAKVKLSVFDRLRLGARLNRKERRDVEQRLSAADPGLEIVNRDAAGIDVGNESHFVAVPRGRDAQPVREFGSWTAALVEIAQWLTRCGIRTVVMQSTGVYWIAVRDVLQKHGLEVNLVDARGTKNVPGRKSDVQECQWLMRLHTYGLLRACFLPAPEIHGIRTVWRLRDQHIKDAGRCIQHMQKSLIAMNVQLHNALSDIGGTSGQAIIRALLAGQRDPKTLAALRDRRCMASEEEIVHSLQGVWKPDVLFELQQAVDAYDFYRQQMAKCDEQLKQHMALLPARRVETLVSSAEPSPTDMSKKSRSRKPQGNEPAFDLGAELERILSVNATTIDGINVMTVQTVLAEVGPDLSAWKTEAHWSSWLNLAPKRDVSGGRVIRHVREHRTNRVGNAFRMAAQALLRSHSYLGARCRYLRAKLGGQKAVKAMARVLACLYYRLVTKGQRWVDQGIEEFNRRSEQRELVLLQRKAHKHGMQLVPTA

SEQ ID NO: 173124 - protein, 356 aa, unidentified
MVYIGVDLHRKRSQIAVVDEVGKVLANRNVASTGPEILRVFGEVAPDPTPIRVAFEATFGWGWFADLLRDAGVEAHMAHPLATKAIASARVKNDSVDARTLAQLLRSGMLPEAWIAPPEVREARRLVRMRVGLVRLRSRLKAQVHAVLAEHGVANPVSDLFGKGGRKLLDELKLPDLSQNRVQACLRLVDDLGTEIQIADTEILALFETDPRTERLLPIPGIGPTTAAIILAEIGDITRYPDARHLCAWAGLTPTEHSSAEHTRRGHISKQGSRWLRWIMVEAATHALDNPELGRFFTGIERRREAKIARVALARRLLTLVFYALRDEGGCRAFPVTRKTRSPRGRARSLVAMASS

SEQ ID NO: 173125 - protein, 320 aa, unidentified
MAMTVLQSIIGVDVAKAEVVACHFETDELKIVPNNKTELKAWLKSLPEGSGIAIEATNIYHLDTVNLAHGMGHMVYVIDGYRLNHYRKSTGGRAKTDASDARLLARYLKNEQADLRAWNPPPKVYTKLQSLLRRRAALVKMRVGLNQSWAGEPLLKASSKSVSACLARHEGLIEKRILDAVTEAGLLHQIKRCQAVEGIGFLTAVALTMAFQRGEFESADAYIAFLGMDLRVSDSGQMSGRRSLSKKGDSEIRRLLHNAASAGIKSNAWKPLYQGYLGRGLKTTQALVIIARKLARIAFSLMKNQSEYQSKAVLGASTKP

SEQ ID NO: 173126 - protein, 338 aa, unidentified
MKTTTFGLDLAKRVFQIHWVDMETGEIGKRQLKRDQVRPFFANRAPAVVAMEACGSAHYWARQLTGLGHDVRLIAAHFVRPFVKRNKTDAADAQAIWEAVQRPEMRFVAIKSEAQQGVLTLHRVREQLMKMRRMQVNQMHGLLYEFGAGVPAGPHGMTHAARALTELADTLPAMVIETLREQLQRIEALTHDIAAIERRLAAWQREDEAAKRLMAIPGVGLLSASAAIATIGDASTFRSGREFAAFLGLVPRQSGTGGRVKLLGISKRGDVYLRTLLIHGARSVLTHQKQFSEHLQHLLARRPFNVAVVALANKIARTIWALLAHGRTYEHGYVAHAA

SEQ ID NO: 173127 - protein, 411 aa, unidentified
MRLLVGDDWAEDHHDIEVMDEAGKVLAKKRLPEAAAGMTQLHELIGRFVPEDADGVEVVIGIETDRGPWVAALTAAGYLVFPVDPLQASRYRERHGVSGAKSDGGDAHMLADMVRTDSHQLRPAAGDSAEGQGIKVVARTHKTLIWDRTRQVQRLRHQLREYFPAAIEAFEDLDAPDALELLGKAPDPGRAAKLTRAQVAAALRRARRRNIKDKTDAILAALRGEHLGQPSALTAAYAATARSLIAVITALNAQVKILEEQVREHFGRHPDAEIYQSQPGLGPILGARVLGEFGDDPHRYASSKSRKNYGGTSPITRASGKKKVVAARFVRNDRLIDALMSWAFASLNASPGARAFYDEQRARGLEHNDALRRLANRLVGILHGCLKARTLYDEATAWGHRENLPQSSVAA

SEQ ID NO: 173128 - protein, 404 aa, unidentified
MWYTGIDWADEHHDALTIDEQGHQMGSIRVDHSPQGFAKLDDFLMQAIGSASKEHMACIIETTHGLLIVHLLEAGWPVYPVNPRTVDRRRSASGAKTDLIDAYLLAKTGRSDFADLHRLTPDSEKVAELKQLTRDQDTLIRTQTRLVNQLTACLKAYYPVALDLFSKLQQKSTLEFLQAYPTIEAARAATLPELQQQLKQTRHPHPAAAATSMVALLQQPQLQADKVLTRTKSRLMLALVSQLLPLMEQIADYDKEIHTLFLTHEDHALFESLPRAGQHLAPRLLAEIGDDRERYRDASSLQALGGTSPVLYESGMYSKAHRRLGCIKPLRNALHQFAWQSTQSETWAKEYYQRKRAEGKSHTVAIRALSNVWVRIIFAMWTRREGYQTATFELAQQQHARRAA

SEQ ID NO: 173129 - protein, 339 aa, unidentified
MYYYGIDQHKRDSFITTYDSQGTVVKQMRVANDPLLIQNYFAQFSGSHRAVVESTGSWYWLADLLQKLDVKLTLAHATELKAISAAKVKTDKVDSDILAQLLRADLIPEAHKISADKRGPRDLMRTRLRLISKCASCKNSIERLLEKFNGSAITELDDLYQLQIRAHKEQIALLEQQIHTIERTLHPHLIPNEDIQRLLWIPGIGKIGAFTICTEIDGIERFPSAKQFFSYCRLVPGADNSAGRTRHRSGSKAGNCYLKLAFSHAGVRAVQYYPEIKTFYKEKLRRKPQRIARTLVSLEIARIVYHVLKTREDFNGHFKKQQLSRRKQSQWPRLASPAA

SEQ ID NO: 173130 - protein, 341 aa, unidentified
MRTLYIGMDIHKNFIQAAAMDEAGNIIKEQQFKSNEKEIKRFVKSLKTKKIHAAIEATCTWYHVYETLDVLGVETTLVNMRRTKTIAESKIKTDKLDAKTIAHCLRTGFIATAYIPPKTIMEQRTILRHRMSLRKEITRYKNKIHAILLRNGIQHSDYSDLFGPGGMTFLRHLALSDSEQYSLTSYLNILETLIHEKTQTAENIEKLCKNNHHAMLLTSIPGISYYGAMIILTEIGEIHRFPHPKKLCSYAGLVPRTIQSGTHVYHGRILKECNQNLKWILDQCTHIHIRHCPNSSITRLYHRVENKKGRNKAIVAASRKLLTCVWYMLMKDETFKYSNDD

SEQ ID NO: 173131 - protein, 349 aa, unidentified
MKKLSKMPTQMRETIGIDLGDKVSRYCIVDSNGDVVEEGSFRNQVSSIDKHFGGEPRRIALEAGAQSAWISRELKRLGHEVIVANPRELKWITASDAKNDPVDARKLALLARADVRLLAPVEHRTAEQQAELAVIRARDAILRARTLLINSARSIAKGFGVRLPKSITGTFGQRAIDALPEFLRTALTGLLEQIDAISGEIAGYDQKIGALAPGHPELARLESIPGVGRLTAMTFVLTLGRAERFAHSRDVAGFLGLRPKQRQSGARDPQLGISKSGDPYMRKLLVQCAHHILGHYGKDSALRQWGRAKSEGGKKATLRAIVAVARKLSVLLHRMWVSGEFYKPFPNMA

SEQ ID NO: 173132 - protein, 451 aa, unidentified
MASKKTNRTRRKKSNPTPKTTHPDAAGIDLGANVHYVAVPADRDAQPVRHFGTLTGDLNELADWIKDCGITTVAMEATGVYWIPLFQILEDRGFEVCLVNARHVKNVPGRKSDVQDCQWLQYLHSVGLLNASFRPPAAICAVRSLMRHREGLMRAACQHLLRVQKALDQMNVQLHHAVTDITGQTGLAILDAILAGERDPEALARLRHFRCKKSEAEIARCLRGDWREEHLFTLRQSLEAWRFHQLQMAECDKRISKHLDALDDRGEGSAPQSPKQGANAPDEPIRQELYKKFGVDLTAVEGVSIQTVLAFLGEVGTDVEKFPSAEHFASWLGLCPDNRITGGRTHAAHTRKVNNRLATALRMAAQSLHRSKSGLGDWFRRLKSKLGTKAAVTAAAHKLARILWAMVKHRRPYNPERLGNHELARARKERYLRLQAEQLGFNLTPVEGEVS

SEQ ID NO: 173133 - protein, 315 aa, unidentified
MFTGIDVSKDWFDAAWEVQGRLYCEHFAYTDEGMEQLMAQAPSGAVFVMEATGVYHARLALKLFEAGRPVSVVNPLVIKRYAQMKLLRVKSDRADAQLILRYGQEHQPARWEPAGEQVQELQQAHGWFNDLISERTRLLNRQAVQQYRARPSAFVAKQMGEQLEQLQRRINACQEHLEELVKKSFAQLYERLLTIPSIGQKTALELIIVTDGFTRFEDVKELGAYIGVSPTTFSSGSSVKGRGTIAKMGQARMRQLLYLCSWTARKCNPACQQLHQRMKAQGKPSKVISIAIAHKLLRQAHAVATKNVSFSAQFA

SEQ ID NO: 173134 - protein, 463 aa, unidentified
MTLPPPASSGPLSDDRGMRRRAPVSDHSTVGSFASAWGLPSGSSRKATGLSLQEALFFVGIDWAAAEHAVCVLDRDGRKVAAFTVEHTAAGFAKLAARLGKLGEAERVPVAIERPDGRLVDALLEAGHPVVPVKPNAIKAWREAEVLSGAKSDPGDAAVIADYLRVRIHRLRPAAPYSPHTKALRAVVRSRGDLVEARVAATNQLAALLDAQWPGAKAIFADISSAIALAFLRKYPTAVAAASLTEKKLAAFCAKQGYSGRKPAAVLLARLRNAPAGATDPVLSQGVRDAVLAQVGVLTALNAAIKTLDRSIGERMHAHPDAEIFRSFPRAGTINAAQILAEWGDAREAFDHPDALAALAGITPVTKTSGKQRGVSFRWACNKRLRVAITTFADNSRHASPWAAHTYNRARADGKDHPHAVRILARAWLRVMWRCWQNATPYDPALHGAARAINPPTEQAIAA

SEQ ID NO: 173135 - protein, 334 aa, unidentified
MSAIKTIGIDLGKSTFHVVGHDYAGQQRYRHKFSRSKLLQFISVHEPVLIAMEACCGAHWLARKCQEYGHQVKLIPPQYVKPYVKSHKNDFIDADAIAEAATRPRMRFVSPKTEQAQLGVVIRRIRTGYIRERTAVMNRIGSILTEFGFSFPRGHANMKRLFQWLADTGQQVPPLLIFELRNQLIITMSLITKSKNKTKKLETLNSGNELFTILQTVPGVGPMTAVCCISSVSDPEDFSNGRNFAAWLGLVPFQYSTGGKPRMLGISKRGNKELRELFIHAARAVLWRDGTAEKYFGKWLIELKHRKPFNVALVALANKLARIAWSVMATKKAF

SEQ ID NO: 173136 - protein, 357 aa, unidentified
MSVYVGIDVHRKRSQVAVINQDGEVLANRNVPNGVKPVLSVIGGLPPGTPAAFEAAFGWGWLVELLEDYGFEPHLVHPLQCKAIASARLKNDKVDAAILAQLLRAGLLPEAWIAPPAVRQLRALLRHRAQLVRLRTLLRNRIHAVLADHGHDRPGGCWSGPGRAWLAARELPAVSREVIEDDLALIDALQQPIDRLDWEVHQRAKTEPAVKALTPLPGVGPFTALVILAETGDITRFGSARKLAAWAGLTPTVRGSDRTVRHGHISKQGSTWLRWVLCQAAQTAKRHPDFAASYQAIARRRGSKIATTAIARKLLTRAYHLLTDAQITAPLAAATAPPGALTAPEGSPGPGRARIVA

SEQ ID NO: 173137 - protein, 408 aa, unidentified
MEVVHARCCGIDVHQASLAVCVTIKDGGKSDKHKLCCGTTTAELLRLADWLHGYQVTHVAMEATGVYWKPVWHILEGQFELLLANPTQVKALRGRKTDLKDGERIADFLQHGLLQGSFVPPQPIQQLRDLTRSRTTLKQEQVRIGNRIRKVLEDANLKLSSVMSDVMGASGREMLRAIVGGESDPAALAQLARKRLRGKIPVLQQAATGTLNEHHRFLIEQWLALWDELVLRIHKFEERIEEQMRPFAAAVETWTSLPGIDRITAWTIIAEMGPDMAQFPTAAQAASWAGLCPGQEESAGKRQSGRTRQGNVWLRRALTQAAWGASMKKGSYFKAFYHRLAARKGKKRAIVAVAHALLTTGYILLWTGKKYSDLGEDYFDRLNRDQLTQRLVKRLERLGHQVSLQPAA

SEQ ID NO: 173138 - protein, 350 aa, unidentified
MQGTGRWIGLDLSKETYEMCYFDQKGKVGRSGGETTKAGRSKLYAKLKAEDIVAMEVNSLAFVMEKEMRTIGCTVVILDASQLSIIYASTKKTDKEDALKLARLVKIYEKEDLPIVDVPTEKEYYRRKLTKECKTLKDDRTQEINRLHALFLQCGITTMKRSNLQTDANRQKVLPQLFGYEVGQAKRVCERLTLLETQIKELEQTITKECKADKDIERLKTIPGVGDKTALAFAAYVGDGKRFNNGDEVANYLGLVPRVDCSGSINRYGHITKKGNRIVRALLYQAAWAIVRSKHGGALKAKYFYMTEHGKGKKISITAIARKMAKLLYLVMKNKQMVYQENPVSALQAG

SEQ ID NO: 173139 - protein, 340 aa, unidentified
MTVIIGIDPHKATHTAVAIGCDEAELATVTVRATRQQVDRLLGWAAPFEERTWAIESAGGLGYLLGQQLVDAGEHVLDVPATLASRVRVLGTGKSDKNDPNDARSVAIAALRSPGLRSVQPADHAAVLRLLAKRNQDIGDLRTKLVCRLHAQIASLSAGGIAKELNASDAEGLLGAFEPRSPAEATRHQLALELLEDVRRLDNQLKESHKRMKIAVRASGTSLTEVFGIGPVLACALIGYTGDVIRFTSRDQFASYNGTAPIEVSSGGRAAHRLSRRGNRQLNHAIHMVAICQIRQIHSEGRAYFEKKVAEGKTKREAIRSLKRRISNTVFRHLVLDTKR

SEQ ID NO: 173140 - protein, 406 aa, unidentified
MTSVFCGIDWASDHHDIALLDETGALLAKLRIDDSPQGLTQLLDLMARHGDAPDNPIPVAIETSHGLLVACLRATRRPVYVINPLTAARYRDRYALSRKKSDHLDAKVLAQILRTDPAEHRPLPADSHLAQAITVLARAQQDAVWDRVQTGNRLRSHLREYFPAFLTVFRHFREGLASTVSRTLLAAAPTPTQAAQLTRPQLRSILKRAGRQREITSEVERLHTLLREPQMHQPPLVEQAMGTKTLALLRQFDAACTSADDLEAAVVDAFTAHEDAELITSFPGLGHLTGARVLAELGDDHTRFANARALKAYAGSAPITRSSGRKTTVLARHIKNQRLASAGYIWAFAALTASAGARAHYDRRRTAEERHIAAQRNLFNRLLGCLHHCLTHHIPYDEQTAFPDTA

SEQ ID NO: 173141 - protein, 425 aa, unidentified
MTPEPNPEFAAFIGIDWADAKHDICLQAAGSRQREFAVLSHRPDAIDEWAAALRQRFHGQAVAVCLEIARGPLVYALQKHDFFVLFPVNPATLAKYRQAFQPSHAKADPADAQIALELLLCHRDKLKALQPQSVGIRTLERLLEERREFVDEQTRITNRLTSALKEYFPLANAWFDEKASALFCDFLSHWPSLKQLQRARRTTLLTFFREHHCYQPRLIEERLAALQRAAPLTDDAAVIKPKALMVEGLVDQLRVTLKAIARFDAEIESVAPTLPDYALFQALPGAGPNLAPRLLVAFGERRERFASAADVQMFVGVAPVTESSGKQHWVHWRLQCPTFLRQTFVEWAAQTITRSFWAGAYYRQQRAKGCAHQTAVRALAFKWIRILFRCWQLRTPYDESAYLNALQRRGSPLLASLALPSPATH

SEQ ID NO: 173142 - protein, 420 aa, unidentified
MPDERHRLGSDDVVIGLDLASAEHQAVVLTAAGQRLTRFRIPHTRAGLEELLRRTMPAALGRAGGARVFAFEATGHLWEAVAYVLRGRGERYVVVNPLATFRVREARQLSREKTDLTDAEQIAELCRTGLVTRTQLEARPYLALRRAWGEYARLREERARLKVLVAHQLYGLFPEFLRVWADLLQPGALAVLRTGLTPAAMAALSLSAFVAQVRAHRAGHRLWRFTLAQVHRDAAQTIACPDGLDVLARDVQRAVARMDVLTAHMTAVAAEIDAVLAELEEVQYVRTIPGLGWASVAGLLAHVGAITKYRHGRQRITLAGTNPSRRDTGQTVGRGQRMSRRGRAGLREVLYLATRSCLQHNPRIRAHDDRLIQRADRPVPKMQALGACMNKLLLYACAVMSRREAFQLDHDWQRTMARVA

SEQ ID NO: 173143 - protein, 377 aa, unidentified
MGDYSEVFVGLDTSKLRNAVAIAAAGRGGEVRFFGEIENTPAATAKLVRKLSVKYKRLTFCYEAGPTGYGLHRQIKDLGFECVVVAPSLIPKRPGDKVKTNRRDALSLAKLLRADELTAVWVPDERHEAMRDLTRARETAMLDLRTKRQHVSAFLLRLGRPYPESRKTWTKAHVSWIASQTLEHPQQRLVLEEMMLAIRQAQERLARLEQAIAAAVPEWSLAPVVTALMAMRGIDLVSATTLLAEIGDLSRFRTPTELMAYLGLVPSENSTGDTVKRGPITKAGNRRARRMLVECSWSYQHPPRVGQAKQPKVDAAPPAVREIAWKAQCRLYRRYRTLIRKGKLKTVAIVAIARELAGFIWAVARAATTAPVAAAPA

SEQ ID NO: 173144 - protein, 316 aa, unidentified
MVPSPLFVGIDVAKATLDIAVRPTAETWSVSNDATGIDALVLRLGALAPTLIVLEATGGYQGPLVAALVAAALPVVVVNPRHIRAFAQAVGILANTDRIDARVIAHCAEAVKPAPRPLPDAETQELRALLVRRRQLVEMVSAERARLDTVPPRIQDAIQAHIAWLTTQIAGLDDALTRASQTPPVWQAKDDVLQSIPGVGPVLARTMLGQVPELGTLGPKPLAALIGVAPFNRDSGTLRGRRTVYGGRAEVRAVLYMGALVATRHNPVIKTFYERLLAAGKAKKVALTACMHKLLTIMNAMVRDLKPWQPQEVPSA

SEQ ID NO: 173145 - protein, 376 aa, unidentified
MQNDITLFVGLDVHKDSITVAYALGSGEVELLGKIGTSARDIDRLCKKLQSKAGHVKVVYEAGPLGYDLQRRLAAKGFDCMVCAPSLIPRKAGDRVKTDRRDAVKLVRSLRADDLTAVHVPTVEDEAFRDLARVWAAARDALKRARQALKSFLLAHAVRYTGTANWGPSHRRWISSFSFGNRWQDLAFSELRRAIEDRFAQCERLESALREAVTQWRFYPAVLALQTMRGIRFTTAVGLLSEIVDVTRFAHPRQLMAWLGVTPSEYSSGGSRRQGSITKTGNSLARKLLIEAAWSYRHTAKVSPEIQQRHEGVPKVIVDRAWDAQLRLCGRYRRMVAKGKNKNVAVVAIARELAGFIWDIGRLGIEQAINTPKPAV

SEQ ID NO: 173146 - protein, 351 aa, unidentified
MTLYVGVDLHSNNNYIGVVDQANEVLFQKRLPNDLEKVLAVLEPFKKDVEAVAVESTFNWYWFVDGMMENGYTVRLANPSAIQQYEGLKNIDDKRSALWLANLLRLGILPVGYIYPKETRPLRDLLRKRLHLVRHRSSHILSVKNIISRSLAMKMRSEDVKKLDERHVRMLFPEERLFLAVNASVKIIRTLSGEIEGIEEVVVREAKLRKEFKGLLSLPGIGQILALTIMFEVGDIRRFPKVGDYSSYCRCVASTRSSNGKKKGEGNRKNGNKYLSWAYVEATHAAKRFYPIIHGYHQKKMSQTNKAVAVKAISNKLARASYYIMRDQAVYDEKKLFGGRADPETGVGSQP

SEQ ID NO: 173147 - protein, 350 aa, unidentified
MEFFVGLDVSLEETHICVVDEGGRIIKETRAASEPKALAKAIRHKGRRIEHVGLEAGNLSQWLHDGLVREGFSVSVMEARHVRAAFAAMRVKTDRHDARGIAQLVRLGWFKRVHVKSLDAQETRALLTARTFLVEKVKATENSLRAALRNFGLKMGAVTRKTWEARARELAEGDTVLEGIVDAMLRVRALLLEELASIDGQLTAIAKSDPVTRLLMTVPGVGVIVALTFQSAVDDPDRFPRSRDVGAWAGLTPRRWQSGKTDIVGRITKAGDPQVRVMLFEAAASILGRVRVMSPLKTWGLRIAKRTSMKKAIVAVSRKLATMLLAMWKSGTAYWATGRPPASAQDFAGA

SEQ ID NO: 173148 - protein, 329 aa, unidentified
MQKSYIIGVDVSKDKLDIHCHSHYQSFVVSNDEKGFQKLLKWMQTQLSEELSAIGVVMEYTGIYTYRLEHFLHQSGIDYVKRSALDIKRSAGLKRGKTDKADAQMISRYGWQRKEEFCAMKPLTKTQQHLQQLMAYRDKIVADKASYQARLTELKTQMGEDLNGCIIRSSEHLIQSLQQELKEITSSIEKLLITDKQLYCNYQLAKSVTGIGFATAVHFLIVTENFTRFTEPRKFACYCGVAPFENSSGTSIRGKTKTSHLANKKLKSLLTMAAISAIQHERDLKEKYHQKVKEGKAKMCALNIIRFKLIERIFAVIKRQAVYEIRLAA

SEQ ID NO: 173149 - protein, 346 aa, unidentified
MNQIIRIGMDTSKHIFVLHGVDASEQPVLRKKLSRKLVLEFFAKLPPTVIGMEACGASQYWARELSRLGHEVKLMAPQLVKPYVMRNKNDGRDAEGLCEAMSRPSMRFVPVKSAEQQAALMLTGIRDGLIARRTQLTNTIRGHAAEYGLIAPKGLEAIEPLLARIAQDETLPALARELFVVLGRECVRLEGELEVVEAKLMAWHRGDATGRRLAQIPSIGPIIATTLVMKTPDPGAFRSGRHFAAWLGLTPKDHSTAGKTRLGKITRAGDQDLRRLLVVGATAVIQQAKRGRGHHSRWLLALIKRKPPKLAAVALANKVARIVWKLMVTGESYDAARLNAATTGTA

SEQ ID NO: 173150 - protein, 379 aa, unidentified
MERIIYIGMDVHSTSYSLCALEPVFGQENKFFFETKVAAEPSNIIKYIDDIESCFANDECTFVTGYEAGCLGFSLYNYLKGRGIDCKILAPTKMSEEKGGKKVKTDKRDARTIAQNLAYGTYSAVFVPTEEDLAVRDYIRMRNDHKAAVKRIKQQINALCMRHGYIYQRTKWTAEHLKYIQRMTLSPLYREILQEYLATMEQLNNKIKAFDVRIEELSKTKRYKDNVGKLACFTGITRSRALAIIAEIGDFRRFLKPLNFAAYVGLVPGEKSSGKKQKRIAITKAGNSHIRKELIEAAQSICRGLPGYKSRALLARQQGNDTTVINYADKASARLRRRYYKLGRCGKKHNVAVTAAARELSCFICGMMNGLTEVQIKKA

SEQ ID NO: 173151 - protein, 371 aa, unidentified
MSQSITFVGLDAHKDTIVVAMLLPGRSVPLEWRIVNEPGAVGRLARKLEREAPGPVRACYEAGPCGYVLQRQLTEQRIACAVVAPSLIPVKPGQPIKTDHRDARKLAELFRAGLLTEVHAPSEDEEAVRDLTRAREDAQRDLTRARNRLSKFLLRRGCVYHVGRRPTWSRKYRVWLHGLRFERVADQLVCDDYLLAVEQTEARLEALDGELAKLSGHERYRAPVVALRCFHGIDTVTAMALVAELHEPRRFPGARQLAAYLGLVPREASSGDRRRLGGITGAGNRHVRRLLVEAAWHYRHKPLVGRALRLRRRGQPPAVIALADRALRRLTLRQRRMLYQGKHPNTTTVAIARELAGHVWNALLAVTPARG

SEQ ID NO: 173152 - protein, 337 aa, unidentified
MEYFAGLDVSMEETHVCVVDRDGKIILEARTPTAPKTITAALAKGPPVERVLFETGRMAPTLFHGLTALGMPVVCVESRQAYQALRSMVTHKTDRNDARGLAHLARAGFFKPVHVKSLPSHAVRALLIARKKLVGQRVTLENQIRGLAVAFGVRLPRGLSSGFSEKAMAAGRGIPGLDGAMRGLLAARDAILKAIVAINADMKSLERSSAACRRLMTIPGVGRLTALAFVAAIDDPDRFRRSRDVGAYLGLVPRRYQSGEIDYTGSISKCGDGRLRTLLYEAANVMLTRYRGSLALKNWALDIARRSTLRKARVALARRLAVIMFAMLKHGTEFQPA

SEQ ID NO: 173153 - protein, 352 aa, unidentified
MATIEFDELMSIGIDIGKDTFHLVGFDHDGLRVLRKQIKRLALIATFEKLPRCVVGMEACLSAHFVSRTLRKMGFEPRIIPAIYVKPFNKGQKNDYNDAEAIAEAALRPNLKAVSEKTQDQLDLQALHRVRSRLVSRRTATINQIRAFLIEQGITVRKGLRALKNSFETILEERKDEISPRMGSILIGLYGDWMWMDDRIDKVSKEIEEISRTEENCVNVMTIPGIGPMISTAMVAAVGEGEAFDRGRDFAAWVGLVPRQYSTGGRTILGRISKRGSRYLRMLFVQAAKVIMMRPHRWPDFSFGEWLISASERMHRNKAAVALANKLARMAWSILRHKTAFDAPRDEVAIGV

SEQ ID NO: 173154 - protein, 381 aa, unidentified
MQRRTATTLASPAVENSLPEIIDEQLDYGLSHRMEEYRDDLHRISIYRLSGGDTQGLLALIARLREKVERLMGHPPDVVSCYEAGYDGFWLHRVLEMHGIRNHVLDSASIQVNRRARRVKTDRIDVEGLVRVLMAYCRGEQRVCAILRVPSVEDEDAKRLHRERERLVRERVQHTNRVRGLLATQGIGHFRPTRKDWEKQLSGLCTGDGRPLPPQLKAEIGRECRRLALVLDMIKEVEKERDAASVSNEKTEMLAELKGIGPAIATVLTREVFYRAFNNRRELGSYVGLTPAPYDSGDTRRDQGISKAGNPRARTLAIELAWLWVRHQPSSAVSRWFQERVGACKGRVRRIAIVAVARKLLVALWRYVETGLLPTGAEVRA

SEQ ID NO: 173155 - protein, 344 aa, unidentified
MTYYAGIDVSLRTVNICVIDDQGELVAETKLASDVQDIVAYLDDLKLDLANVGLEAGTLTQYLTYGLQAAGFDIVCMEARQVKGALSAMRNKTDKHDARGIAQILRSGWYSRVHVKSMESHHIRMLLSSRRAVLSKCVDLENEVRGLFKVFGLKLPPKLGHGAFDIAVRDIIETDNTLSQALLPLLDARLFLYQTFRVLDNRTRKVAHADPVCVRLMSVPGVGFVTALTFKAGVDDPHRFKRSRTVGAYFGLTARRFQSGEVDIDGHISKCGDADVRGTLYTAANALLTRSSRWSPLKAWGMKLAKTRGHRRAVIAVARKLAVILHRVWIDDTQFRWGTEGARS

SEQ ID NO: 173156 - protein, 421 aa, unidentified
MKVTYQTCCGVDVHKSFLVARIVKTTGGIEPSYQKKRFSTFNNSILEFKQWLLDNGCHDICMESTGKYRVPVFNLLEDEINVVIANPKWVKAVKGNKDDAKDSKWIGDLFRLGLVKGSYIPCKKVRILREYTRYRYKLVSCRSSEKNRYQNALTVCNVALDSVVSDIFGKSSTSIIDYLLEQSGTSINHEEIASKLLRSLKSKEDAVIHSIEGYQMTDAQKYRMRLVRAHMDYITAEINDVDKMIENMISSNPDFENAVQFLCTIPGVKRDSAITIISEIGIDMSQFSSSKRLCCWAGLTPGSNESAGKKKSVRITRAGIYLKPALVQCAHAAVKSDKSPYYKKKYESLVKRRGKKRAIIAIARMILTAIYQMLSTGEQWNPSDLYKIDIPVALVEKKRQKLSSRLRSCCNGKDYFLLMNH

SEQ ID NO: 173157 - protein, 330 aa, unidentified
MMLHSIDLHKQVLQLATMRSDGEEVLCEKRMPARDDLLRAYLAQWPGVRHRVVVETTGSWYWVADVLRAAGAELKLAHASKVEAITGAKVKTDHADARTLLTMLRLNLVPEAHVISPELREIRDLLRLRLRLVEKRTSAMNSIARLLEKYNRASVEAIPALAQVQAEFHQGQIALLKAQIRALEKRISRALPANDTVRRLRRIPGIGRLNAWTLYLEIDGIERFATDRNFFSYCRVVPGSDNSGGRSRSKRSRAGNRYLKLALSHAAVRAAQRYAEIGAAYRKKLRKKNRPLALAWVRKELARIVYYVLKDGLEYDNTFRGVALSRPKKG

SEQ ID NO: 173158 - protein, 321 aa, unidentified
MHSFHLGIDVAKAKLDCALRLSDGKYKHKVFENSQNGFVALSEWLDKQGAVNLQVCMEATGVYWEAVAEFLSNKQWHVSVVNPAQIKAFGASRLVRTKTDKVDAQLIAEFCRERQPEPWQAPSPSEQALRALVLRLEALQTMRTQEGNRLEVAREIIRGDILVHIQWLDDEIKALRKKIRDHIDNDPDLKTKQSLLDSIPGVGESTIALLLAFGMHSGRFANARQAAAFAGLDPRQHESGSSVKGKPRMSKVGHAFLRKALYMPAMVTLYRTDWGTRFRERLAASGKPPKLIIGAMMRKLIHVAFGVLKSEKAFNSALQNA

SEQ ID NO: 173159 - protein, 371 aa, unidentified
MEKDITHVGLDAHQETIQAAVLLPDGKKSAEDRLANTPEAIRRWARRLLQRAPGAVVCCYEAGPLGYGLKRELEALGLRCVVVAPALIPVKPGDRIKTDRRDARKLAELLRAGLLTEVHAPSAEQEAVRDLSRAREAVKRDQVRMRHRLSKFLLRRGVRWTPGRRAWTQAHLEWLRGRRLGHPADQAILDDHLLGLEQMESRLVALDAKLEAIGSEAPYRQPVGWLRCFRGIDTLTALALVVELHDFRRFASPRALMGYLGLVPSESSSGGKERRGAITKAGNSRLRRLLVESAWHYRHRPGVSYRLRERRAGQPARVIAIADRAQHRLHARYIRFQARGKPHNKIVVAIGRELIGFVWAALDPKANTPTA

SEQ ID NO: 173160 - protein, 340 aa, unidentified
MDKFRQKKHFIGVDISNDKLDLALLQDAENGRFKDKVVTNDFKGFDSVPGWLEKQSVQVKDCVFCMEHTGTYGLLFFAWLSQMEIDYCVEPALKIKRSLGITRGKDDQVDARRIADYAFTHRAKLQPYSLPSGVLLQIKQLLTYRDQMVRICSSLKNSLKSHQQYQRVSGLKSVSREIEMQITDFQERILQIEKQIIDLIKSDESLYKNYNLARSVIGVAFVIASYMLVTTNNFTSFDSGREYACYSGIAPFKNESGTSIRGKTKVSNLANKKVKTVLSNGANSAINWDPEMKRYYKRKLAEGKDHRLIINSIRCKIVNRVFAVIKRQTPYVKIYQQNFG

SEQ ID NO: 173161 - protein, 311 aa, unidentified
MENIALIGIDLGKNSFHIHCQDRRGKAVYRKKFTRSKLIEFLATCPATTIAMEAYGGSHFMACKLEELGHFPKLISPQFVRPFVKSNKNDFVDAEAICEAASRPSMRFVQPRTESQQAMRALHRVRESLVQDKVKTTNQMHAFLLEFGISVPRGSAVISRLSTILEDNNLLLYLSQLLLKLQQHYHYLVEQIKELESQLKRKLDEDEVGQRLLSIPCVGTLTASTISTEIGDGKQYASSRDFAAATGLVPRQYSTGGGGGQHCWASASEATRRYEPCWFSAPEYLYKNWNTSQAGWPTGAGSYCAGKVTLS

SEQ ID NO: 173162 - protein, 346 aa, unidentified
MMIIGCDFHPSWQQIAWLDTETGETGEQKLVHAEAEAQKFYGQLREPVLIGMEATGNSQWFVELVEDLGHAIWIGDAAQIRASYVRKQKTDRRDAAHILRLMLENRFPRLWTADREQRDLRQLVLHRHKLVLLRARVKNELQHLCLNKGVQRKRKLWSEAGMQLLRELPLKPWASCRREDLLGLLGMLNQQIGKLDLAVQQAGEENPQAKLLMTQPGVGPNTALAFVLTIGDVSRFRRGKQVASYLGLIPREESSGGRQKLGAISKQGNRMLRSLLVEAAGIAVRCDPGFRKQYLHRCHQKPKAVAKVAAARKLAVRLYWMLRTQTAYPEIVRIESSSGMPLVGAS

SEQ ID NO: 173163 - protein, 432 aa, unidentified
MLPARDGEALDRWLPPGGGDGRRGRPIEAWGKVSETANGRPRVLAHRRPSGHIEQKVTLVIAGIDTHKDTLAVAVVDDAGRLIAGGDIPNTELGFLQLVDMFDTHHVLRVGIEGSGNFGRAVAVHLVLRWLPDWPVAVVEVPTLMTSRERRGQLGKGKTDPVDALAIARITARERQLPPVRLTVGPAADLRALLDYREDLVRERGALVNRAHSELVGLRPGYQQQIPILTTRARVRAALELISDDTSVRATLCRRRLERVITIDTETAELKRQITGLVAAADTTLTDLYGVGPLIAARFIAEVVDIHRYPNRNAFAAANGTAPLPASSGRTVRHRFNPGGNRQLNRSLYTIAITQIRGDTEGRVYYERKRAAGKTKREALRCLKRRLSDIVFTTMRHDAANAAARTNQPPQPAWPIPAEVGAVDANEARLTA

SEQ ID NO: 173164 - protein, 412 aa, unidentified
MDVVHERCAGIDIGKADVKVCVRLPGPGKRRRKEIRTFSTMTRDLLAMRDWLIAEGVTVVGMEATGSYWKPVFYLLENDIETWLLNARHMKNVPGRKTDVADSEWICRMVEHGLVRPSFVPPPAIRQLRDLTRYRTEVIRERTREAQRLEKLLEDAGIKLSAVVSDLLGKSARAMLEALIAGERNPLVLAEMAKASMRAKREILAHALTGNFTSHHAFLARTMLDRIDAVTATETRLSEEIARQLAPFRRQIELLTTIPGVSTKSAEVILAEIGADMNRFPSAAHLASWAGMCPGNHESAGKHTSGKSRPGDPWLKGALGLAATAAARSKDTYLAARYKRIALRRGKKRALVAVGHTILTSVWHMLTDDVGYHDLGGDYFIQRTGRARQTRRLVSQLNQLGYQVSLQSTEPV

SEQ ID NO: 173165 - protein, 345 aa, unidentified
MSEYVGLDVSMKETSICVVDEAGRVVAEGKVATSIEAIAAFVAERAPAVARIGLETGSLSGWLWRGLVRCGLPAVLIDARHAHAGLKLQLNKTDRKDAQGLAQIMRTGWYRSVEVRSPESQEARQLLAGRALLVSQRVDLENQVRGLLKGYGLLLGRVGQAGFAGRVLELIGDEPALQAAIGPLLAVREVLRRQIAALHKAALAMARRDPVVRRLMTLPGVGAITALSFRATIDDPGRFANARAVGAYLGLTPRRYASGEIDRQGRISKCGDRQTRGYLYEAANVLLYRVTRWSALKAWALRVKKRAGHKKAVVALARKIAVVLTCMWRDGTTFGWTRQPRQAAA

SEQ ID NO: 173166 - protein, 397 aa, unidentified
MYGLYVGIDVSKDSFSVAGVDSKGNVLFQGSYSTDAEGFSLFLETIVQHCKNLKQILAAMESTGCYHLNLFSFLNEQGIEAVVINPLLISNFAKLSLRKTKTDKKDALTIAQFIVQHQDAVSRLGVSQGLQDLRDLARERESLCHFISETKSEIKRVLRTTFPELESLCDISTKVMLQFLLQYPSARTVKSAKPKDLVKALERKGVGTRITFSVQDIIVVAKNSVGIVSPAKEIIPQGKVSTLMHLQERVEHMTKLMTTLCKASMLQELEIVTSIKGIKTKTAVPFLAEVGDIKHYSCYKKLIAFAGLDPSVRQSGKFVGQSKISKRGNRHLRRALYLMASSVVKYGLFRQYFIRKKKEGMSAQKALFAVTHKLIRIIFAMLKNKTYFNLKEVSVNS

SEQ ID NO: 173167 - protein, 388 aa, unidentified
MGVIIGMDPHKSSATIEVVDERGRVLAAGRYGTDNAGYANMLRAGRRFRDRAWAVEGCNGIGRHIAHRLVHDGETVLDVPAKLSAQVRVFATGNGRKSDPVDAHSVATVALRTPNLVQVRLDAQLQVMAMLVDRRDELGRARTQTINRLHRLLLELVPGGAKKFLSAPQARALIATVKPRDLVARTRRRLAVELIGELERIDRTIKAADKDLKALVLARGSTLMQLHGIGPSNAARLLADVGDIRRLPDRDRFASWNGTAPLDASSGQQQRYRLSRAGNRRINRAVHIMAVVQLRHRTEGRAHFDAKKAAGKTSMEAMRALKRRLSNVVYARMLADQNRQQATDPGGHSGTTLQSSVTDLTPDIGSSDKPLPGPATSQPTQHPKAALK

SEQ ID NO: 173168 - protein, 343 aa, unidentified
MSIMHYIGLDIHKKIIAFCVKTKDGIIHSKGVIPATRPALIEWMKTLPQSWTVAMEATLFTGWIYDFLKPHAFEVKVAHPEMLKAITAAKKKNDQSDAQKICDLLRVDLLPECYMAPSELRELRRILRYRTYIVRTAVQIKNKISGLLMEVGADYNKKRLHTKKYFFELLENVEDVPPSVIDMLKLSRSNLEIFNGIQKKLVRVLKNNHIIRDRVNRLQTIKGIGEVTALTWVLEIGEPERFSSIRKAVSYCGLCAAQKQSAGKEFRGPISKKRNKHIQTVLIEAAKLAPHWNPQLAEVHNKELTKGNRNRATLAVARKLVAYMLAVEKNKKDFQLIESDQAA

SEQ ID NO: 173169 - protein, 343 aa, unidentified
MKHYAGIDVSLEESHVCVIDELGRVVKELVVGSDPRSLAGSFGPWRGSLVKVGLEAGPLSQWLHAGLSCAGLPMECLETRQLKAVLSASPVKTDRKDAHGIAQVVRMGWYRRVHVKSRTAQERLALVTSRKLLVNKLKDLENGIRGLLRGFGLKMGQVGRSKFEWRVRDLLSREPALRSIFEPLLAGRGALRGQFALLDRQVRQTARQDADCRRLMSMPGVGAVVALTFQAAMDDPGRFAHSRSVGAHFGLTPRRYSSGEIDRSGHISKCGDEMVRTALYEAATTLLCRVARWSALKAWAVRIAKARGLKRARVALARKMAVVLHRMWQDGTEFRWSKAESAA

SEQ ID NO: 173170 - protein, 339 aa, unidentified
MGCSQRIRRRKATAKLMYAALDLHERSIQCVLKDDTGKVVRESKMGKDEERILGFLEGTRAKVVMESGYNHQHIYDLLKERGYDVKVAHPLMVKAIAYAKVKSDKVDARMLADLLRADMIPESYVPGKDVREIRDLVRRRHYMVKLRTMLKSKVHAEIATRWIKYDGDLFTEDGRAFLRSLSIAAVDDYLDTIEFLSGKIRELDERVRPLAESDRYAKLLMTIPGVGHYSALLISCEIADIDRFPDPDHLCSYAKLSPGVHQSGDTQYTFSGAGNSMLNWIMIQCTRVHVRRCDSAITRFYEQVSRRRGEKIAIVAAARKLMKAAYIMLKEEQAFRLDG

SEQ ID NO: 173171 - protein, 316 aa, unidentified
MTLIGIDVSRDWLDGFCLPGQKRFRYPNNADGHVALVAMIQQLSGALKVGFEATGGHEWVLWTELAAVGIIAVQLSPAQIKAFALSRGTRAKTDRIDAELIARFMAFRPEAGRELPDENLRILRTLTTRRGQLVDMRKRLKAQIGARKKQGVPAGVESMDDDLRDVLDTRIDDIEQRIENVIARVKPLASRAALLRSIPGIGPVSAAMLIAELPELGRMTSGEAAAMTGLAPVPHDSGAMQDRRVIAGGRRSLRHVLFQAALAAACHNPVLKPVAKRLKERGKPHKLIIIAIARRLVAIADAIIKTGKAWQVQPSP

SEQ ID NO: 173172 - protein, 378 aa, unidentified
MALQTAAHDGPVLFLALELSKSAWLLAAHLPGANKPKLHRIEAGDTAALLATITALRARVAGKSGTAVDVACCFEAGRDGFWLHRLLTANGVASHVLEPTSILVNRRARRAKTDRLDAQGLLRVLMAHCRGDRQACSMVRVPTPEEEDAKRLHREREHLVQERVRVENRIGALLATQGIRGRPSLRSWERDMTALRTGDGRALPTRLRAELDRLRRRLVLTLEMIREVEAERAAALAAEPQDDTCRTIAALCRIRGIGETSATVLAREVLYRPFANRKQLASYVGLAPMPYQSGGMDRDRRISRSGNPRARTAIIQLAWLWLRYQPGSALAGWFRGRVGALAGRTRRIAIVAMARKLLIALWKYARTGLLPEGVEIGA

SEQ ID NO: 173173 - protein, 375 aa, unidentified
MKEKVRFLGLDVHAETIAVAMVEPSGEVCSLGTIANRFESLRKLVKKLGPVEQLRACYEAGPTGYVLYWQLTQLGVDCAVIAPTLVPMKAGDRVKTDRRDAERLARSHRSGDLTAVWVPDEGSEALRDLVRAREAAKQDQLRARHRLSKFLLRSGRRPETKIKTWTGLYMTWVRQLRFAQPAQESTRLDYLHEVEHMAERVQRLEESIREAIKLASPQMQQVISGLQALRGIAEISAVTIASELGNVSRFQSARQLMGYSGAVPTENSSGTRTQRGSITKTGNAHLRRIMVEAAWSYRLRPGIGPELRKRQQGVPDEIKEIAWKAQIRLTKRFARLAAAGKDQRKIATAVGRELLGFIWAIGIKAEAASKQKMAA

SEQ ID NO: 173174 - protein, 484 aa, unidentified
MSGRNRKTPPPPPDDLCRLARGAAQQRRHADDCARIAALPVQHPHAAGIDAGDQSHWVCVDATPDGSDTVREFPAHTAGLRQLVDWLQRCGVTTVALEATGAYGHVLLLTLLEAGLTAILTPPQFARQIKGRPKTDRRDCQWIQRLHKLGLLPSVFRPDAATHTLRDYVRQRGNLVRLSGQHIQRMQKALELMNLKLTGVLGDITGVTGLKVLRAILAGQRDPQQLAQLRDRRCKHSAVEIATALDGRYRPEHLLELRCSLALWDKYQEMIAVVDDAIAAQLRGMRRQTEFPPLAPRIRVRGRKPHDPRFDVRTALYYATGVDLTAIEGIDELHALTLVSELGSDLSKWPTLKQFTCWLGLCPNWKKTGGKVQSSQTRRGKNRAARALRLAAWCLLRSKSYLGAYLRRQRSRLGAPKAITAAAHKLARIVYNLLRYGVAYMKQTEAEYAEQVRARLEKQLRRRAAELGFELRKIEPAAAPTVET

SEQ ID NO: 173175 - protein, 405 aa, unidentified
MARVFVGHDWAEAHHDVHVEDETGKRLAGVRLPEGVEGVRRFHELVAVHVEEPDEVTIATETDRGLFVGAMVAAGYRVLAVNPMSTSRYRERHSTSGAKSDPGDAFVLAELARLDGHNHRPVAGDTELAEALKVLARAHQSMIWTRQRQSNQLRSTLREFYPGALDAFEDLVSGDACSVLTIAPTATLGRGLSRSKIASALRRGGRQRRLDVRAIEIQAALRVPQLEAPAVVADAMGASVRALVAVISELSTQISELEHGLAEHFEVHPDAKIIRSLPGLGMILGARVLAEFGDDPNRYADAKCRKNYAGTSPITRASGTRRVVLARFARNKRLADATTQWAFCAINTSPGARMFYDERRAAGDTHHRALRALANRLVGILHGCLTHATPYDEHAAWGHRLATAA

SEQ ID NO: 173176 - protein, 348 aa, unidentified
MAMTIVEADRAIIGGVDTHLDVHVAAALDPIGGLLGVESFVAAPRGYRAMLEWLGSFGTVGKVGVEGTGAYGAGLARFLRRAGVEVVEVDRPNRQARRTRGKSDSADAVEAARAVLSGRAAGAPKSRDGEVEAIRALLVAKRSANHARSRALAQMRQLSYTGPDQLRSRFKGLSITDLVAQAAALRPRASGDPVLYATKVSLAALGRRVLALADEMTDLDELLTDLVTHCAPQMLDLYGVGVDTAATLLVTAGDNPERLRSEAAWAHLCGVAPIEASSGKVTRHRLDRGGDRDANQALWRIVMTRLAWDPRTRAYLERRTKEGLSKREVIRVLKRYVAREVFKYLPRG

SEQ ID NO: 173177 - protein, 409 aa, unidentified
MKKKILKFSLGIDVSMDKLDCNLSYINELQEVKTKAGRTFNNTPAGIRNLIVWLKRQWKEDAPLVVVMEATGVYHENVAYSLDDIQLNIAVVLPNKSKKYMESLGYKSKNDTIDARGLARMGAERSLPLWQRPSKSIYMLRSLCREHASLQDDMTEIRNQIHALNHAYMKDDRCYKRLEAKLKFIQKQEKINKKDIEDVIKQDKDLSAKVANITAIKGVGIISVATVIGETNGFAQVEKQGQLVSYAGYDVVEKQSGKRHGKTRISKKGNSHIRRVLHFPALNVVRYGAEPFVSFHQRLMDNGKLKMQAYTAVQKKLLVLMWALWRKNEKFNPKHINPNFKKDIETQEGQSNSSNTIKENSTSTEVNVLHKIDSSKPEPSFFDDKVNELSLKVDEKENTKEVYCDCESS

SEQ ID NO: 173178 - protein, 449 aa, unidentified
MTRPRSKPSGLPIINEKAAAIDIGSRFHVVAVPPDLCDDPVQTFQAFTADLERMANWVLSLGISTVAMESTGVYWIPAYEILESRGIEVVVANARESRAVPGRKSDVNDAQWLQRLHACGLLRPSFRPSGDIAALRAYLRLRERHLDYAAAHIQHMQKALTFMNLQLHHVVTDITGATGMRIIRAVVGGERDLDVLVAMRDRNCKSSVETIRAALVGNYQAEHVFALQQALALYDFYQARVDECDVQIERTLATLTASKPSPQEPLAKARNRTQQPNALSFDVRSVMYQLAGVDLTQIHGIGPYLAVRLVGECGTDLSRWPSAKHFTSWLTLSPGCKVSGGKVLSSRTRKTTNRVAALLRLAAVTVGKSNTALGAFYRRLGARIGKAKAITATARKIAVLFYNAMRFGMRFVEPGADQYEKKYKERVIKQLHRRAAEFGFSLQPAESVS

SEQ ID NO: 173179 - protein, 328 aa, unidentified
METLVERCAGLDVHKDSVTACVRVPDGHGGRYAETRRFTTTTAGLVLLAQWLGSFGVTRVGMESTGCSWKPVWQLLEDQVECWLLNAAHLHNVPGRKTDVADAAWIAQLVEHGLVRPSFVPPRPIRELRELTRYPKTQIQERSREVQRPGQGPGRTPGPELSSVATDIIGVSGRAMLEALVAGTSDPQVLAAFAKGRLRSKLPALREALAGHIRTDHHGLLVAQILAHIDYLDETIAVLSARISQVIAPFAEQVALLDTISGVDQRAAEVILAEIGPDMGQFPTAAHLASWAGVCPGNNESAGKHRSGRTRKGPRVAGRLSERGRQGG

SEQ ID NO: 173180 - protein, 352 aa, unidentified
MMVFGVDPHKQSHTAVAADGLGRRQAHKTVRARREGHRELIAWARELAPDGRRWAVEDVRHVASGLVRELLAAGEEVVFVPTRLMAGMRSGGRERGKSDPIDALANARAALREDVFLPAARLNGQVLDVRRLSDHRDDLVTARTRTISRLRWLVHDLDPALAPAPRTLSRTRKARRQLETGLRALPASAGRRIALSLLAAVTALTGEIAGLDEDLTALITRLCPELLAVCGIGVVSAARILGETGDIRRFRSPAAYARHNGTAPIPASSGTRDTHRLNRGGNRQVNAAIYRAALVQARCHDGARALLDRRAATIRETRKAALRVLKRHLSDVIYRALQADAWRLDHPQQHAA

SEQ ID NO: 173181 - protein, 331 aa, unidentified
MNKIILGIDISKGKFDVTLLINNKLQTRKFDNGSKGFCVLSQWLKMKDVYTAHVCMEATGGHEELLANYLYKNNFKVSVVNPARIKGFAMSRLSRVKTDKADCKLIADFCQAMNPELWQPTPKHIQELQQLVRRLDMLIANKNQETNRLEGLSDIVAANVQFHIKFLAQQIKEIEQLISNHIKKHKDLSDKGLLLASIPGIGEKTVAVVLAFLSNVESFTSAKQVVAFVGLNPKPRQSGSSVNGVGRISKTGDADLRKAFYWPALTAIKFNPIIKVFSERLGREGKVKMVVIIAAMRKLLHIIYGVLKTKTYFNPDIEIIISKNEKLLKNS

SEQ ID NO: 173182 - protein, 355 aa, unidentified
MTSVKYIGLDVHKESISICVRNSVGKVVMESVIETKASTILQFIDGLRGDLRVTFEEGTWAAWLYDLLKPRVTSVVVCNPRKNALLKDGSKSDRIDANKLAEQLYMNNIKPVYHGEHGLRTLKELARSYLTVSKDLTRVMNRLKALYRSWAIPCTGKEVYAPRYRAEWLGKISEAGVRRRAEFYYQQLDALCPLRQAVRRDLLLEVKKHKAWKLLRQIPGIGPIRAAVLMAVMQTPHRFRTKRQLWTYCGLGLETHDSGEYRAVAGQLQRAKKQATVRGLNRDHNHDLKDIFKGAAMRASTAAGPLHDFYENLLAKGRKPTMARLTLARKIATITLIVWKKEVRFDANYLRPQAA

SEQ ID NO: 173183 - protein, 342 aa, unidentified
MNIPVRIGMDTSKSVFQLHGVNENEVVVVRRQFRRAEMIRYFERLPPVLVAIESCGSSHHWGRLLQSFGHEVKLIPPQYVKAYVKRGKNDAADAEALCEAVTRPSMRFVPVKSKERQAACMLMTVRERLVSVKSQLSNAFRSYAAEFGIVGPAGRQNVAALIKRVLEDDSLPEMARDLFRLQADEYAAVQARLAKIEAKLMKWHREDDISRRIATIPGIGLIGSSMLSMKAPPPETFRSGRDFAAWLGLTPKDHSTGGRQRLGGITKAGDSVLRSTLIVGATALLRHVRKGRHKPTPWLASLLERKPPKLVAVALANKFARIAWRLMISGGVYNQPVAAMPT

SEQ ID NO: 173184 - protein, 350 aa, unidentified
MRYYVGVDHHKRFSYMSVMDERGDVVKEGKIVNTKESVSRFLGEEYSKDTSAVLEAGRNWTVMYDWLEAELDEVKLAHPLKVKAIAEAKIKTDKIDAKILAHLLRCDLVPEAYVPDKGTRIIKNVLRQRMFLVKLSTMVKNRVHLIIDRHPEIRNQIDPSDLFGTQGMEWLKAVTLPKEDRRILDEELDLLEYLTERIGSSNQWVAQLGKDDPRVQLLMTIPGIGKFFALLIANEIGDIARFHNKNKFASYAGLIPSVHASGGKIFHGRIIRHGNKYLRWALIEAVWPAIRKDLSLREYYESLKVRKGANQAKVAVARRLSIIVYSVLSQNRTYTINYSGCPHKTLAVPR

SEQ ID NO: 173185 - protein, 348 aa, unidentified
MRFYTNQHKFYCGIDLHARTMYLCILNQEGKIVLHRDIKTDPDIFLKTIAPFREDIVVAVECIFTWYWLADLCSQENIPFVLGHALYMKAIHGGKAKNDKIDAYKIAALLRGGMMPMAYVYPSDMRSTRDLLRRRTHLARKRAELIAHIQNTNHQYNFTDMGRIARKCDRIKIGVVNRFTDPSVQKSIELDIALIEHYDKLLNHLEHELSLIAKVHDADSYFRLRSIPGIGRILGLVILYEIHDINRFPSVQDFVSYCRLVKSAKESAGKIIGSSGKKIGNAHLKWAFSEAAVLFLRRNPEAVKYRAKLERKHGKAKSLTILAHKLARAVYNILKKKEVFNPTIFFAK

SEQ ID NO: 173186 - protein, 399 aa, unidentified
MNSVGIDVSKGKSTVAIMRPFGEIVASPFEINHTEEDFEKLVSQIKSLKGESRIVMEYTGRYYEPLANYLYNSGLYISVVNAILIHDYDNSSIRRVKTDKKDAIKIANYGLNRWLDLPEYIPEEELRQALKIYNRQFTQYTKLKVALTNNLIALSDQTFPGIDGLFGKTPRKDGHQKWIDFIKDYWHKDCITTKTINSLERSYQKWCSKNGYHYQSNKVNDIYQLANQTVASMPANSNTKLIITETAKELISLIDALEKIRQEMNRIASQLPEYPAVMSLPGVGTTLGPQLIAEIGDIRRFHSRKALIAYAGIDSSPYQSGTIDIKSRGISKRGSSALRKTLFTVMDCILRHQQIDDPVYQFLDKKRTEGKHYYVYMIAGCNKFLRIYYARISAYLNSI

SEQ ID NO: 173187 - protein, 343 aa, unidentified
MNSYVGLDVSLKQTSICVVDQTGSVVREGAVDSDPEAISVYVRSKAPDAVRIGLETGPTSTWLWTELKQLGLPVICIDARHAKAVLKMQINKSDRNDAIGIARIMQTGWFKEVHVKDIDSHSVRALLASRALLVKIKRDLENHVRGLLKNLGLVIGRAKFNVFAVRAEELIAGRPELIAAIRPLLEARNAVGQQVSELDRKVMKLARHDAQVRRSMTAPGVGPITALAFKATIDDPTRFARSRSVGAYVGLTSRRHASGEVDWTGRISKCGDAMLRSYLFEAAGVLLTRVPKWSAVKAWGVRLAKRNGLRKAKVAVARKLAVMLHRMWIDGTEFNWSKQEIAA

SEQ ID NO: 173188 - protein, 344 aa, unidentified
MHITRVGVDIAKAVFHVYGVDRHEKVQWQGRYTRHQWLDALLKRVPAGADVGMEACASAHHWARELQKRGYHVRLIAAQFVKPYVKSNKNDWVDAEAICEAMGRPNMRFVAIKTVAQQDTQAAHRIREELVGQRTAKANQIRGLIGEYGIIAPTGIQQLRSALPRWLEDGENGLTDVFRVLLSGLADDLGYLDDRISGIDKRIAQSVKEDPAAQRLMALRGVGPLTASALSGALGDGQSFHRGRDFAASLGLTPRQHSTGGRDRLLGISKRGDSYVRKLLVHGARAVLRHAAGKDDGLSRWLNALAARKHVNVAIVALANKTARVAWAVVRNETTYDPGLVAAQ

SEQ ID NO: 173189 - protein, 368 aa, unidentified
MKEVTTYVGIDAHKKDLFVAMLVGHEATPVTWQLANEAQAVRRFVRKLERDAPGPVQVFYEAGPCGYALQRQVTTSRVHCDVVAPALIPRKPGDRVKTNRRDARKLAELGRAGLLTAVRPPTPDDEAVRDLARARDDAREDLQRCRHRLGKLLLRRGLHYAGRNWTRAHRQWIDSLTWTHAAERAVVNDYQLAIDHTDARLIELDAQLAKIAEREPYREPVGWLRCFRGIDTLTAMLILAELHDFRRFASAPALMAYLGLVPGEDSSGEKHRRGRITRTGNALVRRLLVETAWHYQHRPSVGVALTRRRKGQPGRVIAIADKAQQRLCRRFRAMAADHKPAPKIAVAIARELAGFLWAALQPTPVPVK

SEQ ID NO: 173190 - protein, 371 aa, unidentified
MNSIVYVGMDVHKEQYTLCCYSYDTDKVEYKQTIPSDYKLVLKYMEQVRSRYEGEVSFVCGYEAGCLGYSLYHQLKDHAVDCKILAPSTMAVTNTHHVKTDKRDAANIARCLAFHTYSEVYVPDNDDNDVKEYIRMRDDQKLYLKKVKQQILAFVLRQGKRFEGGKTYWTIAHLKWLKHLELSDLQRETLDEYLLTYEYLTEKINRFDERIEELASAERYEEKVKHMRCLLGIKTHTALSMIVEVGDFERFEKAPKFASFLGLVPSEDSSDTRVNRYSITKAGNSHLRRLLVEAAQSYTRGNVGHKSVALKQRQQGNPPEVIAYADKANERLRRRFYKMTLNKGVNRNVAATAIARELACFIWGMMTEHVS

SEQ ID NO: 173191 - protein, 396 aa, unidentified
MISVGIDVSKGKSTVCIMKPCGEILESPFDIGHTADELDSLISLIKSFDEETRVVMEDTGHYHLPVATYLSSHNIFVCCVNALRMKKFCSQSIRRAKTDKIDSSKIASFGITYWNELVKAYPSNVIYDELKFLARQYYQVTGMLVKSKVNFSNLLDQVMPKINDVLSNQGENHKLTEFVSRYIHFQNILDMGEMKFTSDYCKWAKKKGYRLNERKAAEILALAQTGIPTLPNSQSVKIAVSEAVKLIHSIEESRNTILAQMQDLCNTLPEYSVVKEMDCIGDTLAPRIIAEIGDVRRFKNKHSLIAYAGIDAPPYQSGAFHASERHISKRGNSYLRKTGYEIMQSLIKHKPADNAVYDFIQKKRSEGKCGKEAMIAGLNKFLRVYYGKVMEFYSEH

SEQ ID NO: 173192 - protein, 388 aa, unidentified
MQGVAAQSTASIAIRTDLCAIFVSLELSRSTWVITSLSPGAGEKMSKHSISAGDTAGLFSRFAELQQKARTRTGRTFSIIAIQEAGLDGFWIHRLLEGEGIESWVVDPASVLTSRRRRRAKTDKIDGETLVRTLLAYKRGEPRVCAMVKAPTPEEEDRRRICRERKTLTAERIRHVNRIKGLLFTQGVGDYEPLRRNRRARLEELATGDGRPLPEHLKAQISRELDRLEIILAQLKAVGSERDAMLEPVQEGPPTPASLLAQLKGIGPEFAAVLWSEGLFRSFNNRRQVAAYAGLAPTPWQSGSVAHEQGVSKAGNPRLRTTMIQLAWLWLQHQPGSALSLWFRERVQRNGGRGKKTAIVAMARKLLIALWKYAVHGILIDGTQTKAA

SEQ ID NO: 173193 - protein, 347 aa, unidentified
MLYVGIDLHRNRSQIAVLDRDGEQLLSRRIVNEPNSFLELLNGLGDDAQIALEATYGWEWLADLLEEAGYELHLAHPLRTKAIAAARVKTDAVDARTLAHLLRADLLPEAYIAPRELRDLRDLLRHRVALTRMRSALKQRVGAILAKHGIARPYSNLFGPGGSRFLAELELREGPRRRLDSLLALIAAFDHEIDNTTKEIEQRASEDPYVDVLCQIRGVGRYIAMLVIAEVGDITRFPSARHLCAWAGLTPTVRSSDGKARLGHISGQGSPALRWALVEAAQHAPTGGGPLRQSYERIAKRRGKQVAKVAVARKILTLCYYGLRDGEIRCLAPRAKARTLRTTAVTP

SEQ ID NO: 173194 - protein, 326 aa, unidentified
MQIPVGVDIAKKTFDAALPLDGPGKYRTKARLANDPAAFPVFFEWLRKHAPGSPVFMEATGVYHEALAIALVQEGFEVHVMNPAQIAAYAKSELSRTKSDRTDAKLIARFGVAQMQLARPLQPWVPPTPAQRRLRALVYRLNDLEGMRQMEANRLDVSDASVVASIERVIAALDAQIKVVRKDIDNHIDSDPDLRRDRDLLVSIPGIADTTAAYLLGCLGDLRRFAEPGKLDAFVGMNPAIRESGRWKGKTMLSRLGSSLLRGKLFMPAMVAVRHCARLRAFYERLTARGKPKKVALAAAMRKLLHIAWGVVRSGRPFDPNLAIAG

SEQ ID NO: 173195 - protein, 417 aa, unidentified
MIQAVIEKCAGIDVGKTFVVVCVMTGAAEAEPRVDTRRFGTFNGELDHLRLWLVSEGCTHAVMESTGSYWKPIFNILEESVEVILTNAHDVKGRKGHKTDWKDSRWLAHLLRHGMIRPSFIPERGIRDLRDLTRRRKQLTHESTRVKNRISKVLEEANVKLGSVLTDIFGVTGRMILLALLEGKLTASEMAHLARKKAKLKIPSITASLENHRLTEAQRLLIRQSFCQLDFLASCITELEAEIRRRILAVPEYREASSLLQTIPGIREDAAACIIAESGVRMEQFPSAKHFSSWVGLCPGNNKSADIEKAGRTTKGNVWLRTLMVECAWSASLKLGSYFRARYQRLIPRTGKKRAIVAVAHSLLTLIYEILRTKTPYRKAAEEIECERSRQRYVRHHLKALAKLGYIVHHAPVPARE

SEQ ID NO: 173196 - protein, 316 aa, unidentified
MTDNSMICAGIDVGKSHLDIAIHPDDARLRVTYDTAGLKALDAFLQEHDVSRIGFEASGGYEWRLRVHLRAGKRPAARLQPAQLRFFAKSRLRRAKNDRLDAALIALFTASLEQLPALPDARFDRLAAELTYVEQIEQQIALVKTFAETALSEAVKRRHAREIARLETCRKARLLRLEKTVRDDCDLARRLDLLISIKGIGLRSALCLIIRLPELGHAGRAEIAALAGVAPYDDDSGKHHGRRRIQGGRERLRKSLFMCAFTATRHNPDLASFYARLRSNGKEHLFAVIAVARKLIILANAILIRNTEWTPQYQQN

SEQ ID NO: 173197 - protein, 397 aa, unidentified
MTTIGIDIGGRTHVAARCREGQARADREILRVSQDRAGFAALDAWLDRQAEPVTLVAMESSGHYWMPVASHLRRRDVPVAVVNPLAAKYFARSRLGRTKSDPADARSLAEMAMRDTPDATRDPLAGAELRQAARFAMTLVTEQARVCQRLLRLIDLGFPELGEVFDDPTCRTAREVLRIAPTATAARRRRTSTLANANGGPGHRRLGTARAERLQAAAAGSIAVPELDAEAAFEVGLLLDQYDLLERQIADADRRVAALLDGETARRLQTIPGVGPSIAATLLAEIGDITRFDDFDQLLAYAGVHPAERSSGKKGSNPETSWHMSKAGNSHLRAAAYRMAVVGVQHNPVIAAHYARKRRAGKSKMNALGHCMRKALAIVWGVWRNGQDFDPSWGVEA

SEQ ID NO: 173198 - protein, 347 aa, unidentified
MSVYVGIDVHRKRSQIAIAGEDGKVAVNRNVVNGSDAMRRLIGSLPAGTPVAFEAAYGWGWLAAMLEEQGLELHMVHPLRCKAIASARLKNDKVDAAILAQLLRADLLPEAWIAPPEIRDLRALIRHRVSLVRLRTRMQNRIHAVAADHGHDRPASYWTGPGRAWLQGLDLPPVARSLIGSCLAVIDDLGPQIAAADAQLRGYARSDPRVPVLTALPGVGPFTALVIIAETGDITRFPSARKLASWTGLTPTVRGSDLKVRHGHISKQGSPVLRWALNQAAQTTRRHPDFAPAWNTIAARRGPKIATTAIARKLACRSWHLLTEHAASQPPPAGTATANPPPARIAA

SEQ ID NO: 173199 - protein, 326 aa, unidentified
MHIIGTDISKVKTNNSLLADPELHKSRDKAADNNPAGFKTLLDWACRHAKCQPGELHFVMEATGVYHEEMAEFLHAAGCTVSVVNPFHVKSFADSKGFRSKNDRHDGLVLALFGHERKPAAWTPPPPEAKYLKALLLRLAALETDQRRELNRLEKAQVGRAPAQVITSLDKSLAFLKEEKARLLKEIESHLDQHPRLREERDLLLSIPGVGDKLAVELLALFASKNFKRAPQAAAFLGLAPVEKQSGTSLRTKPRMSKAGDARLRRALYMPAVVATKYNPDIRALYHRLLKAGKTKMAAIGAAMRKLVHIACGVYKNLTPYQPQNA

SEQ ID NO: 173200 - protein, 448 aa, unidentified
MQQPIEVDVDESQQVVARVAGIDVAKATGMICTRVPHASIAGRRVTKVWEVKATTKGLLELSDHLVGQSIERVVLESTSDYWRAFYYILEAAGLTVWLVNATQVKNVPGRPKTDKLDAVWLAKLAERSMVSPSFVPAEPMRHVRDLARARFDLVEDRTRVKQRVEKVLEDALVKIGSVLTDIHGASGRAMIDALIAGERRPEVLAEMAKGRARARLGALAEAVDGRFTDHHACLARMLLDQADDLAARIEVVTALLDQAIAALPAPAGASRTDAATGELTSASAKFATAVERISALPGGGPGSARAVIGEIGLDMAVFGTPARLCSWAKVSPRTVQSGRTKAKAVTGKGNPYLKAALGQMATGAAKTDTFLGQRYRRLAKRMPKAKALAALQRSILVIIFHLLADPTATFEDLGADYYDKRVDKQRHTANLVRQLEALGHRVTLTTAA

SEQ ID NO: 173201 - protein, 444 aa, unidentified
MNSNTKTRSNATKIDRSQNARIRAITETTMIVGIDIGSEKHDARAFTYRGIEISAEPFEFRNSEEGYYMFLAWMEDLKSKNGLDAVIPGMEPTGHYWFNLGAFLQSHGMRTVLVNPYHVKQAKELDDSNPLKTDRKDPKVIAGLVKDGRYQIPYIPEGVYAEVRVLSSLRYQAQEELTRVTNRLARWFSIYFPEFKDVYTQPDPITGIMILHEAPLPEDIVKLGADGIEKIWRKAKIRGAGHKRAVELYEAALNSIGKQTAHEAARIEIAELLEDYDKYSHRVAELLEKLNEKTSDIPYVNKLLEIPGIGEKTAYGFVAEVGDIRRFEDPRQLQKLAGYAIVETSSGKHKGESHISYRGRKRLRYVLYEAAVSVVGKNAEFKELYTYYRTRKDNPLKKMQAIIAVACKLIRIFYVILAKGVDYDGTKMLRDIRRKDMDTEIVAA

SEQ ID NO: 173202 - protein, 355 aa, unidentified
MRVVAGVDCHKSSHTAVFLDAVGHVLERITFSTTEAGYERALAVGRSLGCADWGLEGAGCYGYAFGVYARAQGATVWEVPGVLTKRHRRHSSHRGKSDETDARAIAEVVLREADRLPCFHPSVLQRALRLRYDRRDRLVRERTRAVNRLRMAAVLIGVAELPRDLTSTKAARRLAEIAIRLRDEVPLHAAAAAIVDDLHEAAEDILRLTERIRAAERQLRVLTTHSSSDLMSVHGVSSVVAAGLIGHAGDVRNYRNAGAFAAKCGAAPVPCSSGRHVAVRVNRGGDRQLNRLLHVIAIAQVATDAHRGRQYYERKRAEGKTHLSAMRCLKRQLATVVYYRLTAIQGRLAVADVAA

SEQ ID NO: 173203 - protein, 353 aa, unidentified
MYYVGVDYHKRYSVATVVDAAGEMLARKRLDNRLEAFREFLRPYDKTEVKAVVEATRSWGIAVDILEQLADKVILANPGQVKLIAKARISTDKIDSLALAKLLRVGWVPEAYLRSRVNRDQQLTLRVRCFFVQMRTRVKNRIHDLIDRQSESIRETAVSFSDLFGKKGMTWLRNLELDHPGGALLGQMLAAYDALDAQVRQSDRLVAELFAADDDCPRLVTTPGIGTFFAVLIKTEVGSIERFASSACFCSYAGVVPSTASSGGKVWHGRIIKESNRWLRWALVEAVIPATVADAGLRSHYEYYRRMKGSKVAKVVTARRIGCIVYRILKEKQPYYERPVRSQGSRQAGKAHE

SEQ ID NO: 173204 - protein, 414 aa, unidentified
MQEPIRIGVDLGKNHFQLHAVEREGAVAARRKLSRSKMRAFFAQSAPCRVGMEACGSAHYWARELVAMGHEVVLMPPAYVKPYVKRGKNDAVDAAAVCEAMTRPGMRFVPIKSADQQAVLMLHKTRELLIKQRTMSVNALRGHLAEFGLIAPKGIGRVSQLLELANADASLPEEGKDAVKLLALHLEGLDRSIDVAEKKIAAASAGSPTSQLLDQVSGVGPLIASAIAASVPDPGVFKSGRDFAAWLGGVAWVDATAELHRRQGEARRHHQAGQPIPAKDAGRRVHIGAARRRQTQRRSRRLDRGVASEKAGAPGRGGARQQAGENLLGDHDHRRRLPTGDLRQGIEREAIGRVFFLAVWRAQRDVMNDRVATESRGQPANRHEREARRDDQGPRLSDFIRASGQQRRANRPDI

SEQ ID NO: 173205 - protein, 360 aa, unidentified
MCRVGKPVDSLLSFSTLWTNIMIIQSEKMVQAPQPLFAGIDVGAEELILLIRKNGTSHPPQKFANTPADRARLLKKLVNLPGIVVCLEATGVYHFDLSIALHDAGVALMVVNPKSSHNFAKVLMKNSKTDAVDADTLAQYAERMDFVAWTRPSDEKIALRSFARRIDALTRQKAAAKNQLHALDASKETPKAVLRDVNLSITQLEKRLEGLSKEARLLIGKHPDLERAFHLLTSIKGIAQTSAIALMGELLLLPPGLSHRAWVKFAGLDPRAFDSGKSVHKKTRLSKAGNRHIRSALYMPALSAKQHDPHVKAYFQHLVDNGKQPLQAVCAVMRKLLHAIHGMLKQDKPFDNARFYAIPA

SEQ ID NO: 173206 - protein, 349 aa, unidentified
MLADEVDYVIGVDTHRDQHTLAVVAAPTGAVLAQTVVRAGGAGYARALRFGESHADGVRVWAIEGAGHYGAGLARYLAEHGETVLEVGRHARVERRPRGKDDPLDAIRAARAGLAAETLTLPRAGQHQEALRVLLLARRSAVDVRRVALVQLRSVIVTAPEQLRDELRRLPVTKLIRRCGRFRSSHSRTADELAVVLALRSLARRIEAATEEADELEREIRQHVRALAPELLDEPGVGPIVAAQLIVSWSHRDRVRSEAAFARLAGVAPLPASSGQTIRHRLSRGGDRQLNRALHTVILHRRQHDPATRDYIARRVAEGKTTREATRILKRYLARHLYRVMQNATPLTT

SEQ ID NO: 173207 - protein, 332 aa, unidentified
MWYLGLDVHRSSITLAGISSEGKTLASRSYSCENPSALWTVVQRHRPYHAVVEACGSYHWIYALLRQGGEVTLAHPYKLRALWTARAKTDILDAIRLAQLLRAGLIPAAYVPPPAYQRLRDLVRARVRMVRERAAAYHHLHSILARFNWHSPYAQPFCKRGIDWLGRLDMPSPFDLLRRELFERLKHYDQAIQEVEAHLEGVAADYPQIEALTALYGIGTFSALLIVAELGEVERFHREEEVAAYAGLTPCVRQSGSQEHHGAISKSGSPWLRWILVEAAMKVVRKDPALHAFHQRVRRRSGWRRARVAVARKLAVICWKRLRAWERQRPAA

SEQ ID NO: 173208 - protein, 343 aa, unidentified
MQTITTIGLDIAKSVFQVHGVDAAGQVVIRRQLKRRYVLAFFQKLPPCLIGIEACASSHYWSRELQALGHTVRLMPPAYVKPYVKRQKNDATDAEAICEAVARANMRFVPTKTPEQQSCLMLHRTRHLFIRQQTAVINSIRAHLAEFGIVAPVGRKGVTELLHIVADPSDKRVPEVARVCLAALGNQLLGLKEQIVEFDRLIMAWYRSNETSKRLHYIPGVGPLLATALAASVADPQTFRSGRNFSAWIGLVPKQHSSGGKDRLGSISKQGDRYLRSLFVAGALSVIRYAKIHGTKHRPWLTALLARRPTKVAAIALANKLARMAWAMMARGERYRNPVALAA

SEQ ID NO: 173209 - protein, 348 aa, unidentified
MRFYTKTHQHYCGIDLHAKKMFVCILNAEGSIVLHRNIATSPEDFLRVIAPFRDDLVVGVECMFAWYWLADLCNRENIDFVLGHALYMKAVHGGKVKNDKIDSQKIAGLLRGGMFPMAYVYPPEMRATRDLLRRRCFLVRRRADLLGHVHSTAIQYNLPEIGVRLTYEGPRSTVPDHFPDPEVRKIVQIDLAMIDAYDDVIGALEWELEKTSRRQDRRTLMLLSSIHGVGKILSMVLLYEIHDINRFETVQDFASYCRLVKCPHESAGKKKGTGGAKIGNAHLKWAFSEMAVSFLRHNPPGKLLVEKLAQKHGKRKALSILAHKLARAIYYMLKNSVPFNRDKFLATA

SEQ ID NO: 173210 - protein, 404 aa, unidentified
MSVQVAPVTSSTIVVAVDVGKTSAVFSVTDAARHRLVGPSEFAMTGSGLAAAAAQARAVMPLAGRVKVGVEAAGHYHRPVCDHHWPRGWEVLELNPAQVAEQRRVQGRRRVKTDVIDLEAITELVLAGYGRPVTDRDVVIGELSAWATHRSRRVATRTATKNQLLGQLDRAFPGLTLALPDVLGTRIGRLVATEFADPARLAGLGVTRLIRFAATRDLQLRRPVAERLVAAARDALPTRDAVIARRILAADLVLLTDLDDQIQSAQTALGALLPRSPYATLTSVPGWAVVRVSNYAAALGDPQRWPGPRQIYRASGLSPMQYESAHKRRDGAISREGSVALRRALIDLGIGLWLNEPTAKTYAHGLKERGKHGGIIACALAHRANRIAYALVRDHATYEPTRWA

SEQ ID NO: 173211 - protein, 391 aa, unidentified
MSMYFIGIDISKYKHDCCIISAADQKVVSKVTIKNNKAGFNELLTIIHSLANPADIRIGFESTAHYALNLELFLENSLLTFMEVNPVLISEYKKSKTLRRTKTDSVDCESIARWLMTVEYKPHSKGFYHAYSLKSLTRLRDKLIRQRSFYLVKITNVLDHTFPEFKPFFNERLSKTALYLLENYGSAEKMARMNSASYEKLRSVSRGKFSPQQFLRLKELAVNTVGVNNSIFDVELNSLLSLYKSLIKEIDTIEKEINKLIEEVHPHYMSVPGIGPLSAAVIYSEYGDISNFTNPGQMLAFARIEPGINESGTESHGGKMVKRGSSQLRYTLINCCLPLIRFDMTFATYYAKKRGEGKPHRVAITHVAKKLIRVIYALESQDIDFNAQKLR

SEQ ID NO: 173212 - protein, 345 aa, unidentified
MLIIGCDFHAGFQVLSIFDNRSGEITEKRLAHPQEAIAFYQGLKEPARVGIEAGAPCQWFRRLLAECGHELWVGDAAKIRAAETRKQKTDRRDAELIMRLMVEGRFPRIWVPSEEERDVRQLLMDRHHRLRARTAAKNQLQFLAMNQGVQKGQRLWTEAGRQLLANLEMMLHAARRRDQLLGWVGLLDQQSAALDVLIAAEVKQRAEARRLMTHPGIGSQTALATVLTLGDVSRFAHARKVPSYRGLVPSEYSSGGKQRLGHISKQGSALLRFLLVEAGQTAVRFDEELKRVYKRMCARKGNRAVAKVMVARRWAVRLYWMLRNQWTYAELVRHAGEPESFRGKQ

SEQ ID NO: 173213 - protein, 351 aa, unidentified
MTAILGIDLGKFKSVFCLFFPETGEIRYESLPTGKTAFRVYLSRTLPGMTLFETSTAAAWVYDLCRELNLPCRVANPLGEAWQWRKVKRKTDRDDAYKLIRMHLLGELPTVHMPPLETRQYRALIAFRQHLIERRTAIYNHIRALFQAQAIELPAAHRAWSTEVRTSLKVMYARPLAQCGPAELWRGEVHVELALLEALQTQISRVEKQLDALGKARAGVALLRTIPGVGPRTAEAVVAYLDDPHRFRTAREVSAYAGLVPRQFQSGTIDRKGRITKRGPAYLRKILVECAWLMGRYNAWAKRLVERISKGQKGRRKAAVVALARKLLVCCWAMLGKGQAWHEPEIAPAAA

SEQ ID NO: 173214 - protein, 407 aa, unidentified
MYCLSFDIAKGKSVVGLFNDRLDPLIAPYEIHHVKEEFVALASKLDMDQIEIILESTSMNHYPVVSFFEALGFVVIVLNPIISREHKRNLRKTKTDRIDCVNLAAIYFDKKFNLQKKHLPIYRQLQSVSRHIFTLNESMVRYKNRYHQLLELIFPLYEYTLPNESMFKPGHMALLKAFPHPELLIHARVDRLSSVLASAHKRMDHRLLKTAQLIKNLAKETLYSVSKDDVVVDEFVELSILILDLIEKISRHQNQLIALAQTRSDYHKIVSISGVSPYMAALLVAELKDLSSYRTVKQLTAACGLDPTIIQSGKSVDYRGHISKRGNKHARKALFNTVSSILRTSSRVNLQNPILVYYRKKRSENKHHYASVIACTTKLLRIIFTLCKNDLTYTDHHNQYHLVTPIV

SEQ ID NO: 173215 - protein, 388 aa, unidentified
MNAVAPRAAEKTAVRTQLGAIFVSLELSRSTWLVTSLSPGGGEKMSKHSVRAGDVAGLLERFSSFTEKACARIGETFPIIVIQEAGLDGFWLHRVLMDEGVESWIVDPASIATSRRRRRAKTDKIDGEALVRALLAFKRGEPRVCAMLRVPTPEEEDRRRIGRERKTLIAERIQHVNRIKGLLFSQGVFDYEPIHRDRWTRLDELRTGDGHTLPHYLKAQVSRELDRLELLIAQIKAVEAIRNALVTPGQPDNPISPQVAMLVGLRGIGQEFANVLYSEGLFRHFDNRRQVAAYSGLAPTPWQSGSIDREQGVSKAGNPRLRSAMVELAWLWTRHQPESSLSKWFRERTKIDGRRKATIVALARKLLVALWKYVTAGVAIEGAVMKAA

SEQ ID NO: 173216 - protein, 379 aa, unidentified
MPTPTTHTDPPRANPTLHVALDLGNTSWCLAGAPAVAAAARVRMFPARSLARLHAELASARQHFGLPANAPVVLCYEAGRDGFWLQRACTAAGIVALVVDSSSIEVSRRARRAKTDRLDATALLRLLFRHTAGERGHWRVLHVPTVEEEDRRQVHRELARLTQDRTRAVNRLKGLLALHGIRLTSLRALPDQLPLLTQWDGAALPDGVRERLLLIWARLMLIQTQRTALVRARRALLETTTDPTIQMVRRLLQLRGVGEVSAWLLTMELFSWRRFRNRREVAGVLGLTATPQASGDRRRELGIGKGGSALLRGLAMELAWGWLRYQPASALSQWYRARFAAGGSRQRRVGIVALARRLMIALWRYVETGHVPAGATMKA

SEQ ID NO: 173217 - protein, 386 aa, unidentified
MIYVGIDISKYKHDCFICKDTGEVIVENLSFTNNKKGFQQFLDLLKTYDNSNVHIGLEATGHYGLNLKLFLEKNNYSFMEFNPLLVKEFYKSLSLRKTKTDRVDAVVITQKLMSVPYKPNSKLFYHKYSIKSLTRLRENLVKQRSKYKVQLTNILDIIFPEFKPFFSNSFGITSFYILNKYKTPDKIANMRDFDTLNKLSRGNFTYAKFVKLKDLAKNTIGESNDIFEIELSSILNLYKNIDDHINELDKQISTIIKDLNPPTLSIPGIGVISCASIISEFGDISKFSNPSKMLSFAGLEPGIIESGTMSSKGKMVKRGSGYLRYSIMNVALSVIKFNPTFYDYYYKKISEGKCHRVALSHICKKLIRVIYILETKNIQFNSFLLK

SEQ ID NO: 173218 - protein, 337 aa, unidentified
MDYFAGLDISMDETHVCVVDREGVVVRESKTSSATDAIADELAKAPSCRRIVFETGRMAPILFHGLSQLGLPVICIESRQAYQALKSLSTHKTDRNDARGLAHLARTGFFKSVHVKSLQAHALRSLIIARKKLVGQRVTLENQIRGLAVVFGIRLPRALTAAFVNQALKASEGIVGLSAAMRGLIAARTAVMTAVAAIDADMRRMTRASAACRRLMTIPGVGQLTALAFVAAIDDPLRIRRSRDVGAYLGLVPRRHQSGEIDYVGSISKCGDRRVRTLLYEAANVMLTRYKGQLKLKDWAFAIAKRSTMRKARVALARRLAIIMHAMLRDGTEFELA

SEQ ID NO: 173219 - protein, 440 aa, unidentified
MKRTQNEKILQMKSETLVVGIDVGKDTHYSRAIDNRGVELGKLLRFSNTKQGYEALDSWMQKIMQEHGKTEAIVGFEPTGHYWFTLGDHLQKEGHRLGIVNPFHVKCARELDDNSPTKNDRKDPKTIAMLVKDGRYRDVYIPEDLFQELREAVIERERLLEQEIALSNQVIRWLDIRFPEFNEVFKDWSGTAAWLTLKSYPTPAKVMAAGVKGIVDTWPAKVMAAGVKGIVDTWRKGMKKPSHKKAERLIKAASESIGRMAGSEAAEASLQNLMTQYELIKQQKREIESLMQELMLRIPNASKLAAIKGIGMVTAAVIVSEIGDIHRFQDPRQIQKMAGLSLRENSSGRHKGKTTISKRGRKRLREGLFRGIITMLATNQEFRVMHQKNLTREKNPLTKMESIIALCGKLIRVMYVILTKGHDYDANKMMNDMNRSMKAA

SEQ ID NO: 173220 - protein, 340 aa, unidentified
MKERYYVGLDVHKRTISYCVKEAGGQVVREGRVAARRAALKSWAESLDRPWIGALEATLFSEWIYDLLEPYSEELKVAHPAMLKALSAGKHKSDSIDSSKIADLLRCDLLVQSYVPPAEIRQLRRVLRYRHLMVTQMVQLKNRISGLLMETGVEYDQKKVHGQRYFRRLMSELEEVPESVVQLLGLGHDSMRTLQQIERRLLGGLCEQDCLQRRVELLMTIPAVGVVTALTWALEVGEVSRFRAIRNAVSYCGLCAAQNSSAGKDRPGPISKHRNPHLQRVLVEAAKLAPRYSPQLAALSERERNKGNVNRATLALARKLVAYLMAVDRSGRPFEIPAFG

SEQ ID NO: 173221 - protein, 384 aa, unidentified
MKKVNSNVACAGMDVHYKFSNVTFRDASGKVVSRQRLDHPDRKQLAERLSRWPTGIPVVMEASFGWGWLSDLLEQAGQDVHLSNCYKVEQMRKARGWVKTNKKDADLVSLLVFEQSDWWKVWRAPPDVRNRREQMRFRGDLVGSQTRVKSRVHAIFHRHGIFHEFSDLFGGKGRKFLVELCLYNSANLPPGALLALRGQIKLLDHLRRQLADVARILHKQLLKTPLTMRLKTVPGFGLILAHVLAAEIGKIERFKNQKSLASYSLLAPRADDTGEDDPSHSPKGRHLGLRGNRTLKWSFIEAAHGAVRSGGKWRAIFDRATDGGKKNRNRGYIKVARELVKVVYAVWAKGVDYQVIPPGRPGRKSNKKKSRSETGQLLHPMVHA

SEQ ID NO: 173222 - protein, 355 aa, unidentified
MSPHNSADNTLTLASIGIDIGKDVFHIVGFDTGGKIVLRRKIKRFSLVAEFKKLPPSIVGMEACLSAHFVSRTLRKLGHQPRIIPAIYVKPYLKGQKNDYNDAEAIAEAALRPNMRSVTEKSQDQLDLQACHRVRSRLVSRRTATINQIRAFLIEQGITVRTGAHALRNSLFAILENRADEISLRMHDLIMGLYEDWVRLDERIEAITGEIEAISKREANCQRLMSVPGIGPIISTAMVAAIGTGEAFERGRDFGAWLGLVPRQYSTGGRTSLGRITKRGNKYLRTLFIQAANVILMRPHNWEKFSFGPWLTEAATRLHRNKLATALANKLARIAWSVLRHDKAFDSHNPEVTAI

SEQ ID NO: 173223 - protein, 343 aa, unidentified
MGEISTIGLDLAKNVFQVHGVDASGGVVLRRQLRRGAVEKFFAQLPPCTVGVEACGSAHHWGRVIGRYGHQVRLMPPAYVKPYVKRNKNDGRDAEAICEAVSRPTMRFVPVKSVEQQATMAVHTTRALLVRQRTMIANSLRAALSELGIVAAQGLEGLRELIAKLEAPNEEVPEMMRGALSLLAKHWQALDADERLLERQIAKAARSDHKARRLMEVPCVGPIIASTVLAKVPDAKVFRSGRDFAAWIGLTGRDHGTGGKHRPGRISKQGDRMLRALLISGASAYLRHQKARGVSDPWLRDLLARRPYKVVMVALAAKTARILWAMLVKGEPYRDRTSAPAAA

SEQ ID NO: 173224 - protein, 412 aa, unidentified
MQDILTCAMGLDVHRDVIVACLARGELGTEPEIEIRSFSTLIPEMRKLRDWVLEVECRHVAMESTGIYWQPIYEMLEPCFDGQINILVVNARHMKNVPGRKTDMRDAQWIATLLRAGLLKGSFIPDKTFRELRHLTRYRKSIVHDITAQKNRIDKFLQSSGFRFTAFLSDAFGASGRNIIRHLMEYGDISREALDKCLKTQTRKRIDEILVALNGSLSEHQRSFLRMIFEHLESLERHRHTVEDAISEEIVKHEAALNLLCSIPGIDITAAASIIAEIGTDMSAFPDSQHICSWAGLSPGNNESAGKRKSAHINKGNPYLKSMLCEVGWVIAGKRTLYLSGWYWRIKQRKGAKRATIALARKLLALIYTMLKTGTPYNEECFEIRRKQSERKRASRMVNELQKLGYFVVAPD

SEQ ID NO: 173225 - protein, 345 aa, unidentified
MPIVGGLDIHRKQITFDYLDTVTGEVRRGQIAPADREHLAGWLAGRFTGQDAHFAVEGCTGWRYVAEELAAAGITVHVAEPADTAALRGRKRHAKTDRTDSRHLRQLLADGRLPECWIPPWHVLECRALLELYHDLRTEHTAWVQRIHAALFHQGAAQLGEGGLRTGEGLAALQAIAAAQLSPAGQLQVAVSLDKLAALDRHLDVLRRRLVTAARALPGARELHARLYGVGPITALALVCWLGGAGRFSSARKAVRFAGLDITVWSSDRKGPPGRLSRQGPEVLRWCVYEAGKTHARGSAPDYRYYAAVKDRIDGKRAAISEARKIIRQAVHILAELGDDALAAA

SEQ ID NO: 173226 - protein, 423 aa, unidentified
MDIVHSRCAGLDVHKETVVACVRLASGDKVSREVRTFGTTTSGLLALLAWLTEMGCTHVALEATGIYWRPVWNILSDGAFELVLANAAHIKNVPGRKTDVNDATWIADLLAYGLIRSSFVPEPAIQELRSLLRTRKQLVREQTSHIQRVQKTLEDANIKLDCVITDILGVSGRAMIEALSAGETDPGTLADLADRRLKASREQLREALRGRVTDHHRFLLRLHLGQIDALTAAAERVDRQVDAVISRMDAAVEAGQAPVKAVIGLLITIPGIGPLAARMILAEIGRDMSRFPSAAHLLSWAGLCPRNDESAGKRRSTRLRKGAPWLKTVLVQCAWAATRKKGSYLQAQFHRLRSRRGPKKALCAVAASMLTAIYHMLTDGTGYQDLGADHFDHRSTEARARRLVSQLAKLGFDVEIKPLAAVA

SEQ ID NO: 173227 - protein, 388 aa, unidentified
MQVIANRPEAPSAIRTNLGAIFVSLELSRSTWLITSLSPGSGEKMSKHVVHGGDIAGLLERFAQLKEKAQVRTGRNFPIIVIQEAGLDGFWIDRVLKNEGIESHVVDPASVATCRRRRRAKTDKIDGEALVRTLLAYKRGEPRVCAMVKAPTPEEEDRRRLCRERKVLITERVKHVNRLKGLLFSQGVCGYEPLRRNRRRRLDELRTGDGRPLPKHLKAQISRELDRLELLLEQIKVVETERDALLAAQQIAAPAPAAMLLAIKGIGPEFAAILWSEGFFRHFDNRRQIASYAGLAPTPWKSGSIDREQGVSKAGNPRLRTTLIQLAWLWLRHQPQSALALWFKERVVRNGGRLKKATIVALARKLLVALWKYVAAGVVIEGAIMKAV

SEQ ID NO: 173228 - protein, 353 aa, unidentified
MKRIVKQAVGIDVAQDELVVCMGRMYEDLTLELYSHKTFSNTAKGFELLTTWVSKLSNADVGLIYVMEATGVYHESLAYYLSDRGDRLSIVLPNKISNYSRTLDVRTVTDKTASEAITRFGLERKLDNWEPPKGVYRSLRQLTRERDQIVATRTIAKNQLHAEEAEAYPNKRSIARTKKHIAFLDKQEQEIKEELAQMIKEDEEVKRIVVLLCSLPGIGLLTAATILGETNGFDLIRNKRQLASYAGLDVKEKQSGTSVKGKPRISKKGNRYLRKAMHLPALTAIRHDQRFKAIFARIVSKHGIKMKAAVAIQRKLLEMAYTLYKKQEKYDNQYLTKSEGKIEAETQELVIKN

SEQ ID NO: 173229 - protein, 391 aa, unidentified
MVCVGIDVAKDKHDCCILDSDGTVRADCFTIPNNSDGFKRLLQTIQDCTQKSDKIKVGLEATGHYSYNILGFLLDNDLPIYVMNPLHTNLYRKSLSLRKTKTDRVDAKTIATMLLSDVDLKSYTDTAYHNEELKSLTRYRFDKVQERAKLKQSVSRLVTILFPELEQLVSSIHGTSIYALLSEYPGAKQISEAHLTRLANILVKTSRGHYRKDKATHIRDAARTSIGSVMPAKSLELKHTIKLIQELTSEINEIEDAIRKIMDELKPPILSIPGMGFHSAAMILAEVGDFSNFNSPDKVLAYAGCSPSTYQSGKLTNCYAHMEKRGSRYLRYALYTATKYVCYWNPVFTEYLTKKQAEGKHYNVALSHATKKLVRLIYALQKSGKAYLAVT

SEQ ID NO: 173230 - protein, 320 aa, unidentified
MQTPSVALHIGVDVGKDEIVVACAEGSFASRRVPNQRAALVAWLKELPADSRIGVEATGSHHELLAELASKLGFVVYVLNPKDTRNYAKAMGLRGKTDRVDAELIARLIAHEHAKLHPWIPPTAEQREIDRLLRRRAKVSGIRASLMKSFKGVSGFAPELKALRQRFDKLLARLDTKINTLIEASAERKDDYARLRKIAGVGAVVASGVLNTLERVPFAKADSFVAFTGLDPRPDDSGHRRGRRRLSKRGPSELRRLLYLAAMAAAKTKIWKPLYQHYRARGLSTTATLVVLARRIARTAWSIYTHKTEFDPERLTKALT

SEQ ID NO: 173231 - protein, 343 aa, unidentified
MESISICVRNSVGKIVMECVIETKASTLLQFLDGLRGDLRVVFEEGTWATWLYDLMKPHATEVLVCNTRKNAVRKGSKGDRIDARKLSEQLYMNNVKSIYHGEHGLRMMKELARSYLTITKDLTRVMNRLKALYRSWGIPCAGNEVYAPRYRAEWLAKIKEAGVRRRAEHYYQQLDVLRPLRQEVRRDLLVESRKHKIWKLLRLIPAIGPIRAAVLIAVMQTPQRFRTKRHLWTYSGLGLETYDSAEYRAVQGQLERSRKQATVRGLNKDYNHDLKDIFKGAAMKASTATGPLRDFYENLLAKGRKPTMARLTLARKIAAITLIVWKKEVRFDANYLKPQQAA

SEQ ID NO: 173232 - protein, 398 aa, unidentified
MNAVGIDVSKGKSMVAIVQPFGVVVADPFEVSHNGQELSELVERVKLLPGETKVVMEYTGTYYEPIANALHDAGIFVCVVNPLLIDDYGTNRVRKVKTDKKDAFKIANYALDKWTQLREYIPAEDIRKTLKVLNRQYAQYNKILVMQKNNLITLLDSCFPNANTLFSSPRRESDGHEKWIDFVLKFPHINSVSKLCLSAFKTKYQSWCRANRYNYSEAKAAQIHAYSRTQVSSLPMTNAVMKIVEESAKLLNSTLETLAAIRAEMDKLSSTLPEYETVLSLYGVGRVMCSQLVAEIGDVRRFEHSKSLVAMAGIDPPPDQSGQHDPKSRSISKRGSPLLRKTLFQIMQVFLQKQPINEPVYQFLDRKRTEGKPYRVYMIAAANKFLRIYYARVMEALS

SEQ ID NO: 173233 - protein, 340 aa, unidentified
MVHVGVDLDKRSSQIAVLTDDGEIVQQRLANDAVRLTNFFSQLPPQTPIAIEASGTWWWLVDLLEQLGHQPVLSNPKQTKAIAAARLKNDRVDAERLALLLRGDLLPTVWIPSAALREARELIRHRIQLVWLRGVIRNRLHAMLARRNLQPTSGKSWLTQRGQRELRQLPLAETPSRIREDCGALLPTLDAQIRRLDADLVTRWGADPRVRRLTTIPGIGPFIAIVLVLELGDIARFASAKRVASYVGLTPRVRGSAGRVRAGHITKEGNRLLRWVLVLAATQAIRRPGPLRAWFHAVKKRRGKKVARVALARRLVEIVFHVWKQECDYFTVVRHGVVRG

SEQ ID NO: 173234 - protein, 408 aa, unidentified
MEVLYPRCAGLDVHKDSVIARARCVSQPRHDEVRSFGTTTSALLELNEWLRSHGVTHVAMEATGVYWKPIWHLLEGDFELVLANAQHIRNVPGRKTDVNDASWIADLLAHGLIRSSFVPPPAIQELRDLTRTRKQLVREVAQHNLRIQKTLEDANLKVGSVLSDILGKSGRAILQAIVAGESDPGKLADFAFGNAKRRRTELVESLHGRIRPHHRELLRIHLSVIESLQRAMAEIDVQVGKALAPIQKSVRLLTTMPGVNEVTAQVMVGEIGVDMARFPDAGHLVSWAGLCPKSDESAGKRRSTRVRQGAPWLKTTLVTVAWGAVRTKDSYLQAQFHRLRARRGAKKAIVAVAASMLTAAYHMLKNGVEYRDLGAEHFARHDRSKAIQRLIRRLSDLGCDVQLTPQEA

SEQ ID NO: 173235 - protein, 449 aa, unidentified
MSDIPTSSTQPEFVALIGIDWGDKKHAWALQAGNATKIEKGDIEHTPEAIQLWAAELRQRFPTGRLAVALEQSRGPLVFALSKYEHLTLFPIHPTSAAEYRKIFRPSGAKSDGPDAALHLDMLARHRDKLRPLNPDTPETRALQLLTEDRRQLVNERTRYSNRLTANLKSYYPQVLQWFDDLYAPVTLDFLDQWPTLEELQKAKPGVWSEFFQEHNCRDAKTQQRLAAIPMAVTATTDFAVVTAGRAGVCAAVRLLRNLNQAIQEYDRQIDQLAKGHPDFAIFQSLPGAGKVMVPRLIAAFGTQRDRYQRAADIQQYSGIAPVTEASGQQLWVHWRWGCPKFLRQTFHEWAAQSIAQCDWAAAYYRVQREDKNKSHHAAVRSLAYKWIRIAFRCWKDRQLYDDSKYELALKTRAKATPEPKQPSAFPLPLRWISCAGFQKLAEKNEENT

SEQ ID NO: 173236 - protein, 325 aa, unidentified
MPLWVGLDVHKQSCHATAVDERGEVVLQKKMLNEPELLRELFRELKPVAVAMEATYAWEPAYELLEQMGLEVHLAHPTKTRVIAEARLKTDVKDSEALARLLQLNWLPEAYVPPKEIRELRRLVRLRAFLVWKRTSAANRLRAELVRLGLKFIGNPFTSRWRDFLKGASRTARETLELYEFLTLRIQRLEEEIEKVASENPQARLLMTIPGVGAYSALTILAEIGDISRFRSPEDLCSYAGLVPSLHQSGSMVRLGPITKEGSKMLRWILIQCAWMHLFHGESRLTEFFWRLARRKGKKRAIVAMARKLLVAVYWMLVRGEPFKG

SEQ ID NO: 173237 - protein, 343 aa, unidentified
MLAITTVGLDIAKSVFQVHGVDARGSAVVRRQLKRRYVLAFFKKLPPCLVGIEACATSHHWSRELHALGHTVRLIPPAYVKPYVKRQKNDAADAEAICEAVQRPSMRFVPTKTPEQQSCLVLHRTRHLFIRQQTAVINTIRAHLAEFGIVAPVGRNGVEELLYAVADHKDERIPEVARECLQALGSLLGKLKAQILEFDRQINAWHRSNETSRRLDDLPGVGPALATALVASVADPKAFRSGRDFSAWVGLVPKQNSSGGKEKLGNITKQGDRYLRSLFCAGALAVIRYAKIHGTKHRPWLSKLLERRPTKVAAIALANKIARMAWAMMAKGERYREPIALAR

SEQ ID NO: 173238 - protein, 457 aa, unidentified
MSRKSKRTSGIEEAHPFSGMSRIHPHAAGVDIGAIEIVACVPGDENTQVVKAFGNYTVDLQALAQWMKSHHIQTVAMESTGVYWIPLFEELERQGFECLLISSRSLRRVAGRKSDITDAQWIQTLHTYGLLEGSFRPQGDLVALRTLLRHRSQLLEHRSPHVQHMQKALLQMNVQLSQAVTDITGLTGQQIIRAILVGVRDPHTLAAMREPGCKKSAEEIGKALTGTWREEHLFVLKQSVLLYDFYTQQIQACDEEIERLYGLTRPEWEAGNIEPFTRGKKNSHSKNLPQHPEEIRKHLKRISGVDLSAVDGFGVSLAQTVIMEVGTDMSKFPDEKHFCSWLGLAPKHEISGGKVLKNNTLKTKNRAGQAFRMAAQSVKRAECVFGVFYRRLRARLGPSQATVATAHALARVVYRMLKYKVEYEPLNVNEYQRQYEAQQLKYLKKRAAKFGLQLVPT

SEQ ID NO: 173239 - protein, 342 aa, unidentified
MKQYVGLDVSQKETSVCVVDEVGQILFEGKAKSDPGALAALLRKRAPQAERIGFETGAMASWLWHELRRIDFPVVCIDARHAHAALSVRMNKSDQNDARGLAELVRVGWYREVKVKSEESQKIRAILVARSRLVAIRRDIENQVRSLIKEYGLLFPRAIGLQFRNQVRELLREDHQLLGVIAPLLSIHEQICKQQSKFDNEVRELAKSDETTLRLMTVPGVGVVTALTFRHTIDDPSRFRSASTVGAYLGLTPRRNQSGETDINGKISRWGDRLLRTYLFEAATVLLYRTKKWSSLKAWGMKLAKRIGMRKAKVAIARKIAVILHCIWVDGTSFDWGQPQPV

SEQ ID NO: 173240 - protein, 368 aa, unidentified
MAVAVTRKSDDRVVVAVDPHKASWTAAAVDGSLQPLASVRVPVSRDGYRALRRFAQCWPHARWAIEGAAGLGAPLTTLLGTDGVEVIDVPAKLAARVRVLSRGHGRKNDDADALSVGIAALTSPALGTARIDAATTALRAVVEHRDDLVKTRTQTINRLHVVLTRLVPAGARRHLSADHAAELLRGVRPRDAATNTLRALATDLVSEVRQLDRRIAKAANDIQMAVSASGTTLTELPGLGALSAGKILGRVGDVRRFRSAAAFASYTGTAPIEVSSGAVVRHRLSRAGERQLNFCLHVMALAQVRLDTPGRAYYLRKRSEGKNHNEAIRCLKRRLSDIVYRQLIGDAVKRKAGPGGHSGAALSSRAAG

SEQ ID NO: 173241 - protein, 354 aa, unidentified
MSDIKYVAFHVHQATISAAVLNLEGKLLTQAVMQTDATAIRDFLRGLSGVVHLTFEEGTLAQWLFDLTRPLVSELIVCNPRLNHSKKRDNKSDRLDAFNLVRDLRAGLLKSVYHGSPQTQTLKQLVHNYESVTEDTTRCMNRLKAVFRSQAVRCAGRDVYYTRNRAAWLAKLNEEGWRLRAEFLYKQLDHLRELRREARKSLLKEAGQQAAFTRLCAVPGLGPIRVAQFISVIGSPFRFRTKRQLWTYCGFAVVTRSSADYKVVGDKLERRHKSTQTRGLNPNHSRRLKLVFKSAAIEALKEEFFKKMYERLQAAGVRAEMARLTIARKIAAVALAIWKSGEQYDETKLSKLAA

SEQ ID NO: 173242 - protein, 416 aa, unidentified
MKSAPTALPDAPPNGLTCGIDWARDDHAVSVVDAAGRQANRFTVAHTDAGLTALTRRLTGLGVAEVAIERPDGPVVDALLGAGITVVVISPNQLKNLRSRYGSAGNKDDRFDAFVLADTLRTDRARLRPLVPDSQATTTLRHSCRARKDLVLHRVAVANQLRAHLSRVFPGVVGLFAEIDSPITLTFLTRFDTQERADWLSPRRLATWLSSVGYSGKVDPAVLHHRLTAAPRGLTGPDANTEACITHALVAVLTGLATQIKNLTAQIDDQLTRHTDQHIFTSLPRAGRVRAARLLAEIGDCRARFPTPESLTCLAGVAPSTRQSGKIRSVGFRWAADKQLRDAVCDFAGDSRLANPWAATLYQQARARGHDHPHAVRILARAWLHVIWQCWQSNTPYQPHQHRALQRILNQDQHAA

SEQ ID NO: 173243 - protein, 357 aa, unidentified
METAYDGRQVVGMDLHRRRSVLVRMTEDGRRLGTARITNSPQELRREIARAGKSPRVVLEATYGWYWAADTLAAAGAEVHLAHPLGVKAFTYRRVKNDVCDSADLADLLRMGRLPEAWIAPAGVRELREVTRYRQKLVSLRTSCKDQVHGVLAKLGVPVTCSDIFGVAGSAWLDGLGLPQPYAGKVLSLRQLTGELTTEITMLSDVIADLLAGHRGYQVIQQLPGIGPVLAAVIIAEIGEVTRFRNAGQLCSWAGLTPRHRESDTKVTRGRVTKQGSRLLRWALIEAVQHVPADTVTGVLKQRIIARRGNKAKNIAKVAAARHLLTLVFYGMRDGQIRCLSKTPDDSPPVTPQAQAA

SEQ ID NO: 173244 - protein, 347 aa, unidentified
MRFYTQQHKHYCGIDLHARQMYLCVLNAAGNVLLSRNIACTPQAFLAAIKAFRDDLVVAVECMFTWYWLADLCQREGIAFVLGHALYMRAIHGGKAKNDRIDAHKIATLLRGGTIAQAYVYPPEMRATRDLLRRRNHLMRKRSELIAHIQNTASQYNLPPFEHRITKKYQRVGLLEHFPDPQVRNSVALDLAMIDQYDELLPKLERHIRACAKGHDIKAFTLLRSIHGAELIIPLIILYEVHDIARFPRVQDFLSYCRLVKPTRESAGKIYGHSGRKIGNAHLKWAFGELATTFLRANPRAQQLHERLKKKHGKGKALAVLAAKLARAAYFMLSRQKVFDADKFYKH

SEQ ID NO: 173245 - protein, 340 aa, unidentified
MKRYLGVDLHRNCFTVCTLKEDGQSELRKWSIHSLCDFAQEVQATDAVAVEATGNARYFCQALKERGCRLVVVNPHQFQVVSRSVKKTDAHDAKTLAEFLAKDMLPEVRMKEALPAEIASVLQTRDKLVKLRTVLKNKINNLLAGQGILIRRESLSSDKGLEQVLQAPVSDLERVELEVLVGQIRHLNDSIRRLEAAIKEQGPKLPGYESLKSIKGIGDIGGSTMLSTIGDINDFASEGKLAAYFGIVPRVQNSNATERSGRITKRGSKLGRTALVQCALIAMRYSPYLAHYYARIKAARGTGKAIIALARKFLGIIYKTLKNGWVFEDFPAFVLAPAAG

SEQ ID NO: 173246 - protein, 445 aa, unidentified
MRDHSEAFIGIDTSKLRNAIAIAEGGRGGEVRYFGEIDSADAATRKLVSKLAVKYRSLTFCYEAGPTGYGLYRLIRSLGHECVVAAPSLIPKKPGVRVKTNRRDAVELAKLSRAGELTAVWVPDERHEAMRDLSRARQAAKKHLTSKRQQILSLMLRLGRHYPGKKTWGTAHMNWLTQQKLEHREQRIALEELLEGMRQEAERVERLEQAIREAVPEWSLAEVATALQAMRGIDLVAAVTVLAEIGDLSRFQSPRELMGYLGLVPSESSTGDKVKRGGITKAGNGRARRILVEAAWSYRHPARVSREKQPKVAAAPRRVREIAWKAQTRLCGRFRSLTRKGKLPSIVATAIARELSAFIWAINREVMAPGEGLEIRNVPTARSVTPCSPPSRRGLATADEVAGAPRRPALTAAARGVPAAARVGTKKRAPRSNKETGSEAESAGL

SEQ ID NO: 173247 - protein, 482 aa, unidentified
MQKSSIYPNRSQELLSLFEGAGNPSKLMCVPIDYAKKDHLVMFCNGNGEVLRKPFSVSNSVDGVKYLLNQVSRSCGHRNIQREHVFFGGEDVNSYAENFANTIRSKGWLVANVNAHDAKKQRENLQASTDRLDLMGIATMLLNRRANCCPAQSGVYRNLRTIVRHRRKLVKMKTEVRNRIHTLIDRLFPGFLNERKSGILPFSNSSLYLMEERFSAPQIRRRQRSALIRNLEKRGTKKAEQVAAKLQEYASQVLTTPDEYTATLQVSLASHVTHYRCLFDGAQQLVNEMAQLLAQTQGAFLTSIKGIGIVLAAGVAAEIGDPLVQRSTDQVASYAGIVPKVKQSGGSQGPSITSHVSKRSNHILKDFIVQSAFHIGRYGPKDLKDDYSRREAAGQHADFGIARRFIRMAMCMMRTSQVYLPPDMRSTHINPERRAEYYQAMWSYLRDKWRKAGGLNVAFAMDKPLGQWRYIVQEIYGIKLKM

SEQ ID NO: 173248 - protein, 342 aa, unidentified
MEEVSIIGVDLAKNVFQLHGAAADGSVVFRKKLSRPQFARFMADHPACEVAMEACPSAHHWARELTGHGHRVRLIAPHYVKPFLKRQKNDAADAEAIAEAATRPTMRFVEPKTTEQQARAVAFRAREQLVKQRTEAINALRAYLYEFGHVAPEGIGYLPKLAQVVADPGSDLPDLARDICRMAVEQVELLTARLAAVTAKIAAASKAATMPKQLQTMPGIGPIGALAIETFAPPMNQFRRGRDFAAWLGLVPRQHSSGGKQRLGKTSKMGQRDIRRLLVTGAMSVIRWALRRGAPRNPWLERLLERKPPMVAAFALANKMARGIWAMLARGEDYRDPMPVGA

SEQ ID NO: 173249 - protein, 402 aa, unidentified
MNAVGIDVSKGMSMVAIMRPFGEIVSAPFEIKHTASGINSLVELINSVEGESRIVMEHTGRYYEVLAHQLLEANLFVSAINPKLIKDFDNDSLRKVKSDKADAVKIARYALDKWQNLKQYNVMNELRNQLKTMNRQFGFYMKHKTAMKNNLIGILDQTYPGVNTYFDSPARSDGSQKWVDFASTYWHVDCVRKMSLNAFIDHYQNWCKRKKYNFSQSKAEEIYGKAKELVPVLPKDAITKLIIKQAVDQLNSASTTVESLRTLMNETASKLPEYPVVMAMKGVGTSLGPQLMAEIGNVSRFTHKSAITAFAGVDPGVNESGTYEQKSVPTSKRGSADLRKTLFQVMDVLIKTHPQDDPVYQFLDKKRAQGKPYYVYMTAGANKFLRIYYGRVKEYLASLPES

SEQ ID NO: 173250 - protein, 426 aa, unidentified
MNTQNSESIPNAEFAAYVGLDWGDQKHALAWTADTAKTAPQTSTLVHSPEALHAWLQELGQRFAGRPVALAVETSRGPLIHLFGAYPWLRVYPIHPATSARYRTAFKPSGAKDDLPDALLLLELVRDLRHKLRPLQMPEAATRQLAALVELRRDLVDRRTQALLQLLALLKSYFPQAVELVGQDLTSGLALAFLRRWPDPLALQAARPGTLQSFYYQHSVRSEALVTQRLARVQQLRPLTTDEAVLMPARLHLAALLEQLRTLAKHIALVEQKSHTLFREHSEAYLFRELPGAGQALQPRLLVAFGEDRSLYPEPGSLQKYGGLAPVVERSGRQAWVHWRWHAPRFLRQTFIEWAGQTVVYSAWAKAYYQHMKAKGKTHHVILRALAFKWIRILWKCWQTRTPYDEARYLKQLLARRSPHAIKPNP

SEQ ID NO: 173251 - protein, 372 aa, unidentified
MQQKSKVFVGLDTSKLKISVAVAEEGRQGEVRFLGEIENTPEAVRRLINKLASRHGELLFCYEAGPTGYGLQRQISALGHECAVIAPSLIPKRPGERVKTNRRDALTLARLHRAGELTAIWVPDPGHEAVRELVRAREAAMADLREKRQHLQSFLLRHGRIFSGRKPWTRAHARWLAELIFEHPAQYLVLREYRQAIEDAEARLERLTQQVAEVVATWSMAPVVEAYQALRGVALLTAVTFVAEIGDVRRFESPRQLMAYLGLVPCESSTGERVRRGGITKAGNPRVRRVLIEGAWTYRFPARMSRSLQERQEGLPQIVRAIAWKAQVRLCARYRRLMAAGKRQTVVTTAIAREMAAFLWAIGREIQPRSAA

SEQ ID NO: 173252 - protein, 344 aa, unidentified
MYHYAGIDVSLESSTICVVDGAGKILRETKVASEPEALIGWLRSLGLALERIGLEAGPLSQWLFAALRGAGLAVELLETRHVRDAFKSMPVKSDRNDARGIAQLMRLGWFRPVHCKSIEAQETRAILTARKLLQSKLRDVENSLRGVLRGFGLKVGKTTERTFAERIRELVAGHPGLELVARALLEAHAVLRREFNGLDKHTQKLARLHPPTRLLMTTPAVGPIVALTYAAAIDDPNRFRSSKATGAHFGLTPKKYQSGQTDYTGRISKIGDAAVREALYQAAHVMLTKPVKGCPALKSWAMRIAKRAGMRKAKVALARKLAVIMHRMLADAKPFNPMAKAMAT

SEQ ID NO: 173253 - protein, 389 aa, unidentified
MMSIQNATGQVAAHMRGARMSDYTASIGLDVHARSIKACAFNPCTGEVWRKSFGYDPGSVADWALSFERPKAVYESGVTGFHLCRELRALGVDCVIGAVSKMMKPAADKHMKTDRKDAQFLAKQLAMHEIHEVHVPDSECEAARDLSRALADARDDVTAAKQRLSKFLLRHGHCYPSKSEDGKPQKSWTRAHWAWIRSIKMEEPAAAATLDYYIDRVERAIEEKSGLETRIKALAEEPRWKPTVDALRCFKGIEVMTAMSLACEVDGFSRFRNASAFSCWLGITPSENSSGERSRRGGITKAGNKHLRKNLAESAWHFANATRHPKDLAKGQVVNPAVRRHALKGNRRLIERRRALDGAGKKSVVANMAIARELACWCWAVGCMVEAES

SEQ ID NO: 173254 - protein, 370 aa, unidentified
MPETARYIGLDVHKASISVSVAEEGRDGEVRFIGAIANTSLDVAKLARRLAKEGHRLEFCYEAGPCGYGLYRQVTELGHGCTVVAPSLIPTRPGDRIKTDRRDSQRLAILHRSDELTAVWVPDAVHEAMRDLVRARIDAAMQLTRARHQLLSFMLRHSRIYETGKHWTQRHRSWLAGQTFEQPAHQIVFQDYVEAVFTARDRCDQLVERLTIMLPGWSMAPLVEALRGLRGIDFISAVTFVATVGDLGRFANPRQLMAYLGLVPSEQSSGERVVRGGITKTGNREARRMLVEAAWSYRYPARVATKKAEIITRLPKAVRDIAWKAQVRLCARYRRLSASAKKPTVVVAAIARELAGFVWAIGQAVTPAAA

SEQ ID NO: 173255 - protein, 387 aa, unidentified
MQALLSCCCGVDVHDEMIETCILKGDGDEPEIIHKQFGTMPKYLKSFAEHLNEHECSVVAMESTGVYWRPVYEIIEDHCERLDSIVVTNAAHMNNVPGRKNDEDDAQWIAILLRHGLLDSSFVPERTFRDLREASRLYKKFVGEKCRYTNRIMKLLQAHGFKLSNVLSDILGASGRNILNILAERGSLSADDVSACLRGRTAHTSEEIYDAVSGSLTHDEQKLLSILLTKIYTAEKDIDDIIELMRKMASPHQRALDIMDSIPAIDTLAALLILAEISATPHLSFASAPKLCKWAGLSPRNDQSAGKVKSRKILPGNPYVKSILCQVAWVAVKSRGNPYRDWFWSHRSKGQKKAIIAVARKILTTIYALLRDDVLYCPEVAAANIRH

SEQ ID NO: 173256 - protein, 312 aa, unidentified
MRPEQFVPWVEELLRGGHTVHVVYEACGFGFSLYRQLMAVGAHCYVIAPRKLDEECTRVKTDPRDATTLCQRLSRYLEGNTRELAVIRVPTEAEEQARHVSRQREQLVHLRQKLEVQGRSLLVNHSLPAPAHWWKNQTWSRLCKLLPAWICIRLEVHRPALLTLQQQIDALTAELEAAAPGDVPAGLGKLSTVVMTREICSWERFRNRRAISSYTGLCPGERTSGSKRIPGSVTKHGNPRLRAALVECVWRMVRFQPNYPPVKKRLAILAKGARATGGQRKKAIVAVARHLAVDLWRLHTGRCTAAQLGLTN

SEQ ID NO: 173257 - protein, 400 aa, unidentified
MVWYVGIDWATEEHAVCVLDDGGRVKKALSAAHTAAGINGLCRELGALGDRAQVRVAIERPTGLLVDTLVDAGFVVVPLHPNAVKACRPRYSAAGGKDDPGDAYMIADILRTDGHRFRELQPLSDDTRALRAAVRARDDLVAERVGVANQLRALLESFWPGAAEIFADIDSPIALSFLARYPKPQSAAHLGEKRLARFLAEHRYSGRRPVAELLERLRAAPAGKAGVVECDVKADLVRAYVAVLGPLVAQLTTLTALVEHLVGQQPDGPVVTSFPRAGKVNAAQLLAELGDCRERFATEEQLAAEAGVAPVTHASGKHRGVAFRRACNKRLRQAVTCFADNSRHASPWAADVYRRARDRGHDHPHAVRILARAWLRVLWRCWRDGKPYDAALHGGAQRVA

SEQ ID NO: 173258 - protein, 338 aa, unidentified
MLSIGLDAHERTSSLCILDTSGRTVKEVTVKGHPRRVLRWLREVKEPFKICFEASTNYGWLYDELKVIAVEVLVAHPGRLRLIFRSRRKNDQIDAARLAKLLYLGELPLVHVPGADVRAWRGLIEHRQRCVRERTRVKNGIRALLRTHGIQMPCRVRLWARKGRAWLSELDMPTAVTALRRDQFLDDLEHHTRKIHRLETMLGSIGDRHSGMVLLQTIPGVGVRTAEAFLAYVDDPQRFRGRSIGAYLGMVPRQNASGGVNRLGRITREGPSTVRQMLAEATWQAVRRSPTVRKRFERICHDRPDRRKKALIATAHYLARVMIGMLNTGEAWREEVAA

SEQ ID NO: 173259 - protein, 391 aa, unidentified
MPMYFVGIDISKYKHDCCIISAVDQQIVSKFTITNDKDGFEQLLISLNSLSNPEDIKIGFESTAHYALNLELFLENANHSFMEVNPVLIKEYKKSTTLRRTKTDSVDCESIARWLMTVEYKPHSKGFYHAYSLKSLTRLRDRLIRQRSFYLVKITNVLDHTFPEFKPFFNERLSKTAIYLLENYGSAEKMAHMNSASYDKLRCISRGKFSIQQFLHLKELAANTVGVNNSIFDIELNSLLTLYNSLCKEIKNLEAEITRLIEEVHPHYMSIPGIGPISAAVIYAEYGDISNFSNPSQMLAFAGIEPGINDSGTESHGGRMVKHGSSQLRYVLLNACLPLIRFDLTFATYYAKKRAEGKKHRVAITHVAKKLIRVIYALERQDVDFNAQKIR

SEQ ID NO: 173260 - protein, 386 aa, unidentified
MGVIIGMDPHKRSATIEIVDEAAAVLAAGRFTTDKAGYDGMLAVGRKFQDRVWAVEGCNGIGKHIAHRLVHDGETVVDVPPKLSAQVRVFATGNGRKTDPVDAHSVAMAALRSPGLVRVQVDDDLVVMGMLADRRDELGRARTQVANRLHRLLLELFPGGAKRFLSAQQARAMIATIRPRDLPGKTRRRLAVELTGELEAIDKKIKAIKKELTELVTARGSTLLELHGIGPSSAARLLADTGDIHRFADRDKFASWNGTAPLDASSGSQVRHRLSRAGNRRINRALHIMAVVQLRNQTQGRAYYNMRKAGGMPSMMAMRALKRRLSNVVFARMLADQKRREAAGPGGHSGTTPDSSVTNLTPDIGSSDKPRPGPATQSRTPVSTAS

SEQ ID NO: 173261 - protein, 347 aa, unidentified
MMVFGVDPHKQTHTAVAVDGLGRKQAQRTVKARRDGHLQLLAWARAQAGAQDRAWAVEDVRHVAGNLIRDLLAAGESVLFVPPRMMAGERRGGRERGKSDPIDALAIARLALRENLDLPVAHLDEVTRPLRLLTDHRDALVKDRTKMTCRLRWHLHDLDPGLAPAARALSRPAPRRALATALAALPASTARRIATDQLAHIEHLSTQIDTIAADLGALITPIAPALLAITGISVLTAAKILGETGDIRRFRSPAAYARHNGTAPVPVWSGNTEVFRLNRAGNRQLNAALHRIAIAQARLHPGARALLDRRKQTTHETAKASLRVLKRHLSDVIYHAMTTDTHLRQAA

SEQ ID NO: 173262 - protein, 400 aa, unidentified
MTGLWAGIDAGKRAHHCVVIDQTGTVLLSKRVENDEKALLELIATTAEIAAGEEVCWATDLNAGGAALLIELLAAHAQRLLYIPGRIVHHAAATYRGDGKTDAKDARIIADQARMRTDLQPVRGGDQISVDLQLLTARRTDLMCDRVRAINRLRAMLLEYFPALERAFDYSKKAPLILLGGYQTPESIRRSGLARLTGWLRKRGCRNSAKMAEKALDAANSQHTVLPAQSMGAALVVRLAEQIRATDAEIAIVDAQITDLFRQHDSADVLLSMPGFGPVLAATFLANIGGNLDGFDSVDRLASVAGLAPVPRDSGRISGNLHRPRRFNRRLLRTCYLAALSSLKNSPASRTYYDRKRSEGKSHKQALIALARRRINVLWAMLRDHAVYREPATVSGVQAA

SEQ ID NO: 173263 - protein, 398 aa, unidentified
MTESSDYESVQVFIGVDVGKDTHHAVAINRSGKRLFDKALPNDENKLRSLISDLKQHGQILLVVDQPATIGALPVAVARSKGVLVGYLPGLAMRRIADLHAGEAKTDARDAAIIAEAARTLPHALRTLKLADEQIAELSMLCGFDDDLAAQTTQASNHIRGLLTQIHPAPERVLGPRLEHPAVLDLLQRYPSPEKLASLGEKKLAAQLCKLAPRLGKRLAADIAQALAEQTVVVPGTNAAAVVLPRLALQLITLRKQRDEVALEVEQRVLAHPLYPVLTSMPGVGVRTAARLLTEVACRAFASAAHLAAYAGLAPVTRRSGSSIRGEHPSRRGNKALKRALFLSAFAALRDPLSRAYYTRKMSQGKRHNQVLIALARRRCDVLFAMMRDGTFYTPQGS

SEQ ID NO: 173264 - protein, 425 aa, unidentified
MATTTIDAKPRFVALDVHKHYLVVGALTAPQEIVLQPKRVELPAFPTWARTQLRATDQVVLEMSTNTWELVDLLTPLVAKVIVANPLKVRLIATARVKTDAADTLILARLLAAGLVPEVWVPPPAVRELRALIAHRRRLVANRTQARNRLQGMLHRHNLLPPEGGLFAPAQRTWWTELQLDTSERLRVRQDLSLLDSLEPLISEVEAELVRLSQTAPWAEQVPYLIQLPGMGVLTAMVILAAIGEATRFPSAKQLVGYSGLGASVHASGQTYHTGGITKQGRRELRHALVEAAWAAIAHHPHWKSVFTRLSARLGKNKALIAIARKLLVVVWHVLTERQADQHADAHQVALKLVVWGRQLGPRGRQGLKTSVFVRRELMRLGLGADLEQIGWPSVQAARLPSEEEVRHLLAAANAPPQEDTVAVA

SEQ ID NO: 173265 - protein, 319 aa, unidentified
MGVAIGVDSHKSTLAVAVLDELGRVIGTEEFSNDGPGHGALLEWIKVHDVERVIGIEGTGNFGAAVARRLIEANEDAREVPAFLPHRERKRNPSRGKSDLRDAVAIARVVARGEPLSSPRRVDALRDLKLLSDHRDQLVRARTQLINRTHKDLVVSHPGYERKIPKLTSKKRLRETRGLLRADRSVRAGLIRDRITEISRLMDKVAAVEKQIAQKVIESGTTLTQLHGIGFLVAAKILGEVGDPARLRSKGSFAMLTGTAPIEASSGKTRRHRLNRGGNRQLNYALYMMALARRRGHPDTCVYVERLRHEGKSEAPRVS

SEQ ID NO: 173266 - protein, 391 aa, unidentified
MISIGIDVGKFKHCASVIDDLTGEVLIKPFFFTNDEEGFSQFYSKVKSYIHRKHAIGMEDTGHYTSNLTNFLLDKRFTVKRINPRITCMRRKELGINAKNDRKDSLLIAGLLSEKQLWRTITRHRLQMDEIREMTRLYHQLKETQNQDMNRLQRALDIIFPEVNTLSWTRYSRTYMQFLSVYPSASLIAKEDIRNLRKVLKCEERGRPCAITAQEIRDLAKRSVGEDNIGAELEARTLIAIINTREEQIKVLKKKIEESARQLNSPILSIPGISYITGMTILAEIGDIANFKEAAKLISFAGMDPLVYQSGNYDAAHMPISKHGSRYLRKALYQAVFTVCRYCPVFQDYYTKKINQGKSHRCAHGHCVRKLLRVIYKLLSENISYSADQLH

SEQ ID NO: 173267 - protein, 427 aa, unidentified
MPYNIAGIDVHKRMLHVVVSDVQVDGEYDFTRRVFGSLPEALRSLAAWLVEQQVQEVVMESTAQYWKPVWGALERYWKPSCQTRKGALATSGTLHLAQALSNRGRRGRKKDFRDAERLVKRLVAHELVLSFVPDVEQRLWRTVVRTKYQLTRNRVQLQNRLEALLEEAHIKLSSLVSDLLGASARRMLGAIADGETNRETLAALADRGLRATQEQLQDALGVCQELNPVYRRLIRMVLDEVASIDKRIEQLNQEVANLLRPHEDQVKRLAEVPGLGVDTAQQIISEAGATAATFPSEKHLSSWVGACPGDEESAEVNRSRRSPQGNRHMRRILNQAANAAVKLKGSVFEILYRRYVPRLGHNQTIGIIAHKLCRLVWKILHRGIRYEERGPEVSKASKQRRTRKMIQALRRLGYRIEPSPSQSAIPA

SEQ ID NO: 173268 - protein, 340 aa, unidentified
MRKYIRIGVDIAKNSFQVHALESEDCSATKRRLSRSGIVKFLAEVEPCAIGMEACGSAHYWARRFRAMGHEVKLTPPIYVKPYVKRGKNDAADAAAICEAMSRPNMRFVAVKSEDQQATLMAHKTRELLIKQRTMSVNALRGHLAEFGVIAAKGISHVEELVERAAAADLPAMVQATLGVLLAQLRSLDAAIDELERAVVADHRRDPVSRLAASVPGVGALAASAILASAPDPRAFKSGRDFAAWLGATPKQNSTGGKEKFGSITKQGNRYIRRLLVLGAISVLRAAPKRKGALCDWLAALRARKPPKVVAVALANKLARIVWAIITTGEVFRTSIYAKA

SEQ ID NO: 173269 - protein, 523 aa, unidentified
MAAKFKSKRARKSRSHSVHKPLGVIHPRVRAVGPEHFAFVCVDCAKSRSKMMVADFFGWVLIEPTIIEHDRFQFEAVLKQVRDTLKRHGIKDQTAVIERTGRYHGPVQRAFVKAGIEVRILHPYTTKQYRQPADPGNKTDDTDLSAIHRAAVNGFGLLEHEPDPIYVHLQLLARHRRRLVHKNVMLRQQMLEHLHSYMPGYSSCFKDIFDSELLLWVPKHMGSAAEILQAGVEGLDQRLRKANVRSHRPTLKKIVAWARSAPSADEPVSLHRRFFTEFDTVRLATLQLIGAVESDLVEPLSQTPYVLLLSIPGINVVSAAEFAGEMGPIEYYAMPRAITGRAGLCPSRYQSDGVDHPNGPLVRLANHDLRRAILIIADNLIRCNEHFGVLVAGWRLKNADARDIRVRVGSRFCRIAFHMVSGRMTFRHPCTQQRDYVLKKLIQFALGHAIAPDQLLRNLDAAAVQLPPSDEREEAESLAKELAQVRNKRGSGPKAIGEILPAVLVKLGIKLISSSESGEADLT

SEQ ID NO: 173270 - protein, 343 aa, unidentified
MEQYAGIDVSLESASICVVDSAGRIVREAKVACEPEALIAWFSKLGVSLTRIGLEAGPLSQWLYARMREAGLSVELLETRHVRDAFKAMPVKTDRTDARGIAQLMRLGWFRSVHCKSLPAQELRAILTARKLVQSKRHDLEMSLRGILRGFGLKVGQATPRNFEARVRELVDGHPTLLVVADAMLLARAVLVEQLGKLQKRLVSLARQDMRARLLMSTPGVGVLVALTYAAAIDDPARFRSSKAVGAHFGLTPKKYQSGETDVTGRISKIGDASVRTALYEAANVILTRPVRGSSLKSWAMRVAKRAGMRKAKVALARKLAVVLHRMLANGSVFVAGKAAAKA

SEQ ID NO: 173271 - protein, 416 aa, unidentified
MKIVRPICCGMDVHKNIIVATIGITNKKTRITEYIQETFSTLNPDLLNLKQWLINHKCFDACMESTGKYWIPIFNILEDEINIYLTHPKYVKAIKGKKTDKKDSKWICDLFKHDLIKFSFIPPKEIRALREISRYRYKLVGMRSSERNRYQNCMTVSNIGIGSVFSDPFGKSAQAIMKEVLESDIIEDEKILKCIHGSCKNKDKILDSIKHCNIETDQRFKMNESMTHMEELQVHIDNCEIEMMKRAAPMFDRFMHITQLPGISTLSAILIISEIGVDMKQFESDKQLACWAGLAPANNESANKKKSVRISKAGQYLKPLLVQCALGAIKDKEGYFGIKYSRIKKRRGHKKAIIAIARMMLVSIYHMILTGETFNPSDYESFKNPKPPIKQQVLTEESAIEFLKKSGFDVSKLTKP

SEQ ID NO: 173272 - protein, 427 aa, unidentified
MNYTQNHKISQITTSTLIIGIDIAKDKHVARAQDDRGIEFGKRLIFENRFHGFQTLLDWMERLRKQNHKDHVIFGVEPTGHFWLSLAYFLKAKGYDFVLVNPMHVKKSKELDDNSPTKNDTKDAKVIAQLIKDGRYSVPNLLDGIYAELREGAKLRDQLVKQLMITHGRIQNVIQRYFPEFFDVFKDWEGKAALCTLKSFPFPSQIKEMTPEEVLEKWKTQVKRGVGIKKATKLVEAARKSIGIQVGMKFAKREIDCLLEQYELYNQQIQQLDQELESLVEDLPGARQMMAIPGLGKTTVALFFAEVGDITKYSHPQQLVNLAGLSLKEHSSGKFKGQTTITKRGRKRLRRALYLAIRPLVVHNPAFKALHQYYTKRPKHPLKKQQSLIALCCKLLRVLFAIGNKQCDFDGAKLLQGLPQIETLQVA

SEQ ID NO: 173273 - protein, 372 aa, unidentified
MKQNIIHIGLDVDDTQYHGSAFNKDTGEVIDFKSRPTLKGLLQQLDRMARHFKGYKIKLCYEASYIGYCLQRDLMANDIHCDIVSPSSMPSPRGKAIKTDRIDAGYLAQFYANDLLTIVQPPDEEQEQDRDLLRSRQKVMQQRNQLRKHVQAVLRRNGLHYKAQTQYKSHWTKHHYFWLARTIDGLSGSLKVNLELLLRQLKALNAVLTEYGQQIEVLASVPRYQSAVQSLTCYKGIKNIFALTIITEIGDIKRFSHPRKLVSWIGMDIREYSSGGKHHRFGITKHGNRYIRTAFVEANQRGYRTAKIGQDLKSRRKHIAPELVNIADRCLRRLNKKGNRLLLAGKHPNKVKVACAREMVGFVWESLNKVAA

SEQ ID NO: 173274 - protein, 345 aa, unidentified
MKIVGCDLHTRYQQIAMLDAETGELIERRLEHESGEARAFYANLTGPVRVGIEATGHTRWFERMLAELGHELWIGDAAQIRASMVRKQKTDARDAAHLLELLLSGRFPRLWRPTMAERDLRQLVWHRQKLVWMRNAVGNQLHALAMGEGVCRKKKLFTKKGRAELEGLKLDRWASRRRQELLRMLDHLDASLQEFDQAVSEQAEQNPAAVLLMTHPGVGPVTSLAFVLTLGPVERFARSKQVVSYLGLNPREHSSGGRQRLGAISKQGNPMMRSLLVEAGHTAARLDAELRQDYQRLKLRRGGGVAKVAIARKLAVRMYWMLRRQASYAQLVRMQGSPRATLVSS

SEQ ID NO: 173275 - protein, 396 aa, unidentified
MVRYIGLDVHKAYIRGYEFRPHCSEGKQERHFRFPNTPVGWSQFISGLDPDVQIALEVTGSAFEIHDILAPHAAQVVVSNPVAMRRLGSGRHTDREDAVRLAHMLALGTLPGVWVPPHPVREVRRLLEVRERLGSYRRALTNQARAVLRRHGILLPKGPTALRQVTEAVVCKLPQEEQAILASVLSAARALEEQENALTAHIASRVVEEPAVHLLMTIPGVGMLTAATIWAKLGDPHRFPRPKQVARYAGLDPSVEQSGERDRRGRISRNGDRLLRRMLVEAAWAVARHDGGPLGDFYRRKAKQLGAKRALVALARKLLIVAWRMLCTGEIYRGIQQGTLRRKEVRLAKLLQQVPDWGEKLLNLLEGMGNNHAGRRCRAEGVRGELHSKQLCPAAP

SEQ ID NO: 173276 - protein, 249 aa, unidentified
MTKHITICAGIDTGKSKLDVAVEGSREQLQVENTSEGHAVLLAWLRRHRVKRVGIEASGGYEQPVVAELRRKRFVVVVFQPAQVRAYAKFHLQRAKNDKIDAALIAACTAAVRKIHPAPDPRLQPFAEQLTMIDQIGEDIARLKNRIESCRNTQIKGLWEEDLARLAKREKVELKALIASIRKHPDLAKRLDLINSIDGIGLPTAVAILVRMPEIGQITREQAAALAGLAPYDDDSGEQVRHPAHRGRA

SEQ ID NO: 173277 - protein, 392 aa, unidentified
MIYVGIDVAKDKHDCFAMNSDGEILIEKLTIANNLDGFKTLYNSVMNFSVSLDNIKVGLEATGHYSNNILNFLSEKGFNIYLINPLQTNLYVKGQSLRKTKTDKLDAHIIATMLISDNLKPYIPVSYHISELKSLTRHRFRLVKENSKFKTSLVRLVDIVFPEFPKIVSSVAQKSCLALLYELPSAKEIAECNLKHLTHLLSENSNQKFDRDKAIEIRDLAKNSIGLNSNSVSFELKQTISIIQFLQQQIDDIEKRIKEILKELNSPILSIPGISYKLAGTIIAEIGDISRFDSPAKLLAFAGLDPSMYQSGKFFSTHSVMVKRGSKYLRFALINAARMVCMNDATFNNFKAKKLSEGKHYRVTLGHVAKKLVRVIYYLLKTNNVYQSDKIA

SEQ ID NO: 173278 - protein, 421 aa, unidentified
MTETYSWFVGIDWASETHAVCLVDATGVVQDERLVAHTIEAVNGWLTGLLERTGASPAAIAVAIETPRGVLVDTLVERGFAVFAVNPKQLDRFRDRFTSAGAKDDRRDARVLGDALRTDRAAFRRVQLDDPLVLELRELTRADDEWQRDLGRFTNRIREQVARIAPALLTLCPAADEPWYWTLLEVAATPAARQRLTRTDVRALLKRHRIRRLTADEVWTVVRAADFIPAPGVVAGVHVRLDGLIEQVRVTSAQRQRCQKDIDRVLDAITAAPPAEGEPREHRDVEILRSLPGVGRMVTATMLTEAARPLADRDYHTLRATAGTAPVTVRSGKRYRLVKMRRACNQRLRTALYHWGRSSVRWDPATRTYYTQLRQRGHTHGRAIRSVLDRWFRILIAMLKHGTLYNPERFASSSVAVSPTA

SEQ ID NO: 173279 - protein, 345 aa, unidentified
MEATTIGLDIAKTVFQVHGVDDAGRVVIRRQLRRSRVLPFFEKQAPCLVGIEACATAHHWAREIAALGHEVKLMPAKYVKAYVKRNKNDAADAEAICEAVTRPTMRFVPIKTPEQQALLMLHRTRKLLVRQRIRLVNAMRAHLAEFGIVAGVGRNGVDRLLKLIEAGDARLPAPARDCLLALRDQLALARQQILEADRRILAYHRENELSRRLEEIPGVGPLIATALVASVPDPHAFKSARDLPAWIGLVPKQSSTGGKERLGHISKAGNRYLRSLLTIGAFSLIKRAKLGKGKHRPWLIELMARRPTKVAAIALANKIARIAWAMMTRGTRYREPQVKPTPQAA

SEQ ID NO: 173280 - protein, 373 aa, unidentified
MDSSCGVIGIILCQAAFRLETYSERRSPPVNHSTIAVDLAKSVFEIAVSNHPGHVSEHHRLSRPRFELFFAERQPATVLFEACGSAHHWARELRCLGHTVILLPPHTVRPYAVRNKTDRADAKALLEAFRNKDIHPVPIKSIDQQVMASLHRYRSAYIANRTARINTTRGVLREIGISIPQGSSRVIPAVRALIEDPESSIPPALRPTLQEASAEILHFDTRIRDIVHEIEALAAEDPITRRLRTVPGIGLLTATALVAFIGDIHRFPSGRHFASYLGLTPREHSSGLIRRLGSISKRGDPYLRMLLIHGARSVLWAAKRREHPSHLQAWALERQCARGHNKAAVALANKLARIAWAVWSKDRDFKIIEEDTE

SEQ ID NO: 173281 - protein, 337 aa, unidentified
MEYFAGLDVSMKETHICVVDRDGGVAVEATAPTSPAAIAAELAKAPAVKRIVFETGRMAPTLYHGLDALGLPVVCVESRQAYQALKSLATHKTDRNDARGLAQLARTGFFKPVHVKSLPAHAVRALIIARKKLVGQRVTLENQIRGLAVVFGVRLPRGLSPAFAQQVVNGSDGVAGLSGAMRGLLAARNALLAAIAAINRDMKRLARSSEACQRLMTIPGVGQLTALAFVAAIDEPERFRRSRDVGAYLGLVPRRYQSGEVDYTGSISKSGDRRVRTMLYEAANVMLTRYRGDLALKGWALGIAKRSTMRKARIALARKLAIIMHAMLRDGTEFQAA

SEQ ID NO: 173282 - protein, 369 aa, unidentified
MPHVTSIGLDVHARSVAAAAFNPFTGEVVRRSFGTDASEIAEWALGFEEPRACYESGPTGFHMARELRALGLDCAVAAVSKMQRPAADARRKNDRRDAAFIARMLATHNIVEVPLPDMAVEAARDLDRALDDATRELRRSRQRLNMFPIRLGHVWDERNADGARKKAWTRAHWRWVSEIRLEGPQRDALEYYVTAARCAESDRRQLERRVVALAGTDRWRATVEALSCIKGVDTLTAFRLAAEAGSFSRFRSAPAFASWCGLTPSEHSSGESERRGGITKAGNALARTALIESAWHYSTCSPRPKAPAPGTDVPPAIRSRADDCTARLHRRREALAAAGKSACKANAAVARELACWVWEIGCRSEGTVL

SEQ ID NO: 173283 - protein, 347 aa, unidentified
MAHFVGLDVSVKETSVCVVDDAGQVILEQKVATEPADIIAVLASLSGICGRIGIEAGPLSQWLVNALTVAALPVICVETRHMKALLTAQQINKTDRNDARGIAQMMRVGLFKPVHVKTLVAQEQRMLLTSRKLLQRKLLDLESELRGTLRNFGLKVGVVGGGRYEARVRELVAGFPGLAAIAEPLLNVRRVMRQQFAVLHKMLLDTVRGDRVCRRLMTAPGVGAVVALTYRATIDQPQRFVHSRAVGAHVGLTPKRYQSGEVDYDGRVSKCGDALLRTMLYEAAHSLLIQSRKWSWLKAWGMRVAQRRGIRRAIVAVARRLAVVLHRMWVDGSEFRWSKDSAAVPAA

SEQ ID NO: 173284 - protein, 355 aa, unidentified
MNSVRYVGLDVHRDTISAAVLSESGRMIQQSILATRAAAILDFIGGMRGTLHVTFEEGTHSAWLYDLLERRVARLVVCNPRMNALLKSGNKSDAIDARKLAELLRADLLSPVYHGEKSAMEVQHLARSYALLTEDTTRVMARIKAIFRGQAIACAGQKLYGHKHRDEYLAQLGACALRRRAELLYQELEAVQQLRRQAKREMIVECRKYPETKLLCSVLFLGPVRAAVLIGRVQTPHRFRTKRQFWAYCGLALEMRDSGEYRMVDGQVERRKKPAQIRGLNWNHSHELKNLFKAAATTASFSNGVFREFYLGLLKKNMQPEMARLTLARKIAAIALKIWKKGEAFDAEQVKLQAA

SEQ ID NO: 173285 - protein, 398 aa, unidentified
MIYIGIDIGKYHHEALALDRDGQILSKPIRFANSKTGFDRFNAYLKQFTVSGELSSSCGVKLACEATGHYWMNLYHFLKEEGLLVIVVNPLQTQAQRKAHIRRTKTDTRDALMVAKLLRLGELHVSYVPERQIFYLRELTRFRCGLADTVGDLKRQIIAVLDKVFPEYHTLFSDTFIKTAQAILQRNYLPSELAEINLAELTALLKQYSRGYFKKTKAQELIDSAKDSVGLSFLEDVAKIKLSLILPQLQLTQESLAKVDVQIARIFRQGNYCRHLLTIPGISEVLAASILAELGEVRRFNTLNQVVAFAGIDPSTFQSGQFKGSISNISKRGSPYLRRAVYLATIAAVRKDPELAQYFAKKQAQGKHYTMAAMATARKLLARIFVVLKENRPYKIRP

SEQ ID NO: 173286 - protein, 346 aa, unidentified
MTIVETRAITGGVDTHADVHVAAALDPIGGLLGVREFPVTPAGYAGLLAWLGGFGTVCLVGIEGTGSYGAGLARHIAAAGVRVVEVDRSDRQDRRRAGKSDPLDAVSAARAAQSGRAAGAPKGRDGAVEAIRALMVAKRSARSERTQTINQARALIVTGPDDLRARLAGHTPADLVAELASLRPRPGATVGYATRIALRELGRRARFLDDQLQRLDEFIVPLVTARAPGLLALYGVGPDTAAMLLVAAGDHPERLRSEAAWAHLCATAPLSASSGKVTRYRLNPGGDRQANHALYRIVITRLSSHPPTRAYADRRGKEGLSKKEIIRCLKRYVAREVYPCLRPPAG

SEQ ID NO: 173287 - protein, 415 aa, unidentified
MEVVHPRCAGIDVSKRDAKLCIRIQGSSGRKTSSTVTTWGAMTNQILALRDHLAAQQVTVVIMESTSDYWRPFYYLLEADFEVLLVNAREVKNVPGRKSDVSDAAWLADLGAHGLLRASFVPPEPIRQLRDLTRARTHITAERTREVQRLEKLLESAGIKLSSVASDITGVSGRLMLQALIDSHGAADPAVLADLAKRRMRSKIPVLTEALNGYFTEHHAFMTRLFLDRIDAHTRDIELLSQRIDGLMTPFLPARALLESIPGFSQTVAEIFIAETGGDMTQFPTPEQLASWAGVSPGSNESAGRVKSTKTRPGNRYLKGALGVAALNQAKSKKTYFSAKFRHLAPTRGPMKAIVAVEHAMLIAAWHMLTNSEFYRDPGADYYTRRDPARTKTRAVKQLEALGYTVTLQPLPQAG

SEQ ID NO: 173288 - protein, 342 aa, unidentified
MKDSIYDHYIAIDWSILNMAIARMTKKSNKIIIIDVPSDVVELQTYLKNLRGTKILAIEETSTSQWLYTELEGYVDKILICDPYRNRLLGEGAKTDKIDATKLVHLLKAGLMKEVYHSAEKFIYIRRVVSGYEDMVKAGVRLKNQRYALLRTCGKNGKEKDINLGAQGEQFVLECLDRQIKAYDEEKKGFEKEFVRLARKYPEIKHQKSLPGIGTINAVKIVSRVVSPYRFADKGHYLSYAGLIKLEKISGGRSYGKKNPRYCRQLKSVYKSGVLAAIGGNNPINDYYEYLIREKNYPEHNARNSACRRLAILSLGVFRSGKKYQPYRRDRVKGNKEISPDL

SEQ ID NO: 173289 - protein, 322 aa, unidentified
MEQFSFFTGIDVSKLWLDIAVFKPGYGIVYQARVNNNAKEIRSFLKGLKKQLKAEITGNLFCMEHTGKYGHAFLNASILEQAKVWVELPIQIKRSQGLVRGKTDQWDAARIAQYAYRFADKAVFWKPADKTIQDLKELQVKRNRLVKAHAQLTQENKNDPLFKKPLLAIRQAIQAVEIKMEELIVQNESAVQQYELLKTVPGIGKQTAIALIIVTNGFTRLTETRKLSCYSGLAPFPYSSGSSVKGRTKVSKMGDKKLKVLLNLSAWNAIRSIAAFKDYFNRKVSEGKHKMSVINAVRNKLIALALAVIKRNSPFEKNYSLS

SEQ ID NO: 173290 - protein, 355 aa, unidentified
MTSTKYIGMDVHKESISIAVMNSAGKVVMECVIETKASVILQFLNGLSGDLHVTFEEGTAAAWLYDLLKPHVARLVVCNPRRNALLKVGNKSDRIDARKLAELLRGNQLQPVYHGEHGLRVLKELVRSYLTISKDLARVMTRVKALYRSWGIPCSGTQVYSRLYRVTWLSKLTEPGVRLRAVFYFQQLDALRTLRQEVRRELLAESKKHKVWKRLCEIHSIDPIRAAVALGILQTPHRFRTKRQLWSISGFAIETRSSADHRPVNGRLQKVKKRVSIRGLNQNHNHDLKNLFKGAAVSASTKPGPFQEFYAALLARGMRPEMARLTLARKIATIVLIVWNRGVNFDAQYLKPQTV

SEQ ID NO: 173291 - protein, 364 aa, unidentified
MKRKVYVGMDVHKETIRIANLTNNTKEIVKEQQIKHNEVQIKKFVNKLKSEWNEIHSCYEAGVTGYPLYRYLKSLGVNCILVAPGKIPRQSSDKIKTDKRDAIKLAKLLRSGELESIHVPSEEDEAVRDYLRSRDSLRLDLGRNRQRLMKFLLRKGITYSKTKYWTVSHNKWLNNLQFNNEILQETFNDYYSRVRVQEENLKAMDKRIQEIAESEPYREKVGILRCFRGVDYLTAMFLLCEVCDFKRFKTAGSFMSFLGLVPGEYSSGSKRKQTGITKTGSPRLRRILTEAAWQHRFPGTGSKIVTARRSGQPALVVALAEKASLRLHKKFRNLQQRGKTPQVIITAVSRELSGFLWAAMNLTT

SEQ ID NO: 173292 - protein, 360 aa, unidentified
MNKSNLATKSSKTKLDEIGYHNYIAIDWSQVNIALARSTQKQYEPQVHLWNRSDIRIVKDYLSSISGSIILTIEETTTSHWLYVELKDYVDRIIICDPFKNRLLSDGPKTDKIDAKKLCYLLRAGLLKEVFHTTDRLYSYRQLLSAYNDLKNMGVRLQNQRSAIYRAKGFTYDKKKLGEYKKQLDDSDYSKYITNWQDEMIDNYFIDKQNFEQKIAAVVKKETIMKNLSRISGIGTISAFEIVSVVVQANRFKNKGHYLSYCGLVLHEKTSGNKSYGKRKPRYNRILHGVYKRAARVAIHGKNNAIYNYYEYLIKKNLTHKQASLMVARYIARVSFGMMKSGQKYEPYRWRKDEVNTSEG

SEQ ID NO: 173293 - protein, 427 aa, unidentified
MDLKFKEIAAAIDISKGKLDICIRNHREVTAEASYTNNITGCEECYKLLVKETCNDVCMESTGPYWYGVYDYLTSKGMHVIVVNPSKARTNLRNKSDKIDSRALVTLHLLNMLEPSFVPDREIRKLRRLTRLRMKMVKMKTQIKNIANSSASAYSSDITRIFGDMFGKSGRKVLDILGMDEDEIMKELNGMKMSEEKKQEIIHAVRKAYAPSLDSWIIQFASSIISQIEAWIKVLDNTIAGVIDANTRIKEYVNRMITIPGVGLETAQVIAVEIADIRRFRSSRALVRYSGLNPTILQSGSVRRHGQLEKAGPPALRAALFQAASVMAFRGPDNFKEHYNAVSSRYGKRGRRVALVSTSRKLLHLIYAMLTNKTDYISSPMKLTERKRRMMRKRVKAYDSDERPSMINLLLNINSLNDEVKQMLIAL

SEQ ID NO: 173294 - protein, 334 aa, unidentified
MEEVTTVGIDLAKKVFSLHGVDGAGKTVLRRTVRRERLIETVAALSPCLIGMEACSGAHEWGRRFQQHGHTVKLMAPKFVAPYRKSDKNDGNDAEAVCEAVSRPSMRFVPVKSTEQQALLAVHRVRQGFVVERTALINRLRGLMSEFGVVLALRSVTVRRHAAQAAEQLPELARGAIGDLLEQLRVLDERIAKYDKQIEAQARLSEPARRLMQIRGIGSTTALAIVATVGDAREFKNGRQFAAWIGLVPAQHSTGGKSRLGHISKRGDAYLRNLFVQGARSVLQVAGAHQDRISRWALELQQRRGYYRALVAIANKNARIAWALLAKRESLRRA

SEQ ID NO: 173295 - protein, 391 aa, unidentified
MIFVGIDVAKDKHDCAILNQDKVLLDLFSIANNRDGFETLLQRIRSCTTPNDNIKVGLEATGHYSCNILGFLLDNGLHTFVLNPLHTNFYRKGHSLRKTKTDRIDARAVAAMLMSDVDLKSYTDTAYHNEELKSLTRYRFDKVKERAKLKTSVSRLVNILFPELESLVSSLHTASVYALLSEFPSAKQIADAHLTHLKTILSGASNGRFGRQKALEIRDAARRSIGSVMPAKSLELRHTIRLIHELDREIDEIEAQISALMETISSPITSIPGIGIRMGAMILAEIGDFSRFESPDKILAFAGLSPSTYQSGNMNATGAYAHMEKRGSRYLRYALFNAAKYVCQWEPSFAAYLSKKLAEGKHYNVAISHAAKKLVRLIFALQTSGQMYLPA

SEQ ID NO: 173296 - protein, 343 aa, unidentified
MEHTTIAVDLAKSVFQIAISHRAGHVDVERRLTRERFLAFFAQQPPATVVFEACGSAHYWARQLQPLGHTLRLLPAHDVRRYVRRNKTDRTDTKGMLEANRNEEIHPVPVKTIEQQAIASLHRLRSTWLATRTARLNTLRGLLREFGVFIPVGAHHVVPRLRELLGESTDTVPLAVRGTLAAACAELDGLEANMHAVERQLAALARQLPDVTLLQTIPGVGVLTATALVALVGDIRRFRSGRHFASFLGLTPKEDSSAGRRRLGAISKQGDVYVRMLLTHGARSVVWHAKAAAQATALQQWAVHTERRRGRNVAAVAVANKLARIVWAVWVQQRPFAAEHRPG

SEQ ID NO: 173297 - protein, 419 aa, unidentified
MLTARWFVGIDWASEAHEVCILAREGHVCERRQVKHAVADLQVFVDALLARAGGDATTVAVGIEVPRGALVELLVERGFAVYAINPKQMDRFRDRFAPAGAKDDRRDALVIGDSLRTDPQAFRQVRLDHPVIIQLREWSRIDEDLGVELTRLTNQVRDLVYRSAPGLLALSPAADDPWFWGLLRQAPTPVMQRRLSQRRLDRLLRDHRIRRVTAAQVRDVLQQPEVFTAPGVVDAVAAHLQVVLPRVEMIAAQRREAERQLERLLEVLETETPPVGDQREHSDVAIVRSMPGIGTRVAARMLAEGSQPLVDRAYHVLRAIMGIAPVTKQSGRRRTVSMRYACNVRLRNAAYHWARTGAQQEARSREYYASLRARGHSHGRALRSVADRLLRILMTLLTRGQIFDPSHGQQSLLPVVVGA

SEQ ID NO: 173298 - protein, 368 aa, unidentified
MTSVVYVGLDVHKDSIAIAVARQGREAAETWKTIPYDGVRLGKALKMLVKKGEELRVCYEAGPTGFGLCRRLREAGIDCIVVAPSLVPGKPGDRVKTDRRDARRLAHFLRSGDLTAVYVPDEAVEAIRDLERARDDAKCAERVARHQLSKFLLRHDRHWEGTSWTVRHRDWIRTQKFEYPAQQRVLEDYLKTVEDLAERVERLTAQVVELVEETVLAPLVKSLQAFRGISVVSAVTVAAEVGDLRRFATAGQFMAYVGLVPSEDSTGKRRRQGPITRCGNAHLRRILVEAAWHYRHAPVMSKELRRRNQGVATGVQRIAWEAQKRLNKRFYHLVYAGKSTQKAVIAVARELAAFVWAVGQEEKLLEAA

SEQ ID NO: 173299 - protein, 363 aa, unidentified
MFTERTSVGLDVHARSVAAAGIDGVTGELFQTKLTPSIEHIRSWVGDLPGPVAVAYEAGPTGFGLYRSLTAAGIRCEVVAPSKLQKPAGARVKTDAKDAIHLARLLRLDEITSVAIPTVDQEAARDLVRAREDCRSDLMAARHRLSKLLLRHGIVYYGGKAWTGKHDLWLRTEALPKLTTRATRLAFDSGYETVLAVNARRGRLDAVIEAMAADSEFTPVVRRLGCLRGIATLTGFALAVEIGDWHRFTGNTIGSFVGLVPSEHSSGSTKSQGSITKTGNGHARRLLVEAAWHHRSRYTVGATLRARWDLAPAAARVRGDEGNRRLHHRWVKFIDRKKRNTIADVAVARELAGWCWSLAVIDD

SEQ ID NO: 173300 - protein, 363 aa, unidentified
MSDGICFAGLDVHARKTAAAAVQLGCGEVFKAQLSGSPSAVIEWLVSLPGPVRAVYEAGPTGFGLARQARAEGVEVMVCSPGAIPRQPGDRIKTDTRDALKLARLLAAGQLRPVVVPAPELEALRDLVRAREDLRGDLMGARHRVGKLLLRRGLTWDGPGAAWSQRHLRWLSTIRFEDELVELVFGEYLAHHEVLLARRDRLDKLLLEQSTQGPWAPTVARLRCMRGVDTLTAVGLVAEIGDITAFKHPKQLSSYLGLVPSEHSSGTKRRQGAITKAGSAHARRLLVEAAWQYRRPPRVSEPLRRRQDGQPPAAIDAAWRAQIRLHRRWVHLDAARAKKRTTVVVAVARELACFVWEIAQQPD

SEQ ID NO: 173301 - protein, 343 aa, unidentified
MQEPYHYIGLDVHKHTVSYCEKRADGQTVSQGTFRARREAMEAWAAQPREPWIGGMEATLFTGFVYDVLSPYAIEMLVGHPLALKAISWAKHKSDTLDADTLANLLRADLFPACHMASREVRDLRRVLRYRNFLVRQAVAMKNKTTGILMEVGVAYDSRRIHRQGYFYALLDDLGETPPSVRELLCMTRNGLEMFQSAQRRLLDALNKHGLLRERVGRLMTIDGVGEVTALTWALEIDDIGRFPNLKSVQSYCGLCSGRHESAGKNKRMPLSKQRNSHLQTVLIEAAKLAPRFNAQLAQTHAAALERGYNRNRATCAVARKLAAYLTAVDRSGRDYEDRCAAC

SEQ ID NO: 173302 - protein, 323 aa, unidentified
MSQPNLQCMGIDVAKLSLDIATTDTIEPFTVGNDEDGFAVITDKLKHTKINLILMEATGGLEAAIACKLQSEGYDVVVINPRQARDFARSMGYLAKTDKLDAAMLAQLALVIDRHPDRSRYIRHLPDETRAVLAAMVVRRRQLNHMLVAERNRLYPSHPQSRKSIDNIIDALQNELDRINEQMKQHMTAFFQEQARLIGSVKGVGDITVASLIAELPEQGKLNRREISALTGVAPLNRDSGKMRGKRTTFGGRAGVRATLNMAALVATQFNPAIKLFYQRLLAAGKPKKLALVACMRKLITILNTMLRKGEEWNASFQSQVIS

SEQ ID NO: 173303 - protein, 353 aa, unidentified
MSVNQTQVTIINNLNSKIMKKFQLFVGIDVSKEWIDSAVLSKDGVEQLPVKRFTNNKGGFHKMVSWIQSNTDLSPSSYLFCFEDTGLYSMPLCCFLSEVSYSYCLESGLRINKSMGIKRGKSDPADARIIARYLYLHRDQVYLHRIPTASLIHLKVLLSYRERLLKQKHAMEVSSSELSVLGNDPEIIFIQQDSKSIIEILNEKLKIIEKKIKDCIKNDELLHENFKLSASVKGIGLILSAYFLVYTNNFTRFENWRKFSCYCGTAPFEYSSGTSIKAKTRVSHLANKMIKAFLTNGAYSAIQHDRELRAYYRRKLQEGKEEFCVINAIRNKLISRVFAAVKRGTPYVSIVNY

SEQ ID NO: 173304 - protein, 334 aa, unidentified
MTTMNYIGLDVHKKTISYCVKDVSGRIQQEGKIGSTRRELDCWMKTLPQPWTVAMEATIFSGWIKVAHPLMLRAIAAAKKKNDQIDASKLADCLRCDFLPECHMMPAAIRDRRRTLRYRHLLARQMVQMKNRVSGPLMETGVEYKQATAAQGELLPGIALREQGGSSEHTAAVEAQPGDDRALSKDRVRPGQLSPARSGVGRPDQTTPNGSWRGSDHCTDVALEIGDVSRFRSIKQAISYCGLCGDERSLADKAMRMPLSKQRNKHIQRALVEAAKLAPRQNHEMAVIYDQERQKGNSNRATLAVARKMVAYLLAVDRQQRDFVPAEERRTTAA

SEQ ID NO: 173305 - protein, 371 aa, unidentified
MPSARQLAEKGKARKGRSIVRGAEPFSSKTSNGCLGTSPHSQARGVRRGKGTRLERPSEGQTVFVGIDVSKARLDVAFRPEGACFQVSNDEAGIGDCVRRLQALRPELIVVEATGGFETALVAGAAVVGLPIVVVNPKQVRHFAKAIGRLAKTDSIDAGVIARFAEAVRPEVRPIQNEAGELLTALLSRRRQVLEMMVAEKNRLVTMQERHVRQRITHHLHFLKQELRELDKDLDKEVRSTPAWREKEDLLKSVPGVGPVLARTLLAELPELGQLDRKRIASLVGVAPMNNDSGSLRGQRRIQGGRAQVRTVLYMAALVASRFNPRLKRFYDSLRARGKTGKVALVACMRKLLVILNALVRTGERWNAEAT

SEQ ID NO: 173306 - protein, 345 aa, unidentified
MHQIGIDVSKTKLNAALLLAPAFLKKKTKVVPNNPEGFESLIEWLQRQAKDQKPFRFIMEATGTYHQPLALFLSDHGFEVCVINPALIKRFGESMAARTKTDEKDCVIIAHYGAKMNPKPWVPPSPRYRALEQLLRRLDQLDKMIRQEKNRLEALGSGPADQDVLDSIEKTLSYFEKEYKEVSKKIQNHLDQHPDLKDDVKLLTSIPGIGERTALRMTTALEGGSRFASARQFAAYLGLTPRQNQSGNIKGKTSLSKMGPSALRKALYMPSVVACQCNPDIHALYERLLKAGKTKMSALGAAMRKMAHLAFGVLKTRQTYRAFYSPILEPEVGKEANPLAVGLLS

SEQ ID NO: 173307 - protein, 412 aa, unidentified
MQTLIERGCGLDVHQATVVACLLMVRRDGKVQKQMRTFGTTTRELVGLREWLLSEGCTHVAMESTGVYWKPIYAILEGALEIVVANAQHIKKVPGRKTDVKDAEWIADLLCHGLLRSSFVPPKSIRELRDLMRYRRKLVESQAAERNRLLKVLETANIKLANVATDVFGMSGRLMLRALIAGKATPQEMAELAKGLLRKKIPELELALEGKLEQHHRFLLELQLQRLEAAEKDLAVLEQRIRQMLEPYAAQLALLDEIPGVDWTLAAVIIAELGVDMSVFGSVSQLASWAGVCPGNNESAGKRKSSRIPSGNVYLKSGLVEAANAAGRAKGTYLRDKFFRLKARRGYKRAVVAIAHKILVAIYHMLSQQVSYNDLGDLYLDKLNKNHLTRNLVHRLERLGYAVTLTLQQKAA

SEQ ID NO: 173308 - protein, 355 aa, unidentified
MGLHPTQSNEVDFSGQNFYCGIDIHKKNWAVTIETDDMSLKTFTQDANPDLLVKYLNRNYPGGRYIAAYEAGYFGFSTQRKLAKQGVECLVINPADIPTTHKEKDQKRDPVDSRKIARSLRAGQVTPIWVPPVTLTQDRQLIRTRKLLVKDRVRTKNRIKAFLQLYGIEYPDRFKKLQTHWSKAFIKWLEETQLEEPSGTEALQSLVRIFQYTRNELVVLSQRIKALSEEPRYHYAYTKLIAISGIGRLTAMTLLTEVGDINRFRSADAFRSFIGLIPRSHSSGEKDYKGRITNRKCVNLRSLLVEAAWSAIRADPTYLYIFNQYKSRMDTNKAIVRTTRKLANHIYFTLREINR

SEQ ID NO: 173309 - protein, 385 aa, unidentified
MIILDEQEQVLYQKKIPHHLGEMKQTMKELKCLEKKEKAQLSFALEGKNGYSNPLDRLLLLAGFTLYNVDNYKLKRFREAFSGEWKDDHRDALMLSKMLRLKEHINSPQEKVFIEITKPSIITESLKLLSRHQQILIEEKVRLTNRLGKKLLEVCPELFTLGKLNHHKIISILSRYPDFSRYHRITLDSLLTIPGIGKKQAPHLLAGLHDLTYMPGLTAIYKTIISSHAKRILQLQKEIKEIDKKMDQIGQQNKTIRHLKSMPAVGTKLASRFTGEIGDIHRFPSEKNLAIYCGIACVNNSSGKMNKTKAVYKANKIAKQTLVMMAGGSIRLNPQCRDYYLKKRTEGKKHNHALRCLARQMIKVIYRMLTEDRDYQIKKEAMKVA

SEQ ID NO: 173310 - protein, 346 aa, unidentified
MVIVGCDFHPRWQQVAIFEAATGEIGERKLVNGNGEAEQFYRSLPVPSLVGLESCGNSQWFLELMEQLGHEVWVGDAAQIRASYVRKQKTDRRDAGHILKLLLEGRFPRLWRPDAAVRDLRQLLIHRHRLVQIRTRVKNGLQHLAMNRGMQKKSKLWSAAGQRAFLELPLPGWAGCRRQDLLGLLAKLEEQIRPLEAAVEKAAFTHKQARLLMTQPGVGAITALAFVVTLGDANRFQRGKQVSSYLGLIPREHSSSGQQRLGAISKQGNSFMRMLLVEAAQTAVRLDEGLRKKYQHRCHSKAKGVAKVAAARKLAVRLYWMLRTNTPYPEIVHNESSSRCPMAGAS

SEQ ID NO: 173311 - protein, 357 aa, unidentified
MQLQGNTHNPKIYIGLDVHKKSWSISIQTDLFFHKTYSMPAKPNDLFDYVNKTFPGHDVQMVYEAGGCGFHTARFFLNLGWEVLVVNPADIKKGDKERYQKTDAIDSKNLSNFLKRGDLKGIYIPTEEQEQFLSLARHRSQVTKKLRQTKCHIKSMLLYHGVEIPEEFDKPNWTIAFLDWLNTIKFSTSSGTLSLQGKLRMYNFVKAEYLEIANQMRLYCRKEHKKDYNLLRSIPGIGGYLASVIIAECGDIRRFNTEGQFASFIGLVPGVYNSGGTESCLGITPRSRGQLRSYLIEAAWVAIRKDPEMQAYYRKHQGKNVKNIIVKVAHKMSRRILSVVKTETPYQVNKNIVLEQN

SEQ ID NO: 173312 - protein, 340 aa, unidentified
MDNIGLDLHKRESQLCILTSDGEVVERRIQTSRERFTAVLGERAPARILVEAATESEWVAQHLEALGHEVIVADPNFAPMYATRSRRVKTDRRDARTLAEACQLAAYRRVHRLSPARRHVQVELTVRDALIRTRTRYVAVVKARVRREGLRVPGGDPEHTVAKLMALPLSVAVAAELAPLVALLEPLNAQIVAADARLAALAAADAVVQRLMTAPTIGPVTAVAYVATLDDVGRFATARRVAAYLGLAPTERSSGEQQRRGPISKTGNPRVRCLLVEAGWRILRSTQPAAAPLRAWAERIAAHRGRAIAAVALARRLAGILYAMWRDDADYRAAAISAVV

SEQ ID NO: 173313 - protein, 351 aa, unidentified
MKNATARKRTQITIGLDLGDRRHTYYVLDGAGKMAREGSLGNTREQLATMARSYPGATVVMEAGTHSPWVSRFLQELGLRVIVANPRKTRAIYQNERKSDRRDAMMLARLARMDPTLLHPVEHGSQEAQQDMLQLKLRDSLVRARVALINAVRFTLKSLGYPVSNPSSERFHKLVLSEVPESIGEMIAHNVAAIAELTQRIKALEVSISRLAAERYPETIYLQQVSGVGPITSLYFVLKVGTPGRFQRTRDIGAFLGLCPRRDQSGETDKELRISKCGDQYLRGLLVNAAQYILGPFGTDSALREHGLRLAQEGTARAKKRALVAVARKLAVLLLTLWKSREPYESFPTMA

SEQ ID NO: 173314 - protein, 386 aa, unidentified
MQNDHRPDQSAIRTDLGALFVSLELSRSTWLITSLSPGVGEKLSKHSIPAGDAGALLARLTLLRQKATARTGRAFPIIVIQEAGLDGFWIHRVLESEGVESHVVDAASILTSRRRRQAKTDRIDGETLVRTLLAYKRGEPRVCSMVRVPTPNQEDRRRICRERKALLTERIGHTNRIKGLLCTQGVFNYNPLLRDRRARLEVLQTGDGRPLPERMKAQISRELDRIELIIAQLKAVEVDRDLLLEQEEATPTAPAVMLGRLKGIGPQIATLLWSEALYRHFDNRRQVAAYAGLAPTPWKSGSIDHEQGVSKAGNPRLRTTMIQVAWLWTRHQPGSALTLWFKDRVERNGGRMRKTAIVALARKLLVAFWKYVTSGVVIEGAVMQAA

SEQ ID NO: 173315 - protein, 380 aa, unidentified
MKQTIRSFVGMDVHKETISISVAEDGRSGPVRFIGVIPNTPEAVHKMAKQLTRHGELDFCYEASGCGYGIHRQLTRLGHRCTVAAPSMIPRKPGERIKTDRRDSEKLAILHRSGDLTPVWVPDTTHEALRDLVRARVDASMHLMRARQQLLAFLLRHGRSYPTGKHWTQRHRSWLAGQTFQEHAHGIVFQDYLETVWTAQQRRDALIERISAMVGSWSLGPLVEALRGLRGIDMISAATFIASTGDLSRFESPRLLMGYLGLVPSEHSSGGTIRRGGITKTGNREARRMLIEAAWSYQYPARIAKDKAEILIRLPKKIRDIAWKAQTRLCTRYRSMIARGKKPTVVVAAIARELAGFIWAIGQEMRISMTSCQLVEAAAS

SEQ ID NO: 173316 - protein, 322 aa, unidentified
MAMLSFCGIDVSKDRLDIMVLPEQQCLSVHNDASGWAELVERLRSFAIAAIGLEATGGYERGVMRALLAAGMSVRQINPFRLRQFARASGVVAKNDPLDARMIASFVSVMPTRSAQRHTPAVERLAEILAVRRQLSSEKIAAENAARLLEDPMLQRLSRRRIARLSADVEKLDERMVEVVAADAALAHRYRLLISMRGVGPVLACTLVALLPELGRLNRKQIAALVGVAPYDFDSGLLKGVRRIWGGRAPVRNVLYMAAMNASRHNPALKVFHNRLKAAGKEPKVALVAVMRKMITTLNAMVRDDVVWADRSTGRHNVPTAR

SEQ ID NO: 173317 - protein, 394 aa, unidentified
MHRVSLGAVGRWTPAQDGVIGLADRLAAVSHSDGVNGVARWARPKHRGETAVKHYAGIDVSLEESHVCVIDELGRVVKELVVGSDPRSLAGSFGPWRGSLVKVGLEAGPLSQWLHAGLSCAGLPMECLETRQLKAVLSASPVKTDRKDAHGIAQVVRMGWYRRVHVKSRTAQERLALVTSRKLLVNKLKDLENGIRGLLRGFGLKMGQVGRSKFEWRVRDLLSREPALRSIFEPLLAGRGALRGQFALLDRQVRQTARQDADCRRLMSMPGVGAVVALTFQAAMDDPGRFAHSRSVGAHFGLTPRRYSSGEIDRSGHISKCGDEMVRTALYEAATTLLCRVARWSALKAWAVRIAKARGLKRARVALARKMAVVLHRMWQDGTEFRWSKAESAA

SEQ ID NO: 173318 - protein, 429 aa, unidentified
MNCTQNKKIEQVKETTMIVGIDVGSEKHYFRAFNWRGIELTRKPVAFSNSMEGFNSFYNTIVELMQKSELEEALVGIEPTGHYWFALGQFMGEKDIKFVMVNPHHVHKTKELDDNSPSKNDRKDPRVIAGLVRDGRYFYSYMPTGAYAELRNASNRRFVLVEEQTRAKNRLQKWIAVYFPEYKGIYTHIDAKGGMLVLKKAPTPEEIVRLGVEGIIKIWKDAKLRGNGHKKAMLILAAAMRSIGLKAGLTEARMEIQDLIEDYELQTKRLERVNDLIKGLCQQVRYADKLLEIKGIGITTVAGFIAEVGDITRFDSTKELQKLAGLELVADSSGKHNGKTKISKRGRKRLRYLLFEAAISVVGKNEEFKEIHRYYTTREKNPLKKMQSLIAVACKLIRVFHAILTKGIRYDASKMLKDIRHPGEQLKAA

SEQ ID NO: 173319 - protein, 382 aa, unidentified
MKNQNRQNTPTSHEQTDAKAEVIKLGIDIHKRQYVVVQQVDGEAPKSPQKFSPDAFLRQAAKIKARAKRVVSCYEAGCFGYVLHRQLLRMGIENEVVRPRNWDEYGSKVKTDGRDARELCSCLDRWLAGNKHALSIVRVPTEEQERTRSLSRQRDTLSKEQKRLQNVGVSNGRYYGFELPMSWWKPCRFRKLEAELPDWFLDIVRPIQEILVVIGSQLRAATAREECKANRELPVGLGALTASVLDEEFRDYNRFTNRGEVGSFTGLCPSEQSSGGSRRQGSINKHGNPRIRAKLIEAGWRLLQFQKDYEPVKKWKEKLERMPRSKASKKKMVVAIARRFAVDWWRINVGQLQPEEVGLRINYPSAYATKALREGRAVKHHA

SEQ ID NO: 173320 - protein, 329 aa, unidentified
MTKLMAARDRWAKVSGKAPSIVLCYEAGYDAFWLARFLKARGIECLVVDAASVQVNRRARRAKTDRLDVRMLLRALIAWDHGERHVWSVVRVPSVDEEDLRRSHRERDRLVRERTAHINRIKGLLFGQGIRGINVKSKYKTLQIDKLVTGEGRPLPPRLASEITREIARLALIQEQIVALERERDQAPTPCKVTEKKRVQLMCLTGIGPAIAAVMTREVYYRQFDNRRQVAGFLGLATSPHDSGDVERSQGISRAGRGQVRGAIIQAAWLWLKHQPKSAITRWFVQRTAGHSGRIRRIMIVAVARKLAIALWRFLEQGLVPQGAMLANR

SEQ ID NO: 173321 - protein, 366 aa, unidentified
MHTAAPDVTVTIGVDTHKDLHVAVALDALGRRLGELVVPATAAGYQQLHRWATDQGQVDAFGVEGTGSYGAGLARHLRRTGSRVIEVNRPDRASRHRKGKSDPLDAEAAARAVLAGTATATPKDGDDQVEVIRILKLTRDSAVKAQTQAVNQLKAVLVTAPTELRESLAGLGLVALLERCTALRPGEPTTPLSAAKYALRLLARRVLALRAEAKHLREVLTGLTAAAAPALVELTGVGPDTAAALLLAAGDNPHRLHSEAAFAALCGTSPIPASSGKVTRFRLNRGGNRQANAALHRAVITRMHWHEPTKIYVARRTAEGKTKPEIMRCLKRYLARQVYRCLVRRVPVNPVAEQSRDHHEDLAGAA

SEQ ID NO: 173322 - protein, 341 aa, unidentified
MGEVTTIGLDLAKHIFQAHGADASGAVVFRKKLRREQVLAFFAGQPRCRVAMEACASAHHWAREIGALGHETRLIAPAYVKPFVKRQKNDAADAEAICEAAQRPTMRFVLPKSAEAQGAAVIFRTRDLLVRQRTQLINALRGHLAEFGHVARKGPGHVAKLVELVRAAESDLPEEARSVLLITVEALEAVHARVRGLDRQIEARAKASPLARRLMSVPGVGPILATALVALAPPPSTFRRGRDFAAWVGLTPRQHSSGGKERLGRTTKMGERSLRRLLIIGASSVVIAAGRGGARDPWLARLLARKPRMLVMVALANKMARIVWALMARGGSYRAPIAAAA

SEQ ID NO: 173323 - protein, 366 aa, unidentified
MTSVTGTRESIYLALDVHKNSITAGALEPGATSAVMTRIGPDDAAVRRLIGKFSDRKQLKVCYEAGPTGFALARALTKWGVDCEVIAPSRIPKQSGDRVKTDKRDAATLAVLHRAGMLTAIRVPTEGEEALRDLCRARQDAYDDLKRVRRRLLAFLLRHGQVYRTSSTWTREHQRWLNQVRVDEPAARAAFEHYLAVERLRETEVEAMTRELLGWVDREPFATSVHRLAAYRGVAYISALGITAEIGEWSRFHRATGFMSFTGLVPSEHSSGDRRHQGEITKAGNVYVRTHLIESAWQYRHHPVVGAELRRRHEHVGPDTIARSWKAQQRLCGRYRRMNARLVNPNIIITAIARELGGFLWAEMTS

SEQ ID NO: 173324 - protein, 400 aa, unidentified
MLSIGIDVSKGKSTVCGMKPGGEIVYTPFEIQHTREGMSELVSLLHNSGEEVRAVLESTGSYHCPVVAALLENGIFVSVVNSLRMKRFCSQSIRKVKTDRIDAMQIALYGLAYWQELQPTRLPEDTYRELQLLARQYYQMTSILIKAKVDFNALCDQVLPGMQELMNDHAGRHKLSDFVLRYRHTTHILEMGETRFRKDYCKWAEKKGYRNCERMAALIFATAQNGIPVLPNAPSTQIVITEAIRVLHTVEASRDAILTQMQALAKTLPEYSLVREMPCIGDTLAPRLIAEIGDVRRFHSKRALIAYAGIDAPPYQSGKFCANNRHISKRGNRYLRKTGYEVMQSYVMHKPANDPIFTFIEKKRGEGKSGKLAMVAGLNKFLRVYYGKVTELYRSLPAIE

SEQ ID NO: 173325 - protein, 461 aa, unidentified
MPDGGGENSSPRRTKQIEGLPVIRRNVAGIDLGSERHWVCAPVAGSISREVADFGATTPELIRMTKWLQACGVESVAMESTGVYWIAPHEVLEAAGLEVLLVDTRQLARVPGRDKKTDPSDCEWIQRLHSCGLLRGSFRPREEVCMLRTLVRDKANLVAECGDWLRRMQKSLDQMNVRVHRAVSHMDGITGMAILRAIAEGERDAQKLAKLRDTRCHKSEEEIAEQLSGHWREDHLFSLRQSLKMYDAIQQRLADYDREILQRLAAMQREEFRQQPPPPVKNPHKAKNMKKRGEEPMREALFRMSGVDLTGIDAIGVETVQVVLSEYGPDLSRFPTEKQFVSHVTLIPHKPMSGGKPVRKKRRSSASTRVAAALRMAAVSLRNSATALGAYYRKIARRLTGDVAVFATARKLATLIYRLLRWGQPYVDEGAEAFERRYQETRLKNLKAKAKELGYQLVASN

SEQ ID NO: 173326 - protein, 397 aa, unidentified
MRESTTVTVGLDVHARSIRFAAVRADELLEERTLPYDEEAVERVLRRWPGARCCYEAGPTGFGLYRHLVERGIECAVVAPGLVPQRPGDRVKTDPRDARKLARLFAGGLLEPIHVPSPEVEAARDLVRAREDARLDRMRDRHRLSKFCLRHGRLLPTSSWTVVRRKWLSEQRFEFAAEQLSFDTYLHALDLVDARIEALERAIRETAEQGPWRELVARLRCLRGIDTLTALALAAEIGDFDRFPTAEAFIAFVGLVPSEHSSGEQRRRGSITKVGNSHVRRLLIESAWHARRRPKVGYELARLPTRPRRARRRARLALPAAAVRPVATDGRSRQTAAENRRRLRPRARRVCLGDRNRPTTPKHLTSNPLDLQQRMRPTTPRTLERLYAAPPAGDPRP

SEQ ID NO: 173327 - protein, 348 aa, unidentified
MNTTTIGLDIAKNCFQVHGVDAHGKTTLQRQLRRAQVLTFFANLPACLIGIEACGSAHHWARKLGELGHQVKLMPAQFVKAYVKTNKNDARDAEAICEAVARPNMRFVAVKTVTQQELLMLHRVRQRLVMERTAKANQLRGLLGEFGIVVPQGLHRLRRVMPEILADAENGLSCRLRERFSHLFSHLRELDASISEWERQIVAWHRESPLSQRLDKIPGIGPLGASALVASIGDIRTFKSGRQLAAWLGLVPRQDSSGGKTRLLGISKRGDRYLRTLLILGARSVLRQMQRHPARAAQSWLERLTARSHPHIAAVALANKSARIAWALLAHEREYQADYRRRVALAAA

SEQ ID NO: 173328 - protein, 396 aa, unidentified
MYYVGIDVSRHHHDATAIDATGQVVIAPFRFLNTRQGVNTLLARLQTLDGRGNIAMEATGHYWLPLYEALVAKGYSVSVFNPFQIKAYRQIGLRKTKTDAVDSLWIADFLRIGRARPMVVPSPAIRQMRELARFRFSLLQRQTNIRRRALTILDRVFPEYRTLFPRPFSPSSRALLRRAVAAETFAAWPPEDLAQTLRQASRGHFGLEQARQLLHLAQNSLGIRSLGAVANQEMQFLLDQLALLDDQITTLDEELDRLLQQTGTYLTTIPGLSTTLAATILGEIGDIHRFTTLKQLVAYAGLDPTVHQSGQFQATHSRLSKRGSVYLRRALWMAASVARQYDPDLKAFYQRKRLQRKHHSVVIGAVCHRLLARIYVVLKEQRPYEIRTPDTNHSTT

SEQ ID NO: 173329 - protein, 275 aa, unidentified
MILVGCDFHSRYQQIACVDAETGDLIERRLEHENGEAFEFYRSLTAPARVGVEATRGLQWFARMLNQLGHELIVGDAAKIRTMVVRRQKTDSRDASHLLELLMNDRFPEVWAPSSSENDLRQLLWHRQKLVWIKVSVKNQLHGLAMSQGVCRRSKLWNAEGRKQLANLTLDPWAGRRRDELLRMLDQLEESIEQLSAAVEEAGQDREDVRLLLTHPGVGRIVALAFSLMIGPVDRFPSSKHLVSYLGLNPREHSSGGRQKFGDISKQERGSCGHC

SEQ ID NO: 173330 - protein, 430 aa, unidentified
MGEFASFGAKNARWKRKKKFVEYEQVIERGCGIDVHKKVIVATVRGTGIKTETRTFDGFTESLERLRDWLKECKITHIAMESTGVYWKPVYNILEEDFEILLVNARHIKNVPGQKTDKKDSRWISKLLLSGLLKGSFVPPRNIRDLRDLTRYKRKVIEQISSEKNRIHKLLEDANIKLSSVVSNLSGATATKIIDAMIDGQEDINELVKLRHGKMHCSVEELAASLKGKLTGHHKFMLQTYKDSIESKEAIIKKIDDQIEKQLEESELLLDAELLATIPGVGKEGAAYILAEIGDNMEQFPSEQHLASWAGMSPGSNESAGKKKSSRITHGDKYLKVLLVQCAWAATRTKKTYLRSKYDSLVGRRGKKRALVAVGHKILIAAYFILKDKVAYKELGPEYLGELKKDKQVTKHLKILKELGVEVEIKENVA

SEQ ID NO: 173331 - protein, 432 aa, unidentified
MHAAGMDLGTEQIFVSTDGETVKAFGTFTSDLHDLKTYLIANGVTTVMMEATGVLWVPIFDILESAGINVCLVNAAHAKNVPAQKSDPADCRWLYKLHVYGLVRASFIPDEAIRELRIYIRQREDNKDIAASHIQHIQKAFELMNIKLHNVISDIMGVSGLSIIEAILAGEHDAEKLTALCNKQILKKKKEKVLESLKGNFKREYIFMMQQAYDAWCFYQKQIENCDIKIGELLKKMTENLPKPPQELLGKPKPSRHDDLNVDNLHDQLVCVNNGRNAASLPGFSDSAVLKLTAELGTDFSKWATDKHFTSWLGLSPRKYQSGKTNKTRRSLKKNTKAGQIFKELSMSIAGSKHLALKGFYNRIKSRSGSKAAIKAVARKLAKLYYDYMTRGFTYVEQGLNEYEKKYKTAMIKGLEKKAKNIGYQLVPIGVH

SEQ ID NO: 173332 - protein, 366 aa, unidentified
MAPIYIGVDFHARQQTICYLKTETGELVISALQHQGKEQVRAFYQQFQGPVIVGLEASGYSPWFEAMLEQLGHEVWLGHATEIRRRARWRQKNDRRDAELIWDLMVHGEFPRLHRPAVESREVLRMLRYRQKLIKLRTMTKNSLQAIALQAGLAKGKQLFTTAGQEEFQAAAMSPVLQWQREHWFALLKPFNQQLLETMVWFKAQSKNDVNVQRLRTHPGIGLLTALCLVHTLQPVSRFRNPRKVAAYAGFDPVERSSAERQRFLGISKAGSRMLRYLLVEAVQTAVRYDDDLKRFYKRLAERRGRSKAKVAAARKLLIRAYIMMRDEIDYAEFRRRAVAARLARTGQGPLSCARGTDWAAGLSGA

SEQ ID NO: 173333 - protein, 389 aa, unidentified
MDAAGRVLARKRLPEGVAGMARLHELIGQQLGEDGEDTEVLIGIETDRGPWVAALVAAGYTVYAVNPLQASRYRERHGVSGAKSDRGDAHMLTDMVRTDSHQLRAVAGDSADAGAIKVVARTHKTLIWERTRNGQRLRHQLREYFPAALEAFDDLDAPDALELLAKAPDPARAAKLTRAQISAALKRARRRDITGKATAIITALRSGQLGQPPAVTAAYAVTVRSLIAVISTLNEQVKALEGQVEAYFGRHPDAEIYLSQPGLGYVLGARVLGEFGDDPDRYVSGKTRKNYAATSPITRASGKKKVVAARFIHNDRLIDALMAQAFAAMNASPGARALYDAERASGTDHNPALRKLANRLVGILHGCLKTRTLYDEATAWSHHENKLAA

SEQ ID NO: 173334 - protein, 359 aa, unidentified
MDIRDQAKRHVVGGVDTHKDLHVAAVVDERDRVLGSQRFATTRQGYRQMLAWMGSFGEVQRIGIESTGSYGAGLLRFVQTVGIEVLEVTTPDRHDRRRRGKNDDLDAQNAAHAAFAGQRTVTPRRRDGLVESLRVLSACRKTAVAARRVALQLIQNTIVCAPDGLRDVLRSMTRMQLIRTLAAWRPDLTAYRDVEAAYRITFKSLARRYLELHDEIADLDIMIGAIVDELAPDLVARNSIGHVGAAQLLLAAGDNPDRLRSEASFAALCGTSPVPASSGKTIRHRLNRGGDRHANSALHIIAIGRLRTDPKTKTYVAKRIAEGHSKLEAIRALKRYIAREVFTLIMRRHKAINQTQIAA

SEQ ID NO: 173335 - protein, 394 aa, unidentified
MKLVGIDVGKNSHHFCVMDKETGEFNVTPTSFSNNKEGFDFLINSLKPYSKKSILIGMEDTGHYHVALLKFLLSNGYPVALINPKTTDLTRKMEGGITKNDKLDTITICDVLDTPERKKQYRITKVDRFDLYEQRQLTRHHHNLKEELNVYCNRLQKSIDLVFPEFNTLFSSKYSIVYMNLLKTFGSAEAIASTDIRTIRKFFEIKGKGNRISLTPEKLKECAKNSIGISSEVETIQIKHLVSQITLIKEQIAEIDKKIEEFSIPNNSPILSIPGISHFSGTSILAELGDIGNYSKPSQIIKFAGVAPYHYESSQYNAQHTAITKKGSKYLRKTLYQIILPVINNNPVFKKYYLLKISQGKGHRCAQGHCIRKLLRIIYHLLETGQSFDPALLR

SEQ ID NO: 173336 - protein, 354 aa, unidentified
MKENTTIAVDIAKNVFEAAVSVVPGRVGERRRLTPAQLRRWVAQREPSTVVMEACGSAHHLGREFEKQGHKAVLLPPSQVRRYVLRNKTDRTDTMALLEAYRNEDIKPVPVKTEYQQALAWLHRVRTGWKHARTARLNAMRGVLRELGITIPVGATKVLPAVVEAVANEKVPPMLRAVLLEAVDEVRQLEQRIRGAEDDLVREAKTQPAVKALMTIPGIGILTATALVSAVGEPTRFASGRRFASFLGLVPREHSSGDRRHLGAITKRGDPYIRMLLTHGARSALLAAKRKKSNDRLRTWALAVEQRRGHNRATIALANKMARIAWAIWSRGGRYAPGSDPITADRTNAPIVSD

SEQ ID NO: 173337 - protein, 380 aa, unidentified
MITVSMDAHVRNSFLHATNAEQQVLRRGRCSNTLLDLAGFLAPVEREAIAGQEPVHVVLESTTNSRGLARMLATYGREAGIDLTVDVLDARKLRVIAESACKTDAIDARVLNELACSNLKLPVCYLPDDEEFALREHLRSRSDLVRMRTMLKNRVHAVLHRRAILAPQGDLFTASGREFLRQLTLDEAGRTVLDRFLGAVDRIEEAVRASTADLMELARRPRWAKPSALLRTMPGIGLITAMTLLAELGNLQRFPSRAAVANYAGLVPVIRNSNEKHFAGGISHRGSTHLRAVLTEAAWMAEPRVPAYHDLFLRVQHKKGKGTAIIAVARRMLEDAYTMLKKDEAFRYMAVSTAEATTNESIRANTASRRSRNVASSVAG

SEQ ID NO: 173338 - protein, 349 aa, unidentified
MRFYNQPHAAYCGVDLHARTMYLHVLDAQGQTRFEKNLPARPDAFLDAIAPWRNGLVVGCECMFAWYWLADLCEDQHIPFVLGHALYLKAIHGGKTKNDRLDAAKLAALLRGGAFPQAYVYPRAMRQTRDLLRRRTFFVRQRAQLLAHVQNTNSQYNLPPIPQKLSFAGNRDEDELAGRFAHDSTQASIRADLRLTAAYDEQIRTLELHLTRHAKVDDPVTYQLLRTVPGIGPVLALILLYEIHDIARFPEPGNFLSYARLVRCEHESAGKKKGFGGKKIGNGYLRWALGEAACLMLRCHEPAKQWLARQQKKGSKARALGILAAKLGRTVYHLWRKQVAFDARRFLTS

SEQ ID NO: 173339 - protein, 392 aa, unidentified
MYIIGIDIGKNHHEASIVSPEGKQIGHSLRFATTHKGADSLMSFIFNNIGNSSCIFGMEATGHYWYPIYSFLKARGYTIYVINPIQSDSLRKMYIRQTKNDSIDSFLIAEVIRFGQFTTTSMADESILAMRQLCRYRDSVISSRTEIKLRISTIMEQIFPEYEKQFSSLWLSTSMGILEKYLTPENIENAPIDELFEIIKDKSHNKLTMKKAISIREAASDTFGIKIAQDAFSFQLKQLIDRMNFLDKQIEALDCQILEYYEKFDCYLHTIPGIGMIAAATILAEIGDINRFKSSSALVAFAGIDPTVRQSGEFSSTHNHMSKRGSPYLRHAIFLAATTCSFHNSPLNAYYKKKREQGKHHLTATGAVARKLTTIIYAVFRDGKPYEPKKFC

SEQ ID NO: 173340 - protein, 341 aa, unidentified
MMIIGCDFHPRFQQIAFVDQETGECGELRLSHPQEAEQFYRSLGGRQVRIGAEATGNFRWFRRLIEELGQEFLLGDASTIRACCPRKQKTDKRDARHILTLLVEDRFPAVWQPPVENDEMRQLLLHRCRLVRMRTRVKNQLDSMAKNEGLLSLRVWSPKRRSEIEALPLPGWYAHRRADLLVLLDELDKRIKPLDEAVRKAAEGNAEACLLMTHPGVGPIVSLAYVLTIGDWRRFPRGKQVGSYLGLIPAEESSGDKRRLGHISKQGSTLLRWLLVESAVHAQRHDPSWHRQYVRLSMTKHHGVAKVAIAHKLAVRLYWMLRSGDDYRKVRERGSHVGQSV

SEQ ID NO: 173341 - protein, 391 aa, unidentified
MSMYFVGIDISKYKHDCCIISAADQQIVSKFTVKNDKDGFEHLLTTLNSLSNPEDIKIGFESTAHYALNLELFLENAHHSFMEVNPVLIKEYKKSTTLRRTKTDSVDCESIARWLMTVEYKPHSKGFYHSYSLKSLTRLRDRLIRQRSFYLVKITNVLDHTFPEFKPFFNERLSKTAIYLLENYGSAEKMAHMNSASYDKLRCASRGKFSIQQFLRLKELAANTVGVNNSIFDIELNSLLTLYNSLCKEIKTLEAEITKLIEEVHPHYMSIPGIGPISAAVIYAEYGDISNFSNPGQMLAFAGIEPGINDSGTESHGGRMVKHGSSQLRYVLLNACLPLIRFDLTFATYYAKKRAEGKKHRVAITHVAKKLIRVIYALERQDVDFNVQKLR

SEQ ID NO: 173342 - protein, 343 aa, unidentified
MNSMNYVGLDVHKKSISYCVRQADGTILREGSIVATRQALDAWMGELPQPWMAGMEATMFTGWIYDHLVSRGVTVKVAHSAMLKAIAAGKKKNDRLDARKIADLLRCDYFPECHMAPREIRDRRRVLRYRNLLVRQAVRMKNKVSGLLMEAGVPYNQQKVHGKKYFAELMKEQSKQMPPSLPQLLQLSRSTIETLTGMERQLMTALERDALLASRVERLETIPGVGRVLALTWALEIGEISRFSSVKKAVSYCGLCGGEKSSGGKMERTPISKQRNKHLQTMLIEAANLAPRWNAELALVYEREKQKGNRNRATLAVARKLVAYLMAVDRREKAFGPAAKVAA

SEQ ID NO: 173343 - protein, 318 aa, unidentified
MYYIAFDVSKKVLCGFDGEKELVFDNKKGLKAFKGYLKKKYQDLNDLVIVFEATGVYSNYLKAFCADNNLKVCIMNPKRSANFSKAIGNRSKTDKIDTKKTIYEYRKIIGPKDIKVPKIDKVAQTLSAYLTSYKFTVKKRVSISNHLEALERTTSSLELVALLKGELKRTKKTEEKIKAKIEEYIKKDSQLKEDYKRQMTIPGVGKVSAICLLALFNKYKDTNQAQITALVGLDPTKRESGTSVKGKMKISKNGDRMIRGTLYFPLLSAIRFNKKIKALYDRLLANHKPKQVALIAAMRKLILISHAIYKNKTVYSAV

SEQ ID NO: 173344 - protein, 366 aa, unidentified
MRKPSTTALRRRGKLQGEQLTIGLDLGDRSSFYCVLNGAGEVVLEAKVATNPEAMRKTFEKTPSSRIALETGTHSPWVSRLLTELGHEAIVAHSRNVRLIGESRRKDDRLDAQALARLARIDPQLLSPIQHRSAQAQADLSVIRARYALVRTRTALICAARGLTKSFGERIRSRYIRGFKPAMGDTLSPQLRVALAPLLSALETITARIREYDAQIEKLAEESYPDVALLKQVKGVGTLIALTYILTLEDPRRFRKSRDAGCYVGLQPGRRNSGQSEPQLHITREGDSYLRMVLVQGAQHILGPFGEDSDLRRWGLKLAERGGKSGKKRAIVAVARKLAVLLHHLWISCEAYEPLHNTRKRRLAAA

SEQ ID NO: 173345 - protein, 436 aa, unidentified
MRVMYEKCAGLDVHKQTVVACARWTQADGRLEMEVRTFGTTTPDLLELTDWLRAWGVTMVAMESTGEYWKPIYNLLEGECEVILVNASHVKQVPGRKTDVKDAEWLAELLSYGLLKASFIPARPQRDLRDLTRHRVTLVQERARVVNRLQKVLEHANLKLASVASDVLGVSGRQMLEALVAGQTEAHALAELAKGRLRNKMAALEKALTGVVGPHHRFMLAQHLAHIDFLDEQVEQVSQEIGQRLEAMSHASTEPPEGHAPAGPSPVTWQQGIALLDTAPGVDRRAAEVVLAEIGLNMAQFPDEDQLAAWAGLAPGNNQSGSKRKNAKTREGNRHLRQVMIQIAWAAARTKGSYPQALYRRLAGRRGKKRAIVAVARSLLVSFYFMLARGEPYCDLGGDYFDQRRKTASVDQLTKQLAKLGYAVQLEPLLPQPIPT

SEQ ID NO: 173346 - protein, 439 aa, unidentified
MKTMKTTPLRKIRPHAAGIDLGSEEIFVAVEEQPVRRFETFTAAMAEAVAYLKSHSIETVAMEATGIYWIPLYELLEKASIEVYLVNGAHLKQVPGRKSDLSDCQWIQQLHSCGLLSAGFVPPEQIRTLRQYWRLREDHIELAAQHILHMQKALELMNIKLHKVISQLTGASGLRIIEAILAGERDAERLAELCDGRILANKRERVVLSLEGHYRAEHLFALTQALAGWRFYQGQIAECDRAIAAWLAEHTADLPEQPLKGKPKPIHHNPPQIENLHGQLMQLTAGIDPTIVCCLNDRTILGLIAETGLDMTKWSKKSNFYSWLGLAPKTDTSGKRRRKRRQPHNNRAGQIFREAAQSLATTKHPALAGFYRRLRARRGPQVANKAAARKLAGLYYDLMRYGRQYIEQGMEEYEREYKHQQVERLTKQAQALGLQVIAA

SEQ ID NO: 173347 - protein, 343 aa, unidentified
MDQHIGLDVSLKDTSISVRQDGKRIWRGKCASDPKIIVEVIRKRAPKAKRVVFETGPLSVWFFHALTAEGLPAICIDARHAKAALDMAANKTDANDADGLAHLAEVGFYKEVRVKGFDSMLMKTLIAARRQLMKMRVQMSNQIRGLMKTFGLIVPSGAGSVFDRNVILLLEGEGNLARIILPLLKAWGDIRLRVAELTKQLVAMAGADQRCRLLTSVPGVGTVTATAFAAAVEDSINFKNSRAVGAWVGLTPKRYQSGEVDYEGHISRRGDAKLRTLLYEAASVILNRSTETNTLRTWALALKERLGFKRAAVALARKLAVIMHAMLKTGELFDPNAGAAVPT

SEQ ID NO: 173348 - protein, 341 aa, unidentified
MDKELYIGVDVSKKSLDLAYYDGETIDWKNAHIQVSNDDAGFKKIGSWVAKVGKDFDTFLFCMEYTGLYNQNFRLWLESKEYIYSMVEPRKMHRFEPDLDDDQRSLDRIKTDEQDAFRIAIYCEQNHKKILRNPSKLPSPVYFKLKRLLAERKQNTKQSTLYKQQLHDICAYDTDLSVERKKLLLKNMQENQKAIDKEIDSYMNEDTSIRKNYNLLTSIPGIGRIIALETIVLTENFTAINNPRKYACYIGIASFKKESGTSVRKKTGVSKKGFSEAKADLSIAVLSAIRNNPSIRDYWIRKRKEKCGGIVLNAVKFKLVLRMFAVIKRGTPYVETDAYKN

SEQ ID NO: 173349 - protein, 352 aa, unidentified
MRTSQKAAGIITTIGIDIGKNTFHLVGLDKRGAIVLQQKVSRGQLERRLANIPHCLIGMEACSGSHHIGRQLAAIGHDVRLIPAQYVKPFLKGHKNDYRDAEAIAEAVQRPTMHFVAIKTPEQMDLLALHRVRSRLVGQRTGVINQIRGFLIERGITVRQGPMPLRKALAEILSSDTGVLSPRMVGLVTDLVQDWRRLDERIAAVSAEIEALAEQDDGCQRLMTVPGVGPIISSAVVAAIGNGAGFKQGRDFGAWLGLVPKQESTGDRTILGKISKRGNKYLRTLFVQAAHVVLVRRPRAAMRGLWPWIEQASKRLHRNMLAIALANKLARIAWAVLARGRAYQPRTTADAA

SEQ ID NO: 173350 - protein, 446 aa, unidentified
MDVLYTHCAGLDVHKKQLTACRWVPDPTGQCVEGLTEIETFGTMTIELLGLVDWLTEAGITHVAMESTGEYWHPVYNLLEGHFTVLLVNAAHVKNVPGRKTDKADARWLAKLLRHGLLQASFIPPRGQRDVRDLTRYRTKLVQERAREVNRVQGVLERANIKLASVVSDVMGVSSRAILAALVDGHADPATMAELARGRLRSKLPLLEQALSGLVRDHHQQLLAMQLAHIDFLDEQIATLNTTIAERLSALTPPETVAVPVAADEPIAGSTPPVAATAPLTFDQAITLLDTIPGVDRRGAEMIVAEIGTDMSRFGTAARLAAWAGVAPGNDESAGKRRSGKTRKGNRALRTGLVQLAHSATHTKGTYLATLFRRLAARRGKQRAIIAVAHSILVSVFYILVRHEPYRELGAAHFDRLRHSQSVEHLTRRLEQLGYEVHLEPRPAAA

SEQ ID NO: 173351 - protein, 438 aa, unidentified
MVPMTLGIDVACRAAHQGSLADPKGRFAWSGRKFRTTVADLNRLWESIPEGTALTVVMEPTRNAWVPLAAWFRRRGASVIMIPPEQSADLRDYYSKHAKSDHLDSRMLARLPLLHPDGLRPAEGLGPADALRRATKLRASLVKRRSVILARLDSYLELLGPAWHAAFGGDLANNTPLRFLAAGYADPHAVRRLGRARLARFIWRYSHGAFGEQLAGQLLAAAAETLQLWDGELSYPDLAEDIAAEARLALALTTETRDLERKIASLLHELDPAAIMTSVPGVGAIGAAQILARLGDPARFQSLAGARSFTGLVPSLDASGTSGRHGPPTKSGDAPLREALFMASNQARRIDPALAARYHRLMVTCGKHHNSALCHISTALLTRIIACWRAGTPYQIRDLDGTPLTAAQGRALVAARYRISDEIRAQRRTSHTKTRASR

SEQ ID NO: 173352 - protein, 367 aa, unidentified
MEDGITFIGLDVHVKAIRVASVGPDGVVMDRGEVVNRPAAVLAKLTRLAPAGSLRVCYEAGPTGYSLVRALLAAGIACIVVAPSLIPIKVTDRVKTDRRDAAKLARLLRSGDLQAIAIPSPEQEALRDLARLRQTAVRDLHRQRQRLRKYFSHHGIAEPATGSRWTKGWWCWAKSVDVPHAAAQIALDDLRRTIDHHTERVDALTTALTATVTSGQPDRVAQALQVLHGIGPITAASIQAEVGDLRRFQHPQQLFAYAGLVPSEHSSGARQSRGGITHTGNAHVRYLIVEAAWHYITPIKPRTGNGPKTEVERIAAHARKRLYDRYWRLVSRGKAKQEAIVAIARELLGYLWAVAQVVTPEPQPLAA

SEQ ID NO: 173353 - protein, 346 aa, unidentified
MMIIGCDFHPSWQQIAWLDSETGEVGEQKLVHASGDAQRFYQQLTAPVLIGMEATGNSQWFIELVEDLGHGIWIGDAAQIRASYVRKQKTDKRDAGHILKLVVEGRFPRLWTPDREQRDLRQLVRHRHKLVEIRSRVKNELQHLSLNKGMQKKRTLWSQAGQKMLRELPLKPWAGCRREDLLGLLEMLHQQIGKLDAAVAKAAQENPQARLLLTQPGVGPNTALAYVLTIGDVGRFARGKQVASYLGLIPREESSGGRQKLGAISKQGNRMLRSLLVEAAQIAVRCDPGMKKQYLHRCHQKPKAVAKVAAARKLAVRLYWMLRTQTAYPEIVHIESSPRVPLVGAS

SEQ ID NO: 173354 - protein, 365 aa, unidentified
MGVPTMAQARTFVALDVHVSGTVAASIERESGELRRRRLSGRAAEVVEFVAGLPGPVRVTYEAGPTGFALARRLEAAGVSCVVCAPGLIPRGPADRVKTDRRDAERLVRLLIAGELHAVAVPSIEAESLRDLVRAREDLRGDLMSARHRVSKLLLRHDVRFEGTERNWTGAHLRWLAGVRFAQPGTQAAFDDYRGAVEALIVRRTELERLIAEQLPASPCAQTARRLMCLRGVDTLTAAGLCAEIGDFGRFAHPEQLMSYLGVVPSEHSSGTRRRQGSITKSGSRHARRLLVEAAWHYRQPPRVSEPLRRRQAGADPMIVALSWKTQRRLHRVWSRMEQRGKRRTIIAVAAARELAGFCWAVATA

SEQ ID NO: 173355 - protein, 356 aa, unidentified
MTTKTKTAPATILAIDLGKYKSVACVYRGSPDEARFETLTTDHQHLRKLFAKHRRAVVVIEACALSGWVHDLCIELGLSCKVANTASEAWKFKHAKRKTDRDDALRLAQLEALGQLPPVVLPPPQTRQWRALIACRQVLVGRRVACQNRIRSLLVGQGLPAPRGHRAWTELGLEGIGQYARALSECGPDELWRGLLGLALTELGQVRALLDAAEAKLDELARRDKDVQLLETVPGVGTRTAEVIVTHLHQPERFDSGKQVSAYAGLVPRQFQSGETDHRGRITRRGPALLRKMLVECAWVMLRYNPWAKAVYLRLSQGKARKKQAIVAVARKLLVRCWAMLRDQQGWKPPREAVPA

SEQ ID NO: 173356 - protein, 432 aa, unidentified
MSSDVKRLEWFRQFRSKVRGSNDYLVIGIDVAKEKHHAFFGTSGGTTLYKRFVFANTREGFERLRELARDLQQRHGLSERVFGLEPTGVYHKPLLAYLIERGECVVQVSNVAVQRNRELLDGRWDKNDAADTANVADLVGQGRVLFPDAPGEPLRELRNLVRARVRLKKREHALRMRIRNHLVAQFFPELERAYGRGIADRVVLQVIRHGMDPREIAQMEFEAFWNRIALPRWNIRQERKVREVWEAAKTSIGCPMDETIRWEAKRLVEELDLVRTHLVEVEQQMRESLLGFPEARSLLSIPGVGPVLAAMVLAAIGDPHRFQHRRQVVRLAGLDLCASRSGKTSDRAVPKISKQGKGALRYALVHAAIIAAHQNPAIRAYFTRCLEGRQHERGIRQKMYVKLAAKLLVVAWHLMKTRSVFDPERFLAGQTG

SEQ ID NO: 173357 - protein, 386 aa, unidentified
MQASNVCTPTVDHFGTILVAIELSRQSWLVTMHSPDRDRISRHKLCGGDHAGLLALIERVQERAARALGSVPAVVSCYEAGYDGFWLHRRLMAAGITNHVFDPASIAVEQRARRAKTDRIDGELLLRTLMAHWRGEPRVVRIVRVPSAEQEDARRDTRERQRLITEQTAHTNRIKALLRLLGMAVGNPRRRDWLIWLAAQRDWQGQPVPPRLAAELEREHARLMLVREQLEALSQAAVGADAPAAAAQMARRSALLLRLKGLGPVFAATLTNEVFYKDFRNRREVAGYCGLAPSPWRSGATNHEQGISKAGNPRARHKAIELAWLWLRHQPDSALSQWFRERTLNGSGRIKRIAIVALARKLIAALWRYLTAGLVPQGAMFNMCNG

SEQ ID NO: 173358 - protein, 353 aa, unidentified
MGIVVALDVHRKQITYKALDRDTGELRRGRIAPAARVDVRAWLAQFAGCEAEFALEGTTGWRFVVEEIERAGHTAHLADPAETAAKRGRKRRAKTDNADCDLQLRLLLAGELPESWIPPVHILELRTRVRMRKTLIDQRTAWQQRIQAQLFHQGIATGLRLRTQAGRDALAQAELSPAGRELVTLGLRMIDALALELAPLDRELRGFAHRQRGCRALIDGLYGVGPVSATAILAELGDARRFASSDDAVRHSGLDVTVYQSDSKRAPGRLSHEGPELLRWALFEAAVSAARAGSPDHAYYLQVVERLDHTRACLSVARKLCRRAYHILRDLGDEALVPIDRDPQAEEAIAAAA

SEQ ID NO: 173359 - protein, 316 aa, unidentified
MSESMSFVGIDVSKNVLDVHVLSTGEHWQVGNDQAGCASLVERLKPLGKTMLVVMEATNVFWRMAAAALAGAGLACAVVNPRQVRDFAKSMGILAKTDAIDAQVLAQFAQRVKPPVRALPDAQCQVAAELLARRAQLMGMRVAEKNRLGTANAKKVRKDIEATIAFLEKRLAALDEEIDRWLKSTPIDQSRADLLQSFTGIGQNAARSLLITLPELGRLSGKQIGALAGLAPFAKDSGGKRGQRHIAGGRAVVRAALYMPALSAITHNPVIRALYQRLIQAGKHHYVAITACMRKMLVILNAMLRSGKPWKASHHA

SEQ ID NO: 173360 - protein, 430 aa, unidentified
MKSNTQNAKIEAITEKTLVLGIDVGSETHYARAFDYRGIEYSKKPFKFSNTEAGFVTLKEWILDLKERHEKDKVVPGMEPTGHYWFNLGKFLQDNEMKPVLVNPHHVKKSKELDDNNPTKNDRKDPKVIAGLVREGRYMIPYLPDGVYADLRTASNIRFQLQAELTRIQNRISRWFNIYFPEYKTVYGKPDAKSGMLILKAAPLPEDILTLGIDGVNQIWRDAKLRAVGKARAKILIEAAEHSVGSKEGAVSARMEIRMLLEDYESRNICLQEVMTLIEGLVKQIPMAEKLLEIKGVGIKTVSGFLAEVGDISRFNTPKELQKLAGLALVESSSGKHKGETTISRRGRKRLRYLLFEVAMSLVSKNQEFRELHNYYTTRRLNPLKKMQSLMAIAAKLIRVFYAMLTKGVDYDPKKMVSDIKRPAVYLQAA

SEQ ID NO: 173361 - protein, 355 aa, unidentified
MKAQTVNFDQLIAKGCGIDIHKNLIVATIKGEGLQEETRSYDGFTGSLEQLRDWLKENGVTHVAMESTGVYWKPVFNVLEEDFEVILVNARHIKNVPGHKTDKKDSKWIAKLLLCGLLKGSFIPPKPIREMRDLTRYKRKVIGQIASEKNRIQKILEDANIKLSSVVSDMSGAVATRIINALIGGEENVDELVKFHHGKMHCSKEELAASLRGKLTDHHRFMLQTIKESIAEKERLIAKLDEQIEKMLKANELELDAKLLETIPGVGKDGAAYILAEIGNDMERFPNEQHLASWAGMSPGCNESGGKKKSSRTTHGDKYLKTVLTQFAWAATRTKNTYLRSKYESLVGRRGKKER

SEQ ID NO: 173362 - protein, 407 aa, unidentified
MTELSLFVGIDLGNTKQAVCVLDGSKKEVLRRVVETDAVPSLLLEAIGDVAPERVGVAVEDINNVVVDTLLELGFAIFSINPKQADRFRDRMTVVGAKDDRRDALVLARALLTDGEFFQRRAALSPLEAQLRVLRRRERLLGEELRRVSNQLYAVVQRLDPALLRFCEGADEPWFWSLLLHVTTKKRLSGKQVELVLKKAGKRKLDVLVPSLMAVLSSERARAATVLRGWLVDEVKSLVKVLRTLSSEHHRVESSLSSLIKKRAASVDDVDGAAAPSVFAILLSMPGVGPKTAADLVGEALPLLRRDKLGLLRAVTGVAPVTKQSGKSRKVSMRYGCNMRLRNAMFHAAHVAARSDEEFGRYCQKLLDAGHHRARALRSVADRMLGILVAMVSSRTLYDGTRRRAAA

SEQ ID NO: 173363 - protein, 350 aa, unidentified
MKRYIGLDVHAASTTFAVLGESGKRLGTHVVETNGQALVEQLKTIPGERHVCLEEGTQSAWLYEILSAHAEETVVAAIPESRGQKNDERDAFHLAEQLRTGALKKRVFKEVGKFGTLRELGRTHAMVVQDVVRVQNRIKALLRSRGVPALGKSLYSENSREEFLSKLPDSSRGAASTLYAQYDAVEKIRRQAEKDLVAEAHRHAMSRVLESCPGLGPIRVAQLMPVVVSPGRFRTKRQFWSYCGLGIVMRSSSDWVRRTDGGWARADVQQTRGLNLNHNHTLKNIFKGAATTVITQLETEPLRQDYQRLIAAGTKPNLAKLAIARKLAAIALSMWKSNERYDPTRYRKQS

SEQ ID NO: 173364 - protein, 341 aa, unidentified
MLIIGCDYHPSVQQIALLDTETGECQERRLAHRADAEHFYRELRQPGVSVRVGIEATGHSRWFERLLAELGFEVWIGDPARIRAKQVRKQKNDRRDATHLLNLMLKDDFPRIWVPSPENRDVRQLVWHRHRLVQMRTRVMNQLQAIAMNEGIRRKRGLWTQRGRAQLEGLSLPAWTSRRRQELLELLDRFDPSIEHLTEAIQQEAERRPEVQRLQTHPGVGPITALAYVLVLGTPDRFRCGKQVGSYLGMIPCEDSSADHWRLGHISKQGNGLLRFLLGQSALSATRVDDDWRRQYTHLTLRRNHATAKIAMARKLAVRLFWMWRREWDYEQWKKFGSHAG

SEQ ID NO: 173365 - protein, 352 aa, unidentified
MEHFIGCDAHKKFSVFASINEKGEYGRTIQVRHDLEMFREFLKELPAGSKIALETSGCYYWMVDEMERAGHCPQLAHALTAKRRMEGRHKTNDRDAKGLAMLLRNGTLPVVWIPPAELRDQREMLRWRMYLSQMRTQIKNRIHGVLQRYNIDIAVSDLFGDGGRVKLLARQGELPPHSRESVLEQLQTIDSLETQIGECERILEEILYPSAERDLLDSLPCVGKILSAVLALEIGDVRRFPGPDRLVSYAGVVPTARESANWKRKDKCPRDCNVYLKWAYVEAANLISAHSKHWADRHVVQLFQRVKESTKMHGKAAMAVARHLAEASYWMLKKQEVYREPQTRQVLSSTHG

SEQ ID NO: 173366 - protein, 408 aa, unidentified
MQVLYPRCAGLDVHKDTVVACVRCVSEPEHHETRSFATTTRELLALGEWIASHGCSHVALEATGVYWRPVWHVLEGQVELVLANAHHIKNVPGRKTDVNDAMWIADLLAHGLIRSSFVPPQPIQELRDLTRTRKQVVREISQHSLRIQKVLEDANIKLGSVLSEVLGVSGRAMLGAIIEGERDPHKLADLAHGTARRKHDALVEALHGHIRPHHCTLLKLHLNLIIALEHTVAEVDAAVGKCLDPIRQCVCLLTTMPGVRDTVAEVIVAEIGIDMTRFPTPGHLVSWATMCPRNDESAGKRRSTRLLKGNNWLKTALVTAAWAAVRTKTSYLRAQFLRLKARRGAKKAIIAVAASMLTAAYFILRDGVPYRDLGPNHFDRQQRGKTVRRLLRRLHDLGYNLPPQHQPV

SEQ ID NO: 173367 - protein, 342 aa, unidentified
MGGVTTIGLDIAKSVFQVHGVDAAGEVVFRRRLTRVRMVPFFAKLATCLVGMEACATSHYWARELIKLGHDVRLMPPRYVKAYVKRQKNDTVDAEAVCEAVTRPTMRFVEVKSPEQQSIMVVHGTRAMLMRQRIQLSNAIRGHMAEFGVVAPVGRNGLLTLTDILHDETDDRVPAEARQCLQMLAAQLRLVNAQILENDRNIRVSARATDVGRRLMGIPGVGPVLASAFVATVPDPHAFRSGRNLAAWIGLVPRQNSSGGKERLGGITKQGNRYLRQLLFVGAMAVIRYAERHGTRRPWLVQLLARRTTKVAAAALANKTARMVWAIMTSGQAYREPELRAA

SEQ ID NO: 173368 - protein, 483 aa, unidentified
MKMLYSCCAGLDVHKKNVCACIRISQGQQTSQVMRTFGTFTADLEGLRDWLREHKVSHVAMESTGVFWIPVWNVLEQCETKFALTLINPQHVHALPGHKTDRKDGQRIAELLQYGLLKGSFIPPPPIRELRDLSRRRTHLQGDRNRVINRIRRLLETANIKLGSVVSDITGKTASLILAEICRGNCAPEELVKLAQASLKKKRAELIGSLKGFYSEHFRWLLTEAVQDLAHLDRKLQPLDHQLAERLRGHPDLIHRLCTIPGVDFTTAAVIVAEIGSDMSRFPDAAHLVSWAGVCPGNNESAGKRFSGCMRKGNRYLRRVLTQSAWSITHKKDCFLTSLFWRVAARGGRKKAAMAVANRILTVAWHIINNEGMVYREIGGNHHDRLHPQRSARRLLRRLAQIGFEVSVKPKLAEPTPVPESDHRRRKSRTAMPASSTTHKNPEAKPADPSICRRCARWRIACIHVRNAGRSSPALAQPTKSAT

SEQ ID NO: 173369 - protein, 351 aa, unidentified
MTMVGGFDVHRKQITFDYVDDDGLVRFGEIRPATRKTLRGWLSEHCPEGDAEFALEGCTGWRYVVDELAAAGVAAHLGDPAEIAVARGPKKRAKTDRADARLLRTLLLQGRFPESWIPPAHVLEVRVLGRLYCTLMDERRAWQQRIHAQLFHQGCPPIRALLTEAGGEALARVELSAAGRQYVDSALRRIDELSAEIGPLRTQLVNFAKHQAGCRALQAHYGIGWLCAAIMWAEIGDARRFASSDQLVRFAGLDVTVYSSDRKCAPGHLSRQGSPELRWATFETAKCAARRGSPDYGYYHKLAAKHDGHNGKNPTLAVERKILRRCYHTLRELGDAALGLPDTQPHQEVAA

SEQ ID NO: 173370 - protein, 374 aa, unidentified
MMEFNAFVGLDVHKETIAVAIADAGRDGEVRFYGTVPNTSASLDRLVRRIAPKYERLAFVYEAGPCGYGVARHLQSGGHDCRVTAPSRIPRKPGDRIKNDHRDAIQLARLMRAGELTFVWMPDATHESIRDLVRARQSATFDIRRARQHIQSYLLKYSRHFSASGKVWGQVHRTWLANQSFEHPAQQYTLQTYLNAMDQSLARRGEIDGQIRELLPAWSLSPLVEALQTLRGIAESIAVSIVAEVGDLQRFSNPRQLMAYLGLVPGEHSSGSNVRARGITKTGNTIVRSLLIEAAWTYRCTAKVSSRMLRRMATAPESLKAIAWKAQVRLCGRYRRLVARGKKSQVAVTAIARELLGFIWAIAEELRLLRARDA

SEQ ID NO: 173371 - protein, 408 aa, unidentified
MEVIVERVAALDVHKASVTACVRTPGADGGREPHLAEFATTVRGLLGLRDWLAAHDVSQVVMEATGVYWKPVWHVLEEHVTLVLANAMHIRNVPGRKSDMNDATWIADLLAHGLIRSSFVPPAPIQELRDLTRTRRQLVHEVARHVLRIQKTLEDANLKLTQVMSDIVGVSGRAILTALIAGETDPDRLADLTRGRLKATRADLLDALHGRVTDHHRFMIKLHLTQIDALETAVATIEARIGDALGPFRAAVSLLTTMPGLSETTARVLIAEIGTDMTRFPSVGHLTSWAGFCPRLDESAGKRRSTRTRQTSPWLKPTLINAAWAATRKKDCYLRAQFLRIKSRRGAKKAILAVASSMLTAAYFMLRDGVEYHDLGPHHFEQRDKEQLAKRLIQRLRDLGVAVEVKAA

SEQ ID NO: 173372 - protein, 344 aa, unidentified
MEITTIGLDLAKNFFQVHGVDEAGAAVLRRTLRRSQVIPFFTKLRPCLVGMEACGTSHYWAREIARLGHDVKLMPPAYVKPYVKRGKTDANDAEAICEAVTRPTMRFVAVKSPEQQAALSMHRARDLMVKQRTQMINMIRGLSSEFGVEAPRGLHQALALAHRLIDGEPMAMPALAIEVVTSLSRQLLACHDRILDFERAINKWHRSNDISRRLASIPGIGPIGASALAASVTDPHQFKSGRQFAAWLGLTPLQNSSGGKERLGRISKMGDQYLRKLLIVGMTALVRNAKYKPDRTDPRLAHFMARKPTRVATVALANKTARIVWAIMTRGDVYRSQHIPVLTA

SEQ ID NO: 173373 - protein, 376 aa, unidentified
MREKLRFLGLDVHAETIAVAIAEPDGEVRSLGTIANREESVRKLIRKLGAAEHLRACYEAGPTGFVLYWQLAQLGVECAVVAPSLVPRKPGDRVKTDRRDALKLARSHRSDDLTEVWVPDESSEALRDLVRAREAAKQDQLRARHRLSKFFLRTGQRPPMGVRPWTERYWEWVQQIHYTQPAQEATLLDCMNEVHHMGERIKRLEQAIVEAVKLAPASVQEVIRALQALRGVAHISAVTIAAELGNITSRFESARKLMGYTGIFPSEDSSGKRIRKGSITKQGNAHLRRIVVESALSYRHRPGTGIKLRRRQEGIPAEITEIAWKAQNRLHRRYMKLLAAGKDQRKTITAIARELMGFIWAIGIKAEAACEQRLAA

SEQ ID NO: 173374 - protein, 344 aa, unidentified
MDHFAGLDVSVKETSICIVDDAGKIVREVKVASEPEALLAVLKNLAYHFKRIGLEAGPLSQWLFSALAEAGLPVICVETRHMQAVLKAQINKTDRNDARGIAQMMRVGLYRLVHVKTLRSQKLRMLLTHRKLLQSKAIAIENDLRGTLRNFGLKVDVVGKVKFEARIKELVENLPDLAVLVETLLVVRRVLREQLGVLHRRLLAIVRDDDVCRLLMTTPGVGPVVALTFRATVDVPARFRNSKAVGAVFGLTPSQHQSGEIDRMRSISKCGDAMMRTVLFEAAQSLLIRTIKWSWLKAWGMKIARHRGMKRAIVAVARRMAVIMHRMWVNGTQFRWTREELAAA

SEQ ID NO: 173375 - protein, 318 aa, unidentified
MNTKTKQNINVGVDTGKYQLDIYIRPLDIYFTVPNDDKGIKEAVKTIKKYKPERIVIEATGRLEMPFILACANANLPFTTANPIHVKRFAGAIGQRAKTDKLDAQLIAHYSEAIKPKLSQLKPDTMQAMSDLVTRRNQLLTMQTMEKNRLQIMPKALAMTIKPVLTLFNNQIKKIEEKSVKLIESCPEYQAKNMILQSMTGIGKIAAASIISNLPELGYINSKQASSLIGVAPMNRESGRYKGHRKIQGGRPQVRTVLYMAMMSAMQSNPVFKVTYQRLLAAGKPKKVAIIACIRKMIVILNSMLRDGVMWEAPKVNN

SEQ ID NO: 173376 - protein, 413 aa, unidentified
MSLFVGIDVSSSDFKVRILDERGNEPVKRLRVLNDQPGCEQVARYLSEACAKENVDRLVIGLEATSVYSWPLQMFLAEDNSLASLKPQIYSFNPKVVANFKKAYVDLPKNDWIDAWVIAERLRFGRLPEGSQVDFRYLPLQRLTRFRSHLIEMISREKNYFLTNLFLKFSTLAQGAVFSNTFGATSESLTLEFFSPEEVAARPLDELIDLLMEKGKRHFEDPEAKARELKEAARKAHRLRGSLLQPINLILATSIETIHALEKQVKKIDKAIEAEIRHFPNTLISIPGIGPVLSAGIIAEIGDIRRFPNEGALAKFIGLTWRSHQSGNFTADDTPLTRTGNTYLRSYIIQAANLVRQKEPEYKAFYQRKFSESKTHHHRRALVLTARKLVRMVDALLRSNQIYTPHGNRGIAN

SEQ ID NO: 173377 - protein, 349 aa, unidentified
MKKAYLAIDAHARHCVLGSMNSQGKFLEDVRFPTSETDLIAHVVKVKATTKILAVEEGPLAYWMARTLKPYVADVFVCDPRKNKAISGAANKSDSKDVYTLCRLLRLGELSRVYHPQEDHRAIFKSAVQQYIAFRKDECCLKFQIKAQFRGWGVHDVEGQTLFNPKHRVEYISKVEQPAIRRQLDRRYQLLDEALSQQRMSLRDAEDLGTRYEEIKRFRAIPGVGKIGSLVFDAYIQTPHRFASKQQVWRYCQLGITDRSSDNKPLGFKRLDKSGNSELKSMSYNAWKGSLITKELNAISGFFMASMDRTHSRVKARLNTQRKILTVLWTMWKNEEEYNPELIMPGMLR

SEQ ID NO: 173378 - protein, 360 aa, unidentified
MNPTIVAVDLAKTVFQLAVADTNWRVIEQHRLNRSQFERWFLNRDISLVVMEACGSVHHWARWLNRMGIEVKLLPAAYIRAYVKRNKTDAADACALLEAARCADIVPVRIKSIEQQALQGLHRIRSLWMTTRTSRINALRGFCREFGLLIPQGARAGIEVIARTLADPNAAVPTLIRGSMKLLVEEIRLLEARIGQLEKELTELARQSPACTTLLSIPGIGLLTATALVAATSGDVSHFKDARHFASWFGLTPKEYSSGSTRYLGRISKRGDRYLRMLLTHGARSVLRAATVAQRAGRTIDDIKQWALTVQGRTNHNKAACALANKLARICYATLRDAAPYGQPSPRQARKLQRTAFVTA

SEQ ID NO: 173379 - protein, 426 aa, unidentified
MEEPTRFIGMDVHKDTIVVAVTAAGEVGKAVLYGTFSNTAATVEKLVRRLRQAGSGPLKFCYEAGPCGYGIHRALTKMNEDCMVVAPSMIPRKSGDRQKTDKRDAASLAVLHRGGLLTAVWVPDAAHEAMRDLIRARLAAVRAVRAARQQLSAFLLRHERIYPAGRTAWTKAHRGWLADQSFAQPAQQIVLEESIEAVRLGEQRRDRVDGYLREQIPTWSLFPLVQNLSALRGLDTIASAGLAAAIGDPSRFASAPDLMAYLGLVPSEHSTGPKRRIGAITKAGDVHARSLLIEAAHSYRFPARVARHKLTAVDAVPDAVREIAWKAQTRLCQRYRHMMAKGKLKQVVVTAIARELAGFVWSIACIITDPPTKNSAVTTPSEKICRTGSTTCSSVPRRQPIKETARRAERGGQIRTASADGKRPDR

SEQ ID NO: 173380 - protein, 338 aa, unidentified
MTIVMGLDQHRAQITAEWIDTETGELVRTRISPAHRAGVRRFCERFCGQELEVGLEATTGWRFVAEELRRVGAVVHLAEPAETAARRGNKKRAKSDRADARHLRELLIIDRLPESWIPPDHILDLRARVRLRHTLSHQRGEWQQRIQAVLYHHGCPQRRNLMSEEGRSWLAAQPLPSAALEQVAVALGVIDALDRQLAPLNKELRSYARRQVGCKALMGQFGVGELTAVTILAELGDASRFSSSRDVVRYAGLDITVYQSDQRRAPGRLSRQGPPALRWALFEATMTASRIGSPDREYYVQAAERLGSNRARLSVARKLLKRSYHLLRELGEEAMAPA

SEQ ID NO: 173381 - protein, 358 aa, unidentified
MRTMEQQNNGLTLEKKVYVGIDVHKENWHVTIRTLGEEVFNGRIPGSYISLKKVLDRYRGNSVKVAYEAGPFGFWLYDRLTEDGVEALVVPPSTIPIESGNKVKTDKRDSRKLAILLERNMLKRTYVLSEEEREHRDLLRTRRQIVDHRNDVARQIKSKILFYGIPVPFSPKTRLTHRYIAWLKTLAFGTTYLKESLDLLIQLYEYLTQQITQINRKVVTLCREKKYHERIKLLCTAPGIGKLTAIELLVELQDMARFKNASQLASYIGLTPAEYSTGGKTRQGRITRCGNKRVRTYLVESTWILITKDPWIRAKYLKLKATRGGKRAVVAIARRFIIRLRSMLLDNVPYNATCALAA

SEQ ID NO: 173382 - protein, 317 aa, unidentified
MPEQIVVGIDIAKQTFDAAIGIGSIETFANDDGGHDALLAKLAEKSVDLIVMEATGGLERDLACALQAAGFAVAVVNPRQARDFAKAMGYLAKTDRIDAKALTELAQVLSHHPERERFVRTLPTPAQQALQALVARRRQLVAMQVAERQRLSVSHTAARKSIEVMIKAIRAQLDEVEAALAKHIDTHHADLAKLLTSARGIGPATSTSLIADVPELGQLSRREISALVGVAPFNRDSGQMRGKRAIFGGRAQVRASLYMATLVATRFNAVIKRFYDRLVVAGKPKKVAIVACMRKLLTILNAMVRSGKLWDESLHVA

SEQ ID NO: 173383 - protein, 360 aa, unidentified
MSKIIKQAGRKRTTKDNPEMTMGIDVGDRYSHLCLLDEDGEVVERDRVRSTDAAFRRHFEGAPRLRIALECGTHSPWMSRLLKQLGHQVVIANARKIPTITESESKNDRNDAEQLARLAAFDPRLLSPLEHRSLSRQQDLNLIQARAILVKARTMIVNALRGLVKSAGGRLPACSAASFPARAASAVPPVLTAVAGPLIEQIARLNIQIGTMDQQIEKLAAKYPEIGTLRSVPGVGPLVATAYVLTLDGPNVVPSSRSAGAFLGLRPGQSQSGQSDPERRITRTGNTYLRCLLVQSAQYVLGRFGPDSALRRWGLKLAASGGKRAKKRAIIAVARKLAVLLHSMWRSGQRFEPFPQPAQA

SEQ ID NO: 173384 - protein, 360 aa, unidentified
MCRVGKPVSSLLSFLTLRINIMTIQSKKIVQELKSRFAGIDVGAEELILVIRKNGTPYKPQKFTNTPADRARLVKKLSNLPGIIVCLEATGVYHFDLSIALHDAGVALMVVNPKSSHNFAKALMKNSKTDAVDAETLAQYAERMDFVAWTRPSDEKIALRSFARRIDALTRQKAAAKNNCHALSVSRETPKAVLRDVKLAISQLEKRINCLSKEALVLIGKHPELERAFLLLTGIKGIAQTSAIALMGELLLLPPGLSHREWVKFAGLDPRAFDSGKSVHKQARLSKAGNRHIRSALYMPAMSAKQHDPYVKAYFQHLVDNGKRPLQALCAVMRKLLHAIHGMLKHDKPFDNTRFYAIPA

SEQ ID NO: 173385 - protein, 316 aa, unidentified
MSHLFVGIDIAKQTLDCAVRPSGQCWTLPHDPARFPALVAQLQQLGPTRIVLEATGGLETLLATTLAAAGLPVAVVNPRVARDFAKASGRLAKTDRVDAQALAHLGEALAPACYHAPTPYEQEFEALLTRRRQLVERLVAEQNRLAQPHLPAPIRTDLEAHRDWLGQRLAQLDDDLRHALEQSPVWRTQDEILRSTPGIGDVTARTLLVQLPELGRLTHKQIAALVGVAPYTQQSGTWRGASHIRGGRASVRSVLYMATLTAVRCNPIIRAFYQKLRAAGKAAKVALTACMHKLLTILNAMLKTQTKWQPPQLSAS

SEQ ID NO: 173386 - protein, 396 aa, unidentified
MISIGIDVSKRKSTVAIISVMGEILQTPFDIEHSQNGIQNLLQLIKDYPKEQVRFIMEATGIYHLGLVNELQKQGYFVHVANPLLIKKYFDAEIRKGKTDRKDALKLSRYGTEKWWLLQEHSKTDQIYQDLQFLSREYNSFMASKIKLKVQLSNLIERTFPGLEKILKGHYFGLLLDFYELYPCASMVGEVSEKKFSNQFIKMAIKKGHRKGAQIAQKVYRLAHECIMFEPSQKVAALSVKHCVSLLRSTEQATDSIIAQMDELAKELPEYEIVKKMKGVGDKLAPRLIAEIGDVRRFKNSKSLIAYAGIDAPPYQSGQFEGTNRHISKRGSRNLRKCGYEVMMGIKSSKPKEDNAVYEYMLKKEAEGKNKKLVKIAGFNKFLRIYYARVMEVYQA

SEQ ID NO: 173387 - protein, 425 aa, unidentified
MKSTRGMRRRTAKLARRSEIVTRGALVAGIDIARKECVVVFVRAADKARVGRLRVPTTAEGLAAIAGRGHQLAEQHGAERLVLAMETTGHYWKILARTADRAGLPYVTVQSFVVARARELDDLTRDKTDQRDAGLIADLAVELRFNEVQLETGAWAELRSLANTRDHYRVDQRAALQEQRALLELTWPDLLAQAPDLDGSHLQAMLRLGLSPVQIGGLSRARFTARLRRETVGRFLPWMAGRLWAAARCAVHEDQAPSATLRLQLAAQRNRAGTIAVARLDAELAAAFETTGLAWLRGQIRGLGDSQLHNLLALTGDPRRLDDARCMVKLAGSNPTERSSGEQQAAGGIHRRGRPLLRLLAHQAAVCLVLHHPDFEARFLELINRPHRPLHKKQAYLAVANKLLRTLWALAVTGQPYQPTPARAA

SEQ ID NO: 173388 - protein, 313 aa, unidentified
MSEDVFVGIDISKDRLDVHVLPTQERCTCEHDTKGIASLVKRLKKRAPVLIVLEATGGYETALAASLSAAHLPAAVVNPRHVRSFARAMGKLAKTDSIDAYVLARFAEAVRPQVRPMFTEQERAIKELVARRRQLVNLRTREKNHLSHASSSLVRESIELLIRAIDQQIEKIDRDLDDMIKNSPVWLDKVQILESAQGIGSTTARGLLAHLPELGRINRRQIASLVGVAPLNRDSGTLRGKRAIHGGRAPVRTMLYMATLAAIRYNKTIKAFYQRLRATGKAPKVAIVACMRKLLLILNAMVKTKQPYREALA

SEQ ID NO: 173389 - protein, 474 aa, unidentified
MAARRLLTRGPNPLEPPEAQPQTVPVGKRTALKVQEKVAPRRAGIRATCRSCSAAARAKSEGGELVRYYLGVDWADQTHAVWVVDEAGTKLTARAVPHTAEGLSAWGRELDEWRAQGIELWAAIERPEGRVVDFLLDHGVVVYPVNPKALDRARDRFRQSGAKDDPFDARVLADFLRTDHAHLHALQPSSEAAQELKLLTEDYHRQVRQQTRLVNQLTITLKAYYPRALEVAESTTALAREFLQAYPTPEAVTALTKRQWQRWARAHHLSETRTRALWEVLQQPQLPVPAHVVRPKARLMRTLVAELAAVVAAVGEYREAIEDFFASMPTAQWVRTLPIGDHGITAPTLWARLGDAPERWESFRHLQAPAGAVPLTKRSGKQRVVQFRFACDKALRYVVDHVAFLSLRSCEWARAYYDQQRARGHSHRQALRALGAKWLKIIFVMWQRQASYDDQYHLASMARQQLRQPQKKIA

SEQ ID NO: 173390 - protein, 495 aa, unidentified
MSDFKIPRRNVRTRPTPAPAPAANDLSRAARHAEKTRRHAEECAKLVSMPVQHAHAAGIDAGDISHWACVESTPDDTDAVREFPAHTAGLRQLVDWLRQCGVTTVALEATGVYAHVLFLTLLEAGFVVVMTAPQFARQIKGRPKTDKRDCQWIQRLHKHGLLPAVFQPDEATQTLRDYVRQRANLVRLSGQHIQRMQKALQLMNLKLTRVLADVTGVTGLMIIRAILAGQRDPQQLAKLRDRRCRHSVADIAQALDGRYRPEHVTELRCCLTLWEKYQEVIGELDEAIDAHLRTMRRQTELPPLPPKPRLRGHKPHDPRFDVRQALYFATGVDLTAIEGIEEMHALTLVSELGTDFTKWPTVKQFTCWLGLCPNWQKTGGKVKSSQTRRVKNRAAYALRLAAWSLLRSKSYLGAYLRRQRSRLGAPKAITALAHKLARIVYHLVRYGLAYVKQTEAAYAEQVRERLERQLRRRALELGFELKKIEPPVMPTVTEA

SEQ ID NO: 173391 - protein, 349 aa, unidentified
MTRILAIDLGKFKSVACVFDAGTNEHEFTKLPTRPQDLHDLIVARAPARVVIEAGSQAGWVKDLCEALGVDIQVANPNHEGWRWKNLTRKTDRDDALKLAKLSAAGQLPLVKLPSARVRQWRALIEYRAKLVGRRTAVKNSIRALLDRQGLSHTAGRAGWSQAAVEELQRQARPLEDVAPEELWRGQLAMELVALEQAEALIRKVEMKLNALALADERVQRLQTIDGVGPRLAETVVAVLDDPKRFKNCKQVGAYVGLVPRQYESGQMHRSGGITGAGHRLLRTLLVEVGWMALRFNSHLRAVFDRVCRQHAARRKIAVVAVARRLLIICWAMLRDGTAWRPPRAVPTP

SEQ ID NO: 173392 - protein, 416 aa, unidentified
MQKILGVSCGLDVHKDIIEGCILEANGTDEPDVTYESFTTMRGDLVRLRDWLAEYGCPNVAMESTGVYWKPIYEILEEEEKINLCLVNAQHMHNVPGRKRDKDDAEWISSLYMCGLLNKSFVPEQGIRSLQEYTRYYVKLTQENTRLVNRIEKLLQTHGFKLSSVLSSIVGVSGRRILKILCERGTVSVAAVESSLERGVKKSAEEIAYAVNGKLTQSSQNLLRIMLEGLNSCDAQLATVRNAMQCVAEPYARGITILSTIPGINELSATYLIGEIGVDMSRFNKGASSLCKWAGLAPRDDESAGKIKSNKILKGNPYVKSILCQCAWAATKTRNTRLSNWYWRNVKRLGQKKAIIAVARKLLVYAFHMLSTGELYDTQLDFADTERLKEIKLASAKKQITMLEKTLSNESLVANI

SEQ ID NO: 173393 - protein, 430 aa, unidentified
MKSNTQNAKIEAITEKTLVLGIDVGSETHYARAFDHRGIEYSKKPFKFSNTEAGFVTFKEWILDLKEKHEKDKVVPGMEPTGHYWFNLGKFLQDNEMKPVLVNPHHVKKSKELDDNNPTKNDRKDPKVIAGLVREGRYMIPYLPDGVYADLRTASNIRFQLQAELTRIQNRISRWFNIYFPEYKTVYGKPDAKNGMLILKQAPLPEDILTLGIDGVNQIWRDAKMRAVGKARAKTLIEAAEHSVGSKEGAVSARMEIRMLLEDYESRNIRLQEVMTLIEELVNQIPMAEKLLGIKGVGIKTVSGFLAEVGDISRFNNPKELQKLAGLALVENSSGKHKGKTTISRRGRKRLRYLLFEVAMSLVAKNPEFRELHTYYTTRRLNPLKKMQSLMAVAAKLIRVFYAMLTKGVDYDPKKMVGDIKRPAVYLPAA

SEQ ID NO: 173394 - protein, 410 aa, unidentified
MTKIIVAQDAPVLVAIDIAKARHEVLIAIPDKKRRRRLTVLNELADFNRLAAALKEYGRPVRVAFEATGNYHRALAYHLATAGFEVKLVSSVALARTREALNNSWDKNDPKDAQVILHMMEIGNEQYYHDPLVCGTNDIQELSKTHDIVSKSKTELWHRVLTHYLPLYFPEADRFHRSSRSDWFFAFLERYPSPHLITAMGKAAFTADAWDVIGRKVAKERLLADIYETAKSSVGLPVAPDSDAIRMFRLVLGEGRSLIAQRNQIEDRAVALLKDLPDYQLLTSIPGIGPINALTILAEAGDLRRFGHHRQFLKFCGMDLATIQSGTFRGQTKLSKYGNARLRRTLWMAGQVAILQRTNSFRDKFERYIAKDRQNTHLRRKAYSAIAAKMARTVHGIIKHGEPYRPFFEG

SEQ ID NO: 173395 - protein, 316 aa, unidentified
MDHNNAVYGVDVSKAKLVTVQYGVQTLVTVDNRPESIAAWLTSLPKGAVVAMEATGIYHRLLAHLAHAAGMRVYVLNPQTLKHYAQAIGQRGKTDNCDARMIARYAANEQAKLRCWQPPARAADRLSQLLERRHTVVGVRQTLAQSLSGLPMLKAARQSLLASLERTVGRLDILIRHEMARLPGAAALYERLKSVVGIGPVVAAQLVAVFSTLSFARVGAFIAYTGLDPRPNDSGVHRGRRSLSKHGPPLLRCQLYNAGMAAANSKVFKPVYKQMLDRGLQTTEAIVILARKIARIAFALYKSGEVFDAQRHFKIA

SEQ ID NO: 173396 - protein, 332 aa, unidentified
MCKKIWIGIDLAKASFHAAVTPLDAHPSDWARLQNHAFEHSAKGVRALCAWVNKQGYGAEQIAGLCVEATGRLSWTFAELLKERLGPVSIVNPARPVQFAKSIGLREKTDRSDACALALFGVAMRPLPRPLPSERQHQLRELAGLYASTRRDLTAVSNQLKEPIRCAFVQRRLRLKRRRLEHDLAAIEEQMDAQLAEDPKAAQDAQRMQTIPGVGPKTTRMLLAHLGDLRQYTRAELTARAGLYPRQHQSGTSVHKRPRMVKGGGQAIRAALYMAALSARRFCPHLSIFAQRLKHNGLTNMAILGAVMRKLLLLIRTLIVQGIDYDPKYDLT

SEQ ID NO: 173397 - protein, 344 aa, unidentified
MEGYVGQQFVGVDLHRRRSVVVRTDVAGLVLEAVQIVNDADRLVEVIGRAGRAPEVVLEATYGWYWAVDALRSAGARVHLAHPLGVKAFEYRRVKNDFRDASDLADLLRMGRLPEAWIAPPATRELRELVRHRAKLVAVCSHCKAEVHAVLAKCGVQVPMSDLFGVGGTGLLDRLELPAPYAARIASLRRVMDHLDFETDLFTGMVRARLGADPGYTAVRTIPGIGAVLGAIFVAEIGDIGRFGTAPQLACWAGLTPKHHESDTHVRRGPITKQGSRLVRWAAVESVQTLPKTTAVGQLRDRVAARRGRNIGVVAAARRQIEYVYYALRDHHVRALHPIPVAAT

SEQ ID NO: 173398 - protein, 411 aa, unidentified
MHHKQRHIYVGIDLHKHHHTAVIINCWHERLGEIQFENKPAAFTDFFIKVRQLVPENMTLVFGLEDVGGYGRALATFLVDHGQMVKEVNPALSYAERNSYPTMQKSDSWDAECVARVLVNKLDFLPDAEPKDVYWSIKQLVTRRNALVKAQGALKNQLHVQLSHHYPSYKKFFAEVDGKTALAFWERYPSPSCLEEVRIDELTAFLQAVSHNTCSRKKAKEILELVKTDRTTTKQYQETRDFLVQSMVRDLRFKKQEMALVEGELRKLMKLLDYQLETMPGIDVVTASALVAEIGDIQCFPNANKLARYAGIAPVHFGSGGKGKDHKSKQGNRTLHALFYQLAIQQIQVAKESKKPRNPVFYEYYQRKRKEGKTKGQALVCIMRRLVNVIYGMMKNKTAYQLPNITERKVI

SEQ ID NO: 173399 - protein, 339 aa, unidentified
MKLYGAIDLHSNNNVTVLIDEQDQVVYQKRLPNNLPLIAQQLSGYQDALQGIVVESTYNWYWLVDGLMDQGHRVHLANTAAIQQYEGLKYTDDHSDARWLAHILRLGVLPQGYIYPKEERAVRDLLRKRGQMVRQRTANLLSIQNLITRNTGSSISSNRIKTLDSETVDALLPNQDLALAVKANLAMIQCADGQIDILERTVTDRVKLRAEFSFLKTVPGIGQILALTIMLETGEIQRFSTVGDYASYCRCVGSQKLSNGKKKGKGNTKNGNKYLAWAFVEAANFAIRYNARIKSFYQRKKAKSHGVLAIKAVAHKLCRACYYIVKNRVAFDIAKAFAG

SEQ ID NO: 173400 - protein, 331 aa, unidentified
MLYAGLDLSRHRLDVHLMNEAGEPVQVTTAPPDADGLGGLARQVGGFGQPVVAAIESMNGARFVHDQLELAGWEVELADAAEVKGLAPLACKTDRIDAWVLAELARRELVPAIWLPTPEVRAERERARFRLHLVRHRTALKNRVHATLLAFGRPCPVSDLFGVGGRGLLARLGLPEPWAGTTAAAIALIDDLESQIDAGARDLRHLGADHASVPLLMSAPGIAWVLGDTIAAELGDIGRFASPKKLVGYTGLCPRVHQSGARDHRGPLAKNGPKYLRWALIEAATHAARHPIYRDSDQATKRRLGSQRGPAVARVEVARKLAEASWHMLTK

SEQ ID NO: 173401 - protein, 460 aa, unidentified
MTLLGELGSELPRRYYLSIDVGYKEHVAGVISLQAFVRGDDRWKRARCVHFPSTQAGLRKLQGYLDRFSIDHSEFFGLSEPTGGHYGATVFQYLLDREYNMNLVENATVSHMREKIFPGLPKTDEMDTRVMNRIGYLHEAVGEEFTLRPLELPDPDSKHLLALCRDSWKLSTITTRARNQFAQLMAVVFPELKTFFTSSVSTVVPVRLVAAYPSPALLAEATTGEVKDVLWQAGSYQHAHRASELLALARDSSGLLPDSGRAWRLEWLTNFLLDNFQYQAQLDKRIKKLLAQRGDYALIAKVPYSGPNSLGTILAVTNNADRFSNYRKYVAYTGYFAGLRKSQTIDRTKMSNRGNRDLKRAYFQIAAPLVWFDKGENPYKTLFQDRMAAGREWYKAMPFVCAALARHIYHCLKFNDPYDVEKAFRGTSLQPASEEEWLDLGANLEEKFEVMEAHLCQIEG

SEQ ID NO: 173402 - protein, 377 aa, unidentified
MSKIRFVGLDVHADTIAVAVAEEAGEVRSLGTIPNRLESIRKLIGKLAPSGTLKCCYEAGPTGYVLYWQLAQMGVACEVIAPSLIPTKAGDRVKTDRRDAERLARCYRAGELTPVWVPDEAHEALRDLVRAREAAKKDQLRHRHRLGKFLLRHGKRPTDAGQAWTQKYVNWIRIHARFDQPALAATVAHYLAEVDHIAERIAKLEQAIDEAVAQAGPEIRAVIEALQALRGVAQTTAATVVCELGSLSRFPRPRQLMGYSGLVSREHSSGKSIQRGGITKTGNAHLRRVLVEAAWTYRHRPNVQGRVLRRQRSLALSDEVKRIAWKAQQRLYKRFTALAARGKNNNQIVTALARELLGFMWAIAVHTEAQCQLAKAA

SEQ ID NO: 173403 - protein, 315 aa, unidentified
MTQHSADTVGVDISKDFLDSNIHPSGEAKRFANNAKGHRAMIAWLAPRQVVRVVFEATGAYHRSFERTLAAAGFPMAKVNPRQARRFAEATGKLAKTDRVDAAMLARFGALLTPHTSEPVSETLDEMKELYNARTALVGDRTAALNRQKEMRSAVLKRFATQRLKQIDHQLEVIDQTLNQLCSADPALKTKFDILLSIPCVGQTTAFALLIEMPELGTLEAPQAASLAGLAPVARDSGNWRGKRSIRGGRAGFRQALYMPALVATRFNPDFKAKYQALIAAGKPPKVAIVAIMRKLVILANTLLKEGRVWSPKQA

SEQ ID NO: 173404 - protein, 339 aa, unidentified
MKLYGGIDLHSNNSYIVLMDSGGTVVQRSRVGNDMGLILRSLAPYREQIDSLVVESTYNWYWLVDGLKEAGYPVKLANPSAMQQYQGLKYSDDRSDARWLAEMLRLGIVPTGYIYPEAQRPLRDLLRQRSFLVRQGTGQLLHTGNILCRNQGRKSSRQQIRQMTVADAQQLFPDRERTLAVESSLRVIEVLEQQIAAIEKQVLSRIKPEAGFQNLQTVYGIGPILAMTIWLETGDISRFHQVGDYASYCRCVASTRLSNAKKKGENNSHNGNPYLAWAYVEAATYAARFYRQASRFVERKTAQVNRTLAIKALAHKLARACYYVLRDGVVFEPTRLLGS

SEQ ID NO: 173405 - protein, 424 aa, unidentified
MSCLPALAGVCPTHHQVRRDTIILTESVLVVAGADTHADTMHLAAISMTGAVIGDREFPTTRTGYAAAIRFLTSLGQVERIGVEGTASYGAGFTRVLTAAGIEVVEVTRAVKSTRRLKGKSDPLDAYSAARTALAGDGLATPKDDATAGLRALHIARRSAVKHRTAVINQLKAMLVSVPDVVREKYCGLTTLKLIEALARCRPDAQVEPWAQSLLVAAKLLAQRVQFLETQAEALEAQIDALVTEANPGLRAAYGVGADTAAQLLITTGANPHRLHSEAAFAALCGVAPVPASSGKTNRHRLSRGGDRAANNALHRVALVRLSHHQPTKDYAQRQLNNGDSKSRMEVLRKLKRAIAREIFKLLTRQIAVPDYADLRPARQAKNITVTAAANHFGVWPTVISRIERGLQRDDSFAETYRHWLQIA

SEQ ID NO: 173406 - protein, 349 aa, unidentified
MVNAYRTLSPRRRTRTGAFVMSEHSQGRESVMVRRPNAGVDVSKETLDVSVGGHAERFGNDAQGMESLAALLRRQDADVVVLEATGGYEAAAAAALQAAGLTVAVVNPRQARDFAKAMGVLAKTDKVDAKVLAAFADVIAQHEKRGSFLRAVPDEQRLRLAALVSRRRQLLEMRVAEGNRLALAHKGTRKSMAAVIKTLDKQISEFDRDIDNHIREHFRDLTKVLSSAKGVGTVTATTLAAHLPELGQLDRRAIAALVGVAPLACDSGKRVGHRHVWAGRAPVRAALYMAALTASRYNPVIRTFYQRLLAAGKPKKVALVACMRKLLTILNAMVRDGTQWKDALHCVSP

SEQ ID NO: 173407 - protein, 321 aa, unidentified
MNKNTIFVGIDISKDVFDVYSPEEGHRQFTNDAYGFRSFVKTLTPSHWCIMEATACYHYQLSLYIFEKGHRVSVMNPLIIKRYIQMKLNQVKTDKSDAKMICQYGQEQSLGLWHPDPEYVEECKMLQTVTQLYFKQTTAIKNKLHSLGSKGHTKGLMIRSLKRQLKQLQKEINLLETQMESLIKTHEPELFTIITSIPGIGKKTAMLLIITTNSFKDFESCKQISSFLGLAPNERSSGSSVRGRSRISKTGNPIVRNHLFLCSFTASVHNPQCKALYDRIVAKGKSKKLALIAVCNKLIKQAYGVSKSRIPYDKNYVSKLN

SEQ ID NO: 173408 - protein, 387 aa, unidentified
MTARTVSNLPAAMHVETARCLFAIELSKQSWVIGFITPLSAKISRRILSGGDWKGLLDLIEEVRARASRETGRTVDVISCYEAGYDGFWLHRLLEAHGIRNYVIDPASLQTDRRARRAKTDRIDTERLLRSLMAYLRGEPKVWSVVRVPSVAEEDARRLHRERDRLVSERVQHVNRIKGLCALHGIYDYQPLRPQAMARLEQLRTAQGISLPPRLKSEIKRELQRLELVVEMIATLEAERDAIVEDESSMHVNAKKIQALHKLKAIGPEFAAVLVGEIFHRDFNNRRQLASYVGYAPSPFQSGNVAHDQGISKAGNRKGRTTGIELAWLWLRYQPDSDLSVWFRARVGTVKGRIRRIAIVALARKLLVALWRYLETGLVPRGAVLKG

SEQ ID NO: 173409 - protein, 409 aa, unidentified
MDRMIERACGLDVHKATITACVRVAGSEGERRQEVRTFGTTTSELLALRDWLEAHEVTHVAMESTGVYWKAVYYLLEDRFTCLLVNPAHMKQVPGRKTDVQDAAWIAQLLEHGLLRGSFVPPAPIRELRDLTRYRKVLIHERTREANRVQKVLEDAGIKLATVATDVLGVSGRAMLDALVRGTTDPDVLADLARGKLRTKLPALRQALAGQFRAHHTFLLSQILGHLDYLDEAIVALSAQVEAVIAPFAETIPRLDTIPGVNQRVAEVLVAELGVDMAVFPSAGHLASWAGLCPGHHESAGKRHAGTTRRGDRWLRTTLIQAALAAARTRRSAFGARYRRVLRHRGHKKAVVAVAHALLVTAYHVLASQTTYRELGADYYDRGHTERATRRAVQALERQGYRVTLERAA

SEQ ID NO: 173410 - protein, 366 aa, unidentified
MKKISTVEVFGNEILTGQKLTIGLDLGDRWSFYCVLDEAGKILLEQKVATTPEAMKQTFGKIPRSLIALETGTHSPWVSRLLTELRHELIVAHAQKVELITKSNRKDDRHDARTLARLARIDPQLLGPVRHRSAKAQIHLTVIRARAELVSARTALVNAARGLVKSYGQRLPKCGTQQVSRELGAGLPAELREVLEPLLKEVESLNERIQEYDERMEKIAKEVYPEVSLLKQVKGVGTQISLTYVLTIEDPYRFPKSRAVGCFLGLRPGRRNSGESEPQKGISKEGDRYLRTMMVQGAHYILGPFGEDSDLRRWGLKLAERGGKNAKKRAVVAVARKLAVLLHRLWVSGEVYEPLRNSQKAMRAVA

SEQ ID NO: 173411 - protein, 368 aa, unidentified
MPRIAEQVLPVTGGVDTHADVHVAAVVDQVGRVLGTQAFPATAAGYRAALAWMRAHGELAKVGVEGTGSYGAGLARYLAACGIEVAEVMRPNRQARRQRGKSDAADAVAAALAALSGEASGVPKSRDGLVESIRALRVARAGAVKARTQAGNQLRDLILTAPGQVRRQLAGLPCQRQVDLAARFRLRDLAGPAEGAKAAMASLARRHQQLAAEIARLDAAPEELLTRAAPPELLAKQGVATVVAATLLTTAGDNPGRVRTEASFAALCGASPVDASSGKQLRHRLNRGGDRQANSALWTIAMTRLAHDPRTKAYAARRTTEGKTKKEIIRCLKRYIAREIYKALCRPRQPATASAPQVKQDLPAPVLT

SEQ ID NO: 173412 - protein, 338 aa, unidentified
MKVKRQNVGIDVSKDSLASCLVFLTEDFDIKIKSSKKFQNNADGFSELFSWANSKKDSNLEITFTMEPTGVYYEGVAYYLFEKKQAVHVVLPNRAKKYADSLQDKAKTDKLDAKALGRLGVERRLNKWHVDSPVYRNLKILTRERNALIKERTVFQNQLHALNHSAYPFKKSVTRLKQMIRFINKQIKTIEKDCENIVNKDETVKAKVDKVTTIPGIGFITAIVVIAETNGFALITSIKQLVSYAGLDIRIRESGKWKGKSKITKKGNVQIRKALYFPSYTSVKYSETNAKFYERLFERKGKSMVAATAVQRKLLGLIYTLWKNDTTYVENYQQNKAA

SEQ ID NO: 173413 - protein, 342 aa, unidentified
MSEITTIGLDLAKNVFQAHGADASGRAVLRKKLRREQVLAFFGQLPPCVVAMEACGGAHFWGREIGKLGHEVRLIPPAYVKPFVKRQKNDAADAEAICEAASRPTMRFVPVKSEETQGAAMVFRVRELLIRQRTQAINALRGHLSEFGQIVPQGAANASKLIAIVEDPESSLPADAIPTLEVLIAALLQLESEIGTLDDEIARRAKENEVARRLMTVPGIGPLIATAIAVLAPPPETFRKARDFAAWLGLTPRQHSTGGKQRLGATTKMGERSLRRLLIIGANSVIIKQHVHAAAQPGTWLGELLKRKPPMLVRVALANKMARIVWALMARGSVYQSPAAAA

SEQ ID NO: 173414 - protein, 362 aa, unidentified
MRIIGCDLHARQQTLAMLDTTTGEVVEVTLQHEGDNVREFYSSLPGPVRVGIEATGSMQWFLNLLEELGIECLVGHPAQIRAAEPRKQKHDRRDADLILKLLVENRFPAIWLPSKELQDLRSLLRHRHQWVRMRTRIQNALQSIALANGLRRGTALWSHDGQSRIASLPLAPHTAYRRSELQAMYAKFEAEIEKLNQRVEEQACKRLGARLLMTHPGVGPITALATEVFLGDPARFADSKALASYVGMIPREYSSGGRQRLGGLSKQGNPLLRFLWGEAGAHAARKDPELQRFYRRKLVQKGLGKASVAVARKLGIRLWIMLRDQIEYHEFCRRGQKQQKSSDACAGMPETRYGAKSHRPVD

SEQ ID NO: 173415 - protein, 389 aa, unidentified
MKIFVGIDIAKLNHFAAAISSDGEIIIEPFKFTNDADGFQLLVSKLESFDKNSLIIGLESTAHYGDNLVRYLVTELYQVCVLNPIKTCQMRKNNVRKTKTDKVDTYVIAKTLMIQDNLRFVSFFDLDMMDLKALGRFRQKTIKQRTRLKIQLTTYVDQVFPEIQYFFKSGLHQHAVYALLKEAPSPKEIASMHMTHLANLLKVNSHGHFTKEQAKELRVLAQKSVGANDSAISIQITQTIQQIELLDSQLEKIEAEMTDIMKFNDSVIMTIPGIGYINGGMILGEIGDIHRFSNPNKLLAFAGLDPSVYQSGNFQAKTTRMSKRGSRVLRYALVNAAWNVVRNNATFKAYYDAKRAEGRSHYNALGHCSGKLVRVIWKMLTDNVEFNLK

SEQ ID NO: 173416 - protein, 348 aa, unidentified
MDHIGIDVHKRESQIYLLAEDGEIIERRIRTEGERFAAVLGDRPRARILIEASTDSEWVARCLEALGHEVIVADPNFAPMYATRSRKVKTDRRDARALAEACLLGAYRPAHRLSDPQRHVRGRLGVRDALVHTRTRYISVIRALLRQHGYRVPSGSAGSFIDRVRSLPLPGRLLSVVAPLLAVMGHLNQQLAYSDATIEHLAVQDPRVPRLRSVPSIGPVTAAAFLAAIDDVGRFHHAHQLEAYLGLVPREYSSGETQRRGPITKAGHSRVRWLLIQAALSILRRRPPAAEALWTWALRIAARRGKHVAVVALARRLAGILYALLRDGTVYAPRGPAALPDSVAALHA

SEQ ID NO: 173417 - protein, 398 aa, unidentified
MIKQFIGIDISKDSFDVTLLQSSGEIKLEVKLTMNKEGFDTLIKYLSSYSKEELLIAMEATGIYHLPLLSFLLENSFKCVVINPILIKSFIGSTTLRKTKNDKKDAASIALFSLKSHQSLHLASTDTIENIRPLIRERENLSKDVARLKTEIKANLSQLFPELLKNTNIFTKSILNLLLKAPSRKAIRNFKEKKIQAILDDTSGNKVKITAKEILAMAKTSIAVSDKYLEKVLTSKIRRLLAVQEELSILDTELENSLEDTDINSDIEILQSIPGIGAVTSKNFMVELPSVNKFNSVKQLCAFIGIDPSVKQSGSSINYRGKISKRGNANLRRTIWQMAIGTIRSCEKFKLYFSKKREEGKKFKQAVIAVANKLLKTIFVMLKNKTKFDENLALGVSK

SEQ ID NO: 173418 - protein, 366 aa, unidentified
MSSMPVQVLPGHRDSTAHEIVLGVDTHKEVHAAAVITALGALLAARTFPATTAGYRDLVSWAQSLGPLQRAGVECTGSYGAALARHLLSEGIAVIEVSQPDRATRRRRGKTDAIDAESAARAVLAGQATASAKAGDGPVEMIRMFKLAKASALKARTQAINQLKAVLVGADPALREKLSGLSSTILVRRCAQLDACAPAGVTSAAAYTLRLLACRILSLAGEVRELEQHIADAILTHTPRLMQRQGIGPDSAAALLITAGDNPSRLRSEASFAALCGVSPVEASSGKTSRRRLNRGGDRQANAALYRIALSRLRWDQPTRDYLDKRITEGKTKREAMRCLKRYIAREVYHVITAPKPGTPEPQTAA

SEQ ID NO: 173419 - protein, 372 aa, unidentified
MKEDSVIFIGLDTSKLKISVAIADGSRNGEVRFFGDISSEPASVASMVSKLSKRGAKLHFCYEAGPTGYGLYRQIVELGHDCVVVAPSLVPKRAGDRVKTNRRDAMSLARLHRAGELTAVWVPDEGHEAIRDLVRAREAARDALKQARQQLQSFLLRHGRIYAGREPWTRAHRRWLTCQAFDHPAHQILLAEYCQAVADASVRLDRLTKLVVETAASWSMAPVVAAYQAMRGVAFMTAVTFVVEIGDVRRFDNPRQLMAYLGLVPSESSTGERVKRGGITKAGNTRARRVLIEGAWTYRFPARVSPKIQARLDDLPRTVREIAWKAQVRLCAGYRKLIAAGKPKVVAVTALAREMAAFLWAIGQEVAPTAKA

SEQ ID NO: 173420 - protein, 344 aa, unidentified
MATYYIGADVHVNNTELAVEYRRKIVQRYSVPTSIPAISAVLGSLQGKKFLGMEEGSMAGWLYRNLSQEVDKFIVCEPRRNKLISSEGDKDDKIDAAKLAALLRGNFLKVVHHTCDAHRAHLKHWVKLYHDRVRAAVRDINKIRACCRMHGVRIPRKVVRNQLRRHQWLSGLDNTVLKAQLKMFWIGYDATKEQVEMAKKQFSSYARKYPVIKSWCELPGVGLIRATTIFAYLDTPWRFKNRAKLHKYCGVGLVRVTSGKDKKGRPKPPILKLPWPVNGRLKDAVMGAATSAIERTDNAFKDYYKRMLANGITPTNAKHSVARKMVSTMSAMWKTGSEYDEKLL

SEQ ID NO: 173421 - protein, 422 aa, unidentified
MSQTVAGIDIHKKVLMVVVATVSETVSEGGVEQHIEYEGRRFGAGGREREHLTAWLRERGVEAVVMESTAQYWKPVWLDLEPHFRKLHLAQAYSNKAPKGRKNDFGDAKRLTRRLVAGELILSFVPDAEQRAWRTMTRSKQQLVRDRVRLQNQLEALLEEMRIKLSSVVSDLLGVSGRRILEALADGETDPVKLAELGDDRLKCSREELVDALGGRAEPMHLQILKLYLERLKLLDRQIVTLDQMAAQALKKHEEAVIRLAETPGLGVDSAQQILAEVGADARAFPSAAQFASWVGTIPGSEESAEKNHSSRSPKGNKFLRRILTQAAQAAVRKKGCHFQNVFRRLMPGLGYKGAIWAIAHRLCRLVWKILHDGVSYIEQGAETTPQAKKRRAQKLTQALRKLGYQVTLTLMPPPEEPACHG

SEQ ID NO: 173422 - protein, 382 aa, unidentified
MTETQMTPGPDNIRNDRMYIALELSNTKWKIAFGNGFKIRLKTIGAREREQFELEVQRSRRHFGMAEEVPVYCCYEAGRDGFWIHRYLCTLGIHNLVVDSSSIEVNRRSRRAKTDRLDAGKLLTMLIRYINGETKLWSVLRVPQKDHEDARRLHREIERLKKERTAHTNRIKSLLALHGVVMEMGIGKTFPEYIEKVVLWNGEHLPSRVKEEMIREYRRYDLIQQQLQASEQEKKEALKRESESSKKVLTLQNLKGIGPVSSWVLVYEFFGWRLFKNVKEVGAAAGLAPTPYDSGGSQSEQGISKSGNRRVRALMIEVGWYWLMHQPKSKLSQWFMERYGQGGKRMRRIGIVALARKLLIALWKYLEQGIMPEGETVKAYFD

SEQ ID NO: 173423 - protein, 461 aa, unidentified
MRKTRKVAGQRGKKRVDVTANLEILHPNAAGIDVGNAQHYAAVPVGRDPQPVQTFGSFTADLHRLGQWLRACKIETVVMQATGVYWIALYEVLEGYGFNVYVVNAKHTKTLPGRKTDVCECQWLQKLHTFGLLNNSFLPPEEIRVLRTYLRQRENLVAGAGTCIQQMQKVLTQMNVQLANVLSDLSGRSGLEILKAILSGERDPYRLAALADPRVQASRKEIAQSLEGHWREDLLFVLRQVHDLYFFHLDNIAECDRRIEAHLQTLGSKVDLATQPLPQPTPLPRRKHIPQTNLREELYRITGVDLTRIDGIQVQTAQVVLSETGVDMTPWEDEHHFASWLGLCPNHQITGGKIIRRGTKKVLNRATTALRLAAQTLHHSQSYLGAKYRRLRAKLGAPKAITAMAHQLARLIYRLLRFGTEYHDKGMQHYERQYRKNQIEWLKRQPAQLNMQLLPNTGVAR

SEQ ID NO: 173424 - protein, 369 aa, unidentified
MSMELGRRQWKLGFTTGVGQRPRRRTLSTEAWDRVPEEIAAAKKRFRLPADAPVISCYEAGRDGFWIHRYLTSLGIENLVVDSSSIEVNRRARRAKTDRLDVEKLLAMLLRYTGGEKTVWRIVRVPTEADEQRRQLHRELFTLKQDRTRVTNRIAGLLATVGVLLKVDARFGIRLDQLRQWNGQPVPEALRVRLAREWEKVELLTTQIHDLDRARRAMVRESRDEAVALVRRLLELRGIGDNAAWVYVTEFFAWRGFRNRRQVGGSTGLVGTPYKSGALNHEQGISKAGNRRVRAMAVQIAWGWLTHQRQSALTQWYNRRFADGGPVARKIGIVAVARRLTIDLWRYLDAGVIPDGALLKERSTVASGG

SEQ ID NO: 173425 - protein, 355 aa, unidentified
MKRTPKYAGLDVHQATTVIVVREESARVIARAILPTDAMALTEFFRSMRGSVHVTFEEGTQAQWLYDLLVPLVERVVVCNRRETRRQGNKSDWHDAEDLAELLRRNAVRPVYHDRAPHGAELKELARTYVNLVEDSTRVMARLKALYRARAIPTRGHAVYSPRQRATWMAQLPAGAVAFRADALYAELDVLQRVRGTARAALIRAARRHPAWSVLRAIPFLGPVRVALLLGFLGTPWRFRTKRNLWAYAGLAVTTRITAEYQLEGRTPVRRRRTPLTRGLNRNHHRLVKAIFKSAATAATVRPGGLQEFYHRLVAGGMREELARVTLTRKLAALTLRLWKTGEAYDPAKLTRQAC

SEQ ID NO: 173426 - protein, 502 aa, unidentified
MKAKQRKAKGNDHSSSMASKQRAKIAKAMQAPEQMEIVNRHAGGIDCGSEEHYAAVSPESVEEGEPFVRCFSAFTEGLDALVEWLKDCGVTTAAMESTGVYWVALYQKLEAAGIEVFLVNARHLRHVPGRKTDVKDCQWIQRLHSFGLLSASFRPEDMICRLRSLQRHRLNLVSAGAAEIQHMQKALQQMNLHLHHVVSDISGLSGLRIIEAILAGQRDPSQLAKLRDPRVRKSTVAQMEAALVGDYRPEHLFVLDQSLQAYRFYQARIEECDHEIEPLLQQLAERFECSSSPLAAESSQPEVIQDQAAQSQTARPIKPKRKRKPKANQPKIDLAGYLQRICGVDLTQVVGLDVLSVLLIVSEIGVDMSKWRNAKAFCSWLGLCPGNKISGAKVLDRRTCKVINRVATTLRLAAQAVGRSNTCLGIFYRRKKAHLGPAKATTATARKLACLVYHLLKYKDQYREPDPVTYQLKVQKTILNKLQKQAAALGYQLLPTTALVPA

SEQ ID NO: 173427 - protein, 397 aa, unidentified
MSAVVGIDVGAYKHAVAVCGSGEREAERGVFRLSADRSGFNELDRWLERQGPVERVVLESSGHYYWPLASHLHRRGYGVAVVNPLQAKYFAKSRLQRSKSDPADARTLAALGMSEEPRIKDPLLGAEAKEAARFWGGLVKEQAQIRNKLLRLVEIGFPELKECFEDPLCDTALAVLREAPTARVASRKRVSTLADTTRPGGRRRLGENKARRLLELAKQTIAPPELDAQMGFEVEMLVQQFDLLDKQIEIAEHRVAEVLDSELARRLQTIPGVGPALAATFIAEIGDIWRFEDFDQLASYAGVHPKEQSSGTKGQNPETSWHMAKTGNAYLRSAAYKMAVVGTQHNPIIRAHYLRKRAQGKSAMNALGHSMSKALAIVWGVWRSGRDFDPTLGGPRT

SEQ ID NO: 173428 - protein, 445 aa, unidentified
MEVTFTHCAGLDVHKKTVVACCITPGAKGVKQIEVRTFGTMTVDLLALSDWLTSKQITHVAMESTGEFWKPIYNLLEGNFELLVVNAKHIKNVPGRKTDVKDAEWIAELLRHGLVRGSFIPPQAQRDLRDLTRQRTNLVQDRATVVNRLQKVLEWANIKLSSVATDVTGVSARAMLEAIVQDQVDPAALSELARGRLRKKRDALEQALTGAVRDHHRFMIAQHLMQIDFLDQQIAAFDEQITAAMQDLSQPPDEPGPTQSDASQVVVTPPEDTTAPLTWEAAVALLDTIPGVGPRSAEMILAEIGLDMSRFPSEGHFSSWAKLSPGNNESAGKRYSGAIGHGNRWLRTVLVQVAWAAVKVKKSYLSSFYHRLAARRGAKRAIIAVAHRILIAIYHMLKKHEPYKDLGATYLDERNKPKVVSRMKHRIEQLGYRVTIEPVPVSAPG

SEQ ID NO: 173429 - protein, 466 aa, unidentified
MGKSSTSEDEKTVGGRDRVRKGLEPKHPDAAGIDVGSRVHYVAVPPDRDEQPVRRFGCTTPELHEMAKWLRACDIRTVVVESTGVYWIPVVQVLEEYTLEVLLVDARHVRNVPGRKTDVQDCQWLQELHTYGLLSPAFRPSQEILPLRSYWRHRAELVGYGAQQIQRMHKALEQMNVQVQKIVSDLSGQTGMRIIRAIVQGERNPVRLAQLRHASVKHDEETYVKALTGTYRTEHVFALRHAVELYDTFQEKIAECDREIASYMQSLQGPNEGETIGTKPPKKRGSFRRKNQPHFDLREELYRFTGVDLTQIDGIDAMTAQTVISEQGIDMSRFPTEKHFTSHLGLCPNNRISGGKVLRSRTRKVQSRAAKALRVAAQSLHRSRTAIGAFYRRLRARLGAPKAITATARKIAIQIYRMLKYGKDYIDQGEQAYQEQYKERLTKNLAKQARKLGLQLLNAQTGQLLS

SEQ ID NO: 173430 - protein, 364 aa, unidentified
MKTLRNSEAKTIPARGTTVGLDVGDRHSQFCILDEGGGIVAEGRLRTTAETLNEHFTRWARSRVVLEAGTSSAWISRLASAAGHEVIVANPRELRKIHQSDRKNDRTDAQVLARMARFDPQLLAPITHRSAAMQNDLAVVRARDVLVRARTQCVNAVRGLVKTAGGRLTTCSTESFAHKVSAQLPNGLESALEPMLKTIEALTEQIRAYDRIIDELASRYPATEVLRQVTGVGALTAVTYALTLGDPSRFGSSRDIGAYLGLVPRQHDSGNHVSQLSITKAGNTLLRRLLVGSAHYILGVHGPDCDLRRHGERLMTRGGKNAKKRALVAVARKLAVLLHRLWIAGELYNPLHSGANNRQAAQEA

SEQ ID NO: 173431 - protein, 332 aa, unidentified
MMAQNDCVVVGIDVAKDKVDACIRSLSQRQTFPSTPEGRRTLIRWLRKHKVGKAAMEASGGYEREWAKALREAGVEALIVDPKRVRNFARSAGRLAKSDPIDAEMIAWFAETFVEAKGQAYDAAREKLAQIVTARQSLIEMRTRLQNRSEQSAPEAVQKMQARLLKNIALELAGLDAAIAAMIKAVPHFAERAAIIESVPGLGKGTSGGLIAGIPELGEASNDAAAALLGAAPYDNDSGKRRGERHIQGGRRWVRNLFYMACMGAATRHNPVLKAFYDRLIAKGRPKKVAIVACMRRLIVILNVMIARGEKWDATRYQLSGPARLPPSACAA

SEQ ID NO: 173432 - protein, 395 aa, unidentified
MQLWAGIDAGKGHHWITVVDESGSTVWSQKVDNDEGVILDALGQILALSDTVHWAVDIRGTASALLLALLTAHGQQVVYVPGRTVNRMAGAYRGEAKTDARDAYVIAETSRHRRDLDAIAAPAQLAADLSLLTSHRTDLVADRVRMVNRLRDTLSGIFPALERAFDYSSQRGALVLLTGYQTPDALRRLGRARLERWLVNRRVRTAAQVAATALHAADAQHTSVPGQAVAAGIVAELAAQLLALDERIKKTDAQITAVFRAHPQARVIESMPGIGPILGAEFVVAAGELAAYRDDGHLASAAGLVPVPRDSGRRTGNLHRPKRYNRQLRRVFYLSAQTSIIRDGPNRDFYLKKRAQGLKHVQAVIALARRRVSVLWALMRDNRQYTATAPLAKVA

SEQ ID NO: 173433 - protein, 343 aa, unidentified
MQTITTIGLDIAKSVFQVHGVDAAGRVVIRRQLKRRHVLAFFQRLRPCLIGIEACASSHHWSRELQAVGHTVRLMPPVYVKPYVKRQKNDATDAEAICEAVARANMRFVPTKTPEQQSGLVLHRTRHLFVRQQTSVINVIRAHLAEFGIVAPVGRHGVEELLGIVADPSDKRVPEVARACLAALGAQLRVLKAQILEFDRMITAWHRSSETSRRLDDCPGVGPALATALVATVADPKAFRSGRNFSAWIGLVPKQHSSGGKDRLGSISKQGDRYLRSLFVAGALAVIRYAKIHGTKHRPWLTALLARRPTKVAAIALANKIARMAWAIMAKGERYKQPVALAA

SEQ ID NO: 173434 - protein, 366 aa, unidentified
MLHKLNSAATLIQRTTTEAPRDHMYYIGLDVHKRTISYCVKDAAGHVHQEGKIGSTRCELDAWIKTLPQPRMIAMEATIFTGWIYDHLLPHAEKVKVAHPLMLRAIAAAKKKNDRIDAAKIADCLRCDFLPECHMASTEIRDRRRTLRYRNLLVKQMVQMKNRVSGLLLETGVSYNKRRLHKVGYFADLMSTNDEVTESIRPLLRLSREHIVRAQRLDYALVSSLERDPLLWERLTRLRTVPGVGPITALTWALEIGDFTRFRSVKQAISYCGLCGDERSSADKVMRMPLSKQRNKHIQRVLIEAAKLAPRECHELALVRERELEKGNPNRATLAVARKMVSYLLAVERRKQDFVPAEEFKCTAAA

SEQ ID NO: 173435 - protein, 352 aa, unidentified
MLIIGCDFHPGFQQAAIFDNLTGEMQEKRLQHRAEAEQFYQSLAGQEVLVGMEACGHYPWFERLLAGLGIELWWGDAAGVGAGEVSKQKTDRRDAEHLLRLLRENRFPRIWVPSLEVRDVRQLLVHRHKQVQARTRTKNQLQAMALSCGVQKKYKLWTKAGRAELEQLPLLPYAAERRKRLLETLDGLEAAIGELDRRVAEEARQRPEAVLLMTHPGVGSVTALAMVLTLGPAERFASGKQVGSYFGLIPREDSSGGKQRLGKISKQGSSYLRFLLVEAGQTAARLDPQLKRFYRRLAGRRNRSVAKVAVARKLATRLYLMLREDWTYAQLCQAVMQVSPSHSVAGEQGPSA

SEQ ID NO: 173436 - protein, 396 aa, unidentified
MERAWAGLDIGKEHHHAMVVDAEGKRLLSRRVANDQAALKELIGQVLELAATVSWAVDLHSSESTLLVTLLLAHDQTVVYVPGVTVNQAARSYRGAGKTDAKDAYVIADQARMRQDLTVLRADDELIVELRLLVARRQDLVADRTRAVNRLHDQLLAVCPPLERVLDLTNRGALVLLTGYQTPTALRTLGVAGLEGWLRSHKVRSADRLAAAAVGAACSQTVRLPGEGLAARLIADLAEGVLTLDEQIKQVDELIQGRFRRHPAAEVISSLPGIGVLLGAEFLAATGGDMAAFGTPDRLASLAGVAPVPRDSGRVVGNLHRPQRYHRGLQRVFYTSALISIRCCPQSRAFYDRKRAEGKRHTQAVLALARRRVNVLWALLRDGRCYELTPPEPKAA

SEQ ID NO: 173437 - protein, 408 aa, unidentified
MERPAPDSQLADYAVNRVDPRRRAAYEWEPAMRNVRFVGLDVHAETIAVAVAEADGEVRSLGIIPNRAESVGRLVRKLGRAEQLRVCYEAGPTGYVLYWQLTQLGVKCEVVAPTLVPVKAGDRVKTDRRDAQKLARSYRAGDLTAVWVPDAAHEALRDLVRARWAAKRDQLRARHRLSKFLLRHGRRAPEGLNAWTDKHLQWIKSQVRFEQQAQEITLGDYLHEVDHVAERIGRLERSIDAAIKSLPVKMRAVIEALQSLRGIAQLSAVSIMAEVGELSRFEHPRQLMGYSGAVSREHSSGERIRRGAISKTGNAHLRRIVVEAAWAYRHRPGIGKTLAARQRSSSAAVIALAWKAQHRLHQRYARLMARGKCKQQTVTAVGRELLGFIWAIGVQVEREVNPPLRQAA

SEQ ID NO: 173438 - protein, 344 aa, unidentified
MYFIGVDHHKQVSVMTILDEGGRERKRGRVANLRRHVEKFLADYRSFTAVLEAGRSSYVMADLLRELGGEVKIANPLQVKAIAHARIKTDKRDSRTLAHLLRTDLIPEIYQREEWNRRAQRVMRMRAYWVRKRTEIMNKVRALLAQQREEVRLEVEKWERGLFSKKKLEFLARLPLEGKEKEVLRDLLQGYKELQAHIKKSDGWVEALYGENEEAARIDTVPGFAMTLSVLVAVEIADIKRFARVADLHSYAGVIPSTHASGGRTYHGHITKQGNSWLRWAALEAVYPAIKRDLGLRALYSRLARRKGPNVAKVTVARRLLTIIYRVLTEKRDYIPGLMKQSAA

SEQ ID NO: 173439 - protein, 428 aa, unidentified
MTAQRKCSAEVTLVAIDVAKAWNVVLVEKSDGRRQRFRVANTRADHDRLMLFLKNQGGQCRVAMEPTGNYHRPLAHRLLSEGFEVYLVSSVAAARFREALFNSWDKNDPKDAAVILDMLKQGKVLSYYDPVTAGIHDLQEISKTYVQVTLARTRLQHSILTHYLPLYWPEFGRYWHSSRAGWFASFLIRFPVPETLRRLDREAFIQEAWPLVGRKVNKRAKLEEIYELAGDTIALPIDPDGIAVQAFRLQLERYLSLNALRSQLERWAEEALGSNRDSQLLQSIPGIGPVLALIILAEAGDLRRFSHHRQFLKFCGLDLAKRQSGASRGKDRLSKRGNARLRCAFWMAGTVAVRMRENSFRDKYERYIQLNPTDPDLKRKALTAVMAKMARVAYAIVKTGVPYRAYFEAAVPSGSIPLRRAVEAIRTS

SEQ ID NO: 173440 - protein, 373 aa, unidentified
MPRYSTAFGMDVHLRSTTVCALDAETGEAVARRFRGNPWGEVAEWMSGFPGPSLAAYESGYLGCAPQRELAGLGVECVVAAVSKIPRSAADSASKNDRNDAARMAKAILAHGISPVWVPSPEVEGIRDLAGAYDGATARLATAKQRLLAFLAKRGFVYGGTTPAGNPRKYWTYDFLRWLDKVRPEDDGGVRTLAALRNEVEAAAEARADLLSEYRAAVDASPIAAEVAALQSIKGCAFALAAAFSAEVGDFTRFRSGRQVTAYFGLAPSQRSSGDSVRLGGISGAGNALVRKLAVEGSWCYAAARHQPKLMPRDTGVPLEIRMHGRKGSERLLRRREEMLARGMPAAKANAATAAELVRWLWALGMMCREGAE

SEQ ID NO: 173441 - protein, 343 aa, unidentified
MKYYAGLDVSLETTAICIVDEAGRIAAEQKVPTCPETIATWLGKHASPLERAGMETGPLAVWLWNELHDRGLPILCLDARHANAALKMRPNKTDRNDAVGLAQIVRTGWFKQVRIKTRASYQIRSLLSAREALVRIRVKLENQIRGGLRTFGVLFGKAVGGFTRRATQIITEELDASPEMRLIVDTLLQARTAILERIKVLDQRVMAAAKHHPTARLFMSAPGVGAITALSVASAFDDVERFQRSSSAGATLGLTPRRYESGEVSRNGRISKHGNKMTRKHLYEAATTLLTRTTSFSSLKAWGLKLAKTSGFKKARVAVARKLAVILHGMWKSNTEFRWSQAA

SEQ ID NO: 173442 - protein, 375 aa, unidentified
MKEKLRFLGLDVHAETIAVAVAEPGGEVRSLGTIPNRVESIRKMIKKLGPAEKLRACYEAGPTGYVVYWQLAELGVQCEVVAPTLVPVKVGDRVKTDRRDAEKLARCYRSGDLTAVWVPDEGSEALRDLVRAREAAKQDQMRARHRLSKFLLRSGQRPPTGVRSWTRPYLIWVAQLRFTQIAQEATRQDYLHEVEHMRERVARLEQAIMEAVKAASPALQQVINDLQALRGIADISAVTIAAELGQVSRFGSARQLMGYCGAVPSEDSSGKRIRRGGITKTGNAHLRRIVGEAAWSYRRPPGIWYGLRRRQESISEEVKEIAWKAQHRLHKRYMKLGAAGKPQGKIITAVARELLGFIWAIGTRAETTVSQRAAA

SEQ ID NO: 173443 - protein, 411 aa, unidentified
MPKIVYQICCGIDVHKSFVVACIATTNEQLVTNYKRKRFSTFTGDLRRLADWLCEHNCRDVCMESTGKYWVPVYNILEPTCKVVLAHPKYAKAIKGKKTDKRDAKWIADIFKHDLINGSFIPPADIRQLRDLVRYHFKLTSYTTGEKNRAQNCLTVSNIKLDDVFSDVFGKSATAITNQLLENPGKAFDVTPFVHKRCKTPIQDIQAAVDGIMCANQAEKLRIIRSHMDSLELCNANLESEILNVAEKFLPQANLVLTVPGIKSFSAIAIIGEIGVDMTVFETSRHLCSWAGLTPQNDQSAGKKKTTRISRAGAYIKPLLVQCALAAVGSKKHPEVRNRYQAIKKRRGHKKAIIAIARMLLTAIYNILKKNEPYNAELYRQSDMPPMKREVTLEQAIFLMQRQGYIVTVPA

SEQ ID NO: 173444 - protein, 335 aa, unidentified
MKKYLFFVGIDVSKSKLDVTFLEKPLGKKIVHFVVSNDNKGIKEIVKQLNNRKIALEEVLISFEDTGVYSLPLGCYLTRYKIDYWMIPAIEIKRSKGISRGKTDKNDSKDIAFYTLTHLHKLRLTQLPELSLMELKLLFTEREKLLKSLRIIGSTSEGIGYIPKEAMGDVLKINKVVIKQLQKAIEKVERKMKEIIQSNEQLKLQNELIQSIPGVGPQTALYIILVTKSFQSFENWRQVACYAGVAPFQYSSGSSIKGRTKVNHLADKKLKSLLNMCALNSKKHDAELKQYYARKVGEGKSKMLVLNNIRCKLLGRIFATINRGTPYVNIQKFAA

SEQ ID NO: 173445 - protein, 342 aa, unidentified
MTAIKYFVGVDIASATFTACVGTTPWKVILKPDTFENTGNGYQTFLAWLAKQQIGAKESVVCMEATGVYSEGLAYFLFATGYAVAVQSPLEVKRTFKPYGPKTDAVDSLQIAEYACRHIDKLSFWQPRNEILEQVKALLATREQFVSQNVAHKNALQAMQRKPVRTLFAEQAHAQMIEQFKKHIQAIDQEIRRLIESDPTFREMLLLLLSVPGVGLLLASHMILLTQNSLDHKELASYLGIAPNEHSSGSSVFKHATSRHFGPAAVRKLLYLASCSVRTHQAQFTSYFARKTREGKPAKLVLNNIANKLIKIICVVLTTKKAFIKNYHSVQPLVFQNTLTGS

SEQ ID NO: 173446 - protein, 343 aa, unidentified
MQIVRIGLDLAKYIFEVHGVDAHGKVVLRKTLRRDAVSSFFANLPPCLIGMEASNGAHYWARVLSGFGHQVRLISPQFVAPYVKSNKNDRNDAEAICEAAGRPTMRFVPVKSVDQLAVQALHRIRSRLVSGRTKLANQIRGILAEHGIVIARNIAKLRQNLTFMIEGDGNGLSSLVRALVGELKDELAELDQRIAAYDRRIRELYRNNELCQRLGKIEGVGPLSATALMAAVGDRQGFKNGRQFAAWLGLVPKQRSSGGRDRLFGISKRGDRYLRTLLIHGARASLARAKGKQDPRSCWLEKLRERRHPNIAAVALANKNARIAWALLSSGEAYNPNLSVGST

SEQ ID NO: 173447 - protein, 414 aa, unidentified
MRVHHNVCCGIDVHKKSVTACLLWGPADQEPQEEIRRFGTMTRDLQKLAEWLEQAGCEVATMESTGSYWKPVWNVLEGRKYKLILANAQHVRALPGEKTDRKDGRRLASLTRHGQIRPSFVPPKAILELRDLTRYRSKLLAAGSSERNRIQKVLETANIKLGSVLSDVFGVSGQRMLQALVQHEAVDIATIARLAHWSLKPKMDAIEQALEGKLTAHHRFLIELSLNHMRVIEEQLLRLDAEIQRRLEPFQQEYALLQTIPGIKEIGAARILSEIGTDMSAFPDADHLASWGGTCPGNNESAGKKFQTKSRKGNPQLLSALTECSWAATHKKNCHFRNKYYRIKSRRGPQRALMAINHSLIKCIYVVLSQRQAFKEPHITPLTDHHRRRKAASLCRQLRQLGYDVNLKEKNEND

SEQ ID NO: 173448 - protein, 397 aa, unidentified
MIAVGIDVSKSKSTVAILNGDGSIRAKPFDVHHTADELQVLVNYIKGTSEVPTILMEPTSHYHYPLLKTFRDADLPVCLINPYQMKKYGDTALRKVKTDKRDSLRIARYALEKSYSLVPYTPSDQKYEDLRFLSRQYSQRISTLTANKVQLLSLLDQTMPGITSLLPLKTKDPDTCVLLRFVKRFKSFDVIRKMGKTRFLESYQILVRKTKGRPASTKGLRIYELALNSVTTRGDNPLTAMAQEQCVDLISTSQKAADEINLQMRTIAETLPEYKVLRSMAGVGDRLGPVILAEIGDIRRFHSGKALNAYAGNDAPPYQSGQFESRNRHISKRGNPALRKACFEVMQALKLTKPQDDPVYLFLVKKEQEGKPHNVAKMAAVNKFLRIYYARVMELYK

SEQ ID NO: 173449 - protein, 369 aa, unidentified
MTFYTLKAAPAASAVELKNNHKSTKAKRILVGCDVHLRGYQGARKVDEGAIGVVDNFRSEEALLLYIEKQRQQAEQVVVVYEAGPLGYTLYRKLRATGVLCYVCAPDSTQQRKKRRKNNQIDARSLTSKLFNYLNGDQHALQLARVPSEAQEQQRMASRQHDQLVEERKRLGAKGNAMLLSQGFGSWSNWWRPKAWSQLSRVAPQWLLERLQIWVDVLKILDEKISQAKAALARACSGPRPKGVGALSLMQLQSEVLDWSLYSNRRKIACLAGMVPSEWSTGDKETRGSITKVGVPALRRIIVEMVWRMVLFQPQYKPVQKWQEVLKGPNPALKKKAVVAIGRQLMVDLWRLQTGRVTAQDLNLIMVEN

SEQ ID NO: 173450 - protein, 436 aa, unidentified
MRGCRCSMIMGFTKPIEHFNLQRKKVITMNTLYVGIDVSSKSNVVYLMLPNGDKHSNFSVANSHEGSTLLVKKIYSALTSHSLDTVLIGLEATSVYGDNLVYFLREDATLAPFNRKIHVLNPKQVKKFHDTYNDLPKNDYVDSFVIADCLRFGRINKEVYMGEYRYKALQNLTRARFFAVQNLVKEKQRFMNVLFKKYSTMTQEKVFSDAFSTTALAVYDEFESAEALANMDLHELTDFIIEKGKNRFPDPDAVAKAIQKAARSSYRLPKTVNDSVNQVLSISITSMKALESQIKEFDKAIKALMELLPNVLISIPGIGPVYSAGIMAEIGDINRFDNQAALAKYAGLAWKQHQSGSFEAEVTRLIPSGNRFLKYYLCEAAFSLVRCDKEYSDFYHLKYKEVNRCQHKRALALTARKFVRLVFRLLKDNRLYCPAK

SEQ ID NO: 173451 - protein, 323 aa, unidentified
MAKRITICAGIDTGKRKLDVALDGSSEQLQVENTPEGYKVLVERLQRQKVKRVGIEASGGYEQAVVAELRRQRFVVIVFQPAQVRAYAMFHLQRAKNDKIDAALIAACTAAVKKIYPAPDPRLQSFAEHLTMIEQIGEDIATLKNRIESCRNERIQKLWKEDLACLAKRRRAEFKALLAAIREHRDLAARLDLIHSVGGSGLSTAVSILVRMPEIGQITREQAAALAGLAPYDDDSGDHLGNRHIDGGRERLRRALYTAALPASFRWNPQLIALYKRLIAAGKGHKRALIACARKLLVFINTVVARGTPWQVEPPKTASAPAT

SEQ ID NO: 173452 - protein, 446 aa, unidentified
MDSNYAVYCGIDVGKGEHHAVGLTAAGKKIYDKALPNDEAKLRAVFDRLASHGSVLVVVDQPNTIGALPVTVARVGGHEVGYLPGLAMRRIADLYPGQAKTDARDAFIIADTARTMPHTLRRVDTGDEALAELEVLVGFDDDLAGEATRVSNRIRGLLTSIHPALERVLGPRITHPAVLEILSRCGGPAGIRQAGKRKLTAIAVKHAPRMGARLATDILAALDEQAVVVPGTAAAETVLPKLADSLKETLLQRKAVAADVERALDDHPLSPVLTSMPGIGVRTAARILIEVGDGSAFPSAAHLAAYAGIAPVTRKSGSSIRGEHPARSGNKKLGTRPVPVRLRRPPRPHQSRLLRQETGREEETQRGPDLPRPTPLRRPLRHAQEQGTLPESNPLSGLTKTIGTPPQRRVRQELSPPANLARTGASRESIGSAETCPTTRTDIALP

SEQ ID NO: 173453 - protein, 460 aa, unidentified
MGDEDRRSQTDGAGVDGFPVLRTNVAGIDVGSEHHWVCAPARTGAGREVAVFGATTPGVEQMAAWLKERGVTSVALESTGVYWIVPHEMLERAGFEVVLVDTRELGRVPGRPKSDRRDCEWIQRLHSCGLLRGAYRPIEQVCLLRTLVRDKGTLVAERSDWLRRMQKSLDQMNVRVHRAVAELDGATGMAIVRAIVAGERDPHRLAALRDRRCRKSEAEIAEQLTGHWREDHLFSLQQGLKMHDAITERIQEYEREILRQLAQMTPAARRDDQAPTPTQVTKARAIKKRGEDPLRHALYRMSGVDLTAIDALGVETVSVVLSEYGPDLARFPTEKQFVSHVGLAPHRPISGGKPVKKRKKPASTSARVGAALRMAATSMRRSQTALGAYYRRVAQRLGADVAVFATARKLAQWIYRVLRWGPVYVDEGAAAYEKRYHEARLKRLATTARQLGYTLVSVEA

SEQ ID NO: 173454 - protein, 352 aa, unidentified
MTLYLGVDYAKKFSVATLVNETGEVLKQGKLRNERAEFEGFLSGYSEVKAVLEAGWNWRVWVDLLDGLVEEVQLAHPLKVKAIAEAKIKTDSIDSATLAQLLRADLIPQAYLRSKVSSNRQKILRSRCFYVRMRTKVRNRIHHIIDGQQEQVRQEASTFKDLFTKKARRWLRQLQLSQPDGEILKALLDYEEYLTERITESDIGIGRLFEEDINCQMISSIPGFGKFLSVLTVVEIEQIERFRTADHLSSYAGLVPSTYSSGGKTWHGKIHKQGNSWLRWAFVEAAIHTAACPGQLRYFYLRIKRRKGTKTARVATARKLCAIVFRILKNQKPYQAIMDLRSRPRSVYSAPL

SEQ ID NO: 173455 - protein, 332 aa, unidentified
MSILTESGCLKKHSQQSSAQALFEHLKKHYPNGNYLSAYEAGFSGFSTYYSLLDFGIECLPVHAADIPTGQYESVMKTDAIDSTKIARALKSGLLRGIYIPKKEVLDDRNVMRLRITLKRQLSGYKSRVKHLLYNNGVIYPECFQNSKSHWSKRYLKWVHEDVQLLSESRNSLDLLLRQVELFRKSLLEITRLVRTLSRNGRYGEAYENIVSIPGIGMITGMCLLTEIGDIHRFRNERQFASYLGLVPTSHSSGEKTSHGEMTFRGNKRLGPLLVESALVAIRQDRALAAAYGEYCKRMLPQEAIIRITRKLSNRILIILKSGKKYEHDRCY

SEQ ID NO: 173456 - protein, 420 aa, unidentified
MLFVGDDWAEDHHDVEIVDDTGRRLVRARLPEGIEGISRLHALLADHLPEEWADPDTGTVGGQVVVGIETDRGSWVAALVAAGYQVYAINPMSAARYRERHSTSGAKSDAGDAHVLAEIVRLDRAHHRRVAGDTPEAEGLKLVARTHQSLIWDRQRHVLRLRGTLREFFPAALAAFEAAGLDLTSPDALELLGRAPDPDRARALSRSRIAAALTRARRRDVEAKTGKIQAVLRAPELRQPAAVQRAYAVIVASQVRLITALIGDIAELEAVVAEGFGRHPDAEVYASQPGLGTILGARVLGEFGDDPHRYTDAKARKNYAGTSPITRASGKKSVVLARYARNKRLGDAVHQWAFCALTASPGARAYYDTLRARGIGHHAALRQLGNRLVGILHGCLKTRTTYNETTAWAHHTTEQSSTAA

SEQ ID NO: 173457 - protein, 346 aa, unidentified
MNITTIGIDLAKNVFQVHGVDERAKAGLKKQLKRAQVLPFFANLPPCLIGMEACGSAHYWARKLNELGHTVKLMAPQFVKPYVKTNKNDAADAEAICEAASRPSMRFVPVKTGEQQAVLSLHRAREGFVKARTAQANQIRGLLAEYGIVMPVGIDNIVKRLPDILEDGENNLPGVFRQLLQRLGEHLKELDRQVDELNEQIQLWHRENAASRKLADIPGIGPITASALVASIGDAKDFESGRQLAAWLGLVPRQHSTGGKQTLLGISKRGDCYLRTLLIHGARAVIRVSERNVEQADSWLTRIVDRRNKNIATVALANKNARIVWALLAHNREYQSDYVPVVATGA

SEQ ID NO: 173458 - protein, 442 aa, unidentified
MRLTPNKNNKKEVPNMKYTQNEKILQITEKTLIVGIDVGSEKHYARAFNFRGVEYGKLLIFDNSAEGFTKLVGWVQKLTNENGFSDVMLGMEPTGHYWFNLAENMKRHGMRVVLVNPHHVKKSKELDDNNPSKTDRKDPKTIAMLVKDGRYIEPYIPEGIYKELRTAMDIRWRLMEDLTAIRNRINRWINIYFPEYKEVFVDWEGKASLQILHECPTPVKVMEKGIDGIIAIWKGKGIRTVGKKRAIRLVEAAKVSIGSKEGLVAAESELKILLEDYERKREQYERVMMLIEELARQIPGFDRLLEIKGIGIVTAAGFVAEVGDISRFAHPKQIQKLAGLSLKENSSGKHKGKTTISKRGRKRLRYYLTFGIMPLLSKNEEFRLLHEYYTTRAERPLKKMQSLVALSNKLIRIFYVLLKKDVAYDPQKMLGDIKRPVEKMAA

SEQ ID NO: 173459 - protein, 344 aa, unidentified
MSKHSIRAGDVAGLLVRLAQLKEKARGRTGRDFPIIAIQEAGLDGFWIHRVLQSEGIESHVVDAASILTSRRRRRAKTDGIDGETLVRTLLAYKRGEPRVCAMVKAPTPEEEDRRRICRERKALVGERVEHVNRIKGLLFAQGVSDYEPLKRNRRARLEELKTGDGRPLPAHLKAQISRELDRLELVLPQLKAVEAERDALLKPVSEGCPAPAAMLAQLKGMGPEFTAILWSEGLFRSFSNRRQLAAYAGLAPTPWQSGSVAHEQGVSKAGNPRLRTTMIQLAWLWLRHQPTSALSVWFQQRVQNNGGKMRKTMIVALARKLLVALWKYSTSGVVIEGAVMKTI

SEQ ID NO: 173460 - protein, 458 aa, unidentified
MSQTKRSRKSRGLFPVHPAAAAIDVGAALHVAAVGPDRDKEPVRTFRTFTDDLHRLADWFAQCGIRTIVMESTGVYWIPVFEILEQRGFEVMVVNARDAKHVPGRKTDVSDAQWLQRLHEYGLLRASFRPEAEIAGLRTYLRQRERLLDYAAAHIQHMQKALMQMNLQLHHVVSDITGVTGMTIIRAIVAGERDPNVLASHRDRRCHASVEMVCQALVGNYREEHVFALTQALELYEVYQTKVTACDEQIEAILKRLKKNAPPPASKLLPVRQRTHQPNAPAFDARGALHAILGVDLTQINGLGPYLALKLVGECGTNLAAWPTAKHFTSWLGLAPHNKISGGKVLSSKTRRTSNRAASLLRLAAGTVGRTDTALGAFYRRLSARVGKAKAITATARKIAVLFYNTLRHGMAYADPGATYYEDRYRQRVLNNLQRRAKSLGFVLREAGLDTDCSAARF

SEQ ID NO: 173461 - protein, 416 aa, unidentified
MTILLEADTMSEFKNLVFVGIDPHKAEHVAIMIDHWGEVFFELTFPNQASGFETLLNHVNNHIPEGKTVVFGIEDTGGLGRSCAQWLTVRDKLVKGINPIMSSNKRNRQPHRSKTDQIDALAVAKVLITDYNQLPTVTVDEYYHALRQLANRREQLVKTSTRCKNQLHKLLHELYPNYKDFFSDPFGLTALAFWANYSHPSMLQGVGIKRLASFLKKHARNMSTAKAEEILSAVDKHQPLTIDDKMAIVVVKQIIEQLQQLQNHIVEMEQMIDEALLQSNSKLQTMPGVGPVVEITILSRVGPIEKFSSADKLARHAGIAPVDNSSGGTKRQRRSKSGDRRLNAAIHRIALNQISVDRNGVPKCPVALEYYERKISEGKTKLSALTCLKRRLCDIIYAMLRDKTAYREPDCRFPAA

SEQ ID NO: 173462 - protein, 343 aa, unidentified
MYYIGLDVHKKTISYCVKDAAGHVHHEGKIGATRLDLDNWIKTLPQPRMMAMEATIFTGWIYDYLLPHAEKVKVAHPLMLRAIAAAKKKNDRIDARKIADLLRCDLLPECHMASTEIRDRRRTLRYRGLVLRQTVQMKNRVSGLLMESGVTYDKQRLHKMGYFSQLFSTSEEISDSIRPLLRLSRELIQRGQRLDRALVSSLERDPLLSERLRRLRTIPGVGPITALTWALEIGDYTRFPSIKEAISYCGLCSAEKRSADKVMRMPISKQRNKHIQHVLVEAAKMAPRYSHELALLRDKELQRGNKNRATLAVARKLVAYMLAVDRRKQDFVPAEALADKAVA

SEQ ID NO: 173463 - protein, 359 aa, unidentified
MLETTPAQREVTGGIDTHADTHTVAALDNLGRLLGHATFPATSVGYDDLLGWLARHGNIIQVGVEGTGSYGAGLARHLTGSGIKVVEVDQPDRRARRKVGKSDPADAVAAARAVQAGTATGIPKSRDGVVESIRALRVARNGAIKSHTAAINALRQMIITAPAELREQLTGLGPKALVNTCARLRPGDLHDPTQGVKAALRRLARRCQMLAKEIAEGDRDLSNLIKRVAPDLIAQHGVGPETAGQLLITAGDNPTRLRSEASFAALCGASPLPASSGKTNRHRLNRGGDRAANSALHRVVIVRMKSHEATRAYVARRTEQGMSKRDIIRCLKRYVARELLPHINAAKNDADLKLPSIAA

SEQ ID NO: 173464 - protein, 344 aa, unidentified
MKIAVLGIDLGKNVCSVVGLDASGAVVLRRRVRRDTLIDLIAKLPACIVGMEACCGAHHLGRLFAAQGHGVRLMSPEYVRPYVKAQKNDDRDAEGIAEAATRPTMRFVELKTVDQLDMQTLHRSRERLVGERTALINQLRAVLLERGIVAPQGKRKLEQYLVALMDEHDGEGLSARMRMLVTDTRAQWRELDRRILAFDAEFARWAKENEDARRLATIPGVGVTISTALIAAVGKAETFEHARDLAAWLGLVPRQSTTGGKPRLMGISKRGNKYLRTLLIHGARAALPHLAVKETTLGRWAKNLLSRVHQNVAVVALANKLARICWAVLRSGQKFAAKGAPLAV

SEQ ID NO: 173465 - protein, 369 aa, unidentified
MAEITRSLIARVGVDLSKRVYQVHAADKAGRVVLVKAMSPERFFAWCADLPAGCLVAMEACGGAHHVARRLRQTGLDARLIAGHFVAPYRMAGKSGKNDANDAAAICEAASRPRMRFVPVKTAEQQGHLCVHRLREGFKEERTALINRIRGLLTEFGLVFPQSPEALRKVLADVIEDATNELPGPARLALQRAHLHWIEIDLQMAWCDERIAQHVRTDARAAKAATLLGIGPTTASALVVSVGDFHQFDNARQFGAWLGLVPSQNSTGGKAKLGGITKRGDDYLRTLLIQGAKSAVMSAGKRSDRISLWLVQLKERVGWQKTVVALANKNARILWAVLTRDTPFNPDHLPEPPPARCCLPRASAPAPAH

SEQ ID NO: 173466 - protein, 376 aa, unidentified
MVTGVGSRHRPRRDRKPAAVSDVKPRMSLELRSLLPYPNSCPGTSPHQQGRDTKMPMLSYCGIDVSKDRLDVAVLPDGECFSVRNDAAGWAELVERLCSFSIAAIGIEASGGYERGVMRHLLAAGMPVRQVNPFRLRQFAKASGVLAKNDPIDARMIASFVAIMPTRPAQRHAPALERLTEILAIRRQLSAEKVAAENASRLLENAMLRRLSRRRIARLTADIDSLDKYLLEIVVSDAALGHRYELLTSMPGVGPLLACTLIALLPELGTMSRKQVAALVGVAPYAFESGTLKGKRCIWGGRAPVRHMLYMAAMSASNWNPVLRAFHARLKGAGKLPKVAIVAVMRKMIIALNAMVRDDVAWADRHRGRHPMPTAR

SEQ ID NO: 173467 - protein, 410 aa, unidentified
MITQNPPSTPPATATAATATPPSATATPSPKPHRVIKLGVDVHWREHVVVRQIDGTSPQPAQRFAPEAFVAWVAKQAQQADVVHCCYEAGPFGFVLHRRLVGLGVKSLVVRPRNWDEYGKKVKTDRRDALALVSCLDRYVAGNTEALTSIRVPTENEERARSVSRQREQLLEHRKRLAAQGLSCARYYGHDLPDEWWRAKKFELLQAELPEFLVGLLASVQRIALLVHAELEAHSAEVESAQTQELPTGLGALTAQILDREIGDWGRFKNRRQVASYTGLVPSEHSSGERRQRGAITKHGNPRVRHILIEASWRLQQFQPDYRPLKSRQGALDTAKRKGDKPARKKLCVALARQFIVDWWRIRTGRTTPAKLGLQMSWPAAYVLRGKAPQPVVAPLAVVAPLAVPQPAAA

SEQ ID NO: 173468 - protein, 457 aa, unidentified
MAMGVKKAGATGAQDWQIVHPNAAGIDVGAAEHYVAVPAGRDAQPVRGFGACTEDLIALEQWLKQCGIDTVALESTGVYWIPLYELLEARGYKVILANARAVKNVPGRKSDVLDCQWLAQLTAYGLVSSAFRPAGKVCALRERVRQRQMLIGMQAQHIQHMQKALALMNLKLTEAVSDITGKTGLAIIRAIVAGQRNAGELARLRDRRVKASEDDVRRALEGHYRAEHLFALKQALHLYDAYAERVQECDVELERVLTTLARGDDDVPPQDPRKARSHAKNAPAFDLRGALYRCYGVDLTRINGIHVTTALTMLAEIGFDLTRFKNAKHFCAWLGLAPGTKISGGKRLSGRRPKTANRAAQALRLAAQSLRNSQSGLGAYFRRLCARMDKPKAITATAHKLARIIYAMLTQGQAFVDQGQAWFEERYRQRVLHNLKRRAMQLGMNLVPVPTPQIEHA

SEQ ID NO: 173469 - protein, 314 aa, unidentified
MNIIGQDISKDTIDATLHKTNGSIHYIKFKNNDDGLKQFRLWIKGNRIRKVYIGMEATGIYYEKAADMLSSYYTVYVINPLKIKDYGKSRFNRTKTDKADSNLIADYIKRHQDTLIPYQIPKNKALQKLINLKNQLQQQQKQIKNRLHSTEEDFIRNIHQDLIDTIQDKMEQVKIAISEQIKKQTDNNHYRNLQTIPSIGKDTASVLYAQLTEKHFKTANQFVSYAGLSPAIIQSGTSVRGRGRLSRYGNRRLKSTLYMPALCAYRFNAFPKLINNLKKAGKPKMVIIVAIMRKLAKPAYYIVKTGQPYDAERH

SEQ ID NO: 173470 - protein, 313 aa, unidentified
MTTSGAWIGVDICKKHLDVAAITGAPARLRNDADGRIALARRLKADNVKGVIVEATGGLERALLKALDAEGVPASIVNPARVRKFAEGTGQLAKTDKIDALILARFGDYMKPAPTVLADEHRQKLRDLIAYRSQITQEITARSAQVKQYASSDIVARATAAIKVLRTERKVIEREIEAHIKSKDDTQRLYKRLLTVPGVGLIVAATLIAELPELGRLSRRQIAALAGLAPFPNESGDRKGYRSIRGGRDDVRQALFNCARVAIRHNPVAKPFYEGLRARGKPHKVAIVATMRKMLTILNAMLKTNKDWTCNKA

SEQ ID NO: 173471 - protein, 419 aa, unidentified
MLYDSRVHMDRTLVEFLPSSAHLLGGVFMTYFIGIDIAKYKHDCFIMDQDGSVIRDSFSFSNDSAGFCLFLSVLDSLDPSYEKRIGFESTGHYGLNLKCFLEEHDISFMEINPILIKRFSSATTLRRTKTDKADAALIASYLTTVEYITYPTQSYHIHNLKSLTRSRDALVKLRSGQLVMITNVMDKIFPEFKPFFNKSLKSSTAMYLLRNYTVPSKMASMNSESYRKMSSKLKKTISYARFSKLRELAKNTVGREDPCLTFELNTYLDIYQSLDSKIKEMEAHIEEEFKKIHSHIQTIKGIGWMSAASIYSEYGGIENFQTPNQMLAYAGLDPSRSESGEHAYKGHMVKHGSSHLRYVLLNCAEMVILHNPVFYDYYRKKREEGKHHRVALSHVARKLVRIIFFLEKNNVDYDPKKMR

SEQ ID NO: 173472 - protein, 410 aa, unidentified
MEVLYPHCAGLDVHKDMVVACLRHVVDGTIKREVRTVKTTTKALLDLSQWLASEGCTHIVMEATGVYWKPVWHILEDGDFDLALANAADVKTVPGRKTDVNDATWLADLLAHGLVRGSFVPNAQTQEMRGLLRTRKQLVRERTSHVQRLQKTLEDANIKLDSVISDVMGLSGRTMIEALIAGETDPNTLAALAHRRIRAPAEELCEALRGRVTKHHRFLLRLHLQQIDIFDAAIVAIDQEVDANVEPFRAAITILTTIPGVSDLSARTIVAEIGTDMSRFPTDGHLISWAGLCPRNDESAGKRRSNRMRKGAPWLKTTLIQCAWSATRKKASYLQAQFHRLRARRGAKKAIAAVAASILTAIYHMLTNGTLYQDLGADHFDRRGKTAQTKRLVAKLQNLGYAVQITPLAA

SEQ ID NO: 173473 - protein, 298 aa, unidentified
MNKSNRVIGLDVHPDSFAGAVLLKGKDAASARVVSTSRRVELPELEKWVARHTGEQDVLVLEASGNAFAVAERLRVLQRQVVILDSHRAGKVGKAYCANDRVDAIKIARIYLTALSPVVWQPDAKTRERREVFSAYQAVVKEATRLKQQLRSMLNEHCVRLESGFRLSHPSAINRLLKLREWTPVRAMLLEQLHRGLVSAQARRTRLRRYMAQEVLDEPELLRLTRLCGISLITLYGLSASIGDIKRFSNSRKLSAYFGLNPSVEQTGNWEGEGALKRHGRGSFACLAGAVGQETAAG

SEQ ID NO: 173474 - protein, 343 aa, unidentified
MPAVTTIGLDIAKSVFQVHGVDAYGNMVVRRQLKRRYVLPFFKKLPPCLVGIEACATSHHWSRELRVLGHTVRLMPPAYVKPYLKRQKNDAADAEAICEAVVRPNMRFVETKTPEQQSCLMLHRTRHLFIRQQTAVINAIRAHLAEFGVVAPVGRNGVEELLDVIADPNDDRVPEVARECLAALGRQLHMLKAQVLEFDRHIMAWHRSNETSKRLDAIPGVGPALATALVASIANPRAFRSGRDFSAWVGLVPKQNSSGGKEKLGSITKRGDRYLRSLFTAGALAVIRYAKIHGTKHRPWLTQLLARRPTKVAAIALANKIARMAWAMMTKGERYKEPAALAA

SEQ ID NO: 173475 - protein, 348 aa, unidentified
MSGAYEGRQIVGMDLHRRRSVLVRMTESGEHLETVRISNDREYLREVMARAGEAPEVVLEATYGWYWAADTLAELGAHVHLAHPLGVKMFSLRRVKNDQRDAADLADLLRMGRLPEAWIAPPATRELRGWVRHRAKLVGLRSNLKCQVHAVLAAAGVAVPMSDLFGPSGQKLLASPAVSAVLAVESRSRVDSLMRLITALDFEIDTFARLVAGRLRADPGYTAIQQIPGVGPLLGAVFVAEIGDITRFGRPAELASWAGLTPTHRESDTTVHRGRITKQGSRLVRWAAVEAVQRVPAHTRLGQIRDRVGERRGRNIGVVAAARELTALVFYGLRDHHIRCLPTRTGAA

SEQ ID NO: 173476 - protein, 344 aa, unidentified
MKITTIGIDLAKNVFQVHGVDEQGKAVLKKQVKREQMAAFFAKLSGCLIGMEACGSAHHWARKLQDLGHTVRLMAPQFVKPYVKTNKNDVADAEAICEAVARPSMRFVPLKSVEQQAVLALHRVRQGFVKARTAQANQVRSLLGEFGLVMPKGITNVRKRVPELVDNASGNLPAAFRQLVQRMLDHLKDLDRQVGELEAQIKAWHRSSELSQKLEKIPGIGPLGASALVASIADARSFDNGRQVSAWIGVVPRQHSSGGKPTLLGISKRGDVYLRTLLIHGARSAIVAAQRRASVNPWLAGLLQRRNPNVAAVALANKNARTVWALLAHDREFQPDYVPTRVAA

SEQ ID NO: 173477 - protein, 359 aa, unidentified
MMYVGIDLGADTCSASIVDEQGEIKSFLEFSNDENGWKELMNAMGTDVKVAMEAGSAAYPIHDYLVEKGYNVKVGHPAAIKAITQSKSKTDEKDSLILAQLLRLNYLPLAYIPSPGTLRTRELLRMRKGIGQDIICVKNRIHGFILKNGLRPEFRRKSDIFGASGLTRLHKVKFGDQRDCIFKVLLDQLANLDKQKKELNKEIAKISIKNDQVSLLMTIPGIDYYSALIVLNEIGDITRFKGYEALCMYAGIVPSVRSSAEITRMGRITKRGSSTLRWILTIIADGILKFDNPIKQFYQRIVKRKKSKKLAHVAAARKILVMIYFMLKNNEPCRWAKDGLTERKMTALQKMCQRKVLNA

SEQ ID NO: 173478 - protein, 343 aa, unidentified
MDYFAGLDVSVKDTSVCIVDETGKIIREVKVASEPDALLQVLRNAGYHFKRIGLEAGPLSQWLFSALAEAGLPVICVETRHMRAVLKAQINKTDRNDARGIAQMMRVGLYRPVHVKTLRSQKLRMLLTHRKLLQSKAIAIENDLRATLRNFGLKVGMVGTAKFETRIKELIENLPDLILLVEPLLVVRRVLREQLDLLHRRLLAVVRDDAICRRLMTVPGVGPVVALTYRATVDVPARFRKSKSVGAVFGLTCSRDQSGERDRPGAISRCGDAMMRAMLYEAAQAMLLRSAKWSWLKAWAMQIARRRGMKRAIVALARRLAVIMHRIWVDGTEFRWTKEAAAA

SEQ ID NO: 173479 - protein, 318 aa, unidentified
MNVIGLDVSKDTIDATLITTKGSKDYIKISNNNEGFENLINWIKTKRIRKIAISMEATGIYYEQAAEYLNALYTVYVINPLKIKEYAKSQFSHTKTDKADSKLIAEFANRHLDKLTPFRPSENPILYKLVNLLQQLKEQQKETQNRLHTAKDIYIKSTHEAIIELLEEKIDQTSKRIEGMIKQKESLNIEYQNLQTIPAIGKETAVILLRHLTDKNFETANKFVAFAGLSPKIEQSGTSVNKKGRLSRYGHRQLKRALFMPALVAYRMNAFPQLVRNLEAAKKPKMIIIVALMRKLAKIAFYIHKTKKPFDKARHQTV

SEQ ID NO: 173480 - protein, 449 aa, unidentified
MKTQLIVGSCAEAWTVGIDLGYHSHRICLVDPQGRCVFEQEVTHTGAAIEALVQQLLVRTDSDPACLEAALECPHGALVEAFLARGFSVWAINPKALDRFRDRFSLAGAKDDRRDAFLLAVCLRSDRYAFRRVEPLPQCLLQLKELERRRKTLQEEEIRGTHHLREALHRWFPQLLTLAPAADKPWQWSLLVVAPTLGQARRLSGKRLARILAAGHARIDPAQLRQVLRQPDLPQAPGLEEIVALELGQLAAQIQLIHRQGLQLEQAIAGLLRAAPQTEEEERLRRDMVLLSSLPGVGAKVFTSVVTRAALSLRQKDYHSLALLAGVLPVTRQSGGKKVVGMRYACDHALRDALFNGAWVASYRDPVWRSRYAQLRQRGKTHAHALRIIGAQLLRVAIALLKEGVPYDRSRLERRTDPKELKELDQWLVAEPMDLPATMEKEPVMVSGG

SEQ ID NO: 173481 - protein, 344 aa, unidentified
MRIAIGVDSHKETLTASAVDELGRQLDAREFQNDVAGHKLAFEWIGSLGLERVVGIECSGSYGAAFSWFLMARGEDVREVPPALSWRERKRRPSAGKSDPVDAVAIAQVTAREQHLPIPKREGLLVDIRLLNTHREQLIRTRTQLANRCHRDLLILKPGYQTFVKSLRSKKNVRQAMGLVDGDPGVRAELTRTRLETILGLDEQIYQVAKKIESKLEQTGTSLTEIKGVGPFVAATILGTVGDISRIRSKAAFASFAGTAPLPASSGMRHRHRMNRGGNRQLNRALHVIAKTQSRTVPEAKEYITRKMQEGRSYKEALRCLQRQLSNVIYRTLIEDARRTAAAA

SEQ ID NO: 173482 - protein, 368 aa, unidentified
MKKNTSKKQVVNKGKKETKEGLAFYIGIDLGDKNSDVCVLDPHGEVGGEFRLRMKEEAFREYFGSIPRSRVAVEAGGQSRWVAEVIEKCGHEVYVSNTRKVPYIHQSDAKDDPGDAYKLAELVHFKPRLLHPIQHRSREAQADLSWIRAREVLVESRTQLINAVRGLSKAFAGRLKKCATESFTAKLAGQVPEAIRGAVAPLLETIDHLNEQIRYYDQMEEQIARERYPKYRLLEQVNGVGVHTALSFMLTIGDPERFAKSREVGSFLGMRPKKQDSGETKPQLGITKAGDVYLRKTLVNCAHHILGPHGKDSDLRRFGLRLCERGGKNAKKRAVIAVARKLSVLLHCLWISGEVYEPLRNSKQAKAA

SEQ ID NO: 173483 - protein, 430 aa, unidentified
MKSNTQNAKIEAITEKTLVLGIDVGSETHYARAFDYRGIEYSKKPFKFSNTEAGFVTFKEWILDLKERHEKDKVVLGMEPTGHYWFNLGKFLQDNEMKPVLVNPHHVKKSKELDDNNPTKNDRKDPKVIAGLVREGRYMIPYLPDGIDADLRTASNIRFQLQAELTRIQNRISRWFNIYFPEYKTVYGKPDAKSGILILKAAPLPEDILTLGIDGVNQIWRDAKLRAVGKARAKTLIEAAEHSVGSKEGAVSARMEIRMLLEDYESRNTRLQEVMVLIEELVRKIPMAEKLLEIKGVGIRTVSGFLAEVGDISRFNNPKELQKLAGLALVENSSGKHKGETTISRRGRKRLRYLLFEVAMSLVAKNPEFRELHNYYTTRRLNPLKKMQSLMAIAAKLIRVFYAMLTKGVDYDPKKMVSDIKRPAVYLQAA

SEQ ID NO: 173484 - protein, 439 aa, unidentified
MKALPILDELATGIDVGSERVHISVGGCAPQVFGTMTGEVRKMVAWLREQGVRSAAMEATGVYWMCLYAALQAAGIQVLVVNGRHVRNLPGRKTDMADCQWLATLHAHGLLRSGFVPPEPIRQLQDYMRLREDHISLAASHVQHMQKALERMNIKIHDVISDLNGVSGMKIVRAIVAGERQPERLLQLCDVQIKKHKAERVVESLRGTWQTEHLFALRQALQAWDFYQAQILECDKQIEQVLQKIGGPPPEDAPKSGKKGGVNTPRIHGLHQMLVQLCAGKDPTVVPGMADYSLLRIVSEVGVDLSKWPSEKHFAAWTGLAPGTAQSGKRRKNQARQTNRVGQIFCALARSVGNSVDTAFGGFYRRLKARRGGLVANKALARKLAVMFWQMMVHGVEYVEHGLKKYQARAALSEQRVLQKLARKHGMELVPCPATSSMP

SEQ ID NO: 173485 - protein, 345 aa, unidentified
MTEAYDGRQVVGMDLHRRRSVLVRMTEDGRKLETARIENSPRALRAVMARAGVRPRVVVEATYGWYWAADVLAEAGAEVHLAHPLGVKAFSYRRVKNDERDCTDLADLLRAGLLPEAWIAPPEVRGLREVTRYRHKLVGQRTSCKDQVHAVLAKCGVAVRHSDIFGRGGSAWLDGLVLPAPYAGKVASLRALIGVLDGEIARLEQQAAGMLAGHAGYAALRQLPGIGPVLGAVIAAEIGDVTRFARPGQLCSWAGLTPRHRESDTRVTRGHVSKQGSRMLRWALTEAIQRQPAGSRPRQVQDSLVARRGAEARNIAKTAAARVMLTQVFYALRDGHIRRAASQAA

SEQ ID NO: 173486 - protein, 323 aa, unidentified
MSSVSPSTNIGIDVSKETLDIAVHESAVHWTSKHDFTEFSQLLKSLKALHPIRIIIEASGGLENLLASYLGAHNLPVIVVNPRQVRDFARATGKLAKTDRIDAFVLASFGATLKPAVRQLKSAETQELEALVARRTQLVNMLTAERVRLQQAQQQRRQSIVVDLKAHISWLEKRLDKCEGDLSQLLRSSPIWRATDERLQSVPGIGPVTALVLIAELPELGQLPDKQIVALCGLAPHARDSGKWHGKRTTRGGRARVRTALYMAALVATKHNLVIKTFYHRLLSAGKQKKLALTACMRKLLVILNAMFRNQTSWLSPQLVPGA

SEQ ID NO: 173487 - protein, 352 aa, unidentified
MTVTIVETRAETRAITGGVDTHAGVHVAAALDPIGGLLGVREFPATTAGYARLLDWLAGFGTVCLVGIEGTGSYGAGLARHMTTAGVRVVEVDRSDRQDRRRQGKSDPLDAVSAARAAQSGRARGAPKGRDGAVEAIRALMVARRSAAGERTRAINQARALVLTGPDDLRARFTRQSPAALVAGIARLRPRPGDVVGYAVRIALRELGRRAEFLDGQLECLDELIVPLVTARAPGLLALYGIGPHTAALLLIAAGDHPGRLRSEAAWAHLCAAAPIPASSGKVTRYRLNPGGDRQANHALWRIVFTRMGSDAATRAYVERRTKEGKSKAEIIRCLKRYVARQVYPHLRPAAS

SEQ ID NO: 173488 - protein, 321 aa, unidentified
MHKYNQIFGVDISKDVFDVMNSQGEHLQFENSSKGFNQLIKHLTKNDLIVMEATGYYHYCLAQYLYDLGYTVSVVNPLAVKRFIQMKLSKIKTDKSDALAICEYASSNEVPIFTSRDANQAECLQLMSLIEIYLKQSTALKNKLHGEKTLGIPSKTVYHSLNRSLKVIQKEIQLLENKLLELVKNHQQKQLTLLKSIPGMGTKTSIILIVLTDGFTKFDNAKQLCSYAGTTPTIRMSGTSVRGKSRISKMGNQKLRNLLFLCAFSACKYNKACRELYERIVAKGKSKKLALIAVINKLLKQAFAVAKSDLPYDENYVSNLS

SEQ ID NO: 173489 - protein, 396 aa, unidentified
MTTIGIDIGGRNHAVARCRTGETRADREILRVSQDRAGFRELDAWLDGQADPVTLVTMESSGHYWMPLASHLRRQGIPVALVDPLAAKYFAKSRLGRTKSDPADARSLAEMAMRDAPTVRDPFAGVGLRQAARFAMTLATEQARICQQLHRLVELGFPELLDVFEDPTCLTARAVLRLAPTAAIARCRRSRTLADANKGPGQRRLGDAKAQRLHDLAPDSVAVPELQDEVAFEVGLLLERYDLLQRQVEHAEARVATLLDGGLARRLQTIPGVGPATCAVLIAEIGDIARFETFDQLLAYAGVHPAERSSGRKGADPETAWRMSKAGNAHLRAAAYLIAVAGVTHNPVIAAHYRRKRDAGKSKMNALGHCMRKALSLVWGVWRNGTDFDPNWHKGA

SEQ ID NO: 173490 - protein, 410 aa, unidentified
MQRLFKVCAGIDVHKKELSVCLLKADPKGQVSQEIRTVGTMTRDLLELLDWLVAAGCESVAMESTGVYWKPVFNVLEGAMKVVLVNPQHVKALPGRKTDVQDCMWLAELHLHGLVRPSFIPTLEIRELRDLVRTRTRLIAERAQHVNRIQKVLEDANIKLSSVASDVLGVSGRAMLDHLVADDAAPEALAELARGRMRPKRSELQAALTGRVRPHHRLLLRTHLQMIDSLEAAIAGLTAEIEERMRPFAELRDTLDGVTGIGQEVATVYISEMGADMAAWPTSGPAASWAGFCPGHHQSAGKRKSGRPRPGNRWLKQAFIQAAWSAKRANGTYMQAHFRRVQTHRGPKKAAGAVAHSLFVRCFVLASRGGTYQDLGPTYFDERRKEVVTQKLVRRLENLGYDVSIAPKAA

SEQ ID NO: 173491 - protein, 346 aa, unidentified
MDKVIIDFSSVTTVGLDLAKHVFQVHCADASGRVVVTKAIRRGKLLEFFASLPTCVVGLEACGSAHHWARELIKLGHEARMMPPAYVKPYVRRQKNDAADAAAICEAATRPSMRFVSVRSLENQVALMRHKAREMLVSQRTQLLNSLRGHLTEIGVIAPQGPRHARELAALIEACDETIPFEVCEALAPLVVQLRNLDEAIARLERTIAKLARQDDTARRLMSIPGFGPITASAMAASVQDASSFAGPREFAAFLGLTPKQSSSGGKPRLGRISKMGNRELRKLLVVGAHAVLFHRRSHKDPLRMWAKKLIEKKPFKLVAVALANKMARIAFAILRGKTVYREIPA

SEQ ID NO: 173492 - protein, 462 aa, unidentified
MYRELQPFREALSHELKASLFPAAAGIDANKLLETYLDRLTMFTGVDVADQTFTSLALDAGREILGTIEGCPNEPAGFERFMAWARDLRDQHGLRIIAIAGETTGIYYWALWDFLGEQSDVARVLYNPRTTEHMGKVLSKKVRNELVDALLLAEQLRLGSTPEVLLQDDADLLTARYYSRAARDLAQQINRKKNQLRALLRAYCAPVCQVFPGQKLHHPAVYALLQEYLFPAEFIQAGAEALTTILTAHCRDIFGSPEVDQLLAASCQAITRQIGQDAIHSLVHAHIQDITTFQERKALYLKAGYALIKDRQETELLRTVKGAGVSNTLALVSEVGDVTRFSSGEHLASFLGLTTSKHISGATLFQSKRITKQGSPNGRYAAVNVAQHLTRWVPRYQEMYQRIKARKPPRKGHFIALVAVARDFVSNVLYDMWRNQRPFSWRSVIIVLIVRSIRAQTTKAWA

SEQ ID NO: 173493 - protein, 436 aa, unidentified
MRGCRCSMIMGFTKPIEHFNLKRKKVITMNTLYVGIDVSSKSNVIYLMLPNGDKHSNFSVANSHEGSTQLVKRILSALTSLSLDTVLIGLEATSVYGDNLVYFLREDATLAPFNRKIHILNPKQVKKFHDAYNDLPKNDYVDSFVIADCLRFGRINKEVYMGDYRYKALQNLTRARFFAVQNLIKEKQRFMNVLFKKYFTMTQEKVFSDTFSTTALAVYDEFESAEALANMDLHELTDFIMEKGKNRFPDPDAVAKAIQKAARSSYRLPKTVNDSVNQVLSISITSMKALESQIKEFDKAIKAQMELLPNVLISIPGIGPVYSAGIMAEIGDINRFNSQAALAKYAGLAWKQHQSGGFEAEVTRLIPSGNRFLKYYLCEAAFSLVRCDKEYSDFYHLKYKEVNRCQHKRALALTARKFVRLVFRLLKDNRLYCPAK

SEQ ID NO: 173494 - protein, 389 aa, unidentified
MLLDHLADGPAAIHTQFGAIFVSLELSRSNWLITSLSPGKGERMSKHGVPAGDVPALLKLFAEFKRKAEKRTGQSYPIITIQEAGLDGFWLHRALRQEGIESHVVDPASIATPRRRRRAKTDRLDGETLLRALLAYKRGEPRVCAMVVAPSPEEEDRRRLCRERRTLIDERIVHVNRIKGLLFAQGISDYAPLRRDRRARLEGMRTGEGRTLPSHLKMQISRELDRLELLLEQIKAVELEQDALLAAAPKPAGGSAAPDPVTMLLALKGMGPNFAAVLWSEAFYRQFANRRQLAAYAGLAPTPWRSGAIEREQGVSKAGNPRLRTSMIQLAWLWRRHQRQSALARWFEAHSKRGRKSAIVALARKLLVALWKYVASGVAIEGAVMKSVA

SEQ ID NO: 173495 - protein, 370 aa, unidentified
MGKSVLYVGLDVHKMSVDVAIAEAGPAGEVRFYGRIGGDLEALDKVTRKLQAQGAELRFAYEAGPCGYQVYRHLTARGLECLVAAPALIPRRPGDRLKNDRRDALALARLLRAGELTPIKVPDEDDEAMRDLTRAREDAICVERRARQRTVAFLLRHGRVYQGKTTWGRGHWAWLLQQVMDHPAQQIVLQEYLDAVREASARVLRLTGQIRDLVPQWRQAPFVAAYQALRGVSLIVAATVVAEVGDLDRFNNPKELMAYLGLVPSEHSSGASVRRGRITKTGNSHARRVLVEAAWAYRMQARVTRHLLKRQEGLPERVRQLAWKAQLRLCTRYRRLLARGKARQTIVIALARELAAFLWAIGRAVAQATA

SEQ ID NO: 173496 - protein, 317 aa, unidentified
MDSKTEPDRYVGIDVAKGHVTVHVRPDAIAFNCKTDGQGLADLLDRLRPLTPKLIVLEATGGYETVVAASLAEADLPVAVVNPRQTRKFAGALGRLAKSDTIDAADIAHFAEAIRPEPRPMPDEQTVQLRALLARRHQLVVMAGAEQQRHDRAETALARRSCAAMLRSLTAEITRIERAIDKLIIASPVFCAKQDLLKTIPGVGDVVARTFIAELPELGTVDRHKIAALVGLAPMNHDSGKMRGERHITGGRPQIRSPLFAACLSVIQHNPPLRGFYQRLLKAGKPKRLAIVAVMRKLVCIANAMLRNQQPWAHAQS

SEQ ID NO: 173497 - protein, 357 aa, unidentified
MSKNPHRTIHREARTVTGELPRIRQDGIATVDGTGGIMISSPRFVGIDVSKDTLDVAIRPDGTHRQVPNTDEGFDQLVALLRPLAPALVVLEATGGYQRRVVAALGLAGLPVAVVNPARPREFAKALGRLAKTDKVDAEILAEFAERMRPQTRPLPDTQVQQMQELLGRRGQLIGMRTAERNRLGSALSRAVRRSLEAHVEWLDEQIASTEKELDEAIEQSELWKANDELLQSIPGIGPGVARTLLFELPELGRLSREEVAALAGVAPMNRDSGRWVGKRFIAGGRVVVRNAVYMATLAARQFNPALKKFADRLAEAGKPAKVVLIAVARKLLVIANAILRDRKPWRDVTANSVALA

SEQ ID NO: 173498 - protein, 367 aa, unidentified
MTYTLKAAPAASAIELKSEKTAKAKRILLGVDVHLRGYQAARKVDNGVIGVVDTFRSEVELLLHVEKQRPRAEQVVVVYEAGPLGYTLYRKLKAAGVLCYVCAPDGAEQRRKRRKNNKIDARNLTSKLFNYLNGDKEALPLARVPTEAQEELRLTSRQHDQLVEERKCLGAQGNAVLLGQGFGSWSNWWRPKAWTQLSNLVPAWLLERLQIWVDVLKVLDEKIAQAKAAFARSCHGPRPKGVGALSQMQLQSEVLDWSLYSNRRKIACLAGMVPSEWSTGDKERRGSITKVGVPALRRIIVEMVWRIVLFQPQYKPVQKWQAVLRGSNPALKKKAVVAIGRQLMVDLWRLQTGRVTAQELNLVMVEA

SEQ ID NO: 173499 - protein, 355 aa, unidentified
MNQEKYIGMDVHAATISVAVKNAQGKLLMECVLETKAATILEFIQGLRGTLALTFEEGTLAAWLHDLLKPHVSRLVVCDPGKNALLRDGNQNDRVDARNLAELLRTNQVHAVYHGQPGICALRELGRSYSTLTQDSTRVMNRIKSGYRSWAIPGAGTSVYSRRHRAEWLAQLVEPGVRIRAEHLYQQLDSLEPVRQAARRELLRESRKHAAVKLLRQIPAIGPIRSALLVAILQTPHRFRTKRQLWAYSGFAVQTYDSGEFRVVRGKLQRNRERITVRGLNRNHNHDLKNLLKGAAISAIQRPGPLQDFYAARVEKGMRPSMARLTLARKIAAITLTIWKKGVSFDPKQLQRQTA

SEQ ID NO: 173500 - protein, 387 aa, unidentified
MPQPNDLSRSLVALDHNSTIVAVVELSQSSWLVGGVLPGIERQPRKKLEPSPERLLAVLHRWRDEAVRAGHTITRIAVAFEAGRDGFWLARWPEAHGVEAHVIHPSSVAVSREHRRAKTDRLDTELLKRGFSGWLRGERGHCSMVRVPTIAEEDAKRPNRERECLVGERTRINNRIKATLARLGIRNFKPTLRQAAERLATIHTPEGMPLPPNVLAELQRDLARLGLVIGQIREIENARQKRLEQQPETTPHAMVRLLARVVGIGIETGDLLVHEVLSRPMRERRAVARYAGLTGAPDESGARRREQGLARAGNARVRRGMIQLAWRFLRFQKQSALTLWYRARTADSRIGTRKTMIVALARKLVIALWRFVTTGEPLDGVVLRPAA

SEQ ID NO: 173501 - protein, 384 aa, unidentified
MGEVLLVQHIPHTIAGFRQLDEARRSRGVGRQEVIIGLETAHNLLVDYLWEQGYEQIYVLPPSVVKSAQRRFRQSGAKDDAWDAHLIADLLRTDHRRYTPWKPDQPLTRQIRAEVRFAQQLGRELVRDGNRLRSILLRHYPSALEAFPHLDSVVCLAFLQAYPTLWQAQALTFEQLKVFLRQHHHTQIRAWPKIYAGLHSEPPPSNPDLEAVYAPLALAQARILETLVRRRSECLTRLGKFYLHHPDREIYDSLPKAGALLAPALLAKLGDDRARYPNPAVLQAVAGTCPVTNRSGKHSRVYFRSACDHEFRHIAQQWARLSLDASPWAATYYRTVRPHCKTDSDAIRRLANRWLEILWRLWVNRKPYDETFHLKQHVLRMQVH

SEQ ID NO: 173502 - protein, 333 aa, unidentified
MKSGTVHIGVDVSKEKLDIYVPAKEEGSRPLTKEVDNNINGFRELRDLARKAKATVCVEPTGGYELELIAFMHRFDVPVAYTDALRVRQFARAEGNLAKNDRIDAALISRFADKIGVRLIEAQDAEAVELKRKAKFRQTIMDSRTAMANRLETEIDPEMRAMLRAQIKGLDRLIDKTGRLCLETVGKNERMNTLRERFTLVGGVGDLTAISILAGLPEIGTLSDEKLNRLVGISPEENQSGSKDRLRRIWGGRKNVRNALYMAAVASIKWNAILGGYYRKKRAEGHPHKWAIVPTMRKLLSLLNRIARDPGFTPMPEPESTKQNANVGRKKAA

SEQ ID NO: 173503 - protein, 360 aa, unidentified
MFSHRSAEAKCYKRYKNGQLYLEVDVHKKKISYCVKDVSGRIHAEGAIPATRTDLDLWMKTLPQPWTAAMEATIFTGWIYDYLLPHAAALKVAHPLMLRAIAAAKKKNDRIDASKIADCLRGDFLPECYMASTEIRERRRTLRYRNLLVRQSVQLKNKIAVLLMEAGVSYNKQKLHKVGYFRDLLKTNPDINESLRSLLQLCRQTLVRLQKIESAMIRSLERDRLLAERVDRLMTIPAVGPITALTWALEVGEVKHSSSIKKAISYCGLCSAEKSSADVIKRGPLSKQRNKHLQCMLIEAAKLAPRNSPALALVYDKERQKGNANRATLAVARKLVAYLVAVDRSQKDFLVIENQNRTAA

SEQ ID NO: 173504 - protein, 311 aa, unidentified
MTDHTIGVDISKSHLDVFHLDEQRAQRFGNTQAGLRAFQKWLGARPLARVVYEPTGPYHRLFEETLAGKLPLVKVNPLQARRFAEACGTRAKTDALDACGLARMGVALTLQPDVPISQNTRVLRDLQVARAALIKEQTRLRNCAHVHTNAVLKRQTKTRLTLVEKQIAELDTEIAKLIDADERSARQRDILRSIPGLGQVATAAILTFLPEIGTLDRRQVSSLAGLVPHSRESGQWKGRSFISGGRKPLRDALYMPALVAMRFNPDLKAKYSALREAGKPAKVAIVAIMRKLIETANALVKADRIWVKKTA

SEQ ID NO: 173505 - protein, 378 aa, unidentified
MRLRLRSASRRNPIQFPTNIGRPNPGDANKIQGCDYHPGFQQIAFVDSETGELQERRLEHPEEAEKFYRDLGAQGACVRVGMEASGHARWFERLLSELKFELWIGDAAEIRTKRVRKQKTDRQDAELILQLLVENRFPQIWVPSWENRDLRQLLWHRHRMVQARTRIMNQLQAVALNEGLLCKKRLWRETGRKQLESFPLAPWASRRRQDLLELLDRLTPTIAELTQAIEREVENSPEARRLQTHPGVGPLTALAFVLVIGKADRFQCGKQIASYLGLIPLEDSSGKRRRLGHITKQGNSLLRFLLVEAAQVTVRSDPEWRSKYFHLAMRRGRKIAKVAMARRLAVRMYWMMRKGWDYERLNKFGSHAGQPGHRHGVQ

SEQ ID NO: 173506 - protein, 429 aa, unidentified
MNFKPIAGIDIGKFFSEMAILSPSNEVIARMKIHHDSNLDVKKAIELLKKVEKDFNSRPFIVMESTGHYHKILFHSLCKSGFEVSIINPIQTDSIKNIGIRKVKNDKFDAHKIALLYRFSFIKTTVVPDDVIDCLKSLCRQYYKLGDELTTYKNRLIGIIDQVMLNFTDVFQNVYSNTALAVLDRYPSPKQILKANKQTLISLIEKTSKKGLAWSTEKYELLVLKAKEFKDLSINNPGNLAILKVNISMVRTLQDAQKDILDAINEIILADSLEDNPVLAPIINLLCSIPGIGILTAATMLAEVGDFSAFSSPNKLVAFFGIDPSVNQSGEFIGTRNKMSKRGSRLLRRVIFTTALANIRSKRNGDKTNPVLYEFYQKKCTNKPKKVALGAVMRKLVNIIFAVMRDKKPFELRTPEEHEELLLTRSSVA

SEQ ID NO: 173507 - protein, 403 aa, unidentified
MYYIGIDIAKRNHEASVIDSTGKPLSDSISFSNSKEGCNKLIALFEKLGVDVDNSIIGMEATGHYWLSLYSHLLEHGYDLKVINPIQSDAFRKMSIRKTKTDSKDSLNIAQIMRFGEYSSTRLSDENVQAMKLLTRYRFSVVAECASCKCKVIALLDQVFPEYERLFSDTFGRASKELLLNYQIPEDMLEISSAKLASLLTKASKGKFKKAKAEQIRDAAAGSFGVSFAKKAFSFQIRQLIEQINFIEKQLDELDKEISSLLAKTNSVITTITGVGAVLGAAIIGEIGDVTRFDSPRKLVAFAGLDASVSQSGEFTGTQGKLSKRGSPHLRRAIWMAASRACFCDPTLCDYYKSLRARGKHHLTAVSAVARKMCNIIFTILTENRPYESIPPKKTTTREVQSE

SEQ ID NO: 173508 - protein, 391 aa, unidentified
MIYAGIDVAKDKHDCFITNSVGEVLFKSFTIPNNREGFETLFQKIQSVSDDLTKVKVGLEATGHYSYNLLGFLLDKGLPTYVINPLHTNLYRKSLSLRKTKTDKVDAHTIASMIMSDVNLKSYSDTSYHNEELKSLTRYRFDKVQERAKLKTSVSRLICILFPELEKLVATIHMASVYALLSEFPSAHAVASAHLTRLTNLLSESSHGRYGKDTAVMFREAARNSIGSNMPAKSLELKHTIKLIQELTSEIDEIETEIKSIMDEVNSPILSIPGINYRMGAMIIAEIGDFSRFDSPDKILAYAGMSPSTYQSGQLDNCYSHMEKRGSRYLRYALYNATKYVCHWDPTFAEYLAKKRAEGKHYNVAISHAVKKLVRVIYHLEKTNQQYIKAA

SEQ ID NO: 173509 - protein, 412 aa, unidentified
MKDLLEISCGLDVHKEKIVACILTGPLGKPTRSEIREFSTLIPDMIALRNWIVSKNCHHVAMESTGIYWMPIYEILEDAFYGDITLLVVNARHMKNVPGKKTDMRDSEWISTLLRAGLLNGSFIPEKRIREFRDLNRYCKSVIRDITSQKNRIEKFLQSSGFRLSSFISDIFGASGRNIILHLIEHGQIDKTALDSCLKTKTRNRIDEILMSVNGTLSEHQKAFLRILMTHYDSLKKHLAEIETSLEEDMAPFTLQVEQLNSIYGISTTASCAIIAEIGIDMKPFKTAEHICSWAGLCPGNNESAGKRKSTSVTKGNPYIKSMLCEIAWVIAGKRNTYLSAWYWRIKQKKGAKKAIVALARKLLVIIYTMLKQGTLFDESCFETRRKHCEQKQLSRYIRELEKHGYHVEAQS

SEQ ID NO: 173510 - protein, 373 aa, unidentified
MKKDSSSEQSPKQVRKAHRQQGSLTVGIDLGDKQSCYCVLDGRGEVIQEGSIGTNKKALAKMFGSMGRSRIALEVGTHSPWVSRLLSALGHEVVVANPRQVKLISASSRKDDRVDAQTLARLARVDPQLLRPIQHRSARAQGDLMVIRVRSALVEARTGLINTARGLAKSLGERLPICGSDQMGVEQTESLPAELQQVLEPLLKEVVSLTEKIEEMDRKVEQIGRETYPETKLLQQVKGVGPLIALTFVLTLGDKARFQKSRDVGCYVGLRPRRGDSGESQPQLRITKEGDSYLRKMLVQGAHYILGYRGPDTDLRRWGLKLAARGGKRAKKAAVVTVARKLGVLLHRLWVTGEVYEPLRNAHTQQQVKKAAA

SEQ ID NO: 173511 - protein, 370 aa, unidentified
MSSITYIGLDVHTTNYTICSFNGYDGNYFGEVTVKPEYQQIEKYVKRLQKQYEPGHRFLCGYEAGYLGYSLFHELESVGIECVILAPSTMCDTKTNRQIKTDPRDARNIANCLAYGLYSAVHVPTEQDDAVKEYMRMRDSAGAEFKAIKQQILAFCVRHGKRYDGRSTWTKQHEDWLNKQDFGNPILQNAFWEYLRRYYHAQEMQEIYDTQIAEYAQMEEYRQKVNELRCLIGIETHTALALITEVSDFRRFGKADQFAAYLGLIPGEHSSAEKTKRLGITKTGNKHLRRLLVEAAQHYGRGAVGRKSVSLKKKQAGNRREVIAYADRCNTRLRRKFYRIASHSPRNVAKTAAARELACFVWGIMTEHIA

SEQ ID NO: 173512 - protein, 350 aa, unidentified
MYFAGIDAHLRYVAVAVLDRLGGLVLETTVPTRDPDRLLAELAAFRPLEVVVETCPFWPWLYDLLMPAGIGFHLAHAKQLRAIAAAPQKNDAVDARLLARMLLSGLIPEAYPRPADQRELLRLLRHRTTLVRYRTRLAGRIHSQLHQQRLALPREQLLRRATREWLATVAGPRLTDEQRAIVTTHLELIDRLTPLIRALERRIQTAAAGHPAAALLATIPGIGPYRSLLLAAELLPITRFPRVEHVASYAGLAPVTRSSGGHTHHGSIPKGANRWVRGALVSAIPSHVRAAPHSPVTRAYEQLSARLGWRVARVAAARKLLRIVYIMLRRGAPWRSAQPEGGDVRDEVHA

SEQ ID NO: 173513 - protein, 394 aa, unidentified
MFFIGIDVAKRSHQAAVTDISGNVIVKPFNFKNSSDGFTKFLSIVESNAIEKNDCTIGLESTGHYWYPLYFFLIENGFDVKVFNPIQTAAFREITIRKVKNDNLDSLLIADFTRFGRYSETYIPDENMLALKNLTRFRLSISDICGSLKKKVIAILDQVFPEYTGVFSDVFGKTSKQLLEQFSTPDEFMDISTTKLTNLLLKVSRGRNGREKAELIKTAAQSSIGISYALDAFSFELKQLLAQIEFMENQLSDVDAEMEKLLSQSEYAVITTISGIGPMLGSVIVSEIGDINRFETSSKLVAYAGLDASVKQSGEFNSSKNKISKRGSPYLRRALWMAAFMSLQCDPALYDYYSKLRARGKTHRCATTAVARKLCIIVWAIMKSKKPYSPVLKN

SEQ ID NO: 173514 - protein, 392 aa, unidentified
MVVSVGIDVSKDKHDCFIVSSDGEVLADVFTISNTLDGFHGLLQRIQECSAPQDKIRVGLEATGHYSYNLLGFLLDNGLATYVLNPLRTNLYRKSLSLRKTKTDRVDARTIASMLLSDAGLKPYTDTAYHNEELKSLTRYRFDKVKERAKLKSSIARLVCILFPELEKLVPSLHIASVYALLEEFPGAKQVAAAHLARLKALLETASNGHYKRDMALEIRDTAKNSIGSQMPAKSLELQHTIRLIRELNREIDEIEEQIQSIMDELHSPITTIPGLGFRMAAMILAEVGDFTRFDSPDKLLAYAGMSPSTYQSGQLKNCYPHMEKRGSRYLRYALYNATKYVCHWDPAFADYLAKKRAEGKHYNIAISHAAKKLIRLIFAMEKSRQPYCSAA

SEQ ID NO: 173515 - protein, 402 aa, unidentified
MNAVGIDVSKGKSMVAIMRPFGEIVSAPFEIKHTASDINSLVELINSVEGESRIVMEHTGRYYEVLAHQLSKANLFVSAINPKLIKDFDNDSLRKVKSDKADAIKIARYALDKWQNLKQYNVMDELRNQLKTMNRQFGFYMKHKTAMKNNLIGILDQTYPGVNTYFDSPARSDGSQKWVDFASTYWHVDCVRKMSLNAFIVHYQNWCKRKKYNFSQSKAEEIYGKAKELVPVLPKDAITKLIIKQAVYQLNSASTTVESLRTLMNETASKLPEYPVVMAMKGVGTSLGSQLMAEIGDVSRFTHKSAITAFAGVDPGVNESGSYEQKSVPTSKRGSSDLRKTLFQVMDVLIKTHPQDDPVYQFLDKKRAQGKPYYVYMTAGANKFLRIYYGRVKEYLSSLPES

SEQ ID NO: 173516 - protein, 424 aa, unidentified
MKTESADQIDFAAFVGLDWADQEHAVCLEASGSTTVETRVIKQTAQALGEWANELRVRFEGRKVAVCLEQSKGALIYALMSYDFLVLYPVNPQTLAKYRKAFRTSGAKDDPDDAGSLRELVKLHRDRLRAWVPDDVQTRTLQMLVESRRRIVRERTRLTNRLTSLLKAYYPQALEWAGELKSLRACDFLKKWPTLEAVKRAKASELKKFYRQHGSRNEEVIEERIKQIRASDPLTRDQAVIRSSAMVVEAIVSQLPCVIRAVEQFDQEIARVFQQHPDHELFNSFPGAGSALAPRLLAAMGSDRTRYESAKEVQQFSGIAPVTQRSGKSKCVHRRFACPKFVRQTFHEFAKHSIVWSKWAHAYYDQQRLRGKHHHAAIRALAYKWIRIIFRCWMDRTIYNEQAYVEALRRRGSRLIPSPASSDS

SEQ ID NO: 173517 - protein, 418 aa, unidentified
MKKIRYVGLDVHAETIAVAVAEGGRDGEVRSLGTIANRIEPVRKLVNKLREQGEIRVCYEAGPTGYCLYWQLTQLEVECEVIAPSLIPVKASERVKTDRRDAEKLARCYRAGELTAVAVPSPEQEALRDLVRAREAAKKDQLKARHRLGKFLLRHGRKPDGMKAWTKQYLEWIKTNVRFPIKALEVTLLNYLHEVEHVAARVVHLEAAIDEAVREAPAELRAVIEALQALRGVAQTTAATIVSELGLLQRFASPRQLMGYSGLVASEHSSGGKVQRGAITKSGNAHLRRVLVEASWSYHHRPNVTGLLLRRQKNLGLSDEVKAIAWKAQHRLNKRYKALSAKGKNKNQVVTALARELLGFIWAIAAKTETKTLAAGQGGMDQPHATPSSSVGPGPRLSRPSPAGALRAALTGSGPAGS

SEQ ID NO: 173518 - protein, 412 aa, unidentified
MLFVGDDWAEDHHDVEIVDEAGRLLARRRLPEGLQGVTRLHALIAEQMPDDWADLEPGAATGRVKVGIETDRGPWVGALVAAGYEVFGINPLSVARYRERHSTSGAKSDAADAHLLAEIVRLDRAHHRPVAADSAEAEAIKLTARTHQSLIWDRTRHVLRLRSTLREYFPVALQAFPDLDAPDALELLGRAPDPDQAARLSHTTITAALRKARRRHLEDRAHELQRLLRTQGLRQPPVLQDAYAAVVASEVAVIATLNMQIERLGAVVGEYFGRHRDAEIYTSLPGLGVILAARILGEFGDDPDRYADAKARKNYAGTSPITKASGTKKVVLARYARNRRLGDALQQWAFCSLRGSPGAAAYYQQLRARNVGHQAALRQLANRLVGILHGSLKTHTSYDENTASAHIQTSPA

SEQ ID NO: 173519 - protein, 393 aa, unidentified
MHKPKKQMKPLNDLSRSLTPFDPNQTLIAVIEMGKKSWLVAGIIPGVERQPLKKLAPDEDGLLKLFERWRAEAEKAGHKITRIAVAFETGRDGFWLGRWLRARGIEAHVIHAASVAVSREHRRAKTDRLDTEQLKRAFLGWLRGERDHCKMAAIPTFAEEDAKRPHRERETLVGEHTTIINRIKGTLARLGIRNLNPKLKKAPERLEHVRTPEGEPIPPNTLAELQRDLARKQLVAEQIHQIEKARLEQLKQAPKAGPNLMVLLLMRVIGIGIETADMLVKEILSRNMRDRRAVGRYGGLTGSPDESGTKRREKGLARAGNARVRKGMIQLAWRFLEFQKESALAKWFEARTKNNRGLRKKMIVALARKLLIALWHFVRDGVVPEGVVLRPAH

SEQ ID NO: 173520 - protein, 410 aa, unidentified
MQTMVERGCGLDVHQATVVACLLIVLKNGKVQKQVRTFGTTTRELGSLREWLLSEGCTHVAMESTGVYWKPIYAILEGAFEIVVANAQHVKKVPGRKTDVKDAEWIADLLCHGLLRSSFVPPKPIRELRDLTRYRRKLVDSQSAERNRLLKLLESANIKLASVASDVFGVSGLLMLQALVEGKATPHEMAELAKRQMRKKIPELELALEGRVEEHHRFLLRVQLRRLQAVEEDLGVLEHRIQEKLKPYAAELTLLDEIPGVDWKLAAGIIAEMGVDMSVFGNVSQLASWAGICPGNNESGGKRKSSRIPKGNVYLKTALVEAANAAAKAKGTYLRDKFYRLKARRGYKRAAVAVAHKILVAIYHMFSHQVCYNELGDLYLDKLNKHHLTRNLVHRLERLGYTVTLEQKAA

SEQ ID NO: 173521 - protein, 472 aa, unidentified
MVRSVGIDLHQGRHRAHCLDDGAQSCDSFSFQTTPEGLATLEERVFRDGANPIIVFEPAGLPWLMVAVYLRSRHPDCRLVKAKTQKVAALRRYLRGPVKSDRIDALTLAKMPFIDPEHLDEIYLPPAEIHALQRLTRQRKRLEDDVTGRKVRIGAIIDGYLPGVRRAFSNIWSSHARAFLRSRLNPFAVVRDGEEALHTFLNKATSRGKWSRAETLLVFLACQSVATVCELSRPAGTTSEEFFTDLQDEIARELRLMEMEEAESESLARRIAELYRKLHPADNLCTIPGVGEHTAPVFLAAVGDPARFRSQSAFANWEGVVPGARQSSNVEAKGLRMTKAGPSIMRMALYQSGDIGRRWDPQLAAVYYRDMVHHGKTHKQAMGAVMSHMGARVLTVLKENRPYEIRDTEGNPISKDDARKLILAKYQVPEEIRRERRRRNTKVGKNRETATHRTNEAAKAPQPVPVQAVSRK

SEQ ID NO: 173522 - protein, 371 aa, unidentified
MDESSKTLYVGLDVHKDSIAVAYAPEDRGAEVVSLGSIGTRQCDIDALIRKLQSKGATLVFVYEAGPCGYWLYRYLTRKGLSCHVVAPSLIPRKPGDRVKTDRRDAVMLARLMRSGDLTSIYVPGIEDEAIRDLSRGREDAMRDLKATKYRLKAFLLRQDIRYEGRANWNAAHLRWLAEVVCPTRAQQIVFQEYVRGVTEQHERLQRLEGELHAEVKGWRLYPVVEAIQALRGVELTGAVILMAELGDITRFDTPRQLMSYLGLTPSEYSSGERRRQGGITKAGNTHARRALVEGAWAYRYPAKVSRHLQLRLETLPAEVQAIGWKAQVRLCKRYRQLSARGKHVNQVVVAIAREMAAFAWAIARTVPLAL

SEQ ID NO: 173523 - protein, 479 aa, unidentified
MKTQSSLPPSPKQTDRKQRKGKRKGMCLEDRPLLEPNAAGIDIGAREIFVAVPPDRDENPVRTFPAFTEDLQQLAEWLVKSGITTAAMESTGVYWIPLYEILEQHGVKPCLADARHMRNVPGRRTDWHECQWIQYPHSVGLLRSAFRPDGDVCAVRALTRHRNDLVQLATQHIQHMHKSLTQMNLQIHHVISDLTGLTGMSIVDAMLAGERDARVLAKLRDPHVKASEETIRKSLVGNWRAEHLFTLKQSRDLYRVYQQQIVACEEEIERLLQQFESRVDPEEKPLPPDGKRKRNRKRNRRKNDAREAGFDLRTESYKLFGVDLTQIPGLETLPLPLFSEVGRDMRRWESSGHFASWLLLCPDNDISGGRVLWKGMRKGNNRAGQMFRLAANSLHHNDTPMGHYLRRMKAKLGPAGAITATARKIAIIFYTMVKNQVEYDATLWAQRDAQREKRFEEKLKRQAQQRGYKLVPIEEKPAA

SEQ ID NO: 173524 - protein, 400 aa, unidentified
MDKAHQFSGFLGIDVSKETFDASCINTEGERLFSLSTSMNREGFEDLIEELSSLSLPVESVLMGIESTACYHVNLYSFLVSLGYSVIGMNPLLISNFVKLQLRKTQTDKKDAYVIAQFLLLHRDSLSQTLISSDVSELRDLSRQRESLVEQMSSVKSEIKRLLSITFPELEQIAGVFTKSMLRLLCQYPSAASIQQARRSQITKILILGSYGKQMPASVERILKAAQGSVGTSSATKEIILRQKASLLMQLEEHLRELTEMLLELCLAKMRQDMDILTSMRGIGKKSATNFLIEMGGDIKQFQTHQKLIAMAGLDPALYQSGKIDRKGKISKRGNRHLRRVIWLMATKVIQFNERFKQYYLKRIKDGLPYKMAVLATAHKLIRVIFAMLKHKTLFDAKMN

SEQ ID NO: 173525 - protein, 450 aa, unidentified
MAKKRKKKTINKILHTLKPNAAGADIGATEIFIAVPEDRDPQPIRNFETFTEDLHAAAKWIKSCGVDTIAMESTGVYWIPVFQIFESYGLDVVLVNARHVKNVPGRKTDVQDCQWLQYLHSVGLLNGSYRPPQKVCAVRSLLRHRDGLVKTAASHIQHMQKALTQMNLQIHNVISDITGVTGLAILDAILSGERDPNKLASLKHKRIKAGKKTIIKSLEGDYLPEHVFTLKQSLQAYRHYHQLMAECDQEIEKHLNNIDSRIDVDENPLPPPTSSPRKGKGNEPDFDLRTQMYRILGTDLTQIDGISAVTAHVFFSEVGSNVDKFPKPGNFVSWLNLCPGNKISGGKVLSSRTLPGKNRLSQALKMSALSLWHSQSYLGNYYRRKRAKDGAPSAITDTAHKLARIIYHLIKTGKQFDESVFHDQEEAHQKRTLRSLQNKAKSMGYQIVPC

SEQ ID NO: 173526 - protein, 448 aa, unidentified
MSRKLKNIKKGDFIAMRVRYEDRQKRKQLAITDDTLIVGVDIAKSYQWARHVDFRGIEHDHALKFENRKDGFEAILTKIQSICKQEGFKKVVVGMEPTGHYWKAFANWLEKQTDITVVLVNPYATKQAKELDDNSQTKSDKKDALTIAKLVAQGRYFELYLPHDIYAELRGLSTTRTSLNKRKNAIKNTITAVLDEFFPEYVEVFKHPLKGKASRHVLKTCPFPKFIRELGENGVTEEIKKAVKKTVGRKKARQLVEAAQESIGVDYGEEAARLKLRLLINELELLEQQTEELERQMSYALGKTDYAEFLLTIKGIGIVTLAACLGELGDPTRFDNPRQMSRMAGYNLVEDSSGKNKSGTKISKRGRKNLRSVLYQMALTMVATNDEMKELYNYLKTREKDPLRKMQALIVVSKKILTIIHTLAKKKESYDPDKVFGHVRREQLKAAA

SEQ ID NO: 173527 - protein, 448 aa, unidentified
MARKRRTRKRTRFQAEMPVIHPHAAGIDIGATEVYVAVPPDRDPRPVRCFQTFTQDLYALADWLQACGIDTVAMESTGVYWVPLFQILEDRGIQVYLVNARHVKNVPGRKSDVSDCQWLQYLHAVGLLRGSFRPAQDVCALRSLLRHRESLVQMASQHVQHVHKALDQMNLQIHHILSDVTGMTGLAILDAILAGECDPHILARIRFGHLKADQATVAKALVGDYRLEHLFTLRQSLAAYRYIQQQISECDHEIQRYVARLEKEADSQFPSDSHPPAPQTTLDLSAELHRLFGTDLTKVPGLDLRVLQTLLGEVGPDFSKFPSGPAFACWLALCPHNDTSGGKVLRARTRRIKNRTALALRLAAQSLHHNQSHLGQYYRRLRARLGAPKAITATAHKLARIIYHLVTTGETYDESIFAKHEARYQQRLAARLRAQARTLGFQLVPLQA

SEQ ID NO: 173528 - protein, 349 aa, unidentified
MKIIGCDFHPIYQQIVMWDKATGEMLERALSHERKEEVRAFYAGLQGPVRVGIEASGQSQWFEQLLAELGPEVWIGDAAKIRASCERKQKTDRRDAELLVKLLEEERFPRIWVPTPAERDARQLLLHRHKLVRRRTQLKNQLQALALNQGVQRKRKLWSAAGRKPLEALPLLPWASRRRAELLVLLDQLEASIGELDGAAAEQANTRPAVRRLMTHPGVGPITALAFVLTMGPAQRFRRGKQVASYLGLIPTEHSSGGRGQRLGHISKQGNPFLRGLLVEAAQSAVRHEPEMRRAYQRLAQRKCRALAKVAMARKLAVRLYWMLRTEVDYAQLIQGSQAGQLESFRGRV

SEQ ID NO: 173529 - protein, 376 aa, unidentified
MIRWQDTLIKERGSMKQTLATIPVCSPSTTPREVIGIDLGDRWSRYCVLDQAGTVIEEDRVRTTPEALTARFGQEAATRIVIEVGAHSPWVSRLLQGQGHDVVVANPRKVRLIYESDRKNDRLDARMLARLGRVDVSLLSPVRHRSREVQADLALVRSRDALVAARTQLINSVRGMVKSMGGRLPRSTTAAFAGKVDLLIPAELKPALRPLVRCIQTLTEQIGGCDERVEQLADKKYPETRLLRQVKGVGPLIALTYVLTVEDPNRFQRSRQMGSFLGLRPRQCESGNSAPQLGISKCGNNHLRWLLVQAAHYILSRLAPDSRLRRWGLQLAARGGKNGKRRAVVAVARKLAVLLHRLWVTGEVYEPLYGLATEAV

SEQ ID NO: 173530 - protein, 333 aa, unidentified
MNQSAYVGIDVSKRQLDVAIRPTGKVFGVTNDRRGISQLVKRLTKLQPVCIAIEATGGLERELAYALAAKNLPIAVVNPRQVSNFAKSLGRRAKTDAIDAAVLAHFGEVMKPEIRSLPDAAAQELTAFVTRHRQLVEMMTAESNRSEMASNPVRKLINSLLRSLKDQLLLVDREIRKAISASDLWRHKAELLRSVPGVGEVTTATLLAGLPELGELDRRQIAALVGVAPFNRESGIWKGKRMIAGGRALIRSALYMSTVVAVRRNPMLKNFYERLRAKGKPAKQALTACMRKLLVVLNAMLRHQTPWSGPSHLCKRRRENPSVEGGWIERSPE

SEQ ID NO: 173531 - protein, 343 aa, unidentified
MQVVRIGLDLAKYVFAVHGVDERGKIALRKTLRRDSVVRFFANLPPCMVGMEASNGAHYWARVLTDLGHQVRLISPHFVTPYVKSNKNDRNDAEAICEAISRPSMRFVPPKSTEQLAVQAIHRICRRLVSDRVKLVNQVRGLLAEHGIVIPRDITQLRRGLAELIARCDDDLSELVRSLMTELREELAELDRRITSYDRRIREIFRNSEPCQRLGKIEGIGPITATALIAAVGDRTCFKNGRQFAAWLGLVPKQRSSGGRARLVGISKRGDRYLRTLMIHGARAALARAGGKQDPRSLWLGKLRNRRHPNVAAVALANKNARIVWAMLAGNAAYQPELSMKTA

SEQ ID NO: 173532 - protein, 450 aa, unidentified
MIAKLESVSDHPQAQRTRLIHPQCWFGPAPKFCSEERMTTTSSPTRFVALDIHRKYLVVGAVDQEQQIVLTPRRFGFEAFSAWATTHLGPCDAVVLEATSNAWLLYDQLEPLVGSVTVAHPLAVKLIAAARVKTDSRDTIKLAHLLAANLVPAVWVPPVHVRELRALVTHRKRLVNQRTQVRNRLHAVLHRHNLTVPPGKPFAAHQQEWWLSLDLSSSEKLRVQQDLSLLRALEELVAAVEAELGRLSTGEPWVKQVPFLVQLPGLGVLSVMSILAAIGDIGRFPSAKKLVGYAGLGASVHDSGETHQGGHITKEGRRDLRGVMVEAAWVAVEHHPHWKAQFERLTRRIGKQKAIVAIARKLLVAVWHVLTEQEADCHADAQAIARKLMNWIAHHGLTPGQHRDRLLLLYQQLDQLGLSEELEEIDYYGTTYRLSVRQRLLREAQRRQSS

SEQ ID NO: 173533 - protein, 344 aa, unidentified
MNEVITIGVDIAKSVFQIHAVNDAGEPVIRRQLRRRQVLPFFERLPPCLVGMEACATSHHWAREIMKHGHEVRLMPPRYVKPYVKRNKNDAADAEAICEAVTRPTMRFVPVKTPEQQSVLMLHRTRQLFIRQRTSLINAIRAHMAEFGIVAGVGRNGVEALLKRITEGGDDRIPATARECLKALAAQLGLIKRQIVEADRRVLAWHRRSETSKRLEAIPGVGPLIASALVASVPDPTVFRSGRDLSAWIGLVPKQHSTGGKERLGGISKAGNRYLRQLLVVGALSVIRRAKQLGTTRHPWLVGLLERRSTKIAAVALANKIARIAWAMMARNESYQPSRLSPAT

SEQ ID NO: 173534 - protein, 412 aa, unidentified
MNIRVEKACGIDIHQAFLMATVLDLAGTKDTRRFSTCIEDLLNLREWLLDSKCQRVAIESTGIYWIPTYTLLEGKVETIVANPLQIKNIPGRKNDILDSEWIAEICLNGQIKPSYIPPKEIREIRELTRSHVKLTQARTAFKNRAHKVLSRAGIHISGVLTDIFGKSGQIILNGILNGKTIDQTFVEIKNKRIKIKKTEIKESLKGELSQNDIFVIKECLESIKFFDKKIKEFDSKINQNLKGMSKEMKILMSIPGVGFTTAAAIMAEIGNIGVFSKPKKLVGWSGLAPSINESAGKSSNGHITKKGNKFLRTILVLAANSIAIGRPNKLRFFYQRIKGKKGHKKAIVALARKLVSIIHHLLTFKEVYSEEEGKQKQFKLPKFIPVKDFSIDDMIGILCEAGYSVNKTAANS

SEQ ID NO: 173535 - protein, 354 aa, unidentified
MSKVKELDFTGKVIYCGLDVHKTNWKVNARMEGVEIAAFSQNPDNVSLKKHFEKNYPGAALKVAYEAGFCGFEIQRSLKSSGIECIVVNAADIPSSDKDRKRKDDKRDARKLSIELSKGNLESIYIPDKEMQAARTLVRQRYRLVQDQTRCKNRIKHLLMSNGISIADANQHWSLKSISKIQQSKFESSLLKASVDFAIEQYLQIRRILKEITMAIRNISKEEPFLKVQKFLQSVGGIGMITGMVIQTEIGDINRFKRFDSLCDYVGFVPDIYSSNDKTIVRGMSQRGNLFLKETIIESSWVLIRKDPTMLMKYNEYRSRMSANKAIIRIAKHLLSRIRFLWKNEQLYVKGLVK

SEQ ID NO: 173536 - protein, 377 aa, unidentified
MAQFPVSTSNEQSIHAALELSKNSWLLAIQVPGRDNPSLYPIRGGHAEGLMAKLDAARDRVAQLTGQTPKVTLCYEAGYDGFWLSRFLEQRGIECRVMEPASLQVNRRARRVKTDRIDVENILHTLIAWCRGERHVCSMVVIPSVEEEDLRRTHRERGRLVRERTAHINRIKGLLFAQGIRGINVMKDYKTLAPAELVTGDGWPLPKRLGREITREIERLALVQEQLVETERERDQAPTPCAATERKRHDLLRLNGIGPTFAAILAREVYYRRFANRRQVASYIGLAPSPYDSGDGRRSQGISKAGNSLVRYTLIQAAWLWLRHQPNSALTQWFHRRTEGQSKRVRCIMIVALARKLAIALWRYVELGLIPEGAVVK

SEQ ID NO: 173537 - protein, 376 aa, unidentified
MNNVRFIGLDVHAETIAVAVAEPDGDVRSVGVIPNRPESIRKLMKKLGPAEQLRVCYEAGPTGYVVYWELTALGVTCEVVAPTLVPVKAGDRVKTDRRDALKLARSYRAGDLTAVWVPDAAHEALRDLVRAREAAKKDQLRARHSLGKLLLRHGRRPPTPMKPWTQTSLAWVKTVHFEHAAQEATLVDYLHEVEHMADRITRLERAIDDAVKTAPERMRAVIEALQALRGIAQVSAVTVVAEVGELTRFAKPRQLMGYSGAVASEDSSGDRIRRGAITKTGNAHLRRVVIEAAWAYRYRPAVGPALRKRQASVSQEVKAIAWKAQHRLHARYRHLTAQGKCKQETVTAVGRELLGFIWAIGVQVEAHGRNPQSAAA

SEQ ID NO: 173538 - protein, 400 aa, unidentified
MLSIGIDVSKGKSTVCGMKPGGEIVYTPFEIQHTREGMSELVSLLHNSCEEVRVVLESTGSYHCPVVAALLENGIFVSVVNSLRMKRFCSQSIRKVKTDRIDAMQIALYGLAYWQELQPTRLPEDTYRELQLLARQYYQMTSMLIKAKVDFNALCDQVLPGMQELMSDHAGRHKLSDFVLRYRHTAHILEMGETRFRKDYCKWAEKKGYRNRERMAALIFATAQNGIPVLPNAPSTQIVITEAIRVLHTVEASRDAILTQMQALAKTLPEYSLVREMPCIGDTLAPRLIAEIGDVRRFHSKRALIAYAGIDAPPYQSGKFRANNRHISKRGNRYLRKTGYEVMQSYVMHKPANDPIFTFIEKKRGEGKSGKLAMVAGLNKFLRVYYGKVTELYRSLPAIE

SEQ ID NO: 173539 - protein, 391 aa, unidentified
MSMYFVGIDISKYKHDCCIISAVDQQIVSKFTITNDKDGFEQLLISLNSLSNPEDIKIGFESTAHYALNLELFLENANHSFMEINPVLIKDFKKSQTLRRTKTDSIDCELIARWLMTVEYKPHSKGFYHAYSLKSLTRLRDRLIRQRSFYLVKITNVLDHTFPEFKPFFNERLSKTAIYLLENYGSAEKMAHMNSASYDKLRCISRGKFSIQQFLHLKELAANTVGVNNSIFDIELNSLLTLYNSLCKEIKNLEAEITRLIEEVHPHYMSIPGIGPISAAVIYAEYGDISNFSNPSQMLAFAGIEPGINDSGTESHGGRMVKHGSSQLRYVLLNACLPLIRFDLTFATYYAKKRAEGKKHRVAITHVAKKLIRVIYALERQDVDFNAQKIR

SEQ ID NO: 173540 - protein, 352 aa, unidentified
MDRYIGIDAHSASSTIAVVDGAGKRVRSYVVETNGQALIECMKTIPGKRHVCVEEGTQSSWLYEILTPHTEEVVVMAVSESRGQKDDERDAFGLAEKLRAGAIETRVYKDLGRYRALRELGRAHSMIVQDVVRVQNRLKSLYRSRGVPVTGKAVYSVKTREEWLAKLPDGTRAAASTLYAQYDAVSQVRDRAEKELVAEARRHPITRVLETCPGLGPIRAAQLVPVVVTPHRFRTKRQFWSYCGLGIVMRSSSDWVRDKAGGQWQRKEVKQTRGLNFNHNHMLKWIFKGAATTVIMQHPDDPLHGDYERLIAAGTKPNLAKVTLARKLAATALAMWKAEEEYDPAKHRKQIS

SEQ ID NO: 173541 - protein, 363 aa, unidentified
MTVYIGVDFHPYEQSVAYASDEEGEIGYRRFLHSDKQSIRAFYRKCGADAVIGVEATGCLWWFEKMLAEGGHKLKIGDPRMIRRAALSRHKNDFRDAETILDLLMRGAFPSIVPRSEESREVLDLLHYRQTLVQKRTSIANQLQAFARGKGLARFRMPAVKGRRKLVAAPVTEIETLLVRSRLVLFDELTAQMKALESRLEQLAAEDERARLLTTHPGIGVINALALVHTLGEVRRFRRKEEVVAFVGLDPLEKSSGQTKRIGQISKHGSRLARHLLGQAAQACRDQRIRKFYLEVSRRRGRPKAKVAAARKLLINCYVMLCDGIGYEEFQRRGEVGLCEGSGEVRAKASVSGGLRARPAISR

SEQ ID NO: 173542 - protein, 360 aa, unidentified
MAKARSLVGLDVHATKIVAAVLDAESGQLQTFAMGGESAGAAAFCAGLPRPVRVTYEAGPTGYGLARELTRRRLECVVAAPSKIPRAAGDRVKTDRRDAELLARLLMAGKLHAVRVPGDEEEALRDLVRAREAVRVDLMRCRHRLSKLLLRHDIRFDDGAAWTHRHRDWLATITLPWPAAQATLLDARGAIDALAHRRDGLEREILSMLPASPWAVQISRLRCLRGIDTLSAVGLCAEIGDFERFARAEQLMSYVGLVPCESTTGQQRRLGSITKTGSGHARRLLVEAAWHYRARPNIGRGLSDRQQLQPPEAIAVAWSAQRRLHRTWTRLEARAKRRTIIAVAAARELTGFCWAITQIQ

SEQ ID NO: 173543 - protein, 441 aa, unidentified
MSESIPEFAAFVAIDWADKKHVWALRVAGSGPVEKGELDNTPEAVESWAAQLALRFSGRAVAVALEQRRGALVAMLSKYAHVVLYPIHPNTQANYRKAFYPSGAKSDPTDAALLLELLVKHRDRLRPLEPESEETRKLQFLVEERRKLVDQKTAFSNQLTGWAKQVFPQLLVWFEDISSVLVCELLQKWPTLAQLKKVRPATLEKFFREHNCRPLERIQQTVQAIQQAVVATTDPALLEVAQLAMLSLVGLITELRHSLSVYDKRLATISQAHPDFAIFDSFPAAGPVMLPRLIAAFGTDRQRYPTAVHLQCHSGIAPVTESSGQQQWVHWRWACPKFVRQSFQEWSHLTIRFCGWAKEFYDRKRQAGLGHHAAVRALAFKWQRILFRCWMDRQPYLESSYLEALAKSSRRQAAPSAGSAQRPKIVMKSCGSFTKLEGLTS

SEQ ID NO: 173544 - protein, 440 aa, unidentified
MSYKIAGIDVHKKVLMVVVIDASTPEEKPDRRRFATMPSDLQGLSTWLRAQGVEEAVMESTAQYWRSVWLELEPYMRLQLAQAFSNRAPRGRKHDFKDAERLVRRLIANELILSFVPDGEQRTWRSMTRMKVQLARDRVRLQSQMECLLEEMRIKLSIVVSDLLGASGLRILHALAEGETDPKQLALLGDDRLKCSEEQLVDALTGRAQPMHRQMLALQLERLQLIDGQIAKLNGLIAQAMKPHQDALVRLAEVPGLGVDSAQQVIAEVGVKASTFPSAGDFASWVGTCPGKDESAEENHSSRSAKGNKYLRRVLNQAAHAAVKKNGSHFQAVFRRLLPRLGSTTSSCFPATGPATASTSSTTAVYREPRIFGLCRSREIANPSRSCPARRTRSAPNPSFLRTGDGWRTGRMNPDRAKPMSLPSRAVPANGRSRRTGNTA

SEQ ID NO: 173545 - protein, 394 aa, unidentified
MVYAGIDIAKHDHMIIAVDEKGDKLTRPTSFKNSASGFEECSVFLEELGELGDSEDMVIGMEATGHYWLACYTYLTNKGYKVFVINPMQTKAMRKLKGKSRVKTDMIDAYIIAETLRFEDYELTRLASNEIQELKYLTRFQQSLKEEVATLKTQVICCLDQVFPEFEAQFSNTFGESAKAFLERCPTPDECIATDTHALARVLEKTSRGRFGHDKAKALKEVARSSVGIKLGANAISFQIKLCISQIEFIEEQIDEVDRHIKELLDALEPLILTLPGISYTLGAQIVSEIGDINRFTDAPSLVSYAGINPSISQSGKFEGDDNKITKQGSSYLRRALWLAADGARKFDPKLRDYYEQKRAEGKPHRVAVTAVARKLTHVIYAVLKNQQPYDPNK

SEQ ID NO: 173546 - protein, 425 aa, unidentified
MNYKQNEKINQVKESTLVVGIDIGSTTQYARAFDWRGIELGKVFTFSNSREGFEAFKAWMQRLQDKYRKSDVIVGIEPTGHYWFDLGAYREDEGILLVMVNPYAVKQTKELDDNSQSKNDRKDPKVIAKLVTEGRYSAPYTPDGVYADLRIMVTNRKRLIREMTQIKNRFARWFAIYFPEYTDVFGDYEAQSSMLLLKKVCTPEAIVELGAEKINQIWRDAKLRAVGMKRATTLCETAKRSIGLKKGSSAAQYEMKLLLEDYEYKKAQLDAVIEEIEKLCRKIPESEQMLAIKGIGVITVAGFLAEVGDVRRFESPRQIQKLAGLSLRENSSGKHKGQTTISKRGRSKLRAVLFNAAIPLIATNPEFKSLHEYYTTRANNPLKKKQSVIAISCKLIRVFYAILANGVTYDAQKMLSDIHRQPQAA

SEQ ID NO: 173547 - protein, 409 aa, unidentified
MLKIVYPICCGIDVHKTFVIAVIAITNSQGITQYQKRRFSTFTNSLNDLKKWLEAYSCFHVCMESTGKYWIPLYNVLEDEMNICLAHPKYVKAIRGKKTDKKDAQWSADLYKHDLVAGSFIPPAKIRQLRDLFRYHMKLTYMQTSEKNRYQNSLTWSNIQIASVVSDVFGKSSQKIIQHLLNHPDEEIDLPTLIDRRMKAPIEQIETAIEGEISDEQAEKLRVIKAHYDAITFCKNDLQKLISELGEAFEHERQLIQTVPGFQNEFTALRVISEIGVDMSKFPTAGHLSSWAGVCPTCNESANKKHSTKISKGGHYLKPLLVQVANAVVRSDKYPEFKNKYLQLKKRRDHKKAIIAICRKLLVAIYHVLKNDEVYNAELYHYQEYVSPKKTLTVKQAVKLVINHGYQVV

SEQ ID NO: 173548 - protein, 340 aa, unidentified
MSKRSNPEQTSVFCGIDVSAATLAVAVQQQDQPAEQREFANSTSGHKALIVWLGKRKTKVRVSLEATGIYSLDLALALDGAQNIEVAVLNPKLVNRFAQTLQRSKTDRADAHMLAEYSRRMPFTAWRAPAREGLGVRTLVRHIDSLTVQHTREKNRLHAAQGSGATSRCVVEDLKRSLAALQRRIARLRREAKALVQANETMRQNFALLISMPGIAEISALQLMGELTLLSPEMSVRQWVAHSGLDPAHKVSGSSIHLPSRISRAGNRHLRRALYMPALVAVRRDPHLKAFYQTLLARHKAKLQALIAVARKMLHAIYGIFHSRTPYDGRKLFPDLLLPE

SEQ ID NO: 173549 - protein, 401 aa, unidentified
MVSDFMKGRYNLMKIFVGIDIAKLNHFAAAISSDGEILIEPFKFTNDADGFQLLVSKLESFDKNSIIIGLESTAHYGDNLVRYLVAEFYQVCVLNPIKTCQMRKNNVRKTKTDKVDTFVIAKTLMMQDDLRFVSFYDLDMMDLKALGRFRQKTIKQRTRLKIQLTTYVDQVFPEIQYFFKSGLHQHAVYALLKEAPSPKEIASMHMTHLANLLKVNSHGHFTKEQAKELRVLAQKSVGANDSSISIQITQTIQQIELLDSQLEKIEAEMTDIMRFNDSVIMTIPGIGYINGGMILGEIGDIHRFSNPNKLLAFAGLDPSVYQSGNFQAKTTRMSKRGSRVLRYALVNAAWNVVRNNATFKAYYDAKRAEGRSHYNALGHCAGKLVRVIWKMLTDEVEFNLE

SEQ ID NO: 173550 - protein, 349 aa, unidentified
MKNAITIGVDLGDKSHIAVVFDAHGNELEVAKVSNTRMGIAKFFKRYPDSTVAIEAGTHSPWISRELEQLGCKVYVGNPRKLRFIWDSNDKSDERDARMLGMVCRFDPKLLWPLRHRSSQAHADLARVKSRDILVHSRTQLINHARAMVKTAGERLPSCISVSFAKRCAGHVPEPLWPALEAIFKAIDHINEQIRDLDKKIDQLCQEQYPETQRLQQVPGVGPITALSFILSIEDPKRFTKSRQLGPFLGLTPRRDQSGKTDKQLHITKAGNRYLRRLLVGSSQYILGPFGPDSALRRHGLSIAARGGKNGKRRATVAVARKLAVLLHRLWVSEKDYEPFSNKGYKKAA

SEQ ID NO: 173551 - protein, 424 aa, unidentified
MDVMFERVAGLDVHKAMVVATVRVATGGKVERECRTFETTTTGLEDLLAWLTRAGCTYVAMEATGVYWKPVWSILSDGDFDLVLANAAHIKNVPGRKTDVNDATWIADLLAFGLIKASFVPDEDIQELRSLQRARKQLVREQTRHTQRIQKTLEEGNIKLDTVISDIMGVSGRKMIEAIIEGVRNPHTLAAMADRRIKATPKELYDALHGRLTDHHRFMLKLYLKQFDALQASIVEIDQAVAAAIARMDEEAQAAGRSTFQSLILLLTGIPGISAQSAVTILSEIGTDMSRFPTSGHFLAWAGLCPGQNESAGKKKSSRLRKGAPWLKTAMVQAAWSAVRKKDSYYRAQFHRLKARGGSKKAICAVAASMLNAVYHMLKDGVAHQDLGAHHFDKRSTELKAKRLLAQLANLGFQVALQPIEKAA

SEQ ID NO: 173552 - protein, 308 aa, unidentified
MTTIHTGLDIAKLNLQLHLAGRLHDLPNTPAGHRQLLKLLAAHPGTHVVCEATGGYERDVVAALHQAGVPVSVLNPARVRHFARAQGQRAKTDPIAAALLSAYGRALQPKPTPPRSPQEQQLAELIRRRLQVLEILVAQRQQSQRLTLPALRRQAQRLIRRLECDLAQIEAQLTELRVQSAALDDRVQKLETISGVGTLTALGVLAELPELGTLNRRQAAALAGLAPHPRQSGLWQGRRSIGGGRAQVRRALYMAALVAAHRNAHLKVFYQRLRAVGKPAKVALAAVMRKLIVLMNHLLKNPILEPPN

SEQ ID NO: 173553 - protein, 416 aa, unidentified
MDVVVARVAGLDVHKDTVVAAVRVPGPKGVRTELVKEFSTFTGDLLRLREWLTECAVTEVTMEATGVYWRPVWHVLEDEGSFELRLVNARHVKNLPGRKTDVSDACWIAQLAECGLLRGSFVPPKLIAELRDLTRYRKKLVEEHTREVQRLQKVLEDACVKLDSVVTDVTGKAARNMIEALIAGERDPVLLAEMALTRTRPKIPELRRALVGRFNEHHAFLARMHLDRMDSLDEAVAKLDAEVDRVIAPFSDALVRLQTIPGVGQRTAEVVVAECGIDMSRFPTAAHLASWAGLCPGNDESAGKRRSGRARKGNAALRAALCEAAWVGVSTRDTYINAQFRRFRRRFGAKSEGKALFAVAHTLVVIIWNVLATDGATYVDLGPDWFQQRDDTQAHVRRLVRQLERLGLSVNVKPAA

SEQ ID NO: 173554 - protein, 408 aa, unidentified
MVSAEGSGQLAKNPHVQRDTKEVLAELVGKLKEKLDRKKVAARSAGEEHPGGELRPNLDRLTVGVDLGDQGSHYCILGLEGETLAEGQLRTTQEDLATFFQGLNAARVVVEVGTHSAWVQEVISGCGHEVLVANPRLMDGSKRRKRKNDRIDAHKLARLGRVDPESLHPIQHRSREVRRDLVMLRARDALVAARTELINTSRGLVKSMGTRLPKCSSRSFAQKGEETVPVEIREALLPLVRLAAALSADIKEYDKKIETLGREKYGHTALLRQVKGVGPITALAYVLTLENAQRFVKSRDVGPYLGLVPKQEDSGESQPQLGISKAGDTMVRKLLVGSAQYILGPFGPDTDLRRYGLRLCERGGKNAKKRAAVAVARKLAVLLHRLWVSGEVYEPLHYAMSAPIAAAA

SEQ ID NO: 173555 - protein, 411 aa, unidentified
MTKEDFIYVGIDLHKETHTAVMIDCYNNKLGEITFPNRPADFPKLVTKVKKCNTDAKEVVYGLENAYGYGRPLAVWLIDKGYFVKDVNTAISHRQAKHRGAMYRKSDSDDAEAIALATLNMLDKLPDACPNDAYWSLGQLVHRRDNIMKQRTRLVNQLHEQLCIAYPSYKSFFNDISRPTALYFWEHYPSKKYLKGKSVEDLRAELVPVSHNKCSTKTCEKILDAVASDKVKNNAYQDARDMVTLSIVSDLQHYGSQLTEVDKMLEQMYKMLGCTLTTIPGVNVITAVKILAEIGDIKRFANANKLAQFAGIAPLHLSSSGKGKDLATKQGNRRLQATIYFLAIQMVQISSKGTPRNPVVRAYYEKRKAEGKTSQQALICISRRLISIIYGMLKSGTEYRMPVMENTGETV

SEQ ID NO: 173556 - protein, 338 aa, unidentified
MIVIGVDVHKHSLTAVAVDKTGRPLAERTLRGAEDGLLAWAAALDSERLWAVEDCRHVTGALERELVAAGERLLRVPPKLTAPERRAGRVRGKSDSIDALAAARASLREPRLDRPRAGEERLRELKLLVVHRDDLVDERRRAQQRLRWHLHELDSTLAVPPAALDRAAQLERVSRWLRRREQTVLVRISRDLVGRCRSLTCAILELERELAAMTAQIAPALLELPGCGALTAAKLLAEIGPIERFQTDAQLARHGGVAPLEASSGRVRRHRLDRGGNRQLNCALHRIAVTQARVHPAARVYLERKQTEGKSRREAIRCLKRQLARVVFNTLKASPVLT

SEQ ID NO: 173557 - protein, 384 aa, unidentified
MNPDRTDAPAAGEYGTVFVAFELSKSKWKLGVIMPGLQTMSQYTVAGGDLAGLAQLFAAVRAKAERGGKPVRIMSCYEAGFDGHWLHRWLTDRGVINHEIDPSSIAVNRRARRAKTDRIDLDLLMRAFLAHLRGEPRACSVVHVPSAADEDRKRRTRERERLIKERTAHTNRIKGLLHAQGIRDAMPLKPGFLGELDRLCTGDGRPLPARLKDEICREHERLSLICRQIKAIEAEHQAAHRAPAPGSVEAKIVQLAELKGIGPVFAQVLGNEVFYRRFANRRQLGSYLGLTGTPFDSGDSRREQGISKAGNSRARATAIELAWLWLRHQPDSALSRWFRERVGELKGRMRRIAIVALARKLTVALWRYLETGLIPTGAVLRPSF

SEQ ID NO: 173558 - protein, 407 aa, unidentified
MISVGIDISKEKITVCALEEGSKIIWKPFDVYLNKSKVEELLKKLEKIKEEIKITMEATGKYHLPILYELKERDYFVAVINPLKMKQYCRALNFRKAKNDKIDAKQIAEYGLMYWKELEEYKVDEENYRVLKELNRSYQHYMELRINQINYIEQTVHQIFPGIKKLIPHNTGDFSKDKLLDFLEKWWHKDLVLEKTEEEFVEEYKTWAKEKRYHPNANKAKAIYKLAEDSISTQPSHNSKIETNIREGINLIKQINQILNNILSQMIEISEPLEEYQEAKKFSGISEKLAVQIVAEFGDLTKFKNKKSLISFIGIDSPPYESGNFKADQRKISKRGNAILRKVGYQAMKCMMSAKNPENEIYNYMIKKEKEGKAKKVCKFAGLNKFLRIYYARVMEAKAEKKGLKAA

SEQ ID NO: 173559 - protein, 361 aa, unidentified
MAKAMTLVGLDVHARQTHAAILHLDSGELAVSRLRMAPEEVASFLAGLPAPVLAVYEAGPTGFGLARAAAERGIDMRVVAPGSIPKGSADRVKTDRRDAIRLVRLLAAGELHFAFIPTVADEAFRDLIRCIEDLRGDLMRARHRLSKFLLRHGYRYQDGDAWTPKHGRWLRTLSFEDVAQATFADYCASVHLLAGRRASLLQTLEQTVPGCSHAEVIGRLRCFRGIETLTAAGVCAETGGFRRFPRPAMLSGFLGIVPSERTSDTKRRQGSITKAGSPHARRLLVEAAQHYRKQPAISQTLARRQEGQDPRVIEIAWRAQRRLHQRWAHLHNQRRKPAGVVAIAVARELAAFLWEAATLDA

SEQ ID NO: 173560 - protein, 274 aa, unidentified
MSSIAPTRQVTVTRIICGVDIASSSLAARVGQDGAEATFQNSTEGIAGLAAFCHNHDVELVAMEATGGYEQRAFAQLSESDLAVTIVNPRAVRQFAQSMGRLEKTDSIDAGMIAWYAETKKSQPLCLAPQTQLELRARVTRLRQLTELRTTQLNQQRLVTNRAVQAGFRKMLAFVAKQIQELEKSIAALIDADPLWRELDQAFRTIKGVADRTVARIMAEMPEIGTLSNKTISKLAGVAPLAQDSGKHQGNALSAEGAPQYANPVHRGQRCGPS

SEQ ID NO: 173561 - protein, 337 aa, unidentified
MKYCGIDLHSNNSVVIVSDEEDRIVFSKRLPNDLGQIRAALEPHREDLAGVVIESTYNWYWLVDGLMDTGYQVHLAHPSAIKKYEGLKHSGDFADATYLAHLLRLGLLAEGYVYPREERGARDLARKRLQLVRYRTAQILAIEGILMRQTGARLKGEAVKRLTAEQVDAFAFAPDVSLAVEANRAVSQTLSQQIEALEKRLQQRVILRSEYRLLKTVPGIGEVLATTIMLETGTISRFARVGNFSSYCRCVDSLKESNGKRKGEGNTRNGNKYLAWAFVEAANFALRCCPQARSFYDRKKSRSNRILALKALAHKLARACYHMLQDQKPFDVHLCFG

SEQ ID NO: 173562 - protein, 407 aa, unidentified
MKKKEVIEFEQVVECGCGMDVHKDLIVATIQGKNIKTQTKSFKTYTSSLIKLKEWLLSNGVTHVAMESTGVYWKPVFNVLGDDFKILLVNARHVKNVPGHKTDKRDSRWLTKLLLSGLLKGSFIPERSIRELRDLTRYKTKLVNQISAERNRFQKILEDANIKLSSVLNDVFGATGTKIINHILIHENYRPEELLQYVHGKVKASREDIKEALTGYITSHHRFMLKTIMGNIAKIESTVAEVNAQIEICIEPYKIERELLESIPGVGIEGATCIIAEIGVDMEQFPDQNHLASWAGVCPGSNETAGKNKSGRITHGDKYLRSLLVECGWAASRTKNTYLSAKYKSLVGRRGKKRAIIALGHKILIATYFIIKDKVEFKELGEDHLNNFRKDRLIAYYKQQLEKLEAA

SEQ ID NO: 173563 - protein, 402 aa, unidentified
MNAVGIDVSKGKSMVAIMRPFGEIVSAPFEIKHTASDINSLVELINSVEGESRIVMEHTGRYYEALAHQLSEANLFVSAINPKLIKDFDNDSLRKVKSDKADAIKIARYALDKWQNLKQYNVMDELRNQLKTMNRQFGFYMKHKTAMKNNLIGILDQTYPGVNTYFDSPARSDGSQKWVDFASTYWHVDCVRKMSLNAFIVHYQNWCKRKKYNFSQSKAEEIYGKAKELVPVLPKDDITKLIIKQAVDQLNSASITVESLRTLMNETASKLPEYPVVMAMKGVGTSLGPQLMAEIGDVSRFTHKGAITAFAGVDPGVNESGSYEQKSVPTSKRGSSDLRKTLFQVMDVLIKTHPQDDPVYQFLDKKRAQKKPYYVYMTAGANKFLRIYYGRVKEYLASLPES

SEQ ID NO: 173564 - protein, 362 aa, unidentified
MEQFIGCDAHKKYSVFVAVNERGEPSQEVRVGHDREQYRRYLERLPGGSQIAVEASGHYYWIVDEMEAAGHHPRLTHPLEAKKRMGKTGKKTDKLDANGLGILLRNGTLPEVWIPPAGLRDQRELLRLRMFLVQQRTRLKNRIQGGLARYNIQLGVRDVFSVEGRRCLGTRLAELPEHTRQSVELELVTVDFLEVQIEEVEKHLAEIMQVTAEADLLKTLPCVGRILSMVMTLEIGQVERFPSAAHLASYAGLVPRVHSSGGQTRLGQICGDVNHYLKWAFIEAGNLVVVHQKHLSGEHVVRLYRRVKRKRNYQKAVVAVARHLAEAAYWILKKQEVYRSPQAHLKAQAKGESAKALSSTHG

SEQ ID NO: 173565 - protein, 429 aa, unidentified
MSYRIVGIDVHKKMLAVVVSDVEVDAEFQFERRMFGSNPEQLRALATWLLEQEAEEVVMESTAQYWKPVWEVLERYWKPLCEKREGAKRRSGRLHLAQAESNRGRRGRKRDFADAERLVKRLVARELTLSFVPDVEQRLWRTVTRKKFQLRRARIRLQSQLEALLEEAHIKLSSFVSDLLGFSARRMLKALAEGETNPAALAALADERLRATPEQLSDALSACTELNDVYRRLLQMALEECRLIDEQIGKLDQEMASLLSQHQDAVERLAEVPGLGVDSAQQIIAEVGPTAVTFPSEKCLSSWVGACPGEEESAGVNHSHRSPKGNRHMRRLLNQAANAAARTKGSIFEIVYRRTVPRLGHNQAVGVIAHRLCRLIWLILHQGVRYEERGPAVTKRSKQLRTWKMIRDLRRLGYRIELPNPLPSQAPAQ

SEQ ID NO: 173566 - protein, 338 aa, unidentified
MKRFIGVDLHKNMFTVCYLCPESKDSIREFKIIDLEKFKRTLTKEDEVAVEATGNSRNFCERIVESVAKVVQVDPGQFKVISSSHKKTDKQDAYLLAFHLSLGSLPETRIMSKERARLKSLVGTRDKLVKLRTTLKNKIHTILNANGIVSKKESLTSAKGLEAVMKYDLHELTIFEIGILADQIKNLNESIAKIEKELKKSDNQLDGHVNLISISGIGDITASVLLSEIGDVNDFPDKKSLCSYFGLTPSVHQSNDTIYYGRITKRGSKIGRTMLVQCALSSLRYNPRLYEFYLRIKSRRGHSKAIVASARKLLEFVYLTLSNNLIWEDSNSGVLKSI

SEQ ID NO: 173567 - protein, 360 aa, unidentified
MDKHKYVALDVDSANIVAGVYDGKGVALMQCCLRNNGQVIREFFKTMTGTVQVTFEEGTQAVWLYELIRPLVAEVIVCNPRQNKLLKAGNKSDRIDVAKLAKLLRLGELRPVYQGPSAAQRLKQLMHSYEALVEDATRVKNRLKALYRGRGLSCKGETIYGREQRQQWLAQLETKELQTRATCLYEELDCVLRLRAEAEKVMCRAARKHEAYKWISSAPGLGAIRTAQLLATAITPHRFRGKRQFWPYCGLAVVTRSSSDYEWVAGGARRKRKPLQTRGLNQNHNRTMKAVFKGAAVSALQQHPEFQEYYQRLCAKGMRPEMAQLTVARKLAAIVLILWKKGELYDSERLNQAAPGAGQQ

SEQ ID NO: 173568 - protein, 403 aa, unidentified
MNSVGIDISKGRSMIAVMRPFGEVVISPFEVRHTDSELSELARQLKSLDGETRVVIEATGNYHTPVAKLLHDAGLYVSVVNAKLVHGYGNNDLRRVKTDKKDSVKLANYGLDRWLTLPRYVPEEDTRLLLKNCYRQYRQYSKVQTVLKNNLISLLDTVFPNVNRLFSSPIRGDGSEKWVDFVAEFWHCRCVSEKSQKAFTNKYQRWCRKHGYNFSEAKAHTIHAEACGHIDVIPKSETTKLLVEQAVAQLRATSAALAALKHEMQSLASVLPEYPVVMDMFGVGSTLGPQLIAEIGDVRRFYSKKALVAYAGLDAPPNDSGDVTGRHKSMSKVGASSLRRTLFLVMSVYLQNAPLDEPVYQFMDKKRAEGKPYRVYMMASANKFLRIYYATVKAYLESLEHTA

SEQ ID NO: 173569 - protein, 437 aa, unidentified
MQTLPVLDSKAAGMDVGSEQLHVSIAGDTPKVFGTTTGQLHALRDWLRDNGIGSVAMEATGVYWLCAYEVLEAAGLEVLVVNGKHVKNLPGRKTDLKDCQWIATLHAHGLLRSGFVPPEHIRRLQDYLRLRADHITMAASHVQHLQKALERMNVKFHDVISSVVGVSGLKVIRAILAGEREPGVLLSLCDLQIQKKKADAVRESLRGSWKAEHLFALKQALELWEFYQQKIAECDEQIEKVLRELAGPEPQPPAPRHGGGKPRSPNTPQIQNLHTMLVRLCGHKDATVLPGLADHTLLSLVGEVGTDLKRWKSEKHFTAWCGLPPGSKQSGKRRGNTARQRNRAGRLFCVMARSVGRSVDKALGGFYRRLKARRGGLVANQALARKLAALFWRLMVHGKDYVEEGLKKYENKVAETQSRWLRKLASRHGLVLLPKPA

SEQ ID NO: 173570 - protein, 377 aa, unidentified
MSKLRFVGLDVHADTIAVAIAEFGGEVRSLGIIPNRLESIRKMVGKLAPIGTLKCCYEAGPTGYVLYWQLTQLGVACEVIAPSLIPTKAGDRVKTDRRDAEKLARCYRAGELTPVWVPDAAHEALRDLVRAREAAKKDQLRHRHRLGKFLLRHGKRPSEAGKAWTQKYMNWIRIHVRFDQPALDATLSHYLEEVDHVAERIAKLEKVIDEAVKQAPAEIRAVIEALQALRGVALTTAATAVCELGSLARFESPRQLMGYSGLVPREYSSGNRVQRGAISKTGNAHLRRVLMEAAWTYRHRPNLQGRLLRRQKSLALSDEVKRISWKAQQRLYKRFTALTARGKNHNQAVTAVARELLGFMWAIAVHTEAQHKQAKAA

SEQ ID NO: 173571 - protein, 310 aa, unidentified
MEPVFVGIDVSKDRLDVHVRPGGEVFVVSRDGRGLEELVGRLQALGPTLVAVEATGGFETIVAAAVAGAALPLAVVNPAQVRHFAQAVGKRAKTDPIDAGVIAHFAEAVRPVPRTLPDEAARLLAELVGRRRQIIDMIVAERQREKRATNVRVRKSLARHLAMLEKELDAIDQDINTLVRGSPLWRVKEDLLASVPGIGKTLARTLLAELPELGSLDRRHIASLAGLAPYTRQSGRWRGRSMIAGGRSAVRSASFMAALVASRHNPPLKDFYLRLICAGKPKMVALIAVARKLLTILNAILRDNRPWQSA

SEQ ID NO: 173572 - protein, 417 aa, unidentified
MTDQTILQTYNSWIAIDIVKDSNVVAVETIAGKKSTFRVVNSHIGHDRLMAVIHDLPQPCRICFEPTGDYHRTLGFRLISEGFDVCLVSSVAAARYRDAMFNSWDKNDPKDAHVLLQLLKQGLVQKYVDPLVAGNLDLQEISKTYYHLTLARTRLHHSIHTHYLPLYFPEMGKWLCSTRADWWLAYMMRFPCPSAITKLSLAEFCIEASPIIGRKVNKEAKLVELYETAKTSIGLPISADSNACITFKMQLQRYQEFNAQRMQLETMASKVMATMPEYAILKSVPGIGPVIALTILAEAGDLRRFDHHRQFLKYCGLDLAKSQSGNMRGKERLSKRGNARLRLALWIATTIAIRMRENTFRDKYARYIKSDPMDADRRRKALTAVTAKMARVIYGLVKSNELYKSKFEALPSGSTSL

SEQ ID NO: 173573 - protein, 429 aa, unidentified
MMADTTHTTAKPHLLAIDVARRFNAVLIELATGEQRRFKMTNSAQDFDRLVQFIGATAGPWRAALEPTGDYHRPIAHRLLTAGVDVVIVSSVAQARYREAKFNSWDKNDRKDASIILDMLKHGMVMRYVDPMVAGHHDLQELSKTYYQVSRARTKVLHAIANHHLPLYFPEMHRYWQTTRIEWWLRFMLEFPTPAHVRQFSKGAFIEQAWDLVGRKVEKTAKLTEIWHMAEHSAALPHALGSLAVETFRVSLQQAQHLNELRRSLEQCAERVLASNQDYEQLISLPGIGPIIALTVLAEVGDIRRFAHHRQFLKYCGFDLAKLQSGAQRGREQLSKRGNARLRLAFWMAGQVAIRLRENAFKDKYDRYIRSDPGNADLRRKALTAVAAKMARVAYSIIKSGQPYQRFYEQSLPSGSIPLSRAVEAEPYH

SEQ ID NO: 173574 - protein, 583 aa, unidentified
MPNPKAKLLDRVREVRHELKGKRSCYGIPLSPLVPRGERGKYCFWRAYPGRRSCLACPDTLSKVIHGRAELALGAERSEAVNNFAEMNFESNLRPGNNGSGRKAGRKARGRTRSACPNPTRIKPRTPADLGAFIKKSERTTPQEGHRIRTTHDKGQGPCANKKPMNETVRWETITYYAGFDWAKDHHDVVIVNPQGKIVKDLTFEHSAEGWAKWKELVAAYALLAVAIETNQGAAIEQLLESGVIVYPVNPKSAERYRDRKAPSGTKTDFLDAWSLADALRVDGHGWRALKPLDPLIQELRLLCRDEVDLIAKRTELVNQLQAALHEYYPAALQAFEDWTATPSWNFVQQFPTPQLLRQAGRRKWEKFLHVHHLYRPELNEKRLEIFAKAHEFCGPAAVTRAKSRLALALVKLLNALENQLEDYRKEIRRLFNEHPDHELFGSLPGAGEKLAPRLLSELGSDRSLFDSAQALQCYVGTAPVSFESGQVRQVYVRFMCNKSFRHAVHLWADLSRKFCSWAQVYYQQLRAKGKTHATALRCLGQRWLKILWKMWQTKTCYNADFHMANQLKHGSWVLSVKPSKSK

SEQ ID NO: 173575 - protein, 346 aa, unidentified
MKILALDLGKYKTVGCDYESESGVHQFKRGFTTPAGLARMVQEVKPDRVVIEVCSIAGWVCDLLWGMGIEVQVANTSDDAWRWRKVKQKDDRRDALKAARLSAVNQLREVYIPQIEVRQWRALITYRQQLVRRRTKIKNHLRDLLLREGQILARGSKCWNKLGLELLTSLARPLSEVGLAELWRGELHEELQQLQLTQARIVTVEEKLNAIGAADGRVQLLRTVPGVGPRLAEAIVALLDKPQRFRKASQVSGYIGMAPKALDSGETERRGRITRQGSRLVRSLLVEVAWAGLRHNAWVRQTYQRLSGGKKARKKIAIVAVGRKLLVKCWAMLRDNRAWDWQPQIT

SEQ ID NO: 173576 - protein, 367 aa, unidentified
MTSTSSDRPTIIAGVDTHASTHRCVVIDRRGQLLADREFPATTTGYTQMLTWIRGHGHLQAVGVEGTGSYGAGLARHLHTKNITVLEVPRPDRWLRRQRGKSDPIDAESAARTVLAGNASGAPKHGDGPIEAIRVLRVTRTGALKAKTAAINTLRTIVLTAPDQLREQLRHHKRAQLIRTCQQLRPDTTNTADPAQAVKVALRSLAHRIGTLDQEATALHTQINALTETTAPTTSALFALGPDTVSALLIAIGDNPDRLRSEAAFARLCGVAPIPASSGKTTRHRLHRGGDRTANRALHRAIIVRLRYHPGARAYAARRTTEGLSMPEIIRCQKRYLAREVFTALRADYTKITPAEFEMIYTTAEAA

SEQ ID NO: 173577 - protein, 531 aa, unidentified
MARELAKADSHDLVGEPNHFKLSTPDPCVLTSSVKLGQGDFIVSRKKRKNKRGVSGNKKPLTARPVTSKRKTRRRGGLPVDNAPENINSLKQVNLNAAGIDIASGVHFVAVPAERDPTNHVRSFGAFTADLHGIADWLRECQITTVAMESTGVYWIPLFELLEREGFEVILVEPSQIKKFRRKTDVLDCQWIQTLHTFGLLTGSFRPADDIIVLRGYMRQREMLVKHAAQHVQHMQKAMEQMNLKLTEVISDICGVTGLAIIDAILAGERDPQKLARHRNDRCKNDEATIALALQGSWRDEHLFSLKQAVELYRYYHEKIAEVDECIERYLGSMEDKSGGKPLPKLPRSKQRSKRGNDPKFDSRSLLHRLTGADLTTIDGIAEHSALQIVSEIGLDMSAWPTANHFVSWLSLCPELNKSGGKKQKKGKSRTHRSGNRVAQALRVSAQTLIQSKCALGAYVRRIKARDGAPSAITATARKLAIIIYTMLKEGGEYRDIGAEAYDARYRERQVNSLRRRAEHLGFDISPSPAA

SEQ ID NO: 173578 - protein, 460 aa, unidentified
MSRTRKACQASQTTKQVAEVDVLTMLNPNAAGIDIGMDEMWVSVRADRDAEPVRRFGMNTPDLIAVADWLKACGVETAAMESTGVYWIPLYEILEERGFKVYLVNARHAKNLPGRKKDETDAQWLRRLHTFGLLNNSFRPEGEMCAVRAYMRQRADLIEHRAAHIQHMQKALHQMNVRLSPTVKDITGVTGMAIIRSILAGERDPLALAQLRHPRCAQPESEFVKALTGNYRDEHVFALKQAVALYDAYTQQILECDQELERKFSALKPIHDDDLPPLDTSDKRNTHSKNAPAYDGRSLLYQLLGVDLVAVDGLNEVTAQTIISEIGTDMSRWPDEKHFCSWLGLAPHNDISGGKVLRTRTLKTRNRAGQAFRLAAQAVSKTNTAYGAFFRHMRAMHGPMKAIVATAHKIARAVYFMLRDHKQFHDTSAEEYHQRERQHEIARLKRKASKLGFTLAPASA

SEQ ID NO: 173579 - protein, 353 aa, unidentified
MTPTRAPQHIYCGIDTHADTHHAAIITDTGILLAHRQFDTTSSAYDAVVEWIHQHGHPISVGIEGTSSYGAGISRHLRHHHIAAVEVPRPNRKLRRSEGKSDPIDAEAAARAVLARHQLSEPKHGDGPIEAIRALRVARSGAVKAATASMNTIRSMLVTAPEVLRTQLRGRSTTALLDACIALEPDTAAMTDPVNATIVALRSLAKRTRELRREAQELKKNLAALVKEVAPRTASVFGLGPDTAAALLITVGDNPQRLRSESSFAHLCGVAPIPASSGKTNRHRLHRGGDRRANQALHTAVVVCLRYSDIARRYAERRTSEGKSMPEIIRCQKRYLAREVFTALRQDYRALTT

SEQ ID NO: 173580 - protein, 339 aa, unidentified
MGCSRRIKRRKATTKFMYAALDLHERSIQCVLKDDTGKVVRESKMGKDEDRILEFLDGTHASVVMESGYNHQRIYDLLKENGYDVKVAHPLMVKAIAYAKVKSDKVDARMLADLLRAGMIPEAYVPGKDVREIRDLVRRRHYMVKLRTMLKSKVHAEVATRWIKHDGDLFTEEGRSYLRTLSIDAVNDYLDTIEFLDRKIRELDAKVKPKAESDRYAKLLMTIPGIGHYSALLISSEIADINRFPDPEHLCSYAKLSPGVHQSGDTQYTFSGAGNSMLNWIMIQCTRVHVRRCDSAITKFYEQVSRRRGENVAIVAAARKLMKAAYVMLKEEKAFRLDG

SEQ ID NO: 173581 - protein, 320 aa, unidentified
MTILNSPTVVGADVAKAEVVTYREDIQAIEIIANDRSALSLWLKTLPANSSIALEATSTYHLDMAELAHEMGHQVYLVDAYRLSHYRESIGQRAKTDPCDARLLARYLTSEQARLRLWNPPPQAYKVMKSLLRRRAELVNLRVSLKLSWSSEPLLKDELAQQLKSFKQAEQAIQKLLHKVSKEAGIIENIKRCKAIEGVGDLTATGLATAFMRGHFASGDAFIAFLGMDLKAKDSGKKNGTRRLSKKGDSELRRLAHNAAMAASRSPTWKPFYESYLARGLAKTEALVILARKLCRVAFALMKHQSEYQPNLRLQGSHAT

SEQ ID NO: 173582 - protein, 380 aa, unidentified
MNRTTRRTESTKKKPVLHLALELGGKEWKLAFAAEVGQRARLRTIRAADLADLVHEIARAKTRFGLPASARVVSCYEAGRDGFWLHRWLCAHGVENCIVDSSSIEVNRRARRAKTDRLDAQKLLSQLLRFAEGERKVWSVVRVPTVEQEDERQLSRELEQLKSERTAHCNRIQGLLQSQGIRLKVGQKFLDQLAEIVLWDGQPLPEGMRQRLLREAERLQGVQEQILQLGRQRRQRLKEASDATTEKLRQLIGLKAIGENSSWVFVTEFFGWRDFRNRRQIGALAGLAPQPYQSGESVDHTLGIGGGNRRLRSMAIEIAWAWLRFQPRSRLSLWFQQRYGPGSRRTRRIGIVALAWKLLIALWRYLQTGVLPDGAELKTA

SEQ ID NO: 173583 - protein, 412 aa, unidentified
MEVLHACCCGLDVHKKGVTACVLWAEGKGKKRKEKRQFGTMTRDLLALADWLRACGVTHVAMESTGVYWKPVWNVLEGQFEILLVDAQHIKAVPGRKTDQNDAEWIADLLQHGLLRRSFVPPTAIRELRDLTRYRVSLVQECNRLANRIQKVLEDANIKLASVATDALGASGRAMLKAMIEGEGDAKKLAEMSRGLLRNKIPELQGALEGRMKSHHRFLLKELMEHLEFVESKIARLEQEIGEHLRPFEEEMEQLGTIPGVDWVTASGLIAEIGVNMNQFGDPEHLGSWAGVCPGSYESAGKRKSGKTRKGNAWLRRCLCQAAWAVSTKRNNYLSALYRRLAARRGTKRAILAVAHKLLQIAFYILRDGKCYRELGADYFDRLHPYRVKRHLVRRLESLGFQVNLVPASQAL

SEQ ID NO: 173584 - protein, 321 aa, unidentified
MNYVGIDVSKATFVVAYSSAKGSETKTFENTIKGVHKFIQTITPEDTHCVMEATGNYSMLLVYLLSKAGITVSMENPLKIKNFARVMLSVVKTDEIDARMIAMYGEKMNPAPFKLRSESLMVLKQKRTVLRQLKKQLNANTNLQESMEALPFIDSVCKKILDKTMKFLRKQINEMEKELSSIANIEYRKQMDLLTSIKGIGVTLATALIVATGGFTYFDNAKQLTRYLGLSPTYQQSGTSVNRKGHINRNGDSYLRSQLYVAAFSSLRCNTECKACFDRLRANGKPGKVAVIAVANKLIRQAFAVVTQGKEYVDGFISAKK

SEQ ID NO: 173585 - protein, 410 aa, unidentified
MEVLYADCAGLDVHKDSVVACARHTIDGNVSREVRTFKTTTADLMALSAWLSAQGCTHIVMEATGVYWKPVWHILSDGEFELVLANAARVKNVPGRKTDVNDATWLADLMAHGLIRGSFVPEEQTQEMRNLLRMRKQFVRERSSHIQRLQKTLEDANIKLDSVIADIIGLSGRRMIEALIGGETDPQALAALAHRRIKATSAELEAALRGRVTKHHRFALRLLLQHIDAIDAAIAEIDQQVDANIEPFRIAIRILSTIPGVSQLSAEVIAAEIGVDMGRFPTEGHLISWAGLCPKNDESAGKRRSTRMRKGAPWLKTTLIQCAWAATRTKGTYLQAQFHRLRARRGARKAIGAVAASILTAAYHMLRNGALYQDLGAGHFDRRAKTAQTNRLIARLRSLGYAVQITPVAA

SEQ ID NO: 173586 - protein, 420 aa, unidentified
MTSQNSIPADAVLVAIDIAKVRNEVLIEAPGHKRRRRLSVLNTRAEHDHLIEILQSYDRPVVCAFEATGNYHRPIAWRLVEAGFETRLVSSLALARTREALHNGWDKNDPKDAQVILHMLRIHSTQVYHDPLRAGINDVQELSKTHEAIANAKTEIQHRILTHYLPLYFPEIERFRGNSRSDWFFAFLDAFPTPSSITILTKEKFVEAAWDVVGRKVSKSQILMDIYETARTSIGLPLPLDAPAIRMFRMVVAEARSLIRQRNEIEAQADELLRHSRDYQILRQIPGIGPINALTIIAEAGDLRRFHHHRQFLKFCGLDLSTQQSGQYRGQTRLSKFGNARLRRTLWIAGQVAIRQRENGFRHKFERYIARDRDNPDLRRKAMTAITAKMARVVHAVVKSGSDYRPFVEGRVPGGRTSFS

SEQ ID NO: 173587 - protein, 321 aa, unidentified
MTGSMEIVYERCCGIDVHKKMIVCCLITGQRTTQTKTFGTLTKDLQEMTEWLKAENCQIVAMESTGSYWKPLYNIFEMEDIPAMVVNAQHMRTIPGRKTDVNDAQWIAKLLRHGLLQASFIPDREQRELRELVRYHTSRIQERAREKNRLQKMLEGANIKLSNVVSKVTGVSALTLLQMAMDGEELTIEKIEKVRHRGCKSSAEEFLDALTGVITPLQRELFTQVLQTIKEQTTQIERIEALIQAHITDEYAKAAKALEPIPGIGKQSAKSIVAEIGIDMSRFPTAGHLCAWAGIAPGNDESAGKRKKGKPRQGNKALKKR

SEQ ID NO: 173588 - protein, 341 aa, unidentified
MGHYVGIDLHRRRSVIVVLDEDGEELWTRKIDNTPENLAAAIRDAGPGPEVVIEATWGWYWAADVVAEAGGTVHLAHPLGIAAFENRRVKNDVIDARLLADLLRMGMLPEAWIAPGPIREQRELVRYRRKLSQLRAGLKTQVHAVIGKEGLIPPVKHLWGPGGKDWLDDTQMAAAFEDRLRSLRRLIKTYDNEIVRLDARIAGVFKGHPGYETIQQIHGVGPVFAAIFVAEIGDVTRFDNARQISSWAGMTPRHRESDVKAHRGAITKQGPRLVRWAAVEAVSRNHKIEPIHDLYVRVGQRRGVNKGRVAAARKLLTLVFYGMRDLEVRCLDIAHPTTEAA

SEQ ID NO: 173589 - protein, 345 aa, unidentified
MPIVGGLDIHRKQITFDYLDTATGEVRRGQIAPADRAHLRAWLARFAGRDDVACALEGCTGWRYVAEELAAAGVTAHVAEPADTAFARGRKRHAKTDKTDARHLRVLLEQGRLPECWIPPAQILECRALLEAYHDLRREHTAWIERIHAVFFHQGAPRLGEGALRTDRGLAALRQAAACHLSPAGQLQVATALDMLAAVEARMEVLRQQLLHAARHLAGARALQARLYGVGPLAGLAMTCWPGGAGRFSSSRKAVRFAGLDVTVYSSDGRRSPGHLSRQGPEILRWVAYEAGKTHGRAPAPGHDYYAQVKDRQDGKIAALSQARKLIRQACRILAELGDDALTAA

SEQ ID NO: 173590 - protein, 350 aa, unidentified
MLIIGCDYHPAFEQIAYVDTASGDCGERRLEHRKEAEKFYRDLAAQGMKVRVGMEASGHARWFERLLAELNFELWIGDATEIARKRERKQKTDRQDAQHILRLLLKDDFPQIWVPSWENRDLRQLLWHRHRMVQARTRIMNQLQAVALNEGLRSKKRLWRESGREQLEAFRLAPWASRRREDLLKLLDGLNPTIAELTQAIQQEVEKCPAAQRLRTHPGVGPLTALAFVLIIGKADRFQCGKQIASYLGLVPLEDSSGNRRRLGHITKQGNSLLRFLLVEAAQVTTRSLPEWRSHYVHLTMRRGRKIAKVAMARKLAVRLYWMMRKEWDFETLTKFGSHAGKPGPRDGVK

SEQ ID NO: 173591 - protein, 352 aa, unidentified
MKKTLFVGIDFAKANFVASALLGEDPDPVCLPKSFSNDDKGAKALISWIVKLLPETCSLSDVLVCGEHTGSYSLLLPRRLFDAGIDCWLENAVCIKNGSGRIVREKSDSADATMIAEYARTFYQKRVRLFVPESPVLSELRECNDIRRRLVKEQAGLMCKKHDAEVRLKAKPGSKAIVMNIKILDRQLAYIKEQIAKVDRQMYSLIRSEKKLSRIYDIIVSINGVGPVTAIALIVLTSAFTTFFSKRSLACFLGIAPFRSESGTSIQHGSHRSRQADSYYSGLLYMVAVSAMSWNPEIALYKERLLKKGKSKLVVINNIKNKLITIIWAMVKNDTLYDPDHHLKVAQEYQTA

SEQ ID NO: 173592 - protein, 341 aa, unidentified
MSNANSYIGVDLHKKMCFVTVMDKEGKIKKQTEISTDADKVAKFFSKHTNAAVAVESTMNWIPFYENLEGLGCKVVLSNPLATKAIAAARIKNDKVDSKILADLLRTNLLPLSYVQPREIRDLKELVRQRMSYVEMRTQIKNKIHSVLFKNNLKHDFTCLYGKAGMIWLRQLELRNIYRQEMDRYLTTLDLLDKQIEELSMVIMETAKADYDCKLLMTVPGISYFTALTIKSEIGDIERFGSAKKLCSYAGLIPSTYASADKIRHGRITKRGSKWLRKALIDAITSGSRHPSKLTFLYRKLKKNKGTGKAKVATARKLCTIIFAILTDKQPFREFVSVKQR

SEQ ID NO: 173593 - protein, 342 aa, unidentified
MESVQGLVVGVDTHKDTHSAAMVDELGGVLAALDVGANRNGYRSLLKWARCQSSGRIWVIEGTGSYGAGLAAFLSAEGEVVFEGDRPQRRKRGTAGKSDQLDAIKVAREALARPHLAVPRPRGQREAIRILLTTREGAVQAYRQGLNQLYALVVSAPEPIRERLIRLKGEQLIHACIRVRAASDLESSVTATTMRQIARRLNLLLSEAADYERQLAELVGAAAPSLLAEPGVGPITAAQVLISWSHAGRIRHEGAFAALAGVAPVPASSGRVVRHRLNHQGDRQLNRALHVVALSRSSFHKPTRAYIARRTAEGKSTREIRRCLKRYLARRFFRLLQRLDNP

SEQ ID NO: 173594 - protein, 455 aa, unidentified
MPKPKRIRNARTSPVPRILEPDAAGIDIAATEVYVAVPTDRDPEPIRCFSTFTDDLHRLADWLRACNVQSVAMESTGVFWIPLFQILEDRGFRVCLVNARHVKNVPGRKTDVSDCQWLQYLHSVGLLRASHRLAQTICAVRSIWRHRESLVQMAAAHIQHMQKALDQMNLQLHHVISDISGTTGLAIIDAILDGERNPETLAALRDPRIVASRKTIARALVGDYRTEHLFTLQQSLRAYRQYQQWIAACDVEIERQLRVLPNNLADDQKPLSKSKDHHKPRRNEPSFDLRSQLYRIFGVDLTEVPGVSSLTAHALLTEVGPDLRRFPNAAAFASWLGLCPDNRISGGRVLSVVTRKVKNRLTMALRMAAQSLHRSQSHLGQYFRRMRVRLGTPAAITAAAHKLARILYHLITTRQPYQESTFAAMEERSRHRQLLRLKKQAASFGFQLVPGSSVP

SEQ ID NO: 173595 - protein, 345 aa, unidentified
MEYIALDAHKQYTWARVELPDGTVVQEKRIPHERGAIRGFLATCEPGSPVAVETIGSWYWIVDEVEEAGFLPQLVHAHKAKLMLGQVSKTDRLDARGLIRLQRTGTLPTVWIPSRELCDLRDLPRTRMLLVRQRTQLKNRIHATCAKYALIIPCTDVFGKRGRETLLQKLQELPPQTAFTTMCFLNQIDALNEQIARIESRMGDLFEVTEEVSLLMTIPGVGFILAVVIFTEAGDPGRFGRTEQFASYSGMVPRVHESGGRRRYGPLRSDVNHYLKWAFLEAANAVCRQRTRYPNRHVSLLYDRVRKRRGHQKAICAVARHLAEATYWVLTKREPYREPGSSTGA

SEQ ID NO: 173596 - protein, 341 aa, unidentified
MQPMTIGLDLAKHVFQVHAVAADGKVLVRRKLRRSEVRDFFAKQPPCLVGMEACASAHYWARELQRLGHRVRLMPATYVKAYAKRGKSDAIDAEAICEAVTRPTMRFVPAKSVDQQAIVMLHRTRDLLVRQRTMLANALRGHLAEFGVVGAKGFWRLEELVAMARTTPASQLPEMARECIETIVVQLEALGERTSAVERSIQEWHRRNEASQRLETIPGIGVITATAMAAFVTDIGVFQSARQFAAWLGLTPKLSGTGGKVQLGRISKAGDRNLRRLLVLGATSLVHRARIEPAKLPWIAALLARRPARVVTVAVANKLARIAWAVLSRAEVYRHNVVAAA

SEQ ID NO: 173597 - protein, 347 aa, unidentified
MRFYTTQHPFYCGIDLHARTMYVCILNQAGETLLHRNMTTTPEALLKAIAPYRDQIVLAAECMFTWYWLADFCAEHGLPFVLGHALYMKAIHGGKAKNDKIDAHKIAVLLRGGMLPQAYVYPAAMRATRDLLRRRMHLARKRGELLAHVHNTNSQYNLPAIGKKIAYKANRDGVAERFADPAVQKSIEVDLALITYYDELLRDVELTIVKTAKHHDANTLYLLQTVPGIGKILSLVLLYEIHDIERFPRVQDFASYCRLVKCAKESAGKRSGTSGTKIGNAPLKWAFSEAAVLFLRDNPAGQKLLTKLEKKHSKGKALTLLAHKLARAIYYMLKRQTAFDLETFLHA

SEQ ID NO: 173598 - protein, 348 aa, unidentified
MGQISRIGMDTSKHVFQLHGVNAAEEPVLRKKLRRKEMMAFFGKLAPTVIAIEACGGSHHWARRLQSFGHSVKLIAPQLVKPYVKRGKNDAADAAALCEAMSRPTMRFVPMKTAEQQAALMLVGVRDRLIRNRTQLANAIRGYAAEFGLTAAKGMAHVDPLLERLQADASLPALARELFAVQVKEHAQLRAQIDEIDIKLMAWHRANECSRRLTQIPGVGPIGAALLMMKTPAPETFRSGRQFAAWIGLTPKDHSTAGKVRLGVITRAGDEALRSVLVTGATALLRFVRNGKSKSGLSPWLEQLLKRKPPKLVAVALANKLARIAWKLMATGQSYIAKSAPVALPGAV

SEQ ID NO: 173599 - protein, 375 aa, unidentified
MQKKVRFLGLDVHAETIAVAVAEADGEVRSLGVIPNRGESIRKLVKRLGPAEHLRACYEAGPTGYVLYWQLTELGVECVVIAPTLVPVKAGDRVKTDRRDALKLARSHRAGDLTAVWVPDAASEALRDLVRAREAAKQDQLRARHRLSKFLLRTGQRATAGVKAWTELYMAWVRQLRYEQWGQEATRLDYLHEVEHMGARVKRLEEAITEAVKLASPQVQEVVRGLQALRGIAEISAVTIVAELGQIARFETARQLMGYSGVVPRENSSGQRQQRGGITKTGNAHLRRIAIEAAWSYRLKPAVGPGLRKRQKDVPEPIQEIAWKAQLRLHKRYARLAAAGKDQRKIVTAVGRELLGFIWAIGVKVETAARQSIAA

SEQ ID NO: 173600 - protein, 348 aa, unidentified
MNSMHYLGLDVHKKTISYCLRQADGTILREGTIEATREALTALLEGTPQPWSAGLEATMFSAWIYDHIRSQGGTVKVAHSTMLRAIAAGKRKNDRLDARKIADLLRCDYFPECHMAAPEIRNRRRVLRYRNLLVRQAVRMKIKVSGLLMETGIPYNKGKLHSKRYFYQFLEERRAEMPESVPELLQLSRTSIETLARMDYQLLRALEHDRLLAARVKRLMTIPGVGTVVALTWALEIGDIHRFTSLKKVVSYCGLCGAERSSAGKQRRTPISKQRNHHLQTVLVEAAKLAPRWNSELALVYDREKQRGNRNRATLAVARKLVAYLLAVDRGEREFQESARSHEVSSVA

SEQ ID NO: 173601 - protein, 355 aa, unidentified
MNSIKYVGLDVHQSTISVAVLDAEGKLLMQSVLATEASAIVDFFAGLRGTLHVTLEEGSYAAWLYDLLVRRVAKLVVCNPRKNALLKAGNKSDQIDARKLAELLRAGLVSAVYQGQKSTAAVKQLGRSYSALTEDTTRTMGRLKALYRSQAIACGGEKPYSVRHRAAYLAQLNEPGLQRRAQRLYQELDLLEQLRREARRDLLRECRKHRESKLLRSIPWLGPIRTALLIARVQTPHRFRTKRQFWAYCGLALETRSSADYQMVNGQLERRAKPVFIRGLNRNHNPDLKNLFKGAATSASGSRGGFGSFYENLLRKGMKPELARLTLARKIAAITLHIWKKGEPFDADYLKLHAA

SEQ ID NO: 173602 - protein, 359 aa, unidentified
MKIIGCDLHARQQTLAMLDTETGEILNLTLTHEGDHVREFYSKFPRPVRVGIEATGSMQWFLNLMEELGIECQVGHPANIRAAEPRKQKHDRRDADLILKLLVENRFPSIWLPSKELLDLRGLLLHRHQWVRMRTRVQNALQAIALANGLRRGPSLWSQAGQDKLASLSLAPHTAHRRSELQALYAKFEMEIEKLNQRVEKQAWERPTALRLMTHPGVGPITALATDVFLGDPTRFVDGKALASYVGIIPREYSSGGRQRLGGLTKQGNPLLRFLWCEAAIHAVRKDPELQRFYLRKLFQKGLGKARVAAARKLGIRLWILLRDQIDYNEFCRRGQMRQKNGGTCAGMPARVIAQTVAD

SEQ ID NO: 173603 - protein, 323 aa, unidentified
MPEENAMSDVKFCVGIDVSGAVLDYGCWPDGPKGQCVNNEEGISRLVDICGRLGPDLIVMEASGGLEMPLAAGLQDAGLPVFVANPKRVRDFIRSTGQLAKTDRIDPAGIAHYASQTHVEARSVPDAGQRKLKALVTRRNQIRDQITAEKSRLARTAQPDARRDIRDHLRWLEGRLKKMEKRIADHIKADAEMSRKKAILQSVPGVAEATSNSILSEMPELGQLDRKKITALAGLAPFARDSGTFKGKRTIGGGRAALRRALYMAALVATRHNPVIMRQYRRLTDMGKQKKTALVACMRKLLLILNNMLRNNSKWNQFLPQNP

SEQ ID NO: 173604 - protein, 412 aa, unidentified
MSQTIHRFVALDVHKSYVVVGALDTRQEVVLHPRRVSLLQLDGWAKKHLKPTDAIVLEATSNAWYIHDLLEPLVARVMVANPYLVKLIAASFVKTDKRDTLVLARLLQANIIPEVWVPPPHVRELRALVSHRRRLVSQRTAAKNRLWSVLMRHNIMPPAGQVFSTTHRDFWERLPISSSEELRTRQDVAIIDHLSPLIEEVDKELARLSAEETWAPQAAFLVQLPGMGLLTAMTLLGAIGDITRFASAKKLVGYSGMGSRVYDSGQTHRTGRITKQGRREVRSVMIEAAWVAVRRHPFWKAKFERLEDRIGKQKAIVAIARKLLVVVWHVLTAQVADRQADPRAVACSLMTWATRYGLATSLGMPRAAFVCRELDRLGIGQAMNQFQYNGYDYHFPLPMAATVTEQEAAAGG

SEQ ID NO: 173605 - protein, 368 aa, unidentified
MDRLLKTSPTHSISVNEESSGRVLDQSDRRFVRKVTQVGSTPATYTLPIGERVMQTPVDIGADISKDYVNVSCATHVFPNAKLLNRRAVLLAWLKRLPAGTRIGMEATATYHELLASLAHRLGLVVYVLNAKDVHHYAKATAQRAKTDRVDAALIARYVAKEHNQLHVWYPACPAQRQLQRLMRRRGKLTRTRASLRSSLQGVPSLRSDLRALLKHFDSLIAKLDTQARALVSRNVEREQAFGRLDDIPAVGNAVGIALLATLERWALPRANSFVAFLGLDPRADESGTRHGRRRLSKRGDPELRRLLYTAAMSASRTRVWAPLYQRAIARGLSRVQALVVLARHIARTAWSIYTHKTQFEPARVQNS

SEQ ID NO: 173606 - protein, 357 aa, unidentified
MGLINAKTVIGMDIGKKYSWCEAISTETGEVLKEERLINRKEEFISFLDSLPRPIRLVMEASGNSAYLCECLEDWVEEIQIAHPLRTKAIASAKIKTDRIDGGILAHLGMADLVPQSYFPPREVRDLREILRHRAFLVALQTRLKNRIHSYLWKSGVETEQTDLFGKSGLKWVKELELREPYRGLLDQDLRVLEVLQSEIKSATRAIERLAKEDPRVRLLLPIRGIGKYSAMLILAEIGEIDRFANPKKLVSFSGLCPSTFQSGKVFYHGRITKQGSKWLRWILVEAAQDYARAPGRLGNLFRRIEKRKGRNTAKVAVAREILVCIYHCLKKGVVFEETPKRVGGFEFQHVPRVAGC

SEQ ID NO: 173607 - protein, 427 aa, unidentified
MNNVTYQPTLCVGADVHLDEIVLRAVDKALGHEVVDRFRVTNNLPGAQLAAATIAAAATDLGYTRIEIACEATGMLWIPFHRYLSTAPPLQSFELELVCFNPKLVAKFKDGLVLRSPKDDDRDAFDVAARLRFGELPISYVPTDFWQGLRRLTRYRYRLSKAMSREKMRFQSHAFLKCSDWKRVKAFSDIFGATSVALLTQFTAAELQEMTHDQLVDLIAHRGHGRFTDPTATARAVRKALRTSYPIDPRTDEMVTATLAAGWDHIRYLNRLMKRLDQLIARYIDLVPNPIITIKGLGAVITAGILAEIVDVLRFPQEKHLAQYMGLTWRKSSSGGFVSENTRLTKVGNVYLRYYFILGANLLRQNNLEYKAYYWRKYQEVSKYQHKRALVLTARKLVRLVHALLTKNEPYVRPRTTRQEQEDDRLQ

SEQ ID NO: 173608 - protein, 398 aa, unidentified
MTESSDYELVQVFIGVDVGKDTHHAVAVNRSGKRLFDKALPNDENKLRALISDLKQHGQILLVVDQPATIGALPVTVARSEGVLVGYLPGLAMRRIADLHAGEAKTDACDAAIIAEAARTLPHALRTLKLADEQIAELSMLCGFDDDLAAQTTQASNRIRGLLTQIHPALERVIGPRLDHPAVLDLLPRYPSPEKLASLGEKKLATQLSKLAPRLGKRIAADITQALSEQTVVVPGTNAAVIVLPRLALQLIILRKQRDEVALEVEQRVLAHPLYPVLTSMPGVGVRTAARLLTEVACRAFASAAHLAAYAGLAPVTRRSGSSIRGEHPSRRGNKTLKRAPFLSAFAALRDPISRAYYTRKMTQGKRHNQALIALARRRCDVLFAMMRDGTFYTPTAS

SEQ ID NO: 173609 - protein, 486 aa, unidentified
MAKRKKSTFERLRDGEKLKQWERKEVERQFRAEDPGWEVVHRDVAGIDVGNESHFAAVDPKVTQPSVREFGSWTAGLQAMADWFKKCGVKRVVMQTTGVYWIAAQEVLEGEGFQVAVVDARGTKNLPGRKSDVQECQWLRKLDMFGLLRESFQPPEAIQGIRTTWRLRQRWVSDAGRSIQQMQKALTTMNVQLANTISDVSGVTGLAIIRAIVGGERDPWKLAKLRERNIRASEEEIARSLEGNWREDVLFELEEVLEGYDFQQKRIVKCDEQLKKYMGTQPTREVGGAVEVAGEEVAEGPKQRGRKKKGQRKPRKNQPGFHLEAELKRVMGVDLTRIDGVKVMTAQTIYAEVGADLSDFPTERHFASWLMLAPKRDVSGGKVIKHLTFKGSNRVANSLKMAAESLKESDSYLGARYRSLRGRLGGVRAVKAMARYLACLIYRMLTKGEAYVDRGATYFEKKRQDRDLVYLRRKAATLGLQLIAAV

SEQ ID NO: 173610 - protein, 410 aa, unidentified
MEVLHPRCAGLDVHRDSVVACARLVRPGGIERHVETFGTTTSELERLARWLDGHAITHVAMEATGVYWKPVWAVLAEMFEPVLANAAHVKNVPGRKTDVSDAMWLADLLAHGLIRSSFVPPLAIQALRDLTRTRKQLTREKASHVQRIDKLLQAANLKLGSVLSDIMGESGRAILDALAGGESDPERLAGLVRARLRASRADLVEALRGRLAAHQRLLLGLHLGQVDAIDAAIARIDAELGDRLEPFRDAVARLTSIPGVGALSAAVIVAEIGLDMGRFPTAAHLISWAGLCPRHDESAGKRRSTRLRPGDPWLKTLLVQVAWCGTRAKDTYLRALFGRLRARRGPRKAIVAVAASILTAIYWMLRRGVAYQDLGADHFERRDRARLAARLTRKLRELGFDVTLAEPAPA

SEQ ID NO: 173611 - protein, 399 aa, unidentified
MIHVGVDIAKYRHAAAAVNDAGEVVMQPRFLANDAAGFASFSGALRKLGGPEAVAVGMEATGHYWKVFRHACAGHGYRTDVINPLITSREASADVRGRKSDKTEALAIAHVLRKGGYSPAPAAQPATDTLKALARHRRALVERCSDARLRLVAALDVAFPELEKLLGDLFSVSSLAVIRAFPSSRLAAGADIRTLASVFRKASGGQLGQEAAGEFRKAARRSLSLTMDTGGGEFVIPQIVDEIRAASARIDAVEKRMLEEPRPVVATLLGSIKGAGRIQPLVIAAEIGDISRFAGPDMEKRLLAYSGCDPRVRESGKWKGTTRMSRRGSPTLRNALYLMAGTIRLHTPCFNAIYKRHIGKGKHHCVAISHVINKILDVLCGMYRTNTLFAPPKTEVMPC

SEQ ID NO: 173612 - protein, 364 aa, unidentified
MEYIACDAHKHYTLASVVTPDGQLVREERIEHERGAVRDFLKRCERGSPVAVETIGNWYWIVDEIEAAGCLPRLVNARKAKLMMGEINKTDKLDVRGLNRLQRSGTLPTVWIPPGELRDQRDLPRTRMVFVRQRTQLKNRIHAALAKYALHDLAVSDCFGVRGRALLRERFELLPPHTAYASQQLLGQVEELDRQVHAFEQRIQATFKATPAIQRLLTLPGVGYTLAVVIALEVGDVARFASAERLAAYAGTTPRVHASGGKSRFGPARPDVNRYLKWAFVEAANAICLHRGRVAHRHASRLYERLARRKGHAKAIGAVARHLAEATYWMLSKQEAYREPKSVGRFVRGGISARGPMSSSKLDR

SEQ ID NO: 173613 - protein, 413 aa, unidentified
MDLTPMHKRVIALDVHQAKITACAVVEHDDGRVEVTKRDFGAFKRDRRALAQWALEIRPEVVVMESTGVYWKSPFAALESVGIIAWVVNARHVKAVPGRKTDMADAQWLATLARAGLLRASFIPPLQMRQLRLVARQRQKLVGMCSAEKNRLHKVLVDAGIRINVLVADIHGASSRAMVKALIAGKPIHEVLDCKGRLRASREELFEALDTNECGTEQFSAVHRFVAQEIMQHIEQIEQRIARLDQYLLEGLRPWQAQLKLLQTLPGIDEQGAAMLLVEIGADMSVFGSAERLASWVGICPGNNESAGKRKTGRIRKGNAWVRRLLCEFAQAAARTRCALKAKFDALTIRKGRKKSVVALAHKMLRTVYAMLANGTHYQDKEVDYEALNVQRNAPRWIKMLRKHGFIATPAAA

SEQ ID NO: 173614 - protein, 367 aa, unidentified
MKEEKEKKAEPRYVGIDLGKKSYHVAFVGKGGKVTMSNGKTYPDGRQALYRKLRPLDKVAVEACAMAFIMAKEIQAAVGCRVYVLNPYKLAVIYASMKKTDREDSMKLAHILEDCREERLPEVPVPSDKDMKRRKLLASYRRAQRDRTRDINLLHALFVSCGITTKVRSDLSTAEGRQEAVKELNGIELPEAEYILKCLELCEKRIAELDKEIKAEAAGDEVIKRLQSVPGVGPMVAFAFSAHIDAAHFENAGQVSNCLGLVPRVYMSGQMVVYGHITKRGNSFLRALLVQGAWALIRSKDGGKLKERYEYMTKEKSKSKKKTIVAIARRLAEEMYILMKYGTLHEKRPFTPEKGKAKKLAQVALSA

SEQ ID NO: 173615 - protein, 368 aa, unidentified
MVKQSHYKVGCDAHKHYSLFAVLDHRGRPVEQTRVNHEPGAIRAFVSRFPPGTPVALETVGNWYWIVDEIEQAGCVPLLAHAQMAKKMMGHVHKTDKLDAQGLAILQHLGSLPTVWIAPGEIRDARELPRTRMALSKVRTMLKNRMHSTLAKYALSLDTQSDIYAPKWRPQLMQLTCSLPDETRRCMEQELELLDQVQEQIHRLEARILERVQMTPTIQLIQSVPGPAKILSIVIDREVGSIDRFPSPHHFASYSGLVPKVKASGGKTHYGKMIKAANNYLKWAFIEAANVVVRQQHHPSWRQKYVVALFERTRQRKGHAVAVGTVARYLAEATFWVLKKGEPYREPMPQHPAGRKSAVSSKQGQVRA

SEQ ID NO: 173616 - protein, 349 aa, unidentified
MKTFYVGMDVHSVTIRIAVLNGAGKVVMALVIETGAERVRSFLKQLRGKVYVTFEEGTQANWLHDIVRSLVTEVVVCDPRHNKLLQSGNKNDRVDAQKLAELLRLGSLKAVYHGDHGVQTLKELVRTYDCLVSDTTRVMNRLKAIYRGRAIACAGHDIYRQDRRKQWLAKLSEPGAKQRAGFLYEQLAALKPLRRKAKLAMVKEVRRQTAYLSLMSVPKLGSVSVAQLIAVVGTPHRFRSKQQFWTYVGLAVVTRSTADHEVVNGVLRRSQRPVSTRGLNRNHNHLLKRVFKNAATSACHSGPFKAGYDVRVARGMAPSLARLTIARQLAATTLAIWKRGEQFDPERKK

SEQ ID NO: 173617 - protein, 427 aa, unidentified
MKLSTTKHSGSTTQSIPVEAIIACDVSKDDIHLVAQFGHNRIQRHFGNQTTLIEKELRHLKTIAQRCNCSKIRVVAEPTGNYHKTLFRTAERLEFQTAYVSPEAVSKMRVIETNDTGKTDIKDPNVIHTLASIGKTLRHRSLAEPYNLLRQWNKIYDAADKCTVKAKGSMHTLIKELFPDFGMKKDFIFGNSGRALMAKYKYNPYRIARSGRKRFNATMKRAVPRIKFTTLDKIFSQAQSSVRNRLSPRYVEIIELQLAQRWHDLELAQDRKQQAKEAMEDLYNEARLNDDKLPQALKGVITTFHLARIVAETGPLGDFESWRKLVRFSGYNLRERQSGKYRGKTKISKKGRRLLRKVLNLCILPLIKKNGLYGPYYHRKKEKMPGTKAMTAVSRHFLKMLYGWYRTGCAFNAQRVFTCESQMKLAA

SEQ ID NO: 173618 - protein, 351 aa, unidentified
MSQNLNSAIAFIGIDIGENSFHVVGLDGRGAIALRQKWSRGQVEARLANMPPCLIGMEACVGAHHLSRKLKALGHDARLMPAKYVRPYSKGQKNDFRDAEAIAEAVQRPTMKFVATKTADQLDLQALHRVRERLVSQRTGIINQIRAFLLERGIAVRQGLRFLRAELPRILATPPNVLSSRMVRVIEGLAEDWRRLDERIDHLSDEITALARQDVGCERLVSVPGIGPIISSAMVAAIGSGDAFTKGRDFAAWLGLVPKQISTGDRTILGKISKRGNRYLRVLFVQAAWVVLIKPQSWERHGLKPWIEAAKKRLHRNVLAIALANKLARIAWSVLARGRSFEARSAIASAV

SEQ ID NO: 173619 - protein, 356 aa, unidentified
MSREVKYIGMDVHKEAIVIAVLNTRGHLVMESIVETKASSILQFIRGLQGELHVTWEEGTWAAWLYDLLKPHVDQVLVCNPRRNALLKEGSKNDKVDARKLADLLRTGMLRPVYHGEHGLRTLRELARTYQTLSQDLNRVMNRLKALYRGWGIACGGPQVYAPRYREEWLGKIEHVGVRRRAELLYEQLDGLQSLRRTLRSELLAESRKHQAAKLLRQIPCIGPIRAARLIALMQTPHRFRSKRQLWSYSGLGIETRDSAQYRFVRGVLQRAKKPQQICGLNRNHNHEMKDIFKGAANRASCGMGPLRDFYVALLDKGMKPEMARLTLARKIAAIALTLWKKEERFDAEHLKMQAA

SEQ ID NO: 173620 - protein, 345 aa, unidentified
MGQVIRIGMDTSKYIFQLHGVDASEQVVLRKRLSRKAMLEFFVKLPPTVVVIEACGAAHYLARELGKLGHTVKLIAPQLVKPYVPRNKNDGRDAEGLCEAASRPRMRYVPVKTAEQQAALMLLGVRDQLVARRTQLSNTIRGHAAEFGLIEAKGLDKLISFMAAIERNERVPVLARELFAMLARQYDQVQVELKAIEAKLLAWHRGDALSRRLAQIPGIGPVTAAALVMKAPDPHTFRSGRLFAAWLGLTPKDHSTGGKTRLGKITRAGDERLRQLLVVGATSVVKQAKAKGRGPRWLLELLKRKTPKLAAVALANKMARIAWKLMTTGQSYDSARIDAHMAVAA

SEQ ID NO: 173621 - protein, 312 aa, unidentified
MNTQNTAIIHYVAIDVSKATLQVQDDKRAFTVENNSIGYRKLLVHLKGCSKPLVVYEASGGYERELAAFLRKSAIPQAMLNPARVRDFARSEGVRAKTDPIDTRMILAFAKSKALEAIDPPSQESLDLAALLDRREHLVEQMAREKNRLQNSEALILRSIKRMMKTLEKEIAVIDKAISQLVDSTPLLKSRSQTMQSVKGVGKVTAWTLLAYLTEMDHLDRNKLVALAGLAPFNRDSGKMSGRRSIQGGRAKVRKCLYMAAHTATSCNPVIAAYVQGLRDRGKPYKCAIVAAMRKLLIHLQCLIKKSQLAPC

SEQ ID NO: 173622 - protein, 428 aa, unidentified
MEEVDDAELVVERVAALDLGKAGLEACVRVPHTHRPGQRMQELRGYATTTAQLLELAAWLRQWRVQRVVMESTSTYWKGVYYLLEAELDCWLVNAREVKNVPGRAKTDRADAVWLAKVAERGMCRASLVQPAEIRRLRDLTRYRRALVQDRTREQQRVEKLLEDAQIKISAVLSNVHGVSGRAMMEALIAGERDPRTLARLAKGRARKKTDALEEALRGFFTDHHAMILQMMLDNTDRISAQIAELDARIEEAIDPFSGQAARLTDIPGVDAVAAAELIAEIGVDMTRFPSAAHLVSWAKFCPQTHQSAGKSKAKGRGKGNPWLAGTLGRIAFANSRSDTFLGTRYRRLARRRGGQKAIVATGNSVLTVVYHLLSGPDASFIDLGPEYYESRINKHRRARDLASQLQALTGQHIVIRDGKALITDTAA

SEQ ID NO: 173623 - protein, 270 aa, unidentified
MEQVIGIDLAKRVFQLHIASPLGKMMKNTVVSRDKLTAFLAQQPPSKIVIEACGSANYWSCQFKRFGHEVKQISPQYVAPFRMGSKNDQNDAAAIVEADSRPGMRYVPEKTQEQQDIQCLHRVRQRLMKNRTALINQIRGQGLEYGIAIPESAHKVEQCLPDHLENAENDLTPLSRELFQELLRELKEQQQRLKVPDKRLDHLNAQEEDSRRLLTLPGIGPLGASALMIALGDSTDFKNGRHFASYLGLVPREHSSGGKVRLLGITKRGG

SEQ ID NO: 173624 - protein, 405 aa, unidentified
MIMNNSPQIYVSVDIDCRQHSVAIGLSNSDVLDEFAILHRPEGFKQFFERMEHHRQHHGGAVAVAMEGYNGYARPLDSLVKVRGYQLYNINNLKLARFKEIFPAAAKNDRIDACKGLELFQLRDHLPLAKDVLQEIMPTPRENDMLKRLSRRRRALVDEKSRLQSRLQGDLHAVCPGLLDITKDADNLWFLRFITSVDELTKLSRLRVSTLLKIPGVGRKYVSDISAWQSHASFSHEVEWVGEMIIEDAWRILALKNDIKALELRCKMLMQESQAAQLIDSIPGFAVICASELAGEIGTIDRFASERSLALYLGMANLDNSSGKFRGSKAPQHVNKRAKGAMMAAVDKHRKCVPESQRYYEKKRIEGKSHNQAIRALGRQLCRIIFKMLKQNRAYEIRKKIDENT

SEQ ID NO: 173625 - protein, 337 aa, unidentified
MAKQKALRRAGVDVSARWMDVSRDAADEAVAVRQCANTAAGQRELARWLTRGGRRAQVVLEATGLYSLDVALTLQRTAGIEVMVINPRASKEFAGAWGQRARSDASAAAVLREYAARMPFTPWTPPPPAALALRAIMRRVVALIEMRVQERNRLHALSATEALPPSVRADVRQHLGALGRQIARLECEARALVEPAPALRAGYRHLCSVKGIGRRSALLILSEVAVLPAELSVRQWVAHAGLDPRPMRSGSSVHPPVHISKRGNVYLRRALFMPALVAVRRNVAVQRFATALTTRGKAPLAILVAVMRKLLHAIYGMLKTDTDFDGERFRRSVLTAA

SEQ ID NO: 173626 - protein, 379 aa, unidentified
MGDCSEVFVGIDTSKLRNAVAIADGGRDGEVRFLGEIENSEAATAKLVRKLASQYQRLTFCYEAGPTGYGLYRQITELGHECIVAAPSLIPKRPGDRVKTNRRDAVGLAKLLRAGELTAVWVPDRHHEAMRDLTRARETAMLDLRRKRQQITGLLLRQGRHYQEGNQERRKPWTKIHKAWLMRQKFDHPERRLVFEEMMLAMREAEERLARLEQAIRVAVADWSLAEVCTGLMAMRGIDLVSSAGFLAEMGDLNRFPTPSELMANLGMVPSEKSTGETIKRGPITKAGNRRARRLLVECAWAYRHPPRVGVTKQAKVAAAPRAVREIAWKAQHRLYGRYRTLIRRGKLKNVAIAAVARELAGFIWAVNREITVAGAAAR

SEQ ID NO: 173627 - protein, 419 aa, unidentified
MTIQQSTPPQAALVAIDIAKNRHEILIEPGPGMRRRRLSVLNSRAEHDRLVATLHALGKPVVVGFEPTGNYHRVLAHRLITEGFQTRLISSMALARTREALHNGWDKNDPKDAQVILHMLQIGASTVYNDPGCDRLNDLQELSKTHDMVSRAKTELWHRLLTHYLPLYFPEIEKFHGNSRSDWFLALLEQFPTPGSVTALSKEAFATAAWDLVGRKVSKTRLLADIYETARSSTALPVQLDQPAIAMFRMVLAEGRSLLRQRDQIEAQAEVLLANDPDAARLRQLPGIGPINALTILAEAGDLRRFGHHRQFLKFCGFDLATHQSGMFRGQTKLSKFGNARLRRSFWLAAQVAIRQRDNSFRERYGRYIARDPENKHLRRKALTAVAAKMARVAHAIVRSGADYRPFFDRPVPGGRTSL

SEQ ID NO: 173628 - protein, 318 aa, unidentified
MADVHYAGIDVAKDTLELALGADGAVEQFANEPGDHEAIIKRLRHGQVALVVLEASGDYEFALACALQAAGVALALINPRQARDFAKAMGRLAKTDAIDARVLAQLAQVIATHPQRERFVKALADTEQQHLQALVLRRTQLIGMLTAERQRMAISHAVARKSIQMLIGAIRKQLEDIEAQLATHIASHHADVAALLQSIGGVGPATAAMLIAELPELGRLDRRQIAALVGVAPFNRDSGSLRGKRMIGGGRAQVRRSLYMAALVATRFNPVIARFYQRLLAAGKPKKLALVACMRKLLTILNAMVRSGKPWDESLHSA

SEQ ID NO: 173629 - protein, 389 aa, unidentified
MLKQEKEYREGERTAVGIDPCKEFLQLAILSPDGKQEFKKLSLLPSITAEIVRSTVPGRTQIGIESYGSYGKLFVFELLKKGYDVREVNPSISKKLTDLITEDHSDCLDAVSIAKALLLIPDLPKVSFTENKLMLAKLSRLRKRLVKDLNGYLNRLHIALTESYGAVYRRVFQTIFTGKALGYFEKYPTINDAFSQRRKVIAIIGEEKWDLLEQAGQWEKSFYLGLLKIEIRCLIRIIKALQASKKELEEKIKEVGAEDEDVKLLKTFPGIDYITAATLLSEIGNIERFEKEGCLSSYCGVSPVMWQSGTAKVRTKRRKRYSRRLKGILYFISLSQIRLNPESRDYYWRKRKEGKTHWQAMNALSRQLIKIIYYMLKNRECYQRERVVH

SEQ ID NO: 173630 - protein, 355 aa, unidentified
MAYIGVDLHSDKFTAAFRDKTNKDILQSYYLSEYENFIRNLKRDDYVFLEASTPTFAFTDLLKDKVKETIVIDPIQFRAIADSRKKTDKIDARQLARMGKYHIETDKDFLPEVYVVEEGIRKLRSLFTTYRLIRKEINQTKNRIHSLFKQNLKPYSKKHIFDKIMTGFKPIDLDEEYKIQVEILFDVLSKLEEKKAEIKKKILLTGEPFIKDIDILVSISGISVFVALGLISDYATVERFKNAKQFSKYLRSTPKSEESNKKVKTGKTQKSGRKLSMELMLQSINHFRKESPFIDEFYRRLRKGKGACKAKTAVVRKILTAMYYMLREGEYYRYMNKTSHDRKMREYQRFLAKNK

SEQ ID NO: 173631 - protein, 429 aa, unidentified
MTKKYILKTQTVPAERSAVETYLAPPPPSKGKIIGLDCHPDTFTAAVFVGQTPHDARKIGSRENLSLEALLKWAAAELTPQDIILMEAGSNSFELCKRLGNLGLKACVLESCHVGKHAKTYADNDKMAAARIALVYLAGNAPCVWVPDEQSRERRELLHAYRKAVGDHTAATNSIKAYLNGRGLRLGKHGLDEKTTSQWILDQADWSVLQKNILTEHLANITESKERRKRLYRLIAAEMAADPKMMRCMKVLGVGIVSAFALLAVIGDIGRFHSPEKLVAYIGLNPGQRQSGKGKDIRLGVGRRGRGDIRHLLIQGAHAIMRSGRNTPLGQWGWKLFARKGNRNVAVAAIARKLLVQVWHLLHGNPPLALESDTSFRIKLQKLAVALGSTLRTGIGLGKTLEDTIKTLLSRCQTHPEPSASPCETPQPA

SEQ ID NO: 173632 - protein, 343 aa, unidentified
MDYFAGLDVSVKETSVCIVDDAGKIVRDARVASEPEALLQVLTIAIYRFKRVGLEAGPLSQWLYSVLAEAGLPVTCVETRHMRAMLKAQINKTDRNDARGIAQMMRVGLYRPVHVKTLRSQKLRVLLTHRKLLHSKAIAIENDLRATLRNFGLKVGMVGTVKFEARIRELVENLPDVAVLVEPLLVVRRVLREQVGILHRRLLAIVRDDDVCRRLMTIPGVGPVVALTYRVTVDVPARFRNSKAVGAVFGLTPSKYQSGENDRTGAISRCGDEMMRMMLYEAAQSMLVRSAKWSWLKAWAMKIARHRGMKKAIVALARRLAVIMHRIWVDGTEFRWTREVAVA

SEQ ID NO: 173633 - protein, 343 aa, unidentified
MQAVTTIGLDIAKSVFQVHGVDAHGNVLVRRQLKRRHVLAFFEKLPPCLVGMEACASSHHWSRELQKLGHAVRLMPPAYVKPYVKRQKNDATDAEAICEAVTRPNMRFVPTKTPEQQSCLMLHRTRHLFIRQQTAVINAIRAHLAEFGIVAPVGRKGVEELLTVVADTSDERVPEIARACLAALGAQLRMLKAQILEFDRRIMAWHRSNTASKRLDAIPGVGPALATALVACVADPRTFRSGRDFSAWVGLVPKQRSSGGKDKLGGISKKGDRYLRSLFTAGALAVIRYAKIHGTKHRPWLTALLARRPTKVAAIALANKLARMAWAMMAKGEHYKEPAALAA

SEQ ID NO: 173634 - protein, 361 aa, unidentified
MLKQSHYTIGCDAHKHYSLFAILDGNGKLVDRIRVNHEPGAIRAFLSRFPERTSVALESVGNWYWIVDEIEEAGCVPLMAHALFAKKMMGHIHKTDKLDAEGLATLQHLGSLPTVWIAPGETRDERELPRTRMAFSKIRTMLKNRMHSTLAKYALSLDTQSDIFTPKWRPQLMQLILSLPDETRRCMEQELELLGLVQAHIDRLEVRILERVNITRSIQFIQSVPGPAKILSIVIDREVGSIDRFPSPKNFASYAGVVPKVKGSGGKFRYGKMIKQSNNYLKWAFIEAANVVVRQRHHRNWQNKYVSQLYERVRRRKGHAVAVGAVARYLSEATYWVLKKGEPYREPQPRRSLPKQEQARG

SEQ ID NO: 173635 - protein, 422 aa, unidentified
MLEQTQDREEIIARVAALDIGKAEVMCCVRVPDPDRPGRRLQEVKPYSTMTRSLLLLADRLAGLGVTRVVMESTSDYWKPVFYLLEAQGFEVWLVNAKDVKHLPGRPKTDKLDAVWLCKVAERQMIRPSFVPPPPIRRLRDLTRYRRDLVEACTAEKQRVEKLLEDAQIKLSVVASDSFGVSGRAMLAALVAGERDPKVLAQLARASMRRKISRLEEAFTGYFTDHHAFLLSTMLSRIDAITTDIARIDSKIEELVAPFVVAVERLDEITGVGRAAAQVIIAEIGLDMTRFPTPAHLCSWARFAPGISESAGKKKGAGSTGHGNPYLARVLGEAAVAASRTNTFLGERYRRIARRSGAKKAIVAVGRSILVIIWHLLSDPDARYHDLGPDFYPSRTNRDRKIRNHITQLNALGYRVTLEPAA

SEQ ID NO: 173636 - protein, 314 aa, unidentified
MDVSPLTVGLDVSKAEIAIATWPEGEAWTSTTTPDALDQLVTRLVGLHPELVVVEATGGYERAVVAAGVAAGLPLAIVNPRQVRAFAKAIGQIAKTDAIDARVLALFAARVRPAARPLPDADTQALAALIARRRQLQDMLVAERQRLDRATAKPVCRDLRQHIRWLERRVDDVDTDIDRTIERSPAWRVKDDLLQSMPGIGPTVARTLLAELPELGRLDRRAIAALVGVAPFNRDSGRWRGRRVVRGGRPSLRKALYMSALVAARHNPVLRAFYQRLRHAGKPGKVALVAVMRKLLTILNAMMKHQLKWREAVA

SEQ ID NO: 173637 - protein, 364 aa, unidentified
MHYVNNTELSSHEETRSQFNGGRGAIKLGIDVHQDFYVVVEQVGGSNPKPPQRFQKEAFLHWAGRLKRKSGAEVHAVYEACGFGFSLQRKLSALSIQCHVICPQRLDEHNRRVKTDGLDAKALCLRLDRFVQGNRAALAIVRVPTEEEEQLRAIHRQREQLVKARKQLEAQGRSLLVNHGLEPVQNWWKPRTFAALPAPHWMKELLGNSQPILLALQEKIAVLTIQLQSAAAPNQPRGLGLMTSVIIDREIGDWNRFNNRRQIASYTGLCPGEYSSGNTRLQSCVTKHGNPRLRAALVELSWRMVRFQPNYKPVVKWRAILAKGALSTGAARKKAIVAVARQLAVDLWGVRTGRCKPQALGLVI

SEQ ID NO: 173638 - protein, 350 aa, unidentified
MIIIGCDYHPGFQQIAFVDTETGEVQERRLEHREEAEKFYRDLRVQGAPVRVGMEASGHARWFERLLAELQFELWIGDAAEIRSKRVRKQKTDRQDAQLILQLLLEDRFPQIWVPSWENRDLRQLLWHRHRMVQARTRIMNQLQAVALNEGLRWKKRLWRDAGREQLESFPLAPWASRRRGDLLELLDRLTPTIAELTQAIEQEVQKYPEAQRLQTHPGVGALTALAFVLIIGRADRFQCGKQIGCYLGLVPLEESSGERRRLGHITKQGNSLLRFLLVEAAQVTVRSDPQWRSKYFHLAMRRGRKIAKVAMARRLAVRLYWMWRKGWDYQQLNQFGPHAGQPEHRDGVQ

SEQ ID NO: 173639 - protein, 424 aa, unidentified
MATITPVTATVKSEDLMQVCCDVSKEKIDVYSRVGHEGALFEMMDTIRNCGSVLQRQLKAWQELAQAHGHAGVLVVCEPTGGHERKLLALARQAGSRTAYVSGEAVGKARVIESNDTGKTDRKDARIIATLAGMGKTLKVRQLPDEYERLRELNTTYDLECTTVATIRNHVHDQVRQLFPDLDGEDGFVFSATGRAIRQLFGLNPARIRECSWREFVAKVKTFVKAARIERLEKVWAAAASSLLHQCPATVRAMREERLGELFEDLDRHLGRKLQLRTRILDAYGKTEESRKLADIPDASSFQLARVIAESGPLADFRHASQLLRYFGMNIRERQSGKWTGKNRISKKGRALGRKVLYQLVFSSLIGEGKLFADPYRRKKADCACGMKAIVCLMRKALKMILGVFRSREEFSRDRVFASLPAAA

SEQ ID NO: 173640 - protein, 345 aa, unidentified
MNITTVGIDLAKNVLQVHAVDARGKAVLRKQFKRIEVSAFFANLAPCLIGMEACGGAHYWGRTLEQFGHTVRLIPPQFVKPYVKSNKNDVADAEAICEAVARPHMRFVPMKSVEQQSVIALHRVRQGFVRARTKQANQIRGLLGEMGLIIPQGIWRIAPRVPALLEARSDLPAVFKNLIERLTEHLKFLDRQVDDIHRQIVAWGRSCELSQKLQKVPGVGPLTATALIATVADARTFKNGRQMAAWLGLVPRQHSSGGKAKLLGISKRGDKYLRTLLVHGARSVILAAKLKRAKSHFPWLAQLLDRRHINVATVALANKNARIMWALMAHGREFDPAFVVAPAAA

SEQ ID NO: 173641 - protein, 374 aa, unidentified
MDRVPEISPTHMPHSVDEESSGKACTASTADLTARSRRHVSTPAIHTLALGDTAMQTGLVITTFIGVDVSKATLVTCVHDSSTRCTLANQRGAIAAWLKSLPAGSAIGVEATSTYHELLADLAHSHGLLVYVLNPKDVHRYAKGVGIRAKTDRVDAALIARYIAHEHANLHLYRPASLEQRQLQRLLTRRAKLSRARISVQQSLQGLPGLKVPLRKLLERFDALIAVIDARIQALVNACPQRQDACQRLRSIKGVGPVVGPALLNTLERFAFKHADSFVAYTGLDPRPDDSGQRTGRRRLSKHGPSELRRLLYTAAMAAVTSPAWKSLYQHYLDKQLSRTQALVIIARKIARTAWSVYTHNTTFDPQRLTSGLT

SEQ ID NO: 173642 - protein, 401 aa, unidentified
MKSLSGGIDIGSEHHHVIIMGDEERILYDQKVSHKFSEFHRAVKEFREIEEREGGKVSFAIEGKNGYGAPFDRILIENGFTLYNVDNLKLKRFRDVFGAEWRNDQRDAKMLAKMLRLRDYLDTEDEKAFITVEKASEVNERLKILSRHQQVLIDEKVRIQNRLRKRLLEVCPDILEVGDVDSKKMLRLLAKYPDFSSYKRLTMRALLKIEMIGEKQASLMFESLRKIKYVEELADTYRTIILSYSRRILELKEEIEILDKELEEIGERSFAVKRLKTIPGVGTKLSSRLIGEIGDINRFKTERQLAVYCGVACVDNISGKQKMTKVVYKANKICKATMIEIAGCTIRYVSESSTYYAKKRAEGKKHNHALRCLARQMIKVIFKMLKEDRDYIVKEDIEKAA

SEQ ID NO: 173643 - protein, 311 aa, unidentified
MTNPTIGVDVSKETLDAHRLIDGASRTFSNDPKGFKALIAWIGVDVERVVFEPTGAYHRALERALADKGLPMVKVNPRQARRFAEATGKLAKTDRLDAALLARMGALLHLEARPAPSQDLGELKELHITRDALIKERTATKNRAKGLTLTLLKRQNAAHLAQIERQIDAIEAEIEQRIKVQPELARRFEILMSIPGLGRITAFALLIDMPELGVLEPGQAAALAGLAPIARQSGRWSGRAFIRGGRASVRRALYMPTLVAIRFNPDLKRKYQQLTDAGKPPKVAIVAAMRKMILLANALLKADRTWTPKTA

SEQ ID NO: 173644 - protein, 430 aa, unidentified
MKEVIPIMKKRIYRRMPVNDFQPDSVSQPDLGGKLVFAIDVAKVDMVAAIAAADGRVLQTISWKAPDENPRVLEILRAFRSAGLAVEPVMEPSGTYGDVLRHQLEQDGFPLFMVSGKRTFDAREIFDGVPSLHDAKSAAIIARLHADGLSTRLRDEGPDRRQLRASLAIMDLYQERYLQLVHRLESWLARHWPELPTLIELTSSSLMALLARVGGPADVAAAPDKATKLLLGISHRLLPDDKVAAIIASAKSSVGVPLVGVERDALIAIADEAYRAHRAFTTAKTRVDKLAATTPAAALAPAVGHTTAAAVFAEVGDAKSYSCTRAFVKAMGLNLKEKSSGTVHGQLKITKRGPSRVRQYLWLAVFRWIQNDPIANAWYQRKKQRDGGRSSRAAVALMRKLAKALYHVGRGAIFDSSKLFDVRRLHLSEG

SEQ ID NO: 173645 - protein, 345 aa, unidentified
MSMVRMIVGGVDTHADTHVAAVVDANGGVLGIESFPADHAGFEALLGWLTSHGEIGMVGVEGTGSWGVGLSRFLHGHGISVVEVDRPNRQDRWKVGKSDPTDAVSAARAALSGSAAVIPKTRNGPVEQIRILMVARRSARSQRIETLNQLRHLIYTGPETIRARFKDRYKTGLITEVARLRPRTGSDPVLYTTTVTMRGLARRIVMLNTEIKALDAMLVELVADTAPSLVALYGVGVDTAATLLVAAGDNPQRLRTERSWARVCGVSPIPAGSGKTSGRHRLNRGGNRQANAALYRIVLTRMSRDERTRTYVARRRAEGKNTAEIMRCLKRYVARETFRHLPRTV

SEQ ID NO: 173646 - protein, 414 aa, unidentified
MTVLFVGDDWAADHHDVELMDQAGRTLARARLSEGAAGMAKLHALIGEHADVADGEDDLEVRIGIETDHGPWVTALAAAGYVVFAVNPLQAARYRERHVVSGAKSDTGDGHILADMVRTDAHQLRPVADDTDEAQAVKIVARAHKTLIWERNRQAARLRYQLRDFFPGALDAYGGLGLDSADVLELLGKAPDPAAAAKLTTAQVSAALKRAHRRHVAGKTTMIRAALRAPQLTQPAQVTGASAAVVRALAAVIVTLNQQITVLQGQVEAYFLAHPDAEIVLSQPGLGQILGARVLGEFGDDPARYASAKARKNYAATSPITRQSGKRKTVMARYVHNDRLRDALGRQAYSALTASPGARAYYDQLRARGIEHDPALRQLANRLVGILHGCLKTRTLYDEATAWPQNDSQYPPVA

SEQ ID NO: 173647 - protein, 340 aa, unidentified
MAVTVLGIDLAKNVFALHGVDHKGHTVLCKPKVSRAKLLETVANMPPCLIGMEACSSAHFWARTFEKIGHEVRLIAPKFVSPYRLSGRTGKNDAADAQAICEAVQRPHMRFVSIKSEEQQSIQCLHRARQGLNEERTSVCNRVRGLLSEFGVIAPLSPERLRNEFEAMKIHLPALATTCIDELFLHMDNIERKLLKFDRLIKTTAEQDERCQQLMKLKGVGAMTASALVCAIADGKEFNNGRQLAAWLGLTPSQYSSGGKQKLGRITKAGDNYIRSLLVQGARSIMASAGRKDDPLSKWVCGVKDRRGYWRAAIALAAKNARHCWAILHYGESFESCYST

SEQ ID NO: 173648 - protein, 360 aa, unidentified
MLLKYSVGVDVSCKSLKCCISTIDKEQKVKVKSSTTVSNNLSGFKSLIDWVKKHYNDPEVPLLVCMEATGVYYEQCAYYLHDKGFKVVVVLPNKSKKYFQALGLKSKNDKIDAKGLAQMCAEQHLKIWEPMDDFYYVLRHLTRHHQSLQEQKSALNNQLHAIQHSAYQSKTILHQKNQTIALFDKQIKQIEKAITEHITSNPEAKAKFDNVCAIKGLGIISVATVVAETNGFILFENYKQVVSYAGYDVVENQSGNHIGKTRISKKGNPRIRRILYMPALVVKTCQEPAFINLYNRTFERHGIKMKSYVAIQKKLLVMIYYLWKKNEKYNPNYGMNIQEKELVLPSLLAFEKGKNEVASL

SEQ ID NO: 173649 - protein, 421 aa, unidentified
MNQLADTQYTAYVGIDWAAAKHDICVQSAKCEAREFACISSQPEAIETWAQDLYRRFGGPIAIALELSKGPIVWALQKYDFFVLYPINPSTLAKYREAFTPSGAKDDPTDAELAVDLMTRHAERFSPLKPQSVGMRKLIGLVEQRDKFVSDQGRLVNRLGHALQQYYPQVLEWFSEHNTVVFCDFLSQWPTLNQAKRARKASLERFFKSHHVNSVELIERRITAIKAAMALTLDTAVIEPHRLQVEVLIEQLRITIKALKRFDDEIVATAQKLPDYDLLFSPLPGAAKVLAPRLLAAFGEDRQRYPHADALQKYSGIAPVTKRSGKTTWVHWRWQCPTFVRQTFVDWAAQTINKSAWAGAYYRQQRAKGCSYQVAVRALAFKWIRILHRCWQDRTPYDESKYLEALRRKGSPLLKYLAETA

SEQ ID NO: 173650 - protein, 413 aa, unidentified
MKKNSNSQTKSGQKTKPTKARGPVQRESKDVMAELVAKLSEKLEQNPAQEKAAEGKPQVAPAPNRDRLTVGVDLGDQWSNYCILGLEGETLAEGQLRTTREDVAEFFRALAAARVIFEVGTHSAWVREVVVGCGHEVLVANPRLMDGTKRRKRKNDRIDAQKLARLGRIDPQSLFPIQHRSTEVRQDLVVLRARDTLVQVRTQLINATRGLVKSMGARLPKCSSPSFPDKVEEILPGELREALLPLVRLAEELSDRIRDYDERIEKLGREKYGHTELLRQVKGVGPLTSLAYVLTLENPDRFRKSRDVGPYLGLVPKQEDSGNSQPQLGISKTGDMMLRRLLVGSAHYILGPFGPDTDLRRYGLRLCERGGKNAKKRAAVAVARKLAVLLHRLWINGEVYEPLRHGTPAAEAA

SEQ ID NO: 173651 - protein, 339 aa, unidentified
MKVVAAVGLDIAKQVFQVHAADKAGRAVVRRKLRRNEVEQFFAELEPCVVGIEASGSAHHWARVLSGLGHTVRLMAPQFVKPYVKSQKNDANDAEAICEAVTRPNMRFVPQKTVEQQDLQCLHRVRSRLVANRTQLINQIRGLLAECGIVLPQHPWQVRSGLPAVLEDAENQLTGFGRELFQCLYEELAQLDEKIGAADGRIQIAFQNTPDCRRIAAVEGVGPLIATTIVAAISNGHAFENGRQFSAWLGLVPRQNSSGGKSRLLGISKRGDPYLRTLLIHGARSVVYRAKAKTDRRSLWINDKQQRLGTSKACVAVANKNARIIWSLIAREQEYRRAA

SEQ ID NO: 173652 - protein, 414 aa, unidentified
MSQNKDAIVAVLTRACGLDVHKETVVATISGEGLERQTRTYSTMTNGLQELGQWLQANEVKDVAMESTGVYWKPVYHILEEYGLNIKLVNARHIKNVPGRKTDKADSEWISKLLLNGLLEGSFVPPQDIRELRDLSRYKKKLKAQIAAEKNRIIKILEDANIKLSSVVSDTSGVVATLLIDGLLQGRKDLDHLIDESYHAKLKSSKELIKEALTGRITAHHKFMIKTMRENISHLESQVAMIEKEMEKNLVKYEEEINLLQTIPGVGKEGAIGIISEIGADMEVFPDEHHLASWSGMSPGNNESAGKKKSSRTREGNKYLKSLLCELAWGATRTKGTYYRAKYESMIGRRGKKRALITIGHKILCAAYHVIKNKEAYKELGYDFLVERKKKSKISFMTQQLKSLGYKVEKLNVA

SEQ ID NO: 173653 - protein, 400 aa, unidentified
MLSIGIDVSKGKSTVCGMKPGGEIVYTPFEIQHTREGMSELVSLLRSSGEEVRAVLESTGSYHCPVVATLLENGIFVSVINSLRMKRFCSQSIRKVKTDRIDAMQIALYGLAYWQELQPTRLPEDTYRELQLLARQYYQMTSMLIKAKVDFNALCDQVLPGMQELMNDHAGRHKLSDFVLRYRHTTHILEMGETRFRKDYCKWAEKKGYRNCERMAALIFATAQNGIPVLPNAPSTQIVITEAIRVLQTVEASRDAILTQMQALAKTLPEYSLVREMPCIGDTLAPRLIAEIGDVRRFHSKRALIAYAGIDAPPYQSGKFCANNRHISKRGNRYLRKTGYEVMQSYVMHKPANDPIFTFIEKKRSEGKCGKIAMVAGLNKFLRIYYGKVTELYRSLPAIE

SEQ ID NO: 173654 - protein, 343 aa, unidentified
MKHIGMDVHSTTTRISVFSDRGREIKSTRVSTDEADLVGFLLKIPGPKQVALEESQMADFVTRMIQPHVTKVIRCLPQHNRLISESEKKCDREDAKALAELLYLGKLKSVHHSPWEYRQLREGVRAYWRASRELTSAKNLLKAFYLFNGVHCTGEKVYSKRYRQKWVQQLAQRSGNPKLLERRYAQMDFFRDNKAEHVKILRELTQPVQRDVRCLISYPGIGFIGACTLVAYLENGWRLKNKRKLWQYCGIGMRFHTSNEKGHCGVTRKGNRLVKNVVITAAAAIASRRNADNALTRMWRAGVEAGIEPDRMKRNLARKLAVLAQRSLRCKEEYDDDRVVTTQ

SEQ ID NO: 173655 - protein, 384 aa, unidentified
MQTITLYVGLDVHKDSITIAIAEPGPKGEIRTFGTIANSLQALERTLIGFRQAHPDARFELAYEAGPCGFVIARRLKQLKIPCLVAAPSLIPKQPGSPFKTDKRDARNIARLLRAGELTAVYVPEPTDEAIRDLCRARTDAVDDQRRSRFRLKAFLLRHGYRYQGKANWGQPHMRYLRELVLPHPAMKSILEEYLQGIDAAHARVERIEGSMLQLLDHWRLKSAVQALMAFRGFQLVAAMITVSELGDIHRFAHPRQLMTYLGLVPTESSSGPRQRLGGISRCGNGHQRWLLTECAEHYALPPKISKELSARQEGQPQAVRDLSWKAQNRLHLRFMKLLGRRLQRNKAKIAIARELCGFIWALLRSLPCYALPSAQPAANASAK

SEQ ID NO: 173656 - protein, 351 aa, unidentified
MVVIGADVHKETHTFVAVDAAGRKLGQVTVKAVTAGHGEAFGWAVREFGPDLTWAIEDCRHLSARLERDLLTMGQKVVRVPPKMMAEQRRIARTRGKSDPIDALAVARACLREPDLPVASHDEASRELKHLVDRRETLVRQRTATINSLLWRVHELDPGHAPAARSLDRKNTQQQLHSWLNSLSGVVAELALEELDDIITLTSRAAVLERRIAKLATAQAPALLALPGCGPLTAAKLVGETAGVARFAAEAKFARHAGIAPIPVWSGRTEGRVRMTRSGNRQLNCAIHRIAITQIRLTDSLGKAYYDKKKDQGMSTTEALRCLKRRLARIVFNTLRTDTQRQATTALAAAA

SEQ ID NO: 173657 - protein, 339 aa, unidentified
MKYIPVGVDIAKHLMQVHFVDEHTGEIIDKQVKREKFLEYFSNREPCLIGMEACGGSHHWARELQKLGHKVRLLKDRFVKAFVMGNKNDVMDARAIWLAVQQPVQSVAVKSEEQQATLGLHRMRQQLVKFRTAQINALHSLLLEFGETTHKGRAALAKEVPEALERLKERLPLYLINMLDEQYQRITELDEHLDHIEKQLQAIARQNETCQRLLNIPGVGPLIATAAVATMGDASAFKSGREFAAFIGLVPRQTGSGGKIRLLGISKRGDKYLRTLFIHGARAAALLTKEPGPWITELKKRRPASVAIVAMANKLARTVWAIAAHGRKYDKNHVSIRPD

SEQ ID NO: 173658 - protein, 340 aa, unidentified
MRVLYAGFDLHGNSNYLGIMDGEGKRVFRKRLLNDLPWIREVLVPFKEELVGIAVESTYNWYWLVDGLMEEGYRVHLANPSAIQQYSGMKHSDDRHDAFWLAEMLRLGILPEGYIYPKEERPVRDLLRKRGHLVRLRTSLVISLQNILSRNLGRKVNVNDVKALREDRVVPLLEGHEDLALAGRVSKEAIDFLTHQIRRVEGVVLRKITLREAYRYLLTLPGVGKILALTIMLETGSIGRFATVGDYVSYCRKVPSQWTSNGKRKGSGNRKNGNKYLSWAYSEASELARRFDLEPRAYYHRKMQKSNAAVAHSALAHKLARAGYYVMRDQVPFDPGKLFK

SEQ ID NO: 173659 - protein, 366 aa, unidentified
MATYCGVDFHARQQLVKWCNTDDGEIRERQLGHQSIDEVREFYAQFRGAVIVGFETSGYSSWFEAMLEELGHQVWIGHATEIRRRARSRQKTDRRDGELILDLLLKNEFPRIHRVSAESREVLRQLRYRHRLVQQRTRSYNSLQAIALGAGVSLRAKLRTRKGKERLLGLSVTEAHSRQREEWLALIAQLNGYIERVEQELEVIAEADERVQLVRTHPGIGLLTGLALVHTLSPVSRFANSRKVAAYVGLEPREYSSGERQHFGGISKAGSRLLRLLLVEAGHKAINKDAQLKQLYYRVVHRREKAKAKVAVARHLLVRAYIMLRDGIDYAEFVRRGVAVRSARVSYRPQVPGKLIERLASGQQPS

SEQ ID NO: 173660 - protein, 382 aa, unidentified
MQTIDTVNPTILLAIELSASTWLVAARVPGLEKPHLHRIDGGDTAALLALISSLRARAARGLDATIGVVCCFEAGRDGFWLHRLLTAHGVVCHVLEPTSILVNRRARRAKTDRLDAEGMLRVLAAYLRGDHQACSMVRVPTPEEEDAKRTHREREKLVQERLRIENRIEALLFTQGIRKRPSLRSWERDLAVLRTGDGREIPRHLRAELDRLRRRLVMTLELIREVEAERDQAANTKPQDQTCHKIANLCRIRGIGENFAAVLTREVFYRSFDNRRQIASYVGITPIPYQSGGMDRDRRISRAGNPRARTTMIQLAWLWLRYQPGSELAEWFRERVGTLAGRTRRIAIVAMARKLLIALWRYAETGVIPAGAEIREETTVAA

SEQ ID NO: 173661 - protein, 312 aa, unidentified
MPCCVGIDGAKAPWDIALRPAGERWAVPNDAGGVVMRVERWQALPPTLMVLAATGGLERAATAALATAALPVVVVHPRQARDCARATGPLAKTDAVEARALAHCAAVIRPTPRPLPDAQTQELRALLGRRQHLIGMRTAEQHRLAGTTARLTKDSAAHMTWRNAAIATLDGDLETLRRASPLGRDKDDLWQSATGIGPVWARTLRRALPALGTRTRQQSAAVVGVAPRHCDRGTLRGRRMIWGGRAPVRPVFYMGTLVATRFNPQIKVFYERLLAAGKVKKVALTACMHKLLTILHAMLKHRTPWQPQEVQS

SEQ ID NO: 173662 - protein, 435 aa, unidentified
MSSKAYRATRVNEVNWAQIARGKEGLGATVGVDVGKFDLLVICRWADGRFERPWRVKNPWEIPTLVGVLKQVKADRKLVVALEPSGTYGEALRQALGDNGIEVQRVGTKASHDYAEVFDGVPSQHDGKDAAVVAELAALGKAKPWAYQAADSWEEELAYWVEEMVIQRQIIMPWQGRLEGLLARHWPEASQVLKLSSGTLLRILKRYGSPQALAEDADAATQLARWGRTLLSPAKIEELLTGARSSVGVRLGPWQQRQIQEYAERALAARQQASRAQRQLRRLAAGHPVLQAQGKVVGVPTACVLWVSTGDPRDFDSAGAYRKAMGLNLAERSSGTYQGRLRISKRGSARTRQWLYFAVLRLVQQCGVRPWYEAKKARHEGEARQVVVAVMRKLAVALYHVGVRNEEFQPRRLFGRSGRRSGRSAKPSVSSQQRA

SEQ ID NO: 173663 - protein, 414 aa, unidentified
MGGVPVFSLLLFQGGVALSALYIGIDVSKDFSTAQAIDWKGNKCFYLELAMTADGFDKLLKAITAHGKDISQVTVAMESTGCYHINLFSFLTHKGIRCIIINPLLTANFARLSLRKTKTDKKDALTISQFLLVHKDSLLKTDLSPDRQDLKDLAREHESLTNLIAGMKNDIRRMLQITFPELESVCNIFSETILDLLRQFPSARLIKIAKPNTIAKALLHEDKRKKTSVSAEDIIKAAKASVASHGAAKEIILPEKIATLQYLIEKKGRMKKVLVEACEDMMVEDIEIITSIGGISNITASRLLAEIGDYRAFSTYKHLIAFAGLDPSVHQSGKFEGISRISKRGNRHLRYIIYLMTTCVVRGDNIFRTYYQKRRAEGQPFKKAIMATAHKLIRVLFTMLSKRTTYKSKEVNAI

SEQ ID NO: 173664 - protein, 326 aa, unidentified
MKIIGIDVSKAKLHSSLLVDPNLKKAKAKSSENTLAGFRALFEWACRHGKCEAADLHFVMEATGVYHEALAEFLFEAGCKVSVVNPYRVKKFAESHGFRSKNDRHDGLVLALYGNERNPTAWCPPPPEASHLKALLARLTALETDIRRELNRLEKAQVGRAPLEVMTSLDNSLAFLEEQKSRLQKEIEDHLSRYPKLKEERDLLLTIPGVGDKLAVQFLALFESKQFTRAPEAAAFLGLIPVEHDSGTSVHKRPRLSKAGDGRFRAALFMPAIVATKYNPDVRELYQRLTKAGKTKMAAIGAAMRKLVHIAFGVFKNHTPYQQQIA

SEQ ID NO: 173665 - protein, 441 aa, unidentified
MSDGWTTAATEPEWAAFAAIDWADQKNFWRLLPVGSRKSEAGELENTPEAVEAWAVDLQQRFGGGPIAVIVEQSRGALVYMLSKYPHLVLFPVHPTTAAGYRQTFAPSGAKSDPSDTESLLDLLLRHRERLRALQPDTVETRLLHFLVEERRQMVDEKTRQSHRLTACLKLYFPQVLQWFDDVTSPLVGALLDRWSNLEELQRAHPGTLRKFFHDQNCRSAERNEERIAAIYQATPATKDEAVVEGCALIARGLVALLKTLRANVAAFDKRIAELAAAHPDTTIFASLPGAGAVLAPRLIVAFGTRRDRYQEAYEVQCYSGIAPVTESSGNSEWVHFRFACPKFLRQTFHEFAGCSIQWSEWAKAYYRHLREEGKKSHQAAVRSLAFKWIRIIFRCWKDGKPYNEEIYMQSLRRRGSLLVGALEVTTSAKWKTVAGFQKLS

SEQ ID NO: 173666 - protein, 344 aa, unidentified
MSEVITVGLDIAKHVFHAHGVDDRGRPIFSKRISRGKLLDFFAAQPSCVVALEACGGAHHWARQLIQLGHQVRLIPPAYVKPFVKRQKNDAIDAEAICEAALRPNMRFVAVKSEQQQAAGLVFRTRDLLVRQRTQLINAIRGHLTEYGWIAPKGPSHVAMLADLIEREAIASSLPEAARAMFRCMLDQLAGLNGKIADLDKEIARRAREDEVSRRLMTIPGIGPISATAIAALAPPAETFAKGRDFAAWLGLTPLQRSTGGKQKLGATSKMGERTLRRLLIIGSSAVVQQASRRGAPKGSWLEQMLARKPRMLVTVALANKMARIVWALLVKRENYKAPVAAKA

SEQ ID NO: 173667 - protein, 412 aa, unidentified
MVVFCGIDWAEEHHDVALVDGEGTLVAKRRISDDAAGFTALVQLLADAGDTEDQRIPVAIETNRGLLVACLRATGRQVFTINPMAVSRYRDRYSVSRKKSDAGDALVLANILRTDLAAHRPLPSDSPLAQAIAVLARAQQDAVWDRTTAHNKLRSVLREYYPAILDAFADKRGGLLRSEARTLLAAAPTPHAAAELSTAKLRALLTRAGLQRNIDPEAHRLREILQREYLHHPQLVEEAFGRQALALLHQLDAACASAEDLAAAAAEQFDRHPDAEIITSQPGLGSLTGARILAEIGDDRTRFTDARSLKAYAGSAPVTRASGKAITVLHRRVKNQRLAATGYIWAFAALTASPGARAHYDRRKATGDRHIAAQRNLFNRLIGILHHCLQTRQRYDETTAFAATAIPTAAVA

SEQ ID NO: 173668 - protein, 353 aa, unidentified
MKPKMESNPVSVAVIGVDIGKEVFHLVGFGADGKIAFRRKIKRLGLKDVFEQLPACIVGMEACLSAHFVSRTLRTLGHEPRIIPAIYVKPFVKGQKNDYNDAEAIAEAALRPNLRFVQEKSQDQLDLQACHRVRSRLVSRRTATINQIRAFLIEQGIAVRSGLRTLRNSLFTILENRKDEISPRMAKLILDLYKDWCHLDERIEAVTGEIEELSRVEPKCQRLMSVPGIGPVISTGLVAAIGTGEAFDRGRDFGAWLGLVPRQYSTGGRSILGRISKRGSKYLRTLLIQAAKVLLMRPHNWPRYSFGAWLKTASERLHRNKLAVALANKLARIAWSVLRHDKAFDTHLETAAI

SEQ ID NO: 173669 - protein, 345 aa, unidentified
MVHVGLDLSRLRVDVCALDDAGALLTRTTASPDAEGLRVLADRLAPLGEVSAVVESMTGARFVRDELVACGWEVLIADAVKVKGLAPLACKTDKIDAQVLAELSRRDLVPQVWLPGPAVRQVRELSRFRIHLVKHSTMLRSRIHSALITYGIPCRTSDLFGVGGRQQLAQLELPEPWAGNVLSMLSVIDHLGAEISELERQLRKLSSQDPAVPLLMTAPGIGPILGFTIAAEIGDITRFPSPRQLVSYTGLVPRVYQSGNSDRRGPLAKNGPRYLRWALIEAAMHAARHPAYHDHYQRTKTRLGKQRGSKIARVEVARKLTEAIWHMLSTNTSFAPAGAASVLAA

SEQ ID NO: 173670 - protein, 313 aa, unidentified
MSQNNTSILYVGLDIAKLSLALDLAGHSHALENHATGHAQLLKLLRPYPHAHVICEATGGYEQPVVRCLQTAGVAVSIVEAGRVRHFARAQGQRAKTDPIDAAVLSTYGHACQPLASTAPSAQQQQLADLTQRRRQLVQLLTQERNHLEHYTDRFRLRQAKQLCRLLDKQIDDCEQAIAGLIGEDPLLKHKAERLQAIPGVGPVVASTMLAEMPELGDLTPQTAAALAGVAPYNQDSGPKQGFRSIGGGRRTVRCALYMATLSAVRHDRILKEFFQRLLAAGKKRKVALTACMRKLVILMNRLLKNNQFQLAN

SEQ ID NO: 173671 - protein, 318 aa, unidentified
MLIRYIDIAKRNFVIAVSSLSKTKTETNNPKGIAHTIEYLKKHKVALVVTESTGGLEIPAAKAIRRAGIAVIIANPRQTHQFAQSQPLTKTDAKDAKMPAFFAQMTAQKEDSQTMPYQPPTEAEEVLEALVNRRNQSADMRTAEKNRLHQVHETQVGSVKQLIAHFDRLIDELDKQIDDHTHTHFDGKAQVAEQIKGIGSITTATLMVMLPELGRLSHKRIASLVGIAPHPRESGETKFKSRCFGGRSAVRKALYMATVAATRFEPLIRDFYQRLLSEGKPYKVAVTACMRKLLTISNARMRDYFAENDTAENGIRTA

SEQ ID NO: 173672 - protein, 415 aa, unidentified
MEPIYQRVAGMDVHRMKHVVTVLIAQEDGTVASETREFGGFKRDMHALTDWLRANRIQQVVMESTGIYWKSVFSHLEAAGIPALVVNAFHVRNVPGRKTDVSDSEWLAQLARFGLLRGSFIPPKDLRELRLVSRYRRKLTGTLAAEKNRLHKLLDDAGIKLGGVVADIDGACASKMIEGLIAGSAPEQLSALGRGKLKAKAEVLEAAVDGELSARHRLVLDMVLNHLRYLEQKLAVLDRYLIEAMKPYAWAWRLLQTIPGVDEIIATMILIEIGDDLHRFGSPSRLASWTGLCPGNHESAGKRKSGKTRHGNPIVRSILCEAANAARRTKTVFQAKYNSLVIRRGHKKTIIALAHKLIRTIFFVLVRRKPYRDSSVDYEAASVAKNAPRWIRALKKYGYWPQLTDPTPKPAPTAT

SEQ ID NO: 173673 - protein, 428 aa, unidentified
MNQTELSRVKEFRQLKNEIQASDTYLIVGIDVAKERHHAFFGTGSGKTLLKKLIFNNTSAGFSELIARAEALRVQTGLSEIVFGLEPTSNYHKPLGRYLISKGCHVVLVGGKAVKNNRELLDERWDKHDTKDAANVADLVSRGKCFYYDTPSREIEELRELHSLRARLKKEEHSLSLRIRNNLLAKHFPELDSFYSACERETLAIVRWCLNPQKIAAMPFDQFFKLVATNGRGIAQKLRLQKIHRLAHESIGCPVGCAVELQAALLVEKIKQVREQIAEVEQVIQQLCAQFPAYEYLLSIPGFGPYVASKVLATIADPWRFDTAKQVIRTAGYDLCADRSGKRSDQAVPVISKKGNSQLRYALYQAAMIASSRHRFFIAYFARMLQGRERERGIKTKMRVKLAAKMLVIAWTLMKKGEPFNPEYLNLQ

SEQ ID NO: 173674 - protein, 394 aa, unidentified
MFIVGIDIAKRGHMVRVVDSEGRTVCRPFSIRNSCSGYNTLLERLRKLTNHKSEFLFAMESTSLYWLALYTRLRKEGYQVVVLNPIQTDAMREMLMQENKTDKIDTLVIAETIRFGRYKASSVPQEKLLALRELCRNRFYLIDMGSDLKRKITTLLDQVFPGFESQFSTIFGKTALAVLRQYPTPEKLSRAQTGKLTEVLQAASNGRFGEWKARQLKELARDSFGIPDCEGAYSALLLLYLDQFQSLQDAAAVLEKRIAELFSQFDSTLTSITGIGPVLGAVILSEIRDISCFASADKLAAYAGLNPKVKQSGDKKSSAVHMSKRSSPYLRRAIWMAGAIAVQFDPMFKAYYEKKSAEGLRYMNIIGHVSKKMTSVIFAVMRDNKLYEPVLPAA

SEQ ID NO: 173675 - protein, 440 aa, unidentified
MPRYVGLDVHKQFIEACFIDEQGKQLHRCRVPVTRESIQTFVAKCLQPSDHVVMETTTNTWEVANLILPQVAKVAIANPLKVKAIAESKIKTDKVDAGVLAQLLRCDFLPEVWIPDKTTRLLREMCAHRAGLAADQTRIKNRIQSLLAQRLIPVSVPVLFNGCGRNWLSHLELNPQDRVRVDSCLRVLDQLELEESGLQKALAQLSYDNEQIRLLMTLPGVGPAGAQALYAALGDWKRFKDGAHVASYLGLSPSTRQSANHCYHGSITKAGNSLARWLLTQAARQVAQHPGPLGVFFRRIHKRKNFNIAVVATARKLVTIGFLMLKNAEPYRYSLPGPTQRKLSVFRVEATGSRRSKSKLRLPMQRREPGTRLQSIPSLDEVYSSENLPPITKADALSSGERRMLQQMGIADLPQRLQVVQTRTYQSRKTAPAPKKNPSC

SEQ ID NO: 173676 - protein, 343 aa, unidentified
MSEISMIGLDLAKNVFQIHGVDASGKVMWRRQLRRGAVEKFFAQLPPCTVGMEACGSAHHWARAIGRYGHRVRLMPPAYVKPYVKRNKNDGRDAQAICEAVGRPTMRFVPVKSVEQQATLAVHGTRALLVRQRTMTANALRAALSELGIVAAQGLAGLRELMARLEAPNEDIPEMMRAALLVLAQHWQALDADERALERQIAKAARADKDARRLMDVPGVGPIIASTVLAKVPDARVFRSGRDFAAWIGLTGRDHGTGGKHRPGRISKQGDRMLRALLISGASAHLRQQKRRGISDPWLRELLARRPYKVAMVALAAKTARILWAMLVKAEPYRGRAIAPAAA

SEQ ID NO: 173677 - protein, 316 aa, unidentified
MKIHTNQNINVGVDTGKFQLDIYIRPLDIYFTVPNDEEGIKEAVKTIKKYDPDRIIIEATGRLEMPFIMACAKANLPFVIANPVHIKRFAGAIGQRAKTDKLDAQLIAHYDEAIKPKLSTLKPDIMQDMSNLVARRNQLLVMQTMEKNRLQILPNSLDMTIKPVLTLFKHQIKKIEDKLVRLIESCPDYQAKNTILQSMKGIGEIAAASIISNLPELGYISSKQASALVGVAPMNRESGRYKGVRKIQGGRHQVRTVLYMAMMSALQSNPVFKAHYQKLVAAGKPKKVAIIACIRKMVVILNSMLRDGVLWEAPKV

SEQ ID NO: 173678 - protein, 338 aa, unidentified
MIHVGVDLHQRFCYMTALEARGKILQAGTVTNEKLALRRYFRQFRGKEVQVAVEACGFWPAFREVVEPEVKRLVLVHPQRVKAIASAKLKNDRVDSATLAHLLRCDLLPESWKADRGTQARRQQVRLRATLVRHRTRLKNQVHAVLHQQGLRSPVTDLFGKRGRLWLAEVKLPVQARESVNVCLRLLDGYSEEIQKQNLQLSEKAKQDKRAEWLMTIPGIGECSAMMLLAEIGDIGRFQDKEALCSYAGLVPRVRESAGKAARGGITRQGSPWMRWILVEAAQVATRCSPAAKRYYERLARKKHKHVARVALARKLLIAVYALLHDGVVFDEQKFAAV

SEQ ID NO: 173679 - protein, 360 aa, unidentified
MRIIGCDLHARQQTLAMLDTETGEVVTRTLLHEGNEVREFYSPLPHPVLVGIEAIGPMQWFLDLLQELGIECQVGDATKIRAAEPRKQKHDRRDAELILKLLVEKRFPAIWLPSKELLDLRALLLHRHQWVRLRTRIQNALQAIALANGLRRGPGLWSYDGQAKIAFLPLPPHASYRRSALQTMYRKMQEEIENLTEQIAEQTGQRCGARLLMTHPGVGPVTALATDVFLGDPQRFADGKALASYVGLIPREYSSGARQRLGAITKQGSPLLRFLWNEAGAHAARRDPELQRFYRRKLVQKGLGKARVAVARKLGIRLWIMLRDQIDYQEFCRRGQKQSGDACAGMLETRFGANGHRPVD

SEQ ID NO: 173680 - protein, 343 aa, unidentified
MGEVSTIGLDIAKSVFQVHGVDFDGAVVMRKRISRAKVLEFFASLQSCLIGVEACPTAHHWSRRLQALGHTVRLLPPSYVKAYLKRSKNDANDAAAICEAVTRPSMRFVPTKSEQQQSGLMLHRSRQLLVCQRTMLSNAIRGHMAELGIISAKGRNGTAELLAIIADEQDDRIPEAARFCLGVLARQYAAVRAEIVAIERRIHAWHRSSEESRRLEEIPGVGPIVATALVAEVGDWKTFSSGRSLAAWIGLVPRQHSTGGKERLGRISKQGNRHLRWLLVAGAMAVIRYARQHGTKRAWLARLMDRRPIKVAAVALANKIARMAWAMMVRGERFKEPMLLPAA

SEQ ID NO: 173681 - protein, 381 aa, unidentified
MRQVCGLDVHKDSVFVCILNENGIIFQEKFGVLTPELEQLASVLQDHDVGEVCMESTSIYWMPVWRVLEPYVAELKLVNPYFIKQLPGKKSDVKDAEWIATCLLKDLIKGSYVPADIIQQLRQYDRRIFDLNAECVRKLCKLDAALQRCNIRISNYVSTTDGKGYKEVVRLISEGVTGPEVLIKAIHGRTINRAGRDVILASLTGVISGADVDIIRQLREEIDLAQRHRDECQSRMDAICQQHFPEQLNNLQTIPGIKGRSATAIIAEVGTDVSSFQDAAHLVSWCGLKPRNEESAGKIKARSITHGNRFLRKTLIECAWAAAKTQGCFLNKFSYYQTVVRKKNKMKVQVAIARKILTAVWYVMHDNVAYRDYTPDIAPAG

SEQ ID NO: 173682 - protein, 349 aa, unidentified
MNIATMGIDLAKNVFQLHGVDSHGKVVLRRQIHRGQVRGLFVNLPPCLIGMEACASAHYWARTLQSYGHTVRLIAPHFVKPYVKTHKTDATDAEAICEAVNRPNMRFVPIKTIEQQSALSLHRVRQGFVRARTAQACQIRGLLAEFGLVMPRGIANIKQVPKLLQVAGKELPAAFCRLIERLLAHLKELDRQARELEEQIVDWHERSEPSRRLAKIPGIGPITASALVASISDVSSFKNGRELAAWLGLVPRQHSSGGKPILLGISKRGDRYLRTLLVHGARSVILRARKRDDDQGSWLKKLLERRHVNIATVALAHKTVRMVWALLAHDREYCPNLPIAARGGMKMRS

SEQ ID NO: 173683 - protein, 442 aa, unidentified
MKRKNTGKMKVPKHLEHINRCAAGIDIGSRSHFVAVPEGTDENPVREFSTFTEDLEHLADWLIVCGVTTVAMESTGVYWIPVFEILESRGLEVRLVNARHVKNVPGRKSDVLDCQWLQQLHTYGLLQGAFRPADEVCTLRAYVRQRSTLVRSAASYIQRMQKALTQMNLQLHNVVTDITGATGMRIIKAILDGERNPDALASMRDPRCRNSRSAIARSLKGNYRPEHLFSLQQAVELYEFYQIKIADCDRQILEQLKSFDACDPPHDLPRSTVEDALLRMSGVDLTSIDGIDTATALKILAEIGTDMSRWKSSKHFASWLGLSPGTRISGGKVLSSATKPVANKAAAALRMAAFTLFNSKSALGAYLRRQRARLGAPKAITATAHKLARLVYAMLAQGTAYVDAGQEYYEQRYRLRVIQNLKRKAQELGFELVAMQGTTTAQ

SEQ ID NO: 173684 - protein, 357 aa, unidentified
MTIIIGIDMHVKTLVCEIGYGKMFPFKKTFANDLEGHQMLFAYIEKLKQELGIEDVLIGYEASGLGYVLYDRAIERGYRCVVLAPTELLRSATGFKKKTDKKDASYIYETLRGHVLAGNRLSNIWVPDKEFREDRDLVRSWFDISGKISSIKTQVQTLLKKYGLKKPDTIESWTKAFMGWIMHERSKQGKGFQSSLDTLLRQLDFLNNESKLIEKEVKALSQNKRYKRMCDALLTIKGVGLKTAMTFITEMGDMNRFQNRRQVGAYIGLVPSSFESGDASDRKGRITRNGPYRVRSILNQALWVHLKYNGEAKAHYDTIVLKNPKRKKKAVVACMRLLAIRMWHIAQNADTDYLKVA

SEQ ID NO: 173685 - protein, 419 aa, unidentified
MVHVHGVQVQRLVAQTRGVPLEQLLVVPIDVGKHQAMALVGDFTGELLVRPFRFSMTRAGVAQLVGRVRGVCAQRPVRLVRVGIEAAGHYHRPLTSVGVLPGHWQVVELNPAHVTAQRRVNGQRGVKTDPVDLAAIGDLVVAGRGIVVGQLDQTMGELVGLVAHRDRRVQVRAALKNQLLGQVDRCFPGLSGCLSSLLDTRVGRLLVAEFADPARLARLGARRFQAFAAHRGIIVRAAVAQRLVDAAHQAIPTDQADVARRVLADDLALLERLDTQIAAIDQRLEVLVPATAFAVLCSVPGWATIRVARYGAGVGQLGRWPSAHQLYRAAGLTPTLYASAGRRRDGAISREGSVALRRALLDLGIGLWHCDPSARAYAASLRARGKPGGVIATALAHRANRIAYALVRDQAVYDPDRWR

SEQ ID NO: 173686 - protein, 363 aa, unidentified
MNVGVDLHKSQFTVCVHELKDGRENRQYRTTSGGYAEFLARVKNWQECGEEVRVGVESTGNTRYFKNQMEAAGCKVVVINTMKFKVVNESVKKTDKHDAATIAEFLSKDMLPESSICSESSEQIRRLLKSRETLVKTGVVIKNQIHALLTGIGMEDKKASLQSKKGRQRIIDALNEAGNVLVVQPLIDTLNNLSENVKLIEAEIAKLTEGDKVVELLKTIPGCGDIGAWTIRAHTDDIKRFSSAKKYAAFAGLVPWVQNSNERVHHGKITKRGPKELRTALVQVVLGMRRCKKTTVAWRLMTRYEMMKKGKGSGKSIIATARKVSCIIWTMLTNEKEFDCSLMLDKKICKTADSMRNLARLAM

SEQ ID NO: 173687 - protein, 342 aa, unidentified
MDHSAGVDVSVKETSICVVDDAGRIVREVKVASEPEALLQILANPIYHFKRIGLEAGPLSQWLYNALADAGLPVICVETRHMRAVLKAQINKTDRNDARGIAQMMRAGLYRPVHVKTLRSQKLRMLLTHRKLLQSKAIAIDNDLRGTLRNFGLKVGVVGAVRFEARIKELVENFPDLALLVEPLLIVRRVLREQFVIQHRRLLAIVRDDEVCRRLMTVPGVGPVVSLTYRATVDVPARFHKSKSVGAVFGLTCAKHQSGEVEWSGRISRCGDEMMRVMLYEAAQSMLRSKKWSWLKAWAMQIARRRGMKKAIVALARRLAVIMHRIWVDGTEFRWTREAAAA

SEQ ID NO: 173688 - protein, 348 aa, unidentified
MNALHYIGFDVHKKTISFCVKTAAGEMVEEGSVPAQREVLRKWAAARPQPWRGAMEATLFSGWIYDTLKPYGEQLEMAHPAKMKAISAGKKKSDTIDARTIADLVRCNLLPACYVAPPRIRELRRLLRYRSLVVSEAVRMKNKMAGLLMETGALYVKEKLHRKKYFANLLEELEEVPESVIDLLRLSRGALEMFESTQKRLVRELLADPELAQRVERLMTIPAVGEITALTWALEVGDPQRFPSCSDAMSYCGLTAALKSSAGKQQRGPISKQRNRWLQTTLIEAAKLAPRWNPQLAALHARELERGHCNRATLAVARKLVSYLLAVDKSCQPFQVRAPSELPTQKAA

SEQ ID NO: 173689 - protein, 402 aa, unidentified
MNCVGIDVSKGKSMIAVMRPFGEVVVSPFEVCHTASELSELARLLKSLDGETRVVMESTGNYHAPVAWLLHGAGLYVSVVNAMLVHDYGNNSLRRGKTDKKDAVKLANYGLDHWLTLPRYVPEEDARLMLKTCYRQYQQYSKVQTMLKNNLISLLDTAFPDANRLFTSPPRADGSEKWVDFVAAFWHCECVCGLSKKAFTTKYQKWCRKHGYNFSEDKALDIYVSACGRFGVMPKTKTAKLLVEQAISQLQATSAALAALKQEMQSLAASLPEYPVVMGMFGVGPTLGPQLIAEIGDVRRFHSKKALVAFAGIDAPPYQSGQIDVRSRSISKRGSASLRRTLFLVMGVLLQCAPMDEPVYQFMNKKRSEGKPYRVYMMASANKFLRIYYASVKNYLDSLEHN

SEQ ID NO: 173690 - protein, 353 aa, unidentified
MTDQRVVVVAGVDAHTDEHHIAVLDLQGRLLGAGAFPTNADGYRRLIHWLHDHGRVVRVGVESTGAYAAGLVRALVAAGIDVVEVNQPHPHARQRLGKSDPIDAELAARAALSGTATAAPKHTGRIVEAIRQLAVVRTGALKARTAALQQLDDLIITAPEALRDQLRHGRTLKARSRLCSKLRPDLERLHEPAQAAKLALRSLARRINELDRETQELDRQLERLVAAAAPSTVQLFGVGTQAASQLLITAGQNIDRLKSEAAFAKICGTAPIPASSGRTTRHRLDYGGDRQANRALHMIAVCRLRYCDQTRTYAAKRTADGLNRREILRCLKRYIARQTYHALRADLEALNST

SEQ ID NO: 173691 - protein, 391 aa, unidentified
MFYIGVDIAKNNHEASIIDSNGKLVSESFSFSNSIRGLEKFQKFISSFSIDSNNCIIGMEATGHYWLSLYSFLIDLGFSCVVINPIQSDAFRKMYIRQTKNDSVDSFVIAQILRFGEFSVSHFSDEDTFALRNLSRFRFALVDEASDWKRKLVAILDQVFPEYSSLFSNIYGVASKELLSKYPLPEDMISIPADELAKMLSKCSRGRFGIDKAKEIQEKASNSFGVKFALKSFSFQIKQIIAQISFLEDQILEIEEEISSMINSLCPVITSITGIGDVLGAAIFSEIGDISRFERANQLVAYAGLDVAVKQSGNFNATDTKISKRGSPYLRRAIWLAASVAAFKDPALSVYYQKLRQRGKAHGTAIGAVARKLTNIIFAVLRDNKAYIPNI

SEQ ID NO: 173692 - protein, 407 aa, unidentified
MDTRFAVVIGLDVGKTAHHACALDPDGNKLFDKPLPQDETKLRELFTQLQNHGEVLMVVDQPNPIGALPIAVARDSGCSVAYLPGLAMRKAADLYPGRSKTDARDAFIIADTARTMPHTLRQVDRDNEVLSALKVLAGFDEDLAHETTRALNRIRSLLTQIHPALERVFVSGSLATGLVLDLLEKFGGPTGFKTAGRARVLRFARSHSRRDPEALIDQIFKALGEQTVIVPATAAVELVIPRVAGQVKELKEQRATVAREVEAMLEDFPLASVLMSMPGIGIKTAAQILLNIGDGSAFETPGHLAAYAGIAPVTRRSGTSIRGEFPARSGNKRLKNALFYSAWVASNHDPISKAYYDRKRAEGKRHNAAVICLARRRCNVIFAMLRDGTYYQPPTTAPTLEQTALAA

SEQ ID NO: 173693 - protein, 419 aa, unidentified
MAFKIFRFNCCGLDVHKTWIFACIGLTDANGRTEYKEKRFSSFSRGLRDLAAWLASYNCTDVCMESAGKYWIPVFNVLEKTCNVILAHPKYTKPQKGNKTDRKDAKWICDLFMCDMIKPSFIPPAEIRHLRDLVRYRFKLTNMLTGEKNRAQNCLTVSNLKLDDVFSDVFGKSSRSITEYILAHPGETFDVTPFVDRRCKTPIEEIQAAVDGAVSPEQAIKLRQCLDHIDELEKHKAEMEREILRVSDPYLDALELIRTVPGFDKNPFTAIQVLSEIGGDMSVFPTDQHLVSWAGCCPRNDQSNFKIKSTPISRAGSYLKPVLVQVANALIKSKKHPEITERYRRIKSHRGHKKAIIAICRMLLTAIWHILTDLKPYTAEGYLAPRPVKTEKILTTSQALNLLKLRGYVIKDDLPVTAS

SEQ ID NO: 173694 - protein, 482 aa, unidentified
MKKRTIYQNRSQELLSLFEQAGNSSKVMCIPMDFSKKDHVVMFCNGYGDILRKPFSVKNSQMGVAYLTDQVMRLCRHRRIKKEHVFFGGEDAQSYAENFVNTLRSEGFLVANVNAYEAKKQRENLQASTDRLDLMGIAVMLLNRRANCAPAQAGTYLNLRTLVRHRKKLVKMKTGVSNRIHTVIDRLFPGFLNEKKSGIKPFSKSSLYLMSDRFSAQQICRRRRSTLIKHLKRFGTKDAENRATKLQAYAKRVLTPLEEYTATLQLSLAYNIKHYRCLQENIDHLEKEIALLLSQTQGAFLTSIQGIGIVLSAGVTAEIGNPFAQKPLNNLVSYAGIVPRVKQSGGSEGQPYIGRVSKRNNHILKDYVVQSAFHIGRYGPKDLLLDYKRREAQGQHADFGMGRRFIRMAMCMMQTSQVYLPPRLRSNSVDQRDKAEYYLYIWPLLKEKWKRSDALKAAFEKDRPLGRWRQIVQHLYDIELDI

SEQ ID NO: 173695 - protein, 322 aa, unidentified
MNVSNQRCAGIDVSKGTLDIAISNIASQFTVPNGTDGFTQFLRELKRNETRLILMEATGGLESGVACYLQSEGFDVVVINPRQARDFARAMGYLAKTDRIDARVLLQMSEVINQHPEREKYIRPLPDAHRQILAAMVARRRQLTAMLTAERNRLHPSHPLSHASIRSIISALKGELARIEGEMAIHIKKHFSELSELLNAVKGVGTATVAVLLAEVPELGSLSRREISALIGVAPVNRDSGTMRGRRTVFGGRASVRTALYMSALVGTRHNPIIKEFYTRLVAAGKPKKVALTACIRKLLTILNAMLKKNEAWDPMYHQHAS

SEQ ID NO: 173696 - protein, 343 aa, unidentified
MEHYAGIDVSLEQCSVCVVDGTGRIVREAKVASEPAALVGFFDQLGLVVARIGLEAGPLSQWLHAGLTEAGFEAVLLETRQVKAALSAMVVKTDRKDARGIAQLLRMGWFRPVHCKSRPAQEVRALLVGRKLLQGKLLDVELSIRGILRGFGLKVGVVSKGRFVIRIRELVAGQAMLVRVIEPMLRAREALRAEYHLLHRAVLGLVREDETCRRLMTAPGVGALVAITFTSAVDDPGRFTRSRTVGAHFGLTPKKYQSGETDVTGGISKVGDAMVRSVLYEAANVMLTRAGRLSTLKRWALEVGKRRGMKRAKVALARKLATILHRMWVDGTSFRFGKEVAAA

SEQ ID NO: 173697 - protein, 456 aa, unidentified
MKTLSIINPKAAGIDVGSEKLFLSIAGEEPVVFGTMTNEVYRLRDYVRQHGVTTVAMEATGVYWLYLYSVLEAAGLAVIAVNGRYVKNLPGRKTDMADCQWLATLHAHGLLRGGFVPTAEIRRLQDYQRLRADHITEAASQVQKMQQALERMNIKFHDVISDLTGVSGMKVIKAILTGERQPERLLSLCDLQIQRNKRERVIESLHGVWAAEHLFALRQALSIWEFYQERLTECDQQIEGVLRELAGPPPASPPDSAEGSQGQTKATKPARKNAPRIEDLHALLVRICGGRDATSLPGVADYLWLQLIAETGKEMSAWASEKHFTAWCGLAPGTRQSGKRKGSVKRQRNRAGRLFCAAARSLVRSVDKGLGGFVRRISRRKGGLVAIKALARKLAALYYRVLRYGLEYVERGLREYEQKYEESQRRLLCKLATQHGFKLISEQTLALHAAVAAPQP

SEQ ID NO: 173698 - protein, 363 aa, unidentified
MADRITYVGLDVHKEGIVVAVAAGGLRGEVREYGRIANTPTALERLLRKLGGDGVMLRFCYEAGPCGYGIQRQISATGHECVVVAPSLIPRRAGDRVKTDRRDAASLARLHRAGELTAVWVPDARHEAMRDMVRARLDAVHSLRRARQQLSGFLLRQGCHYARPAWTKLYRRWLAGLKFEQAVHHIVLEDYLAAVEAAEARRDRLTTQIEAMLPDWTLAPVVAALQTMRGMALVNAATLIAELGDLSRFADPRQLMAYLGLVPCEHSSGASVRRGGITKAGNGAARRLLIEAAWSYRFPARISRELLLRQEKQPKPIRDIAWKGQVRLCARYRRLARTGKPANVVTTAIARELTGFVWAIARR

SEQ ID NO: 173699 - protein, 346 aa, unidentified
MKHFAGLDVSLEETAVCVVAEAGGIVREARLPSEPEALVAFFRSLGLAMERIGLEACSLAAWLHEGLTAAGLPAVCLETRRAKAAMGAMPNKTDRNDARGIAQIVRTGWYRAVHVKSPACRSWRALLAARRLVLNKMRDVENGLRALLREAGLELGTPARREFAVRVRELTAADPVLSALAEPLLTIIAAVACELARLTRRVLDTARAEPVCRRLMGVPGVGPLTALAFRATIDRPDRFRRSRDVGAHLGLTPKRYQSGETDVQGGISRCGDELARTALYEAAHSLLVRSRKWSTLRAWGMQVAKRRGMARARIAVARKLSTILHRMWIDGSDFRSGKESPAPAAV

SEQ ID NO: 173700 - protein, 406 aa, unidentified
MNMYAVGIDVSKRKSTVVILQPGGKTVVKPFDVPHLAAPFQSLKDLISDLDGDIRIVMECTGRYYEPVARELSRAGFFVSAVNPQLIHGFQGQVNPLRKVKTDKADSVKIARYTLDSWAKLKQYSLMDELRSQLKTMNRQFDFYMKHKTAMKNNLIGLIDLTYPGVNAYFDSPAREDGSQKWVDFIDTYWHVDCVRRMSLEAFTDHYRKWCSRRKYNFSRAKAEEIHGKAKELIPVLPKDTFTKRILKQAVEQLNAVSQTVEQLRSLMNETASLLPEYPVVMAMKGVGPSLGPQLMAEIGDVTRFTHKGAITAFAGVDPGVNDSGDYSQKSVRASKHGSPVLRKTLFQIMDVLIKTKPDDAVYLFMDKKRAQGKPYYVYMTAGANKFLRVYYGRVKEYLAALPSSD

SEQ ID NO: 173701 - protein, 319 aa, unidentified
MAQNEVVVVGIDVAKDKVDACIRSLSQRQTFPSTAEGQRALIRWLRKHKVGKAVMEASGGYEREWAKALRNAKIEVRIVDPKRVRSFAQSAGRLAKNDAIDAEMIAWFAETFDEARGQAYDAAREELVQIVNARQALLEQQTQMQNRCEHTVPIPVRKMHERLLKAIALEVTKLEAVIAALTKASPHFAETAEIIESVPGLGKITSAGLIAAMPELGQVSNEAISALLGVAPYDDDSGKRQGERQIKGGRRKVRNLFYMACMGAATQHNPVLKTFYRRLIAKGKKPKVALVACMRKLIVILNIMIARREKWDASRYAVG

SEQ ID NO: 173702 - protein, 335 aa, unidentified
MENSLPALSLLILFVGIDVSKAKLDVACRAGQQLSQRVFANSAVGYQQLCDWLAGFAAKAVHICLEATGSYSPPVATFLEQAGYAVSVLNPAVLVDYRRSLNLRRKSDALDASLLARFAQERQPSLWHPLPQAVQVLRHWLRQRRQLLALHTQLTNFLEDPQLLAPIRQQWHKQREQIRQLQVISEVQVVRHLHQQPELLLLWQRLQTIPGIGWLSAAQLIAAVGSLSRFSHVGALVSFVGLAVSQQQSGSSVHRRPHLDHHGQRPLRALFYLAALNAMRSDPALAAWAQRLRERGKPEAIVHAAVMRKLVHIVYGVWKTGCDYDPQRAFPLQAA

SEQ ID NO: 173703 - protein, 369 aa, unidentified
MSERTRFLGLDVHKATIAVAVAEAFGDPEDHGQIANDPSAVRRLMQRLGGPDLHLEVAYEAGPTGYALHRQLTAMGIACVVVAPSLIPVKPGDRIKTDQRDAAKLARLLRSGDLTPVWVPDEAHEALRDLVRARDDAKADLLRAKHRLSKFLLRRAIHPPVGVRAWSRAHDVWLAGLTFEHAADGVVIEHYHAVVREAAERVRRLETALAQCAAASPHAELLAALQAIRGIGFLTAVTIVAEAGDLRRFPTARQFMAYVGLVPSEYSSGASRHRGHITKTGNRLIRHVLGQAAHNARYRPNVSTSLRARQRGVAPAVVELDRRAQARLHARYRHLAGRIGTNKAIIAVARELAGFVWATGQLVPMAQAA

SEQ ID NO: 173704 - protein, 345 aa, unidentified
MKIVGCDLHTRYQQIAMLDTETGELIERRLEHANGEARAFYAGLQGPVRVGIEATGHTRWFERLLAELGHELWMGDAAQIRAAMVRKQKTDARDAAHLLQLLLDDRFPRIWRPTMAERDLRQLVWHRQKLVWMRNAVGNQLHALAMGEGVCRKKQLWTKQGRAELQALNLGAWASYRRQELLEMVDQLDGSLEKLDRAVEEQSQQNEAAVLLRTHPGVGPVTSLAFVLTLGPVERFKRSKQVVSYLGLNPREHSSGGKQRLGGISKQGNPMMRSLLVEAGHSAARLDAELHKDYQRLKLRRGSGVAKVAIARKLAVRMYWMLRQQANYAQLVRMQGSPWATLVEK

SEQ ID NO: 173705 - protein, 433 aa, unidentified
MAVQSLHSPHYHFGGGFVVKVVFPTCCGVDVHKTFVVATIITTPADSVQPHYQKKRFSTFNSDLNRFADWLLEHNCLDVCMESTGKYWVPVFNILEKRGIRVVIANPKWVKAVKGNKDDTKDSKWIGDLFRIGLVKSSFIPELNIRILREFLRYRYKLVSMKSSEKNRFQNAFTVCNVALDSVVSDMFGKSATAITDYLTSDESFDPDHCVSLLQRSLKKKAEKVLESIEGYSISDEQKARIKIIREHYDFVEKLIAKVDTCVNEMVEKYEGEINLLCTIPGIDRNSAITIISEIGADMSQFGSSKRLCCWAGLTPGNNESAGKKKSVRISRAGVYLKPALVQVAHAAVKDKANPYYALKYERIAKRRGKKRAIIAIARMILTAIYTMLCTGEVWNPVDLFKIDMPEHLKEQQLAKAIKQATRFLEKQGLTVA

SEQ ID NO: 173706 - protein, 386 aa, unidentified
MRAVCGLDVHKDSVFLCILCETGEIFEKVYGVLTHELQSMCRDMKRRGVTEVSMESTSVYWIPIWRVLEPHFRLKLVNPYFIRQLPGRKSDVKDAQWIAECTLKDLIRGSFVPPERIQQLRQYDRRIFDLDAEIVRKLSKLDAVMQRCNIRLSNYVSNTDTKSYKEVVRKLCEGVTDPEELIKVIFGRIINRHGRETILAALTGVVSDAEKDAMRQLRDELDFAEKHMQECQDRMLHICKTYYPNELKRLMTIPGIKERAATSLIAEIGVDMTRFQTAAHLASWSGLKPRNDESNKKIKSRRITHGNVFLRKTIIECAWGASRTRDCFFSRFSFHQTQVRKKNKMKVLVAVARKLLIAVWHVLHDGTDYKDFGANDCDASAVENNG

SEQ ID NO: 173707 - protein, 357 aa, unidentified
MLSSNVKYIGLDVHKEAIAIAVLNGAGKLVMESIVETKASTLLDFLHGLRGELHVTLEEGTWAAWLYDVLKPHVQKIVVCNPRRNALLKEGSKSDRVDARKLAELLRTGMLRAVYHGENGLRTLRELARSYLTISKDQRRVMSRLKALYRSWGIPCAGRQVYAPRHREQWLSKMAHAGVRRRAELLYQQLDGLLVLRHTVRGELLAESRKHQAVNILRQIPLIGPLRATLLLALMQTPHRFRSKRQLWTYSGLAVETHDSAQHRYVDGQLQRSKKPQQIRGLNQNHNHEMKEIFKSTAMSASRCAGPLQDFYEGLLAKGMKPDMARLTLARKIAAITLTLWKKGERFDAEHLKSQAA

SEQ ID NO: 173708 - protein, 335 aa, unidentified
MQGQIQPQTPGAQPVYVGIDVCKDHLDIHLHPLGHGLRLANDRDGVSRLKRLLARHDVARVVLEPTASYHRLVHRSLAQAGWPVAVVNPLRARLFAEVLGSRAKTDRVDAKMLAILGATLAPQATPPAPEALEDLRELVHARAAATQERTALANRLTASHVAVLKAELRRRLAGLDRHIARLAREIGRRITDDPGLARRQAILTSIPGIGATVAAVLIADMSELGQLDRHACASLAGVAPSPTTAATSGGRATSGAAAPCPAARSIGQRCPPPGTIPTSPPSTNACATTPKNPRSPSPPSCESSSSSPTPCSRRTDCGPQNTLDLKHRCSPRPSP

SEQ ID NO: 173709 - protein, 447 aa, unidentified
MRTARCKQKRYVGLDIHKELAVSCIVNAVGKVVHRQRCGCTREELERFGRRYLHPTDKVALEATTNTWKVVAILKPFVAEVVVSNPLKTRAIAEAKIKTDKVDAEVLAQLLRCDFLPRVWEPPAETQRLRHLTARRATLVMDKTAIKNRIHAVLHQRLIQCPVKDVFSVQGRQWLSTLSLDREGRVVIDSDLRLLESVEAELAAQEQQLAEAAYAEPQVKLLMTLPGVSIIVAQTLWAVLGDIGRFRDGDHAASYLGLVPSTHQSGKHRYHGPITKQGHRQARSLLVQAAHQAVAHPGPLGAFFRRVAKRRGYNVAVVAMARKLVVIAWHMLKTNEPYRYASPQTVEYKLEQLRVTATGERRKRGYAAGTPRPATYGSGQRLRRVRSLRQVCERAALPLPKAVDQLPAGEVRMLEGHGTLAFVQEIQQEKVKVQRVKKQQPECECHS

SEQ ID NO: 173710 - protein, 424 aa, unidentified
MSVNNIHPSRPAPLSNPGPGDLAREGVTAGVDWASTEHAVAVVDQQGVELRRATVPHTKAGLSQLVGMLDRAGVREIGIERGDGPMVDALLEAGFVVFVIAPNQVRNLRRRYGAAGNKDDHFDAYVLADTVRTDRHRLTPLAPDTPPTVTLRMSVRARQDLVAARVAMGNQLRAHLAIVLPGAIGLFRDIDSAITLAFLTRFPTQAKVNWLTPRRLENWLRSQRYPNPRRAELLHAHLAGAARGTTDPQADTRAHITAALVAGLQSLRTQITALEDDIGQQLLIHPDAQIFTSLPKAGTMRAARLLAEIGDCRSRFPTPQALTSLAGATPSTRQSGKVTVVGFRWAVDKQLRGAVMDFAGDSHHANPWAADLYWKARHRGKDHSHATRILARAWLLVIWRCWQNHEAYDPARHRAYQALQNTVA

SEQ ID NO: 173711 - protein, 323 aa, unidentified
MIDWLFHLGIDVAKAKLDCALRFANGKIKSKVVENNPQGFKTLSEWLAKHDASEVHICMEATGVYWEAVAEYFANQGKVVSVINPVQIKAFGQSELLRTKTDAVDARLIARFCAERHPEPWQAPSLSEQSLRAMVLRLEALQVMRTQESNRLEVSHEVVQPNILSHINWLDEQIKALMKQINQHLDRDGDLKNKRDLLESIPGVGERTTAILLSFYTNLDRFRNARQAVAFAGLDPQHHDSGSSVKKKVRLSKVGHAFLRKALYMPAMVTLYKTDWGNRFRQRLAAAGKPAKLIIGAMMRKLIHVAFGVLKSGLPFDPALHGA

SEQ ID NO: 173712 - protein, 341 aa, unidentified
MKKNLFFIGLDISKADFAASIYQTPGQSIVTKEAIPNDPKGFEILLLWLKDHHIDKKNCRICMEATGVYSQAIAYYLLFQGFPVSVEPPLKVKRAFDPIGHKTDPVDSKQIAEYAYRFQDELTSWQPRDEILEKIRQLLSVREQFTKQKVALKNAIQAYSKQRVQVILIKKAQKETLAQIEKQIARIDKELANLIKQDPEILQKANHLKSIPGYGMLLAAHLLVITENFTKIQQSKRLASFVGIVPYQHQSGTSVFKRAKIRHFGPGPSRKLLRLAAQSVATHDVTFGGYYLRKLAQGKAKALVLNNIANKLLKVACAMVRNNTRYIKEHRSIHPMYLKSA

SEQ ID NO: 173713 - protein, 364 aa, unidentified
MHYVDNTELSSHEETRSQFNGGTGAIKLGVDVHQDFYVVVEQVGGGNPKPPQRFRKEAFLHWATRLKQKSGAQVHAVYEACGFGFALQRKLSALGIHCYVVCPQKLDEQNRRVKTDGLDAKALCLKLDRFVQGNRDALAIVRVPTEEEEQARAIHRQREQLVKARKQLEAQGRSLMVNHGLEPVQNWWKPHTFAALPMPQWMKELLANSQPILVALQQKIAALTVQLQSAAAPDQPRGLGKMTSVVIDREIGDWKRFNNRRQIASYTGLCPGEYSSGNTRLQSCVTKHGNPRLRAALVELAWRLVRFQPDYKPIVKWRATLTKGALATGAARKKAIVAVARQLAVDLWRIKTGRLSAEELGLIN

SEQ ID NO: 173714 - protein, 342 aa, unidentified
MNITTIGLDIAKSIFQVHGVDAAGACVEQRKLRRGQVEGYFRRLPPTLVGIEACGSAHYWARRLSAMGHEVRLMPPQYVKPYVKRNKTDARDAEAICEAVTRPTMRFVPIKSEAAQAARGLHRARDLLVRQRSQITHAMRGLLGEFGIVAAAGQAGGARLRAALSTGDIAVPEPLREALLALARQWEALDAAVTELDRRILAQAKACAVARRLMAVPGVGPVTAHALVAGMPAPNAFSSGRDFAAWLGLTPRQNSSAERVRSGKVSRAGDSGLRRLLVLGAASLLRQIRMGRGDKSALRRLQALLARRPAKVAIVAQAARTARIVWAMLAKNTEYRAAPIAA

SEQ ID NO: 173715 - protein, 327 aa, unidentified
MTCKVGVDISKMKLDVAWLRADGKYRSKVFPNNAGGFAELLRWLQSNLPDGKATAHVCMEATGTYHEALALFLHDQAVAVSVVNPLQVKRFMELEGVRNKTDGGDAKALARFCDKTDPALWEAPSAGVRSLQALVARLDTLLELRQAEANRLEVAHDAVRPSLTAVIASLDDSIKDVRMQIRKTIDDDPDLRQRGELLASIPGLGDRTIPQLLAYIGRPERFGCVKALIAYASLTPMIRQSGTSLDKRRGTHPQGHREFRNALYFPAMVAGRYNPLVAQFWQRLKAQNKPGKVIVVACMHKLLAIAYGVLRSGKPFDVNHHPKAVCS

SEQ ID NO: 173716 - protein, 398 aa, unidentified
MICVGIDIAKGKSTVCFLKPGGEVLKAPYDIEHTAEEVGKLIRDIRSYDEEVRVVLEATGHYHLPVVAQLLEADIFVCVVNALRMKKFCAQDIRKAKTDKIDAAKIAAFGLTYWQDLQRAKPTDEVYRELRLLSRQYFQLTSMLVKAKISLGNLLDNVMPGITDVLQDREPHHKLTDFVLKYLHFDKITAMGEKKFVSGYCSWAKKQGYRMYERQAEEIFALVQNSIPALPMTPSTTIVVKEAIRVVREIETSRTSILTQMQAFAKSLPEYFLIREMACVGDTLTPLVIAEIGDVRNFHSKHALIAYAGIDAPPYQSGGFNGTERHISKRGNGYLRHVGFEIMQCKLRLKPEGDPVYEFIQKKRSEGKCGKEAMVAGINKFLRIYYGKVTELYRELEA

SEQ ID NO: 173717 - protein, 435 aa, unidentified
MKLFISITNKEETTMRGLRAKRVRTVKEGTLIATVDIGLASNTGYCTTLDGRGTKSFRFDNTKEGFERFWWMTIASKNRFGCDEVLVGYESTGPYAEPLVHYLANKQVKIVQVNPMHTKKMKEVNDNSPLKTDDKDPRVIADIIRLGHALTVVVPEGDAAYLRRLNNARERHVGEQTALLNQLQQLVFLIFPEFKTVLKNMKGKTAQHILKRYTIPERIGTLSKEALGEEMRKRSRGKFGIKEAESLIGLARETVGIKEGIGGIFMDIRHILTQLEAEVRFISEIEAEMGAALERIPCSVRLLSIKGLGTVSVAGLIGEVGDFSKFSTQSEIMKLAGLDLYEISSGKRKGQRRISKRGRSLLRKILFYAAIQMIRKNGIMYDYYGRLTGRGMERMRALIAVSRKLLRIIHAIVRDNRDYVGQYQAPERRVMKKAA

SEQ ID NO: 173718 - protein, 354 aa, unidentified
MMVIGADPHKNSHTLVAVDAATGEQLGCETVPSSAAGSERAMRWARRLGRGPRVWAIEDCRHVSGRLERRLIAHGERVVRVAPKLMAGARRSARTRGKSDPIDALAVARAAIREGVDRLPVAALEGRALEIRLLLDHHDDLVADRSDEQRRLRWHLHDLFEDLSIPAGALDRTVWLDRVAWRLARTEQTTRVRIAREQVRSIRERTARIRELEREIAALVQAEAPQLLGEVGCGALTAAKLIGEIAGAQRFATDAKLARAAGVAPVPVSSGRRDRHRLDRGGNRQLNCALHRFAVNRAKWDPETAAYLARKQAEGKTRMEALRCLKRHLARLVHRLLTPTTPTANPLDAALALT

SEQ ID NO: 173719 - protein, 357 aa, unidentified
MHYVGLDVHARRSSLCILDSCGKVVKRLEVKGSWPKLMERVAAEVPRPFSVCFEASCGYGHLHERLSALAERVAVAHPGKLRLIFRAKRKNDRVDAEKQAKLLYLDQVPLVHVPGADVRAWRGLIELRRKLVGRRTAVKSQLRALLRGAGCCDAPAGKALWSKRGLKWLAAAALGEADALRRDLLLEELAQADERVGRVTRELDRRADAHPGVALLRTIPGVGPRTAEAFVAYVDDVRRFARTRQVGCYLGLVPCQDSSAGRDRLGHITGDGPPTARMLLCEAAWQAVRRSPSVKAFFERVMHGEPGRKKIALVAVAHKLARSMAAMLRAGEAWREEVQEQGRGQGQDRGQGQEPGA

SEQ ID NO: 173720 - protein, 395 aa, unidentified
MYKLLVGIDVSKERFSAAGIDSGGKEAFSRAYTMDSKGFEELLKAVRSLCEEDSKVLMAMESTGCYHINLFSFLSSQGIGTLVVNPLLISNYAKLSLRKTKTDKKDAMTIARFLLDHHKEISQLSISQDNQDLRDLSRERESLSHLISATKVEIKRVLRTTFPELETVGDVYTGVMLRLIQEYPSARLVRAAKLKGIIKLLKEPRRGNKRTYTAEDIYRAAKTSIATVSPGKEIILRGKVATLLHLQERLEEITKLLTELCQSTRMEDLDILQSIKGVGPNTAAPLLAEMGSIENFSSHKKLIAFAGLDPSVTESGQYIGASRLSKRGNRHLRRAIYLMTTSVVSWNAWFKAYFQKRKAEGMAPQKALFATAHKLIRVIFAMLSQRTYFKVKEAK

SEQ ID NO: 173721 - protein, 377 aa, unidentified
MNASRTALQEKHTGEASELYMAFELGEKNWKLALSDGTRSPSRYTVTAGDTAVLLECIAKAKARCGFPKRARVHSCYEAGRDGFWLHRWLLESGIDNIVVDSASIEVNRRARRTKTDRLDGDKLLAMLIRYHAGERRVWSVLRVPTLEQEDERRAHRELERLVRERTAHINRIRALLVMHNLRVKYVGGRLWQRWWGQHAGELLPGVRGEIEREGERLLLVRAQMRAIEAQQHQAVATGSEPQVARLAKLGAIGVGSGWVLVKELFGWRRFGNRREVAGCLGLAPSPYSSGKHETEQGISKAGNRQVRTLMVELAWSWLRNQPQSALSKWFTRRFAAGGKRLRRIGIVALARRLAIALWRYLEDGLIPEGAKLKATG

SEQ ID NO: 173722 - protein, 314 aa, unidentified
MEAAVVVGIDVSKRTLEVALSSGGGFSVANNEDGLSELLLRLRQSGAALVVLEASGGYESPAYLALWEAGVPTALINPRDAYHFAQANRQLAKTDQLDARGLCEFGLRMQPEPLPPPEAADEELKALAVRRRQVIKMLAAERTRVQQAPRAVRSSVKRMVRALERELGAVDHQIEQRLRDNPRLAQRCAQLEQVPGLGPVTCAILVSRLPELGLLGPKQVAALVGVAPYDHQSGEWRGRSPIFGGRAEVRSALYMATLSAIRCNPVLRGFYRRLRAAGKPAKVAIIAAMRKLLVILNAMLKTNSPWRPPCAVLA

SEQ ID NO: 173723 - protein, 307 aa, unidentified
MTQDIIGVDIAKDWIDIHHLSTGRRRRIATTAAALGRFSSQACGALVVFEASGGYERPLMAALATAGVAFARVNPRQAREFARAGGQLAKTDRVDARMLAEMGRSLALRPTPPAEPARARLAALVARREDLVGMIGAETNRSRQVRDPWIARDIKSVLRLLQRRLERIEAEIADHIASQEALAQASARLQSVPGIGPVIAASLAAELPELGRIDRRAIAKLAGLAPHACDSGLHRGKRRVWGGRAGARRSLYLAGFIASRYDPTIKAFRKRLEADGKATKVAITACARKLLTILNAMFRDNTDYRTA

SEQ ID NO: 173724 - protein, 312 aa, unidentified
METKFVGIDVSKLTLDFDCLPVDAPQQFANDSVGVEALVALLKGSGVERIVVEATGGYETAVVSALAVAGLPVVVVNPKQVRDFAKAKGHFAKTDKLDAKVLALFGERMKPPLRALPDAAQRALADVLNRRLQLVTMRAQEKTRLASVPTVAKKDIELHIAWLDKRIAKLETDLGDRLKTSPVWCHKAELLESVPGVGDVTTFSLLADLPELGTLNRQEISALVGLAPFPDDSGTRKGKRYIRGGRAEIRCVLYMATLSAKTYNPPIKAMFERLTKAGKPFKLAMTACMRKLLTILNAMLKKDQAWKIQPSA

SEQ ID NO: 173725 - protein, 326 aa, unidentified
MNKQIEVSYLGIDVSKKKLDCALLLGGKTRNKAVENSPAGMGVLKAWLARHGGTGAHVCMEATNTYWELCAEALADAGHPVSVVNPALVKAHAQSCGLRTKTDAVDARTLADFCREKQPPVWMPPSPSERALRALVLRHQALVEMQTQEKNRIETAGEAVQDSVQIHLQWLSAELKRIEKAIRQHIDDDPGMRGRRDLLDSIPGLGERTIALLLAYIGTQCRFGNARQFVAFAGLNPRLHESGSSVHRKPKLSKIGHSALRRALYMPAMVTLYRTAWGQRFRERLAQAGKPAMLIIGAMMRKLAQVAYGVLLSGKPFDPTLHGACA

SEQ ID NO: 173726 - protein, 338 aa, unidentified
MSNIVTVYVGLDYHQDAVQVCVLDREGRQLTNRSVPNDDDAIRAATERYGKHVVAAIEACCGAAELAERLSKAGWSISLAHAGFVNRMKQNPDKTDFDDALLLADLVRIGYLPKVWLAPAELRRLRRLVPYRQQLVERRKATKLRIRALLRENRLKLPPSVNAWTQAFFAWLETAELHEEDRWLMDQHLAQLQELSRQIQESDPRLADRLADDAITQRLLSYYGVGLITAATMRAEIGRFDRFRSGKQLAKFCGISPRNASSGARQADAGLIKSGNPQLRRVLIELAQRLLWRSKGPHAAMASRLLQKGKPKNVVVAAVANRWIRWMYHQMQPESLAT

SEQ ID NO: 173727 - protein, 408 aa, unidentified
MKTLHKRCAGLDVHKAEVVACLRVVMNRKVGQEVRRFPTTTQGLLVLAEWLENAGCTHVAMEATGVYWKPVWHILEGHFVLILANAAHVKNVPGRKSDVNDATWLGDLLAHGLIRSSFVPPPEIQELRDLTRTRRQLTREIVQHVQRIQAVLEEANIKLCSVITDIMGASGRRMLKAMIAGETDAEKLAALGHERLGCTRAELVEVLTGCVREHHRFLLGQHLRTIEQLEDSIAAFDARIEGALSPFHDIVERLKEVPGLGATATETVIAEIGTNMSPFPTAGHLLSWAGFVPRLDESAGKRRSTRIRKGAPWLKPVLVQAAWGAARKKNSYFQAQFLRLKARHGAKKAAIAVAASILTTVYHMLRDGTCYQDLGPEHFTRRNPAKAAARLANRIRNLGYHVEIRAAA

SEQ ID NO: 173728 - protein, 491 aa, unidentified
MKSIFQRANPAILELFEKAGSPEKVLCVPIDYAKREHTALACNGAGLQLRGPFTLHNTPAGVDFLEKVVAGLCRKHAIRREHVFFGGEDGASFTFNFAHALVQKGWLGIGIHARDAARERQNLVASTDNLDLLGIAAVLINKKWGRTLASECSPARVLRNLVHHRASLVRARSASAQRLHHLADQLLPGFLDEKQSGLTPFTKPSLWVMSRGLAPRRILARKLESLTAGLERFMVRQPAEKARKLKELARAVLPPPAGLCDTLQANLDHEVTVYAHLDTCIHAAEQDIARRLAATPGAMLTTVPGIALTLASALFVEIGDPARDRGLGRLVSYAGIVARLKQSGGPDQEARTHGRSRRACVPLKRCVMDIALKMGQYGHPELKADFERRVNAHQDPRLTLGRRMLRICRHLIRHQDFFLPPSVREATDPDVRREYILRAWDKMLIKWRDTGAIREAFADGAPLEGWRITLNEIYGLNLSKTSPYTGRTEIP

SEQ ID NO: 173729 - protein, 376 aa, unidentified
MEDDSTLYVGLDVHKDSITVAYALGAGEVELLGKIGTTQADVERLCKRLQSKARHIRVVYEAGPCGYGLYRKLIQKGFECMVCAPSLIPRKPGEHIKTDRRDAVKLVRSLRAGDLSAVYVPSVDDEAFRDLARAWVIAKDDLKRARQRVKAFLLSHGVRYTGSADWGPAHRRWLSAYSFDSAWQQFAFEELRRAIEDRLAQCDRLESALREAVVNWRFYPAALGLQAMRGVQFTTAVGMLAELGDLSRFVHPRQLMAWLGVTPSEHSSGGKRRQGSITKSGNSYARKLLVEAAWSYRHPARVSPDIQRRHEGLPKPIVDRAWDAQVRLCRRYRKLVARGKQKNIAVVAVARELSGFIWDICRLSLSLAIPRETQMP

SEQ ID NO: 173730 - protein, 310 aa, unidentified
MDVIIDKGCGLDVHKETVVACVMGSGIKKEIRTFSTMTGDLFRLKGWLTEKGITHVAMESTGPYWKPVFNVLDDSFEVILANARYIKNVPGRKTDVKDSEWMCRLLRSGLLAASFVPPKAIRELRDLTRYRRKLTQSISAEKNRVQKVLEDANVKISSVVSDTFGVSASRMIEAIMVGTLDTEAISDLAVGKLKGKKEELKKALVGNFQEHHRFMIQASLDHIGFLEKIIAELDQEIDRKLKDYHKEYELLQTIPGVKEQGAASIIAEIGADMDRFPSESHLSAWAGMSPGNNESAGKKKAERRPTAIRI

SEQ ID NO: 173731 - protein, 319 aa, unidentified
MAQNDLVVAGIDVAKDKVDVCIRSLSLRRTFASTAEGRRELASWLRRQKVGKAVMEASGGYERDWAKALRAAKIEVRIVDPKRVRSFAQSAGRLAKNDTIDAEMIAWFAETFDEARSQAYDATREQLHQMVNARQAMKDMQAKLANQGEHAVPAAVQRMHAQVSKTIAVELVKIEAAISALIQATPRFTELAEIIESVPGIARTTSAALIAAMPELGQANNKIVAALLGVAPYDDDSGRRRGERHIKGGRRRTRNVFYMACLGAATQHNPVLKAFYDRLVAKGKEKKVALIACMRKLISILNIMIERRQKWDASRYAVS

SEQ ID NO: 173732 - protein, 371 aa, unidentified
MKSIIYIGMDVHKKTYSLCALLKETGEIIGETKIPADVSLIIKFIENAKKSVDSDDVQIKTGYEAGCLGYSLYWQLAEKGIECDILAPSTMHRSAKNKVVKNDRRDAKNIATNLANGTYKSVYVPTDEYVEIKEYIRMMHDFKIELKKVKQHINAFLLRFGHQYPGKSKWIPAHIKWLKELELSDMYREILDEYLSQLEILSEKIERFKYRLEELSQKETYKEKIGQLRCIKGIDTTVAMTMHAETSDFDRFPTANAFASYCGLTPGEDSSGDSYHRLGITKQGNSMIRTTLVEAAQVLVRGTIGKKGKKVKSKQKDQDVKVIDYADKAVIRLQKKYHRMIFRGVKRNIAITAVARELACFVWGIETGHIS

SEQ ID NO: 173733 - protein, 416 aa, unidentified
MTNQERWYAGVDWASESHHLFLTDGDGRRIGERVFKHGGEGLAEMAAWLMATSGAGEPGQVSIAIEIPHGPVVETLIERGFAVHAINPKQMDRFRDRFTLAGAKDDSRDAEVMASALRTDARCFRRLAAADPIVIELREHSRIAEDLGAERTRLTNRMRELLWRYFPAMLELDSDLGAEWLLDLWDIAPTPDKAARTREATIAKLLKRHRIRRFDAAHVLAVLRQPPVQVAPGTREAASAHIETLIARIRLTNQQIRQTHGRLDALTAQLASAEETEPGQAKQHDVEILASLPGVGRIVLATLLAEAWDALQRRDYAALRSLTGVAPVTKRSGKSCSVVRRQACHDRLANAMYHWARVAVQHDPRSRAKYAALRSRGHSHGRSLRSVADRLLNVACAMLKAGTPFNPSLATSKTAC

SEQ ID NO: 173734 - protein, 443 aa, unidentified
MKSKALQPLDRRAAGIDIGAEQHFVAVPDDIDEPVRCFDTFTTDLHELVQWLKDCRIDTVAMESTGVYWIPIYEMLEQAGFEVLLVNAHHVKNVPGRKTDVLDCQWIQQLHSYGLLRGAFRPDDTILPLRAYMRQRANLVRYAGMHIQHMQKALDQMNIQLHHVVSDITGLTGSRILTAILGGERDPRKLAALRDSHCRHSEEEIAKALTGNWRPEHLFELKQGWELYQFYQQQILACDREIEQAISALPTQTDEPAPPPDKPKRSGANKNALSFEVRDLLYGIAGVDLTGIDGLQEHTVLKILAETGTDMSRWPTEKHFAAWLGLCPGNKVSGGKRLSGKTTPSANRAAAAFRMATQGLHHSQSALGAYYRRMRARLGGPKAVTATAHKLCKLFYNMLKYGSDYHDAGAEYYEQQYRDRVLRNLRRQAKNLGFELAELPQSA

SEQ ID NO: 173735 - protein, 317 aa, unidentified
MTESIAQFVGIDVSKQSLDIAVRPAGTYWQCPNKPERFPELLARLQGIAPALIVIEASGGLHLPVTAALAEAALPIAVLNPRQVRDFAKATGTLAKTDAIDARVLAHFAEAVRPEVRPLPSAQALELDALMSRRRQLVAMHTSELNRLSSSPACVHPDIEAHLRWLEQRIERTDKELRSLIENSPLWRAKDDLMQSMCGIGPATSATLIAALPELGILNNRQIAKLAGLAPLNRDSGTMRGQRRIQGGRGDVRTALYMPTRCAVRFNPVLRDFYQRLKRAGKPEKVAMTACMRKLLVILNTMLKTNTSWEQRLAVQP

SEQ ID NO: 173736 - protein, 348 aa, unidentified
MAHFVGLDVSVKETSVCVVDDAGKVILEQKVQTEPAAIIAVLTSLDVSFGRIGIEAGPLSQWLVNALTAAELPVICVETRHMKALLTAQQINKTDRNDARGIAQMMRVGLFKPVHVKTLVAQEQRMLLTSRKLLQRKLLDVESDLRGTLRNFGLKVGVVSSGRYEARVRELVAGFPRLAAIVEPVLSVRRVMRQQFAVLHKMLLDTVRGDPVCRRLMTAPGVGAVVALTYRATVDQPQRFHHSRAVGAHVGLTPKRYQSGETDYEGGVSKCGDALLRTMLYEAAHVLLTRGAKWSWLKAWGVRVAQRRGMRRAIVAVARRLAVVLHRMWVDGSEFRWSKDSTAVPAVA

SEQ ID NO: 173737 - protein, 395 aa, unidentified
MDVVFARCAGIDVHKKTVVVCRLMVGADGQRHGETQTFGTTTDELLRLSDWLAAGGCTHVGVESTGEYWKPVHNILEGSFEVWLLNAQHIKAVPGRTTDVKDAQWIAELLSHGLVRPSFIPPRPQRDLRDLTRHRTKFVRERASLVNRLQKVLKSANIKLAGLASDIMGLSARKMLAALVEGEEDVVRLAELAQGKLREKRAQLEQALSGCVRPHHRFLLSELLAQIDGIEDTIRHFDAQIHQARAADAEVAALLDTIPGIGSGTAEVLLAEIGTDMRRLPSAASLAAWAGLAPGNNESAGHQRNGRARKGNVWLRTALVQAAQAAAHTKGTALSAQYHRIAARRGAKKAVIAVAHTLLVIAYYVILRHGPYHELGPNYADRQRPAATPGCALAA

SEQ ID NO: 173738 - protein, 324 aa, unidentified
MLPTLGIDISKDSFHVELSVNDKLHHRRFSNRKAGFAELSVWLTKHKVAGLHACLEATGPYSEALALYLHEQGHTVSVVNPARIKAFGQSELLRNKDDRPDAALIRRFCEKQQPSAWTPPTPQLRELQSLTRHLENLLETRQQQVNRLEAPNAKSVVKSLRKLVAQLQAEIQRTEQQIADHIDRHPDLKQQCQLLTSIPGIGPRTAAKLLAEIEGLNKYESARQVAAYAGLTPRNNRSGTLRGRTRLSKTGNARVRKALFLPAIVAQQHNPIVRTFCQRLAQRGKPKMQIVGAAMRKLIHIAYGVVKSGKMFDPNHELLLKSVS

SEQ ID NO: 173739 - protein, 389 aa, unidentified
MIYVGIDVAKDKHDCYIMGTDAQKLFPVFTISNNMAGFNELYEKVFSVAKDKTEIKVGLEATGHYSMNILSSLVDKGLATYLINPLHTNLYRKGQSLRKTKTDKVDAYTIAMMVMTDRTLKPYSDTSYHNEELKSLTRYRFGKVQERAKLKVSVMRLVTILFPELEKIVSDIHSTSIYAVLEEMPGASFIAKCNLTHLKSVLESNSKGRYGREMAILIRNSARDSIGITMPAKSMELKHTLHLIEVLTEEIDEIDESIKKIVDMSASPILSIPGISYKMGAMILAEVGDFSRFNNADQLLAYAGLSPSTYQSGQLESCYAHMEKRGSRYLRYAIYNATKYVCLWDERFATYLAKKRAEGKHYNVAISHAAKKLVRTIYKMELTRQPYHK

SEQ ID NO: 173740 - protein, 351 aa, unidentified
MPRTSTVHAVTTIGMDMGKNTLHMIGLDSRGAIVLREKVSRGRIASRLANLPCCLIGIEAGLATHYVARELAALGHDVKQVPPTYAKPFRQGHKNDFRDAHSVAEAVQRPTTRFVPAKTDEQLDLQALHRVRSRLVSERTAVINQIRGFLLEHGIIVRQGLRFLRQALPDILAKRTDVLSPRMVRIVADLASDWRQLDERIEPVTDEIETLAKSDDGCRRVMTVPGIGPIISSAMVAAIGNGAAFARGRDFSAWIGLVPKQMSTGDRTILGRITKRGNGYLRTLFVQAARVILLRPASWPKHSFGVWLARAAQRLHRNVLAAALANKLARIAWTVLAQGRGYEARITKPAV

SEQ ID NO: 173741 - protein, 483 aa, unidentified
MKSKPEEQNKRATNHPTQHQWHEMNRKQRREITRQIQSEDLSLEVIHPDAGGIDIGNESHYVAVPPGRDNQSVRRFGCTTAQLKAMAAWLKQCRIRTVAMQSTGVYWVAVYDILEQAGLEVYLVNARDTKNLPGRKSDVQESQWLMKLHTYGLLRNAFRPSQEIREMRTYWRQRNDLVQSAGRHILRMQKALTQMNIQLANVLTDISGTTGQAIIKAILAGERNPHKLAEFRDPRVKASEEQIAQSLEGNWQEDLLFVLKQEHKGYEFCQKQMAECDRQLKQYLQQREDRSHGAPLPEEKRKGRLKKKKGNAPQFDLREGLFRMTGTDLTRIDGIDVMTATTIISEAGWDMSKWKTEDHFVSWLRLCPDNRISGNKVIGKGRLPTNNPITIALKMAATTLRLSKTYLGAQFRRLRTRLEAPIAIKAMAAKLARLVYRMLRYGMKYVDQGAAVYELRHRELQIKRLKARAQKLGYRVTPIPAAA

SEQ ID NO: 173742 - protein, 398 aa, unidentified
MTESSDYESVQVFIGVDVGKDTHHAVAINRSGKRPFDKALPNDENKLRSLISDLKQHGQILLVVDQPATIGALPVAVARSEGVLVGYLPGLAMRRIADLHAGEAKTDARDAAIIAEAARTLPHALRTLKLADEQIAELSMLCGFDDDLAAQTTQASNRIRGLLTQIHPALERVLGPRLEHPAVLDLLQRYPSPEKLASLGEKKLAAQLCKLAPRLGKRLAADIAQALAEQTVVVPGTNAAAVVLPRLALQLITLRKQRDEVALEVEQRVLAHPLYPVLTSMPGVGVRTAARHLTEVACRAFASAAHLAAYAGLAPVTRRSGSSIRGEHPSRRGNKALKRALFLSAFAALRNPLSRAYYTRKMSQGKRHNQALIALARRRCDVLFAMMRDGTFYTPQGS

SEQ ID NO: 173743 - protein, 429 aa, unidentified
MPYRIAGIDVHKKMLAVVVSNVEVESEFQFERRMFGSNPEQLRSLAAWLLEQEVEEVVMESTAQYWKPVWETLERYWKPIREKREDARRRSGTLHLAQALSNRGRRGRKKDFLDAERLVKRLVARELTLSFVPDAEQRLWRTVTRRKYQLTRDRARLQNQVESLLEEAHIKLSSLVSDLLGASARRMLKALANGETNPAALAALADKQLRATPEQLCDALGACTELNPVYRRLLKMALEQLQFLEQQIGDLDQETANLLRQHQDAVERLAEVPGLGVDSATQIIAEVGPTAATFPSGKHLSSWVGACPGDEESAGVNYSHRSPHGNRHMRRLLNQAANAAVKVKGSIFEIVYRRSVQRLGHNQVIGAIAHRQCRLIWLILHQGIRYEEHGPAVTKQSRQARTARMIRQLRKLGYQVELPNSQPANSAGR

SEQ ID NO: 173744 - protein, 344 aa, unidentified
MQYIAFDVHKRYTWARVEDQSAQVLRQERIDHCHGAVSAFLDECEQNSPVAVETVGNWYWVVDEIEQAGCAPRLVNARLAKLMMGQVNKTDKLDARGLNLLQRNGTLPTVWIPPGAVRDARELPRTRMTLVGQRTQLKNRVHATLAKYGITPPEVSDLFGKAGRQALAGLIEQLPPNTVHATRAVLQQLDGLEQAIAAVERRMQEVFAPSAHHDLLRSLPGVGPILSVVIAAEMGDMARFAGAERFASYAGTVPRVQASGGKSYGGRVRMDTNPYLKWAFVEAANAALLQGARYGHVRRLYDRIRARRGHGKAVVAVARHLAEAAYCVLTKQQSYQEPRRSTRG

SEQ ID NO: 173745 - protein, 349 aa, unidentified
MAMTIVEAPVGITGGVDTHLDTHVAAALDPLGRLVGTESFDADAAGYKALLGWLEQFGQVTKVGVEGTGSYGVGLARFLRRKGVEVIEVNRPNRQARRSHGKSDPLDAVEAARAVISGRALGTGKTKDGPVEAIRVLVVAKRSARQARVKAIVQMRHLVVTAPDQLHCRLKGLTVTALVAESAKLRATRATDPVTAATKASLCSLAHRVQALDAELEDLNEQIESLLHATAPDLMARFGIGPDTAASLLVAAGDNPERLHSEAAWAHLCGASPVPADSGRNAGHLRRHSGGDRQANSALWRIAMVRIAHDPETRMYFDRRVKEGRTKRDIIRILQRYIAREVYRYLPRG

SEQ ID NO: 173746 - protein, 353 aa, unidentified
MKSDKYIGMDVHQETTVVAVVDCDGKMILETIVATEGSAIVRLLNGLNGPLHVTLEETTQAAWLYEVLRACAVDVIVCDPRRNGLLTEGSKGDKPDARKLAELRRAGLVRAVYHGHAGTRKLKELVRGYETLSIDTERTMVRIKAVFRGRGIRTPGTAVYQAKQREQWLGLLNEEGVRQRTTWLYDQLDHLRALRKEAKRTMLAESQQHRATALLKTIPQLGPIRSALIVATVDTPHRFRTKRQLWSYSGLGIVTHTSAEYEIQAERVVRRRKAVSTRGLNRNFNRRLKNVFVAAAIGGSHCEPYRKYLEGLTQKGMRAEMARLTLARKIAAVALSIWKKGETFDPKKLNWAT

SEQ ID NO: 173747 - protein, 352 aa, unidentified
MTKRSTAAVTVGLDLGDRFSSACVLETESGEMSDEWRLPTTRKGLARYFEVKPAMRVALEVGTHSPWVSRLLVSWGHEVLVANPRKVRLIAHSRRKSDRFDGRTLARLARLDPELLWPVRHRSSDCQQDLAVLRARAALVRARTLLVNHLRGAVKSCGGRLPSCSAASLSRQAGLRLPEGLQPTLEPILPVLGEITEQIRSYDRQVEALTKSYPETAALRQIAGVGSLTSLAFVLTLEDPARFPQSRQVGAYLGLTPGTRQSGECDPQMHITREGDPFLSQLLVQSAHYILGPFGPDCELRRHGLKLAQRGGKAAKKRAAVAVARKLAVVLHRLWLTQQRYEPLREPTRSAA

SEQ ID NO: 173748 - protein, 348 aa, unidentified
MIIIGCDYHPGFQQIAYVDTETGELHERALQHREEAEKFYRELAAQGLKVRVGMEASGHARWFERLLAELNVELWIGDAAEIRAKRVRKQKTDRQDAQLILKLMLKDDFPQIWVPSWENRDLRQLLWHRHRMVQARTRLMNQLQAVALNEGLRCKKRLWREAGRQQLEAFRLAPWASRRRQDLLELLDRLNPTIAELTQAIEREVEKCPEARRLQTHPGVGPLTALAFVLIIGKADRFRCGKQIASYLGLVPLEDSSGSRRRLGHITKQGNSLLRFLLVEAAQVTVRSDPGWRSKYHHLMMRRGRKIAKVAMARRLAVRMYWMMRKGWNYEQLKSSVRTRDNSYQAMV

SEQ ID NO: 173749 - protein, 348 aa, unidentified
MLHVGLDLSRRKIDVCVLSEHAEVVEEFASPPDADGLLGLARRVGRHERPVRGVIESMTGARFVHDRLERLGWDVLIADAAKVKGLAPLACKTDKIDARVLALLSHRDLVPEIWLPDPRVRRERELARFRMHLVKHRSMLKHRIHATLISFGHPCPVSDLFGVAGRELLDRLDVPQPWRGTVDASLRLIDDLDRQIDAINRQLRASGADHPYVPLLLTVPGIGWVLAFTIAAEIGDITRFPSPKKLCGYTGLCPRVYQSGDRDSRGPLTKQGPKYLRWAMLEATMHALRHPAYRERYQRNKRRLGRTRGAKVAQIDVARKLTEAIWHMLTHNEPFAPAPGGSALRLAA

SEQ ID NO: 173750 - protein, 338 aa, unidentified
MAQNKIIGIDLAKSIFFLFEINHKGKNISRKKLPRSKLLNYIAQQNECTISMEACSSAHYWAREFSKLGHQVMLFPPQHVKSQRHKQKNDYNDAEAIAEITLYQRHHPVPHKSIEQQDIQSVIKMRKLLITERTRLINQVRGLLSEYGIIIPKGKTAFGKAIPSILEDAENQLSSMLRELIYHQHERYNYINEQVSWFDNKLHHTIQHFDNAKLLTSIPGFGPLTSQAVAVWMGSGQQFKTGRDASAAMGLVPKQNSTGGKTMLLGITKQGNTYIRSLLVHGARAALRRAKFKSDKLSLWAVDIEKRRGANRAAVALANKLMRIAWAVISKNEEYKPA

SEQ ID NO: 173751 - protein, 290 aa, unidentified
MSRIKDIKKSVDIKHMYVGLDLHKVTINATVMDENGNVLNEVKIKSEPDSLRNFSDSIPFGSDIVIESSSTWYWAYRILSERHNVTLSNPLKTKAIAESKVKTDKVDSLTLANLLRGGYIAESYIPPRELMQLREMVRYRASLVRVRSIIKNRIHAHLLMYNIKIDGTPFTKEFIKTLRELNDYKINGYLNVLEVLNKEIDDISNRIKEIANDNEDAKLLMSIPGISFYSALFIISEIGDINRFPDSGHLVSYAGLAPSTRSSGTKVYHGPITKQGSSYLRWILRLSGQT

SEQ ID NO: 173752 - protein, 342 aa, unidentified
MSVIIGVDPHKATHTAVAIDRSEVELARAKVRSTCHQVPQLLDWAEPLGERTWAIESADGLGYLLSQQLIGAGETVVDVPSTLAARVRVLGTGRSDKNDPNDALSVAIAALRTPGLRQVATADHTAILRLLAKRNVDIGNQRSRVVCRLHSLLMELSPGGISKELNASDAIALLDRVTPTSPVEVARHDQALDLLADIGRLDEQLKVSHKRICTAVAASNTTLTDVFGIGPLLACYLIGFTGDIGRFTSRDRYAAYNGTAPVERSSGGKIVHRVSQRGNRRLNHALHMVAICQIRHPDSEGRAFFERKVAEGKTKKDAIRSLKRHLSNTVYRRLVEDQRRAR

SEQ ID NO: 173753 - protein, 342 aa, unidentified
MEYYAGIDVSLEYSSVCVVDATGKIFREAKVASDPAALISWLKSLDYGLSRVGLEAGPLSQWLYATIREAGLAVELLETRHVRKAFEAMPVKSDRNDARGIAQLMRLGWFRPVHCKSMDAQEVRAVLTARKLVQTKCQDVENSLRGILRGFGLKVGKTTDKSFAGRIRELVQGHPSLKAVGEALLSVRAVLLKEFNVFEKQVRAMVRSNAKAKLLTSTPSVGAIVALTYASAIDDPARFKSSKDAGPHFGLTPKKYQSGETNYSGRISKIGDAAVREALYQAAHVMLTKPLKGCSQLKSWAMRIARRAGMNKAKVALARKLAVILHRMLANGTPFNPAASAA

SEQ ID NO: 173754 - protein, 409 aa, unidentified
MNHNVAGIDVHKKILAVAVGKATESALVFERRLFGTVGRSLTELAEWLKEQGVERVVMESTAQYWKPVWLALEGSFDLHLAQARSNLAPRGRKTGFRDAERMVRRLLSGDLTLSFVPGAEQRQWRLLARGKYQLRRDRVRLQNQLEGLLEEGRIKLSSVVTDLLGLSGLRILRALAAGEDDAEKLASLADTRLRVSREDLAEALRGSVTTLQRVLLSQLLTRLDLIDTQIRELDQTLAKEMERYSEAIQRLSEIPGMGPDAAAQIVAEIGPQAGAFAAPEKLASWVGVCPGRQESAGQSTSNRSPKGNRAMRRILTEVAFAAVKTKDSHFQEVFRRLAPRLGVNKAIWAIAHRLCRLIWKLLHEGVTYREQGARGQDPQAIRKRARKLIGDLRRLGYTVLIEEPTPKTA

SEQ ID NO: 173755 - protein, 345 aa, unidentified
MNKISVIGLDLAKNVFQVHGVDSAGEVVVRKQLKRSQVRRFFTNVEPCLVGMEACGGAHYWSRELTGLGHTVRMMAPVFVKPYLKSNKNDRKDAEAICEAVQRPSMRFVQPKTPEQQCVLHLHRARRLLVRQRVALSNHLRGILSEYGIVLPQGAKVLSERLPALLEDAENDLPMLTRDLLAECKEEYDQLMQRIERLEGRIKAWHVTHDVSQRLASIPGIGVLTASALAATVGEGQDFSNGRQLAAYLGLVPRQASSGGKVRLLGISKRGDGYLRGLLIQGARNVIYHIRRRLRAGQPGGNAWVEQLLQRSHPNAVAVALANKMARIAWVLLVRNQTWCPARTL

SEQ ID NO: 173756 - protein, 346 aa, unidentified
MDHYAGIDVSLECSSTCVVDANGKIVREAKVASEPEALIAWFRSLGFDLARIGLEAGPLSQWLYAAMKKAGLSVELLETRHVSDAFKAMPVKSDRNDARNIAQLMRLGWFRPVHCKSMSAQETRAILTARKLIQTKLQDIENSLRGILRGFGLKVGKTTKRSFAARVSELVTGHPVLETIAAATLAVHMVLLREFNGLEKRVRMMSRLDAKAKLLVSTPAVRPIISLTYASAIDDPSRLTSSKRAGPLFGLTPKKYQSGETDYSGRISKNGDASVREALYEAAHIILTKPIKGCAQLKSWAMRIARRAGMNKAKVALARKLAVIMLRMLKDNVPFNSTAKANAAAV

SEQ ID NO: 173757 - protein, 347 aa, unidentified
MTNRSQLNGEVFAGLDVSAREISVARLRSKEGTPTVASFANNASGHKALLAYLLQGTEHVRVCLEASGNYSLDLALALHAHRHVEVSVVNPRRARRFAESLGQRSKTDPVDARVLCQYAVRMPWVAWRPPTARALRLRAITPAIESLGVMHTQEKNREHALKASLALPCLVIREMRRHQRYLEHRMEQLRREARRLIAKDPELDRRFRLMVTVPGVAETSALQILGELVVLPDGLDARQWVAFSGLDPSQFTSGTSVEKKPRISRGGSRHLRHALYMPALVALRREPHLRAFYQRLVSRVKARLQAVVAVMRKLLHALFAMFRSDQTYDGSKLCSHELPATVTTSCA

SEQ ID NO: 173758 - protein, 343 aa, unidentified
MEIHTIGIDLAKNVFQVHGVNEEHDVVLVRQLRRRQMLSFFAKLEPCLIGMEACATSHHWARELTKLGHTVRLIPPVYVKAYVKRQKNDAADAAAICEAVTRPSMRFVPIKSEEQQAALAVHRSRDLLIRQRTQLTNALRAHLAEFGIVADQGAEGLAKLIAIVSDESTLQLLPSTMLEPLRVIIDQLTSLQQQIGELDRLIKAQHRSSSVSRRLEGIPGIGVIGATALAATVTDPSQFKSGRDLAAWVGLVPKQYSTGGKARLGSISKQGDRYLRRLLVVGGTSVVKLAKIFPWKYPWVAKLLAKKPAKVVAIAVANKLARIAWAIMSTGETYRPRVRRVRL

SEQ ID NO: 173759 - protein, 427 aa, unidentified
MPYRIAGIDVHKRMLTVVVCDVEVRGEYEFERRQYGSTPSHLRSLAAWLVERQVEEVVMESTAQYWKPVWATLERCWKPLQQGREGARPMSGMLHLAQAQSNRGPRGRKNDFADPERLVKRLVAGELILSFVPSAEQRLWRTVMRTQHQLRCNQVQLQNRLEALLEEAHLKLSSLVSDLLGLSGRRMLTAIAEGETDPAAVAAQADYRLRATPEQLCDALGACGELHPVYRRLLKTALEDWQRTEAQITRLGQEMATLLATHQEQVQRLAEVPGLGIDSGQQILAEVGASAATFPSAKALSSWVGVCPGEEESAGVNRNRRSPKGNRHLRRILNQAAHAAVKLKGSVFAILYRRYVVRFGHNQTIAVIAHRLCRLIWKILYQRVRYEERGPAVSQKSKQRRTARMIRQLRDLGYRVEMLKAAAAVTA

SEQ ID NO: 173760 - protein, 345 aa, unidentified
MPIVGGLDIHRKQITFDYLDTVTGEVRRGQISPADREHLRAWLARFGGRDDVAFAAEGCTGWRYVTEELAAAGVAAHLAEPADTAFARGRKRHAKTDKTDCRHLRVLLAEGRLPECWIPPGHILECRALLETYHDLRREHTAWVQRIHAVLFHQGAPALGDGALRSEQGLAALRAASTAHLSPAGQLQVATALQMTAALETRLHELRHQLLDAARHLAGAKVLTARLYGVGPVTALAMTCWLGGAGRFSSSRKAVRFAGLDVTVWSSDRKGPPGRLSRQGPPVLRWAVYEAGKTHARTSAPDHAYYAQVKDRCNGKRAALSEARKILRQACHILAELGDDALSAA

SEQ ID NO: 173761 - protein, 429 aa, unidentified
MTRISAGVDVSKNRSTVCIIDQDGKVIMRPFLVWHSTEELDFLADTLKRLNGEVRVIMESTSVYQYPIALQLKERGLFISIVNAYEMKQFANTDFRGGKTDKKDSRTIASYGISYWYKLVEWQIPKDTYFNLDLLNRTYMNAKKHRQIILQELQHYIDCAMPGMDKELHSLNLSTKKDFMLDFVEKFWHRDEIVNMTEAEFTEVFTAWAKEKGYRPGKGKAAKIYAIAKSCIPYYPANPTVKTILQCIVDKLSGVNRTLVTIVTQMIEEAKKLPEYQIVREMPGVGDPLAARFFGSAGDIRRFKNSKALVAYAGIDSPPDESGDFSSTHRHITKKGSKVFRDTGYEIMMALRAQKRTWEKGRKNPEVYDYMLRKEAEEKPRKVAKIAALNKFLRIVYARIKELYDNMALAERAKAKTKSKTKAKTKATA

SEQ ID NO: 173762 - protein, 350 aa, unidentified
MKYIAVDIGKRDCKACIMNSDGSIAEETKYNNTLHEAEIFAYTIVKKYGKCVAVCESTANLWLKTYQAFEKHNIGVKLANPLKTKAIAEAKIKTDTLDARTLAHLLRSDLVAECYIASREIREDRSLLRLRTNLVQDRTRVMNRVRSLLDKYDVKCDYDNIFGVKGIRWLKSLKLSDNDKILLHEYVMQIEFLNTEIKNIESKITCEASKNESVKILMSMTGIDYFSAMMIASEIGDITRFSTPEKLVSWSGLCPSIHQSGNSLYMGRMKDGNKKVRWILIQAANTAARADDRLRKFYLRIAKRHGHHVAITHVANRMLTIIWYMLVNKRLYNERKQKLYETKLKRIQKA

SEQ ID NO: 173763 - protein, 391 aa, unidentified
MSMYFIGIDISKYKHDCCIISAADQKVVSKVTIKNNKAGFDELLTIINSLSNPEDIRIGFESTAHYALNLELFLENSLLTFMEVNPVLISEYKKSKTLRRTKTDSVDCESIARWLMTVEYKPHSKGFYHAYSLKSLTRLRDKLIRQRSFYLVKITNVLDHTFPEFKPFFNERLSKTALYLLENYGSAEKMARMNSASYEKLRSLSKGKFSPQQFLKLKELAANTVGVNNSIFDVELNSLLALYKSLAKEIDTLEKEINKLIDEVNPHYMSIPGIGPLSAAVIYSEYGDISNFSNPGQMLAFAGIEPGINESGTESHGGRMVKRGSSQLRYTLINCCLPLIRFDMTFATYYAKKRGEGKPHRVAITHVAKKLIRVIYALERQDIDFNTQKLH

SEQ ID NO: 173764 - protein, 310 aa, unidentified
MEAIYVGVDVSKDRLDVHVLPSGQAFAVARDGKGLNELIERLSSVRPRLIAVEATGGFETIVAAAIAGAHLPLAVINPAQVRHFAQAIGKRAKTDPIDAAVIARFAEAVKPEPRELPDEPARLLSELVGRRAQVIEMLVAERQRERRASALRVRKSLARHIATLEKELPEIDRDIDAMVCGSPVWRDKEDLLVTFPGVAHKIARNVLADLPELGRLTRRQIASLVGVAPFTRQSGRWKGKSMIAGGRPFVRAAIFMAAFSAIRCNPVLRDFYQRLLAHGKPKMVALIAVARKVLTILNAMLRDRKQWQPA

SEQ ID NO: 173765 - protein, 344 aa, unidentified
MPSTGAQEALYCGADLHGNNVFLSVCDVLGNEVLARRVKADLGAVNAALAPYWPRMRVVAVESTFNWYWLVDGLRAEGRDVRLANPAKMDQYNGLKVGDDASDARWIAEMLRLGILPEAYVYPPEQRPLRDLLRRRALLVRQRTQALLSLEGLLARQGLKRPGAGALKKWTHTEVQALALDETTRFQAQTLLEMVRVSEALAQGIEMRVKATLKPRSEYQRLQSVPGIGPILGMVIALESGEFGRFASAGAYASYCRAVKSERSSNGRKKGENNRKNGNPYLAWAFSEAAVYAMRFHEPIRRWYERKKGRRCAPVAMRAVACKLAKAVWHVMRGGEYQEKLLFG

SEQ ID NO: 173766 - protein, 393 aa, unidentified
MICVGIDVAKDKHDCVILNSEGKILAGVFTIPNNADGFDTLLQKIRSCTSSDDKIKVGLEATGHYSYNILGFLINQGLPTYVINPLHTNLYRKSMSLRKTKTDRVDAKTIATMLMSNVDLKSYTDTAYHNEELKSLTRYRFDKVQERAQLKQSVSRLVTILFPELEKLVPTLHMSSIYALLIEFPGAKQITEAHLTHLKSLLKDASKGRYGRDMATEIRDAAKHSIGSVMPAKSLELRHTIRLIRELDSEIEDIEAAIEAIMEELQSPITTIPGMGFRMGAMILAEIGDFSFFDSPDKILAYAGMSPSTYQSGHLSLAGTYSHMEKRGSRYLRYALYNATKYVCHWDPGFAAYLAKKRAEGKHYNVALSHAAKKLVRLIYAMEKSRQPYKRAA

SEQ ID NO: 173767 - protein, 350 aa, unidentified
MLDKISRHTLKPGDGKELLDLCERIRTRVARETKKRVEMVSCYEAGYDGFWLHRLLEAHDVRNHVIDPASLQVDRRARRAKTDRVDAERLLRSLMAYLRGEPKVWSVVRVPSVAEEDDRRLHRERGRLINERIQHVNRIKGLLAIHGIYDYQPLRRDRTQRLERLRTADGRTLPPRLEAEILRELQRLELVIGMIKTIEAERDAIASANTETEHRGAKKVQHLAKIKSIGPEFATTLVGEVFYRSFDNRKQLASYVGLTPAHFQSGAMCRDQGISKAGNAKARTVMIELAWLWLRHQPDSPLSVWFRDRVGKLKGRIRRIAIVAVARKLLIALWRYLETGLVPEGAALKV

SEQ ID NO: 173768 - protein, 375 aa, unidentified
MKEKLRFLGLDVHAETIAGAIAEPDGEVRSLGTIPNRAESIRKLIRKLGPAEKLRACYEAGPTGYVVYWQLAELGVQCEVVAPTLVPVKAGDRVKTDRRDAEKLARCYRSGDLTAVWVPDEGSEALRDLVRAREAAKQDQMRARQRLSKFLLRSGQRPPTGVRPWTRAYLIWVAQLRFTQVAQEATRQDYLHEVEHMRERVARLEQAITEAVKLAPPALQQVINDLQALRGIADISAVTIAAELGQVSRFGSARQLMGYCGAVPSEDSSGKRTRRGGITKTGNAHLRRIVVEAAWSYRRPPCIWYGLRRRQESISEEAKEIAWKAQHRLHRRYMRLGAAGKNQGKIVTAVARELLGFIWAIGTRAETISKQQAAA

SEQ ID NO: 173769 - protein, 341 aa, unidentified
MTTIKILGIDLGKSCFHLIGQDHSGKEIFRKKYTRSKLIHYLSQLPQTVIAFEACGGAHWLGRQCLSLGHEVKLIPPQYVRAYVKGNKNDFIDAAAIAEAANRPSMRFVAVKSEQAQVISAIHRIRSGFIKERTACMSRIGSILLEFGVSLPQGHATMKRLFSWLAEQSQSLPSLLIHELQVVHDHYLLLNERITEHDKQLKALVDQDENGRLLKSIPGVGDLVASQCLADLGAVDQFKNGRNMAAWLGLVPRQHSTGGKSTLLGISKRGNKHLRTLFIHGARALLAKPNKVGQVFAPWINKLRETKPFNVATVALANKLARIAWSVLKYHQPFNAEKLHA

SEQ ID NO: 173770 - protein, 390 aa, unidentified
MEARTVNNLPPAETHDDTVRCLLAIELSKKNWIVAVNTPLSDKISRYTLKPCDGKELLDLCERIRTRVARETKKRVEIVSCYEAGYDGFWLHRLLEAHGIRNYVIDPASLQVDRRARRAKTDGIDVEKLLRSLMAYLRGEPKIWSVVRVPSVAEEDDRRLHRERGRLINERIQHVNRIKGLLAIHGIYDYQPLRRDRMQQLERLRTADGQALPPRLKTEILRELQRLELVIGMIRTIEAERDAVASAETEAEHTSGKKIQDLVKIKSIGPEFATTLVGEVFYRSFNNRKQLASYVGITPAHFQSGSTCRDQGISKAGNAKARTVMIELAWLWLRHQPDSPLSVWFRDRVGKLKGRIRRITIVAVARKLLIALWRYLEIGLVPEGAVLKMK

SEQ ID NO: 173771 - protein, 343 aa, unidentified
MQVIIGVDPHKASHTAVAISDRENELARKKVRATRLQVDQLLSWAEPFPTRTWAIESAHGLGFLLAQQLVAAGETVVDVPATLVARSRVLSTGRSDKNDPNDSLSVAVTALRQPGLRQVVPVDHREVLRLLAKRNTDIGKQRARSVCRVHALLIELAPGGIAKEINASDIEPFLAQLEPASPVEQMRVDMVRELLADIVRLDGQLKESHKRIRAAVKVSGTSLTEIYGIGPIIAAMLIGYSGDITRFATRDHYAAYTGTAPVEFSSGGRVAHRLSRRGNRHLNHALHLAALCQIRQPASEGRAYFDRRVAEGKTKREAMRALKRHLSNVVYRQLTADARPAKK

SEQ ID NO: 173772 - protein, 337 aa, unidentified
MKAYAGLDVADKTTAICVVSSDGETLLETSANTDAGAISQVLKPYRRSLAQVACESGNKSMWLAREMLRKKWPMICLDAFHTHSALRASINKTDANDARGIAEVLCRGIYTVAYIRSEQSQAWRTILLHRKAMLRKRLELSLLASGILKQVGGKLMRDGDTLAVVSQKRRKLDPTMRAVLESSIAVMNVLQVEHERLDAVVVRLANADPVCRRLMTIPGVGPVTAFAYRTAVENPSRFASSRLVAAYFGLTPRVYQSGERSHTGAISKRGDLEVRSLLYQSAGSLINVCKTPWRLRTWAKELAKRKGFKLAAIACARRLAVVMHRMWVTERDFDPGK

SEQ ID NO: 173773 - protein, 349 aa, unidentified
MYYVGVDYHKRYSVATVLDAAGTMLARRRLDNRLEEFRNFLKPYDKAEVEAVVESTRSWGIPVDILEQLADRVVLANPGEVKLIAKARISTDKVDSLSLARLLRMNWVPEAYLRPKANREQQLILRIRCFLVQLRTRVKNRIHDLIDRQDESVRERTTGFSDLFGKKGMTWLRSLELGHPSGKLLGQLLAVYDALDKEVRQSDRLVAELFAADEDCKLLVKTPGIGTFFAVLIKTEVGSIERFANSPRFNSYAGVVPSTESSGGKTWHGRIIKQSNCWLRWALVEAVIPATVADAGLRAHYEYYRRMKGSRVAKIITARRLGCIVYRVLKERKPYFEQPVPRRGYRQTG

SEQ ID NO: 173774 - protein, 348 aa, unidentified
MAMTIVDPPRSVTGGVDTHLDLNVAAAVDAIGGLLGVHQFPATSAGHAQLLSWLNRFGLVARVGVEGTSSYGTGLARSLRRAGVEVVEVDRPNRQSRRRTGKSDPADAIEAARAALSGRAHGAAKAKDGNVEAIRALFVAKRSARDTRIKTLNQIRHLGFTAPEELRERLAGLYRTQLAGAAAALRPRQGGDQVAFATKTALCLLGRRVLALDAEKEQLDNLMAKLVEKTAPELLGLYGVGVDTAAALLVAAGDNPGRIRSEAAWAHLCGAAPIPASSGKVTRWRLDRGGDRQANAALYVIVLARMSADKRTKAYVQRRVAEGRTKLEVIRILKRYVAREVYHRLPRP

SEQ ID NO: 173775 - protein, 486 aa, unidentified
MKESRELFRRPSLAAEGVNVNILYRRCAGLDVHKKSISACLRNRVHGHKVDVKTAEFGTTTQELERLRDWLKEHRVKHVAMESTGVYWIPVWNVLELARYGFDLMVVSPQQVRALQGRKTDRIDAQRIAEFLQYGLLRGSFVPPRPIRELRDLTRCRVHLQQDRNRVINRIGRLLETANVKLGSVISNIVGASGLSILQAVARGIRDPEKLAGYKVGNLKCTHEELVRALDGRFNDHFRWLLRDLLDKLAYLDRKLAELDARTRESMEPYMPVVRRLCTLPGVDYLAACAMVAEIGVDMSVFPTANHLASWAGLCPGNHESAGKRLSGRTRKGSRYLRRLLIQNAWGVARRKNCGLTAVFYKIASRRGMKKAAMAVAHKILVIAYYIIRDAVEYKNPGGDYLDRRDPERTAKRLLARLERIGFPVDPNLKAILATRRHRSKAPRPPIPLEQASGCPQCAGWGIPCIHARNQKRPPESGASNSEHSG

SEQ ID NO: 173776 - protein, 426 aa, unidentified
MKKYTQNDKIEQVTEKTLVVGVDIGSVKQYARAFDYRGRELDHVYRFMDCRDGYELFLDWMQGLQSANGMDRIIVGAEPTGHYWFGLRDFLDAAGIQFVLVNPLHVCKSKELDDNNQTKNDQKDPKVIARLVTEGRYSIPYIPRGVYAELRNMWFLRQRGVDAEVKIRNRIARWFKIYFPEYTQAYGSFAAKSSIALLRVACLPEDILQLGTEGIVEIWRAMKLRAVGKKKAESLLAAAARSTGQKEGAGAARMEMQMLLDEWELLNKQHQQIDEKLKELCEQVPESKNLLDIKGIGFVTVAGFLAEVGDIKRFDSPKQIVKLAGLALRENSSGKHKGKTTISKRGRARLRRLLFAGVMPLLATNDAFHSLHVYYTTRTQNPLKKKQSVIAICCKLVRIFYALLTKGTAFDSNKMLGDIHRPPLAA

SEQ ID NO: 173777 - protein, 338 aa, unidentified
MIVIGVDVHKQSLTAVAVDEAGRMLAEKRVAAANQELLEWGSGLGRERLWAIEDCRQLTRALERELIAVDEQLVRVPPKLMAPERRAGRQRGKWDPIDALAVARAALREPRLSRPRSDEQPFRELKLLVDHRDDLVDERRRAQQRLRWHLHQLDPSLLVPAKALDRPVHLDRVGRWLARRPGEVQVRVARELVVRCRQLTRTILELDCELERRTTETAPALLELPGCGTITAAKLLAEIGPVDRFQTDAQLARHGGVAPLEASSGRVQRHRLDRGGNRQRNCALYRIAITQARYHPAARAYLERKQAEGKSRREAIRCLKRQLARVIFNTLKASPALT

SEQ ID NO: 173778 - protein, 338 aa, unidentified
MQAIYAGVDVSKNKFDVSVIKGNRDFVDHISFKNNLTGFKQLRKYLLKNFKDHSIYIAMESTGSYSQGLSEFSYQNGYHTYVLNPVGIKNFAKGMLCHAKTDKLDSGVISEFLIFNHKKLITFQPLSESQSALKACTNRRTDIMVQRLREKNRVEALQSQNPFVLKSLKRSIKFLEKELKEIENEMKRIVENDSIMKEQKERLSEIKGIGDISIYTALSMIPELGMIRRKQIAALVGVAPYVNESGNMTKKGHIKKGRQKVKSVLHMAASVAIRHNKKLEKFYEKLKESGKPYKVAITAVMRKLLIAMNGIMRTYFREKLGVSKNQPLDPKLCLTLRQ

SEQ ID NO: 173779 - protein, 410 aa, unidentified
MEVLYPRCAGLDVHKKTVVACVRIQQGPAVEQEVRTFETTTSGLLALSAWLSEKGCTLAAMEATGVYWKPVWHILANGEIELMLANAAHVKNVPGRKTDVNDATWLSELAAHGLIRGSFVPDRPTQELRSLLRTRKQLVRERSSHTQRLQKTLEDGNIKLDSVISDILGVSGRAMIEAMIAGQTDPAVLASLADRRIRATREELREALRGRLTAHHRFLLQLHLDQIDALDRAIARIDEQVNTDLDSFREAIEIVRTIPGLDDLSARTVLSEIGVDMSRYPSDGHLLSWACMCPRNDESAGKRRSTRMRKGSPWLKATLFQCAWAAARTKGSYFQAQFHRIKARRGVKKAIGAVAASLLRTIYHMLKDGTLYQDLGPDHFDRRHKTASTRRLVRRLQNLGFAVQLTPAAA

SEQ ID NO: 173780 - protein, 408 aa, unidentified
MERLIERVCGLDVHKQTVAACVRVPGSKGTREHVQTFGTTAAELLALRDWLEAHEVTHVAMESTGVYWKPIYYVLEERFTCLLVNAAHVKQVPGRKTDVQDCVWIAQLLEHGLLRGSFVPPAPIRELRDLTRYRKVLIQDRTREANRLHKLLEDAGIKLASVATDILGVSGRAMLEALVRGTTDPEVLAELARGKLRAKLPALRQALRGRFRPHHAFLVSQLLAHLDYVDETITTLSERIEEVIGPFADELARLDTIHGVARRTAEVLIAELGVDMSQFPSDRHLASWAGLCPGNNESAGKHKSGKTRRGNRWLRAALTEAALAAIRTSNSAFTARYRRIMRHRGHKKAVLAVAHAMLVTAYHVLARQTTYQELGADYFDRRHGERVTRRAVQLLERQGYRVTLERAA

SEQ ID NO: 173781 - protein, 359 aa, unidentified
MPIVAHAYQFVVGVDTHAGRHAFSIVETRTQTEIDSGEFPVTPAGFARAITWIRRRTKSSPQVLVSMEGTGSFGQTLRLDLEREGLLVVEAPKPPHRAGRITKSDLVDARRAALGVMGTPVESLVLPRCGGAREALRILLQARGALTVENTAQINRLTALVRTHSLGIDARRALGRLQIKEIAKWRTRNEGIDLRTARNEAVRLAQRIVTNRNDLNDNKTVIEDLIRQEAPELLDIKGVGPVTAAQFYLAWSHPGRVRSAAAFVALAGANPIPASSGKNQRHRLNRGGDRALNNALHTVILVRMRHDDETKTYVQKRTREGKSKREIMRCLKRYLARRVYRTLQNANTGASIQPLKNTA

SEQ ID NO: 173782 - protein, 364 aa, unidentified
MFTERTSVGLDVHARSVAAAAIDGVSGELLQARLTPSFEEIRSWLGKLEGPVAVAYEAGPTGFGLYRDLTSAGIRCEVVAPSKLQRPAGDRVKTDAKDAIHLARLLRLGETTPVAVPTESTEAARDLVRAREDCRGDLMRARHRLSKLLLRHGIVYSGGRAWTGVHDVWLRKVALPQLGAHAQVLTFDAYYENVLATTARRDRLDAAIAEMAADSEFTALVHRLGCLRGIATLTGFALAVEIGDWHRFTGSSIGAFLGLVPSESSSGASRSQGAITKTGNGHARRLLVEAAWHHQRRYTIGKTLRDRWDLAPAAARARGDLGNRRLHARWVTFTQRNKKPSIANVGIARELAGWCWSLAVLEED

SEQ ID NO: 173783 - protein, 478 aa, unidentified
MEQRRIIGLDLGIPSAHTARVLSGDGKVVAKRKAFPTTESLSALEVAALEGAPPGTVLEVVMEPTGPAWLPIAVFFISRGHKVFRVPSAKAHDMRRYFSRNAESNSIDADALAKLAIIDLDGLRLLELNGADEAALDRRVRACDRLTQEAALHKVRLKDLVRQLLPMTPLTGDIGDADLALLEHWADPHDLVKAGKARITKVIATASHGHQRAERADEWLAAARSSLELYGEHPGVAFADLAAEVATEVRLLKAIGDELASHEEAREERYRSVDPEELARSLPGIKTVGGPALVATMGRAQRFPSAAHFRSFTGLAPKASETGNTDRKGQPMSKAGNSLLRTTLVRAADWARKQDPQLARIYYVQMTERGKTHLAANCVVAAHLAERAWLVMRRGTPYVLRDIDGTAVTPVEAKAIIAKRYSVTEETRKRRRSNKGGKAPQKVLTEHLKSHAQGVDRTRRPSPTTTSVRSEAGVKRTA

SEQ ID NO: 173784 - protein, 346 aa, unidentified
MTSYYLGVDASKGYADFVILDAHKKLVEANFQLDDTFAGHSHLYQRLNRFCSDHPKGLIHAAVESTGGYERNWYKALSGFRASLKIKVAHLNPLGVHHNSKADLKRNTTDAISARNVAEYLIAHPEKVSYQTADPLGGLRKHWSFIRMLTKQCTQLLNQLESLVYNANPELLAYCKDGVPQWVLKLLRRYPTAAKLCRAKNSAVARIPYVSLQRAAELIRAAKTSVASATDEVSAQVIIATVEQILHLKKRIAVQQQAMRQQCRLPQVELLESFSGIAEHSAVGLILRIQNIERFANCKKFVSFFGLHPTYRISGDGVGAFRMSKKGSKEVRQLLYMVAINAIQNN

SEQ ID NO: 173785 - protein, 351 aa, unidentified
MLLIGVDYHPSFQQIAFFDEETGECGERQLSHSDGEAERFYRDLQQRGVRVRVGMEATGYSRWFERLLAELGFELWIGDPAEIKAKRVKKQKTDRKDAQLLLRLMREGNFPRIWVPSPENRDLRQLLWHRHRLVQMRTRIMNQLQALAMNEGRRWKTKLWSERGRAELEKLALAPWASRRRQELLELLDRLHPTIEELTTAAEQEARKRPEVVRLMTHPGVGPLTALAYVLIIGTPERFHRGKQIGTYVGMIPSEDSSAGKQQLGHISKQGSSLLRFLLVEAAQAAARINPEWRRRYTHLAMRRHKSIAKVAMGRRLAIRLYWMWRNGCAYSSSLEFGSYVGQLGTGHGVQ

SEQ ID NO: 173786 - protein, 337 aa, unidentified
MTDFSLRVGVDISAQQVSATWGTTPDEHRPVVEVEQSPQGYQQLIHQLHQTGHDPAHCQVVMEATGTYWMRLAYTLHDAGFVVSVVNPVQAHRLAQAQLRRAKTDAIDAHLLMELGFKLEPLPWTPPPPLYDALYQRLRQRDAFLEIRTQERNRLHALQQWPEAQAAVIERYRLHIAFLTEQIKTLQTEIEQLLRSDSEWASATHSLLSIPGIGPITAAWLMVATLNFTTCQTVEELVAFAGLAPYPQQSGTSLHRTRGVGRGGHVRLRSALYMAALAAVHSNPTIRRFYTRLRERGKPAKVALCACARKLVLLAWALVTKHLVFDPDFEKPIRCPA

SEQ ID NO: 173787 - protein, 355 aa, unidentified
MTMLAEVVDAVIGIDTHRDSHEVEIADPAGRPVAALRIGNDSAGFAQLMAAIAEVVPGPRVAVAVEGTRSYGVGLARALAAAGLLVIECEQPRRKQRRGKGKSDPIDAHLAVLAALRLDISRLPVPRADGDREALRILLVARQEITVAATAQASRLRALLLTGDDTDRRAARAALTKTALATLAGREVPADAGREQAVRQAEIARLALAIGQARRQLTDNRTQLLAIVDDIAPGLTSRYGIGPVTAAQAIVSFSHPGRCRNEAAFAALGGTSPLPASSGRTIRHRLNRGGDRALNRAIHAIALTRMRSCPRTRAYVARRTAEGKTAREIRRCLKRYIARELYRQLTQSMKPLTNP

SEQ ID NO: 173788 - protein, 403 aa, unidentified
MNNVAGIDVSKGKSMVSVLRPFGEVVAKPFSIGHTGSELKELADYLKSLDGETRVVMEHTGRYYEPVARFLHDEGVFVSAVNPKLIKDYGNNTLRKVKTDKADSRKIARYGIDNWAELRQHTPMDTIRMQLKTLNRQQSLYTKTKTMMKNNLIALLDQTYPGVNALFDSPVREDGSQKWVDFATTFWHVDCVRNMSLTAFMERYRKWCKRHGYNFSQSKAVEVHAGAQDLIAMLPRDALTKTMVRQAIDALNAISASMERLKAEMQALAAQLPEYPVVMAMHGVGDSLGPQLMAELGDVTRFTHRNAITAFAGVDPGADQSGTHEAKSTRVSKSGAPELRRALFLVMDCLLKTQPQDDPVYRFMDKKRAEGKPYLVYMTAGANKFLRIYYGRVKEYLASLEGN

SEQ ID NO: 173789 - protein, 354 aa, unidentified
MDLFVGLDVALEETSLCIIDKDGKMVRETKVDTEPAAIRSALEGYADRLGRIGIEASSIGMWLHRELHASGFPVVVVEAHHAHVSLSVMRNKTDRNDARGIAQLMRLGWYRAVHVKNVETQKLRTLLSNRKLLKRKLVDLENHIRGALRTYGLRVGPVSRGEFESRIRELIEHADCVFETMITTMLEVRRAVHQGFEKLHKVLLQVVGHDALCRRFMTVPGVGPVAALSFRVGVDDPHRFARSRTVGAHFGLTPRRHQSGTSIDFEGHISKRGDLGVREALCEAAASLLLRVKKWSALKAWGMKIVKRSSMMCAIVAVARKLAAILHRMWIDGTDFQWTAGARITPAMRLKLAR

SEQ ID NO: 173790 - protein, 370 aa, unidentified
MAKYSEAFVGFDTAKKKHALAVAEGGRNGEVRWLGEINSSPATVEKVIGKLAARYAKLHVCYEAGPTGYGLYRQVKALGHDCAVVAPSLIPKKPGDRVKTNRRDAVTLARLHRAGELTSIWVPDAIHEAVRDLARAREAAAEDLRKKRQQLMAFLLRHGRIFDGLKHWTVTHLRWLAQQSFEHPAQQIVFQDAINAIEDAIRRLRSLDQQLAAIVPSWSMAPVIAAYQAMRGVSFLVAVTFVAEIGDVRRFDNPRQLMSFLGLVPSERSTGEAVRRAGLTLAGNRRARRVLVEGAWTYRYPARVSETLRTRIEKLPKAVRDIAWKGQVRLCARYRRLVAAGKKTPIVIAAIAREMAAFLWAIGHQVEPMT

SEQ ID NO: 173791 - protein, 341 aa, unidentified
MKHEMHVLGIDIAKRVFHAVGMDGRGNIVYRKRLSRHDLIPCIAKLPPVLIGIEACGGAHYWARRFRAHGHEVKLMAPQFVKPYVKSNKNDSRDAEAIAEAVTRPTMRFVPIKDVDQQDLQALHRVRERLIGERTALVNEVHGLLHEYGIVIPKGVAKFRQAVVGKLESEKDKLTPLSQELFWKLVDEFALLEKQLAYYQEKLETVATTHPECQRLMTIPGIGPLTATALVAAISDASAFKNGRQFAAWLGLVPRQHTTGGKERLLGISKRGDTSLRKLLVHGARATIRWVGRKTDRRSQWMRQLLERRGKNRTAVAVANKNARIVWALLTSHQDYQPAEG

SEQ ID NO: 173792 - protein, 425 aa, unidentified
MSQPKQSLDRECEFAAYVGMDWADKKHAWSLPVATTGKREEGEVEHSPEAVEEWIQGWMVRFPGQLLAVCLEQSRGALLNLLSKYQQLVLFPVHPATVSRFRAALYPSGAKDDPKDADLLLDLLVHHRERLRRLEPDTVETRTLRFLVEQRRHLVDQRTAHSNRLTSPLKQYYPQVLCWFEDPAAPLVTAFLARWPTLDMLQKARPETLLRFFHQHNCRSEELIQERLQQIRKAVPATRDPAVLESGMVQTHWACQMLSLLSQAIADLDQRIQPIAQAHPDYAVFDSLPGAGEVMVPRLIAAFGTKRERFSNASQVQNFSGIAPVRESSGRTEWIPMRWACPQFLRQTFQEWVGHSIAHSSWAQAYYHQQIARGNGHHAAVRSLAAKWIRIVYRCWVNHMPYDERIYLDSLRRHGSPLAAAIPAL

SEQ ID NO: 173793 - protein, 412 aa, unidentified
MTKRYGFFVGIDWAWDEHTICILGSDAEVIDQRTIPHSGAGLAQLADVLEKLSSGNSSSVAIAIEMPRGAIVEYLLERRFAVYSLNPKQMDRFRDRHTVPGAKDDSRDAFVMADALRTDLHLFHKARLDHPDILRIRELSRSEEDVQQDQMRAENQLRSLLNRYYPQMLQLCPAVDQAWFWDLLEMASLPAQGAKLSKSRIEKLLRSYRIRRLDADEIHQTLSVPALQLAPGAAEAASEHVLLILPVLRLLDRQREEIARRMQLLLEKMSEDEQVVEHRDVKILLSLPGVGRVISATMLAEASQPLAERDYHAIRSYAGAAPITRRSGKRKMVVMRRGCNPRLRNALYHWSRVSSQNDPRSKEHYAALRAKGHSHGRALRGVADRLLAVLIAMLRSGTLYDPNHQTAAMPLK

SEQ ID NO: 173794 - protein, 420 aa, unidentified
MVYLERGYNLKELPWSKTVSNSFLFKEACMILVGVDVAKDKHDCYIMTSEGEVLFKSFTIANNMEGFNQLYEKILSVIDNFDNVKIGLEATGHYSYNILGYLLDKGLTPYVINPLHSNLYRKSLSLRKTKTDKVDSHIIASMLMSDVSLKPYSNTLYHNEELKSLTCYRFTKVQERAKLKISISRLVTILFPELEKLVPTLQMNSIYALLYEFPSAHAISKAHLTRLTNLLNTTSKGHYIKDKAVLIREAAKNSIGSNMPAKSLELKHTIKLIKELTSEINEIEEEIKIIMNKINSPILTIPGIGLSTGAQILAEIGDFKNFSSPDKLLAFAGLSPSTYQSGNMYSSNAKMEKRGSKYLRFALFNAAIYVSYWEPTFSQYLKKKRVEGKHYYVAISHVVKKLVRLIFHLEKTNERYSTVV

SEQ ID NO: 173795 - protein, 366 aa, unidentified
MQKISTMQAFSNELLKEQKLTIGVDLGDRSSAYCVLNEAGQIVFEHKLPTTPEAMKQVFGSMPRCRIAMETGTHSPWVSRLLTALGHEVIVAHAQKVRLITKSRRKDDRLDARSLARLARIDPELLSPVQHRSAQAQLHLTEIRARAVLVSARTALVNSARGLVKSYGERLRKCGTEQLRRETTSGLSAGLREALEPLLQEVESLNERIQEYDRRIEQMSKKAYPETALLKQIKGVGDLISTTYVLTIEDPHRFRKSRDAGCFVGLQPGRRNSGEREPQMRISKEGDEYLRTLLVQGAHYILGPFGEDSDLRRWGQKLSARGGKTAKKRAVVAVARKLAVLLHRLWVSGEVYEPLRNSQKVMTAAA

SEQ ID NO: 173796 - protein, 543 aa, unidentified
MVVGSRLCSLFSLDIFAWYNKKKLTFYYTHNPLFVKFGILIYVNIIRSPPPGIEIQISLKSISGRYTMKNQNIYRNNNYALKETLSNYKPEQLLYIPIEVGKFNHKASIVNFFGDIVVKLFEFPNKKHGLDFFVKKLNFATTSSNAQKIFLGCESCGHYHLNLVHHLKQLNFPIEIINPRDTRKENPNKNSKTDNIDLGAIARVLISNKGGRQIVPEGVYYNLQRAARTRRKFVQRKTSSKNIITGLLDRIFPGLWDKDAPIFSDRWGKASMLLLERYPHPHRIIRLGEQRLARFLRKNNTKLGIDSAHKIIDAAKDSLTKPLAELHMDIFALKSHIKCLNLYNETIAQLEQEIACLLVQTPGIYLLSIDGISVIFAGEFTAEVGDINRFAYANQIISFAGSCSKVFESAEYQAQGLHISGRGSKFLRSTLNQVALALNAWCEPFHLYYTNKALQKPDKPGIARIATGNKFVKLAFALMKYEQLYKPRGLLLDEKNYYSNLWSKIIRKLSGFNLTNISQENNYLLKIKKYLEEKYALTLPTKL

SEQ ID NO: 173797 - protein, 368 aa, unidentified
MMGWMAPLRHLSAKLLSDRISSEWEPSMGEVTTIGLDLAKHVFQVHGVDAEGATVLRKQLRRAQVLAFFSRLPPCLVGLEACATAHYWARELRALGHEVRLMPAQYVKAYIKRNKHDAADAEAICEAVERPTMRFVPVKTADQQAAVLLHRGRERLVRQRTGLVNALRGHLAEFGVIAPQGLRNVGKLIAIVRDEGDARLPDLARQVLQVLAAQIEQLEAAVAAIEKQLMAWHKSNPVSQRLASVPGIGPIIATAIAATVVEPSGFRSGREFAAWLGLVPRQNSTGGKHRLGGISKRGNQYLRRLLINGASANLLRSKATNADPWVIGLAVGGRPPLVVAVALANKTARIAWAVMHRHENYQRVAAAA

SEQ ID NO: 173798 - protein, 351 aa, unidentified
MLIIGCDFHPRFQQIAYLDKETGECGERRLTHPEEAARFYRSLTASQVRVGMEATGNFRWFRRLLGELGHEALLGDPSAIHASIPRRQKTDKRDARHILRLLVEDRFPVVWQPPVENEELRQLLLHRCRMVRLRTKVKNQLDAVAKNEGLLSARGWREKRRQIEALPLPGWYAERRKDMFALLDELDRRVRPLDEAVKKAAGENADARLLMTHPGVGPVVSLAYVLTIGDWQRFPRGKHVASYLGLIPEEESSSDKRRLGHISKQGNDLLRWLLVEAAITAQRHDASWHRQYLRLSMNKHHGVAKVAIAHKLAIRLYWMLRSGEDYEQVVERGSHAGQSVCPSGCGLTPRT

SEQ ID NO: 173799 - protein, 343 aa, unidentified
MHIASIGIDLGKTTFHLVALGERNKILLRKKFSRAQLLAYTANLPSSQVGLEACSGAHFLGSRLREQGHDVRLIPAQFIKPYRKSNKNDFLDAEAIAEAAGKENMRFVPIKSEEQLDVQAIHRVRDRLVQRRTALINEIRGFLLERGMTFAVRPTQLRKKLPDVIEDAEQNLSSRLRWLLQRLWLEWKQVDHEIQVITEEIERISEENVLCRRLRQIPGFGPMVSSATVAAIGNGAAFRRGRDFAAWLGVVPKQYSTGGKQKLLGISKRGNIYLRRMLIHGARAVLFRVKYDTAGFGQWVHRLAQRAPRNKVVVAIANKLARMAWAVLSSGRDYRHQPLQVPA

SEQ ID NO: 173800 - protein, 364 aa, unidentified
MKNSITWVGMDDSANKINVAIFQGQEREPREEIVVVNDSTGLGRLAKKLKTIPGQVRCVYEAGVNGYHLHRYFKNHGISCDIAAPTLTPRRAGKRVKTDRLDEKKLATLYRAGELTSIAIPEKEQESLRDLVRAREDALEDLQRARHRLARFLMRRGLRYGIGKNWSCGHMKWIKNLRFEDDRNQMVLDEYRFTLDERTERLKRLQQRIEELATQEPYQKRVRYLMALKGIQALTAMTIIAEALDLRRFMDAPAFMAAIGVVPSEESSGDIEHRGSITKTGNRHIRRVMIESSWHYRHSASIGKTLKKRREGLPIEILEIARGCDHRLHQKFRRLINRGKDRRTAAVAVSRELAGFIWAIGQVA

SEQ ID NO: 173801 - protein, 485 aa, unidentified
MYKADDTWHPVSLNKGGIHMTSFYLGIDVSKGYADFLVLNHKKQPVVKNFQLDDTFEGHTRLYEILNQFLAGHEQATLYAAVESTGGYENNWYQALTSFQASLPIQTARLNPLGVLHNSKADLKRIKTDKISAQSVAEYLIAHPEKVSYQQEDRLAGLRKQWSFIQMLTKQCTQFLNQLHSLIYTANPELLGFCRGGMPAWVMKLLLQYPTACRLAKARAKTVAKIPYVTLERAQKLIADAKCSVASNADDVSAHLIVATVSQILHLKKTIAAQTDSMAAQCNLPEVKLLKTFIGISDVSAIGLMIQIQNITRFKTVKKLASFWGVHPVYKTSGDGSGGFKMSKQGHVQPRRILYLVALTAIEHNPVIKAVYEHHIRQGKEKMAAIGICMHKILRIIYGMLKNNTVFDPEIDNANRIRLMAAKTAAPKKDKNRRFQQYDISAPISRRQRKKRLEREQSQSVNNTECGISAPVPMATIIADILAKL

SEQ ID NO: 173802 - protein, 436 aa, unidentified
MFVGHRFRTDPDELDTLWARLPKDAERIEVVMEPTRNAWVALAAWFRRHGATVVMVPPEQSADLRDYYNKHTKTDRLDSKVLARLPLLHPEGLHREDSLGPGDELKRAVKIRSGLVHRRTACMARLDALLEILGPAWIAALGSDMTLTALRFLARYANPVQVKRLGKARLAAFFRRSSRQAWADERADAVIEAAATTLRLWGADGGELDFDALAADIAAEARLALTLTDEINGFDKRIGALYDKADPAGIVRSVPGAGRVCAPQILGRLGDPTRFANLAAVRSFAGLVPAADSSGQADGHRGPTKAGDSCLREALFIAADHARKVDPTLAVRYQRLMLAGKHHDSAVCTLAAVLLTRIAACLRAGTHYLLRDTDGRVITEAQGRAIVAERYTVPPEVRAARRKVTPHRHPRRNERNERAKTGVATRSKASPVPQPA

SEQ ID NO: 173803 - protein, 341 aa, unidentified
MQITTIGLDIAKNVFQVHGIDGEERVVVRKQLRRGQVLRFFEELSPCLVGLEACATSHYWARELTKLGHEVRLMPAKDVKAYLKRNKNDAADAEAICEAVRRPTMRFVQVKSAEQQAQLMQHRARDLLMHQRTQLINAIRSHLAELGIIAPQGREGVKELLAIVAKDANPGLPNDARASLLVLAAQLQALQTTIGAIEKRIVVQHRANKQSKRLQTIPGIGPIGASAIAATVTNPKIFRSGRDFAAWIGLVPRQMSTGGKPKLGPISKQGDRYLRRLLVVGAVSTLRRAKQNPQKFPWVTRLLARRPYKVVAVALANKMARIAWALLNSDKTCRSAWFAAA

SEQ ID NO: 173804 - protein, 452 aa, unidentified
MVKGHRRCCGIDVHKEKLTVCVLPPDGKFGQCLEREYRTFTEQILQLKAWLLKLGVTEVAMESTGVYWRPVWNVLEGAFRLLLANPLQVKALAGRKSDRRDARRIAEYLQDGRLDGSFVPPAAIRHLRELTRDRVSLVEEQTRVSNQIRDLLETANIKLGNVASDILGKTGRRILEELAGGERDAGRLAEEARGKLRSKRRELREALRGRFTEGHEFRLKELLLRLEFLECRIVALEGEIRRCMKPYQRQLELLDGIPGVNEVVAWTLVAELGVEMGVFPTGAHCASWAGLCPGENESGGKKKSGRTRRGNRYVRRALVQAGWAAAREKGSYFQGIFRRLVGRRGFAKSVVAVAHRLLVIVHAMLRDLEPYRELGADYAAQRYKAQTIRRLTERLAALGQRVSLAPREEAAVGAAVVGAGGEAVTAGAARSEGKRGRGRPRKVREEGRKDEA

SEQ ID NO: 173805 - protein, 365 aa, unidentified
MDDSTTTTVAVGLDVHARSIRLAAVRADELLEERTLPYDEEAVERALRRWPAVRCCYEAGPTGFGLHRHLVEQGFDCRVVAPGLVPERPGDRVKTDSRDARKLARLLAGGLLEPIHVPSPELEAARDLVRAREDARLDRMRDRHRLSKFCLRHGRRMPTSSWTVVRRRWLGEQRFEFAAQQQAFDTYVHAVDLVDARIGQLERAIRETAEQQPWRELVARLRCLRGVDRLTALALVAEIGDFDRFQKAEELMAFVGLVPSERSSGERRRQGSITKVGNSHVRRLLVESAWHARRRPKVGYELARRQRGQDAIVVERAWRCQQRLYQRWQRMAGRGKPQQKIVVACARELAGFVWAIATEQPLRSS

SEQ ID NO: 173806 - protein, 357 aa, unidentified
MRFYNTQHQFYCGIDLHARSMYVCIVSHDGELLVHRNMKAAPEPFLKAIAPYRDGLVVAVECIFTWYWLADLCAQEHIPFVLGHALYMKAMHGGKAKNDKIDSQKIATLLRGGMVPKAYIYPAEMRATRDLLRRRTHLMRKRAELLAHVQNTNSQYNLPEIGKKIAYKANREGVAERFDDPAVQKTIAVDLALITYYDQMLSDLELFILKTAKQHDAQTLYLLQTVPGIGKILSLVLLYEIHQIDRFPRVQDFASYCRLVKCAKESAGKRLGTSGNKIGNAHLTWAFSEAATLFLRGNEAGQKYLARLEKKHDKGKALSILAHKLARTVYFMLKRKTAFDLEQFLRTSGSRAREPGA

SEQ ID NO: 173807 - protein, 410 aa, unidentified
MDDGMASLGRDSAQTVLCAPFVLGVAPGAIVAGFDVHRRQITFDALDTVSGECWRGQLESTSAAVERWVGRFPGRVVHVAVEACTGWLFVCRALEYCGAVAHLAEPVETSALRGRERRAKTDRADAKWLRQLLCEGRLPESWCPPEHVRQWRSRARLRNTLLAERTSWIQRIRATLYHHGVPGAPDDLRTLAGRQFLAALELPVDAAERIRVALESIDMLEIQLSGIERDLRTLARHQTGCRALMSLYGMGELSSLLTLVELGDVTRMHASRQAVRMAGLDIGPHRSDRHAQLGKLTRQGSAPLRWALFEAAQSACRPTSPDYADYHALKNRGLSHNRASLTIARKLARRSYQAHPSTMRPTRAASSRNDRGTHARRGGPQETERPQSLHRNDRSTISSPTASTGGRGPR

SEQ ID NO: 173808 - protein, 383 aa, unidentified
MKSVCGLDVHKDSVYLCILSEFGELIEKVFGVLTYELEEMRDLMLHHHVVEVSMESTSVYWIPIWRVLSPHFKLNLANPYFIKQLPGRKSDVKDAQWIAECTMKELIRGSFVPPEIIQQLRQYDRRIFDLNEEIVRKLSKLDAVLQRCNIRLSNYISNVDSKSYKAVVRAISQGITDPEELVKLIHGRIIKHHGIDVITASLKGVVSLAEIDMISQLRDELDMAEAHKEKCQARMLEICEREFPEELKRLQTIPGIKERAATSLIAEIGTDMNKFETANHLASWSGLKPRNDESNKKIKSRSITHGNVYLRKTIIECAWAASRTKDCFFSRFSFHQTQVRKKNKMKVLVAVARKMLIAVWHVLHDNTIYIDFTTDRKTSRTKG

SEQ ID NO: 173809 - protein, 332 aa, unidentified
MSSHEIVGIDVAARKLVVIGERLALAEYENTAAGRSTLVNALSRSPQPVRVVLEATGMYFLDLACEVAAAGIAVMVVNPKATHHFAEAILQRRKNDPVDAAMLREYGRRMDFVSWQPPRHELFGFRALTREVQALSKTVAAARNRLHAITATQLAPAVLIGALERQIAHNQALINELVAAAVAQTESDPELARLLARTDSVPGFAAKAAVLVIGELSVLPPMTARQWVAQAGLDVREETSGSSLARRPRLSKRGNKRLREALFYPALTAARCCPAAAAPCSLPGAGFVDRLVAHGKTRLQAIVALMRKLLHGLHAMWRNDEDFDAEKLFAPA

SEQ ID NO: 173810 - protein, 341 aa, unidentified
MARVIGVDAHKATLTCSAVDELGREVDSITAANDGRGFARVGRFALRVGATRVGIECSGSYGLALAQHLVAGGWDVKEVPGQLVKQIRRALAKGKNDSLDALLIARVVVREKNLPPPPLKGVTHDLKALVDHRETLLREATRHRNRAHAMLTQLRPGYWRVVPALTSVRRLQAARRLVEDDAGVRAELLRDTLARVEELQSSAKMIERQIEALVKASGTSLTDIIGVSVITAARILAELRDVGRVSNQSAFGALTGTAPVPASSGKTDRWRLNRGGNRQLNRAIHTIALTQISHDPRAREYLDRKREAGKSRKDAMRCLKRHLARVVYRRLVADQTLLLLT

SEQ ID NO: 173811 - protein, 341 aa, unidentified
MKNKSFIGIDISKNVIDVSIFCEETPIKDFSHDVFNNSRKGFGEMCTWLKKNHVVLSNCLFGMEFTGSYSMELEKFLTARKYQFCMLSTHTVKHYPMGPKDKNDKIDSAKIADFLYRYNGTECVKPYKMPDKTMQRLKTLMNERKFLVEQRTCFMNRRQLCTTKEDTQLYDGYIKKLSRDIENIELEEQKLLATDDSLLSTYKNLLTIPGIGFVNAINVIVITRNFTAFETARQYASYVGVAPHFRTSGTSVKWRPRPSARCDGQAKADLSMAATVVVQYDAELQSFYNRKLGGKQDSDTKRKALNAVKFKLVLRMFAIGKQNRKWEPLDSKSSNEKLAIS

SEQ ID NO: 173812 - protein, 341 aa, unidentified
MVYVGLDVHKEFCQACVIDRSGRVISNERFSSTQEELDEFLDQFKNAKFVLESTGIWEFIYEGIENRGFEAVLAHPLKVRAIAEARVKTDKVDAETLAQLLRADLIPRSWVPSKDMRDLRQLVRQRAYLVRQSTSLKNRMHAELLRRGVRRPDGMLKPFSQKHIAWMRSLNIPTVGSCLNCLESVQAQIEELNTTLLDEFHRRPDAQLIATIPGIGYYSALLIHAEIDDISRFPNPEKLSAYSGLVPTVSQSASSVHYGGVSKEGSAYLRWILTEAVYSHIRFNPDSRLSKFHARIARRRGKQKATSATARKLAHIIYWMLVRREQYQSHGSNPRRETCTI

SEQ ID NO: 173813 - protein, 348 aa, unidentified
MLIIGCDYHPGFQQIAWVDTETGEADERRLAHREEAEQFYRTLKGRRVRIGMEASGHARWFERLLNDLQFELWIGDAAEIRTKRVRKQKTDRQDAQLLLKLLMEDRFPRIWVPDAANRDLRQLLWHRHRLVQMRTRIMNQLHVVALNEGVRRKKALWRPAGRSELESLPLAPWASRRRQDLLDLLDQLTPKIQELTRALEQEVEKRPVARRLMTHPGVGVLTALAFELVIGTPERFGCGKQIANYVGLVPTEESSGDRRRLGHISKQGNALLRFLLVEAAQVTVRSQPQWRSKFFHLAMRRGRKIAKVAMARKLAVHLYWMWRQGLDYGQFGKLGSHAGEPGNRHGVQ

SEQ ID NO: 173814 - protein, 331 aa, unidentified
MALKIVYKICCGIDVHKTFVVACIASTNDKGVTSYESHRFSTYTSGLKTLLQWLLDRNCKDVCMESTGKYWIPVYNILEKDCSIVLAHPKYVKAIRGKKTDKKDAKWIADLFKHDLVAGSFMPPADIRQLRDLMRYRFKLTCFKSSEKNRLQNCLTVSNIQLGNVVSDTFGKSAQAILDKILEDPADTSFDLEPLVFKSLKKKLPELRDAIDGYITPEQAGKLKVIKAHYENLEARKAELEELILALATPYQQELAILQTAPGISSDFTAIGIISEIGTNMEAFPSAKHLCSWAGLTPTNNESAGKKKSVRVSKAGCYIKPLFSTVCKRCC

SEQ ID NO: 173815 - protein, 415 aa, unidentified
MKVVFPTCCGVDVHKSFLVATIIKTPKDSLQPSYQKRRFTTFNSDLKRFAKWLHENDCLDVCMESTGKYWVPVFNILEKRDIRVVIANPKWVKAVKGNKDDTKDSKWIGDLFRLGLVKSSFIPSKDIRVLRELTRYRYKLTSMKSSEKNRFQNAFTVCNVALDSVVSDMFGKSATAITDYLTPNEDFDPQHCVSLLHRSLKKKAEDVLASIEGYEISPEQKCRIGIVRNHLHYIDKLIERMNACINTMVEKYDGAISLFCTIPGIDRSSAITIVSEIGVDMAQFGSSKRLCCWAGLTPGNNESAGKKKSVRISRAGVYLKPALVQVAHAAVKDKLNPYYAVKYERIAKRRGKKRAIIAIARMILTAIFSMLSTGEVWNPVDLFRVDMPEHIKEQHRAKAVKQAIRFLKAQGLEVS

SEQ ID NO: 173816 - protein, 394 aa, unidentified
MKLVGIDVGKNSHHFCVMDKETGEFNVTPTSFSNNKEGFDFLINSLKPYSKKSILIGMEDTGHYHVALLKFLLSNGYTVALINPKTTDLTRKMEGGITKNDKLDTITICDVLDTPERKKQYRITKVDRFDLYEQRQLTRHHHNLKEELNVYCNRLQKSIDLVFPEFNTLFSSKYGVVYMNLLKTFGSAEAIASTDIRTIRKCFEIKGRGNRISLTPEKLKECAKNSIGISSEVETIQIKHLVSQITLIKEQIAETDKKIEEFSITNNSPILSIPGISHFSGTSILAELGDIGNYSKPSQIIKFAGVAPYHYESSQYNAQHTGITKKGSKYLRKTLYQIILTVINNNPVFKKYYLLKISQGKGHRCAQGHCIRKLLRIIYHLLETGQSFDPALLR

SEQ ID NO: 173817 - protein, 345 aa, unidentified
MKILKQVLGIDVAQKELVVSLGRMHEDLTAEIYAGKVFANTEKGFSALLEWVERSTDSNLPVRFVMEATGVYHESFAYFLDERLRQVSIVLPNKINHYFKTLDVKTVTDYTAAEAIARFGLERKLTVWKRPNAVFKNLKQLTRERDQIVDARTVTKNQLHAESCEAEPSKNTIKRLNALIAFLDKQEKEIMQEITALVKKDQPARDTIKLLTSIPGVGVLTAAIVLAETNGFELIRNKRQLTSYAGLDVREKQSGTSIKGKPRISKRGNRYLRKAMHLPALSAIQCNERFKTVFARLVSRHGIKMKAAVAVQRKMLELMYILYKTNTSFDAEFTREIKKEKQLLQ

SEQ ID NO: 173818 - protein, 344 aa, unidentified
MIYVGLDISGKSLVLHGMNEKKKVVFKEEIPPNQRALRKAMLGLGVETRLVVFEASNQLKWIADCLRKIKGVHIHVVHPNELKWITQSNGKTDKADARKLAELARGNLLPPKVHIAEGVIRELRELISARNTAMRKRVSLANCLRSYSLQEGSSVNAGFLLNPKRPELLPSLKIIENLKMIFTTIMPAADALKDAEEEFLLRIKEIEDDRQDLVRTIHGIGPLGSATIVSALDNVERFANKKCVAKYGALAPTIYQSGNVTRLGHINFDGRREIRRVLLQSAHIIIRMKSPAAKPLRDFYDRIKARRGKKIATIALCRKVLTIAYGILKTGNPYDPFVLTPNLV

SEQ ID NO: 173819 - protein, 336 aa, unidentified
MSQQYVGIDLHRRRSVIVRTDAAGEVLGEARIENDPLALAAEIAKAGPAPEVALEATYGWYWAADLLAECGARVHLAHPLAIKAFENRRVKNDRIDATLLAELLRMGRLPEAWIAPVPVRELRELVRYRHKLVDIRSGLKCQVHAVLAKEGVRVPMTDLFGLAGTQLLNRLELRDAFLVRVESLRDLIITLDNEIQMLDRRIHERVAANPSYRAVQQIPGVGPVIGAVFVAELGDVTRFRHANQVASWAGLTPRHRESDTKVHRGAITKQGSRLVRWAAIEAARAPRAQGWLKRDYHYLAQRRGKNIAAVAIARKIVTLAFYALRDGEVRCLTRAA

SEQ ID NO: 173820 - protein, 379 aa, unidentified
MTTAIDTRDVCCAALELSKTSWVCAFAAPGDTRASVHKVRTGEVGRLIGILNNGRAKAERELGRPLQTVLCYEVGYDGFWLARLLIARGIRAVVFDPASFLMPRRGRRAKTDRLDAEGMTRTLRAWLFGDREVAREVQIPSVAQEDAKRIERERKYLVEERVSIVGRIKGLLALHGIWLTGKRIGKGLRACLDSMKTGDDRPLGPFLRSDIERMLTRYDMISQQIAEVEAERKVALDSNTGQFPNAEKVRLLSKLGAVGETTATVLVAEVFHRTFETRRHVASFIGLSPSPYNSGDVDRDRGISKAGNKLARQTLVELAWFCLRYQPDSKLSLWWRERFGSKGMRGRKVGIVALARKLAIALWRFVEGGIIPEGATLKA

SEQ ID NO: 173821 - protein, 431 aa, unidentified
MNSSSNNDPTQNNYAAFIAIDWADQKHTFSLQVAGQAKKETGTLEQKPEIIGPWVAKLRERFGGRPIAVAVEQSRGALIHALLAYDFLMLYPIHPTTVAKFREAFKFSGAKSDPLDTDQILEILTKHLELLKPLKPDTEETRLLGRLVEDRRKAVHLRTSHIQALLASLKEYFPQAIELVSGNLKSRLAGDFLKKWPSLESFQQAKPSTIKRFYYGHNIRSPEVIEAALKLAIHAQPLTTDSAIVESSRRVSQMHAQMIQTLNPVIADYDQRIEKVFHDHPEFPLFSKLPGAGPVMAPRLLSFFGTDRSRYPNAENAQTFCGISPVTKSSGKTRVVYFRRACPKFQRQSFHEFARLSVTSCQWARNYVDHYTAEGKKYNTVIRALAFKWIRILFRCWKDRTPYDDNKYMEILKKRGSIFATLHLEQKNENC

SEQ ID NO: 173822 - protein, 273 aa, unidentified
MILVGCDLHTRKQQVALLNTDTGELWEQELSHVGADVERFYAALPSPVTVAIESTGYSVWFHALLQRLGPTLLVGAAAKIRAMVVRTTKTDRRAARHLRDLLKDDRFPLVWIPDPTTRDLRALVKHRLRLVRSRTMVKNGRHAIALNQRLALGPSLWSRQGLAQLQALVLRPHTLRRRDDSLELLHWLHRHIDELDLQVATAAAADPNARRLMTHPGVGPLTALATVLVRGPVARFPGSKHVVSSIGLAPAVNASADKYRLGHISKQGSALLR

SEQ ID NO: 173823 - protein, 376 aa, unidentified
MTTPKEVFVGIDVAKRRNAVAIADAGRDGEIRYMGEFDASPESMTRLIRKLSAKHDKLHFCYEAGPTGYGLYRQIVALGHDCIVVAPSLIPRRAGDRVKTNRRDAQSLARLLRAGELTAVWVPDETHEAIRDLVRTRAMAVEDERRKRQYVTSFLLRQGRRDGSKASWRGKHKRWLDEQSFAHPAQRLAFQEMLNAVQAAMERIERLEAALIEIVPDWTMAPVVTAFQAMRGVRFITAVTLVAEAGDVRRFEHPRQLMAFLGLVPSERSTGETKRQGGITKAGNSRARKALIEAAWSYRYSAGIGVRHQLRQTNLSQSVRDIAWKAQTRLCARYRRLMAKGKRKTVVTVAIAREIAAFLWSIARHVDPQPVAIAAA

SEQ ID NO: 173824 - protein, 441 aa, unidentified
MKNNHTQNNNSIAAADPIAAWVGLDWADKKHSLFVRPTDGAPSTACELEQKPQALDQFFLQLHQKHPQGRIAVCLEQSRGPVLYALMKYDFVVIYPVNPRCLADFRRAFKVSGAKADPTDADLLSELGCKHQERLRALVPEDNATRQVRFLVEARRDFVDKRTALANELTATLKSYYPLALEVVGETLEGPMGLEFLRRWPNLAKLQGAKPSVVRAFFYAHNSRSEEKIAARLEAIKTAVPLTEDPAIVGSLQLQAAGLIRQLAAVQKTVAEYDQQIRVVFEGHSEKWLFDKLPGAGPVLAPRVAAAFGTIRTNLGTALDLLCLSGVAPVKRESGQQETVHFRFARPKFLHQSLVEFAKCSIGQCDWARLLYEEQMKNGKSAYAAIRVVAFKWGRILWRCWQDRVAYDEVRYLRSLQKRHVKLYETLYDALPEQSVEVNNS

SEQ ID NO: 173825 - protein, 403 aa, unidentified
MKHVIAFDISMDKSYMVIYNAQKQCVFESKIKHSKPEFKKLQEKIHELTDKTGELHKIVFEATGIYSRQLERFMQDNQYTYCLLNPLEAKLQCDSLLIYKTDRSDAHRLALTHFTATPRVFTGTDNLFYQLKSLSRLYSELDSELSIIRGRMHKVIQLTFPELERMFTSKSDLFLNFVQLFPHPNCILGLSKTIIKNRIRANTNKKLLNITAEKKAIQILEIAKTSYPAVSQNDVLCDQLKLYSRRYQEFLHQKECCINKMVYIAKQRAEYNINPSLPGIGPNTAVRLMAEIGDVTRFNNNKQLNAFAGIDIRRFQSGKTFFKDKINKRGNKHLRKLLFLIIQNMIKQRRDGQNHIVEYYDKLKTQPYNKCHKVSSIACVNKFLKFLFHLITHDINYDYRLTA

SEQ ID NO: 173826 - protein, 303 aa, unidentified
MTSVLYVGLDVSLEMTSICVVDAEGGMILEAKAVSDPADIGEVLAGIGGTFERVGFEAGPLSKWLYNGLTSAGLPAVCIEARHAKAAMVAMNRNKNDRNDARSLAQLIRSGWFKAVHVKSTESQEMRTLLMSREFFVNKLRNHENEIRGLLRPFGLKVGRVAARDFDTRVRELIVGYPNLELCMSALLRGRAEMQAQLAELHRALLRLTANDELCRRFMTIPGVGPVTALASKATIDDPCRFRRSSDVGAHLGLTPRQYQSGETDVRGRISRSGDAFTRTALFTAAMSCSPVPGSGPRSEPGA

SEQ ID NO: 173827 - protein, 416 aa, unidentified
MNYNPCITIDVSQGKSHIQGFIGYNNKNRKPDNITQPKVMRHSKQGFNKIIELISIIKSKTNLIPIVIFEFTGVYHKTLEKFLQKNNINYHIVAPLRAAKSRQNDIRSVKTDKRDCLSLARMFYDIKKDSLGKFDSQSEFYESMKQLNRFYENIKLRQQELKVNFREYLAIIYPNYEITKSNLNGAFKNVYSKESLGFLKEFPHPELVVKKTVQEIEETIIKYLGKIHSKFSLSIASRLLDYCKDLVSGCSFDQPLVDNMQFYISQIELYENTLNVTLDKLITLAENTSLYHLLLTIPCVKENLASRFVAEIGDINRFNSYKAIISFVGNDPKIYQSGDDLGLHKKITKKGNKHLRTIFYLIAQQMTKAKNIESSIKDFYKKKTQQGLPKLAALIACSNKLIRIIYYMNKTGCAFL

SEQ ID NO: 173828 - protein, 339 aa, unidentified
MPRTSVVGLDTAKNVFQLHGADREGRLTFKRRLRRGQLTDFFANLPSCVIGLEATQGAHHWARVLETFGHTVRLIAPQFVKPYLQSQKNDANDAAAICEAVSRPQMRFVPKKTVEQQDLQALHRIRSRLIGSRTQIGNQIRGLLAEYGIVLPQHLIQVRRALPQLIEEKETRLSDFAKRLFSNLYEELQALDQRILAMEAEINQAFQQNTLCQRIAEVEGIGPVTATAVVAAISNGNTFHNGRQFAAWLGLVPRQNSSGDKQRLSGITKRGDCYLRTLLVHGSRSVVFRASKKDDARSKWITEKQKKLGTAKACVAVANKNARIIWALLAHDEPYRRAA

SEQ ID NO: 173829 - protein, 465 aa, unidentified
MAKHIKKNNKKPATNFKLSPLNSCVAGIDIGSASVFVCAGSLDGSQEVREYLTFTEDLKQMAKWLKECGIKSVAMESTGVYWIPVYDILAQEDFDVVLVNAYYLKTVPGKKTDVNDCQWIQQLHAYGLLHGSFRPDNNGVELRGYVRQRSRLVELASQQVLLMHKGLTQMNLQLNHVISDITGVTGMNIIRSIVQGERDPKILAGYRNPRCKKSKEEIAKALTGNYREEHLLAIKQALESYDLLHRQVNECEDAIEKILERWVKEKTLLDNPTEENNSETNLKAALKTAYNKSPYGFEAEQSLKRILGVDLLCVPGFDVNGIMKIIGEIGTDMTKWPTVKHFTSWLGLCPGNKVSGGKVLSSRTKPSANRAAAALRLAAFTLYRSKSALGAYYRKMRARLGAPKAITATAHKLARILYNMIKDKKSFVEIGQEAYEQAHKEKQIAALKKKAKEFGFTLAEAQLAS

SEQ ID NO: 173830 - protein, 398 aa, unidentified
MTATHKPDCTFASASAPVLYMALELSSGTWKLAFTVGLGQKPRLKTVTARSTVGLVCEIKAAKKRFGRSEDAPVLSCYEAGRDGFWLHRFLLAHGVQNQVVDSASIEVNRRQRRAKSDGLDAVKLVEMLIRLHNGERKVWKLVRVPAVAEEDQRQLHRELIELKAERTAVSNSIKGLLATLGLVVIVDETLPKQLEHLRQWDNAKLPPSLHQRLLREFTRWQLINGQIDDLERERTAKIRDDKTPQIEKVRRLMNLKGVGLNGAWLLVYEFFGWRQFKNRRELGSLAGLTPTPYDSGESRREQGISKAGNRRVRWMMMELAWGWLRYQPASELSQWYQRRFAQGNTRLRKVGIVALARKLLVALWKYVEGGEEPPGAVLVGWENKRGYKGVKARQKAS

SEQ ID NO: 173831 - protein, 370 aa, unidentified
MIVIGADTHKSTHTAGAVDARTAELRGDSTVPARQAGHEELLHWARALDSERVWAIEDCRHVSGALERFLLASGERVVRVAPKHMAGARRSVRERGKSDAIDALAIARAALREGVETLPTAWLDPEAMEIKLLSDHRDQLIGERTRTQNRLRWHLHALWPCLEIPSGGLDRLKWLDRIARRLARAEPSARVRVCREQVRRLRELARRDRELERELRALVGAKNPRLLELGGCGTLTAAKLIAETAGAERFASDAKFARLAGVAPIPASSGGSDRHRLDRGGNRQLNCALHRIAVTQGRDHTPARDYLARKQAEGKSRREALRCLKRQLARTVLRLLRAPSQERESLSLSNEAEKPQTAIVGGDLVAVGLT

SEQ ID NO: 173832 - protein, 403 aa, unidentified
MTIFVGLDWGGSSHAVCVVDAAGKVLDHFVVAHDRDGLADLVARLRRHGPPGETPIAIERPSGLLVDALVDAGFVVTPVHPNVVKACRPRYRAVAAKSDPGDAYILADILRTDGHRLTPLKPQSDAIKALRALVRGRDDLVATRLVLANQLRALLESFWPGAAGLFADIASPIALAFLQRYPTPESASRLGEKRMAAFLAQNQYCGRRSVADVLDRLRAAPATKAAEAEADAKGELVRAIAVTLESLVAQIGKLSSRIEHAVAELPEGKIVMSFPRAGKICAAQITAELGDVRDRFQSQEHLAAEAGVAPVTYQSGKSRAVTWRWACNKRLRAALTCFADNSRHASPWAAKVYHDARKRGCRHPHAVRILARAWLRILWRAWQDRTSYDPNKHPAASLLLTTG

SEQ ID NO: 173833 - protein, 464 aa, unidentified
MTSLFFGIDVSKGYADFCCINQAGSRIGEIAKFDDTSSGHTAVKLIVESLRTKHPDAQMVFGLENSGGLERNWAVFLKDLVTPFDGRVFTLNPLAVKKFLDRDLHRNITDAVSAQGIANYLRQGMRPAEVPFEDSLSGPISLYRCLRNAISRCAQMKNELQSLLPRVQPELVQFCRHGLPAWILEILHGWPTASKLSKAKMAQLVKVSHVTEKRAEKLILAAQESVASLGDSSTEITVSLLAKEILHSQEIISTMKKHVIESLANDEGIKIIQSIPGIGAWGATCLRLEIGSIERFPSPEALVAFAGLDPRIKQSGDSTKHIGISRRGRRQIRAILYPLILSAVRCNPAVKEFYARLRGKGKKHLVSATACMRKMLHIIYGCWISGKVFDPSHEKNRQAQEPKPTVIPSQNEESQTKEKIYILHIDAPVSRREASKRRKAATMPQTGISRRERGLGAASKNNAT

SEQ ID NO: 173834 - protein, 339 aa, unidentified
MKQVSTIGLDLAKKVFQVHGVDEQGEVLIRRALRRDRVVAFFAKLPACLIGMEACATAHHWARELRQLGHTVKLIPPAYAKAYVRRNKNDPADAAAICEAVSRPSMRFVPVKTEQQQAAAGIHKVREMLLKQRTMLMNHLRGMMAEFGIVVGEGPQHIPALLGVLADPQDERIPALLRDGLRLVADSLRGLEARLAVIDKQIVALGRDNATYRCLITAPGYGPILSSAMAAIVVDPTVFRSGRDFAASLGLVPRQDGTGGKVKLGPISKRGNGYLRRLLVNGATSVLGSKRAKHDPWLAKLLATKPRKLAAVALANKMARVGWALMVRQESFRSMPAAA

SEQ ID NO: 173835 - protein, 427 aa, unidentified
MKQEAPEQQEFGAYIGLDWADRTHVISLRGTDSGKVEHYQLVHKPEALAEWVSDLQRRFPGQRVAVALEQARGAVVHALMGYDFLVLYPVNPKTLAKYREAFSPSGAKDDPTDADLLLELVTLHRDKLRAWLPDDELTRTITLLVEYRRQLVATQTSLSNRLTSLLKLYYPQALAWAGELTTVQACDFLQRWPTLAQVQQAPPAKLRQFYLAHGCRKADVIEQRLQEIKLAQPLTRDGAVISASVVMVQATTTQLRPLMEAIARMEKQIAELFRQHADHELFSSFPGAGPVLAPRLLAALGADRGRFAAATEVQQLSGIAPVMERSGKTCWVHRRWACPKFVRQSFHEFAGQSIRWSTWARAFYDQQRQRGNGHHAAVRSLAYRWIRIIYRCWQMRVPYCEQTYCRALQRRQSPLARVLAAPMQNAS

SEQ ID NO: 173836 - protein, 369 aa, unidentified
MRIIGCDLHARQQAVAMLDTTTGEVVSMTLKHEGNNVREFYSSLPRPVRVGIEATGSMQWFVNLMEELGVECLVGHPGQIRAAEPRKQKHDRRDADLILKLLAENRFPAIWLPSKELQDLRALLRHRHQWVRMRTRIQNALQSIALANGLRRGTALWSHDGQNMIASLPLAPHTAYRRNELQAMYAKFETEIEKLNQRVEEQACGRPRARLLMTHPGVGPVTALATEVFLGDPARFADSKALASYVGMIPREYSSGGRQRLGGLSKQGNPLLRFLWGEAGAHAVRRDPELQRFYRRKLVQKGFGKASVAVARKLGIRLWIIASRCQVHPSRRAQTSPATCRQPSLCLQSESSCSSLGTVSHFIFGALIS

SEQ ID NO: 173837 - protein, 349 aa, unidentified
MSHKSAPPTVSTIGIDLGKNSFHLVGLDQRGAIVWQLKCSRAQLERRLANIPCCLIGMEACCGAHYIARQLAALGHDVRLLPAQYVKPFLKGHKNDYRDAEAIAEAVQRPTMHFVAIKTPEQMDLLALHRVRSRLVSQRTGAINQIRGFLMERGIIVRQGVVPLRRTLPDILSSNTGALSPRMVNLISELVQDWRRLDERIAAVSAEIESLAEQDEACQRVMTVPGVGPIISSAVVAAIGNGAGFTQGRDFGAWLGLVPKQESTGDRTILGKISKRGNKYLRTLFVQAAHVVLARRPSAAMRGLWPWIEQASRRLHRNMLAIALANKLARIAWAVLARGRAYQPSIVAI

SEQ ID NO: 173838 - protein, 395 aa, unidentified
MKKPSYSCGIDISKDSFAVAVKNGTFIIKDKSFTMNRQGFDDFDRLIKDFKGNSLIGMESTGIYHNNLFAFLNDRGYNSVTVNPYMVHQFFKFTSNKPTKTDQKDAKTICEFVELKKDELTQAKQHEKDERDQLKYLVREKEEITYRIAQTKTEIKRILTLIFPEIEKEVGLFSQGLRTLLLEFSSAYIIRNLSKKDFIRKAARLTSRTQGRGITLTPLKIYELAVSSIAERQYPFYEEMLKMKIKRLESLLEEKEYITKLIDNEADKSFSKEIEILTSIPGVGRESAIYLMAELIDIKRFAEWKKLVGFCGLDPVIKQSGKFKAQCKISKRGNTHARRIIWIMGGCVKRSCPYFRDYYLKKRAEGKSYKEGVVATSTKLLRVIHALLSKERRFQ

SEQ ID NO: 173839 - protein, 373 aa, unidentified
MPRYSTAFGMDVHLRSTTVCALDAETGEAVTRRFRGNPWGEVAEWMSGFPGPSLAAYESGYLGFAPQRELSGLGVDCVVAAVSKVPRSAADLSSKNDRNDAARMAKAILSHDISPVWVPSPEIEGLRDLAGAHDAATARLAAAKQRLLAFLARRGYAYGGTTPAGNPRKYWTYGFLRWLDKVRPADDGGIRALAALRNEVEAADETREAVLAEYRAAVAAGPLSAEVEALQSIKGCGFALAAAFAAEVGDFSRFRSGRQVTAYFGLAPKQRSSADSVRLGGISGAGNALVRKLAVEGSWCYAQAGHQPKLMPKGSGVPLEIRMHGRKGSERLLRRREEMLERGMPQAKANAATAAELVRWLWALGAMCREAGE

SEQ ID NO: 173840 - protein, 394 aa, unidentified
MTLYVGIDVAKRFHVAALVGEDGEVLHTLRFDNDAAGYARLRQIMSQYSVSETLVAMESTGHYGHALRDWLLSQDFAVHIFNPLKSNRFRDFYIQWHKNDERDAVALAHMLRLGERQLYYPLPASLRGLKQMVRHRALLVQARARAKNQLRAILDEVFPEYQQVPLFTDLFGTTSLALLSRYPTPTHLAALSEAELADFLSQRSRGRVGMDRACLILETAHHSVGSPAAGEAYAPILPLFIAAYLALAAQIDHFTAQVEAHLAQEDQTLTTIPGMGPVLAATILAEIGDVHRFPSADHLVSFCGLALSESQSGQSRQRRFLSRRGSARLRSAFYQAALLAIKYDRYLGAYYRRRVRQGLTKKRALLSVARKLVRISYALLKSGQPYQPQVVGGK

SEQ ID NO: 173841 - protein, 415 aa, unidentified
MRRLAAKQASVKRGTIIFGVDLAKRDNYVHIMNTEAIALGHMRFTHDAVGYQRLREQIATLQKDYDAPEVIVAMEPTGYYWKLVAADLEQHTKRYVLVNPYTVKKHREGDQIDRSKTDPRDAFFIGELVRTGKFTETQLLHGRYAQLRELCVLDSQLLRNQQQVRNYINNLVGQLFPELDQVFADFTGVTARALLRNHAVPAQLTQLSWETLVAQVRADSTGQRLMLKKLRQAQTLAPTSVGLRDTARVQQMALRTHIEQWELQHAQRQQAGSEINTLFQTLAEAPYMLSVPRLGVLSAAHILAEIGDPRRYQNSGQLIKLAGTQPAPNTSGQRTRSRTPMSHQGRPGLRTTLYYAVLRLIQACPQFQAVYQRLQERPTDRLLPMEALGAMMNKLLRILWTLIRYQKMYDPAQIS

SEQ ID NO: 173842 - protein, 366 aa, unidentified
MKKISTVRVNGNMIFKGHKLTIGVDLGDRWSCYCVLDEAGEILLEQKVATTPEAMKQIFEKIPRGLIAMETGTHSPWVSRLLKELGHAVLVAHAQKVQLITKSNRKDDRHDARTLARLARIDPQLLGPVRHRSAKAQIHLTVIRARAELVSARTGLANAARGLAKSYGERLRKCGTQQVSRELAAELSVELREVLEPLLKEIESLNERIKEYDVRMEQIARESYPQVELLKQVKGVGTQIALTYVLTLEDPQRFPKSREVGCFLGLRPGRRDSGESHPQMHISKEGDPYLRTMLVQGAHYILGPFGEDSDLRRWGLKLAARGGKSAKKRAVVAVARKLAVLLHRLWVSGEVYEPLRNSQKAMRAAA

SEQ ID NO: 173843 - protein, 407 aa, unidentified
MNTGFAVVIGLDVGKTAHHACALDPEGNKLFDKPLPQDETKLRELFTQLQNHGEVLLVVDQPNTIGALPIAVARDTGCTVAYLPGLAMRKAADLYPGRSKTDARDAFIIADTARTMPHTLRQVDRDSEVLSALKVLAGFDEDLAHETTRALNRIRSLLTQIHPALERVFAGGKLSTGLVLDLLEKFGGPTGLRSAGRGKVLRFARAHSRRDPETLVEQIFTALSEQTVIVPATAAVELVIPRVAGQVKELKEQRATVAHEVEGMLEDFPLASVLMSMPGIGIKTAAQILLAIGDGSAFESASHLAAYAGIAPVTRRSGTSIRGEFPARSGNKRLKNALFYSAWVASNHDPISKAYYDRKRAEGKRHNAAVICLARRRCNVIYAMLRDGTYYQPPTTAPTPEPTALAA

SEQ ID NO: 173844 - protein, 320 aa, unidentified
MAHYIGFDIGKLTIHYAYYKNGELVQGELKNQLDKIEAFIAQLPSDSHGVMEATGLYHFPLAYALQAQGFILTVVNPAASKGYSQSLLSISKTDASDAVMLQRLGEERQLKGMMLPDKDWQTHRHRLLNLQHLQNDIQKLKNRISELSFHPQPDDLSVMMIEDQLELLQRQQKQLEEKVTQELPQNYQKQLVYGVSVKGIGKKTATFLLLFTQGLKDFSSPKALAKFIGIAPNIYQSGRYQKRGRICKKGHPQLRSLLYNCAKSAKRYNSACKALYEKLRAKGKPHKIAMVAIMHKLVRQFFAVIKNETLYQDDYQLNKG

SEQ ID NO: 173845 - protein, 359 aa, unidentified
MDTTVAHTHPFVIGVDTHARTHTYTVLTAAGQHLGTETFPNTAAGRSRAINWAGRRSGGVTDALWVIEGAGSYGAQLAHNVADTGYRVVEAARMGRTGRRGIGKPDPLDARRIAAAVLSLPVNQLRTPRQDEGVRAAAQILLTARDGLAAERTRAVNALTALLRIIDLGIDARRPLGARKIAEVARWRTREEALAATTARTEAIRLAKRILELDTELDQNMTRISDLVAASPAAELLEKTGIGPVTSARTLVAWSHPGRVKSEAAFAAIAGVNPIPASSGNTTRHRLNRGGDRQLNRALNIIAMVRMVHDPGTHDYVERRRAEGKTDREIRRILKRYLARSIYRHLNTASATKLGVDEI

SEQ ID NO: 173846 - protein, 370 aa, unidentified
MNDIIFVGLDVHKATVAVAVAEGVRGGEVVQLGTIPNRPEHIAKLAMKLGKSGRRVSFCYEAGPCGYGLYRQLTCLGHDCTVAAPSLIPMKAGDRVKTDRRDALMLAKLHRAGELTAVWVPDSAHEAMRDLIRSRATAVRVLAKARQHLQGFLLRHGRVYAGKKGWTQAYRRWLTTVRFDHSAQQVVLQDYIHAVTDAEARVGRLIQQIEDLAPEWSMAPVVEALQAMRGVAFIVAVTVVAEIGDFSRFDNPRKLMAYLGLTPSEHSSGNTVRRGGITKAGNALARRALIEGAWTYRMQARVSRKLHDRIENLPQVIRDIAWKAQVRLCARYRRLAAAGKAKVVVTTAIAREMVGFLWAIARQVQVNLAA

SEQ ID NO: 173847 - protein, 391 aa, unidentified
MSMYFVGIDISKYKHDCCIISAADQKVVSKFTFKNDKAGFEELLTVLNSLSNTEDIKIGFESTAHYALNLELFLENAHHSFMEVNPVLIKEYKKSTTLRRTKTDSVDCESIAHWLMTVEYKPHSKGFYHSYSLKSLTRLRDRLIRQRSFYLVKITNVLDHTFPEFKPFFNERLSKTALYLLENYGSAAKMARMTSASYDKLRCISRGKFSIQQFLRLKELAANTVGVNNSIFDIELNSLLTLYKSLVKEIDTLESEIHKLIEEVHPHYLTIPGIGPISAAVIYAEYGDISNFSNPGQMLAFAGIEPGINDSGTESHGGRMVKHGSSQLRYVLLNACLPLIRFDLTFATYYAKKRAEGKKHRVAITHVAKKLIRVIYALERQDIDFNTQKLR

SEQ ID NO: 173848 - protein, 335 aa, unidentified
MRYVGLDVHYRSSTFCVLEENGKELQCETVRGHWAKLLERLGTVTGPWTICFEATCGYGYLYRELSRLAQRVVVAHPGQLRLIFRAKRKNDRIDARKLAKLLYLDEVPTAYGPNEEVQSWRELIEHRRHMMDRQTIGKNAIRSLLRSHGMIAPKGLWTKKGLASLRQEEMPTSAARLKRDLLLDELSDAQRRVRTVTQVLDESGGRHPGVLLLRTIPGVGIRTAETVAAYMDKAERFTRSKQVGAYFGFVPCQDASAGVNRLGHITRQGPATARQYLVEAAWQGVYRSPTIRAYFERVQHGRPERRKIALVATAHYLLRCMHAMLVHHQPWHEAP

SEQ ID NO: 173849 - protein, 392 aa, unidentified
MLPSIHHASIEQTATVRPDLTLYASLELSRATWLVTCLLPERDRMSKYSTPGGDGGALLGLLARMRRRVRQLTGRPVRIVVIQEAGLDGFWVHRLLEANGIESHVVDPASIAVPRRRRRAKTDAIDGETLLRTLLAWTRGEPRVCAMVVPPTPEEEDRRRVCRECAILLQERIRHTNRIKGLLAGQGITDFNPLHRDRRQLLDAARRGDGRPLLHQLKAEILREIELIELLLRQITDVEAARKVLAGPKAAKAPSPVVLLEQLKGIGPEIASVLYLEGLFRSFGNRRQLAAYAGLAPTPWRSGTVDQEQGISKAGNPRLRSTIIELAWLWQRHQPASTLSRWFHARVGNERGRIRRISIVALARKLLIAVWRYVTQGEVPEGAVLKARIMRA

SEQ ID NO: 173850 - protein, 387 aa, unidentified
MPASGPRPGQVAVQISLAAIFVSLELSRSTWLITSLVPGGGDKMSKHSVRSGDIAGLLDHFTKLREKAHARAGASFPIIAIQEAGLDGFWVHRVLERAGIESHVVDAASILTSRRRRRAKTDRIDGEALLRTLLAYKRGEPRVCTVVRAPSPEEEDRRRLCRERKTLVAERVAHVNRIKGVLFAQGISGYEPLRNDRRSRLEALRTGDGRPLPPYLKAQIGRELDRLELLLEQLKAVEAERNAMLEPANDAAPVAVKALAGLRGIGPEFTAMLWSECLFRSFGNRRQVAAYAGLAPTPWQSGSVQHEQGVSKSGNPRLRSTMVQLAWLWLRHQPTSGLSLWFRERVKRDSGRSKKTTIVALARKLLVALWKFSSSGVVIEGAMMKTA

SEQ ID NO: 173851 - protein, 369 aa, unidentified
MHRKQITFDYIEMDTGEVHRGKIRPANRESLREWLAEFTEHFPGKQAAIAVEATTGWRYVVEELERAGVEPHLAEPAQTKALQGPKKRAKTDRLDAGHLRDLMVIERLPESWIPPEHIQEIRTLMRLRHSLIEERTTHKQRIHSQLFHNGYPQQKNLDSIEGRAQLEDMELPGAARQVVDFSLAMIDHINEELEPVEAQLRAYARSQAGCKALMEHYYGVGELTSVALLSELGDTRRFSNSKKAVRFAGMDITVHSSDDKRAAGKLSRQGPPTLRWAAFEVAKRAWRKGSPDHDYYVHNKERIGANRAALAIARKLIRRAHHTIGELGEEAMSEPVAASEAIAEMDRDSQEEGHREGSCAQRNPTEAMS

SEQ ID NO: 173852 - protein, 459 aa, unidentified
MGMTLGIDLACRAAHVASLAGPDGALVWRGRSFFTRPADLEKLWRDVDCVPAELTVVMEPTRNAWIPVAAWFRRRGAKVVLVPTTQSADLRAYYSKHTKNDRLDSAILARLPLLHPEGLREHVGDGPADPLRRVVKQRSSIAKRRSAIFHRLDAQLELLGPAWYDALGTDYGKATLQFLAHYADPATVIRLGQARLARFLQRYSHGHWREGKAAELIAAAKESLQLWDTDGMDFAELAADIAVEAEQAMMLTAQLADLDERIANLYAEADPAGIIRSAPGVGPVIAGIIAGRLGDPHRFTSLAAVRSYSGLVPKINQSGKAEHVGGLTKAGDPLLREAMWMAAEQARKLDPQLAAKYKRLMDSERHHGTAVCHIATTLLTRIATSWRNNEPYQIRDLDGTPLTQDEGKRIVQEQYQVKKNPKKQYKRATNHKAGREPQESPSAPTSRPVTTKPTSPRAA

SEQ ID NO: 173853 - protein, 347 aa, unidentified
MHYVGMDCHITTLDFAVVDDAGRLVKSCKVDTSAKNFMEFVKNVAPPRIVYMEESVLAAWALEICNRFGEKLIITDPKQNHWIGSSTQKDDPLDALKLAQLGRGGFIKEIYHPVGERRRFRELMDSYHDTVKSTTRIKNKIKSKFRQNGIQCTGMTVYSETYREEWRQKLPQDQTLLLIVEGLWNQLKESEQTEKNLLKAARNFAKHYPEIKLFEDIPGIGFISAATISAILETPHRFANKRKVWMYAGLGITIRSSGGKTYSEKLSKDYNRLLKYTLKQVAETAVQAKDNPFRQKYLAMTTLRGIAPHRAKLTISRDLLATMWAMWKNGEKYNPEIRRSPGYKQVS

SEQ ID NO: 173854 - protein, 452 aa, unidentified
MTKKSKKAIKIRYHEGLPQIRSNAGGIDVGASEVWVDVGSKDAEPVRAFETFTGELNRMGDWLKSCGIETVAMESTGVYWIAVCQILESKGIEVYLVNARHAKNVSGRKSDMIDCQWLRILHSYGLLSASFRPANDIGVLRTYMRHRQMLIEYAAAHVQHMQKALTQMNLQLQHVISDITGLTGMKIIRAIVAGERDRKRLAAMRDVRTKANEETIAKALEGDYRAEHLFALKQSLELFDSYQKQIQACHDEIENHLKSLESKADPAELKPARREKKKRRNQPEFPIREQAFRISGVDLTQIDGIHESAALALIAEFGVDMSPWKTEKHFASWLTLCPNNKISGGKVLRRATRKSANRARDIFRLCAQSLLGSRSALGAFCRRMCGRLGTPKGIVAAAHKLAVLVYRMLKFGHQYTDIGQERYEEKYKERALKQLARKAHDFGFQLVPSLQN

SEQ ID NO: 173855 - protein, 417 aa, unidentified
MTSVGRSIGLDVHRDFCEVAIAQDGEVRSSGRVDTTPEQLELFGASLHPRDRVALEVSGGAWEVARILERHVARVVVVSPSDTGIRQARAKTDRLDARTLARLLAAGELDAVWSPDERCRVMRRRLSRREQLVRARSRSKNEIHAALVRRLVGRPSVSDLFGVKGRQWLAELDLPLEESETIEACMRHIEFLDSEIATVERQIASEALASAEIRRLMTVPGVNVICAASFMAAVGEIRRFQNPRALTGYLGLDPRVYQSGSAPAQGGRISKQGSASTRWALVEAAWSVVRQPGPLHAFYQRVRARRGHGIAVVAAARKLACLFWFLLTRGEDYAHQQPSLTAKKLRLLEIRAGARTLKGTPTGTWATRQAMREGERKLAEQAEASYKQMVRDWQAAAPRKLGASVTPGRASQEPSRG

SEQ ID NO: 173856 - protein, 378 aa, unidentified
MRPMTTRESASSVSTPLYLSFELGERDWKLAFSIGLGQRPRHRTMRASRLPVLDDEIARARQRFGLAADCPVRSCYEAGRDGFWLHRALLARGIDNVVVDASSIEVNRRARRAKSDRLDAEKLNEMLLRHHAGGRRVWHVVRVPSEADEDRRHLERERQTLIQDRTRLRNRIQGLLATHGVTLRLAGGGAAALGTARRWDGTPLPTGLVARLRREWARLEAVGAAVAALEAERTTAMTRPNATAQCSRRLARLRAIGPTFAWTLASEVFGWRAFRNRREVGGLLGLTPTPSQSGAERRELGIAKSGDPHLRALAVELAWLWLRYQPRSALSRWYQARYARGGPRLRRIGIVALARKLVIALWRYVAFDQLPEGAVLKA

SEQ ID NO: 173857 - protein, 312 aa, unidentified
MTDITIGIDISKALLDVATYPDGEITQFTNNAKGYNSLRTWLANYSVANIIFESTGPYHRGLEYFLGQHAMPFSLINPRHAKCFGQATGKRAKTDRADALMLAKFGKLMEPEQTAIKSQALEELAELMAARRALMKDRTAAKNRQHNLYSALLKRQIKQRLKQIERQITAIDVRSQDLIKQDNTLTKRHAILTSIPGLGSLTATIMLCAMPELGSMNKRQTAALAGLAPITRQSGTWKGKSFIRGGRAHLRQALYMPALVAIRFNDELAAKYKTMIDAGKPAKVAIVAVMRKLIITANALLRDERKWQNNTA

SEQ ID NO: 173858 - protein, 323 aa, unidentified
MQGKIMSEQSAAQPVYVGVDVCKDRLDIFVHPTGQRLGVANDRDGLKRLKRTLAGLDAALVVMEATAKYHRLAQRTLAQAGLLVAVVNPLRARLFAEAAGALAKTDRVDARMLAIMAAALDPQARPPAPVAMEALQELVRARSAATRDLTGLKNRRAATQTPFVKTELGRQIGNLERSIGRLSAEIERRIADDPVLDRRRQILMSIPGVGPAVAAVLLTDCAELGELSPKAAGLLAGLAPIACDTGQTSGQRHIRGGRRTVRNALYMAALSAARANPQLKTFHQRLRDHGKKPKVALTAVMRKLIILANTLIKEDRQWLPSKP

SEQ ID NO: 173859 - protein, 349 aa, unidentified
MVIIGVDSHKRTHTVVAVDETGRKLGEKTAPATPDGHLELRAWAGRSPDRTWALEDCRHLSRRLERDLLRAGERVLRVPPRLMAGARRAGREPGKSDPIDALEVARAALREPDLPVAVLEGPERDLRLLVDHRDDLVAERTRDMARLRWHLHELDPGNEPSPRSLDRAKVLAALEARLATFEGTVARLARALVTRIRALTAEINALEREITGLVAALAPSLLALRGCGALSAAKLVGEAGGIARFRSRAAFARHNGSAPVPVWSGNDVRHRLSRGGNRQLNAALHRIAITQVRIGAEGRRYYDQRIAAGDTTTEAYRALRRRLSDEVYRRMRDDDGLLATTRAPLAAAA

SEQ ID NO: 173860 - protein, 395 aa, unidentified
MEESTTFVAMDVHKKQHTVAMLLPRAETPEQWKVANTAAHLRKMVRRIRRKAPGPVVICYEAGVCGFALQRQIEAEGVTCMVIAPSLVPVTPGQRIKTDRRDARKLVGYLRAGMLTEVHPPDEEAESARDLVRNCEAAQADLVRSRHRLLKFLLRRAMHYRDGYHWTEKHFRWLGGLRFARARDSVIFNGYLAEVLHRKDQVAELTRAIAAMATEAPYAEPVGWLRCFRGIDVLTAMTIVTELYSIGRFRSPRQLMSYLGLVPSEASSGETEHKGGITKTGNRRVRRVLIQAAWNQRNRLGLSAALKKRRVGQPAWAIQLADHAMRRLHQRYWYLVNRGKLTTVAATAVARELVGFIWAALYLQDQAPLHFRQRQTRKKSKPAKRQTAAEFLAMA

SEQ ID NO: 173861 - protein, 356 aa, unidentified
MKRNHFIGIDVHSQFCEVAVMTPAGQVVQRERCATTIPALSELLDKAPRPCSVVLEEGPMAGWLWRNLHDKVNPLVVAEPRRNRLIVQDGDKDDDIDAEKLALLHRGGFIKPVHQSGSLEQAVFKQLVALYHYRVRQRVREAHRITHLFRQHGIVIRERAYADRADRPALVQRLPAEGLLPELVRSMWTSYDALVQQEDQWRKRLLRAAKQVEVVCRFQDLPGAGWVRAATLYAYLDTPWRFRSKAALWKYLGIGLERKHSGKGKEYLGVPKQAHRLLKCTILGAARSAATARDNPFADMYRRWVEEEGLSPARARRNVARRLAATAWGMWKNGNAYHPEWVGVAGTAQAAAQESR

SEQ ID NO: 173862 - protein, 345 aa, unidentified
MSEFYEGRQFVGMDLHRRRSVLVRMSETGEHLETVRILNDRDVLADVMSRAGESPEVVLEATYGWYWAADALAELGATVHLAHPLGVKAFSYRRVKNDQRDAADLADLLRMGRLPHAWIAPPETRELRELVRHRAKLVAMRSQCKAHVHAILAKGGIWVPMSDLFGVEGNLLLDNVTMPAPYKARIASLRRFIEAFDAEIDLFTGLAQRRLTHHAGYTAIQQIPGIGAVLAAVFVAEIGDVHRFPGPAQLTCWAGLTPSHHESDTTVRRGRITKQGSCLVRWAAIESVKSLPDTSHIGAIRDQVAHRRGNRNIGAVAAARRQLELVFYGLRDHHIRALHHPPRAA

SEQ ID NO: 173863 - protein, 429 aa, unidentified
MSYRMAGIDVHKRMLAVVVSDVEVDSEFHFERRKFSSSPEQLRSLAAWLLEQEAEEVVMESTAQYWKPVWEALERYWKPICEKREGARRKSGTLHLAQALSNRGRRGRKRDFPDAERLVKRLVAQELTLSFVPDAEQRLWRTVMRKKYQLRCDRIRLQNQLESLLEEAHIKLSSLVSDLLGLSAQRMLKAMAQGETNSAALAALADKHLRATPEQLCDALGACTELNAVYRRLLGMALQELQLIDEQIGRLDQEMASLLSAHQDAVQRLAEVPGLGVDSAQQIIAEVGPTAATFPSEKCLSSWVGACPGDDETAGVNYSHRSPKGNRQMRRILNQAANAAARTKGSIFEIVYRRSVPRLGHNQAIGAIAHRQCRLIWLILHQGVRYEERGPAVTKRSKQLRTWRMIRQLRSLGYRIEPAIPLPSQAHAQ

SEQ ID NO: 173864 - protein, 337 aa, unidentified
MARPDGQLVREQRLPHERGALQQFLARCEPGSPVAVETIGNWYWIVDEIEAAGCVPKLVHARKAKLMMGEINKTDKLDVRGLNQLQRNGTLPTVWIPPGELRDQRDLPRTRMVLVRQRTQLKNRIHATLAKYALHNLDVSDLFGVRGRALLRQRLDLLPPYTAYATQQLLEQVENLDRQVRGFEHQMQTVFKPTPTIQLLLTLPGIGLLLAVVIALEVGSIARFATAEKLAAYAGTTPRVHASGGKTRFGPSRPDVNRYLKWAFVEAANAICLNRGRAPRRHVSRLYERVARRKGHQKAIGAVARHLAEATYWILTKQETYREPKAAAVSSTGDKRG

SEQ ID NO: 173865 - protein, 360 aa, unidentified
MQQFVGIDWATRRARWCAVTRAGALIDEGWAPADEDGLASMVVRLGPDAVACLEMMSGAAWVRDRLQAGGWTVQVADARKAKAVGSLAAKTDKLDARVLAELARRDLVPQVHVPTFADRELKERLGRRMHMVRLRTAAMNRAHGVLSQFGVTLAFKRLRGPDREELLIARGIPEVWRRSITEAVAVVAMLDQRLIPLEQELRPLARADPRVRLLITIPGVGDLLGLTIASEIGDISRFPSARKLIGYSGLTPRVYQSGQKARTGKLSKSGSTMLRWAAIEAAQQAWRPNNPWNQLYLDVKQRCGGKGNPAKAAVARKVLIATWHVLALQQPFNPSRPRGASAPVPASSSCVLADSRPTRN

SEQ ID NO: 173866 - protein, 330 aa, unidentified
MEYFAGLDVSLETVNVCIVNAAGDILLEKKIAAEPAAIVHLLKGFGSPFKRIGLEAGPTSSWLYGELRAAGYGAICLECRHVKAGLSAMRNKTDRNDARGIAQLVRLGWFRQVHVKSEEAQRTRMLLVNRQQLLTKALDIENSVRGSLKVFGLRVGVVARRGFKARVLELVADDPILLAVTEPMLRVRQALLEEFERLDRLCQQLARRDPVCRRLMTVPGVGVVVALTYRTGVDAPERFSKSRDVGAHFGLTPKRYSSGQTDYDGRISRCGDEMVRTALYQAANVLLHHGRWSSLRSWAMRIAKRGSVKGAKVALARRLAMVMHRMWCRV

SEQ ID NO: 173867 - protein, 411 aa, unidentified
MRRVIGMDIHCTFAEVMIWEDGRLRPAGRVDMTRVGLEGFGRSLTREDEVVVEATGNAMAVVRVLTPHVARVIVANPLQVKAIAHARIKTDKIDAGVLASLRAAAFLPEVWLPDAETERMRRLVARRNQVVRHRTRIKNEVHAILHAHLVPPCPHADLFGRLGRLWLDSQSLPDDERAAIARHLRELDRLGEDLGALDTDVARAAIDDPAVKRLLTITGVNLTVATGLVAAIGDVRRFADPQKLVSYVGLNPRVRQSGLGLAQHGRISKHGRAHARAMLVEAAWAAAKAPGPLRPFFLRIRARRGHQVAAVAVARKLAVLCWHLLTKDVDYQWARPALVANKLRAMELQTGVPAKKGNKRGAAYAYNVKELRDREIEIARQAEQAYEQFVNRWKPRGRTGRRTGAANEERR

SEQ ID NO: 173868 - protein, 403 aa, unidentified
MSPEHSIDIFLGLDVGKSEHHACALDRDGNKVFDKPLPQLESELAGVFHQLQKLGTVLVIVDQPNTIGALPIAVARDCSCEVGYLPGLAMRKAADLYPGRAKTDKRDAFIIADTARTMPHTLRAVDRNDEVLSALKMLSGFDDDIARDCTRTVNRLRSILTQIYPSLERVFAGSTLTRTPILELLIHYKGPQGLKRAGYQRVLNWMINHTRKDPTPLVDDIFVALKAQTVTVPGSDAAELVIPQLAANIKALKEQRNTIAEQVEEMLADFPLCEVLMSMPGVGIKTAAQILLAIGDGSDFDSAGHLAAYAGIAPVTRRSGSSIRGEFPARSGNKRLKNALFYSAFAVIRSHEPSRRYYERKRAEGKRHNAAVICLARRRCNVIYAMLKNKEFFREIPPRPVAA

SEQ ID NO: 173869 - protein, 314 aa, unidentified
MICGVDVSQKSLEARIEQGGPGASFANSREGIFQLAEFCRAHQVHLLAMEASGGYERLAFLLLSGEQIPVTILNPRAVRKFAEAMGYLEKTDALDAGVIAHFARTRKSKPSAPGSADQQHLRALVTRLRQLTDMQTAQRNQQLLVTDATVQQLCQQLLGVVKAQIRSLEKAIAQLIEADPLWRQLSQSFRSIKGVAGRTVSRVMAEMPEIGTLSHKRIAKLAGLAPLACDSGKARGKRAIAGGRRPLRDTLFVVAGVVARFHPDFIAFRQRLTAAGKAKKVVRVALAHKLLTRLNAKAREVRLQFAQTTLAAAC

SEQ ID NO: 173870 - protein, 465 aa, unidentified
MEEGITGANAKGWGALRHGEGRVRGDLQRINPNAAGIDIGSQEHYVAVPEGQEEQCVRRFDCFTSDLHQMARWLERCGIETVAMESTGVYWMPVCEVLQRYGFEVKLVDARRVKNVPGRKTDVLDCQWIQQLHSFGLLSGAFIPDEEIGVLRSYWRQRSELIQSAAKQIHLMQKALDRMNVQLHKVLSDVTGVTGMNIIRAIVGGERDPLVLAQMRHPQVKNSEETIAKALTGEYREEHLFALKQAVDLYDFYQQKIAECDERIEQYMHTFQSKADPNALKSESAKKKSGRKRRKNEPHFDLRSHLIRITGVDLTRIDGIDTMTAQTVVSECGFDMSPFPTEKHFASWLGLCPNNRITGGKVKKTKTNKVSNRVARALCIAAQSLHGSKSALGAFYRRMRQRLGAPKAITAAAHATSIACSSSGRTMSMPVRNTMNNNTELASSRTSKHVLNQWAIHWSLANQGR

SEQ ID NO: 173871 - protein, 412 aa, unidentified
MKDLLEISCGLDVHKEKIVACILTGPLGKPTRSEIREFSTLIPDMIALRHWIVSKNCHPVAMESTGIYWMPIYEILEDAFSGDITLLVVNARHMKNVPGKKTDMRDSEWISTLLRAGLLNGSFIPEKRIREFRDLNRYRKSVIRDITSQKNRIEKFLQSSGFRLSSFISDIFGASGRNIILHLIEHGQIDKTALDSCLKTKTRNRIDEILMSVNGTLSEHQKAFLRILMTHYDSLKKHLAEIETSLEEDMAPFALQIEQLNSIYGISTTASCAIIAEIGIDMKPFKTAEHICSWAGLCPGNNESAGKRKSTSVTKGNPYIKSMLCEIAWVIAGKRNTYLSAWYWRIKQKKGAKKAIVALARKLLVIIYTMLKQGTLFDESCFETRRKHCEQKQLSRYIRELEKHGYHVEAQS

SEQ ID NO: 173872 - protein, 370 aa, unidentified
MDKTTPLYVGLDVHKDSIAVAHAAGGTAEAPTFVGTIGTRQADIDKLIRRLQSKGCRLVFAYEAGPCGYGLHRLLTSRQLECRVVAPSLIPKRPGDKVKTDRRDAVEIARLLRSGDLTAVYVPSVEDEAIRDLCRARDATRLTLKAARQRLKSFLLRLGLHYVGRADWNDAHKRYLAKVVCPTAAQQIVFQEYLHAVDEQVERLGRLEKELLDAASTWRLSPVVESLQALRGVQTIVALTVVAELGDLTRFDNPRQLAAFVGLIPSESSSGDRRRQGGITKTGNSRARRALTEAAWAYRYNAKISPIIQKRLEALATPIRAIGWKAQVRLCKRYRRLRARGKHANVVVTAIARELIAFMWAIAKEVPLNS

SEQ ID NO: 173873 - protein, 347 aa, unidentified
MRFYQRQHQFYCGIDLHARTMCVCVVDQAGKVLVNDDGPCEPERFLRLIEPYRADLVVACECTFHWYWVADLCDQQKIKFVLGHALYMKAIHGGKKKNDQIDAHKIALLLKGGMLPQAYVYPRGMRETRDLLRRRTYLVRRRAELLTHIENTNSQYNLPPFGKKLSYKANRSGVAERFSDECVRQSIAIDLELVEHYDRLITELELYLVRHAKVDDAYRFHLLRSVPGIGKVLALVLLYEMHRVERFESAGEFLSYARLVAGRGSSAGKPKGVMGRKIGNAHLKWAFSEAICFFIRECPEAKRFVARQEKKHGKARARAILAARLGRAVFLMLKRKEPFDVQRFFAS

SEQ ID NO: 173874 - protein, 360 aa, unidentified
MNEITRVGVDLAKRVLQVHAVNAAGVRVTGRALPREKFLAWCAQLPKGCLVAMEASSSAHHWARQLMALGLDARIIAAHLVSPYRLQGKGGKNDANDAAAICEAAGRPQMHFVPVKSVEQQSMLSIHRLREGFKLERVACINRIRGLLAEFGVVLPQKPAVLRQALPDVMEDACNEIGGLARMGLQRALQQWQEVDEHLAWCDARIAEHLKANEQVRQAQQLMGVGPVTASAVVAAVGDFRQFKDGAQFGAWLGLTPRQHSSGGKNCLGKITKRGDMYLRMLLIQGAKSMVLSAHKRDDPISKWAHQLREKSGWQKAVVALANKNARILWAVFVRGRAFDAHHVSVKPGAAMTVPGAAAA

SEQ ID NO: 173875 - protein, 412 aa, unidentified
MKDLLEISCGLDVHKEKIVACILTGPLGKPTRSEIREFSTLIPDMIALRNWIVSKNCHHVAMESTGIYWMPIYEILEDAFYGDITLLVVNARHMKNVPGKKTDMRDSEWISTLLRAGLLNGSFIPEKRIREFRDLNRYRKSVIRDITSQKNRIEKFLQSSGFRLSSFISDIFGASGRNIILHLMEHGQIDKTALDSCLKTKTRNRIDEILMSVNGTLSEHQKAFLRILMTHYDSLKKHLAEIETSLEEDMAPFALQVEQLNSIYGISTTASCAIIAEIGIDMKPFKTAEHICSWAGLCPGNNESAGKRKSTSVTKGNPYIKSMLCEIAWVIAGKRNTYLSAWYWRIKQKKGAKKAIVALARKLLVIIYTMLKQGTLFDESCFETRRKHCEQKQLSRYIRELEKHGYHVEAQS

SEQ ID NO: 173876 - protein, 320 aa, unidentified
MMAQNDLVVAGIDVAKDKVDVCIRSLSLKRTFASTEEGRRELTSWLRRRKVGKAVMEASGGYERDWAKVLRNAEIEVRIVDPKRVRSFAQSAGRLAKNDTIDAEMIAWFAETFDEARGQAYDETREQLHQMVNARQALKGMQAKLESQGEHALPAAVQRMHARILKTITVELVKFEAAIAAMIQATPRFTELAEIIESVPGIGRTTSAALIAAMPELGQANNKIVAALLGVAPYDDDSGRRRGERHIKGGRRRTRNVFYMACLGAATQHNPVLKAFYDRLVAKGKEKKVALIACMRKLISILNIMIERRQKWDASRYALS

SEQ ID NO: 173877 - protein, 369 aa, unidentified
MFIGVDVSKNWLDVAYYDGVDVDWKQGHIRVDNRQSGYDQIGKWLRGLGADRESVLFCMEYTGLYCQDFRVWLEKEGFVYGMVQPRKMHRFEPDLGEGERALDRIKTDEMDSFRIAMYCEKHCRKIRVSPSRLPGEACLRLKRLLAERKQYTRQSTLYKQQLRDISAYDTEESRRRKQAALAMLNGQIRQTDAEMLGVMDGDPALRGSYDLLCSVGGIGHVVAVETIVLTENFTSVTNPRKYACYIGIAPAKKESGVSVRGGEHVSRKGFTQAKADLSMACLTAIQSDANIRAYWQRRKAEGKKGGVVLNAVKFKLVLRMFAVIRRLHELNTFNTNVANSGIRYILSESVVLISLSDPSGYITLNDETE

SEQ ID NO: 173878 - protein, 355 aa, unidentified
MSQNLDVSPAAIGIDIGKNSFHIVGQNQRGAIVLRQKWSRGQVEARLANLPPCRIGMEACVGAHHLSRTLKALGHDARLMPAKYVRPYSKGQKNDYRDAEAIAEAVQRPTMKFVATKTADQLDLQALHRVRERFVGQRTGIVNQIRAFMLERGIAVRQGLRFLRAELPSILATRTDALSPRMLRILEDLSADWRRLDARIEDLSSEIEALARQDKGCERLMTVPGIGPIISSAMVAAIGTGDAFSKGRDFGAWLGLVPKQLSTGDRTILGSISRRGNRYLRTLFVQAAWVVLVKVGPKHWDRYGLKSWIEAAKKRLHHNVLAIALANKLARIAWAVLHKGRAFECVKTNEAYRPA

SEQ ID NO: 173879 - protein, 343 aa, unidentified
MKLTRVGVDLAKQVFQVHGVDRAERPVWCQRLRRSRWIAELERHVEPGCEIGMEACGGAHHWARLLQSKGYVVKLIAPQFVKPYVKSNKNDANDAQAICEAMSRPSMRYVAVKTVEQQDIQAVHRVRAGLIGERTAKANQLRGLVNEYGLVAPREIASLRRAVPAWLEDATNGLSARFRALLAALYRDLQGLDERVHELDREIAALARENEAVRRIEQLRGIGPLIASALVAMVGDGRQFKNGRHLAVALGLTPRHHGSGGKEKLLGISKRGDKYLRTLLIHGARSALRTAPGKTDRLSRWALALAERSHPNVAATALAHKMARVAWAMLRHGTNYEPERMAA

SEQ ID NO: 173880 - protein, 385 aa, unidentified
MGSQTFVPRDYDVFAGLDVDKRSISVTFTDHRGLSRSVRIPYSVEHLLHYVGKHFAGQKVAFAYEAGPTGYGLYDGLVAHGAPCLVASPSMIPKAPGQRVKTNRLDSRGLSETLRGGQLKSIHVPSPPYRELRHLTQLRDTFVSEMVGMKLRIKSLLLLEGIAFPPAPAGSQWSFLVKDQLRTLACSGTVRFQLDQLLESLAFAEQHVRQTTREIRRFCQHDPELSQCIALLRTIPGIGWIVASQLVARIGDWRELQHVRQLAGFLGLVPTEHSTGERTDRGSITHTGDSRLRSKLIQAAWSAIRQDGELREFYRSVCQTHPRPLASRVAIVAVARKLSTRISAVLMHQRPYVVREKVHAAPLTQEETPPQGTTRRQAEPAETHS

SEQ ID NO: 173881 - protein, 428 aa, unidentified
MSENSTTHPEPEFVAFVGIDWADQKHAWCWQRAGATQREHGEVEHTPEMVEAWVSQLAQRFGPGPIAVAVEQVKGALVFMLSKYECIHLFPVPSTMSASLRKSLYPSGCKDDPRDAELLLDLLVQHRKKLRRLTPDNEVTRRIQNLVEERRTLVDEKTTQLNRLTGYLKVYFPQMLGWFEKLDTKLVCDLLERWPSLEELQKVPPAELRKFFRQRRGRHQELTEWRLEVIGQAMSAIRDRAVLEAKRAMVQVSAQLLRTLLEGIANLDSKIEEAASAHPDFFIFESLPGAGSALAPRLLAAFGSQRDRYGSAEEVQKHSGIAPVMEKSGKKKWVHFRWACPKFLRQSFHEWAGHSISQSTWARAYYQQQRGRGKDHHAAVRALAFKWIRILFRCWQDRVAYDENKYLAALARRGSPLSSVLTVTAATL

SEQ ID NO: 173882 - protein, 403 aa, unidentified
MIFAALDWAEQSHCLVILDADGQQLACKKVEHGHNGLGELDLLLHEHAPREEVYIAVELHDGLLIDWLVRQPYRVYGVNPKSAQRARDRFTPAGLKDDARDAWCLAEFLRTSHQHLRPLRPESDQTVALITWVRLREDLVQERTIQLQQLRSHLVMWHPHVLKVMPDLNAKWALALLERYPTADAFAKLTYRKVEQWAKGRNLRMITIDRVGAAVQFPTPTTRPCRNEAHAAEVRHRVQRIRQLNEELAKIDATLEELVDAHPDAVYFQSLPVHGTVTTATILAGFGEDRDRWTGHEEVAARWGVAPVTHQSGKYKGVHRRQACDNTIHQAWLWFAFNTITCEGCWARDYYRGKRKTGADHYTALRCTAQRWVKIAYRMWHDRTLYDEQRHQERRMQRAALRN

SEQ ID NO: 173883 - protein, 316 aa, unidentified
MQANEVFVGVDVAKDTLVICIWGVLQRQLVPNEERAIKEWLKTLSPRAVVGMESTGRYHQELARLAHQAGLRVYVLNAKDVYFYAKALGARGKTDPGDAQVIARYVAEHHRSLHAWAPGTAAQLRVQELLQRRARIAVCRASVRQALTGLDELAPAVLQLEQQFEQLLRRIDREVQALVASESQLSQGSTMLQSICGIGPQSAALLAALLSRIEFANADALVAYSGLDPRPCDSGTKSGRRRLSKRGSPNLRRQLYLAAMAATRSKAMGSIYQAIKAKGFKSTQALVILARKLLRIVWAVWKSGKPFDPTRLQSAA

SEQ ID NO: 173884 - protein, 315 aa, unidentified
MTQTIACFAGIDISKEMLDLAFSNDNGVVHFANTKTGCRKLAALLIERQPQRTVFEATGPYHRELETALAQAGLVYAKANPRKVRRFADVIGVHAKTDSVDARLLARFAAMVEIAPTTQKSALLQTLGELMNARKSLVADRTAIKNRSHVQSAKLLVRQNEARLKLIESQIKAIDQEAMKLVDADAALAARFEILVSIPGISSLTACVMLTEMPELGTLDQRQVASLAGLALHARESGKWKGKRFISGGRANLRQALYMPALVASRFNADLKAKYDALIAARKPPKLALTVIMRKLIILANALIRNARVWNEKSP

SEQ ID NO: 173885 - protein, 343 aa, unidentified
MKVTTIGFDLAKNVFQVHGVDERGHVVVRKQLRRDQVAVFFANLPACLVGMEACGSAHHWARKLQGFGHCVRLISPQFVKPYVKSNKNDVADAEAICEAVARPNMRFVPIKTMEQQAVLSVHRVRQGFVKARTAQANQIRGLLTEFGLVLPQGITNVMRGVPPLIDAATDLPASMRQLIARLLENMKVLDRQVKELEAQIKAWHQGSALSRKLEKIPGIGALAASALVASIADARSFKNGRQVAAWLGLVPKQDSSGGKPKLLGMSKRGDTYLRTLLIHGARSAIVAAQRKGKPNLWLSGLLARRHPNVAAVALANKNARTIWALLAHEREFRPDYVPRLATA

SEQ ID NO: 173886 - protein, 342 aa, unidentified
MSTIQTIGVDLAKNVFSIHGVDAYGKCVLRKTVKRNKLLDTFAKLPPCLIGMEACSGAHHWARELLKLGHNPKIMASKFVIPYRQNEKNDANDAEAICEAVSRPKTRFVSIKSEEQQAVLCLHRIRQGLIKTRTATINQLRGLLSEFGIVMPQGRYSAQNTIGSVLEDAENGLPILARELLQDLSNKIQHLNLEVLHYDRRVSALVREMASAKALMDIPGVGEHSASTIVATVNDAKQFGSSRQFAAWIGLVPRQYSTGGHVHLGRISKRGEKHIRTLLIHGARAVIARCKEKTDRNSIWLNQLVERRGYKRAAVALAAKNARIIWALLTTGKEYKINYVNG

SEQ ID NO: 173887 - protein, 423 aa, unidentified
MPYRIAGIDVHKKRLAIVVADVEVDEEYQFERRWYGSNPEQLQKLAEWLIAQQVEEAVMESTAQYWKPVWSTLERYWKPNCQNREGTGKMSGTLHLAQALSNRGRRGGKKDFRDAERLVKRLISQELVLSFVPDSEQRLWRTLTRTKYQRTRDKVRLQNQLEALLEEAHIKLSSLVSDLLGVSARRMLQALGDGATDPAALAALADQRLRATPEQLRDALGACAGLNPVYRRVVKMALTDLQLIEQQIGQLDQEMASLLHEHQDAVQRLAEVPGLGVDSAQQIIAEVGAKAATFASPKNLVSWVGACPGDEESDQVNRSKRSPKGNRQMRRILNQAANAAVKHKGSIFEIVYRRLVLRLGHNKTIGAIAHRLCQLIWIILHKGARYEERGPAVSEKSKRLRTSRMIRTLRMLGYRVEPALIPA

SEQ ID NO: 173888 - protein, 351 aa, unidentified
MLTVGLDVHQSRSSVCVLDARGNILKQHEVKGDYAALAESLAQLRAARGPFQVCYEASTGYGALHQKLAPLAARVTVAHPGKLRLIFQSSKKHNRADAQKIAVLMHLNQVPAVHVPSQDVRSWRGLIEHRGHLVNRNVAVKNQIRALLRTQGLRGLPGERQWTKAGLAWLEKAPWPTALETLRLTVLLGQLADLGGQIQRVTAALDQRAAAHAGVRLLQTIPGVGPRTAEAFVAYVDDPRRFRAGTIGAYFGLVPREDSTGNHRHLGHITREGPATVRKLLTEACWSGMAHSRRIREVYQRVGQGQKGRRKLAAVATAHWLCRVMLAMLKTGEVFREAPDAPEATASEPTQ

SEQ ID NO: 173889 - protein, 358 aa, unidentified
MNNITRVGVDLAKNVIQVCAVDVAGKVVLNKPLPRDRFLTWCAELPKGCLIAMEACSGSHHWARELNKLGLNAKIIAASHVTPYRMEGKGGKNDANDAAAVCEAASRPNMRFVPVKTSNQQGILCVHRMREGFKEERTGCINRIRGLMAEFGIVVTKSPNKLREKLQDILEDAENGLDWLARLAIQELYTHWCAIDEKIDWCDKRINAHISDDVQAQSAKQLIGVGALTASAAIATVVDFKQFKNGAQFGAWLGLTPKQSSSGGKTKLGRITKRGDTYLRTLLIQGAKAAVMSAHMRHDPISKWLFQLKEKSGWQKAAVAMANKNARILWAVMTKGINFDPAYVSVKPGGSTGAALAV

SEQ ID NO: 173890 - protein, 339 aa, unidentified
MYAATIGLDIAKNVFQVYGANAAGDPLFNRRVSRAAILDFFSKLPPCVVAMESCSTAHYWGRSISALGHQVRLIHPAYVKPFVNRDKTDANDAEAIHEALFRRSMRFVPLKSTSHQASTMLFKTRALLVRQRVRAVNALRAHLAELGIVARPGTSNVSSLISIVRDRQSKSLPPSAITALKIIARQIDTLTKDIESLEKTLKGQAKEDDEMRRLMTIPGVGPMTATAIKAFVPDIGVFKSARHFASWTGLTPKSFSSGESIKIGGITKMGNAYLRSLLVTGAMSVIRNTKTDDNKSWTASLKRRRPFKVAAIALANKNASTIWAILTKGGSYETAPTRA

SEQ ID NO: 173891 - protein, 392 aa, unidentified
MYIIGIDIGKNHHEASIVSPEGKQIGHSLRFATTHKGADSLMSFIFNNIGNSSCIFGMEATGHYWYPIYSFLKARGYTIYVINPIQSDSLRKMYIRQTKNDSIDSFLIAEVIRFGQFGTTSMADENILAMRQLCRYRDSVISSRTEIKLRIGTIMEQIFPEYEKQFSSLWVSTSMGILEKYLTPENIENAPIDELFEIIKDKSHNRLTKAKAISIKEAAADTFGIKIAQDAFSFQLKQLIDRMNFLDKQIEALDCQILEYYEKFDCYLHTIPGIGMIAAATILAEIGDINRFKSSSALVAFAGIDPTVRQSGEFSSTHNHMSKRGSPYLRHAIFLAATTCSFHNSPLNAYYKKKRDQGKHHLTATGAVARKLTTVIYAVLRDSKPYEPKKFC

SEQ ID NO: 173892 - protein, 414 aa, unidentified
MMERVLERCAALDVHKAQVTVWARVPDGRGGREDLRARFSTMAADLLALRDWLGELGVTHVAMESSGVYWKPVYYVLEDEFELLLVNAQHVKNLPGRKTDMKDAEWLCQLLECGLLRASFVPPREFRELRDLTRYRKSLIAERQRQANRLHKVLEDAGVKLSCVATDVLGASGRAMLEALISGTRDPEVLAELARGKLRKKIPQLKQALAGRFSAHHALMVGHILAHLDYLDEAIGQLTGEIEERIAPFVQKAERLDAIPGVGQLTVQAILAELGVDMSRFPTHRHAASWVKICPGNHESAGKRRSGRTGKGNRHLRVALVEAAQGAARTKDTYLRAQYEQIKRRHGHNKAIVAVAHSILIAAYYMLRDDIAYHDLGGDYLARRSDPERMTRRLVAQLERLGHQVTLQTLPQAA

SEQ ID NO: 173893 - protein, 459 aa, unidentified
MSASKTKVNKRSVQSLPILQPKVAGIDLGACEHYVCGPALISGEPNVRVFQSTTPQLIGLIAWLQEQGVKSVAMESTGIYWIPLYELLEASGIEPILVNARELCHVPGRKTDVQDCQWIQLLHSCGLLHGSFRPSEGICRCRALTRQCANLVEERSKTVNWMQKALDQMNVQVHRALTDITGKTGLAIVRGIVEGQRDPKVLACLRDSRCGKNEEEIAEHLTGTWKSEHLFNLKMALKLYDQLQAQITDYEQELHKELLAMTPQERKNKEAPEHPKAAKRKAIRNRGEQEDQKILWQFSGVDLTRIDGISAGVSQVILTEVGFNLSDFSSKKHFVSWLRLCPKMGISGGKALKKKPPRGTGSNRVAGILRMAVVSLSRSHSSLGAEYRRVARRRSGAVAVFALARKLAILIYRTLHYGQDYVDEGEKVYQERFKARRFFSMAKTAKELGYQLVELPANR

SEQ ID NO: 173894 - protein, 354 aa, unidentified
MYYVGLDLHKRYVTACALDSAGQVVMTERRLGTTLEALLGFLRALEGPVTVAVEATLHWAWVHDQLSTVGCTVVVAHPQQVKLICHARCKTDAIDAKKLADLLRSNLLPAIWVPDAQTRARRQLLRGRAFLVRVRTRLKNRIHGYLAEQNERVGVSDLYGHAGRAWLATVALPPVVREQVELLLELIDHLTERLGRLDRRIRHRVALSAEAKRLMTIPGVGTYGALLILAELGAISRFSSAHAVACYAGLVPSTRSSGGKTAHGSVGPAGSHWLKWILIEAVQTLKRQPGPVRDQYERLLRAKGKQKATVAAARKLATYIYWMLYEGWSYDEWLEQHMRTKREGRPVQTLASVA

SEQ ID NO: 173895 - protein, 341 aa, unidentified
MEQYIGLDVSLKDTSISVRQDGKRIWRGKCASDPKLLAEVIRKRAPHPRRIVFETGPLSVWFYHALTAEGLPAICIDARHAKAHLDMAPNKTDANDADGLAHLAEVGFYREVRVKGFDSMLIRTLVAGRRQLLKMQIQMSNQIRGLLKTFGLVVPKGVGGVFDRNVRTLLEDDAALARIILPLLQAWSEMRRQAAELNKQMVGLGRENRHCRLLMSVPGVGIVTATAFTAAVEDPDNFKNSRSVGAWVGLTTKRYQSGEVDYDGHISRRGDGHLRTLLYEAAAVMLTRSIADSSLRRWGLELRERLGFKRAAVALARKLAVIMHAMMKTGELFDRRIEAAA

SEQ ID NO: 173896 - protein, 363 aa, unidentified
MFTERTSVGLDVHARSVAAAAIDGVTGELVQAKLTPSHEHIRSWVQALPGPVAVTYEAGPTGFDLYRALTGAGIRCEVAAPSKLQKPSGERVKTDAKDAIHLARLLRLDDITAVAIPSVDQEAARDLVRAREDCRGDLMRARHRLSKLLLRHGIVYYGGQAWTGKHDAWLRHDALPQLTTRATRLTFDSDYETVLTVKARRDRLDTAISEMAADSEFTDMVHRLGCLRGVSTLTGFALAVEIGDWHRFTGNTIGSFVGLVPSEHSSGSSRVQGPITKAGNTHVRRLLVEAAWHHRARYTVGKTMRDRWELAPAAARARGDEGNRRLHHRWVKFIDRRKKNTIANVAIARELAGWCWSLAVLEE

SEQ ID NO: 173897 - protein, 387 aa, unidentified
MPRVNDLSRSLTALSQDSTLIAVIEMGLKSWLVGAILPGIDRQPLKKLDPDEESLLELLHRWREEAARAGRPVARLCVAYEAGRDGFWLARWLRMRGVEAYVIHPTSIPVSREHRRAKTDRLDVGLLMRAFLGWLRGEAKHCSMAAVPTLAEEDAKRPSRERESLVGERTRIVNRMKSTLIRLGIRGFKPTLRKAAAKLETLCTPEGVALPPHTRTELCHDMARLQLLKEQIKAIEAARLERLEQAPDAGRHAMIRLLARVIGVGVETADMLVNEVLSRNLRDRRAVARYAGLTGSPDESGSKRREKGLARAGNARVRRAMIQLAWRWLMFQKDSGLAQWYRARTADARGDTRKTLIVALARKLLIELWRLATTGQFPAGLALHSAS

SEQ ID NO: 173898 - protein, 373 aa, unidentified
MKYNTVYVGMDVHKETFSVCCYTNETEKAEYSQTMDAHYSKVLNYIEAMRFHYGDEALFICGYEAGCLGYTLYHQLTGHGIKCVILAPTTMSKSANEKKMKTDKRDAALIARCLAHHDYKSVYIPTEHDEQVKEYIRMRDDHNLALKKIKQQILSFCLRHNYRYEGGKNYWTQKHLAWIGSLDPEEIYKEILNEYLLTYRTLADKIERLDQRIEELASDEEYNDKVNRLVCFLGIKTHTALSVIVETGDFKRFKDARSYSAYLGLVPGENSSGPKRNGLSITKAGNRHIRRLLVEAAQSYSRGQVGYKSKALKARQKGNAAEVIAYSDRSNERLRRKYYNMTLRNNKRANVAKTAIARELSCFIWGMMTANYI

SEQ ID NO: 173899 - protein, 402 aa, unidentified
MITCGIDIGKGKHAVAVVDESGRQLVRTRFYDNTKAGAERMLAELLRHAEPSQIHVGMESTGNYWRAYYDFLKGRGCVVDVINPIVTSASSAGDIRGRKTDKRDAESIAEVVLRGKYACRRDEGLQERKLRALTRQRGFIVEERSAAKLHLASLVAEAFAEFESLFEDPYGALALAVLSKYPTAGHLARARKSSLAKIVRANTRGKDADAEALRLIGGAKDSISLSCEITDALARCVTSSIRTIMDLDERVKDVEEAIKGFDPPDLASKLMAIKGSGKVMPMVVAAEFGDISRFRTNPKDGSEAGMHKRLLAYAGCEPRIRESGKWKGRKFISKRGSRQLRTALYLIANNIRQWDPYFKAVYERKIGSGKHHNVAVFYVVAKLIEVLCALYKSGRNYAAIQP

SEQ ID NO: 173900 - protein, 368 aa, unidentified
MKKISTAGARQTGNFRDEQKLTIGLDLGDRSSWYCVLDEAGEVVLEQRLGTTPKAMKEVFGKMPRSRIALETGMHSPWVSRVLSELGHEVIVAHARNVRLIGESRRKDDRFDARTLARLARIDPQLLAPVQHRSAQAQAHLMVIRARAGLVRAWTSMINTARGLTKSYGERLRGCNQRNMNGEKAQGLSPELQAALESLLVAIESLSERIYEYNQQIEKIATNSYPQVARLKQVKGVGTLIALTYLLTLEDAQRFRKSRDVGCYVGLQPGRRNSGQSEPQLHISKEGDPYLRTLLVQGAHHILGPFGADSDLRRWGLKLAERGGKNGKKRAVIATARKLAVLLHRLWVSGEAYEPLRNSRPLRLPAAA

SEQ ID NO: 173901 - protein, 428 aa, unidentified
MSTLFISVGIDVGADFSYMSIALPNQTLIGKPFKIVHGNLNSLEKAVSTIKEAEELHSMKARIVMESTGMYHYPLFCYLRDKGLCVAVINPIISKNNTNMNIRKVSNDKFDSKKLALIGLKPDLKVSIVPPEAVLDLRNLVREYYNLMDSRVAYVNKLSGILKVSFPQYASTFSKNTTQTSLALLEMFQSPAEFLAAGEDVIVGVIRKTARFGEAYAKAKYQAIVEAANKANAFGHFVSSNSVQIRLCVSFIKKYDEEIAEILSLIREHVKQHEDEDFVRQIRLIESIPGAGFLTAVTVIAEIGDFSAFKSPKQLFAYFGLDPAVKQSGKFVGTYVKMSKRGSAVARRAIHRIALVGIGVNRKGVANNHVLRDGYLAKCKSKPKMVALGVAMHKVCNIIFAILRDNKEFCIVTPEEHIANYQAAKSAA

SEQ ID NO: 173902 - protein, 413 aa, unidentified
MPNTLFVGIDVSSNSCEVAFIDDQGKQLGRSFSVSNDLDGACKVGEMICLSAEAQKVSQVRIGLESTSVYGWHLRDFLFDLDSLSKYLPLVYEINPSMVASFKKSFSHKPKTDSIDAYAIAQRVRFGGLRPYSKTQMTTAALQQLTRLRFHLVQTLIAEQNRTLSLLFLKFSAYKQANPFSHIFGKASTAVLDQFTSEELVNLSVEDLASFILNNGNNRLKNPEEAAKVIKAAARRSYRLNPKMQDAVDVTLSLTLQNVEFLESQIKKANAIITKELQAFRQTLTTIPGIGPVLAAGIISEIGDVCRFKDHGALAQFAGLTWTKYQSGDFEAEEHSLTKTGNRYLRYYLVEAANSLRVHNEEFKRFYQRKCQEVPKHQHKRALVLTARKLVRLVFSMLRKGQIYRQEMIRETV

SEQ ID NO: 173903 - protein, 397 aa, unidentified
MYIVGIDIAKRKHEAAVIDGEGAVIIKPFSFTNNCSGYNRLLAMLAKAKLPLDEVSFAMEATGHYWLALFTRLQKEGFRVQAINPVQTNSIRSFYIRQAKTDPRDALLIAEVIRFGHFSESTLHPENIYELRELCRGRHAIVSMQADVKRKVVALLDQVFPEYETAFTNLFGDTSMAILQTCPTPKELSEMPFEELCHLIEVSSHKRFRMAKAQELQALARNSFGFAMAGDVFSTMIRLYAKHLDFLKQQVQEMDRKIAEIMDTLDTPITTITGIGPTLGAYILSEIGDISRFSSAAKLAAYAGIDPTMRQSGEYNGVRNRMSKRGSPYLRHAIWLAASSAVLHDPALKLYFQKKRDEGKPYMASVGHACRKMVSIIYAVMRDNKAYTPCIQNEISA

SEQ ID NO: 173904 - protein, 365 aa, unidentified
MQKISTMRTSGKSSFEGQLTIGLDLGDRSSAYCVLNEAGEIVLEHKLATTPEAMKQVFGSMPRCRIAMETGTHSPWVSRLLTALGHEVIVGHAQKVRLITKSRRKDDRLDARTLARLARIDPELLSPVKHRSAQAQLHLAEIRARAGLVSARTALVNAARGLVKSYGERLRKCGTQQFTREITSGLSAGLREALQPLLREVESLNEGIQEYDRRIAKMAKEKYPETALLKQVKGVGDLIATTYVLTVEDPHRFRKSRDAGCFVGLQPGRRNSGESEPQMHVSKEGDEYLRTLLVQGAHYILGPFGEDSDLRRWGQKLSARGGKNAKKRAVVAVARKLAVLLHRLWVSGEVYEPLRNSQKAMSAAA

SEQ ID NO: 173905 - protein, 402 aa, unidentified
MSRSVFVGLDWAYRSHAVCVINAQGGVLKRLEIAHDRQGLAELLRTLATFGKALPIAIERPSGLLVDALVEAGHQVFAIHPNAVKATRPRYRSSNAKSDAGDAFMLADLLRTDGHRWHALQPQSGAIRALRSLVRTRDDLVATRIRLANQLTALLDAYWPGAACIFAAVDSPIALAFIERWPAPRKLGARQIQAFCKRQRYSGGRSPAVLLQRLDGAAAGCCEPRLAQANAIAALALVALLKPLAAQIKALDKHIAQAMAGLPQAASVMSLPRAGCICAAQILAELGDVPERFASAQQLCSEAGVVPVTYESGKSRAVTFRWACNRRLRQAITCLADNSRHASPWAASVYHAARKRGCDHPHAVRILARAWTRVLWRIWHDGSTYDPAMHLAAQRIEFTPGG

SEQ ID NO: 173906 - protein, 339 aa, unidentified
MLFAGLDVSSARIALCVMNEAGELVCQASIESEPGVIAEELRPWRDQLSLVGLEAGPTSAWLARELRALDLPVTVIDAAHASAALRTGFRNKTDKNDARGIADLMRVRKFRPVHVKSPEAQRDRALLSVREHLRRQGLDLRNAVWSILQAEGLKPPKLTTSRFQQLLVAALEDPDLAPVLTPLVRLIDKTEEEVAELDRQIAKKAKARATCRRLMTIPGVGPLTALTFATGIDDPARFSRSRDVGVHFGLTPRRYQSGDMDWSGSISRAGDAAVRRALYQAANAMIHHSRRWCALKSWAVRLAARRGLKKAKVALARKLAVVMHRMWVDGTDYRVSTAN

SEQ ID NO: 173907 - protein, 391 aa, unidentified
MPMYFVGIDISKYKHDCCIISAADQKVVSKVTIKNNKAGFDELLTIINSLSNPEDIRIGFESTAHYALNLELFLESSLLTFMEVNPVLISVYKKSKTLRRTKTDSVDCESIARWLMTVEYKPHSKGFYHAYSLKSLTRLRDRLIRQRSFYLVKITNVLDHTFPEFKPFFNERLSKTALYLLENYGSAEKMARMNSASYDKLRCISRGKFSIQQFLRLKELAANTVGVNNSIFDLELNTLLTLYKSLSDEINTLETEIIKLIEEVHPHYMSIPGIGPISAAVIYAEYGDISNFSNPGQMLAFAGIEPGINDSGTESHGGRMVKHGSSQLRYVLLNACLPLIRFDLTFATYYEKKRAEGKKHRVAITHVAKKLIRVIYALERQDVDFNAQKLR

SEQ ID NO: 173908 - protein, 342 aa, unidentified
MNREIYIGVDVSKNWLDIAYYDGVVIDWKSGHIRVDNNKSSYKKILLWLKNHQIAKESTIFCMEYTGLYCHNFRLWLEKEGIVYGMINPRKMHRFEPDLGEEGPALDRIKTDEMDSFRIAMYCEKHSRKIKSSPSKLPSHAFFKLKRLLAERRQYVKHSVLYKQQLNDISAYDTEDSRKRKQLGLKSISVLQHQTDMEIKKIIKDDESIYKNFKLLCSVIGVGLVIASETIVLTENFTAITNPRKYACYIGIAPERKESGISIRGGNHVSKKGFTNAKANLSLVALQAIRNDSNIRAYWLRKKAEGKHSGVVLNAIKFKMLLRMFAVIKRQKPYIEMDTFKK

SEQ ID NO: 173909 - protein, 341 aa, unidentified
MDTVSLVGIDLGKHCFHLHAQDASGRMVFRKKLTRSQMFALLGNFPSCTVVMEACAGAHWIARRLQALGHEAKLISPHFVKPFRQGNKNDFADAQAICEAASRPSMRFVSPRNEAQQVVSALHRVREALVRERTGTINQIHAFLLEFGISLPRGMAVIRRLPAVLETQALPPRLVAVLERLQAHFKYLDEQIGQLEHELLTQLHEDERSERLLEIPGIGPITASVLMSELGDAHQYGSARQFAASIGLVPRQYSTGGKPTLLGISKRGDKELRRLLVQCARVIMLRIERRTDSLGTWVRSLLARRHSNVVACALANKLARIAWAILAKGTHYRSAPAALAA

SEQ ID NO: 173910 - protein, 377 aa, unidentified
MEDRNEAAPTAEADFGTAYAGIELSKSSWVVSVLEPRSANPRVHKLCGGDAAGLLALLDRVRGSGARVVCCYEAGRDGFWLQRSLAAHGIECVVLDPASLPVDRRARRAKSDRLDAHGLSRAVMALDGGDRRACRAVVVPPPAVEDARQVHREREALVHERVRLVNRIKALLATQGVSGFEPLAEEKAALAALRCGDGVALPAALHDRLRREYDRLALVVAQIAEVEAIRDAIAAAPPPADPQAGQIVRLAKLKAVGCQTATVLAREVFWRAFDNRRQLGSYLGMTPTPWRSGAMVREQGISKAGNPRARTVAIELAWMWLRWQPDSALSKWFRDRVGAAKGRARRIAIVALARKLLIALWRYLTTGLVPDGAVLKA

SEQ ID NO: 173911 - protein, 316 aa, unidentified
MNETIVEKFVGIDVSKSTLDVSIEPIEQILHVAYDEAGIKQIVVQLKEISPTLIVMEATGGLEIRIATELASQGLPVAIINPRQVRDFAKATGQLAKTDKVDAAVLAAFAKQIRPHIRPLKDADTRALDDMVSRRRQLIDMRVQETLRLGTAASKPLEKSLNKHIAWLDKRIAEIDTDLTNRLRKSDVWRTKDDLLRAIPGVGPVTTLTMLAKCPELGKLNRREIAALTGVAPLANDSGKHRGKRFVWGGRADVRAVLYMAAISAIQHNDTIKVFAERLRKAGKPPKVVIVACMRKLLTIMNAMLKNNTPWNPKIA

SEQ ID NO: 173912 - protein, 394 aa, unidentified
MIYVGIDVASTKHDCAILDSSGKMLCDVFTFANDRSGFDSLIARLSLFSEVKDFSDIEIGLESTGHYSSNLVNFLHEKRLCVKIFNPLTVQRLRKAQTLRRTKTDKTDAKFLAYMLFSDDSKPYEKSVTHIDELKTLSRHRMRLVKETSKHKQHISRLITIVFPEISTAFCSTSLATVRELLLRFPSASDIAKADIRRLTNLLWSASKHRFGRDKAEEIRNLARSSIGTSNRGTSFELKQHLQAVCFLKQQIKELEEQIKEIMLEIDSPILSIPGISYILGAVIISEIGDIKNFATPAKLLAFAGLDPSCYQSGKFTADRTPMVKHGSSYLRYALIKAAMCASRYAPEFKQYLSKKSAENKHYFVAISHVAKKLVRVVFSLLKYNESYVTQAVA

SEQ ID NO: 173913 - protein, 367 aa, unidentified
METLFIGLDVHKSTISIATAKEGRDGEVRSFGTIESNHLHVDKLMKRLAGAGKSLHFCYEAGPCGYGLYRQILEAGHRCTIVAPSSIPTKPGERVKTDRLDAIKLARLLRMGEVTAVWVPDPAHEAMRDLVRSRADAMEQLSASKRQLLAFLLRQGRVYDGLTYWTRTYFVWLAKQTFDHPAHQIVFQDYINAVLDGRQRHDQLIRMIENLLPEWSMRPLHEALCTMRGIDMISAATILCATGDLRRFPSPGKLSAYFGLVPSEHSSGTRVGRGGITKTGNREVRRILDQCAWCYRFPARVSTWKGSTYSDAEKKVRDVAWRAQVRLCARYRKLLARGKKSPVACMAVARELATFIWEMGQVVPLAR

SEQ ID NO: 173914 - protein, 370 aa, unidentified
MANGVTCVGLDAHKESIQVAMLVPGRREPLEWQLANEPQAVRRLAKKLLQGAPEDVVCCYEAGPCGYALQRQMQAVGVRCQVVAPSLIPVKPGERVKTDRRDARKLADLLRAGLLTEVHPPTVEEEAARDLCRCREDAKEDLLRSRHRLVKMLLRRGRVWIAGKRTWTKAYYEWLRGLRFELPADQAVFEDYLLAIEQIEERIARVDIKLEAMAQEEPYREPVGWLRCFRGIDTVTAMTLVAELHDFRRFHSPRELMAYLGLVPSEHSSGGSQRRGSITKAGNSHVRRVLVETAWHYRHAPALSKKYRRRRRGQPAWILAVADRAQQRLHRRYVRLCARGKPHNKVTVAIARELVGFIWVALRGRPAEII

SEQ ID NO: 173915 - protein, 360 aa, unidentified
MSERDYNRQVVKRERINRATLVVGVDVGNAWNAVGFMDKEGNVLGSCAKLYNSREGFEQFVKMTEGFKERQGMKDVLIGLEPTGHYWRKLVCFAKDQGYEVRFVRTTALKHHRELDESSSAKSDKRDALTIANITREGKYIDTVIEDGVMRQLRTLSKVRERLLRYSVGAENALHAALDDYFPELHEIFWSMNSRSLWAILDRCPFPEDVISMKRSILRELIACSSRKKAGAAQKAKALCQAAKKSIGVKRIGSADRYRVKICLQEVKRTVLMLKDIDRQMKSILKEIPSSEYLLSIPGIGHLSAAIFLGELGDPAYFQNARQIVKYAGYDPQESDSGYRVSRNSYPKRDAGSSGNACSS

SEQ ID NO: 173916 - protein, 391 aa, unidentified
MVCVGIDVAKDKHDCCILDSDGMVRANCFTIPNNMDGFKQLLQTIRNCTKKSDKIKVGLEATGHYSYNILGFLLDNDLAVYVMNPLHTNLYRKSLSLRKTKTDRVDARTIATMLLSDVDLKSYTDTAYHNEELKSLTRYRFDKVRERAKLKQSVSRLVTILFPELEKLVPSLHGVSVYALFSEYPGAKQISEAHLTKLTNLLSIASKGHYGKEKAIQIREAAKSSIGSVMPAKSLELKHTIKLIKELTSEIDEIEDSIQQIMDELHPPILSIPGVGIQSAAMILAEIGDFSNFESPDKILAYAGCSPSTYQSGKLTNCYAHMEKRGSRYLRYALYNATKYVCHWNPVFAKYLAKKRAEGKHYNVALSHATKKLVRLIYALQKSGKAYLTAA

SEQ ID NO: 173917 - protein, 354 aa, unidentified
MAKSSVAVLGIDLAKNSRSLVGFDQAGTVVLRRRARRETVVGLTAKLPACVVAMEACCGAHHLGRLLAVQGHAVRLMSPEYVRPYVKAQKNDDRDAEAIAEAATRPTMRFVALKAQEQLDMQSLHRVRSRLVGMRTMLMNQLRAILLERGLAFPQGRRKFETAVGGLLEDPEARVGARIRSLVAEIREEWAGLDRRIDALDREFIAHAHADEAAHRLVSIPGVGPMTATALHAAVDDGSAFASARDLPAWLGLVPRQHTTGGKPKLLGISKRGNAYLRGLFIHGARAALASLSKAEDATGRWLRGLLARAHYNVVVVALAAKLARIAWARLRKKGELRGAAGAGPRIGHQKRLT

SEQ ID NO: 173918 - protein, 353 aa, unidentified
MNNIKYVGMDVHKSITVIVVLNELGQFESRSQIKTKGENICDFFRGISGKVEVVFEEGTHSAWLYKLLKPLVASVTVCDPRHNKLIEDGNKSDDEDAETLAQLLRLGAVKAVYKGDEQQQQLKEICRAYDNLIEDSTRVQNRLKAIYRGRGISCSGHDLYRADQRSDWLAKLGEEAARFRAESLVEQLESISQLRKQAKQRLLAQARTHADYRILIKLPGFGPVRVAQLIATVGTPHRFRTKRQFWPYCGYAVITRSSADYQIVEGKIVKQRKNVSTRGLNRNHNPQLKQVFKGAALTALRHEAIKAYYQRLIDHGRRPELARVSIARKLASIALTVWQRREEFDVKKAFAQD

SEQ ID NO: 173919 - protein, 331 aa, unidentified
MFPVGIDVSKNTLDLCILYDGIKGRIKTRNIQNNRHSVENILRWLRLQHCGPEDVHVVMEATGVYHERLATELHDAGFRVSLANPHRSREFARGMGIMTKTDKVDAYMLACYAFLKKPHYWEPPAPEIRYLGALLRRRDVLLGDALREEKRLEKYLSTDTPADIISSCRRMAQLLREEVSNIERQIKAHIKASPALRRDYTLLNSIKSVGPQLGMHMLVVLRSHNFASAEQAAAFLGVVPIEKRSGTSVRSRPRMSKIGPPQLRAKLYMSALCGKIYNKRMRNIYDEMCLRGKPKMVAIGALMRKLVHWCYGVLKTGTVFNDESLKQVLST

SEQ ID NO: 173920 - protein, 359 aa, unidentified
MLTIGVDFHKRTSTFKIMNEAGQMIATRKLVNSRDTIRQYLSSFTGPKRLGMEATRSWGLFYDTTYDLLESFHLGHPKKMKAISESSIKNDSRDADLITRMLHSGFFPQAYVSPKDARELRSLLRYRHFLVNQRRSIRNQIQTLLDRNLWPTDRPQTFKNVFCRRGLEWLKSLPLSPKERFILDQALENFQHLEKQILAFEQFLVPQDFQLPGLKHLRSVPGFVKSKVNAWIILAEIVDISRFPNAKSLAHYSGLVPRQHSSGDKHHTGHLVKEANMHLRTALIESTLAAIRKDKGLRSYYQKVKTARHSGAAIIATARKLCYAVYHVLKEQRDYRPEPLVTPAAACHPLEQKNSEKNS

SEQ ID NO: 173921 - protein, 400 aa, unidentified
MRAVFGIDVSKASSEVAILVNGEKVHGYTMSNDALGFARLLGDLRTVHKPEIIFEATGVYSRRLQAFLDEHGYAYTRLNPLEAKKQLDSLRVRKTDQIDAEKLAQSQFVLNRKPTYVQEEVYQNLRALSRFYQNLTEDIVRAKNRLHKVLQVTFPELETILSTPSGQQYWNLVIDFPCKDFVLELSKDELSESIRQSTSKRISDKRVAYLVEKLTALANQSYCAVKKTSPIMEEVRYYAKELLRLSGQRQAVLDEMVELAQPLPEYDILLSIPGIAETTATSIIGELGDIRRFQSANQINAFIGIDLRHYESGNFLAKEHITKRGNPYARKILFKCIHNIASASHTNPCHIADFYEKRKRQSQTTSTKPHTIASIHRLIRTMYYLITHNKLYDYTSTQNR

SEQ ID NO: 173922 - protein, 422 aa, unidentified
MLAESVDDEEIIARVAALDIGKAELVCCVRVPGAGGGRRRSQEVSTHSTMTRSLGDLANRLVDLRVERVVMEATSDYWRPVFYMLEAHGLQPWLVNARDVRHLPGRPKTDVLDAVWLCKVAERQMLRSSFVPPRPIRRLRDLTRYRIDLVGTRTAEKNRVEKLLEDACIKLSVVASDIFGVSGRAMMAALIAGERDPKGLAEMARTRMRVKIPQLVEAFTGHFDDHHRFLLAQMLARIDGIDADIAVLDAEIEAHLVPFKVAVERLDEIPGIGPVAAAVIIAEIGVDMTRFPTAGHLCSWAKFSPGIKSSAGKSKGSGSTGHGDRYLARVLGEAAVMAGRSDTFLGDRYRRIARRRGKKKAIVAVGRSMLVIIWHLLSDPDTRFHDLGADHYARTVNTEARKRNHIRQLEALGYRVTLESAA

SEQ ID NO: 173923 - protein, 340 aa, unidentified
MSDLRTVGLDLAKNTFFAVALSGAGKRLWRKKLSRTQVLRTFAEQQVCRIAMEACAGAHYWSRKLQELGHEVVLLPAHHVKGYLRGQKNDYNDAEAIAEACLHGRLRPVRPKTLEQQEMQSLHRMRKLLVAERTALVNHVRGLLAEYGVVIAQGRARFGREMPFVLEDAENDLTPRMRELLARQLQRYRALDEELSWYDQQIKEQVRQDAVCRQLMTVPAFGPVVSSVFRGWIGDGKQFRRGRDASAALGIVPRQYSTGGKPTLLGITKKGDKELRSLVIHGARAVVKHAHKKDDPLSRWIQRLLQRRGTNKAVVALANKLVRIAWAIVTRGEVYRVQPA

SEQ ID NO: 173924 - protein, 355 aa, unidentified
MNDAKYIGLDVHQATISVAVLDTAGRLVMEAILETKAETILQFIHGLRGSLHVTLEEGTCAAWLHDLLKPHVTQVLVCDPRKNALIKSGNKSDRIDARKLADLLYLNKLNPVYHGETGIRALKELARSYLALTRDTTRVRNRLKALYRSWAIPCAGQRVYAPRYRSEWLTKITEAGVRCRAEIYYQQLDALRLLREQVRRDLLAEGRKHRAMKLLRQIPSIGPIRAVLLIALMQTPHRFRTKRQLWAYCGLALKTSTSGEYRIVEGRLKRSKKFLAIRGLNANHNHDLKNIFKGAATRAAAVPGPFQEFHAGLVARGMKPTMARLTLARKIAAITLIVWKKGVRFDAEHLKQQAA

SEQ ID NO: 173925 - protein, 405 aa, unidentified
MKTTAYCGFDWASETHYYVLKNARKEVLSEGTVPHTTEGFEAFLESLGQCRQGGRVALIVEANRGVPMNALLDVNWLDLYPVNPMKTRKLNELQGSVRQKSDASDCHLLCDYLIANESELSGSYVERDSLIRQMQEWIGMETDLVSNCRQLKQRIMSHLDTFMPDLKRMLPNLDKKVYVRYLFEFDPLTPVDCSEVESFLRRHGCRNAETIEAFAAGHVALRALGEDAEVHRAQADVLRAWAELLWQLQCSLEDCRKRINALFVQLPQAAIYSSLPGLGETLAPRMACLFGSRPSERFACKEQAVAYFGQSPVTEQSGKGLKVGRRRNCHRYARNTCFLWAMAVNKMPNCHWQRTFLDKRRRKGDARPTRYRKLGRKMLGILYRCVIDNVPYDEVKFIQNLHQKA

SEQ ID NO: 173926 - protein, 348 aa, unidentified
MVVVGADTHKRSHTCVAVDEVGRKLAEKTVSATGAGHGELIEWARGNWGTDVLWAVEDCRNMSGRLERDLTAAGYEVVRVPTKMMAKARASARTRGKSDPIDALAVAHAALREPDLPRATYDEAAREMKLLVDRREMLVRQRTETINSLRERIHGLAPEYTAGPLDRPKHQQALGEWLGIQDGLVAELARDELADIRRLTDAINALATRIQGRVENLAPTLLELAGCGALTAAKILGETAGVTRFRSEAAFACHTGTAPIPVWSGSTTGQVRLNRSGNRQLNAALYRIALTQTRIAGRGQDYYRRKITEGKTTRAALRCLKRHIAREVYRRLHTDHEVRQNPDLPIAA

SEQ ID NO: 173927 - protein, 465 aa, unidentified
MKKTHKKSQRSKSKKKLVASGGRAVEVRASGELNRINEHAAGVDIGGERHYVAVPPGSTEHPVREFGVFTKDLYAIADWLRECGVETVAMESTGVYWVPLFEVLEECGFKVKLVDARKVKNVSGRKSDVLDCQWVQQLESYGLLQAAYRPTDEIVVLRSYVRQREMLVKSAATHIQHMQKALQQMNLRLDNVVSDITGQTGMRIIKAILSGERDAQKLGMMRDYRCHATAEEIAQSLIGNYRQEHLFSLKQAVELFEYYQEKIAECEAEMEKYLECLPHVTEEDPPELPFKDKRNIMSFNVQDHAYKLLGVDLFRIRGLNSETVLRIVSEVGVDLSAFPSEKHFASWLCLSPNQRVSGGKVLSSKTNPSSNRAAAAFRQAAVSVERSQSELGAFYRRKRSQKGPASAATATAHKIARLYYSLVKNGTEYQEQGARAYEERERERIVANLKKRARSFGLELVAKGA

SEQ ID NO: 173928 - protein, 397 aa, unidentified
MYIVGIDIAKRKHEAAVIDGDGAVIIKPFSFTNNCSGYNRLLAMLAKAKLPLDEVSFAMEATGHYWLALFTRLQKEGFRVQVINPVQTNSIRSFYIRQAKTDPRDALLIAEVIRFGHFSESTLHPENIYELRELCRGRHAIVSMQADVKRKVVALLDQVFPEYETAFTNLFGDTSMAILQTCPTPKELSEMPLEELCHLIEVSSHKRFRMAKAQELQELARNSFGFAMAGDVFSTMIRLYAKHLDFLKQQVREMDRKIAEIMDTLDTPITTITGIGPTLGAYILSEIGDISRFSSAAKLAAYAGIDPTMRQSGEYNGVRNRMSKRGSPYLRHAIWLAASSAVLHDPALKLYFQKKRDEGKPYMASVGHACRKMVSIIYAVMRDNKAYTPYIPNEISA

SEQ ID NO: 173929 - protein, 385 aa, unidentified
MYFVGIDISKYKHDCFICTETGEVICENLSFQNTSEGFSQLLNLLKSLDNTKSIRIGFEATGHYGMNLKLFLEKNNYSFMEFNPALVKEFIKGQTLRRTKTDKKDAYQITKYLISVDYKPHPKQFYHKYSLKSLSRMREKFVKQRSYYEVALTNVLDHIFPEFKPFFNNEFSKTAIYILNKYKSANKIQHMKDFDSLRKISRGKFTSAHFIKLKELAKNTVGSSNDIFETELESLLILHSQIEEQIRKLEDKIEIIIKELNPPTLSIKGIGIISCAGIISEFGDISRFKSADAMVAFAGIEPSISQSGTESHAGHMVKHGSGHLRYFLLNAADYVFMHEPIFTEFYYKKRNEGKTHRIALNHVAKKLVRIIYKLESDNIEFNHNI

SEQ ID NO: 173930 - protein, 440 aa, unidentified
MQSRLERRCIGLDVHRDFAQVAIWQGGVVKQAGRFATTPEGVRAFAQGLGPADEVALEVTGNTWAIATVLTSRAGRVVVSNPAKTRAIAEAKVKTDKVDAEILAQLLAADYLPAVWLPDAATSALRRQVLRRTQLVRQRTRCKNQVHAILHRNLIPRCPAADLFGHKGRAWLAEQDLPPDEQAAAVALLRQLDFHAAELRLLDTDLGQAGLDRPEVLHLMTVPGIDATVALSIVAAVGDFTRFRTPEKLVAYLGLNPKVRQSGGQPAKHGHITKAGAAHARGMLVEAAWSASKAAGPLRAFYQRVQARRGMQIAAVATARKLAVLCWHLIIKGEDYAFAQPSLVAHKRRKLELRAGRASARGRKGTASGYSLTAVRTAERQLAAQAETAYRTMVSAWQPRRPTTPTTASKTRAAGSAVSVAATNGARQFSPSPGNAARQG

SEQ ID NO: 173931 - protein, 408 aa, unidentified
MVTTEAEHPHAMFAGIDWGGTHHQICVVDHTGTIQVQRRIEHTVTGFTEIDRLLDAFASRGVLRVSIERAEGILVEHLLDRGESVFCISPKISARARERYRVANTKSDAFDAFVLADTLRHEHVHWRPLSRPSALTAQIAALSRDRERVIVMQRAVESRLRAALEAYHPAPLHLFSSLDRDITLAFIRDYPTPAAAARVTEDRMRRFCARHGYTGRVEPAALCDRLRPHLLTATDGTITGKHTAALMLVDQLELLNTNIRTYNAMLTPLVSAHPDGPVFTSFPGIATVIAATMIGEMGDDRARFPTAATLLAEAGLAPVTRASGRTRQVRFRYAANKRLRHSIDWWMTVAAREDPWSGDVYEHARNAGQGRYRAYRGLGARWTRILWRAWTDHEPFDPTRVHHQAPAA

SEQ ID NO: 173932 - protein, 323 aa, unidentified
MLGVGIDWSEEFHLVALGTPEEGITEVARVEHSPKAVEALVAKITALEPDPAEVRVVIECRHGMLVERLLEAGYVVVPVNPYMVAKRRGPAKKKDDAEDARIACRIALDRFEQLRPLIPHGEIAGELRSIARDDERAARDERRLLNRLRQDLITTFPAALAITGDDLGRPTFLRLLERWPTRGALAQVSHDELTGFARECKYGWPERFAERVQQAMATDQFTARDYLVRAKADTIRARAQQPREDERGQGFPGGEIYLSFPGLGDRLAARIAGEIGDHIEQFETPNSLQCYAGKAPVTRRSGKSEFVVACRLAYNHPLGDAVQ

SEQ ID NO: 173933 - protein, 443 aa, unidentified
MILADLSQKWMKKLLALKSVKPIKLGAMRKKDYVEFEQVVERGCGMDVHKETVVVTIRGKGIKTITKSYSTYTRSLIKLKEWLKRQGITHVAMESTGVYWKPIFNVLGDDFEILLVNARHVKNVPGHKTDKRDSRWLAKLLLSGLLKGSFIPERPFRELRDLTRYKKKLTNQVAADKNRFLKILEDANIKLSMVLSDVFGVSGTKMINHILVYNDYRPEDLMQYVHGRVKASREDIKEALTGYITPHHRFMMNTILGNIAKIESTIAEIDEHLKVVLEPYKLEKELLETIPGVGPDVSIGIIAEISTNMEHFPDHKHLASWAGMSPGSNESAGKNKSGRTTFGNRNLRGFLTEGGWAASRTKNTYFSAKYKNLVGRRGKKRAIVALGHKILIAAYFIIKDKVEFKELGEEHLNNFRRDKLLAYYKKQIERLNPDINIGQEEAA

SEQ ID NO: 173934 - protein, 334 aa, unidentified
MNYCGIDLASKASALCVVDHQGTIIREQMVPTEEAALRVAFTGWGVLRCVVEAAPLAEWIAQVLEDLGHEVVVIDPRRAKAVIQTKNKTDKLDARNLAKLAQTGWYTAVHRKSAAARLQRTQLQARQGLVETAKAQASRIRGLLRAHGIKVGKVSAGQFVARVQALIAQRAPALASILAPLLMLYQQAQQAAQALAQVLTRQVRHDPVCQRLMQVPGVGPLVASTYVATIDDPRRFANSTQVAAYLGLVPRVHQSGETHYHGRISKEGDKLLRWLLVEAANVLLTRTKRSCALKRWGLKLAKKRGQGKANVAVARKLAILLHRLWITGAAFAPA

SEQ ID NO: 173935 - protein, 375 aa, unidentified
MINNTIFVGLDVHKDSITVAMAKSGRQDVETVGVISNDSTSVRKMVKRLEEKGRELSFCYEAGPCGYGLYRQIASMGHSCMVAASSLVPQRPGDKVKNDRRDARKLARHLRNGDLSPVWVPDESNEALRDLSRARQSAKEDLHRNRQKLLKFLLRLGIRSPQGNRNWGSKHWQWLKSLKLDNSIQQMILSEHIYAIEECDSRVSRFEKEIEAQGQDGPHQNVMAALQGLKGVALITSATIISEVGDLTRFKNPRQLMAYAGLVPSESSSGNSIKRGSITKSGNSHLRKVIVEAAWHYRHRPTLSIGLKKRQEELPEEIKQISWKAQHRLNLKFRRMTATGKPSQKAVVGVARELLGFVWAVGQAVGKENEFLKTV

SEQ ID NO: 173936 - protein, 394 aa, unidentified
MRLWVGFDVGKAFHWVCVLDDEGEVLLSRRVEAEERDIETCCEEIAALGRSDERLVATDLLGGPATLLEAVLLGRGERLFHLPGIAVNRARDGYRGESKSDARDARVIADQIRMRWRSLQEVRPREDAAAELRTLVAHRRSLVEDQARVITRLRALLLEVFPGLEAALDLSTDRALLATTRVATPSAARRLGASRLARWLKDRGIRKSEELAGKVVEAAKVQRRELPAAETKAALVSEMAAEVLRTRGRVATVDTRLEELMAAKPEAAVVRSMPGMGPLFTAEFLSEVGDSSRFASADALAAAAGLVPATRQSGDGSFQRRARRGNRRLKNLLYRSAFSCTVHHAPSRIYYLRKRAEGKAHHRAVIALARRRVNVLWAMLRDGELYRDPVAEAA

SEQ ID NO: 173937 - protein, 427 aa, unidentified
MPYKIAGIDVHKRMLHVVVSDVQVDGEYDFTRRSFGSLPEALRSLAAWLVEQQVQEVVMESTAQYWKPVWGALERYWKPICQTREGALAMSGTLHLAQAQSNRGRRGRKKDFRDAERLVKRLVAHELVLSFVPDVEQRLWRTVVRTKYQITRNRVQLQNRLEALLEEAHIKLSSLVSDLLGASARRMLAAVADGETNHETLAALADRGLRATQEQLRDALGVCQELNPVYRRLIRMVLDEVASIDKRIEQLNQEMANLVRPHEDQVRRLAEVPGLGVDSAQQVIAEVGATAATFPSEKHLSSWVGACPGDEESAEVNRSRRSPQGNRQMRRILNQAANAAVKYKGSIFQILYRRYVPRMGHNQTIGIIAHKLCRLVWKILHRGIRYEERGPEVSKTSKQKRTRKMIQALRRLGYRIEPSLSQSAITA

SEQ ID NO: 173938 - protein, 380 aa, unidentified
MKHTQMILHEAITNNRLLYIAFELSETKWKLMFSNGVKRRQRTIESRDLNRLLLEIRQTQEKFQMGEEVTMMSCYEAGRDGFWLHRFLTGRGINNLVVDSASIEVNRRQRRAKTDRVDAEKLLNMLVRHVHGERKHWSVVRVPEEAAEDARRLSRELERLKKERTAHTNRIKSLLVLHGVTGVMISSSFQGQLEGVRLWDGKLMPEQLKQELLREYERYCLIQTQIRQLTLQQREQLKTDCAQAVQVRTLGRLRGIGPVGSWKLVYEFFSWRRFANGKQVGAAAGLTPTPYASGTMNRELGISKAGNRRIRHVMIEMAWQWVRWQPDSELSKWFEQRFGSGTARMRKTGIVAVARKLLIALWKYLEQGCVPEGALVMGKA

SEQ ID NO: 173939 - protein, 398 aa, unidentified
MSRSTRISLIIAPTQVLRYEKKRFATFTHDLLQLADWLAQCGVTHVAMESTGVYWKPVWNILAEQFEVLLVNAQHIKAVPGRKTDQKDSEWIADLLQHGLLRGSFVPPRPTSELRDLTRYRVSLVQEINRIANRIQKVLEDANIKLASVATDALGASGRAILEAMLAGEQDAALLAEMAQGKLRNKIPELQLALEGRMTEHHRFLLRQLFDHLRFTESKRSDIEQEIDKRMLPFEDKVTRLCTIPGVDRVTAWGMLAEIGLNMDQFPSAAHLASWACLCPGSFESAGKRLSGKMRKGNVSLRRCLSQAAWAISMMKNNYLSALYRRIAARRGAKRAVMAVAHALLVIAYHMLKRKEDYRELGADHFDRIDVNRIRRSLVNRLERLGHKVTLEPLTPTA

SEQ ID NO: 173940 - protein, 414 aa, unidentified
MESVYRVVAGIDVHKNMLAVVIRRQAGEQAEYEKRKFGTTRAEIQHLEAWLRAQAVSEVVMESTAQYWRPVWYGLEAHFRLHLTHPLKTRAPRGRKSDFRDGQRLADRWSAGDLEESFIPGSEQRSWRWLSRTRVQLKKKLGVIHSQVEGLLEQGGIKLSAVVSDLFGVSGWAMLEHIARGITDVEVLAGQARGALRKKDPELKAALAGQLDPVYRMLLRQHMDQVRLLRRQVEELNQALAEAMQEHIAALHRLSKIPGVDLYAAQELLSEIGPNASAFASAEQFASWVGVCPGSQQSAGINYSARSAKGNRYLRRLLCQIAWAAIHTKDTFFAGLFARLKPRVEGKGAAWAVAHRIAKVVWLVLHQQVEYQEKGSAPPNERTLVRKFKRLLKEFGSLGLDVRALLDSQLPTPV

SEQ ID NO: 173941 - protein, 461 aa, unidentified
MSRKRPAGKQKGSVQKKVDWKALEIMHPDAAGIDVGGSEHWVAVSPDRDPDPVRRFGCFTADLREMGQWLLQKGVRSVAMQSTGVYWMPVFEVLEQHGLEVYLVNAQHTKNVPGRKSDVQECQWLLKLHAFGLLNNSFQPTDEIRIARTLWRQRGNLVAEASSVIQRMQKVLTEMNVQLSNVLSDLSGMSGMTIIGAILEGERDPWALAALVQPEVKASPEDIAKSLEGNWRQELLFVLRQHVELYRIYQEKITDCDLQLRKHLESLGSKLDLKTQPIGSRPKGKKNSRNAPSFDLRTELYRITGIDWAQINGIDVLTAQTVIAEAGADLSAFPSEKQFASWLGLCPTNEQSGGKILNRRTRKVVNRATLAFRSAAMTLLRSQSYLGAQYRRLRTRLGAPKAITAMARKLACLFYRLIKHGQQYVDKGTEYYEAKYREQQIRSLAKRAQKLGLQLVIPKTA

SEQ ID NO: 173942 - protein, 412 aa, unidentified
MADKTFRWFAGVDWGSAKHQVCLLDEAGMVVGERAFAHGGAGLAALCDWLVSIAGEAGRVAVAIEVPHGPVVDALLDRGFAVHAINPKQLERLRDRVSLAGAKDDRRDARVAAGGLRTDPHLFRPVEAGDPAVIALREWSHLAEELQQERVRLSNRIRQQLWRYYPQLLEVSDDVTAEWVLDLWTLAPTPAKAARLREATLARLLQEHRIRRLDAAQVVGLLRQRAITVAEGVTEAAVLHLRSLVARLRLANREFHQAGRKLNELCTALSEGAAAAGGAPRDAVILSSLPGVGTVTLAILLTEAAGPISRRDYAALRTLSGVAPVTKRSGKSCIVTMRYAAQVRLRNAVFHWARVAVLNDPKCRSRYAALRARGHSYGRALRSVADRLLGMACVLLQRQVLFDPDYGSSAAA

SEQ ID NO: 173943 - protein, 424 aa, unidentified
MDRNDDTRLKEFRQLKNEIRGSTPHLVVGIDIAKGRHAAFFGTANGKALFRGFAFDNTREGFDRLLFQADTLKTREGLANLVFGMEPTADYHKPLGEYLIEHGHQVVLVGGAAVKKNRELLDGRWDRHDPKDAANVADLITQGKCLFYELPSLEVQELRSLLSLKRRLKKSEQGYKVRIRNHLIAQYFPEVDSYFGYGEGPGIVRWYLDPKELARLPFEEFSRMVSSPKGGEKQQERLEEIHTKAGISIGCSTHPSVAFEASTLLEGMRRIRTMIEETNARIAAVCKKFPEYPCLLSIPGFGPDGSAKVIGALGNPHRFENHRQVLKTAGLDLSADRSGKRTDVTPVISKKGKADLRYGLYQAAFIASTRNRHFMAYFTGKLKGREREKGIGTKMRTKLAAKMLVIAWSLMKKKEVFNPECIKG

SEQ ID NO: 173944 - protein, 459 aa, unidentified
MPKKNVTRKSRKRQSHLLKTVQPDAAGIDLGSREHWVAGPPLPDGSPSVERFGTTTAELLRLAEWLKQQHVTTVAMESTGVYWIPLFEILDRRGFEVHLVNARQISHVPGRKTDILDCQWLQLLHACGLLRGSFRPGDEICRLRALIRERNGIVEQRSDWVRRMQKSLDQMNVCVHHAVSDITGVTGMGILHAIVDGERDPRVLAHLRDRRCLKSEEQIVAELTGNWRPEDLFNLGQALKIYDHLNAVISDYDTEILRCIDSLQSAVCEDSSAPPPASKAKASKISPRGQEPLRQGLYRMSGFDLTTIDGIGVDTAAVILSELGPDLSAFADEGRFVSYLRLAPNLSISAGKRVPGKFKAVTSTRVSNALRMAATTLRTSKTALGAYYRRIAWRKGASVAVFATARKLAQLVFRLIRFGQAYVDEGAKAYETRFTQRRLSSYARALNELGYKIEPLTAQ

SEQ ID NO: 173945 - protein, 395 aa, unidentified
MSAEGEAIRSNDYRKDTTVKAPSTRPAAVLGLDVGKSSHWACLIDRDGEVLASAPVRNREAELDALFASAPAGTLVVVDQFRNIGSLAVRRARAAGLGVAHLPGLAASRAAGLFAGEAKTDERDAAVIARTALGVPDSLSGVPGRGEALEAARALSSQRDHVVACATRDKNRLRAVLLESCPALEAAVDLSDRRWLELLAGFGGAWGIARSGAEGPRAEAAGEAAAASTAPPPALVEAENKQVRFLAARISEALDEAGALEAETAALLEGDETYACLLTVPGIGPRTAAQLAVSVDIGRFPDHDHLVSYCGIAPRVRSSGTSVRSVRASRRGDARLKSLLIFSCNSLVRSSGRYGEYYRACRARGMGHGRALKAVARKRLRAIYAVMRDRVPYRE

SEQ ID NO: 173946 - protein, 438 aa, unidentified
MSNKVIFNLDDLFISVGIDVGADFSWMSIALPNQQFVGKPYKILHSSIDSLTTAVSKIKEAEELYSLESRIFLESTGIYHYPLFCYLRDKGFNCSVINPIITKNSTNINIRKVHNDRFDSKKAALVGLKPDLKVSLMPSDLALNCRNLCREYYDLMDNRSAYVNKLQGELRMAFPQYLGIFSKVTINTSLTLLETYTSPSAFLEADKQEIIDIIKSTARFGLTYAQNKYNAIIQAATDANQFGYIIDSNIKRIRLYISFIRKYDEEINNILESLHELVDANEDADFVKQIHLIETFKGAGFLSAVSIMGEIGDFSAFSKPKQLFVYFGLDPAVKQSGKFEGTKVQMSKRGSSIARRVIHTLTLQSISISRNGEAKNPVLREYYLKKCDSKPKLVAMGAVSHKVCNMIFAILRDNKSFEIITPQEHIKQYNASKCDMAA

SEQ ID NO: 173947 - protein, 345 aa, unidentified
MKYYAGLDVSMKETFFCILNEEGKRVYEGSCASDPVPLYEALTHQGYKLEKVGMEAGSISAYLTKGLTDLGLNAICIDARKMAAILSVTINKTDKNDARGIADAIRCNHYKEVNLRDISDVSTEILLQSRSTLVGTRTKFKNKIRGYLKTFGIRLGDVGNKSFTRTVHTFYVEMPLTARLAIDSLLTLFEETSREIDRLDQELNKLCKDDALVGLLTTAPGVGKIVALSFKSSIGDPGRFKNSASVGAYYGMSPRQYSSGETVRQGRISKCGDSYVRHLLVEAATVLLTRTKKWSSLKAWGLRLMKKSGLRRAAVAVGRKLAVTMHAMLLTGEEFRFSKAETLTR

SEQ ID NO: 173948 - protein, 351 aa, unidentified
MIIIGVDYHPSDQYIAFVDTETGEYGERQLSHSEGEAEKFYRELAARGVSVRVGMEATGYSRWFERLLAELGIEVWIGDAAEIKTKRVRKQKTDREDARLLLRLLRENNFPRIWVPSPENRDLRQLLWHRHRMVQMRTRIMNQLQALAMNEGQRRKKKLWSEAGRAQLEKLLLAPWASRRRKDLLELLDRMNPTIEGLTATIEQEARKRAEVLQLMTHPGVGPITALAFVLIIGTPERFKCGKQIGSYVGLIPCEDSSAGHQRLGHITKQGSSLLRFLLGEAAQAAARWDADWRRRYMHLALRRQRNIAKVAMARRLAVRMYWMWRNSWEYSEWVKFGSHAGQLGLRHGVN

SEQ ID NO: 173949 - protein, 321 aa, unidentified
MMAQNDRVVVGIDVAKDKVDACIRSLSQRQTFPSRAEGRRKLIAWLRKHKVDKAVMEASGGYERDWAKALRGACFEVWIVDPKRVRNFARSAGRLAKNDVIDAEMIAWFAETFKEAPTQTHDVAREELAALVKARKAVIDLKTRLQSQNEHAVPGAVQKAHARVLKGLDAEIAKLEDAIVITVKATPAFAARAEIIESVPGLAETASAVLLAGLPELGTVRQEIAAALLGAAPYDDDSGKRRGERHIKGGRRWVRNALYMPCLGAATQSNPVLKAFYQRLIARGKEPKVALIACMRKLIVILNTMIARGQKWDPSRRFAVN

SEQ ID NO: 173950 - protein, 349 aa, unidentified
MSMVCGLDLHRQQITFDALETGSGEVWRGRVSQPDRERFRRWLTRDVARRANGEPVTIAVEGCTGWRYVAEEIIAAGFEVHVAEPADTQTARGRKHRAKTDRSDARLLRELLQRGELPESWVPPTVVLEWRERVRLYKSLLDQRRVWIQRIHAELFQHGVAVPPGEIGTTATRAWMASDQVTLTAAARQRIEVGYAMIDATDAHLVPLRAQLQRFARRQPACRALIDAHYGIGGLTAVAVWSELGDCRRFTRSLQAVRHSGLDIKVDSSDRRRAGGYLTRQGPSTLRWALFEAGMCAARPRSPDHAYYTAVKERHDGKLAAISVARQLARRCYHTLRNLDPDVVYAVPA

SEQ ID NO: 173951 - protein, 349 aa, unidentified
MLADELDYVVGVDTHRDEHVLVAVAAPTGAVVARQAVRANARGYRETLRFAELYAPGARAWAIEGTGSYGAGLTRYLAGCGETVLELSRTPRSERRLRGKDDSLDATRTARAALASETLVLPRSGERREALRLLLVARRSAVDVRREALGQLRGVIVTAPDRLREQLRGLPAGKLLERCSRMRRSSSQTADEVATRLVLRSLARRIEAATLEADQLERELLGHVHALAPTLLDEPGVGPIVAAQLIVAWSHRGRVRSEACFARLAGVAPVPASSGQTTRHRLSRGGDRQLNRALHTVILHRRQHDPTTKDYIARRIAEGKSRRDATRLLKRYLARHLYRLLERQEPLMT

SEQ ID NO: 173952 - protein, 357 aa, unidentified
MKIVAGKSKKSVVGKDVYVGIDVHKESWQVTVRTGGEEIFNGRIPGQYQSLKKLFERYQGCRMKVAYEAGPFGFWLSDKLVADGIEALVVPPSLIPTESGNRVKTDKRDSRKLARLLESNMLKRVYVLTPEEREHRDLLRTRRQIVDHRNDVARQIKSKLLFYGITSPFTTTTRWSLTYIEWLKVLRCDTDYLRESFNLLIDLYEYLTRQIVRINKKVALLCRDKKYRDKIKLLCTAPGIGRLTAIEILVELQDITRFESAEELAAYIGLTPSEYSTGERTRQGRITRCGNKRVRTYLVESTWMLITKDPAIRLKYLKLKSLRGGKRATIAIARKLLIRIRRMLLDNVPYRMTAMAA

SEQ ID NO: 173953 - protein, 359 aa, unidentified
MEQDGEKDRRIIGGVDTHKDLHVAAVVDEHDRPLASRCFPTTRHGYKQMLAWMRSFGSLQRVGVEATGTYGAGLLRYLQHAGVEVLEVTMPDPHDRRKRGKTDDLDAQNAAHAAFAGRRTVTPKSRDGMIESLRVLKACRKTAVAARRVALQMIHNTIICAPDELREALRKLTRMQLVRTLAAWRPDLTDYRNVVSAYRITLKSLARRYLELHDEIADLDTMITAIVEELAPALVARNSVGHGSAGQLLLTAGDNPERLRSEAGFAALCGVSPVPASSGKTTRHRLNRGGDRAANSALHIIAIGRLRTDPRTKAYVAKRIAEGHSKLEAIRCLKRYIARELFALIRQRGREINQGAIAA

SEQ ID NO: 173954 - protein, 433 aa, unidentified
MTTAPYDLIIGLDRSDQTADLCLLDTRTGERRRVSIATAPEALWEWLAELRQQYPAARVGLCLEQPAGHLIPFLEAYAWLTLHPINPLTLQKYREAFVTSRAKDDTKDAEYLADLLLNHHAQLPVWAPEDSATRAVQQLVFHRRAVVDERTALTNRLQALLKQYYPQALTLCGEDLWRPLATAFLLKWPSLGAVQKARPATVTQFYYVHGSRSQKLLAQRLALLEKAVPVTDETAVIQSFELRVQLVCRQLQALQRTLGEFDQQLAAAYAAHPDRAIFASFPGAGPVLGPRLLASLGANRERFADAATQLQRYTGVAPVTKRSGGSCRIHRRYLCPKFHRQSFHEYASQSVLWSRWAAAYYLQQRQKGSAHHTAVRALAFKWQRVIWRCWQSHTPYDERIYEASLRKHGSPVVALFERVELGKSPWKNPAPKN

SEQ ID NO: 173955 - protein, 414 aa, unidentified
MHKSFIVAVICDSTSITPKYYKKRFSTFNNDLVKFRNWLIDNDCQNVCMESTGKYYIPVYNALEGFIPNVVVANPKWVAVIKGEKDDNKDAKWIADLFKLGIVRSSFIPSKDFRILREYTRYLYKLTCNRTSEKNRFTNALTVGNCKLDMVFSDIFGKSSQSIIQTILDNNSFSDDDIINSLHKNCKSSHEDILSAVSGVSFTYEQKLRIKLIKDHIDYLTNEINDLRDIINNLVAPYEDYINLLMTIPGIDRNSAITILSEIGTDMSQFSSHYKLTSWTGLAPGCNESAGKKKSVKISRAGVYLKPCLVEVAHCAVKDKTNTYYSNKFNKISKRRGKKRAYIAIARKILVAIYHMLLTGEVWNPRDLASNETSDKDRLKYTKNNFKQSLKQLLSLGLTSNELLEIVNQNAIIE

SEQ ID NO: 173956 - protein, 447 aa, unidentified
MQKREEKRKAISGLAVMNPYAAGADIGDTRHDIAINDGKGGHVVRTYGTFTSDIQDAVNWLKEEGITTIAMESTGVYYLTFYLMCEEAGIEPYLVNARHVKNVTGRKKDETDAMWIQRLHTCGLLKSCFQPDNDFRTLRTFVRQRKGLITRSSDEVRRMQKSLEQMNIKIHVVISDILGKTGMQIIQAIINGNHDPEDLSKLRDPRIKASREDIIKSLQGIWKAEYLFTLSQAYDTYMFYQKQIQECDRKIHEQLSIQVAKANEGEVPVEEKNKKKVKARKNQFTMPVEPLLRSLTGVDLCKIPSISETSAVEFISEIGIDTKKWSNIKSFTSWLNVVPNTKITGGKIISSKVMKKKNRAGQTLRMACTSLHSNKTVIGDYYRRMSYKYGGRGASLATAHKLAKIIYTMLDKKLEFSLVQLVDSQNRYREEKIRQLERQIDRLRKVA

SEQ ID NO: 173957 - protein, 339 aa, unidentified
MKLTPVGVDIAKNVFQVHWVDPDSGEIISKRVKRAKFLEHFANREPCLIGMEACGGAHHWARQLTKMGHQVKLMPARFVKAFNIGNKSDPADARAIWLAVQQPGKAVAVKTDGQQAVLALHRMRQQLIKFRNMQINCLRGLLTEYGEVMGKGRSALDKAISAVLATVAERLPAALIDTLREQWNGLSKLDQQIATIERRLREWMKQDKACNSIAEVPGIGLLTATAAVATMGDPKSFRSGREFAAWIGLVPRQTGSGGKVVLLGISKRGDTYLRTLLIHGARGVLYNAKDPGAWVERLGKRRPPNVVLVALANKMARTIWAILAHDRPYEKTFVSTKPA

SEQ ID NO: 173958 - protein, 470 aa, unidentified
MVVARLALGYVAGLWSLEAAHKLTWELPAPRIGASPSPPSKVVTRMLLRARGALSTRRCAMERLIDRCCGLDVHKKTVTACVRVPGANGAREQHVRTFGTTTADLLSLRDWLEAFQVTQVAMESTGVYWKPVFYVLEETAICVLANAAQIAQVPGRKTDVKDCVWIAQLLEHGLIRESFVPPAPIRELRDLTRYRKAVIQERTREANRLHKVLEDAGIKLASVASRVLGVSGRTKLDALVAGTTDPAVLADLARGRLRKKLPALRQALVGRFRGHHAFLVAQILAHLDYLDEAIEAVSTQIDTVIVPFADDLTRLDTIPGVNKRTAEVLIAELGVDMRVFPTAGHLASSAGLCPGNNESAGKHRSGRTRKGNRWLRGALIEAALSAGTHSATGALAARYRRVMQHRGHKKAVVAVAHAILVTVYHLLARQTNYKNLGADYYDRRDAEHVRRRAIHTLERQGFRVTLEPAA

SEQ ID NO: 173959 - protein, 366 aa, unidentified
MKNTTLFVGMDVHKESISISVLVGDRGEVARPTVKVRNDALELKRLFGRLKKEGEVRACYEAGSCGYEVHRLLAGMKIPCDVIAPSLIPVRAGDRVKTDRRDAEKLARLYRAGELTSIRIPSEAEEALRDLVRCREDVREDVLRERDRLLKFLLRHGHSFTGGQKNWSMAHWAWLRKQTFENATAHTVFTEYLARLDGTLARLRALDQELAAAAEQEPYKTPVAKLRCLRGIDTLTAVILVAEICDFQRFDHPDQFMAFVGLVPSERSSGGKERRGSITKTGNGHARRVLVEAAWHYRRPPRPSATIKKRWEGQNEKVVAHAWKAQERLHRRFHRLVSRGKPSQVAAVAVARELCGFVWSIARTSA

SEQ ID NO: 173960 - protein, 388 aa, unidentified
MIYVGIDIAKLNHFASAISSDGEELIKPFKFTNDNDGFHLLISKLDPLDKDSLIIGLESTAHYGDNLVRYLVAKNYKVCVLNPIKTSTMRKNNIRKTKTDKVDTYIICKTLMMQESLRFVTFYDLDLMDLKALGRFRQKTIKQRTRLKIQLTSYVDEIFPELQYFFKSGLHQKSVYALLKEAPTPEAIASMHMTHLAHLLKVNSHGRFDKKMAQQLRVLAQKSVGASDSSLSIQVTHTIQQIELLDSQLERVEAEMTEIMKFNDSVIMTIPGIGYVNGGMILGEIGDIHRFSSPNKLLAYVGLDPSVYQSGSFQAKKTRMSKRGSKVLRYALVNAAHNVVKNNATFKAYYDAKMAEGRTQYITLGHCAGKLVRIIWKMMTDNLEFNLN

SEQ ID NO: 173961 - protein, 435 aa, unidentified
MAQSYSTRPVEAVNAAELVKGRDGQVLAVGVDVSKADLRLVPRWADGTFLRPIRVRQPSQIGLGIELLRSLGTGRDMIVALEPTGRYGDVFRQACHRAGITVHRVSAKVSHDYAEVFDGVPSQHDGKDAALIAELAAIGKSRPWPWPAADDWEQRLALAADLGDAYQRQMIAWFNRIEAWLAAHWPEIQKDLWLTSQTLPRILLHYGGPTALAADPDAAEQLKRWGRNMIPAERITRILQLARETVGVEVSEPEVQRVRNYAAEAIRAKRVMRRYKAELAELAMQHPVVKRMATAVGAATAGVLWLEGGDPSQYVCGRAYLKALGLNLTERSSGAVQGPQRISKRGSSRARRWLHFAAMRLTMEEPINRWYAAKIERDGGIKKKGLTAIMRKLGLALHRIAKDGVDFEPQRLFAGRRQRRRSQRSAGQEDHSLEA

SEQ ID NO: 173962 - protein, 326 aa, unidentified
MQSILGIDVSKYTLDLVLLTDHGVSHKKVKNDPKTFPKLVEWLTKKQSGKVHACLEATGQYGEEVADFLLDHGHQVSVVNPARIKHYGASKLHRNKTDKADAALIAEFCQKENPALWEPLSPEIKRLRALVRRLQDQKANLQQEKNRLESGEKDPWVIRDLETHIEYLKKRIKATEAEIEEVVNQSPDLKFNRMLLTTIPAFGKLTAHTFLAEIGDVKRFNNAPELGAYAGLNPKGHRSGTSVFKKTRISKQGRVELRRCLYMPAVVALSCNPVIQDLNERMTQRSSHKMEIIIAAMRKLLHIAYGVLKNQIPFDPDYGKQFNFSS

SEQ ID NO: 173963 - protein, 314 aa, unidentified
MITYTSFIGIDIGKYSFVVALHGNKKVDEYENTPSGIEEFIQSYKKDLIKGLCILETTGGYEMGVLLTLCSQGFAVHRANTRKVKHFIKSYGNAAKTDKLDAKNLGLYGFERGKALELFTPQSKQSGELYEMIQRRTDLKQMLVAEKNRLKAPRAACVKESIQSLIEILKVKLEAITEEINSLIAQDPVLSEKKKILKTIPGIGDIIANELLILLPELGQLSRREIASLVGVAPRCNDSGTLQGYRRTTHGRAGVKPLLFLAAMAARNSNSILKTFYEGLLARGKIKMVALVALMRKIIVIANARLKIVQPIAF

SEQ ID NO: 173964 - protein, 395 aa, unidentified
MLLMLFIGIDVSKSKHNCYLVDSEGTIYENNLQIQNDIHGFKTLSQKITSICQAHNHKKVKIGLESTGHYSTNITNYLYSEGFEVIIFNPIITNNNRKSNTLRKTKTDKTDAKVIATMLFTDDSKSYSPISYQIIELKSLTRHRHRMVSQRSKFKVSLTRLITIIFPELPEHIYSIHQTSSKALLLELPTTKDISNCHLTKLTNLLKKNSRGKYSRNKAIELKNLAAESIGSSNRATAFELKQTIRFIQFLDSEIKIIDKKIKELMDEINTPVITIPGIGHTLAATIIAEIGDIHRFPKPSKLVAFSGLDPSVCQSGNYNATHTIMVKRGSKYLRWAILQAAKTVTMRDKTFKDYLSKKLSERKHYFVALSHVGKKLIRVIFHLLKNNISFVPQT

SEQ ID NO: 173965 - protein, 341 aa, unidentified
MHNFSAVAGLDLSLNSFTTSLISSNEKFKSKIKTFKRTKEGLEEFVKWIENQGFPKEKVLVVMEATNNFWEEVAVKLAENKIAVSVINPRVIKDFARSLQRKAKTDKIDAEVIALYGVRMKPKVLDISKSKRFGKLRNLVREREFWLRERVRLENYERTLKSGVFVSEEGKERVKEMIEKVLLYIEEIEQEIKREIEKEEELREALKIVGSIPGIGEVNGVVILVETGLFKGFRRGKEVVSYAGIVPRVYESGTRKGSKGITREGNRRLRQAAYFAAVASLRSKCGVFKEFYDRLKERGKAKKVALVALAGKILRIAFALVKKREYFDARKLQSQISSVGA

SEQ ID NO: 173966 - protein, 368 aa, unidentified
MTLVAQTRPFVIGVDCHARTHTFAIIEARTKRQVACEQFPTTSAGISRALAWVGRRTDGDTRCLWAVEGVGSYGARLARAVAEVGYDVVEAPRMNARGRRAIGKSDPLDAAAIGTAVLALDESQLRTPRQDEGARAGLKILSAARDQLTRDRTMNVNALIALLRAHNLGIDARKPLVPAQIATITRWRERDEPIELLIAREEAVRLARRVHEVTTQLTANQKRMTELIQQSPAAPLLEMMGAGAVTVATILTAWSHPGRVRSEAAFASLAGVNPLPASSGNTVRHRLNRGGDRRLNRALHTITMTRMVHDPGTRDYVTRRTQEGRSYREIRRSLKRYIARILYRQLNTLYATAEPDRSHVAGADPYPE

SEQ ID NO: 173967 - protein, 399 aa, unidentified
MLAVGIDISKSKSVAAILNQDGSMHTSPFEFHHTQPELDAFIKYILNSKQSATILMENTGHYHYPVLKAFQEAGLPVCMVNAYQIKKFGDMDLRKAKTDKKDAVRIARYALEKSYSLVPYTSMEQKYEDLRFLARQYNQRMLTLKTNKVFLLNLLDETMPGITNILPLTTRTPETSLSVLFINRFKSYDRIKKMGKSRFLDAFEKIARKSRNRQTKTYGLAIYEAALRNITTRGENEYTLAAQDQCLELVCESQKAADSIILKMKTLAETLPEYAVLRSMAGVGNRLGPLILAEIGDIRRFHSGKALNAYAGNDAPPYQSGTFENHNRHISKRGNAALRKYCFEVMQALKLTRPQNDPVYLFLLKKEQEGKPYNVAKMAGVNKFLRIYYARAMETLKQQ

SEQ ID NO: 173968 - protein, 340 aa, unidentified
MPVIRIGLNVAKNVFQAHGVDEHGQVVLCKQLRRREVLSFFASLPPCLIGIEACSASHYWARELTALGHQVRMMPARYVKPYVQRGKSDALDAAAICEAVSRPTMRFAAIKSVEQQSALTLHRAREILVKQETMLANLIRGCLGEFGIVAPLGIRRMAELVGIIRDEADSRIPPHARIAMTAVADQLGDLQRRIKEIEQAIRAWHRNNDASQRLATIPGVGIITASAIAATVATPTEFKSARHFAAFLGLTPKQHSTGGRQRLGRISKQGDGYIRRLLILGGTALVRYARGAGGTVWAKQLLARRPARVVTVALANKAARIIWALLVRGGVYRSAAPQAA

SEQ ID NO: 173969 - protein, 297 aa, unidentified
MHVNTIGVDLAKNVFQVHGVDSAGKVVITRQLRRKQVLEFFSKLPGCLVGMEACGTGHHWAREISKLGHTVRLMPPSYVKGYVKRSKNDAADAAAICEAVTRPSMRFVPIKSTDQQALLMLHRTRDLLIRQRTQLINALRAHLAEFGLVAETGREGLAQLGAIITDESNHEALPSAMKQALQAIVDQLAALELQVGALDRAIHAHHRANDMSCRLETVPGIGVIGATAIASTVADPSGFKSGRDFAAWIGLVPRQHSTGGKERLGGISKQGDRYLRRLLQQPLFDRPGCIRKSIPGS

SEQ ID NO: 173970 - protein, 370 aa, unidentified
MGKSVLYVGLDVHKMSIDVAIAEAGPGAEVRFYGQIGGDLDSLDRVIRKLRATGAQLQFAYEAGPCGYVVYRHLTAQGWSCLVAAPSLIPRRPGDRIKCDRRDALSLARLFRAGELTSVKVPDADDEAMRDLTRAREDAVSVERRAKQRTGALLLRHGRRYPGKTTWGRGHWRWLLQQVMDHPAQQIVLQEYLDAVREASARVQRLTGQIQELLPQWRRAPFVAAYQALRGVSLIVAATVVAELGDLSRFKNPKELMAYLGLVPSEHSSGASVRRGRITKTGNGHARRVLVEAAWAYRLRARVTRPLLQRQEGLPENIRQISWQAQVRLCARYRRFLARGKHKNTIVTAIARELAAYIWAIGQAVEPLTA

SEQ ID NO: 173971 - protein, 389 aa, unidentified
MNTITTTASNNTTILAIDLGKYKSVACALDNDTGEFRFTTFETTRAELLKLIGQQRPGVVVIEACLLAGWVHDLCGELGVRCLVANTASEAWKFKHLKRKTDKDDALRLAQLHLLGQLPTVTLPPTNVRQWRSLIACRQTWVGRRVAVQNRIRALFVAQGLPAPRGARAWSTTGLAGIAMQAKPLAECGPDELWRGLLDMALTEYRQVCALIVQAEERLDALGKQNADVNLLQTTPGLGPRTAEVVAAYLNDASRFQTGKQVSAYGGLVPRQHQSGEMDRRGRITKRGPALLRKLLVECAWCMLRYNGWARGIYLRLTGGGERRKKQAIVALARKILVRCWAMLRDKKPWRDPQTGPKPTLPPSKQRRQEEAQRRRQAKQAAVLDGANA

SEQ ID NO: 173972 - protein, 316 aa, unidentified
MNIKTQVEINVGIDTSQSQLDIYVRPTGDYFSVENTPQGAKQAAGKIRKYQPTRVLIEATGRLELNFVCAAQTAGLPVVVCNAGQVRQFARSTGRLAKTDKLDAQDIAYFGEALQPVLTIIKPDKLRDISDLITVRRQCLDMSTMQKNRLSRMPKSVQPPIQRILKAIQKEIERIDQKLDKLVDAIPQWREQRDLLMSAKGVGRVVAYTLMSELPELGKLNRKEIAALVGVAPMNRDSGGYRGKRRVSGGRSKVRTVLYISMWSTIQYDPKIKATYERLVAAGKPKKVALVACMRKQLTILNIMMKNGTHWSEKIA

SEQ ID NO: 173973 - protein, 342 aa, unidentified
MQITTIGLDIAKNVFQVHGIDAAEKVVVRKQLRRSQVLAFFKALPPCLIGMEACATAHYWARELTKLGHTVRLMPAKDVKAYVKRNKNDAADAEAICEAVRRPTMRFVQVKSAEQQGRLMQHRTRDLLMRQRTQVINALRAHLAELGITAAQGTAGLKELLAIIANDEDERLPVDAHASLVVLAAELQAMQTLIGSLEKRIMAQHRKNEASRRLETIPGIGFVGATAIAATVTDPKAFRSGRDFAAWIGLVPRQDSTGGKQKLGPISKQGDRYLRRILVVGAHAVLRYAKQNPEKYPWLTQLLARRPFKVVAVALANKMARMAWALLAHGGTYRAPQLAAAA

SEQ ID NO: 173974 - protein, 361 aa, unidentified
MAQVRSWAGLDVHARSVLAVTVDGASGEMRTRRLPGATSEVVAFCASLPGPTKVAYEAGPTGYGLARALHAAGIGCVVAAPGKIERPAQDRVKTDQRDGERVLRLLMIDGLHAVRVPSCEEEALRDLVRAREALRGDLMRGRQRLSKLLLRHDVIYEDTASAWTARHRAWLTKLDLGGGAQLTLLDYLHAIDAMVIRRDALQTAIGELVPGSPWAQPVARLRCLRGIDTLSAVGLCAEVGDFDRFDKAGRLMSYLGLVPSENSSGETRRQGAITKTGSRHARRLLVEAAWHYRKPPARGKALERRQDGQPAHVLAIAWQAQQRLHRVWRRLDGERGKRRTIVAVAVARELAGFCWALARAD

SEQ ID NO: 173975 - protein, 343 aa, unidentified
MTYYAGIDVSLETSSICIVDAQGAIRREFKAESEPEAMAAALIATGLAFSRIGLEAGPLSQWLHAGLAKAGLPVVLLETRQLRATTKSMPVKTDRNDARAMAQVVRTGWYKAVHVKSELSQELRALLTGRKLLVAKLRDLENGIRGLLRGFGLKVGQVSEATFPARVRELVEGHAGLEALMAPLLQARDAVRTECERLHRLVLVAVRDDDVCRRLMTVPGVGPVTALTFCSAIDDPARFSRSRAVGAHFGLTPKRYQSGETDRVGHISKQGDGLARQALYEAANVLLTRTSKWSALKAWGMGVAKRAGMRRAKVAVARKLAVLLHRMWRDGTEFCWSREVAVA

SEQ ID NO: 173976 - protein, 370 aa, unidentified
MDEDIKFFVGLDVHKDSIAVAVAVAGREPARRVGSIAHDIGKLRKLLGRYGDPARVQVVYEAGPTGYGLQRELARRGYQSQVIAPSLIPKRAGDRIKTDGRDGLRLAELSRAGELRAVWIPDPADEAIRDLSRAREDAVHARTQVRQQLKGFLLRHEVRYAGKTSWSKTYYRWLATLNFGLSGAQTAFTEYWQAVSAADERVARLTTALAPAIEGWRFEPVVRALQALRGIDQISATGLVAEIGDIGRFAHPRQLMAYLGLVPSEHSSGERVVRGSITKTGNTHARRLLTEAAWNYRFQPRIGRRAQQRAEDLPQAIRDVAWKAQLRLSGRFARLRGRGVQINKVCVAVARELAGFVWAIASAQAKQAQS

SEQ ID NO: 173977 - protein, 387 aa, unidentified
MAQVNDLSRSLTAFDPISTLVVVVEMSKASWLVSGAVPGVERQPLKKLEPDATVLLRLIERWRNEAVRAGRPISRIALAYEAGRDGFWLARWLIARGIEAHVIHSASVAVSRERKRVKTDRLDAAMLMRVFLGWLRGERGHCGMVTIPTMEEEDARRPSRERESLVNERSRITNRMKSALARLGVRGFKPHLRKAPERLAGLRTAEGTGLPANIIEEFRRDMARLALVREQISSIEKTRAERLDQAPDTGPHAMVRLLARVIGIGIETADMLVREILSRKLRDRRAVARYAGLTGSPDESGSKRREKGLAKAGNARVRRGVIQLAWRFLMFQKNSALARWYRTRTEGPSGARKTTMIVALARKLLIALWRLVTTGEVPDGVELRPAA

SEQ ID NO: 173978 - protein, 404 aa, unidentified
MYNAVGIDVSKGKSTVTVLQPGGTVIRKPFDVSHTSQNLNELSRYLGSLDGDTRIVMECTGRYHEPILKALSEAGLFISVVNPHLIKNFGNNTLRKVKSDPADARKIARYTLDNWAELRQYSSMDNTRTQLKTLNSQFSFFMKQKVAAKANLIALLDNTYPGVNKLFDSPAREDGSEKWVDYAYSFWHVDCVRGIGLKAFTERYQAFCKRHHYNFQADKPQKLFNASKELVAVFPKEKTYKLLVQQSIQQLNLACAHVERLRREMNELASTLPEYNTVMGIYGVGKTYGPQLIAEIGDVSRFTHREALTAFAGVDPGVDESGQHKSKSNRASKVGSARLRKTLFQIMTTLLQNAPEDDPVYRFLDKKRSQGKPYYVYMTAGANKFLRIYYGKVKECLRNLEQES

SEQ ID NO: 173979 - protein, 380 aa, unidentified
MKVVYPICCGVDVHKTFLVATLITSQGLTPSYSKKRFSTFNNSILQFKQWLIEINCLDVCMESTGKYWVPIYNLLEDTIRITIANPKWVKAIKGNKDDTKDSKWIGDLFRLGLVPGSYIPEKEIRILREYTRYRSKLVSCKSSEKNRFQNAFTVCNVALDAVVSDMFGKSATSITDYLISSDSFDPEYCISLLQKSLKKKADTVIESIEGFQMTQDQKERMLMVRSHLEYVTKSIVKLDEALNTMTKPYESAIKLLCTIPGIDRSSAITIISEIGNDMSHFSNSKRLCCWAGLTPSNNESAGKKKSVRITRAGVYLKPALVQVAHVAVKSDKSPYYRIKYERIYKRRGKKRAIIAIARMILTAIYHMFITGKEFNPCDLN

SEQ ID NO: 173980 - protein, 352 aa, unidentified
MEKSNKLDFGGQHIYVGMDVHKKSWSVSIHTEQFEHKTFTQPPEVEKLTYYLERTFPGATYHTVYEAGFSGFWLHDQLRAKGIDCMVVNPADVPTKDKERAGKRDRVDCRKLARGLRNGEINGIYVPPRVKVEDRTLVRTRQSMVRKQTRCKNQITSILFFYGIVIPEEGRWSRRFINWIESIRMERASGDFALKAHLEELKHLRQIIANLNKAILSLSRTEEYLADVLLLKSVPGISTLTAMILLTELADLDRFSSLDKLASYAGLVPDIRSSGETEYAAGITFRRNAALRALLIESSWIAVRKDPALTMAFNKLSARMKKTKAIVHIARKLLNRIRFVLKNRQKYVPAVV

SEQ ID NO: 173981 - protein, 445 aa, unidentified
MFIQSQDDSHYCYSFFTKVVILMMKLKYSICCGLDVHKNVIVATIVITNKDGVSEYKQKSFSTISSDIQKFHNWLIENHCYHVCMESTGKYWIPIFNYLENDIEVCLTHPKYVKAIKGKKTDKKDSKWIADLYKFDLVRCSFIPPKDFRQLRELARYRFKLVCMKSSEKNRIQNCMTVSNVGIASVLSDPFGKTATEIMSYLLEHTADSIDEKAVRKLIKKGAKAKSDEIIEAIRGYNIETDQAKKLELARAHLDFLDDMITQTEVELYVRIKPYYEFVEFVSSMPGMTELSSTIVLAETGVDMNIFDDAKHLCSWCGLSPANNESAGKKKSVRIAKAGDYLKPMMVQCALAAVKSKKQPYFAIKYGRIKKRRGHKKAIIAIARMMMVCIYHMVSEKKPFTPTDYEELMDPQNHVERVVLNENNVFAYLETLGYDSSKLVKRSDN

SEQ ID NO: 173982 - protein, 320 aa, unidentified
MEKEKEYVGIDVAKSSMDIAVHATEQRWSFPNDDYGISKTVSLLRKLAPVLVVMEASGGIELTLTAALASAGLPLAVVNPRQVRDFAKATGKLAKTDTLDARVMAHFAATVRPVPRPLPNAQAEKFSSILARRRQVIEMLTAEKNRFGTANKAVRQGIEAHIKWLEQELSNIDDELRQSIQRSPVWREKGNLLRSVPGVGPVLSTTLLAELPELGILNRRQIAALVGVAPLNRDSGTMRGKRTVWGGRAPVRAALYMATLVATRYNPVIRRFYQHLCTAGKAKKVAITACMRKLLVILNAMLKHRAPWCYVNAQMFGPCH

SEQ ID NO: 173983 - protein, 403 aa, unidentified
MNSVGIDISKGRSTIAVMRPFGEVVISPFEVRHTDSELSELARQLKSLDGETRVVMEATGNYHAPVAKLLHDAGLYVSVVNAKLVHGYGNNDLRRVKTDKKDSVKLANYGLDRWLALTRYVPEEDTRLLLKNCYRQYRQYSKVQTVLKNNLISLLDTVFPNANRLFSSPIRGDGSEKWVDFVAEFWHCRCVSEKSERAFTCKYLHWCRKQDYNFSEAKAHTIYAEASGHIGVMPKSETMKLLVEQAVAQLRATSTALAALKHKMQTLASQLPEYPAVMDLFGVGPTLGPQLIAEIGDVRRFYSKKALVAYAGLDAPPNDSGDVTGRHKSMSKVGASSLRRTLFLVMSVYLQNAPLDEPVYQFMDRKRAEGKPYRVYMMASANKFLRIYYATVKAYLESLEHTA

SEQ ID NO: 173984 - protein, 257 aa, unidentified
MDSQQHVVLSPRRFGFAAFAEWAHVHLTHADAVVLEATSNAWLLYDQLQPLVSEVVVAHPQAVKLIAAARVKTDSRDTIKLASRLSANLIPAVWVPPQEVRELRALVTHRNRLVHQRTQAENRLHSVLHRHNFDPPPGTPFAVHQREWWLTLDLSLAEKLRVQQNLSLYQTLETLIQEIEAELGRLSTCDPWVNQVPFLVQLPGLGVLSALRILAAIGEITRFPSAKHLVGYAGEGGQRSPVGEDQSRGAHHQGGAQ

SEQ ID NO: 173985 - protein, 384 aa, unidentified
MNRHSILFIGLDTHKEFNEVAYIEEHRGVQPVHLGRVSSSKVAVQKLVRQFESKYSGATLHFVYEAGPCGYWIYRLITSLGHCCYVVAPSLIPKKPGEKIKTDKRDALKLAKLLKSEDLTPIYVPEPEDEAVRDLSRAREVAMKDLKDAKYQLKALLLRNNINYKGTANWSQKHLRWLTEIVLPHTAQHIVLQEFLHTITERISRLERLDNELTHHVHQWRYYPVVKAIQAMRGVRLLVATGVVAELGDLSRFDHPRKLMSYLGLVPSEHSSGGKRHIGAITKCGNGRARRLLVEGAHTYRYAANISTDMQKRQEGLPKDIIDIAWKAQIRLCKRYKKMIAKGKHYNLVVTAIAREMIAYIWAIAKEVVLTPVNTKLRLARVPA

SEQ ID NO: 173986 - protein, 319 aa, unidentified
MTQDKIEFDQVIEKGCGIDIHKSVLVVTVRGKEIKTETRSFDAFTESILSLQAWLKSLGITHVAMESTGVYWKPVYNILEEDFEIILVNARHLKNIPGNKTDKKDSRRIAKLLLAGLLKASFIPPKPIRELRDLTRYRRRIIEQAASEKNRVHKILEDANIKLSSVVSNLSGAIATKIIDTMIEGEGNPEKLAKLRHGRMKASEEELIKALTGNLTTHHKFMLKMVKQSIKDKELLIKELDKQIDNKLKENEMVLDAELLSTIPGVDKESAACILSEIGNNMEQFPDEQHLASWAGLCPGNNESAGKKKVHEPRTAING

SEQ ID NO: 173987 - protein, 429 aa, unidentified
MRTESTPGARGPVFCGVDTHADSHWLYVLDWRGRRVLSRRFPADAAGYEALAGAIAAAGEPACVAMEGTSSYGAGLTRHLASLGMPVREALSPARTQRRRPGQGKCDEADAERAARAAMSGSKLGTPKSQDGWVDGVRCMLAARSGAVKARTSAINTARSLLTTAPEGLRSRFRGMGGPRLMEELPSVRAEGALGAALGALADLWAAARDAALDMERAIEASLEENCPALLAMYGCGPVSAAKLAVAAGDNPGRLRSEASFAAICGACPIPASSGKTVRHRLNRGGDRQANSALHEIARQRVMRDPETAEYAERARGRGKSDREVMRCLKRYVAREAYRALMHPHEIRRPADASELVAARRAARVSQVRAASILGTSEKYISMLERGQRDLKPIRRAYEAWVEAGLPLDWDRQAFEAERKLDSKKHLAK

SEQ ID NO: 173988 - protein, 426 aa, unidentified
MAVVMIGVDPHKTSHTAVAISPAEEPLGQLRVRAPAVQAERLLGWAQAWPERAWAVEGAGGLGHLLAQQLLSAGERVLDVPPKLAARVRLLATGNVNKNDPDDARSVAVAALRSAQVREARRDDHATVLKVWSKRCQDLGRARTQVACRAHQVLCELVPGGVPGEITAGQAGQVLASITPAEAVQAARCELAAELTEDLRGVDIRIRETRKKLTEAVRAAGTCLTGLFGVGPVIAAAVIGDVRTVSRFASRDRFASYNGTAPIEVSSGGRKACRLSRRGNRRHGHAIYMAAVTQIRYRHTKGRACYDKKLAEGKTPKEALRALKRQISDAIFACLQEDARRAAAAAGKSPGGQPGNHSASRAAGSHPDHRLFGQATPGPASHPTTAAPFPAPLPSRASEGPGQGPGAARPRSGARRASSTRPPASR

SEQ ID NO: 173989 - protein, 409 aa, unidentified
MQVLHPRCAALDLGKDVLVAGVRLQEESSVQRACRTYRTTRTQLLDLADWLTSLGITHVVMEATGSYWKSVWNLLEGRFELTLANPAQIKNLPGRKSDVNDATWMADLHAHGLIRGSFVPPPPITALRELTRTRKQFVREISRHTLRIQKLLDVANFKITGPISEILGVSGRRIVKALIAGETDPERLAALADPHLKASRAELVETLQGELSPQQRRLLKMHLKLIENLEMAVAQIDRDIAKAVDPFRELVDRLKGVPGLSDISAPALVAEIGVDMTRFPTARHLVAWARLCPRLDESAGKVHSRRILKSAAWVKTLLVQAAWCATRTRNSYLRAQFLRLRARRGAKKAIVAVAASILTAVYWMIRDGQPYRDLGFNYFQASDNNRFVRRSVARLQQLGYVVTLTRGAA

SEQ ID NO: 173990 - protein, 341 aa, unidentified
METTRHIGIDLHRNKFTCCMRVENGRSYLSEWKLENLPRFVKKLRSTDEVAVEVTGNTRLFHDAVAPHVARVAAVDPNQFRVISHSVKKTDPNDARNLALYLSKGLLPEVRMKEKTQAQIASLTQTRDTLVKLRTALKNKVNNILSAHGINLEKEALSSEKKLNEVLAMQFDPMIRIELKVIVEQIRSLNQSIAELEKTITEEGQKLQGHKNLTSIKGIGPLTGSILLSVIGDIHDFADEGKLAAYFGIVPRVSNSNKTERSGRITKRGSKIGRTALVQCGLIAQRYSPYLKQFYEKTKARRGTGKAIIALARKLLGIIYRTLKNNWIFKDFPNFVLAEKS

SEQ ID NO: 173991 - protein, 344 aa, unidentified
MECYVGLDVSLKQTSICVVNEKGLVVREGVVDSVPEAIAGFVRSKAPGAVRVGLETGPTATWLWTELARLDLPVICIDARHAKAVLKMQVNKNDRNDAAGIARIMQTGWFKEVHVKDLDSHAVKALLASRALLVKIKRDLENQVRGLLKNLGLVVGHGTFNVFAVRAKELIADRPELTSAVSPLLTARTAIEQQIGELDRQVLKLSRQDAQARRFMTVPGIGPITALCFKATIDDPARFRRSRSVGAYIGLTTRRHASGELDWSGRISKCGDAMLRMYLFEAAGVLLTRVPKWSALKAWGTRLTKRNGLRKAKVAVARKLAVILHRMWVDGTEFNWSNNKEVAA

SEQ ID NO: 173992 - protein, 410 aa, unidentified
MEVIHERCCGLDIHKKTIVACLSLPGAKGAATTTVRTFGSMTADILALSDWLVAAGCTQVAMESTGVYWKPIWNLLEGVFTLLLVNPRHMKAVPGRKTDVTDAEWVASLLRHGLLTGSVVPERAQRELRELTRYRTTLVRERTAEANRLQKTLEGANIKLASVATDILGKSGRDILMALIAGATDAAALTQYTQKRLREKLPALEQALVGQFGGHQRFMVAQQLAHIDFLEATIAAVSAEIAARLQPADDLVERLDAIPGIGRYVAEALLAEIGTDMHRFPTAGHLASWAGMCPGSNESAGRQRGGRTRKGNAWLRAQLVQAAHAAARKKGTYLEAQYRRLAARRGKSRAAMAVGHTILVIIYHLLRDGTVYEDLGPHYFVERDRQGAERRLVHQLEGLGYTVTLEPRAA

SEQ ID NO: 173993 - protein, 318 aa, unidentified
MNTNTLQNINVGVDTGKSQLDIYIRPLDIYFTVPNTDKGISDAIKTIKKHKPQRVVIEATGRLEMPFILSCDKAKLPYVVANPLRIKRFAEAIGQRAKNDRLDAALIAHYAERVQPELTKLKSENIRLMSDLVTRRNQLLTMQTMERNRLQILPKNISSTITPILTALKNQLEKVEAKIAKLIESCPEYQAKSTILQSMPGVGKVLAASLISNVPELGFITNKQASSLIGIAPITRESGRFKGKRMIKGGRPQVRTVMYMAMMSAIQCNPVFKATYERLLAAGKPKKVAIVACMRKMVVILNSMIRDGVMWDKNSAPN

SEQ ID NO: 173994 - protein, 346 aa, unidentified
MNSMNYIGLDIHKKSISCCVRQADGTIIQESTITATRHALDGWMRQLPDPWIAGMEATLFTGWIYDHLVSGGALVKVAHPAMLQAIAAGKKKNDRVDARKIADLLRCDYFPECHMASREIRDRRRVLRYRNLLVRQAVQMKNKVSGLLMEAGVPYNQQKVHQKKYFAALLQTQKQEMPPSMPELLRLSRSTVEALTGMQRQLIRALESDALLAARVERLASIPGVGRVVALTWALEMGDISRFASVKKAVSYCGLCGAEKSSGGKTERTPISKQRNKHLQTMLIEAAKLAPRWNAELALVYEHAKQKGNRNRATLAVARKLVAYLMAVDREERPFDTHLSVAGNAA

SEQ ID NO: 173995 - protein, 351 aa, unidentified
MKQLTSQPDDFAAFVGLDWANAKHDVCLQAADTNRREACVLQHKPEAIEEWVSALRQRFQGKPIAIALELDKGPIVAALQKYDGLVLFPINPLTLARYREAFTTSCAKDDPTDAQLQLELLLKHRDKLNRLRPQSVDMRVLSQLVEDRRVLVNNKVRLLNRLTSALKNYYPQALEWFNEKDTALFCDFLERWPTLKAARLARRSTLVRFFHEHRVRCAELIDRRVQAIKNATPLTTDEGIIMPKRLLVEVLLSQLRAVRQGIERFDEVIAERAHHHPDFALFAALPGAGAVFAPRLLVAFGELRERYADAAALQKYSGIAPVTKRSGNACWVHRRYQCPKFLRQTFVEWSV

SEQ ID NO: 173996 - protein, 325 aa, unidentified
MTDVHVVGLDIAKSVFQLHGLDEAGTIVLQKRLTRARLLPFFEKLSPCLVGIEACATSHYWAREIAKFGHEVRLMPAQYVKPYVKRQKNDMADAEAIAEAVTRPTMRFVAPKAPQEQSAMMLHKVRLMLNRQLVMLTNAIRAHMAEFGIAAPVGRIGVDRLLKVIEDGTDERLPAAARQCVQMLVAQLSLVKQQILENDRQVLGLARSTELGRRLMEVPGIGPLVASALIACVPDPSVFRCGRNMAAWMGLVPRQNSSGGKERLGSITKAGNRYLRQMLFTGAMAVIRRAMQSSAAHGSYVYLSAVSRRLLPSHWQTRTLGSHGP

SEQ ID NO: 173997 - protein, 407 aa, unidentified
MLFIGDDWAEDHHDVEVQDEQGRVLRRARLSEGMAGITEFGELVGRLLSEDGQAADVLVCTETDRGPWVNALIAAGYRVFSVDPKQAHRHREILSSSGAKSDKGDARGLADMVRTRRHQLREAGGDSEIAEAVKVVARAHQTMIWERTRHMLRLRAALREYFPAILAVCDTVDLSLTSRPLLVLLDKAPTPELAAKLTARQILPMLKGCRNKDAKAAQIQQILRGENLGQPPVVTRAYAASVRSSVAVLMVIVEEITHLETEVKAHFGQHPDADIILSQPGLGPILGARVLAEFGDAPGRYRSSKDRKNYAGTSPITRQSGKMRIVAARYIHNNRLVDALQGQASCAILHDPDVRGYYDQLRARGTKHNAALRPVANRLVGVLHGCLNTRTRYDRNTAWAHRHTAAA

SEQ ID NO: 173998 - protein, 425 aa, unidentified
MNYKQNEKINQVKESTLVVGIDIGSTTQYARAFDWRGIELGKVFTFSNSREGFESFKAWMQHLQDKYRKSDVIVGIEPTGHYWFDLGAYLEDEGILLVMVNPYAVKQTKELDDNSQSKNDRKDPKVIAKLVTEGRYSAPYTPDGVYADLRIMVANRKRLIREMTQIKNRFARWFAIYFPEYTDVFGDYEAQSSMLLLKKVCTPEAIVELGAEKINQIWRDAKLRAVGMKRATTLCETAKRSIGLKKGSSAAQYEMKLLLEDYEYKKAQLDAVMEEIEKLCRKIPESEQMLAIKGIGVITVAGFLAEVGDVRRFESPRQIQKLAGLSLRENSSGKHKGQTTISKRGRSKLRAVLFNAAIPLIATNPEFKSLHEYYTTRANNPLKKKQSVIAISCKLIRVFYAILANGVTYDAQKMLSDIHRQPQAA

SEQ ID NO: 173999 - protein, 337 aa, unidentified
MKRYLGVDLHRTQFTVCTRLENGRTYLRQWPMQELKLFAAELRPEDEVAVEATGNTRLFYDAVVEHVARVGVVNPGQFKVISQSVKKTDKNDAELLALYLAKDLLPEVRMKDKTQRSLGHLAGTRDLLVKQRSALKAKINNLLSAEGINLKREALSSNKALERVLALPLWPLLMAEARVLVSQIRSLSASIAELEGLLEEEGPKLAGHANLMSIKGIGPVSAAVLLSVIGDIRDFADPGKLAAYVGLVPRVQNSNETVHSGRITKQGNKLARTCLVQCALVAKRYSPYLKNFYQRIQRRRGGGKANIALAHKFLGVIYHTLKNNWVFEDFPNFVLAS

SEQ ID NO: 174000 - protein, 428 aa, unidentified
MTIVNANAAGIDVGSKSHFVAIGQRAEDVREFHCYTSNLKELCLWLKEKGITTVALESTGNYWQALFVLLQNFGLNPIMVNGKFTKNVKGRKTDVQDCQWIQKLHTLGLLEGSFIPDLFTEKLRQYCRHRQNLLENAADYIKKMQKALRLSNIRLDVAIRDIVGQSGRAIIEAIIAGETDPRKLASLAHWRVSKSEDEIAEALTGDWRHEYVFELKQSYDLYKYLHAKISECDKEIENILNQRVEEMEKIDGEQRAKYTGKVRRLKKNDPDFNLQELTFQMSGAVDLGAIEGVGRSTIMAILSETGIDMGVFPTAKHFASWLHLSPNNKISGGKIISSRTFKAKNRLADALRHAANAIGNMVKPSALHQFFKRIEYRKSRIGAITATARKLAVIIWNMLTNKQPYQPLVQHEYLIKVRNNQVKTYNGR

SEQ ID NO: 174001 - protein, 425 aa, unidentified
MPFALGKKSLQLKQGETICNDPQVCRIVDLPVYYELETNNGNRDYRIQIGGHYMNYNTVYVGMDVHKESFTLCSCKYEDEKASHYQRTPASYKNVLRYLEFLRTIYGEYTRFVCGYEAGCLGYSLYHQLENFNVECVILAPTTMLEQRSKRRIKTDKRDAEIIARSLAQHNYSPVHIPTETDNQTKEFIRMRDDHKAELKKIKQQILSFCLRQGYQYDGSGNWTAKHVKWLRSLKPAGLYKEILDEYLLTYTILTDKLNRLDQRIEELASKEEYKESVSKLTCFLGIKTHTALSVIVEVGDFQRFVSARKFAGYLGLVPGQHSSGDDRNGLGITKAGNTHVRRLLVESAQSYTRGKIGYKSRVLRSRQAGNSPQVINYADRANERLRRRYYKMVLKDGKKYNIAKTAIARELACFIWGMMTDNIY

SEQ ID NO: 174002 - protein, 407 aa, unidentified
MFVGIDWASTEHAVCVLDQTGKTVRAFRIPHSAPGFDDLVARLRRLGAPAGLPVAIERPDGRLVDRLLEAGHPVVPVRSNAIKAWREGEVVSGAKSDTGDAKVIADYPRLRHRQLRTLTPFSDATRALRAVVRARGELVRQRLAASNQLTATLDAFWPGAKAISPDIQREIALAFLERYPTPESTIHLGEQRMAAFLTRHRYCGRTPAAELLARLRAAPAALAGGAEATARRDAVLAFVSVLRALNQAIRDLDRSVIARLGEHPDSKIFASLPRSGQINAAQMLACWGDCRDAYDGPEAVAALAGIVPVTRQPGKHAAVSFRWACNKRFRNAMATFAHNSRLASPWAAKVYADAIARGHDHPHATRILARAWVRVIWRCWIDQVAYDPVKHGAAQRLAEQPANAAAA

SEQ ID NO: 174003 - protein, 339 aa, unidentified
MRKVALDLAARKIAYCEVANEQVLERRTVSSIGRLEDLLGSDSPPARVAIEACREAWHVHARLQDWGNEVLLVDTTRVKQLGVGQHGRKTDRIDAEVLALAVERNQIPTAHVLSPERQQLRMQLSVRRALVMTRAEYVTTVRGLVRAAGGKLPSCATAHFVKHVRQAKLDNAVSDLVAPLLDLLDQLNAQLAQLELQLEQKCADEPVIALLMTAPYIGVVTAAAFVSVIDDAKRFGGSRKVGAYLGMVPSEKSSGDRRRLGSITKKGNSYVRSLLIEVSWGILRHRSDDPLYRWTQAVAKRRGKRIAVVALARRLAGVLWAMWRDDTAYDPQCEHDRVN

SEQ ID NO: 174004 - protein, 318 aa, unidentified
MNIEMNQNINVGVDTGKFQLDIYIRPLDIYFTVTNDDKGISDAIKEIKKHKPERIVIEATGRLEMPFIIACVKANLPFVIANPIHIKRFAGAIGQRAKTDKLDAQLIAHYGEAVKPKLSTLKPDIMQSMSDLVARRNQLLVMQTMEKNRMQILPQHLAMTIKPVLIVFKNQIEKIENKIVSLIESCSDYQAKNIILQSMKGIGKIASASIISNLPELGYISSKQASALVGVAPMNRESGRYKGHRKIQGGRHQVRTVLYMAMMSAIQSNPVFKDTYQRLVSAGKPKKVAIIACIRKMVVILNSMLRDGVMWEAPKAIN

SEQ ID NO: 174005 - protein, 440 aa, unidentified
MEEEKISMEIVNPHAAGVDVGSRSHWVAVGQQEKDIREFGVFNQDLFDMADWLHEKQVKTIAMESTGTYWQNLYAVLISKGFHVILCNGKFTKNIKGKKTDVKDCQWIQKLHSLGLLSSSFLPDGKTEELRTYCRQRANLLHQAASTSRKMQKNLRLLNLRLDVVVKDICGLTGLLIIRAICNEETNPQKLAALRHGNCRKSEEEIARALQSNGRKDYLFALRQELDTYDHLQKKIQQCDEEIEKMLEQIIKSDDNKHQHHIDPKPHKRINKNTPENIYLNLKSYQMFEGTDLLAIEGVSFSTVLALMSEVGVEGIRKFPSAKHFCSWLRLAPNNKISGGKVLSSKVPKGSNRLKIALRNAANAIGNLKESTPLRDFFQRINFRKGRVSAISATARKLAVIIWNNLPRSFGVVVKGTPYNNPEGYLYLDQKRKLGLVKRI

SEQ ID NO: 174006 - protein, 413 aa, unidentified
MTDQRTWYAGVDWGSQNHQVVLTDHDGRKIGEKAFKHSGEGLRDMAAWLLSASGAVDAAQVLVAIEVPHGPVVEALIERGFKLFVINPKQLDRFRDRFGVSGAKDDSRDALVAASAVRTDRHLLRALERADPAVVELREWSRIAEEIGAERVRLANQMRDQLWRYFPAILDLDDDLGAEWLLELWETAPTPAKAARLREAKIANLLKRNRIRRLDGAQVLAILRQPPLQVAAGTTEAASAHIATLIARIRLINRQIKEAHRRIDELTDRLSPETEPGQDEQHDAKILASLPGIGRINRATLLAEGHDALQRRDHAALRILAGVAPVTKQSGKSRIVHRRLARHHRIANAVYHWARVAVQHDSRSREKYDALRKRGHNHARALRSVGDRLLGVACAMLKAGTLYDPKFGDEQQA

SEQ ID NO: 174007 - protein, 442 aa, unidentified
MPTRKTPTLTVAPLPVQIALDRGDHEMHAAVLPPGATRPVQEIFKTGAETLHGFIRRWQQAHPGHVLEIAFEQPAPGLLHALMDLPGVELYPMNPSQTARYREVLNSSRKKDDATDALVILELLKTHRQHFPKWEPESPSIRRLRLLVEGRRKAVDERTQAVLSLIGLLKIYYPQALELCGDNVHGPITLAFLKRWPTLQALKQSTAATIRAFYYGHQVRSRKAIEARLSLVEKAEPLTSDAPLLEACGLRLGLLLDQIRMINVHVASYENQIDALAVEQPQYAIVQSFPGVGRVIGARLLAALGSRKENLPHALNLACMSGIAPIVKRSGKSTSTQRRMARPVFLHQTLMEFAESSIKSCLWAQAFFRLKRAQGKGRWESVRALAYKWIRILHHCWRHDIPYDDNRYLAQLRLKGSPLLPYLDQLLAAPNTTSILNKPTGM

SEQ ID NO: 174008 - protein, 350 aa, unidentified
MLTDLVDHVLGVDPDRDRITVAVVAARNQGVVASNTFPTTPRGYRAALRWAAEHTEQGRRAWAIEGAGGYGAGLATTLTAEGEHVVEFDHPSARPSKDGAKTDALDAIRAARETLGRTSWATPRSRGAREGLRTLITARDSAKVARISAINVLKALIVTCPVKLREELRRLPLGQLVSRCQRFRFDTATDPELAATKLAMRSTATRIHHLTIECRDLEKAMEPIVAALCPRLLTEPGVGVLVAAQLLVSWSHPGRCRSEAAFARLAGVAPLPATSGQTQTRHRLSRGGDRQLNRVIHTAVLTRVKTDAGTRDYLARRVAQGKTKREAMRCLKRYYARHLFRLLEAAPMTT

SEQ ID NO: 174009 - protein, 337 aa, unidentified
MDITLLAIDIAKNVFHCHGVNGKGKQLLRKKLTRKQLLPYMANFPSCTIVMEACGGANYWYREFIKLGHEVKLINASYVKPYVKTNKNDYNDAEAIAEAASRENMRFVSPKTIEQQDIQSIHRIRKNLVENRTGLSNQIRGLLAEYGVIFPQGIRYIRNQISGVLEDAENDLTMLTRELISDLYGQLCILDEKIKEYDQRVKLIFKQNEACQRISCIEGVGVLTATALIAAVGDPNVFKNGRHFAAWLGLVPKQKSTGGKQVLLGISKRGDSYLRSLLISGARAAMKFLDRKTESKYDWLKAVVGRAGRYKAAVALANKNARVIWALLASGEAYKAA

SEQ ID NO: 174010 - protein, 348 aa, unidentified
MTLTTIGLDVAKLVFQVHGVDENSRAALKRKLHRHEVVTFFEELPRCTVFLEACGASHYWARLLTALGHEVKLIAPEAVKPFAKKGKKNDAVDAAALCVAGSRPEIQFVPIKSVAQQAVLALHTARSLLVKQQTMLANAIRGLASEFGLVVPQGLHRLEELMVQVTAEASVPAEGRQALIVLHAQLQAAAERIVMLEEQIVVHARQNASARRLATIPGIGPITASLIAATVGDNITAFTSARHFAAWLGLVPRQHSTGGKPRLGRITKAGNTEIRRLLVLGATSMVRRAETWNSAAGIWLRCVLARRPVRLTTVALANKMARIAWALLTRNDVYRAQGRSKVAAGAAA

SEQ ID NO: 174011 - protein, 362 aa, unidentified
MLKSTIIIAFDQHAATTVAAVLWPGHQTPALHTLTSEPAKIIRFIERVRQDVAVQCCYEAGPCGFELQRALTARQIPCDIIAPALIPRRAGNRIKTDRRDAGQLAILYRAGALTAIHIPTEQEEAARDLLRCREDIRADLLRARHRLSKFLLRHGRRFTETKKAWSKRHDAWLRAQCWPLTALDQTHRAYLRAVDEIVARLRDVETELRALLDLEPLRGRVQRLRCFRGIDDLTALTVAAELGDARRFATAPRTMAFVGLVPSEYSSGTKRAQGGITKTGNAHLRRVLIESAWHYRHHPFVSAALRTRQRGAPPDVIARAWAAQQRLHRRYQRLAARGKPTQHIVAAVARELTGFIWATLTQ

SEQ ID NO: 174012 - protein, 414 aa, unidentified
MTMVGGLDVHRQQITFDYVDNDGLVHWGQIRPATRKTLRGWLAEHCPDGDTEFALEGCTGWRYVSEELAAAGLGVHLGDPAEIAALRGPKKRAKTDRADARLLRTLLVEGRFPESWIPPAHVVEVRTLGRLYCTLMDERRAWQQRIHAQVFHQGCPPIRALLTRAGREALAGAELSAAGRQYVDTALRRIDELSAEIDPLRTQLIGFARRQPGCRALQRHYGVGWLCAVIIWAEIGDARRFGSSDQLVRFAGLDVTVYSSDAKRSPGHLSRQGSPELRWAAFEAAKSAARRGSPDHGYYHKLAAKHDGHNGKNPTLAVERKILRRCYHTLRELGDAALALPISDRRRWPPEMRCARALPINQLMPAASSRNSPAATSPLWGGPPAKTERPHPFGSPHAGTPSIIMSPDLVRGPR

SEQ ID NO: 174013 - protein, 363 aa, unidentified
MFIERTSVGLDVHARSVAAAAIDGVTGEIVQTRLTPSHEHIRSWISELPGPVAVAYEAGPTGFGLQRALTEVGIRCEVVAPSKLQKPSGDRVKTDARDALHLSRLLRLDEVTSVSIPSVSQEAARDLVRAREDCRGDLMRARHRLSKLLLRHGIVYYGGQGWTGAHDQWLRTVAAPQLRSAATRMAFDADYDHVLTMQARRRRLDAAIEEIAKDCEFTPIVRRVSCLRGVSTLTGFALAVEIGDWDRFTGNTIGSFVGLTPSEHSSGSSRVLGAITKTGNTHVRRLLVEAAWHHRARYRVGAVMRSRWDLASPAARARGDEGNRRLHGRWVGFLERRKRPTVANVAIARELAGWCWSLAVMQD

SEQ ID NO: 174014 - protein, 327 aa, unidentified
MEPAYIGIDLHKAFFQVCAVNGAGERTWEQRWPTTDAGIAALLTRCDTQSRLAVEASSPTWAFVDRIVDHVATVTVVDTRKTRIKAGYAAKTDRLDAQRLADALRRDSVVGIYYPSPAIRDLRELCRYRCHLARLQASLKQRIHALLLRQGVDAPRALFTKRGTQWLEGCSLAGWAGHELQGLRRVMTDVRTQLVPVVAAIRTIAATDPVAHALDQRRGFGPVFSVTLRAEVGTIRRFPDGPHLASYAGLVPRVERSAGHRWTGRITKAGSPWLRWVLIEAAIHQFRRQDAFGRWARRLAVKAGMLKTRVAVARALCTEVFEAWPRE

SEQ ID NO: 174015 - protein, 434 aa, unidentified
MSEFLSDFVVGIDVSSEFSVVAMLEPNGSLIRKPFRIDHNPAGFNKLLIILKKEEERLKQKPIYFVESTGIFHLPLFFFLKSNDLKGFVLNPLCVHSTKNFNLRKVKNDEKDAESIARLAKFQNVKYSLVPEPQILALRMLLREYYSISDMLTELKNRLCTDLYLLFPGYLDVFSDPFGKSSLKILRDYPTPEAILSESPDTLAKMMASISRKGLIWGQKKVAKLVEMAQLCLSMPMEFSILSRKIQFHLDGIEMFQNNQVGLKEQLVGMVSDVDFPKTVRESIALLEAMPGIGFMTAATILAEIGDFSRFHSPKALVAFFGIDPSVNQSGKFNGDRNKISKRGTRLGRRVLFTAALGSIRTTSKGDPINPILRDYYQNKCLNKKKKVALVAVMHKLLHYIFAVLRDQKPFEFRSPEDHQSWRNSNRSSLTLVA

SEQ ID NO: 174016 - protein, 419 aa, unidentified
MKYFVGIDVSKEFHVVNVIDEDERRVLKNYKFLNSKDGFDSFKSKLSSLSKDKDSFVLGLEATGVYGENLYDFLSLNGYNIKLLNPFQTSRYRQNYTMKSVKNDNIDSLYIALLLKDDRFSSGYVASEEYMALRVLYRNRNSCLKESKEIQKRILSILTVTFPEFEKFINPFSVSGLTLLKKYPTAAHYKGVSANSILKLFRHIKGNNFSKEKATKLLELAKNSVYSGKAKKERAIALNSLIRLYEKYQEEIDTLDKEIDSLLNSDSLSNEDKATIQEAKQRAESIIKNLHTIPGVSTKTISAILGECGDLSRFPTISKLLGFIGLHPTQDSSGKKESFGHLSKRGNSTVKHALYLSSVSCIRHNSELKKLYNDKRAAGKSKKEALIIVSRKLITIIYSIFKSNKPYNPSRVFSMVRQW

SEQ ID NO: 174017 - protein, 406 aa, unidentified
MELEALHKRVVGLDVHQAQITACALIEEADGTTRIERRQFGTFARDRRELADWIASLHPDEVVMESTGIYWKSPYAALEKVGIRAKVVNARHVKNVPGRKTDVADAHWLAMLSRAGLLRASFVAPALLRELRLIARQRQKLVGQLASEKNRLHKVLSDGGVRLGVVVSDLHGQTARTMVKAIIAGQSPHQILELAGRRLKASREELFDAIQGELSASHCFVLDELMRHIEEIEARIARFDARLLDGLRSEHPALALLQTVPGIDLIGAAMLLVEISTDMDAFGHSDRLASWVGICPGNNESAGKRKSGRARKGNPYVRRLLCEFAHAASHTRSVFKAKFQALLPRRGYKRAIIALAHKLLRTVYFILKRREHYRDSVVDYEALAVQRNAPRWIKALVKHGFLNSAA

SEQ ID NO: 174018 - protein, 390 aa, unidentified
MYRSDGSFTTHRFSTLLDGLTALREWVVENRCERVLMEATGVFWIPPYTALESSVEVYVVNPLSIKYLPGRKTDTLDAVWLAEIALNGMFKASYIPPRDVREFRELTRTHRKLVEERTAHKNRIHKILERSGIRLSGVLSDIFGKSGLLVITGLIEGKPIEQILATLHDSRILKKRDAIERAICGDLGENEVFIIQQSLESIKHVNAQIAQYEERILRTLARDEESLQIVTSVPGIGFKVGAVILAEIGNISQFDGPKNLVSWAGLAPTVYESAGKTAHGHITKRGSKYLRTVLIETAQVIANGKPNRLKQFFLRIRARKGYKMAIVALARKVLALIHHLLINRERYLDDPGTVKTVNLPKIRPNREMDHDEMIQLLTQAGYVVQKLNAA

SEQ ID NO: 174019 - protein, 391 aa, unidentified
MVCVGIDVAKDKHDCCILDSDGTIRADCITIPNNMDGFKQLLQTIRDCTKKSDKIKVGLEATGHYSYNILGFLLDNDLAVYVMNPLHTNLYRKSLSLRKTKTDRVDARTIATMLLSDVDLKSYTDTAYHNEELKSLTRYRFEKVQERAKLKQSVSRLVTILFPELEQLVPTLHIASIYSLLGEYPGAKQVSEVHLTKLTNLLVTASKGRYGKDKAIQIRDAAKTSIGSVMPAKSLELKHTIKLIRELTSEIDEIEDSIQQIMDELHPPLLSIPGMGIHSAAMILGEIGDFSNFESPDKILAYAGCSPSTYQSGKLTNCYAHMEKRGSRYLRYALYNATKYVCYWNPVFAKYLAKKRAEGKHYNVALSHAMKKLVRLIYALQKSGKAYLTAA

SEQ ID NO: 174020 - protein, 332 aa, unidentified
MNMHPQGGVANLDRRANAGIDVSKQHLDACWGDVELRVLNDASGWDELAARLKAADVDLVVVEATGGYERGLVCALQGAGLAVARVNPRQARDFAKSMGVLAKTDRVDARCLRDFADVLARHKDRAKYITAAAEPLRVELAAMVTRRRQLVEMRVAESNRLALAGKRAVLSIKTVLRTLDKQLAQLDSDIDDFLGEHFAAQRALLDSVKGVGPVTIMTLQAALPELGRLPRRQVSKLAGVAPLANDSGQHKGKRQIWGGRSEVRAVAYMAVLSAIRYNPAIKLFYDRLIAAGKLPKVAIVACMRKLLTILNAMARDGAFWDPLKHEQATKNA

SEQ ID NO: 174021 - protein, 398 aa, unidentified
MIVQGTSVGLDVHALSVVAHAVDEETGKVARARLCPDHGEVLGWLHQLRAPVRVTYEAGPTGFGLARAITGAGMECLVAAPSKLQRPAGDRVKTDARDAAHLARLLRLGEITAVRVPEREIEAVRDLVRAREDARADLMRVRHRLSKLLLRQGIVYSGGTPWTCVHEEWLRRHRFDDIHLKAAFDHSFDAVLAATAARDRLDEQIMVVAASPRFADPVNRLGCLRGISALTGLALTVEIGDWSRCSGSSIGAYVGLVPCEYSSGNSRVQGSITKAGNTHVRRLLIDRPGITASPTAPLDPPCGPAGPRSTRRFGLAGTPATGASTSGGAASPNAARTHWSPTSPSPANSPAGAGLWRPCTKPASTQTWLIQVTRRRRGERTNLQRTYEPQRDSHGNRE

SEQ ID NO: 174022 - protein, 340 aa, unidentified
MLYVGLDLHTKQITSCVLNNEGKLHERWQVPQVDQLIERLTRFQQPFKVTYEAGCGYGRFHELLAPIADQVAVAHPGLLKIIYGSKRKNDRHDAEKLAKLLYLDAVPAVHVPSADVRAWRELIVFRHRLVEKTTRAKNGLRGLLRTLAIRPPRTPSLWSQEGLVWLKALPLPHSLQTLRRNLLVDELESLKRQTAQVEQELARFSAHNPAIRRLRTIPGVGIRTAEAVAAFLDDPQRFQHSKQVGAYFGLVPCQDQSGDKNRLGHITRDGSATVRQLLTEAAWQATRRSPTVRAHFERIHGGDRARRKIALTATAHYLVRVMWSMLRNERDWQERIPRES

SEQ ID NO: 174023 - protein, 342 aa, unidentified
MLYVGIDIAKNKHDVTALNVPGKTVLKPLTFSNNKAGFELLDLSLRQLNQDCLIALEDTGHYAFNLLNFLHEQGYKVYTYTPLLIKEFAKSLSLRKTKTDKKDAHGIALKLLSDPNREQFQHDNRQVELKILARHIHRLKKKQSDWKVQYTRCLDIIFPELDKIVGKHSEYTYQLLTRYPNPQKRLEAGFDKLIEIKRLTASKIQDILSVAPRSIGTTSPAREFEIIENIKHYKRLIDKAETCVNDLMAEFNSVITTVTGIGGRLGAVILAEIRNIHAFDNPAQLQAFAGLDSSIYQSGQIDLAGRMVKRGSPHLRWALIQAAKACARFSPAFKAYLKTKLE

SEQ ID NO: 174024 - protein, 392 aa, unidentified
MYIVGIDIGKNHHEASIVSPEGKQIGRSLRFATTHKGADSLMSFIFKNIGNSPCVFDMEATGHYWYPIYSFLKAKGYTIYVINPIQSDSLRKMYIRQTKNDSIDSFLIAEVIRFGQFGTTSMADENILAMRQLCRYRDSVISSRTEIKLRIGTIMEQIFPEYEKQFSSLWVSTSMGILEKYLTPENIENAPIDELFEIIKDKSHNRLTRAKAISIKEAAADTFGIKIAQDAFSFQLKQLIDRMNFLDKQIEALDCQILEYYEKFDCYLHTIPGIGIIGAATILAEIGDISRFKNSSSLIAFAGIDPTVRQSGEFNSTHNHMSKRGSPYLRHAIFLAATTCSFHNSPLNAYYKKKRDQGKHHLTATGAVARKLTTVIYAVLRDSKPYEPKSFC

SEQ ID NO: 174025 - protein, 354 aa, unidentified
MNVHQTQTEFNCGIDLHAKSMYICVMNREGEILRHQNIKNNDFAYFLKVVEPFRHDLTVACECTFNWYWLCDDCYDAEICFSLGHALYMKVIHGTKTKNDRVDSKKIAHLLRSNLLPKAYCCSAERRPARELLRRRIYMMRERSALLAHMSSAVQTYGQDTLTTAEKRKNDRQELIPKRFDNELLKLSMQVDVEMVEQLDMQIAKMEKTIVKHTKLTSSAEYNLLKSSPGIGTILALIILYEVDDISRFPTVGDFCSYARLAPNNAQSAGKTVGKQGRKMGNQYLKWAFTQAVVLTKSSNSPLKRYCDRLTAKHGKLKSNTVMAHRLARAVYFMLKRGQVFDMKLFLKGKINMT

SEQ ID NO: 174026 - protein, 345 aa, unidentified
MELHTIGIDLGKTVFHLVGLNLRGEVVVRKKFSRKQLLHFTANLQVELIGMEACGGAHFLGRALREQGHEVRLMPAQYVKPYVKTNKSDYIDAEAIAEAVGRPKMRFVPIKSDDQLDLQSLHRVRERWVMRRTAVINQIRGLLLERGITLRKGRCHVDEAVPGILEDANAKLSGALRVLLAQLKLELDHLQMRIDEADAVIKKTAGENEACRRLVAIPGIGPITATAIIAAIGNGAAFKKGREFSAWLGIVPGEYTTGGKQKLLGISKRGNSYLRRLFVHGARAVLQQSAKQSSGLSSWLAQLTTRTHRNVAAVALANKLARMAWAVLAKNEPYRPPMLADAATA

SEQ ID NO: 174027 - protein, 437 aa, unidentified
MQIIYSRCCGIDVHKDSVTACVLVYSESPEPEVRKKEFSTHFKALGNLRFWLFAQKVTHVALESTGVYWKPVWEALEGHFQLILANPYQVKNIPGQKTDARDSQWLAELLAHGLIRPSFVPPRETRNLRDLTRYRVKLTEERNRIHNRIHKVLEDACIKLDTVASDILGASGRAIIQGIIAGQEHPDWLADKAKGTLRGKQPELRLALRGRITDHHRLMLGELMDDLEFVEGKIERLEKAIAPQVDVETLARLCTIPGVDLITAWTLLSELGSDMQVFESPKHAASWAGLCPGNHESGGKRLSNRTRKGNRWLRRALCQAAWAASRKKNCYLTAFFYRKAGKHGIRKAIVATAHHLLLIAFCILRDQTEYREMGGDYFDRLHPDRTRNRLVRRLQRLGHDVVLTPRIETPPALPRPKRKIGRPCKCAERAIPCKHMS

SEQ ID NO: 174028 - protein, 414 aa, unidentified
MVVTNEFTFYVGVDWATEHHQVCILDCDGRMVRQQRIEHSGKGITEFMASMEDLAQGQVDRIAVAIEVPRGPVVEAFLEHRWAVFAINPKQLDRFRDRHTVAGAKDDSRDAFVAADSLRTDQRCFRRVSADNPAIVRIRELSRAEDHVGVDLRRTVSQLYQLLLRYFPQLLQICPTPDEPWIWTLLEVAPTPERAAKLKVQRIRQLLAKHRIRRWSAEKVAEILSAPQLPLASGTAEAVSEHALLLVPQLRLLSTMRKQVADRMEALLDEMAATSGDSPETQVFRDVAVLCSLPGIGRVVSGALLAEAAGPLRQRDYYAIRAHGGVAPVTRQSGKTRQVGMRYRCNTRLRNALYHWARTSVQHDPRSKQQYARLRAVGHSHGGALRGTVLMAMLKSGQAYNPKRRQSNVSAAAA

SEQ ID NO: 174029 - protein, 370 aa, unidentified
MRDDSEVFVGIDTSKLRNAVAVAEGGRGGDVRFLGEIESSATATAKLVRKLAARHRRLTFCYEAGPTGYGLYRQIRQLGHECIVVAPSLIPRKPGDRVKTNRRDAVGLAKQLRSGDLTAVWVPDPRHEAMRDLTRARQATVEDLRRKQQQMSAFLLRIGRHYEGKTTWTKTHLKWLASQKLEHVEQRIAFEEMLLAIRQADERIERLEQAIRNAVPDWSLAEVVTALMALRGIDLISATGFLAEIGDLARFQTPRELMAFLGLVPSEESTGKRIKRGSITKTGNRRARRILVECAWSYQHPPRVSKHKQARVAAAPRVVREIAWKAQCRLSGRYRALVRKGKLKTVAVTAVARELCGFIWAIHRESFAAR

SEQ ID NO: 174030 - protein, 309 aa, unidentified
MKEQVVYLGVDVAKASLDAAMGSEKRRLANDGTGHRQLINWIKQIEAQVQVICEPSGGYERMLIQALVGAQVKVSLVQANRVRQFARAAGILAKTDSIDAEVLCAFGEAMRPQTLSASKLAQEQLRELESQRRHLSRLLVMEQNRGARLGDSSVRRLNHSLNKQIQKQIERIDLLINEHIAGSQELSAKAHKLTAICGVGPRTAALLLAQMPELGQLNRREVAALVGVAPFNRDSGKLRGKRTIFGGRRHVRHGLYMAALVAARHNPILRAFYRRLRAAGKPAKLALTATMRKLLIVLNSALKPDPLYA

SEQ ID NO: 174031 - protein, 323 aa, unidentified
MSGFVGVDIAKNTFDIATHQPNGKHKTKAKLANDPKGFKEFEAWLEKNAERSALIVMEATSVYHLELAEFVYNKGFRVCVVNPATTKAYADSELRRIKTDKSDAKLIADFAREKDQKLHPWAPEPLKYRQLKAMVRRLDDLQEMEQMELNRLDVSDEKVKDSINSVLRHIEKEIVETHKAIKKHIDDDPDMRQMRDLIVTIDGIGQKTLERLLAELGDLRKYSDPRQLVAAAGLNPKLQESGKLKGHTLISRVGSARLRAGLYMPGMVALKHNKAIKAMKERLEANGKAPKQIICAAMRKLLHFIYGVLKSGLPYDPKLALAR

SEQ ID NO: 174032 - protein, 420 aa, unidentified
MEEIAGEEAELVARVAALDIGKAELVCCVRVPHEGKPGRRRQEVRTFAATTRSLLELRDWLAGQGVSLCVMEATSTYWKPPFYLLEDEIECWVVNARDVKNVPGRAKTDKLDAIWLAKLAERGMLRPSFIPPPWQRELRDLCRYRRTLVQERTREKQRAEKLLEDTQIKLSSVISDIFGKSGRAMLEALIAGQRDPAVLAELALGRMRGKKSVLQEALTGHFRDHHGYLLRMMCDRVDALTGQVEALTVKIDEAIAPFAVQVAQLDEIPGVGKTGAQELIAEIGVDMARFPTAGHLVSWAKFAPRAKQSAGKNRPGSTGKGNPWIAGALGEAAMGAARTKTFLGSRYHRLARRRGKQRSLVAVGNSILVITWHLLSDPGARFTDLGPGWHDRFTPLRRKRQLIAELERLSGPKVILQEAA

SEQ ID NO: 174033 - protein, 347 aa, unidentified
MTEQRRSYIGECVYVGVAVHKETYTVTCVCHKQIVKTATVQAEPAGLAASLPRWFPGATLYSVYEAGFSAFVLHRVLTKAGISNIVVNPASIAVAANDKVKTDRRDSKKLAIDLADGRLRGIYVPTEAEELARLLPRTRAQIVEHRATIARQIKAKLHQVGLIAPSSRRMISNRYLREIAPWSLPPELSVSLTLLAEQWRFATRQLIEMRRLLREQAQAQQEIEQVYRSVPGIGEVAARTLATELGDMTRFANERALFSYTGLTPSEYSSGASVRRGHMSRQGSSRVRPLLVAIAWRALPRDAVLQEIFDRIAATRGKKRAIVAIARRLTGRIRACFRQGTTYAVGT

SEQ ID NO: 174034 - protein, 399 aa, unidentified
MLYLGIDLHRVQMTVSLRNENGDVILRRQVSTRWAKLDEFRGQLQQAGAAGEKFIAIVEVCGFHDWLVKWLQQDDSCQRVLVVQPLGRSATKTDRRDANALSELLWVNRERLLRGDRVQGIRTVLVPGAEEQADRHLTQLRDRLVRKRTQTINQIHKILRRHNLAWERPTKSFQTRKVAEWLQTLQLGPMDRLALNQLLVQWRLWEEQLAVTDSGIAERFQANQHAQLLATIPGVSMYIALAITCRIMPIERFPRGRSLANFLGLTPGCRSSGETERLGSITKEGSRLVRCLLAQVVLHLLRRDQTARAWYQRIKRRRGANIARVAVMRRTATILWRMLSKGERWRPGAANSETPAAAGDPRPVRLWRPRRTMLSALTACEAEAAGSSTGSSSLLVGGR

SEQ ID NO: 174035 - protein, 369 aa, unidentified
MEKGGEKENRMTICIGIDVHKKKCIATLKRDSQEIVEQTSFYNNGHGIKEFIEHIKLYSESAIAVCESTGNYWIRLHDTLEDNGIDTVLANPIKTKIIAQAKLKDDKIDSNVLADLLRADLVYTSFVPDKEHRELRQIVRTRVDLVATKTSIKNKVHAILAKYDYSCPTNDLFSQKAVQWLKKIELSWIDRMAVDAYLETLCGIEKQIKIFTAKIASISKEDERVRLLMTVPGIDYITALTIVSEIVDIQRFSTPWKLVGYAGLAPSKRESGTTHRIGDSRRITRQGSRWIRFTIVESATTAIMYDNRISKFYRRIASRRGPQKAKVAAAKEMLVIIWHMLTKKEPYRTMNNDLVQRKYKRMERESVLA

SEQ ID NO: 174036 - protein, 347 aa, unidentified
MSHKTAATGADTIGIDTGKNTLHLIGLDDKGAIVLREKIARGRIVARFANVPRCLIGIEAGMATHYVARELSALGHEVKQVPPAYAKPFRQGHKNDFRDAHAIAEAVQRPSTRCVPVKTDDQLDLQALHRVRSRLVGQRTAVINQIRGFLLEHGIAVRQGLRFLRQQLPDIMAKRSDVLSPRMVRIIEDLSADWRHLDGRIEHVTEEIEVLAQGSEGCRQLMTVPGIGPLIASAMVAAIGNGAAFAKGRDFAAWLGLVPKQMSTGDRTILGRISKRGNRYLRTLITQGARVILLRPANWTKHSFGPWLTAAANRLHHNVLATALANKLARIAWTVLMQARSYEARVN

SEQ ID NO: 174037 - protein, 380 aa, unidentified
MDSMTDPQRAIVVGVDAHTDTHDAAALDGCGRLLGTRTFAADAAGYRELLAWAEHYGQIVALGVESTGSYAAGLVRHLRAEGLEVLEVNQPHAHTRRRRGKSDPIDAEMAARHVLAANRPVIAKDTTGIVEAIRQLRVARDGAIKARSAALNALTGLVVTAPEPLRQQLLARKTTRGRATLCARFRPDPGRLHEPEQAAKAALRSLARRVADLDTEVKLFDRQLEQLVSRAAPITTARVAVSTGHAGTLLVTAGQNIERLRHEASFAALCGASPIPVSTGRTDRHRLNYGGDRDANRALHMIAVCRLRYCERTRAYAERRAAEGKTKTEVIRCLKRYIARELYHALIADLLPQRDTPRPRDPIVSITCGAGTIGRTVTTT

SEQ ID NO: 174038 - protein, 340 aa, unidentified
MDIRHCIGIDVSKNTAPADRLDWAVYAAKGIVWQTQSENSPTAIRAVIKQLQALPDFDRSNCVVCMEHTGLYNAHALEVFFQAQLPIWLEASLHIKQAGGLQRGKSDSIDAQRIAEYAYRFQDRTRLWKPARPVMKKLAEFTRLRQRLQAIVSQLKVPLNEQKRFGDKALTTQLGQHCSSSLKALLSDLKGVEKAIKQLITDDPTLKALFELVTSIPGVGQVVATELILASDEFKAINNPKKLACHAGVAPFEHSSGSSVRGKTRVNHHARKSLKTLLHMAAMSALQVSGELQEYYQRKVAQGKNKMLVINALRNKLIHRVYAVVKRGKKYNKNYTLTLV

SEQ ID NO: 174039 - protein, 343 aa, unidentified
MDHFAGLDVSVKETSVCIVDDTGRIVREVKVASEPEALLQVLTNPAYRFKRIGLEAGPLSQWLFSVLTEASLPVICVETRHMKAVLKAQINKTDRNDARGMAQMMRVGLYRPVHVKTLRSQRLRMLLTHRKLLQSKTIAIENDLRGTLRNFGLKVGMVGKVKFETRIKELVEHVPDLAVLVEPLLIVRRVLREQIGILHRRLLAIVRNDDVCRRLMTTPGVGPVVALTYRATVDVPARFRNSKAVGAVFGLTPSKHQSGEIDRMGAISKCGDAMMRTMLFEAAQAMLMRSAKWSWLKAWAMKIARHRGMKKAIVALARRLAVIMHRIWVDGTEFRWTREAVAA

SEQ ID NO: 174040 - protein, 427 aa, unidentified
MNEVERNRVDAFRQFRKRIRGSSEDLVVGLDIGKRKHHAFFGNANGKTVLKGVIVENSAEGFRHLLSQVGFYMQRDGFKRVVFGLEPTSVYHKPLAEHLIGQGHLVVYATNEAIKKNRSLLDGRWDKNDTKDSANVADLVAQGKCQYYDLPEPRLGELRSLLLFRKRLKKQVHSWRVRIGNNLVAQYFPEFDRFWKKAASENLEIVRGFLDPGSIRQLTCEQFMAKLSTARGGLRQQRRLRQIWEAAGASIGCRPAPGVQLEAELIVDTLNSLQVQLTRVERAIHQLAKGFEEYRYLKSIPGFGPYVCAVNLAAIGNPDRFENRAQVLRLGGFDLSANRSGQRSKTAVPVISKKGKADLRYALYQAALVASSSTSHFRDYFSRLLDGRQRERGIRTKMRVKIAAKMLVIAWTLMKRKEFFNPAYIQA

SEQ ID NO: 174041 - protein, 362 aa, unidentified
MFRPHTLYIGIRIVRKVFEPAFAMKDQDVSDVVRTKNRTAMKYIGIDVSKATFVVAYSCEKSGEIRTFTNTTTGIKQFIGTLPKDGSIHCVMEATGNYSALLLYMLNIAGLTVSMENPLKVKNFARAMLSTVKTDQNDARLIALYGEKMTPQPFKVQGEAVLRLRQKRTVIRQLSKQITALSNLGGSLDCLPVPDKGASHTVEETIKFLEKRRDRLQSELTGLVEAEFSRQLALLTTIKGIGITLATALIITTGGFTYFQNAKQVSRYLGICPTYEQSGSSVNIRGHINRHGDAYTRGLLYVAAWPASRFNAQCKETYTRLRSNGKSGKLAMIAVANKLVRQAFAVVSHDKEYVDGFVSNRP

SEQ ID NO: 174042 - protein, 472 aa, unidentified
MEEAAMKHNQQRARSGKKSRGSISLLERIQPDAAGIDCGQNSHFVAVPSDRDPQPVREFRTFTAELHRLADWLAQCGVKTVALESTGVYWIPLYEILEQRGFEVLLVNARDVHNVRGRKSDVKDCEWLRELHSVGLLRASFRPAATIVPLRSLMRQRQTLVEEAATRIQRMQKALTEMNLKLHTVLTDLTGQTGLKIVRSILNGQRDPEQLAVHRDHHCHASHQEIVAALTGNYRAEHLFALRQNFAAYEFHLQQIAECDTAIEKLLAKLAEQQPPPSGPLSTPRRKRGSKHAPTFDIRTSLHRLTGGADLSQIHSIGPHAALQIVAEIGTDMRRWPTEKHFTSWLTLAPNNKVSGGRLLTSRTPPSANRAAVILRRCAMSLGRTSTALGAFYRRLAARTGKAKAITATARKLAVLVYRVLSGDFIYNDPGAAAYHQLNRARELKSLRKRAKLLGYQLVNHSTGEVLSIPVS

SEQ ID NO: 174043 - protein, 348 aa, unidentified
MLIIGCDYHPGFQQIAFVDTESGELRERRLTHREEAEQFYIGLKGQRVRVGMEASGHSRWFERLLGELQFELWIGNAAEIRTKRVRKQKTDRQDAQLLLRLMIEDRFPRIWVPDSENRDLRQLLWHRHRLVQMRTRVMNQLHVVALNEGLRRKKALWRPAGRQELESFVLAHWASRRRQDLLDLLDQLTPKIQELTRALEAEVERRPVTRRLMTHPGVGPLTALAFELVIGTPERFHCGKQVASYVGLVPSEESSGDRRRLGHISKQGNVLLRFLLVEAAQVTVRSQPQWRSRFFHLAMRRGRKIAKVAMARKLAVHLYWMWRQGRDYGQLQKLGSHAGEPGNLDGVQ

SEQ ID NO: 174044 - protein, 494 aa, unidentified
MVKSKRKSYKKRQHIQKVKGRRFTDEIRNLDLEKVLVVPIDGGKNSHKALVANYFGDILHDPFEFTNSVAGVKMFHTILKSISSSIKAQKLIIGLESTGHYYENLYRSLTSLGYDVAMVNPTSVYSQRSGQLNWCKTDEIDLCAIGQVLIDNQATETRLPEGLYYNLKQLTRLRRDEVRKRARLKTQIRVLCDHIFPGLQKPHIFSDFWGKSSILLLENYPTPSSIIRLGAKRLARFFKKHNTKLGLYTAERLVNLAKNSLTTKATNLEAHLLNLRFKIADLKIADEKIRKLNLEIARYLVHTPGILLLSIKKINVSSAAEYLAEVGPLKQAGSAKKIIARAGLNPSRFQTSEYERANNSITRHGSNPLRNISLIISQNLIGLNPHSSRPCNPYFREFFDRLVGEGKDKRLAKVACSNKFIRVSWAMMVGRKLFSPPTWKKNKVNDDPLTKLKDFLFLNETKEFFEELAKIAKEQLPSHYRSPVVERPNPEKVS

SEQ ID NO: 174045 - protein, 341 aa, unidentified
MKLYGGIDLHSNNSVFNLVDENANVVLKKRISNDIEAIILLLEPYSDAVEGLVVESTYNWYWLVDGLMDAGFKVHLANTAAIQQYSGLKHGDDDSDANWLANMLRLDILPEGYIYPKEERMIRDLLRKRFQLVQQKTINLLSIQGLYARHLNMKLNSDQVKRLTERQLTIDFSDLNVRLAASTNLVMLLCLTKQIQQIERVLKQQLKLKAEFVKLTSIDGIGLILALTIMLETGDISRFNKVGQYASYCRCVNGGRYSNGKKKSKTNTKNGNKYLAWAFIEAANFAIRFNDTVKRFYQRKLAKKSIVIARKTVAHKLARACYYVMRDQVEFDVNKAFGYSK

SEQ ID NO: 174046 - protein, 417 aa, unidentified
MSLDPHEEPAAIQTHIGAIFISLELSRSKWLITSLVPGGGQRMSKHWVEAGDLAGLLARFWAIRDKVLARTGKSYPIVVIQEAGLDGFWIHRSLVKEGIESHVVDAASIAVSRRRRRAKTDKIDGEGLLRALLAFKRGEPRVCSMVRVPTPQDEDRRRICRERKTLTAERIRHVNRIKGLLFSQGIGDYEPLRRDRRRALEAARTGDGRALGANMKAQIGRELDRLELLLGQIAAIEAERDAMLARQAEAEAVQGAPARVQKPMDLNGPGAETVPEAEAAPGVQKLMELNGLGAETVAMLWTEAFYRSFDNRRQLAAFGGLAGTPWKSGSIDHEQGVSMGNHRLRQTMIQLAWLWPIHQPNSALTRWYRERTKGATKLQKKKMVVALARKLLVALWRYVDAGVVIEGAVLKRAARAR

SEQ ID NO: 174047 - protein, 418 aa, unidentified
MIDDVQWFVGIDWATQSHRVCLLDVEGRHVNERDFAHGGAGLSELRDWLLEKTKAAPGQIAVAIETPHGPVVEMLLDHAFPVFAINPKQLDRFRDRFTVAGAKDDSRDARVLGSALRTDRQAFRRLVVNDPVMIELREWSRMADELQQERTRLANRVRQQLWRYYPQAAELTDDVADDWFLALWQQVPTPASATKVSEKAVTRILKDHRIRRLDAATVLQTLRKTPLFVAPGTTEAACAHIRSLAARLRLVNQQIKEAHRALDGLCAKLEAPAESPSGQNREQHDVTILRSWPGIGRIVLATLLTEATEPLRTRDYHALRALAGTAPVTRRSGKQCFVIRRLACNKRLQNAVHHWSRVAIQHDTAARRRYDALRRRGHGHARALRTVGDRLLYALCTTLERQTPYNPNCQTAQVTAGL

SEQ ID NO: 174048 - protein, 416 aa, unidentified
MKLFVGLDVSSEKLDACFMTDDSTLSVLKEATFENSQLGASQIKELVIGFSQNFEIEKLVIGMEATSLYSFHPSMFFKEDSELNQLNLTVSVEQPNKIKKYRDIFEENKNDQIDAFYIADYFRVQRQVNSIVKEEKYLALQHLTRTRYQLIKQLVRTKQHFTENIYYKCNTLSKELKAEGGSVLSATLVTLMTEDYSMDQLAEIPLEEFADLIQKLGKYRFKNPESIATAISKAIRSSYRLGQVHQDSVDTVLGVLAKELRSLEKLIKDLDKAIDDLVVVLPEYQCLTSIPGIGPVYAAGILAEIGPIERFSDETKLAKYAGLYWRQNQSGNSEFENTPMAKRGNRYLRYYLVEATNSVRRYEAEYIAYYKKKYAETPKHKHKRAIVLTARKFTRLVDTLLRNHQLYMPPRSVIDK

SEQ ID NO: 174049 - protein, 420 aa, unidentified
MLPARDAPPRRLIGKCRAGAAAGNVSAEGEAIRSNDYRKDTTVKAPSTRPAAVLGLDVGKSSHWACLIDRDGEVLASAPVRNREAELDALFASAPAGTLVVVDQFRNIGSLAVRRARAAGLGVAHLPGLAASRAAGLSRRGQADERDAAVIARTALGVPDSPGPGGPGPRRGPSEARRALSSQRDHVVACATRDKNRLRAVLLESCPALEAAVDLSDRRWLELLAGFGGAWGIARSGAEGPRAEAAGEAAAASTAPPPALVEAENRQVRFLAARISEALDEAGALEAETAALLEGDETYACLLTVPGIGPRTAAQLAVSVDIGRFPDHDHLASYCGIAPRVRSSGTSVRSVGASRRGDARLKSLLIFSCNSLVRSSGRYGEYYRACRARGMGHGRALKAVARKRLRAIYAVMRDRVPYRE

SEQ ID NO: 174050 - protein, 323 aa, unidentified
MNHKVGKDNTVARFIGIDVSKQWLDVACLPERETRRYGNDCAGLEQLCTWIVPLAPELIVMEATGGFETNAATALAAGGLALAVVNPKHVRDFARAFGILAKTDRIDALVLAAFAQKVHPPVRPLPDEERRELIDLVDRRRQLVTMRAEEKTRLTQATPAARQDIKEHIEWLNERLRRLDIDLTAKLRSSSLWKTKEQILTSAPGVGRVTVATLVARLPELGTLNRRAIAALTGVAPFARDSGQHRGRRMIWGGRADVRNVLYMATVTAARINPVIRSFYLRLKQAGKPPKVALTACMRKLLTILNTMVRTNQPWQTPPTQTI

SEQ ID NO: 174051 - protein, 291 aa, unidentified
MNRVRFVGLDVHAETIAVAVAEQDGEVRSLGIIPNREDSVRKLVRKLGPVEQLRFCYEAGPTGYALYWQLTRMGAKCKVVAPTLVPVKAGDRVKTDRRDALKLARNYRAGELTPVWVPDAAHEALRDLVRAREAAKKDQLRARHRLNKFLLRHGRRPPGEVKVWTMKYLEWVKREVHFEQMAQEATLLDYLHEVEHAAARITRLDGAIEEAVKLAPPQMRAVIEALQALRGIAHVSAVTVVAELGELSRLAGAKQLMGYGGIVASEDSSGERTRRGSITKTGSNCLARRDG

SEQ ID NO: 174052 - protein, 396 aa, unidentified
MSQEKYIGMDVHQATISAAVMDAQGKLIMECLLETKAATILEFLQGLHGALAVTFEEGTSAAWLHDLLKPHVSRLLVCDPRKAALLKDGNKSDRIDARKLAELLRTHQLKPVYHGEHGMRTLKELGRSYLTLTQDVTRVMNRIKALYRSWAISCSGTTVYAPRHRAEWLAKIVEPRVRVRAERLYQQLDGLQPVRLEARRELLRESLKHPAVKLLRQIPSIGPIRAALLVALLQTPHRFRTKRQLWAYSGFAVETHDSGEYRYVRGKLQRNRERITVRGLRDNYNKDLKNLFKGAAIGVGRAIRFAGPVARSTASKYRESGPSSRANPGSLPHPADHVFVCASRLHGSWPDAPPGTRCLTLPAAPRTTASPRWLRCRPPLDLPTKRKNLVPCSPRA

SEQ ID NO: 174053 - protein, 341 aa, unidentified
MEKVTTIGLDIAKQVFQVHGVNGAGAIVCRRRLRRDDVVGFFKALPPCLIGIEACATGHHWARVLMALGHEARLMPASYVKPYVKRQKNDATDAEAICEAVTRPTMRFVPVKSEEQQSVLMLHRVRELLIRQRTMLVNALRGHLAEFGIVTRQGIAGVGMLIELVEDGDHDVIPPLARSALLLLVGQLREVHEKVSEMDRQIHAWHRSNELSRRLETIPGIGPITASAIAATVTDASLFKSGRQLAAWIGLVPRQNSSGGKDRLGRISKQGDPYLRRLLVVGAHAVLRFSRNGKTAPTRWAAELLAKKPYNIVAVALANKMARIVWALMATGRRFEAAPAL

SEQ ID NO: 174054 - protein, 364 aa, unidentified
MKRKVYVGMDVHKETIQIAILPSNTKALVKEQQIKHEEGQIKKFIQKLKSEGTEIHCCYEAGVTGYPLYRYLKTLGVNCIIAAPGKIPRQSSDKIKTDKRDAIKLARLLRSGDLESIHVPSEEDEAVRDYLRSRDSLRLDLGRNRQRLMKFLLRKGIKYSTTKYWTASHYKWLNNLHFENEILQATFNDYYSRVRVQEENLKAMDQKIREIAESEPYREKVGILGCFRGVDYLTAMFLLSEVNDFKRFKTAGSFMSFLGLVPGEYSSGPKRKQTSITKTGSPRLRRILVEAAWQHRFPGTGSKVVAARRVGQSALVVSLAEKASLRLHKKFKSMQLRGKTPQVMITAVSRELSGFLWAAMNLVA

SEQ ID NO: 174055 - protein, 430 aa, unidentified
MQEKQTDTTQELNYAALIGIDWSDEKHDVHLRVCETGQEESKVIKSTPEALDEWIQQLRERFEGRPVAICLEQSRGMLVYILMAHDFITLYPINPAMSAKYRQAFTPSHAKDDPTDARLMMELLLYHRDRLIAWKPDNVQTRTLARLCEERRAAVNLRTKLVQKLNAKLKIYYPQALTLTGENLSSTLACDFLLKWPSLAKAKKVKPAKVRAFYYGHNCRSESLIQERIKLLATAKSATTDEAILIPLVASVKMLARLIRDLYPAIKDFDEQIKALFAQHPDAHIFNSLPGAGEALAPRLLVSFGSDRNRYSSAAEVQQFSGIAPVTERSGKQTWIHRRWQCPKFTLQSFHEFAQHSIGWSAWANAYYQFYKTKGKKHHVIVRALAFKWIRIIFACWKNHRSYDEAKYLETLHRRGSPLCEYLGKPALVA

SEQ ID NO: 174056 - protein, 339 aa, unidentified
MTIVGCDFHPGWQQVAVFDAETGEIRELKLENGNGEAERFYRQLSAPALIGFEACGNTQWFEDLLDRLGHEVWMGDAAAIRASYVRKQKTDRRDAAHILKLLMESRFPRLWRPSAGERDLRQLLIHRHKLVGIRTRVKNGLQHLMLNRGVQMKRKLWSEAGQKALRALPLEGWAAQRRQDLLHLLSGLDPQIRQLDVAIERAAQENPRAQLLMTQPGVGPITALAYVLTMGDVSRFQRGKQVASYLGLIPSERSSSKRRRLGSISKQGNSFMRMLLVESAQTVNRLDEGFRKQYQHRCHRMARGVAKVAAARRLAVRLFWMLRTNTAYPEIAHIESSPR

SEQ ID NO: 174057 - protein, 361 aa, unidentified
MVGSMSLVGLDVHASQTHAAVLNTATGELSGTRLRMAPAQVVEFLATLPAPVRAVYEAGPTGFGLARAASARGIDVRVVAAGKVPRASGDRVKTDRRDAERLARLLAAGELRFAFVPAVADEQFRDVIRAIEDCRGDLMRGRHRPSKFLLRREVRWPGPGSTWTQRHMSWLRGLHFDDLCSQATLVDYLWGVEMLVARRAALIAALEQAIPDGHHAPTIAALRCFRGIDTLSAAALCAEVGDWRRFRPKQLSGFLGIVPTEHTSDRKRRQGSITKAGSVHARRLLVEAAHHYRHRPAIGDGLARRQHGQDPRVIEIAWRAQRRLHQRWEVLADQRRKPAGVVAIACARELAAFCWEAATLT

SEQ ID NO: 174058 - protein, 325 aa, unidentified
MDIVGIDISKAKFDTALLLGERVRHAVFSNTEAGFQQLLAWLAKPRPDPTVLLHVCMEATGNWGLELADFLHAHGVRVSIVNPARIKAYGESELARNKTDKLDAGLIARFCRAHVPPAWVPAASHLRELRELVRRCDALKVARVQELNRQKSGFASPVVARSIAAHIGWLDEQIEAVMDEARHLITADPTLSKNLALVRSITGFGEVSATILLAELPNIADFTPKALAAFVGLSPSEHSSGASVRRPGKVSRIGTERLRSTLYMCALSAKRTNKPLAAFVARMTAAGKPPKVILVAVARKLLVYAHAVIRTQKTFESSPDARFPA

SEQ ID NO: 174059 - protein, 358 aa, unidentified
MNTLKRNKLDFTGQPIYIGLDVHKKSWSVSISTQHGQYKNFSQPPETDKLVHYLRHHFPEAQYCSTYEAGYCGFWIHDQLKNNGIDCLVVNPADVPTKDKERKTKRDRIDCRKLSRSLRNGELEGIYVPPREKLEDRSLIRTRLSMVRKQTRCKNQITSMLFFYGIVIPEEKEMGHWSRRFIRWIEEIQMERASGAMALKIHLEELCHLRQIIAKLNRAILALSRTEEYQPWVSLLKTVPGISTLTAMILLTELGEITRFPSIDELTNYVGLIPDTDGSGEKEHIGGITQRSHRQLRWVLIEASWQAVKKDPALMMAFDQYCKRMKKTKAIVKIARKLLNRIRYVLKNQAEYVPAVLE

SEQ ID NO: 174060 - protein, 366 aa, unidentified
MSAISKTTDRVVIAIDPHKASWTAAVVDASSQPVATIRVPVSRDGYRALRRFADRWPDPTWAIEGASGLGAPLTARLRTDGIDVVDVPAKLAARVRMLSTGHGRKNDDADAVSVGIAARSAPRLNSAAVDDTVTALRAIVDHRDDLVKTRTQTVNRLHVVLTNLIPAGAQRDLTAERAAELLRGIRPRDAAGKTLRGLATDLISEIRQLDRRIAKAAADIQTAVTASGTALTELCGIGALTAGKILGRVGTIDRFRSAAAFASYTGTAPIDVSSGDVVRHRLSRAGDRQLNLCLHVMALTQIRQDTSGRAYYLRKRTEGKSHKEAMRCLKRRLSDVVYRQLRHDANRLEAGPGGHSGAALSSSAAS

SEQ ID NO: 174061 - protein, 345 aa, unidentified
MQNMYYIGLDVHKRTISYCVKDGSGAIHAEGTIPATRFDLDRWMKTLPQPWTAAMEATVFTGWIYDHLQPHAAALKVAHPPMLRAIAAAKKKNDRIDASKICDRLRCDFLPECYMASTAIRERRRTLRYRNLLVRQMVQMKNKIGMLLMEAGVSYNKQRLHKAGYFRELLATNPNIDEGLCSLLRLCRETVVRLQRTESALVRSLERDSLLMDRVERLMTIPAVGPITALTWALEVGDVKRFPSIKKAISYCGLCGAEKSSGNTMQRTPLSKQRNKHLQTTLIEAAKMAPRNSPELAMLYDREKQKGNANRATLAVARKLVAYLMAVDRGQRNFQVVETNNCIAA

SEQ ID NO: 174062 - protein, 341 aa, unidentified
MTEFYAGLDVSDKTTHICAVDTDGKVAWRGVCVTDPEIIATQLNARCPDLVRVVLETGTLSSFLYHGLLERGLPVVCICARHAKGVLSVQVNKSDVHDAEGLAQMARTGWFKAVHMKDSQTHLDRARLKMREQMVRAHNTMVNQMRGLLKLFGLRLGGSTTPGMRNKRLDFLFRQKPELRDIFAPMITSLTALEAQIKAISATIKRRAQSDAVCERLMTVPGVGPITAMTYICSIEDPKRFAHGCDAGAYAGLAPRRFQSGERDTKGHISKAGDRTLRHALYEAANNLLCRVKRPFALQTWGKALALAKGGKRARVAVARKLAALLHKLWLSGERFDWEAA

SEQ ID NO: 174063 - protein, 394 aa, unidentified
MKLVGIDVGKNSHHFCVMDKETGEFNVTPSSFSNNKEGFDFLINSLKTYSKKSILIGMEDTGHYHVALLKFLLSNGYPVALINPKTTDLTRKMEGGITKNDKLDTITICDVLDTPERKKQYRITKVDRFDLYEQRQLTRHHHNLKEELNVYCNRLQKSIDLVFPEFNTLFSSKYSIVYMNLLKTFGSAEAIASTDIRTIRKCFEIKGRGNRISLTPEKLKECAKNSIGISSEVETIQIRHLVSQITLIKEQIAEIDKKIEEFSITNNSPILSIPGISHFSGTSILAELGDIGNYSKPSQIIKFAGVAPYHYESSQYNAQHTGITKKGSKYLRKTLYQIILTVINNNPVFKKYYLLKISQGKGHRCAQGHCIRKLLRIIYHLLETGQSFDPALLR

SEQ ID NO: 174064 - protein, 440 aa, unidentified
MSEPSDGAIVYAAWAALDWGSKKHVWALAGAEAKDLEEGEIEATPESIDAWAAGLAERFGGQPVAVALEQSRGALLYTLSKYPHLVLHPVHPTSLARYREAFSPSGAKDDAPDARLLLDFLRRHPEQLRRWQPDTVPTRTLQFLAEDRRALVEERTRQTLRLRARLLCYFPQVVAWFPDLDAPLVGDLLRRWPTLEQLQKARPATLRQFFHDHNCRSRQLIEERLDRIGKAVPATHDAAVLQAGMSLVKILVEQIALLSQGIAALEKQLSELFGQHPDARLYRSLPGAGPALGPRLLAAMGTCRDRYQSAAEIQCYAGIAPVLQRSGQRQVVHFRRGCPKFLRQTFHEWAGHSIAFSPWARAFYQHQRAQGKGHHAAVRVLAFKWIRILYACWKNRTPYDEARYTQALQRRSAPPPPNVPARFAWERTSGGFFRFKGTVS

SEQ ID NO: 174065 - protein, 554 aa, unidentified
MIRFDFASYTGTAPIDVSSGDNNRHRLNPGGNRRLNHALHIAAVVQYRMPCPGWPRLLPAQARPGQDPPRGVALPHWWSIGVRGPVRCRAVAPRSYRGMASLPSRCDGQFEYGHPRCVGAPRPALGTCPTEGRTMRNRRRASTVGVNHRLRQETRMKYVGWDWASQSHDVTVIDNAGTVVDRWALSHTEKGLVTALQRMARHGQPGDLPVIIERTSGLVVDRLLLAGHPVAPVHPTAFHAARPRWGASGAKSDPGDSYKLADYLRTDGHRLRKLAPVEPGLRELQALVRLRDDQVRTRTATTNQLTALLDAYWPGPKELFCSLASPIALAFLSDYPTPTSASRLGETRMAAFCRRHSYRGGKSPAELLSRLRGAPTAPMTLPPETLAAMVAAQVQLLRGLQQTITDIEGLIRDRVHANPRAQLLAGLPGVGTLNLAQLLAEVGPILERVDTAEQAAAECGAAPVTRASGKTRGVYFRWAANTRARKAMTSFAHNSRMQSPWAAELYAGARSRGKRNPHATRIVARAWLRVIWACWQNGTPYDPKVHQAAQRLTA

SEQ ID NO: 174066 - protein, 421 aa, unidentified
MGINKANVKTSKHIGRENMKHVIAFDISMGKSYMVVYNALKKCQFEKEIAHNRPGFMDLKKLIDDLIEGYDEQPHIVFESTGVYSRTLERFMQENNYSYCLLNPLEAKLQCDSLRIHKTDRSDAHRLALTHFTHERRIETDSNDVYRQLKRLSRHYSELDDELSVTRSRLHKVVQETFPELENIFTTKSELFLNVVQLYPHPDLVLNHSKTIIKNRILANTNKRMAVNKAEEKAVELIEAAKQSYPAASSTDVVCDQVRVYAKRFQELLLQKEQCISKMESIAERLEEYSIIRSIPAIGANSAVRIIAEIGNIQRFDNNRQLNAYTGIDIRRYQSGKFIAKDKINKRGNKHLRKIMYLTVQNMIRQRRFGGNHIVEYYDKLKTQPYNKCHKVASVACVNKLLKTIFFLVTHNQNYDYRLAP

SEQ ID NO: 174067 - protein, 388 aa, unidentified
MSQTMTWVGLDVHARSTHAAAISTMTGELVRARFGPGVDEPVAWLSKLEGPVRACYEAGPTGYGLYRAAAAEGLAVQVIAPGKTPRGPSDRVKTDKKDAELLARLLLAGGLTAVVVPPPEVEAARDLMRGHDACRRDLMTARHRVSKLLLRHGRVYDGATTWNRVHRTWLSRQQFAEPATEMAFADLVAQVDGLSARKTAIAQRLGELALDDRWWPQVARLRAFRGIDTLTALAIHLELGADWQRFERAPQLAAWLGLTPSMTQSGESSRQGAITKTGSTLARRLLVESAWHYAREPRIGVTLRNRQEGQPAHVLAIANRAQQRLYRVHTRMRSRGKPHNVCVVACARELSCFLWAAVNATDPPRLTTNPGRWAGAPGHRRPARAIRL

SEQ ID NO: 174068 - protein, 417 aa, unidentified
MKSASNTLPDEPVNDVTAGIDWARDDHAVCIVDGRGRQVATTVVEHTAAGLRDLITFLRRHGVGEVAIERPDGPVIDALLGAALTVVVISPNQVKNLRGRYGSAGNKDDRFDAYVLADTLRTDRARLRRLEPDTADTVALRRACRARKDLVSHRVAVANQLRAHLRNVFPGAVGLFAEIDSRISMAFLTRFTTQQQADWLTPKRLGDWLTKQGYSGRMDPAALHRRLIAAPRGITGADAETQAPITEALLAVLSTLVEQIAALSKQIDRQLAAHPDAHIFTSLPKAGRVRAARLLAEIGDCRAKFPTPESLACLAGAAPSTRQSGKLRAVTFRWSCDKQLRDAVTDFAGDSRHANPWAADLYQRARDRGHDHPHAVRILARAWLYVIWHCWQQDTAYNPTRHHALQRVLAAAKNQAA

SEQ ID NO: 174069 - protein, 315 aa, unidentified
MYSGIDVSKDWFDAAWQVAGQLRCQQFAYTDEGMEQLMEQVPPTAVFVMEATGTYHARLALKLFEAGRQVSVVNPLVIKRYAQMKLLRVKSDRADAQLILDYAQQQTPPLWAPASEQVQELQQAHGWLNDLIAERTRLLNRQHAMAYRAKPSAFVVEQMSAQLEQLQQRIEQCEQHLEVLVKKSFAELYERLLTIPSIGAKTALELIIVTDGFTRFEDVKQLCAYIGVSPTTLRSGSSVKGKGGIAKLGQGRMRQLLYLCTWTAKSCNPACKQLHQRLKAQGKPAKVINIALAHKLLRQAHAVATKNVRFSAEFA

SEQ ID NO: 174070 - protein, 373 aa, unidentified
MPKYSTAFGMDVHLRSTTVCALDADTGEAVTRRFPGNPWGEIAGWMDGFPGPSLAAYESGYLGFAPQRELAGLGVECVVAAVSKIPRSAADSASKNDRNDAARMAKAILAHDISPVWAPSPEVEGIRDLAGAYDGATARLATAKQRLLAFLAKRGFVYGGTTPAGNPRKYWTYDFLRWLDKVRSEDDGGVRTLAALRNEVEAAAEARADLLSEYRAAVDASPIAAEVAALQSIKGCAFALAAAFSAEVGDFTRFRSGRQVTAYFGLAPSQRSSGDSVRLGGISGAGNALVRKLAVEGSWCYAAARHQPKLMPRDTGVPLEIRMHGRKGSERLLRRREEMLARGMPAAKANAATAAELVRWLWALGMMCREGAE

SEQ ID NO: 174071 - protein, 457 aa, unidentified
MIAIGIDVSKGKSTVAAIGEGKKVLQKPFDVSHNKTNLAELTEFIKKFDDVRVVMEHTGVYYQVVAETLSKAGINVSVVNPVLICGYGDNSLRKVKTDKKDSMKIARYTLDNRDKLRDYTVTETLRDNLKSFVRQFDFEDKTLSAHKNRLYSLLERAFPLIDGYFKSPAKPNGHQKLIDFVIEFWHNDCVSSLSLANLTEKYRKFCKKNRYLFDEKTVAEIHAISRENLTTMQKNDVTKMLIADAAKQVLQISIRVEKLRQEIIKLAKQLPEFETVNALYGVGETLAAKLIGEIGDVRRFESKRSLVAYAGVDPDKNDSGKKVSISGSISRSGDALIRKTVFQVVECHLLNSPADEPVYQFLDKKRSEGKNYYVYMTAACNKFLRVYYARVREFMDSLEAPPQADEAVNTSGDSTKRIIFVPIENNNNAFTCKQDNAPVETDMSGLQGLAYTNGAVT

SEQ ID NO: 174072 - protein, 400 aa, unidentified
MHLTANISVPQKNFIAIDLHSDNAVICVRRNALNKAGELVGKNIWCGRGSIRDGLDSFVKALLPYCQDFDHVAVVESTYNWYCLADVFEERGWLLRIADPSTVSQANLKSSDDRTDAQYLAERLRVGSLKHYLPLNYSSRALRDLCRYRMAMVQDCASLKIKLINLYRNQLSKNVRVADLLERCQPHMQPNYRFNSDILEEFKDPNIRLRVAFEISRIAMLEEMIEECNAEIQKQCKDQELVKLCKTIPGCGPVLSAVICTEIGTMQRFKSAGDFVSYCRLCSTSKLSNGKSKGLGNAKNGNAYLSWAFTEVAQYASRNPVIREILQRLLRKYGGLRVKAIRTLAAKIARVTFYVLKNKQPFNAAKCFGIELTKSIKKKLTHKTLREDAAVVLPTVAGQA

SEQ ID NO: 174073 - protein, 376 aa, unidentified
MTKLRFIGLDVHAETIAVAVAEPGGEVRSLGTIPNRLESIRKTIGKLGPVKELRACYEAGPTGYVLYWQLSNLGVDCQVIAPTLVPVKAGDRVKTDRRDAEKLARCHRAGDLTTVWVPDAAHEALRDLVRAREAAKKDQLRARHRLSKFLLRHGQRQPAGMKAWTKAYLEWVKSKVHFEEPALEAALGDYFHEVEHAAARIVRLEKALDEAIAKAPAPLRAVIEALQALRGVAQLTAATIVSEIGSFSRFEPRTLMGYSGLVASEHSSGGKTRRGSITKTGNAHLRRVVVEAAWAYQRRPWIGGFLLRRQRHLNLSEEIKEIAWKAQNRLHKRYTKLTAGGKNKNQTVTAVGRELLGFIWDIAVRTERAGEQSKAA

SEQ ID NO: 174074 - protein, 315 aa, unidentified
MASFLGIDVSSRSLDALVRPQGIKIHVSNDRAGFEELQRSLGGRSIKRVLLEATGGYERDVMHFLQDGGYKVIRVNPRRARAFAESIGVKAKTDAIDAEVLAHYAEVIPDQSTLRISPERALLRELLQQRDRLVQQRDDDLRRLKQAQSRMVSDFLKANLQHFKSQIKLVEQAISQQAEALKDERVTQLVQVKGIGLVTAGKLVTLLPELGRVESREIASLVGVAPFNHDSGKFVGKRSISGGRFEARRSLYMSCLVAMKYNPALKARYEALRERGKVAKVAIVACMRVFLVRLNAMLRTGEPWLDLVLPQPKRT

SEQ ID NO: 174075 - protein, 340 aa, unidentified
MVHVGIDLDKHSSQIAILTEDGEVVQQRLANDVTRLEEFFGDLPPHTPVAIEASGTWWWLVDLLERLGHDPILSHPKQTKAIAAARLKNDRVDAERLALLLRGDLLPTVWIPPAALREARELVRHRIQLVWVRGVIRNRLQAMLARRNLKPASGQSWLTQRGQRELHRLPLPAAAGRIREDCTAVLPMLDAQIRRLDAELLARWGQDPRVQRLTTIPGVGPFIAIVLILELGDITRFATAKQVASYVGLTPRVRSSAGRVRAGHISKEGNRLLRWVLVLAATQASRRPGPLRTWFHAVKKRRGKKVARVALARRLAEIVFHVWKHECDYFTVVRRDVVRG

SEQ ID NO: 174076 - protein, 412 aa, unidentified
MEGETVIAGVDTHKDVHVLCLLDGLGRKIRSGSFGADPEGYDRLAEAIGDPGSCMVVGVEGTASYGAGLTRRLAELGYNVVEVLRPKRDKARPGEGKSDPLDAERAARKAASGRGCSVPKSQDGWVEAVRQLYVARRLAVATSTSCVACAKSMLTTAPSALRERFRGRERPKDLMPLLARGRKAGDALEESVLASLRSVAAVWKEARSQVESLDERIRALLEANAPALLGIEGCGTTTAAALVVAAGDNPGRLKGEAAFSMMCGASPIPASSGKTDRHRLNRGGNRQANWALYEIAIKRMAYDERTRRYVARRTSEGKSRREAVRCLKRYIAREVYRVLMDPNPDGAAPEGPELAKMRKAMRVTQKQAAAGLGLSAATLGHLEHGRRRSTKLERKYYELLCELRGALPQTAS

SEQ ID NO: 174077 - protein, 408 aa, unidentified
MEVLYAKCAGLDVHKDMVMACARIADGGKVQQEVRSFSTTTRGLLELAEWLVDVGCTHVAMEATGVYWKPVWHVLEGSFDLLLANAHHVRNVPGRKSDVNDATWLADLLAHGLIRGSFVPPTPVQEMRDLTRTRKQLVREIAQHTQRIQKVLEDANVKLSSVISSVLGQTGRAILDALVAGATDPAKLAALAHPRIHASSEELAEALRGKVTEHHRFMLKLHLEQIDSLQKAVRELEARMGDALAPFREQVAQLITIPGVSDVVAQVIASEVGLDMSRFPTAGHLISWAGLCPRMDESAGKRRSTRVRKGAPWLKTTLVTAAWAAARKKTGYLRAQFLRLKSRRGPKKAIMAVAASMLTAVYHMLSRKTDYADLGADHFDRRDKAKVAKRLIKRLQDLGIAVEVKAAA

SEQ ID NO: 174078 - protein, 341 aa, unidentified
MKIVVLGIDLGKTYCSVVGLDESGAVVLRRRLRRGNVERFVGGLSPCVVAMEACCGAHHLGRVFGEQGYEVRLMSPEYVRAYVKAQKNDDRDAEAIAEAATRPTMRFVPVKSMAQSDVQALHRARERLVSARTALINHLRALLLERGIVAPQGRARLEAELCTFADEEAGSLSPRIRLLVEDLRREWRSLDQRIAAFDKEFVALARQDEAARRLSTIPGIGTINATALVAALGDARSFRRGRDLAAWLGLTPRQRTTGGKPRLLGISKRGNRYLRKNLIHGARAALRHLVAQDTPLGRWLRSLLQRAHKNVVVVALANKLARIVWAVLTQGRAYASGYQGV

SEQ ID NO: 174079 - protein, 358 aa, unidentified
MYPFYLGIDLHLKRTYMVLMNQTGEVIDERRISNNEIKEYLVEKVPKDTHAVMEATRNWAFMYDHLAQHVERVDLAHPKELKAISAAAVKADHIDAKVLANLARLDFLPISYAAPKDIRDLRMYNRHRDQLVRMRTQVKNRIHAILASYNLAAPVSDLFGVEGGEYLEEVMETKLRTAAKRVIQDQLVLINQLSEQIAAIESETTLSPEQKQMVRLLKTVPGIGKVTATTIMAEIGDIHRFHSAKALCNWAGLTPKIHSSDVIVRHGRISKQGSSLLRGAMTRAATVASRRSKRWYVVHENLLPRCGKVAAKVAVARRLLTVIFYMLKRMEPYQEDYGRNIQRTGEPVAMHGSLKPIR

SEQ ID NO: 174080 - protein, 409 aa, unidentified
MITYIGIDWSSKKHDVCFVNAAGAAIARQVIAHTPAGFAEFERQREQLGVEPAECVIGLETAHNLLVDYLWGHHYSQVYVIPPNQVNRESQARWPSGARSDPSAAQLLAEMLRQDRTRFPVWCPDSLLTRQMRSRVSLIMHLTRHITALSNRLWAVLCRYYPAAITVFSELTAQIELAFILAYPTPQAAAQLTYAEFQAFAVQHRHTQPRKLPAAFARLQQPQPLADPDTVATFQAEAVQLAQLLLPLVQAKQTQLHELTRLFQQHPDAAIFDSLPGAGDFLAPGLLVKFGDDRQRFPDAASVQALAGTCPVTDSSGKRHVVRFRKACDHEFRTLTQQWAKATLTVSPWAQAYWQDMRPHCRSNSAAYRRLANRWLAIVWKLWQTHQPYDEAYHLQQRAARSQPRPTQR

SEQ ID NO: 174081 - protein, 312 aa, unidentified
MILYQNFIGIDIGKFTFVVNVHGQKSTNTFDNTMQGIKTFIKDYKDILSDSLTVLETTGGYESLALKILLAKGYAVHRANTRKVKNFIRSFGNDFKTDALDAKALALYGKERSDQLNLYRPPSPEQELLYDLVTRRQDLTKLRAAEKNKIQGPKCQGILKDSCQAMIDFLTQQIKGIEDQITSLINKDEQLKAKVTELQTIPGVGPIVATTLLALMPELGTLTRRQVASLAGVAPKANDSGTLKGYRRIVRGRETVKPALFMAAMAARNSHSDLGAFYTRLTGKGKKKMVALTALMRKIITIANAKLKPATT

SEQ ID NO: 174082 - protein, 351 aa, unidentified
MVVVGADVHKRTHTFVAVDQVGKQLGLLTVPATTPGHRKALAWAREKFGNELTWAIEDCRHLSARLERDLLTGGQPVVRVPPKMMAQVRSSARTHGKSDPIDALAVARAFLREPSLPVASHDETSRELKLLVDRRETLVSTRTGTINSLLWRVHELDPAHAPKPRSMDLAKHQNLLRDWLVTQTGIVAELAMDELADIVELTRRAKELEQRITRLARQLAPTLIAMPGGGALTAAKLVGEAAGITRFKSEAAFARHTGVAPIPVWSGNTAGRVRMTRSGNRQLNAALHRIAVTQIRLTDSLGKAYYAKKKTDGMSNREALRCLKRRLARIVFHHLTTDHQATTATRAAAAA

SEQ ID NO: 174083 - protein, 320 aa, unidentified
MRNAVGLDISKLTFDASAMVGNAEYSAKFDNDSKGLDQFSDRLKSLGCQNLHICMEATGNYYEEVADYFAQYYSVYVVNPLKISKYAESRFKRTKTGKQDAKLIAQYCRSAQESELVKRQKPTDEQYRLLRMTAAYAQIKSECAAMKNRHHAAKDEEAAKAYAQIIKAMNEQLEVLKEKIKEQTEKPNCKEGVKRLETIPAIGRMTAAVLFHHLTSSKFETSNKFAAFAGLSPQQKESGTSVRGKGKLTKFGNRKLRAVLFMPAMVAYRIRAFPDFIKRLEEKKKPKKVIIAALMRKLAVIAYHVHKKGGDYDPSRYKSA

SEQ ID NO: 174084 - protein, 629 aa, unidentified
MGKGSGGNGMTRGDRRRNARRERLRAMLPRDGAVIGIDLAEDKQALAVIDHDVRVLARKTERVKVFRLGAALDWAVGQARAKGFGQVTVACEPTGARWLQVQRLCAERGLPLVCIQPLISHIAREQQDFTRHKTDESDCVMIARLAVELHCYVPEELDETWAHLRHLGRRRAQLITAATASAQRIRDFLSVAWPAVPETCARPLESVTWLAALQVVTARCGADPGKLAAMGEQEFTALVRGAVPGWGGQKAHGPISRRVFAALTGTEGVVVSSRRGLLRRVADELGDLQRTRAQLRAVEAGMVAVLDELGLSRLADIPGLTAVGAAAILAETGGPHRYDNSSSLDGHAGMSPSGNASGAFSGQAHISRRGRPGLRLVVWRAVWPMLQYNPVMAARYQAMTRAADTAAAGARPQQAGQRRPRPAPGAPRPAPRVPPRCCAGSTAWPAATPAGILPSPPAPPAGTTPRTPRRRPPDQRLPATTRYGCPRPSSPMKGRASPHRRRGPTPCITPGSSPPVARSFSPARLNAVGAGVPASCRARRARLHYVEREDPGGLAPPAARHHDHHAAADLRHATTDVPRTRILASPCTPTPPVAKPQLTTITAPATQIFPDRLTIIYLRWLCSAFPVSR

SEQ ID NO: 174085 - protein, 360 aa, unidentified
MENIQRSFSESTIALGLDVDATISVVVALDTTTGELLFEGRVPHNEETWHKLLRRFTDHRVWACYEAGATGFRLCRMLRRLGVDCQVVAPSAIPKSPIGRQLKNDRRDALMLAQLYINRPRSFVRVPTEQEEADRQLIRTRAQLVKDKVRVKTRIKSLLLYYGIQAPQGKGMMSWSLTWRRWLKSFDCPLPVRCSLDAMIAELECIEQQIKTVTAGIAELSRTDPYHDRCRRLQKISGVGTLTAMAFLLEVFRPEDFPTAAKLASHLGLTQCEYSSGGHVRRGHITHWGPSHLRKLLVEAAWVWIRKDPQALQRYLSIRSGKERKRAIVAMARRLAIAMWAMTVKEQDYSYSWFELAKAA

SEQ ID NO: 174086 - protein, 345 aa, unidentified
MLYVGLDFHKYFSFVTVMDGQGEILKRAKLQNHPDTLLCFFGQLEDEVTVAVEATWNWYWLQELFEDHHIPMKLVHPQRAKAIASARIKTDKIDSEILAHLLRTDLLPEAYISTRETRLLRERLRYRASLVRLVTQIRHKLHAIVAKNGLRLPTRNILSKKSLSYLREVSLADAFRQAIDGYLRLVELLCEEIERVNSTIASQAQQDPRALRLTELYGIGYYLALLIVAEIGDITRFPRAKSLCAYAGIVPSVHSSGQTHYTASITKQGSKWLRWALVQVAQHIHKKPPFDGLYQRVKSRRGPKIAKVAVARKLCKTIYHMLTEEENAIIVGQTRWGHGLVRPQI

SEQ ID NO: 174087 - protein, 467 aa, unidentified
MPCFYKYKNMSKNSKKKKRAAAIPAAKKMERFELLNPHSAGVDIGSMLMVVSYTDGEGMINVREFDSFTSSLYELAELLQKEGVEKVVMEATGPYWESLYNLLEKHGMEMFLVNPSHYRNVSAQKTDINDAQWLHQLLAHGLIRNSHIAPELYRELRQYLHEREIYQNHKSDSLNRMQKTLTLMNVKFQHLISDVEGVSGMKLLRAISSGISDPQTLLARIDVKKLKASPEELLSSLQGDYKQHYIHILSNTLKSYDFFKEQMLAYESHIEKTLQELLACNGEYRTAIPKKTRKIRKNQYSFNLKDYLLGIFGVDLTEVEGLDEIGLLTILAVTGTNMKKWPTAEHFASWLNLSPRPKISGGKVIGYETRNSNNPATQAFRLAAHCLWQSKGPMGQQYKRLAATKGSKKAIKAIARKLAVIFYHMVLNKQAFDASRVQPDIAQQKARKIARLQKEAAKLGLTIQKAA

SEQ ID NO: 174088 - protein, 371 aa, unidentified
MKKDSTTKFIGLDVHSKTISVAIADEGREGEVRHYGTIENTFEAIDKVIKKLTATGVELKFIYEAGPCGFALYRYLTGNGFTCIVISPAMIPRRKNVRIKNDRRDAMTLARLYRAGELSGIYVPEPEDEAIRDLARTRDDARVAERKAKQRLNSFLLRHNLIYPGKTKWNRTYFNWLGSVGMKYPAQKIALQEYIETVNECTGRVARLSEQIGLAVEEWRMAPMVKALQALRGVSLICATVTVAELGDLSRFQNPKELMAYLGLVPSEHSSGETIRRGGITKTGNGHARRVLVEGAWTYKHHARVTLPLIKRQRDLPKSICQISWKAQLRLCARYRKMVARKKPNNVVVIAIARELAAFMWAIAQEVRAAT

SEQ ID NO: 174089 - protein, 345 aa, unidentified
MKEYSVIGLDVSDKTIEVAALDTTGEVVWQTTVNSTPTAVRHAFQNVARTLVALETGMHTGWLARLLTELGHDVVVANARKLRAIWGDDQKSDERDAEMLARLARTDRKLLRPVTIRSAETQRAMDLVTGRDALVRSRTQMVNVVRSLVKNRGARLRRCSPQAVPKHCRVDLPEADLVELDPVLETIESLSKQIAAYDRLIEAIAKERYSEATERISQITGVGTLTALVFTLVIENPERFACRRTVGAYLGLTPRRDQSGETDKQLPITHAGHSMLRRLLVTAANYVMGPFGPDCELRRFGERLAQRGGRNAKKRAVVAVARKLAVVMLALWQSGEPYRPLRQAA

SEQ ID NO: 174090 - protein, 407 aa, unidentified
MLLVGDDWAEDHHDVYLMDEAGALLAAQRLPEGLAGIGQFHELIAAYADDPGEVVVGIEKDHGLWVGVLAASGYQVYAINPMAVARYRDRHRLSGAKSDAADAKLLADLVRTDRHNHRLLDGDSAQSEAIQVLARSHQSLIWTRAAQVAVLRSALLEYYPAALQAFTNLGDRDRDRDVLAVLGRAPTPDQGARLSLSKIAAALKAGGRKRYIDERAREIQAVLRSEQLTAPEAVTAAYGATTRATDNLLLELTIQISELETELAQHFRTHPDADIYLSQPGIGVILGARVLGEFGDDPNRFTTAKCRKNYAGTSPVTVASGRKHAVMARHVRNQRLYDALDRWAFATLKCSPGARAYYDQHRTAGDTHHQALRALANRLVGILHGCLRHRTFYNEVTAWAHRTSIAA

SEQ ID NO: 174091 - protein, 353 aa, unidentified
MVTLISDSPRIVVGVDSHKESHQVAVLDRTGALMGNQGFAVTSAGYRELEAWLATLGTIDRVGMECTGSFAAGLTRYFRERDVEVYEVTTTHRATRARRGKDDTIDAEMAARKVLSGEARALAKDTTGDIESIRLLKLSRESAVKARTVALLQIRDVLITAPSELREHVESAGGTRHRVNRAGALRPDLERLGERLQAAKFTLRQLSRRVMMLDEEIAGVNTQLNHLVARCAPHLLESCGIGTQHAAQLLITAGQNLDRLHSDSAFARLCGVAPVPVSSGKTNRMRLHRGGDRQANRTLHLIAIARLRIDPRTQIYMERRRTDGLSKSDVVRCLKRFIAREVYKALKLDLLQN

SEQ ID NO: 174092 - protein, 343 aa, unidentified
MEHYAGIDVSLTESSVCVVDATGKIAREIKVASEPEALVEFFAELELPVVRIGLEAGPLSQWLHAALVAAGREVVLLETRHVKAALSAMTVKTDRKDARGIAQLLRMGWYRAVHAKSVNSQDTRALLVGRKLLQGKLLDVELSIRGILRGYGLKVGDVSRGRFEARIRELTSGHVVLETVIGAMLAARAALWSEFTKLHREMLKIARADKVCHRLMSTPGVGALVALTYRSAVDDPARFGKSSTVGAYFGLTPKKYQSGETNRDGGVSKVGDTMVRTALFEAAHIMLTRATRFSSLKRWALDVAQRRGMKRAKVALARKLGVVLHRMWVDATEFRWNKATLAA

SEQ ID NO: 174093 - protein, 307 aa, unidentified
MAFKILRKNCCGLDIHKTWIFACIGITDSNGRTEYKQARFSSFSNGLRDLADWLAKYSCSDVCMESTGKYWIPVFNILEKTCWVTLAHPKYTKPQKGNKTDRKDAKWICDLYMCGMVKPSFIPPPDIRQLRDLMRYRVKLTNMLTGEKNRAQNCLTVSNLKLDDVFSDVFGKSSRSIIQYILEHPGEQFDVTPFIHRRCKHPVEEIQAAVDGVVSREQAAKLKECLLHIDQLNAHRERIEAEILRLAEPYPYQLELIRTVPGFAAAPLTAVALISEIGVDMSVFPSAKHLASWAGCCPRNDQSNKKK

SEQ ID NO: 174094 - protein, 424 aa, unidentified
MEVMHERVAGLDVHKASIVACVRLQAGGKSNRQCRSFDTTTDGLLALLEWLVECRCTHVAMEATGVYWLPVWKILGEGDFTLFVANAAHIKNVPGRKSDLNDAMWIADLVACGLVKGSFVPEERMQELRSLLRTRKQLGREQTRHVQRIEKTLAEANIKLDAVISDIMGASGRRIIEAMVAGVRQPRKLADLAGKQIKATPKELYDALHGRLTDHHRFLLGLHLRQWDALEATIREIDREVQARIAHMDAQATPGAAPFRDLIGLLCTIPGVANLSATTILAEIGRDMNRFPTAGHLVAWAGLCPGQNESAGKRKTTRLRKGAPWLKTILVQCAWAAKRKKNSYYRAQFFRLQSRRGPQKAICAVAASILTAAYHILKDGTEHHDLGGDYFDRRRSPEAQAKRLVGQLTRLGFDVHLQPAAKAA

SEQ ID NO: 174095 - protein, 344 aa, unidentified
MFITMFITRILAVVVSDVEVDGEYQFERRMFGSNPEQLRSLAAWLLEQEVEEVVMESTAQYWKPVWEALEQYWKPPRQKQEGACQMSGTLHLAQAQSNRGPRGRKRDFPDAERLVKRLVAQELRLSFVPDAEQRLWRTVTRRKYQLTRDRARLQNQVESLLEEAHIKLSSLVSDLLGACTELNPVYRRLLKMALEQLQFLEQQVGQLDQEVAGLLRQHQDAVERLAEVPGLGVDSATQIIAEVGATAATFPSDKHLSSWVGACPGDDESAGVNYNHRSPKGNRHMRRVLNQAANAAVKVKGSIFEIAYRRSSGHYKVEASTHCENDPPTPKARLPGRTGEFAVE

SEQ ID NO: 174096 - protein, 343 aa, unidentified
MHTITTIGLDIAKSVFQVHGTDAAGQVVIRRQLKRRAVLAFFQKLPPCLVGIEACASSHHWSRELQALGHAVRLMPPAYVKPYVKRQKNDMADAEAICEAVTRANMRFVPTKTPEQQGCLMLHRTRHLFIRQQTAVINSIRAHLAEFGIVAPVGRKGVMELLQVVADPSDKRVSEVTRACLASLGNQLLSLKEQILEFDRMIMAWHRSNEPSKRLRYIPGVGPMLATALVASVADPKTFRSGRNFSAWVGLVPKQHSSGGKDRLGSISKQGDRYLRSLFVAGALSVIRYAKIHGTKHRPWLTALLARKPTKVAAIALANKLARMAWAMMARGERYRNPVALAA

SEQ ID NO: 174097 - protein, 364 aa, unidentified
MTAAQAGRQAASSTVEVVGGVDTHKDTHTAAAVDTAGRVLGSAQFPTDAAGYRALLRWLRGFGTLLLVGVEGTGVYGAGLARSLAAQGVAMVEVDRPDRKARRWQGKSDPVDAEAAARAALARVRTGVPKQRDGRVEALRALRVARRSAVGQRADVQRQIKALIVTAPESLRAQLRKLPDRELIEVCADLRPDRADADDPGTATKIALRSLARRHRRLSVEVADLDELLGPLVAQINPGLLALKGVGAEVAGQLLVTAGENADRLTNEAAFAMLCGVAPLPASSGKTTRHRLNRGGDRAANCALWRIVITRMGTDQRTKKYVARRTTEGLAKPEIIRCLKRYVAREVFLALQPASTEKRPANAA

SEQ ID NO: 174098 - protein, 359 aa, unidentified
MDESMFIGLDVHARSVTAGVLDATTGEVRCGPAPARTAELVEWLAAQGAALAVAYEAGPTGFGLARACEAAQIPCLVAAPSRIPRAAADRIKTDRRDALRLAKLLRLGELVAVRVPSPAEEAARDLVRAREDARADLMRARHRVSKLLLRHDLLWEGSTWTVAHERWLCAQRFEERGLQIAYEEAVAAMQAVRARREALDAAIAEEAAREPWAGIVGRLCCLRGVSVLTAFGLAAEIGDWRRFDGRSLGAYLGLVPSESSSGQHRSQGAITKTGNGHARRLLVEAAWHQRRGTSHPSRELVRRREGQPALVRVRAEAAGRRLQRRWAAFDARGKRSTVAAVAVARELAGWCWSLAVMDS

SEQ ID NO: 174099 - protein, 370 aa, unidentified
MLDTTTFVGLDVHARSIKAVSLDVMTGEVRCATFGYDAGAVAEWVRSVDPGARCVYESGVTGFDLQKRLSGLGVDCVVGAVSKMIKPSADRRRKNDRNDAEFLARMLSVGNVVEVWVPDDECEAARDLTRALEDARDDLSRAKQRLSKFLLRHGLVFDERTPTGRRKGNWTRAHWSWIESIEFAEGADNDVLAYYVDAVRRAAEEKARLEGLVEAEARKPRWRKRVDSLRCLKGVDTASAADLVFEAGEFSRFRNARSFAAWVGLTPSEHSSGESDRRGAITKAGNKHLRKALVEAAWHYLTCSGRPKDPARGQAPDRGARRHAAKGVRRLVERREALLARGVHGNKANVATARELACWVWAVGLMAEEA

SEQ ID NO: 174100 - protein, 404 aa, unidentified
MPAICGIDWAADWHDVRVADEHSGQLLVERRFAHDETGIGALVELLIAQRVARVAIERPEGLLVGRLLAAGIRVLAIHPNQLAAARDRFRAAAGKSDRFDAFVICELCRTDHHRFAALAPSSDETIALQALVRTREDLVAVRVHLANQLRAQLDCFWPGAKLIFAAVDSPIALAFLARYPSPQAARGLGPKRLHAFLARNAYSGRRPAADLLDRLRSAPTAAIGELEHEARHTTVTGLVAALAPIVDQISLLTSQIAGAIRAHPDGPIFLSFFRDPKSVLTAAGLLAEIGDNRARYPTPDSLAADAGQAPVTKQSGKRRHTTFRWACDKRLRNHFGVLADSTRHWHPWAADVYQRASTRGCEHPHATRILGRAWTRVLWRCWQDHTAYDPTRHGNLNRLLEDRS

SEQ ID NO: 174101 - protein, 459 aa, unidentified
MTKPKPKRSRREREMSPVHAGAAAIDVGATMHVAAVGPGRDPEPVRSFGTFTADLHRLADWFKQCGIKTVAMESTGVYWIPTFEILEQRGFAVVLVNARDAKHVPGRKTDVTDAQWLQRLHEYGLLRASFHPERRVAALRDYLRQRERLLDYAASHIQHMQKALMQMNLQLHHVVSDITGASGMRIIRAVLAGERDPAALAALRDQRVKASEETVRQALVGNDREEHVFALLQAVELYDAYQAKVAACDVRIEAALKEIEAACPPPASPIPAPRHRTRQPNALAFPAREALHRILGVDLTQIHGLGPYLALKLVGECGTNLSAWPSAKHFTSWLCLAPSNKISGGKVLSARTRRSSNRAAALLRLAAVTVGRTETALGAFYRRLAGRVGKAKAVTATTRKMAVLFYNTLCHGMDYTDPGASYYEDRYRRRVLTNLQRRAKSLGFVLHPVEPKPGGAGVS

SEQ ID NO: 174102 - protein, 339 aa, unidentified
MKLYTAFDLHSNNSYLGIIDENGKRVFKRKLPNDPAVIMESLNPFRDDIVGIVVESTYNWYWLVDLLMAEGYKVHLANPAEIQKYTGLKYADDQHDAFWLTEMLRLGILPEGFIYPKEDRPIRDLLRKRGHLVRLRTSLIISLQNIISRNNGIKLKVGDIKILSKDRVAPHLERNEDLALAGKVSKESIDFLTLKIKAIEAVVEKKLELQEPYDRLLTEPGIGKILGLTIMLETGPISRFAKVGNYVSYCRKVSSKWMSNDKKKGKGNKKSGNKYLAWAFSEASEIARRYDENARTYYNRKAQQTNRMVAHNALAHKLARAAYYIMRDGITFMPEKCFV

SEQ ID NO: 174103 - protein, 465 aa, unidentified
MKAQNPEKVLFVPIDFAKQTHYAFFCDGYGQYLRKPFTVRNDREGVGYLIESIEKTRKSKGIQSRDQVIIAGEDSASYTQNFMLRLADHGYITMQVNAHEVHRQAESIDSSTDKTSLQAIAKTLLNRNAREFATPDDYKQLREFTRQRRRFVHQTTRVKNRIHTHADRLFPGFLSSESMINAFSAASIELMRGSFSAVIFSKKPLTQLQRRLERLGVKNAAQIALALKEQARRSIPAQAEVATTSYQLLQSELDLYLALDRNTTLMDREIARQLARTPAAFLTSIRGLGITLIAAIIAEIGDLSSAPRTDSINAYAGIIPKVKQTGGPESEAHVRGKRQRFNRILKDYLLQAGNHLYLHGPEDLMNDARCRKAANKAVETAMARRLLRIARSLVKNHCIYLPAHLCNDTDQTGVRQRAQYIVNTWPAMLLKWKRLGLAQEAFAPDMPLGMWRVNAQEIYEIELPL

SEQ ID NO: 174104 - protein, 433 aa, unidentified
MKVLYERVAGIDVHKEMIKVAIRSPGDKPWTRTTEILEFRTFYGVLQAMARDLRKRGVTHVVMEASGVYTEPVFYALAEQDFEQVAVINPAHAKALKGHKTDARDCARLAELFECGLLRGSYIPAPELKEVRDLTRYRMKTVQARTSEIQRLGKALESAGIKLGSVASSITGASATAMIEALIDGERRGGVLADLAKGRMRSAGKLADLSMALTGRFTGHHALLCRLHQDRIAGFDAAVAGLDEQIAGKVTRWQREAGLLTSVPGFGDVVAQAWLGEIGPAPHRHFATHEKLACWVTLCPGNNISARKRKHGRTGDAGTYIKPMLIQAAWNAIRVRGRLQARYNRLVRRFGGDKNPGAKKKAITAIAHTLLKIAYQVLKSGTPYQDLGADFYTRRESPEQKHAWLERQLQKLHPGCAITITISPPEVALPPGA

SEQ ID NO: 174105 - protein, 457 aa, unidentified
MAQRSKKAKSRKFKITQLPAQLRHINLNAAGIDIGSERHLVAVPEGRDDVSVREFGTFTVDLEALADWLKKCGVTSVAMESTGVYWIPVFEVLERRGFEVKLVDARHVKNVSGRKSDVLDCQWLQQLHTYGLLAGAFRPPDEVCVLRSYLRQKEMLTQAASMHIQHMQKALQQMNLLLHNVVSDITGVTGMKIIKAILAGERDPKVLARNRHALCKNSPSTIAKSLIGNYREEHLFALRQAVELYEMYQAKIADCEQAIIKQLEKQPNVSDDEPPPADKETQTRSRIRADVDVQDLLYKKTGIDLFAIPGLAADTLLTLASEVGFDMTPWKTEKHFASWLGLCPGTKRSGGKVLNSNTKRNPNRATQAFRMAASSLSRSKTALGAFFRRVKMRTGGPQAVTATAHKIARIYYAMLTKRSNYIELGQQAYEQRYQQRRINSLKNQAKSLGFQLVPCAT

SEQ ID NO: 174106 - protein, 291 aa, unidentified
MTSIIYVGMDVHKENYTLCCYSFDRDKVEYRQTVPSDYRLILKYLEQVRRKYPEEVEFICGYEAGCLGYSLYHQLTDHGVKCIILAPTTMGITNTNRVKTDRKDAANIARCLAFHTYSAVYVPDGEDNAVKEYLRMRDDQKLALKKIKQQITAFVLRLGKQYTGSKSLWTENHLKWLRGLDLTLLEKETLQEYLITYDYLTDKLERLDARIEELARNERYGERVRRLGCFIGIKPHTALSLLVEVGDFRRFEKAPNFAGFLGLVPGEDSSGGAETALPSRKRATAICGGFW

SEQ ID NO: 174107 - protein, 441 aa, unidentified
MSRCSYVARLRLSFKTRTSLISYDLESGDFMNDLLQYLFVGIDVSKDNNQVYAMNFSQEKLASFSTPNHQSGASLLETKLLDVLDRHHLSKIIIAMESTGIYSTHIATFLSASKFLFPFDVRVYVLNPKISRNYRHSFSDMDKTDPQDAYILADIARVGRCDQLTPFKGPQKIALQRLTRHRHHIAELLAKEKVYALNNVFLKFSEFKGILSNDFSKTAIELLLNFKSVDEIINVPLEDLVEFVMTASKNRFVDSNQIALTLKAAARNSYRLDKLAYEPINLSLAASFNCISTYQTELKSIDSAILKQVNGLNKNHYLSLLSIPGIGPVYASGILAEIGQIDQFDSDDALAKYAGITWRKSQSGNFDAEDTKMTKTGNVYLRYFITEAANLARIHNPVFKQYYQKKFDEVKTHQHKRALALTARKLIRLIFGLLSTDRLYK

SEQ ID NO: 174108 - protein, 391 aa, unidentified
MIYVGIDVAKDKHDYFITNSDGEVLFKSFTISNNREGFETLFQKVQSVSDDFAKVKVGLEATGHYSYNLLGFLLDKGLPTYVINPLHTNLYRKSLSLRKTKTDKVDAHTIASMIMSDVNLKSYSDTSYHNEELKSLTRYRFDKVKERAKLKSSVSRLVCILFPELEKLVPQLHMASVYALLSEFPSAHAVASIHLTRLTHLLSESSHGRYGKDMAIIFREAARNSIGSNMPAKSLELKHTIKLIQELTSEIDEIEAEIKAIMDEINSQILSIPGISYNMGAMIVAEIGDFSRFDSADKILAYAGMSPSTYQSGQLDNCYSHMEKRGSRYLRYALYNATKYVCHWDNSFGAYLTKKRAEGKHYNVALSHATKKLVRTIYAMEKSGRVYLPTV

SEQ ID NO: 174109 - protein, 347 aa, unidentified
MDHYAGIDVSLEASSVCVVDGGGKIVREAKIASEPEALIGWFASLGLDLARIGLEAGPLSQWLFAAMKEAGLTVELLETRHVRTALQTMPVKTDRNDARGIAQLMRLGWFRPVHCKSLAAQETRALLTARKLVQSKLSDIEMSLRGILRGFGLKVGPTTPKRFAQRIEELVAGHATLEVIAKALLSAHAALLREFDMFEKRVRAMARADKRARLMMSAPGVGAIVALTYVSAIDDPSRFSSSKRVGPHFGLTPRKYQSGETDVTGRITKIGDAGVRTALYEAANVILTRPVKRSGLKSWAMKLARRAGMKKAKVALARKLAVILHRMWADGTAFDARRAASAAAAAA

SEQ ID NO: 174110 - protein, 341 aa, unidentified
MKLTTVGIDLAKQVFQVHGIDEHGKVLVKKQLRRDQMTTFFVNLPPCLVGMEACGSAHYWARKLQAMGHTVRLMAPQFVKPYVKTNKNDAADAEAICEAVSRPNMRFVPIKNIEQQAVLALHRVRQSFVKARTAQANQIRGLLGEFGLVVPQGIGYIATRVPELIEDAENELPGSFRLLVQRLLDHLKELGQQVEELEAQIQAWHRNSDLSTKLAQVPGIGPITASALVASIGDARNFEGGRQLAAWLGLVPRQHSSGGKSNLLGMSKRGDSYLRTLLIHGARSVIYRAGQKAGPCSWINAVVQRRNKNVAAVALANKNARIVWALLAHDRRYEPSYRKVA

SEQ ID NO: 174111 - protein, 411 aa, unidentified
MNQQIAFEQIVRGGCGMDIHRDTVVATVMGEGVKKETRTYSTYTNSLCELQQWLTSLSITHIAMESTGIYWKPVFNILEEHFQILLVNAWHIKNVPGHKTDKKDSVWLTKLLLSGLLKASFIPPREIRDLRDLSRYRRKLTQQATAERNRFEKILQDANFKISAVISDVFGMTGTKLIEALLSGNNNFDELLELCHGRIKNKKEQLKEALVGHLTPHHKFMLKTIRKSLDSVLGKISLLDAQTLLLSKPYQRELELLQTIPGVNKISSVCLLSEIGADMSQFPTEHHLASWAGLCPSANESAGRIKSTRVTQGNQYLKPVLVECAWSASHVKGCYLRSKYESLIGRRGKKRALIAVGHKILTSAYHILKEKIAYKELGYDYLSKRRKKSQVQSYLDKLKNLGVEVQVTSIA

SEQ ID NO: 174112 - protein, 389 aa, unidentified
MKIFVGIDIAKLNHFAAAISSDGEILIEPFKFTNDADGFQLLVSKLESFDKNSIIIGLESTAHYGDNLVRYLVAEFYQVCVLNPIKTCQMRKNNVRKTKTDKVDTFVIAKTLMMQDDLRFITFFDLDMMDLKALGRFRQKTIKQRTRLKIQLTTYVDQVFPEIQYFFKSGLHQNAVYALLKEAPSPKEIASMHMTHLANLLKVNSHGHFTKEQAKELRILAQKSVGANDSAISIQITQTIQQIELLDSQLEKIEAEMTDIMRFNDSVIMTIPGIGYINGGMILGEIGDIHRFSNPNKLLAFAGLDPSVYQSGNFQAKTTRMSKRGSRVLRYALVNAAWNVVRNNATFKAYYDAKRAEGRSHYNALGHCAGKLVRVIWKMLTDEVEFNLE

SEQ ID NO: 174113 - protein, 347 aa, unidentified
MRFYNRQHRHYCGIDLHVKTMYVCILDTAGQVLVHRNVPSTPEAFLETIAPYRDDLVVAAECMFTWYWLADVCATERIPFVLGHALAMKAIHGGKAKNDRIDSNKIAVLLRGGMLPQAYVYPAAMRATRDLIRRRLHLVRKRGQLLTHIQNTRAQYNLPAFEKRLAYPGNRDGVVEHFPDPSVRKSIEVDVALIDHYDALINDLELTIVRQAKRHDADAFHRLRSVPGIGKVLALTILYEIHDVTRFDRVQEFASYARLVKCAHQSAGKKLGTGGAKMGNVHLKWAFSEAAVLFLRHTKDGKKMLAGIEKKHGKGKALSILAHKLGRAVFYMLSRGTVFSAEKFRAA

SEQ ID NO: 174114 - protein, 358 aa, unidentified
MAVIEGTRRIVGGVDTHKDLHVAAVVDEQDRVMETRSFATTRQGYRQMLAWMRSFGELQSIGIESTGSYGAGLLRFMQQAGITVLEVTTPDKQDRRRRGKNDDLDAQNAAHAAFAGQRTVTPRSRDGMIESLRVLMACRKTAVSARRVALQMIHNTIVCAPDGLRDQLRRLTRMQLVRTLGSWRPDLTAYRDLESAYRIGLKSLARRYLELHDEIADLDAMIAAIVEELAPNLIARNSIGHVGAAQLLLTAGGNPERLRSEASFASLCGVSPVPASSGKTVRHRLNRGGDRAANSALHIIAIGRLRTDQRTKDYVARRIAEGHSKLDAIRALKRYLAREVFTLVTQRRREINATQIAA

SEQ ID NO: 174115 - protein, 307 aa, unidentified
MSLSIGIDVAKAKLDIFDGNRSFIIGNDEKSIREAFKGYCSDSKIVLEATGKYHRLAHRVLHSLGFKVMVIDPYQGRNFAKAMKITCKTDKVDAAVLSRFGETMKFTETIPSTEIQAEMRELSRHLDDLKRVKSEVEARRDEADGFIDKSLLSVIKSLEKEIKKTESQLKEVVSKSDELSKNVSLLQTMPGIGSATAIMLCSLVSELGKTSPKEIASLTGLAPMNNDSGTFRGKRRIKGGRHDVRRSLYMPVLGAATIHNPRLNIIYTRLVDAGKPKKVALTACARKVVVWANAILTQQQPWKETNV

SEQ ID NO: 174116 - protein, 402 aa, unidentified
MNAVGIDVSKGKSMVAVMRPFGEVVLSPFEVPHSSSELSKLARLLKSLDGESRVVLESTGNYHTPVAKMLHDAGLYVSVVNAMLVHDYGNNSLRRAKTDKKDAVKLANYGLDHWLSLPGYVPEEDTRLLLKNCYRQYQQYAKVQTMMKNNLLSLLDMIFPAVNRLFSSPVRTDGSEKWVDFIDAFWHVQCVSGLSANAFSAKYLKWCRKHGYNFSEEKALEIHRTARDHVAVMPKTDTTKLLVKQAVAQLRTVSSAKAALQNEMDALAASLPEYPVVMDMFGVGPKLGPQLMAEIGDVRRFHSKKALVAYAGIDAPPYQSGQLNVHSRSISKRGSPALRRTLFLVMSVYLQCSPADEPVYQYMAMKRAEGKPYLVYMMASANKFLRRYYAAVKAYLNALEQG

SEQ ID NO: 174117 - protein, 341 aa, unidentified
MDIVVLGIDLGKNSCSLAGLDASGRVIMRRRMRRSSVESFVNGLGRCIVAMEACCGAHHLGRVFAAQGHETRLMSPEYVRPYVKAQKNDELDAEAIAEAATRPTMRFVAVKSQSQSDTQALHRARERLVSERTALINHLRALLLERGIVAPQGRRKLQEELLVFADEDGIEALSPRIRLLIEDLRSEWRALDERIAAFDGEFVRMVREDDAVRRLTTIPGIGTINATALAAAVGNARAFGRGRDMAAWLGLTPRQMTTGGKPRLLGISKRGNRYLRKNLIHGARAVLPYLVQRETPLGRWARGLLARAHKNVVVVALANKLARIAWAVLARGRTYEAASAV

SEQ ID NO: 174118 - protein, 371 aa, unidentified
MENGITFVGLDAHKKKISVAVLMPDQTAPLQWDAPNEAGAVKRMVRRIEREAPGEVRFCYEAGALGYALQRQITEAGSEKVSCMVVAPSLIPRKPGERIKTDRRDARKLAELFRAGLLTEVQPPTPEDEAVRDLCRAREDAKEDLTRSRHRLGKMLLRKGVVYGQGNAWTARHRLWLRGLRFEHASEAEVSDDYLLAIEQLEERLRGLEEKLEGVAQKTPYAEPVGWLRCFRGIDTVTAMTIVTELYGFERFHSPRGLMAFLGLVPSEQTSGYDPKRGRITRMGNSHVRRILIEAAWHYRHRPGVASLRKRRQGQPAEIIALADKAQQRLHRRYRRMTEKGIPAPKAVTAVARELTGFIWAALRHTTKASA

SEQ ID NO: 174119 - protein, 355 aa, unidentified
MGGLKHQKEKRSMDHFAGLDVLVKETSICIVDDTGRIVREVKTASELEALLQVLTNPAYHFKRIGLEAGPLSQWLFSVLAEAGLPVICVETRHMRAVLKAQINKTDRNDARGIAQMMRAGLYRPVHVKTLRSQKVRILLTHRKLLQSKAIAIENDLRATLRNFGLKVGMVGTVKFEARIKELVENLPDLAMLVEPLLIVRRVLREQIGILHRRLLAIVRDDDVCRRLMTVPGVGPVVALTYRVTVDVPARFRTSKAVGAVFGLTPSKHQSGESNRTGGISRCGDEMMRMMLYEAAQILLVRSARWSWLKAWAMKIARHRGLKKAIVALARRLAVIMHRIWVDGTEFRWTREVAAA

SEQ ID NO: 174120 - protein, 434 aa, unidentified
MTATDSTARGRVLVAIDIAKAKHEVLVELPTGKRRKMIVRNELSDFRQLAGYLKRLDGVPEIALEPTADYHRNLAYFLKAQGFAVKLVSSIAVARTREALHNSWDKNDPKDAQVILHLLRNGNTQYFYDPVIEQTNDLQELSKTHFQVSLRKTRVQHSLLNHYLPLYFPEAERFLSTSRSNWFARLLFEFPTPQAITQLTENEFLERGSQLLKRKQSKAAVLRALYAKAQESVALPVPLESQAIATFRLTLAQHLELCRIRTELEETAHELLQDQLDYQILRSVPGVGPIIALTVLAEAGDLRRFGHERQFLKFCGLDLATSQSGAYRGRTQLSKRGNSRLRSALWMAARRATHMQENTFRQKFSRYLRADPTNTDLRRKAYTACTAKMARTIYGMIKHQQFYRAYREDAIPEPGGRTRSHGPLRQAASGGLTS

SEQ ID NO: 174121 - protein, 478 aa, unidentified
MAKVKQSAFDRLRMGARLNRKERRVVEQRLSAADPALEIVNRDAAGIDVGNESHYVAVPRGRDAQPVREFGSWTAALVEMAEWLVRCGIRTVVMQSTGVYWIAVHDVLQKHGLEVFLVDARGTKNVPGRKSDVQECQWLMRLHTYGLLRACFLPAPEIQRVRTVWRLRDQHVRDSSRCIQHMQKCLIAMNMQLHNALSDIAGATGQAIIRALLAGERDPETLAALRDRRCMASKEQIVHSLQGVWKPDVLFELQQAVDAYDFYRQQMAKCDEQLKQYLALLPARSVEPVDPPSTDISKKSRKPHKRQGNEPFFDLEAELERVLGINATTIDGINVMTVQTVLAEVGPDLSAWKTEAHWSSWLNLAPKRDISGGRVIRHVREHRTNRVGNAFRMAAQTLIHAHSYLGARCRYLRAKLGGHKAIKAMARILACVYYRLVMKGQRWVDQGMEEFNRRSEQRELDLLRRKAQKHGLQLVAAV

SEQ ID NO: 174122 - protein, 362 aa, unidentified
MKVMYERVAGIDVHKDMVKIAIRSPGDKPWTRKTEILEFRTFYGVLQHMAAELRKRAVTHVVLEASGVYTEPVYYALAGQDFTEVAVLKGHKTDARDCARLAELFECGLLRGSYIPAPELREVRDLTRYRMKTVQARTSEIQRLGKALESAGIKLGSVASDITGKSATAMIEALIDGERRGAVLADLAIGRMRAAGKLADLSQALAGRFTRHHALLCRLHRDRIDGFGAAVDDLDQRIAGKAARWQREADLLTTIPGFGDIVAWAWLGEIGPAPHRYFPSHEKLASWVTLCPGNNISARKRKHGQTGDAGTYIKPMLVQAAWAAIKGRGLLQARYNRLVCRFGGNKNPARRRRRSPRSRTPC

SEQ ID NO: 174123 - protein, 449 aa, unidentified
MKQKKPFKRKSMRLPKHLVHLNAYAAGIDIGSKSHFVAVPEGVDSEPIREFSTFTDDLERLADWLIACGITTVAMESTGIYWIPVFEILDSRGLEVRLVNARHVKNVPGRKSDVLDCQWLQQLHTYGLLRGAFRPADQVCALRAYVRQRGTLVRISASHIQHMQKALAQMNLQLHNVVSDVTGMTGIRIIKAILAGERNPKTLAKLRDKRCKNDEETIARSLHGNYRPEHLFSLKQAVELHEFYQAKIADCDLQILEQLKLFDAAESGQNGSSSKTPTSLEEALLQMSGVDLASIDGIDTNTALKIIAEIGTDMSRWKTDKHFASWLGLCPGAKISGGKVLSSATKRIANRAAVALRMAAFSLIRSKSALGAYIRRQRARLGASKAITATAHKLARLVYSMLKNGTAYIDVGQQYYEERYRSRVVQNLKRKAQELGFELIAVQEQTVQI

SEQ ID NO: 174124 - protein, 394 aa, unidentified
MYKGHLPWASLPRSSYVCNEDSSESSANFSLGTNNNKIMNKFRQLDFSGQDIFVGLDTHLKDWKTTVMVGDYIYKTFSQDPSPGVLKNYLARNFPNANYYSAYEASFCGFKAHRELLNLGIKNIVVNPADIPTTDKERKQKEDVRDSKKIARELSQKDLTAIYVHDIETEGDRQLVRYRKTLAKDLARTKIRIKMQLYFLGIGIPARFAEKPYWSKKFTAWLEQVELPTESAKKVLNGHLEMAHLLREKQYSTLKEIRTLAEKHRYKDNYLLLLTLPGIGTLTAMMLLTELGDIARFKNLDKLCSFIGLIPTTNSSGDREKTGDITPRGNKMLRSAIVESAWVAIRNDPALMLAYQKLIKRMKGQDAIIRIAKKLVSRILFVLKNKKAYVPKIV

SEQ ID NO: 174125 - protein, 353 aa, unidentified
MERFCVGIDVSAKKLDVAWRDSKRRVEREAFENESACHRALVRHLKKRAGRKVIRVVLESTGVYGIDLALALDRAGFEVMVANPRASANFAKASMQRSKTDRLDCVMLLEFAEQMTFRQWQAPSAVGLQIRTISRRVHALMSTIRDEKNRMHAANQVDGTEIVKRSIRATIKGLEKQVQELRTAALGLIQSDAVLTRRNELLLTVKGIGQISAIAILAELAILPPDMTDRQWVAHAGLDPRECESGTSLRMPPRISKRGNKYLRSALYLPARVACRFEPGVASFATRLRERGKKPLQIHVAVMRKLLHSIHAMFVNDQDFDGCRFYLTAAADAVGTSGIASSAISEVSTALSS

SEQ ID NO: 174126 - protein, 422 aa, unidentified
MKNSTALKLGQLPKGYLIVGVDAHKKSHVAVVMDENALVLRKVRFANSKSGFEEMLERVRGEASKAGSGGVIFAIEAGSHYWRNLAYFLDRERVPFRLISPYTLKRRREGEDLNRRKNDFRDAEMAAELLRTGKFTESRLLYGLYAEIRAAFGTYRRLRKESTMHINTLKGLLDAVFPEFTEVFKDPCGKTAMAVLLSSPIPHIIAETEASELIESVRANFSGKGLKSKKILGLHAVASSSIGIREGAEAVSEEIALLVERIKLNSEQMKRLVENIARLVDMIPESRHMLSVPGLSYISVAGIIAGLGPISQYKNGRQLVKMAGTNPTQRESAGKSSRHTPMSKHGRADLRWCLWPAVVSLLRYNPDFKSWVENRQNRKAQAHPLHRREVIGAGINRLLRLIFALARKQVYYQLPREQTVTA

SEQ ID NO: 174127 - protein, 400 aa, unidentified
MRVVFGIDVSKASSEVAILVNGEKVHNYTMSNDAIGFSRLLGDLKTVHKPEIIFEATGVYSRRLQAFLDEHGYAYTRLNPLEAKKQLDSLRVRKTNQIDAEKLAQSQFVLNRKPTYVQEEVYQNLRDLSRFYQNLTEDIVRAKNRLHKVLQVTFPELENILSTPTGEQYWNLVITFPCKDFVLDLSKNELSKSIRQSTSKRISDKRVAYLAEKLTALANQSYCAVKKTSPILEEVHYYAKELLRLSEQRQAVLDQMVELAQPLPEYDILLSIPGIAETTATSIIGELVDIRRFQSANQINAFIGIDLRHYESGNFLAKEHITKRGNPYARKILFKCIHNIASASHTNPCHIADFYEKRKRQSQTTSTKPHTIASIHRLIRTMYYLIMHNKLYDYASTQNR

SEQ ID NO: 174128 - protein, 348 aa, unidentified
MKNIIIGIDFSKETFDATVLDLSKTNGVLSASIDGMHQKFQNGKLGFRQLLRWVKTSTRQRPSKDWMFCGEQTGKYSHGLCDFLSSNGLDMWCEAPLRIKRCMGITRSKNDSLDSLRIAEYAYRYQDKMSAYKPVSKAIAQLKELFLARLKFVEQRKALYVRNNTCTEYSKGSDAEKMVAELSQKLIEQFDESIKKLDKEMQAIIDSDEEILETFENISSIKGISLINASAFIIYTNNFKDFGADPRRIASYWGVAVFAQDSGTSVHHPARTSPMCSKMLKSLLSEAAVAAKTYNPGIKQYYDRLIAKGKHKGVALNNVKNKLVHIITALAVNKTKYMEGYESIRKAS

SEQ ID NO: 174129 - protein, 278 aa, unidentified
MNVTTVGLDLAKNVFQVHGIDSTGKVIVRRSLRRRQMMPFFSKLEPCLIGIKACGTSHFWAREIAALGHQVKLMPPIYVKPYVKRGKTDAADAEAICEAVTRPTMRFVAIKSAEQQSVLALHRTRDLLVGQRTQLVNMIRSQLAELGIVLAKGIHHALRLVDQLVDGVVPDIPPLACKIVIALAEQIRALQARVAMIDGEIKTWFRGNEQAKRLATIPGIGTITASALAASVSDPHRFTSARQFAASLGLTPKADSSAGKDRGGRISKMGERIFVAYW

SEQ ID NO: 174130 - protein, 361 aa, unidentified
MSTIADDDARVIAGVDTHKDFHVVVVLDELGRKLDTATFAATPHGYRDLTGWVCGFGEVLAIGVEGTGSWGAGLCRHLRERGLNVIEVNQPDRHKRRRRGKSDRLDAEMAARAVLSGDATALPKAGNGPVEALRQLRVARTGAMKARTAAANQLHSVCDTAPDHIRSQLRGLTTRRKIAVAARYRPGDALTPIGGAKRALVTIARRWTALDAEVAELDRAIKTILDTIAAPLLARHGVGYETAGALLCTAGDNPERLATEASFASLCGTAPVPISTGNSKRRRLNRAGDRRGNSALWTIVMSRLRSQHAPTVAYLQRRVAEGHSKRDAIRCLKRFVAREVYGDIQTITAAQTTKSSLEIAA

SEQ ID NO: 174131 - protein, 490 aa, unidentified
MSRNRQLRQPPLSDATPTSGSPVPFRDVGIDLASVGEHHATVLDERAEVLFGRYFPTRAEALAQLEARALQATPSGTRLRVLLDCASLAWLPVAVWFQRRGHLVYQVPNGKTKDLREYYSKHSKSDPDDSYALAKHPTVDAESLVPLYLPTPEVFSLDRLNREHDRYSKEVAAMKNRLRDFLNSFAPGLAGALPVGLFHAGARELLREYLAPERVLRLGQRRFGTVLQNRLGDQVTPAVSAAVYQVYQQTATLFDLAERPAVCFDDLQAQLNRYWDELAHWEAQAAELKRQIGERYEQVSPGKHLSSLPGVGDLIGASFFGTVRGRDRFPNLASQRKFFGFTPKRNQSANSDKKSQRMTHAGPNLTKKHLFLATDMLRQHDPEVAAYYYDQMVRKGKCHTVAVCNAVNNKTIPRLHALLREDRPYELRDPETGESITPQQARQLIRERYTVPEEIRRARRSHQPRRKAQPPKEGTRSRKKGRAQSPGLRP

SEQ ID NO: 174132 - protein, 397 aa, unidentified
MNSVGIDISKGRSTVAVMRPFGEVVISPFEVRHTDSELSELARQLKSLDGETRVVMEATGNYHTPVAKLLHDAGLYVSVVNAKLVHGYGNNDLRRVKTDRKDAVKLANYGLDRWLTLPRYVPEEDTRLLLKNCYRQYRQYSKVQTVLKNNLISLLDTVFPNVNRLFSSPIRGDGSEKWVDFVAEFWHCRCVSEKSQKAFTNKYQRWCRKHGYNFSEAKAHTIHAEACGHIDVIPKSETTKLLVEQAVAQLRATSAALAALKHEMQSLASMLPEYPVVMDMFGVGPTLGPQLIAEIGDVRRFYSKKALVAYAGLDAPPNDSGDVTGRHKSMSKIGASSLRRTLFLVMSVYLQTAPLDEPVYQFMDRKRAEGKPYRVYMMASANKFLRIYYARAMELYK

SEQ ID NO: 174133 - protein, 332 aa, unidentified
MAYDFVIGVDVGKYFHHACVLDPQGRQVLSKRINQHEGSLRKLFGQFLADNASVLVIVDQPNNIGRLTVAVAQDMGADVRYLPGLAMRQLSRIHVGNSKTDVRDAYVIAHAGLNLPDALRNVDRVEEVFTQLKVLNGIDEDLARAYTRLINQMRSALVGTYPAFEHVLRGQMIHRKWILHLLAKYGGPTKIRRIGRTRLAAFARSHKARNPEPVIDAMLAAIHGQTVSIAGAEYAELGVAMSAKDALAKLEHRKEIEAQVLKLIQDIPQTEILLSMPGIGPRSAAQILMTVGDMSDLPDAAHLASYAGLSPRTNQSGTSIMSNSPNRAGNKN

SEQ ID NO: 174134 - protein, 369 aa, unidentified
MHDVTTFVGIDAHKKDLFIAMLVGNQATPVTWTVANEPNAVRRLAKKLEREAPGPVHAFYEAGPCGYALQRQLTTPRVHCDVVAPALIPRKPGERVKTNPRDARKLGELGRAGLLTPVRPPTPDEEAVRDLCRARDDAREDLQRCRHRFGKLLLRRGLQYRVGRQWTKAHRRWVDSLTWPHEAERVVVADYLLAIDQTEARLKELDQQLTAVAATEPYRERVAWLRCFRGIDTLSAMLILAELHDFRRFASPRALMAYVGLVPGEHSSGEKQRRGRITRTGNALVRRLLVEAGWHYQHRPGVGVALARRRKGQPARIIAIADKAQQRLCRRFQYLAVLNKPRPTIVVAIARELVGFLWAALQPALVVAN

SEQ ID NO: 174135 - protein, 389 aa, unidentified
MKIFVGIDIAKLNHFAAAISSDGEILLEPFKFTNDADGFQLLVSKLESFDKNSIIIGLESTAHYGDNLVRYLVAEFYQVCVLNPIKTCQMRKNNVRKTKTDKVDTFVIAKTLMMQDDLRFITFFDLDMMDLKALGRFRQKTIKQRTRLKIQLTTYVDQVFPEIQYFFKSGLHQHAVYALLKEAPSPKEIASMHMTHLANLLKVNSHGHFTKELAKELRVLAQKSVGANDSAISIQITQTIQQIELLDSQLEKIEAEMTDIMKFNDSVIMTIPGIGYINGGMILGEIGDIHRFSNPNKLLAFAGLDPSVYQSGNFQAKTTRMSKRGSRVLRYALVNAAWNVVRNNATFKAYYDAKRAEGRSHYNALGHCAGKLVRVIWKMLTDNVEFNLK

SEQ ID NO: 174136 - protein, 367 aa, unidentified
MTKSITVARRQTSNFAEKKYTVGLDLGDRWSWYCVLDERGEVVFERKVSTTPKALREVFGAMPHSRVALETGTHSPWISRLMKELGHEVIVAQARKVRLIGESRKKDDRLDARTLARLARIDPELLGPIQHRSARAQADLIMIRARAGLVRARTALVNAARGLTKSYGERLQGCNPRNMDAEKRKGLSAELQLALEPLLRAIESLSQQILDYNERIEQMARDSYPEVARLKQVKGVGTLIALAYVLTLEDPQRFTKSREAGCYVGLQPGRRNSGSSTPQLHISKEGDPYLRTLLVQGAQHILGPFGADSDLRRWGLKLAERGGKNGKKRAVIAVARKLAVLLHRLWVSGEAYEPLRNSRAIELPTAA

SEQ ID NO: 174137 - protein, 363 aa, unidentified
MTIVANTCPFVIGVDTHARSHALSILIAATGAVIDEAQFPATVAGLARAIDWAARRTGGDLAALWVIECVGAYGARMAASVTQAGYQAVEAARMNARANRGVGKSDPLDARRIAASVLPLEVNRLRHPRKDDGVRAALRVLVTARDMMTTERTAVINALTALVRTVELGIDARRSLTSSQIAQIAKWRDRNEDIARAIARTEAVRLAKRVVTLNNEITQNTATMTELIKQSPAKGLLDKPGVGPVTAAVAMAAWSHEGRLRDEAAFASLAGVNPIPASSGNIVRHRLNRGGDRRLNRALHMAVVTRMAHDPQTRAYVERRRAEGRTTREIRRLLKRYLARQIFRQLNATCRSVKAPPTSPVAA

SEQ ID NO: 174138 - protein, 358 aa, unidentified
MSTIVAHTHPFVIGVDTHARTHTYAALTATGEHLGTETFPNTAAGRARAISWAGRRAQGVADALWVIEGANSYGAQLARNVTDAGYRVVEAARMSGGRRGVGKSDPIDAQRIAAAVLALPTDRLRNPRQDDGVRAATQILLTARDELAGERTRAVNALTALLRVIDLGLDARRPLGARKIAEVTRWRTRDENIAAATARAEAIRLGKRILELDVELGQNMARISELVEASPAAELLQETGIGPVTAATTLVAWSHPGRVSTEAAFAAIAGVSPIPASSGNTTRHRLNRGGDRKLNRALNVIAMVRMVHDPDTRAYVDRRRAEGKTDREIRRILKRYLARRIYRHLNAASNSELGVDEI

SEQ ID NO: 174139 - protein, 357 aa, unidentified
MYSIGVDFHKAYSHMTVMDAQGQVVRVGKVSNTVEAVHAFVAPYRDDAQAVLEATRNWTVMYDMLERELRAVYLAHPLKVRAIAEARIKTDRIDSKILAHLLRCDLLPTAYVRPREQRVSQQILRQRMFLVRVRTMVKNRIHVLIDRQLDVREVATQFSDLFGSAGLAWLRTVGLADIERQLLNAELALFEAVQERIAESDGLVRNLAAGDPRVRWVRTIPGFGRFFAVLVVHEIGTIRRFATPEKLSAYAGLVPSVHASGGKVFHGRLTKQGNKWLRWAVVEAVRPAVTTDPDLRRYYERLRQRKGPNPAKVATARRLLLLAHRVLSQERPYRKPGPMTIRPRPRTALMNPLPAAG

SEQ ID NO: 174140 - protein, 337 aa, unidentified
MNNIEGCGVEVSARELVVARKGKAGVQLTRFANTAAGHRQLLRALTRGGQRVRVVLEATGLYALDLALLLSAQEQVQLMVANPRAVRHFAQAMMQRSKNDQLDAVVLLEFAERMPFTPWVRPAENTLALWAIARRLQALTKLCTAEKNRAHAMGLSEAIPAMVRRDIARSLQFHQRAMKKLRQQALQCIAADAQLQQRYQLLRSVPGLGEISAVQTLAELLLLPADRDVRQWVAYAGLDPREYSSGTSVRKYTRISKVGNAHLRRALYMPALVASRVEPHLRGFYEHLLARGKSKRQALVAVARKLLHAIYGMFRSQRPYDGTRVYLAAAAQAEKFS

SEQ ID NO: 174141 - protein, 396 aa, unidentified
MAVMIGVDPHKRSHMAVVVDRDDVEVDRLEVRASRVQVQELLRWAARFGERTWAIESADGLGYLLAQQLVAAGERVLDVPATLPARVRVLASGRSNKNDANDGYSIAVAALHAPTLRAVEAADHAAVLRLLAKRNKQLGGARTRAACRWHALLVELVPGGIAKEITPNRAARLLESVTPANPVEVTRHMLALDHLDDLCRVDDQLRDLHRRMDDAVKASGTSVTELFGFGAVGAAIAVGYTRDITRFANRDRFAAYNGTAPIEVSSGGRTVHRLSLRGNRQLNHAIHIAAITQIRHAHSPGRAYYERKLAEGKTKKEATRALKRRISDALYDRLVADANAGSGGQTGTTGTSVTGITPRKPALRESHSRTRHEPTTRLSTAPTTPQRRRKRQRNHS

SEQ ID NO: 174142 - protein, 343 aa, unidentified
MDQHIGLDVSLKDTSVSVRQDGKRIWRGKCASDPKLLAEVIRKRAPNAKRVVFETGPLSVWFFHALTAEGLPAICIDARHAKAALDMAANKTDANDADGLAHLAEVGFYREVRVKGFDSMLMRTLIAARRQLMKMRVQMSNQIRGLMKTFGLVVPKGAGSVFDRNVISLLEGEDNLARIILPLLKAWGDIRLRVAELTKQLVAMAGADQRCRLLTSVPGVGTVTATAFAAAVEDSINFKNSRAVGAWVGLTPKRYQSGEVDYEGHISRRGDAKLRTLLYEAASVILNRSTETNALRTWALALKERLGFKRAAVALARKLAVIMHAMLKTGELFDPNAGAAAPI

SEQ ID NO: 174143 - protein, 366 aa, unidentified
MKQQHQDSEVTIGLDLGERWHRFCALDGRGEVVEEGSVLNDRASLARLTARYPRALAVMEAGTHSPWVSRYLEGLGWEVIVSNPRKVRAIYQHERKSDQRDALMLARIGRMDRALLYPVRHGSEQAQQDLLRIKLRDSLVRARVALINSVRFSLKSLGYAVSNPSSERFHKVAMEGLPERVQQMVAPSVQALAELSTRIAVLEREIHVVARTKYPQTLLLQQVPGAGALTALYFVLKIEDPQRFENVRDVGAYAGLCPRRDQSGGSDPQLRISKRGDPYLRRLLVSAAQYILGPFGPKSALRAYGLMLAADGSARARKRAVVAVARKLAVLLLSLWKNRSHYEAFPHWQTIEDKRSGTIAMHRVEA

SEQ ID NO: 174144 - protein, 384 aa, unidentified
MQRATNTATVSANTLHCALELSKKTWLLAIQFPDREQPSVYPVKGGDAGALMAKLIAARDRWAKVSGSPPSIVLCYEAGYDAFWLARFLKGHGIECLVLDPGSLEVNRRSRRVKTDRIDLKKLLRTLTAWCRGERHVCSVVRIPTIDEEDLRRSHRERSRLICERTAHINRIKGLLFAQGIRVGNISSKTLTLDKLVTGDGHRLPPRVAAEVEREIERLALVQKQIDKVECERDTAPAACKETEKKRHLLLQLKSIGPTNAALLSREVYYRHFDNQRQLGSFIGLTPSPFKSGDEEHCQGISRTGSGHVRAAMIEAAWLWVQHQPKSALTRWFNQRTAGQSKRVRKIMIVALARKLAIALWRFVELGLVPEGAILSPRVIAKAR

SEQ ID NO: 174145 - protein, 312 aa, unidentified
MNTEIFVGVDISKEHLDVAFGPDQAPQRFPYTPEGVNRLLAHLQALSPTLIVLEATGGLEADLMDALSRAGLPFSRVNPRRVRDFARASGVLAKTDRLDARILAEFGQKMRPPVTVLPDEHTRHLEILVARRRQLVEMRAIEEHHWRTAPETARPYIRKHLEWLDAEIATLEREIADWVNQTPLAETVEILDSAPGVALVGAATLVAEVPEIGRLNRKKIAALVGVAPYNRDSGTQRRQRRVTGGRQAAREVLYMLTIAGIRCNPVLRTFYQRLRAAGKPPKVAIVACMRKLLTILNAMVRDRRKWCLELAG

SEQ ID NO: 174146 - protein, 343 aa, unidentified
MSIITIGIDLAKNVFAVHGVNESGKPELVKPKVARDQLLPLIANLPPCLIGMEACSGAHHWARQFQQHGHTVRLIAPKFVTPYRMTGKRGKNDAADAAAICEAVTRPQMLFVPVKDEHQQATLTLHRTRQGFVEERTALYNRLRGLIAEFGIVLPQKVERLREDIGAHLEDLPGWANRCVGDMLAHADRLEERIREYDKAIAQLAKGDVRSKRLMQLPGIGPTTASAMLASIGSGHDFKNGRQVAAWIGLVSGQYSSGGKARLGRITKAGDSYLRSLLVLGARSVLNSLGDKQDRHSRWARSLVERRGYWRAAIAIAAKNARLSWAVLKYGEDFKLYSTQAEG

SEQ ID NO: 174147 - protein, 341 aa, unidentified
MEPLYAGLDVSDKKTNICIVKKDGKAHWQGVCASDPDALSRSLKKRAPGLVSVVLETGPISSFLYHGLQVRGIDAVCICARHAKGVLSTRLNKSDENDAEGLAQLARTGWYKAVHVKGQSTHLDRTLLRVRHQLVKSHVDMLNQLRSLLKLFGLRLGAVTTPDKRSERLTHLFEREPTLKPLLDPLINALSGIEFELKKLAKQVKRQAAGDLVCKRLMTVPGVGPITALTFKSSIEDPARFKRACDVGAYAGLTPRRFQSGDMDTMGHISKRGDKMLRRALYEAANSILGRLKRDCALKAWGRKLAEHKGAKPARVAVARKLAMLMHRIWVTGEEFDWQKV

SEQ ID NO: 174148 - protein, 342 aa, unidentified
MTIVMIGIDLGKNSCSVAALDERGAVVLRRRMRSASIIEFAAKYAPCTVAMEACCGAHYLGRRLIEQGNAVKLMPPEYVRPYVKAQKNDDRDAEAIAEAATRPTMRFVELKSQEQLDIQSLHRVRSRLVGARTTLINQMRAVLLERGTTVVQGRRKFEKALDGMLANEALLIPGRLRDLLVDMRAEWAALDRRIDAFDQEFAQLARTDEVARRLTSIPGVGALNATALVAAVGKAEAFDQARDLGAWLGLVPRQHTTGGKPRLLGISKRGNTYLRTLLIHGARSALPSLAKANTALGAWLRGLQARCHPNTVVVALANKLARIAWVLMRRETVFLAPRAATV

SEQ ID NO: 174149 - protein, 314 aa, unidentified
MTAEKWYVGIDVSKAGLDVALLPAGEYWQFENTPKGIAKLIHQLRSLTLDRIVVEATGGYETALVEALAQAGMPVCRVNPARVRRFAQGMNWLAKTDKIDAKVLARFGEKAQPRLLELPSEAEKRLAALVKRRQQVVEMLVAEQNRLELAERQALKSITDTIQFLQEQLAALDAQIQDQIDQDPGLKQKQELLKSVPGVGKVLSATLISHMPELGSCDRKEIAALGGLAPYSHDSGRFRGRRMIRGGRPFVRKVLYMATVASIRFNPVIKAMYERLMESGKRTKVALVACMRKLLTILNAILRTHTPWHMAPVS

SEQ ID NO: 174150 - protein, 394 aa, unidentified
MKLVGIDVGKNSHHFCVMDKETGELNVTPSSFPNNKEGFDFLINSLKPYSKKSILIGMEDTGHYHVALLKFLLSNGYTVALINPKTTDLARKMEGGITKNDKLDTITICDVLDTPERKKQYRITKVDRFDLYEQRQLTRHHHNLKEELNLYCNRLQKSIDLVFPEFNTLFSSKYGIVYMNLLKTFGSAEAIASTDIRTIRKCFEIKGRGGRISLTAEKLKECAKNSIGISSEVETIQIKHLVSQITLIKEQIAEIDKKIEEFSITNNSPILSIPGISHFSGTSILAELGDIGNYSKPSQIIKFAGVAPYHYESSQYNAQHTAITKKGSKYLRKTLYQIILPVINNNPVFKKYYRLKISQGKGHRCAQGHCIRKLLRIIYHLLETGQSFDPALLR

SEQ ID NO: 174151 - protein, 346 aa, unidentified
MFVGIDVHKDTHTAVGISPYGEKLFEITVGNYKEDFEKLDEKVKEVSGILSPYIGLEDVRGYGERLAGYLYDKYPIYHVPSILVDKARQNATHPEKSDSLDALGVAKVMIQSIDTLLPYTISQESEKAKQLKEISIDREDLVLERTRLKNQVHTLLYRIYNTEYANIFKDPFSLKALKYWKSCKVQCDPYLMKTMKRKVKRILDIHTEVSELEKDMEKLLDANYTIQTASGCGVVIASAIIGEIGDIQRFKSPASLAKYAGCAPREKSSGKKVRHVKSRSGNRRLNCAFHRMALSQISRSGNEKAKTYFQRKIAEGKSKSQALVCLRRQLVNVVWNMMKYKTAYRD

SEQ ID NO: 174152 - protein, 366 aa, unidentified
MKKISTMQAFSNEILKEQKLTIGLDLGDRWSFYCVLDETGKIILEQKVATTPEAMKQTFGKIPRSLIALETGTHSPWVSRLLTELGHEVIVAHAQKVELITKSNRKDDRHDARTLARLARFDPELLGPVRHRSAKAQIHLTVIRARAELVSARTALVNAARGLVKSYGERLPKCGTQQVSRELGAGLSAELRDVLEPLLKEIESLNERIQEYDERMEKIAKEVYPEVSLLKQVKGVGTQIALTYVLTIEDPYRFSKSREVGCFLGLKPGRRDSGESKPQKGISKAGDRYLRTMMVQGAHYILGPFGEDSDLRRWGLKLAERGGKNAKKRAVVAVARKLAVLLHRLWVSGEVYEPLRNSQKAMPAVA

SEQ ID NO: 174153 - protein, 376 aa, unidentified
MNELNGEISKGIGDEATQDKALGRVLKLGLDVHYRQVTVARQEDGGRIKAAGKMNHGAFLNWVRTKLEQGWQLYSCYEAGASGYWLHRQLVELGVKNLVVAPKAMGGAEAKRQKTDKRDSAQLCDGLDRYLRGQDKALSVVAVPTVEQEQNRALIRYHRQMIKDRTRAEARGKGLLCTQGIEVGGRWWEGKGWAEVQSDPRLKDWMKEQLEGWQKKILSAQSQEKPLREQIEALAPERLPKGVGAYSAAVLQHEMKGWKRFSNRRQVASYTGLCPGIHLSDGRGKEGSINRCGNPTVRWTLVEMVWRLMIWQPHYGPVRQLAAGLVKSKRAKKRLVVKAARRLAIDLWRLETGQTTAEKLGLIMRLRSSSKKNRGL

SEQ ID NO: 174154 - protein, 356 aa, unidentified
MGNSNKLDFTGQPIFIGLDVHKKSWSVSIHSAVCEHKTFTQPPEVDILVNYLRRNFPGASYRSVYEAGYSGFWVHDQLMEKGVACIVANPADVPTKDKERRTKRDRVDCRKLARSLRAGEIEGIYVPGRPKLEDRSLVRTRQSMVRKQTRCKNQIKGILFFYGIPLPEDGAERRWSGPFMRWLETLPMERASGEVALRMHLDELKHLRQIIARLDREIRVLAQTGEYGVQVRLLRTIPGISTLTAMILLTELQEISRFRSLDELASYVGLIPDTRSSGETEHTGELTKRRHAQLRASLVEAAWVAVRKDPALLMAFEESCQRMRKTRAIVKIARKLLNRVRYVLKNQTPYRMGVVQ

SEQ ID NO: 174155 - protein, 435 aa, unidentified
MKSYVAERMNQRLDAITATTLIVGIDIAKAVHWARFVDYRGIEVGKPFSFRSDRQGFERIVAKIEEIRNSKVMRQRFDNVLIGMEPTGHYWKTAASHFMKVQYRVVCVNPHHTKKSKELDDNSPTANDKKDAITIARLVKNGSYFEPYLPQGVYAELRNLTNARVSTMKRSSAVKNTITAIMDEYFPEFCAVFKKPLKGKASRQILRSCPFPAFILELGEVGVLAEIKKAVKKSVGKKKVLQLIEVAENTVGADYGLDTARFRLRQLLDELEMYERHVAETEVAMEQMLNATGYAEQILSIKGIGVVTAAGFLGEIGDPLRFQNARQIANYAGYNLTEDSSGKSKSGTKISKRGRSQLRALLYQMAFTMVGKNAELKALHKHLTTRQKNPLKKKQSLVVISKKIITVIYSLLKKQATYDPALVLGTVRREMMQAA

SEQ ID NO: 174156 - protein, 346 aa, unidentified
MSKPESSAISAIGIDVAKATLSVCFRRPKADESALTLRNTDADIRKKLLPHLDGFTGRVVMESTGHYHWRVALLLTEAGYKVFVVNPILAKQYTSSNIRKVKTDPADASGLARMAELADNLPRCFALTRETLNLRKKLSVIASIAKQMQALKATQRQLAEGHEILRTGASRGEDALDTTIKQLTKTADLLEDEFVKESAALETDSTAATIIDGIPGVSPFVAHLVLHWLAVLPDITAKSWIGYAGLDVSSRESGSWHGRCRLTKRGNSFLRRRLYSAAWGATMSDEKFKEYYDKMRADGRPHVEALLIIARKIVRIMFKLLETKKKYDPSLFTFGKKTKLTLDIAL

SEQ ID NO: 174157 - protein, 360 aa, unidentified
MSFNGTSVGLDVHALWVVAHAFDEETGQVERARLCPDYGEILDWLHRLRGPVRVAYEAGPTGFGLARALADAQIDCVVAAPSKLIRPAGDRVKTDARDAAHLTRLLRLGEITAVTVPEADVEAVRDLVRAREDARADLMRVRHRLSKLLLRHGRVYSGGQAWNGVHQIWLRRQRFDDSHTRAAFDHHFDAVLAATAARDRLDEQIVAVAASPRWAEPVDRLGCLRGISALTGLALSVEIGDWTRFTGSSIGAYVGLVPCEYSSGASRVQGSITKAGNAHVRRLLIEAAWHHRAAYRNPGPTMRARWAKVDPALKDRGHAGNRRLHQQWCRFIERKKPHVVANVAIARELAGWCWSLATLN

SEQ ID NO: 174158 - protein, 422 aa, unidentified
MLEETQDDQEIIARVAALDIGKAELVCCVRVPGQGSSGRRAQEVTTYSTMTRSLQVMADRLLDLGVTRVVMEATSDYWKPAFYLLEAHGFEVWLVNARDVKHLPGRPKTDRLDAVWLAKVAERQMIRRSFVPPSPFRRLRDLTRYRAALISDRSGEKNRVEKLLEDAQIKLSVVASDIFGVSGREMMAALIGGQRDPKVLAQMARARMRAKIPQLEEAFVGHFTDHHAFLLTRMLARIDQASADIADLDARIEEQIAPFADAVKRLDAIPGVGTAAAHVIIAEVGLDMTRFPTPAHLTSWARFAPSVKESAGRTKGSGSTGHGNPYLARVLGEAAVAAGKTDTFLGERYRRIARRRGKKKAVVAVGRSILTIIWHLLSHTDAEFRDLGAGFYDTRMGTESATRNHVRHLQALGYKVTLEPAA

SEQ ID NO: 174159 - protein, 339 aa, unidentified
MELYAGLDLHSRNTYIGIMDKAFNRVFKKRVPNHLELILQTLDPFQDQIKGFVVESTYNWYWLVDGLMDAGYSSAHLANPSAIKQYEGLKHSDDQHDAFFLAQLLILGILPQGYIYPKKERPVRDLARKRMFLVQHKTAHILSLQSLIQRCCAMKVRANDMRHLTVKELELWLEEEHLVLSAQANLDSVNFLKQKIKQLEKAIIQKVKLNKAFKYLLTVPGIGNILAMTIMLEVGNINRFPKVGNFTSYCRCVPSRRLSDGKSKGQGNRKNGNRYLSWAFTEAAQLGRRHNERFRRYYNRKVAQANTSLATKALGNKLARICYYIMRDQVPFREELFCH

SEQ ID NO: 174160 - protein, 392 aa, unidentified
MYIVGIDIGKNHHEASIVSPEGKQIGRSLRFATTHKGADSLMSFIFKNIGNSPCVFGMEATVHYWYPIYSFLKAKGYTIYVINPIQSDSLRKMYIRQTKNDSIDSFLIAEVIRFGQFGTTSMADENILAMRQLCRYRDSVISSRTEIKLRIGTIMEQIFPEYEKQFSSLWVSTSMGILEKYLTPENIENAPIDELFEIIKDKSHNRLTKAKAISIKEAAADTFGIKIAQDAFSFQLKQLIDRMNFLDKQIEALDCQILEYYEKFDCYLHTIPGIGMIAAATILAEIGDINRFKSSSALVAFAGIDPTVRQSGEFSSTHNHMSKRGSPYLRHAIFLAATTCSFHNIPLNAYYKKKREQGKHHLTATGAVARKLTTVIYAVLRDGKPYEPKSFC

SEQ ID NO: 174161 - protein, 304 aa, unidentified
MFGIGIDVSKATLDVAVHGEQFRQFSNDKRGFVRLIRWLKTWPIKQVVLEASGGYERAALDVLHAAGLPMVRINPARARRFAQGTGRAAKADRLDATVLAQMAHLLPLTRYVPPAPWQQRLAEFAQCRRHLVQMRVSEMQRLRRLVDPDLIAMKQRYIAQLSDDLKQLDKAIAEQLEGQPGWKNIGALKGVGPILISTLASELPELGSLGSKTIASLVGLAPMNRESGTWQGQRRISGGRAVVREALYMAALTAIRYEPRLRTFYAGLKAKGKASKVALVAVMRKMLVILNARKRDAEVALGCP

SEQ ID NO: 174162 - protein, 355 aa, unidentified
MKLNKPEDIYEIVVIGVDIGKDTFHLVGFDQFGQRVLRKKIKRLALQPTFEDLPRCIVGMEACMSAHFVSRMLRELGFEPRIIPAIYVKPFNKGQKNDYNDAEAIAEAAMRPNLRTVTEKSQDQLDLQAMHRVRSRLVARRTATINQIRAFLIEQGITVRAGRHRLQSSFEAILENRRDEISPRMRSTLLGLYGDWLWVDERIKALSSEIEEISRSEENSANVMTIPGIGPLISTAIVAAIGKGEVFDRGRDFAAWLGLVPRQFSTGGRTILGRISKRGNNYLRMLLVQAANVILMRPHRWDAIGLGPWLRGVVSRMPHNKAAVALANKLARIAWSVLRHGKIYTVGGDETLGAI

SEQ ID NO: 174163 - protein, 356 aa, unidentified
MVVYVGIDVHKKYCQAALMNDNGKLERELRFDNTTEGAKSLVNLAKSIDPEIKAVLEPSANFWIRIYDQLEDESVEVKLSNPLRTKAIAEARIKTDRIDAKTLATLLRGDLVAESYVPNHKNRERRAIIRHKASLMHMRVEIKNRIHALLDKHELTHSYSDLFGKEGLEWLRNIQLPTIDHQILQSNIQILETITTEIDNADIQIAKDAVNENQAKLLMSMPGVDYYAAMILLSEIGDVKRFPTPDKLASWVGLTPQVHQSGETNWTGHITRKGSKRARWILGQCAQSARQHDPRMRNFYERIERKHGSSKAIVAVAHKMVTIMHVMLTRNEPYRGQNIQLTEKKHKRLNNIANSA

SEQ ID NO: 174164 - protein, 346 aa, unidentified
MKRYLGIDMHRESCTVVVLSAGGKETDQRVVPTEAAALVQYVRSLSGELHICVEEGEWSEWLVELLSPRVHRVVSCTARGRRGPRSDAKDARELAERLRTRQTGPPVYKPLAAQWGRLREAVRLESKLLGDEVRAKQRLKSLYRRRGVACVNAEVYSPRLRGEWEKKLPPSLRPSAELLGQELDQLAELQQIAEQQMCDAAGKFPMWRKLQTVPGIGQKRAAQLLAVVVTPHRFRTKRRFWSYCGLGVVTRSTSDWVRQADGQMLRVPVIQTRGLNKASNRQLKGIFVGAARTALSCRPPNPLLEAYERIVESGTKPNLARLTIARKIAAVVLAIWKTESEYRIMN

SEQ ID NO: 174165 - protein, 311 aa, unidentified
MTEHTIVGIDIAKETFDVFISPAGRFLHLDNSPQGHQQLIDALASHTVIRIVMEATGRYHNLLAATLELAGLPVAVVNPAQVKHFARALGTLFKTDPNDARIICEFGRRISPDIRPAPDEQTQRLAMMVSRRRQLVDNRTMEQNRYGSCTDELIRTGIKRHIDWLNAEIKDTDDDIDRQIKVMPLWQEKVKLLEEVKGIGRTTLAVLLSMLPELGKLSRRKISALVGVCPYAHDSGKMKGKRCIWGGRSAVRAALYMAAMSAVRYNPTIQAFFERLRARGKAFKVAMTACVRKLVTILNAMVRDNKKWVAD

SEQ ID NO: 174166 - protein, 427 aa, unidentified
MTDQLQHTAYSSWVAIDIAKDSNVVMVELLDGKTRRFRMANSGKDHDRLIELIHELPQPCHIGFEATGNYHRPLAYRLLTEGFDVSLISSLASARYREAIFNSWDKNDPKDAGILLELLKRGIVQTYVDPLKSGYHDIQELSKTYSNITLSRTRLQHSILTHYLPLYFPEMAKFWCSTRNAWWINYLLHFPTPASVTQYTEQAFCQIASPIIGRKTNKQAKLLELYKAAQHSIGLPIAPDSLACQTFQIQLQRYQELTKQRQQLEQQAEATLSTNPDYCLLKTVPGIGPIVAMTILAEGGDLRRFNHHRQFLKYCGLDLAKNQSGNFRGQDKLSKRGNARLRLALYMASLHAIRQTENSFRNKFHRYTQATPKDADCKRKAMTAVMAKMARVVHALIKSGTPYQGYFEVSPSGSIPLFGAVGATRTP

SEQ ID NO: 174167 - protein, 343 aa, unidentified
MQTVTTIGLDIAKSVFQVHGIDAAGQVVIRRQLKRRYVLAFFQKLPPCLIGIEACASSDHWSRELQALGHTVRLMPPAYVKPYVKRQKNDATDAEAICEAVTRANMRFVVTKTPEQQSGLVLHRARHLFIRQQTAVINAIRAHLAEFGIIAPVGRHGVEELLNVVADPNDKRVPEIARACLLAFGAQLRRLKEQILEFDRMIRAWHRSSETSRRLDDCPGVGPALATALVATVADPKSFRSGRNFSAWIGLVPKQHSSGGKNRLGSISKQGDRYLRGLFVAGALAVIRYAKIHGTKHRPWLTALLARRPTKVAAIALANKIARMAWAMMAKGERYKEPVALAA

SEQ ID NO: 174168 - protein, 346 aa, unidentified
MRFYDQQHQFYCGVDLHTRRMYLCILDREGNKRLHRNMRAKPQEFLNAIKGFRDDLVVGAECMFTWYWLADLCLDENIKFLLGHALYMKAIHGGKKKDDKIDSEKIARLMRGGTFPLSYVYPREMRATRDLVRRRIFFMRRRSELLGHVQLVNQQYNHDPFEKMLQYACNRDVLDRFGQGNTRQNVEADLQMIGHYDQLLKELESNLLRQAKLQDPQACFLLQTISGVGKILSLVLLYEIHTIDRFPSVGDFLSYARLVTPKHISDGKVTGHSGGKIGNAHLKWAFSEAVIAMLRCSADAQQFVARKEKKHGKSRAMTMLARKIARAVYHMLKRKEAFDAVKFFAS

SEQ ID NO: 174169 - protein, 348 aa, unidentified
MNKYSELKSIKVVGIDLAKSVFHLHGVDSHGRTMMRKKLNRNKLSEYMVMLPPCLVGMEACGGSHDWARRLATMGHDVRLISPQFVKPYVKSNKNDVADAAAICEAVQRPDMRFVPLKSVDQQDIQSLHRARSLAVSHRTAQANQIRGLMLEYGIAVAKSIAALRSAVPEILEDADNALTPMFRELLCGLWDEMLRLDHRIVAYDTQIKHLSEQSDVCKRLMTIPGIGPMVSTALVASVADGKAFKSGREMAAWLGLVPRQYSTGGKPRLLGISKRGDVYLRKLLIHGARSSLRWANRKQDGRSQWVSELATRRGQNIAAVALANKIVRTAWVLITRNEEYRTTTVVA

SEQ ID NO: 174170 - protein, 389 aa, unidentified
MFFLGIDIAKLNHVASLVSDNGNIVFSNFMFKNTLEGFLSLIDKVKSIPKDDIVIALEFTGHYSDNFVNFFFNKKFNVTLVNPANVANFRKSYGRDSKNDRIDSINIAKMLLSREYSLVTQSDIEYLSLKKLNRIRDSLVKQKSKCKILLSRNLDSIFPELHLLPSGIHSKAVYALLKKYPSSEEIAALGIDVLTNILKTNSRGHFCEKTACIIKSQAKSSVGFEDISLSFHISQLISSIELLEEQIRNTEKQINAIIEKLKPVILSIPGISNVACACILGEIGNISRFRSPSKLLAFAGLDPKVRQSGQFRALSCRMSKRGSKYLRYSLIYTAWNAVRNNEVFSNYYALKRSQGKNHYKALGHVAHKLVRVIYRLMKDNIPFDAEQLI

SEQ ID NO: 174171 - protein, 320 aa, unidentified
MDTVLGIDIAKAKFNVTLRFPDGTRRRKACPNSPAGGAELLAWLTRQGASRVHACLEATGTYGEALATLLVDAGHRVSVLNPAIIHHYAKSQLARAKTDRVDADVIADYAAKEHPPAWTPLPREVRELQALGRRLDALVGMQTDERNRSQAGPLTPAVRESIEAVLEHLAGQIATVRDQIRQHMNQHPGLRAQRDLLTSIPGIGEATAALLLAELFNKAFTSARQAAAFAGVVPRPHDSGTHQGRRVMCKLGPGRLRKGLYFPAIAALRFNPSLQPLAQRLRGAGKPPMLIIGAAMRKLIHLAFGVLRSGRVYDASLAKA

SEQ ID NO: 174172 - protein, 397 aa, unidentified
MIAVGIDISKAKSTVAVIDSDGTVLASPFTMAHTQPEMEAFVSYLKGLGEPTTILMEYTGHYHYPVLKKLQDEGFPVCIVNPYQMKKYGDVEIHKAKTDKKDALRIAAYALEKSYKLVPYSSMEQKYEDLKFLSRQYSQRITYVAKLKVQLIALLDQTMPGITRTLPLNSRNPEKCALLLFIKRFKSFDEIQRIGKARFLASYDVLAKKTSERSASSKGLSIYELAVDSITTRGEDPYIWLSQNQCVDLLSATQNAADEIISQMRNIAETIPEYKVLRAMHGVGDRLGPIILAEIGDVHRFHSGKALNSYAGNDAPPYQSGQFESRNRHISKRGSSTLRKACYEVMQALKLTKPQDDPVYLFMLKKEQEGKPFNVAKMAGVNKFLRIYYARAMELYK

SEQ ID NO: 174173 - protein, 358 aa, unidentified
MNTHRVQDFVVEGKEVFVGLEDSKKTWKIAVRCTKMLIHEVSMEAKYSLLIRYLRNKFPQCTIHLIYEAGFKGFNLYDRLTEDGIDCIVFPPHMVTEPKVNKVKTDKRDARRLALILENHDYKDSCHVPDKERREDRQISRTLIAVQKDIIRNRNRIRKILDFHGIDVPFAGKDTWGRKEFGALRELSLSEPLKLTLNLFLDQLEQLWAHQSSLRDALRRLCHKERYRPAFEIARSLPGIGWFTAIRLILELGEDLSHFTSGKKIAGFVGLASSEHSTGETERKGRITGLGSGFIRSVLIECSWTAIRRDQALLSKFMRVWRASGMKKKGIVAVARIMIVRLRACMLSGRPYTIGMVR

SEQ ID NO: 174174 - protein, 343 aa, unidentified
MKITTIGIDLAKNVIQVHGMDERGRAVLKKQLKREQVASFFANLPPCLIGMEACGSAHHWARKLTELRHTVKLIAPQFVKPYVKTNKNDAADAEAICEAVARPNMRFVPIKNGGQQAVLALHRARQGFVKARTAQANQIRGLLAEYGIVIAQGIGHIAKRLPEILEDGENNLPGTFRQLLDRLGDHLKELDRQVGALEVQIQSWHRENEASKKLAKIPGIGPITASALVASIGDAKSFENGRQLAAWLGLVPRQHSSGGKQMLLGISKRGDTYLRTLLIHGARAVIRVAEGKVGHADSWLARLMDRRNKNVAAVALANKNARTVWALLAHARDYQAGYAPTAA

SEQ ID NO: 174175 - protein, 347 aa, unidentified
MRFYTKQHKFYCGIDLHAKKMYLCILDEAGEIRLHRNIKTDREVFLKIIEPFREDIVVAVECMFTWYWVADLCTEHVIPFVLGHALYMKAIHGGKAKNDKIDSHKIAVLLRGGMIPMAYTYPAKMRATRDLLRRRNHLMRKRAELYAHIQNTRSQYNLSDFLGRIAKAQNREGVAEHFEDPSVQKMIAADLAVIEAYDPIIAKMEREIISMANHHDPVAYALLKSIPGIGKILGLVILYEIENIRRFPSVQDFVSYCRLIKCSKESNGKKSGTSGKKIGNAHLKWAFSEAAVLFLKGNEQGKKYLDRLANKHGKGKALSILAHKMGRAVYFMLKNKKPFDQDKFLGL

SEQ ID NO: 174176 - protein, 370 aa, unidentified
MRDDTTVLGLDVHKETIAAALLPAGAGMVRDLGVLPNTPEAVRKLVKRVRVPGPVVVVYEAGPCGYATHRQMEGLGVPCAVVAPTLIPIRPGDRVKTDRRDAAKLARLYRAGELTEVRVPTPGEEAARDLVRAREDVVANRLRARHRLSKFLLRQGRIWREGRAWTGKHGVWLGGQRFDESLQQQAFDAAQRGVAEADAHLAVLGQQVTDAAQVEPWRAVVTALRGLKGVDTLAAMTLAVEVRDFARFPTGPAFMAYTGLVGREDSSGSRIRRLGITKAGNAHVRRVLVEAAWHYRHARGTVSPALAARRAVLPPLLAQMAQRAQDRLQRKFGRLVSRGKVPQVAVVATARELAGFVWALARAGATEATT

SEQ ID NO: 174177 - protein, 323 aa, unidentified
MYAALDLHEKSIQCVLKDLDGCIVKESKMGKDEDRILEFLDGTRASVVMESGYNHQHIYDVLKEKGYDVKVAHPLMVKAIAYAKVKSDKVDARMLADLLRADMIPEAYVPGKDIREIRDLVRRRQYMVRLRTMLKNKVHAEIATRWIKHDGDLFTEDGRAFLRSLSIDAVNDYLETIEFLGRKIRELDEKVRPIAESDRYAKLLMTIPGIGHYSALLISSEIADINRFPDHEHLCSYANLSPGVRQSGETQHASTGFGNSMLSWIMIQCTRIHVRRCDSAITRFYEQVSKRRGEKVAIVAAARKLMRAMYIMLKEEKAFRLDG

SEQ ID NO: 174178 - protein, 385 aa, unidentified
MKKISTAAAKQTKNFHEHKLTIGLDLGDRSSWYCVLDEAGEVVLEQRLGTTPRAMKEVFEDMPRSRIALETGMHSPWVSRLLSDLGHEVIVAHARNVRLIGESRKKDDRLDARTLARLARIDPQLLCPVKHRSAKAQADLTVIRARAGLVRSRTALINTARGLTKSYGERLRGCNPRNLNPEKAQGLSPELQAALEPLLAAIESLSERIHEYNQQIAKIAKESYPQVARLEQVKGVGTLIALTYLLTLEDPHRFRKSRDVGCYVGLQPGRRNSGQSEPQMHISKEGDPYLRTLLVQGAHHILGPFGADSDLRRWGLKLAERGGKNWEETSGDCHGTEAGRLAASLVGERRSVRTAAQQSPGSNAGGSIKSKYSKEGKTKPKAEFR

SEQ ID NO: 174179 - protein, 356 aa, unidentified
MSEGSWVGLDVHARSVVAGVIDRGSGEVRSLRVPPGCDATVAWLKTLPAPVRVVYEAGPTGYRLARACAGAGISCVVAAPSRIRAAADRVKTDRRDAERLARLLRLGEITPVRVPEPEEEAARDLVRAREDARGDLMRARHRLSKLLLRHGSVYDATAWTRAHDAWLRRQRFQSGPLAIVFDECYGRVLDAKSRRDALDEAIAELAATPPYVDVVGRLVCLRGVSTLTAFALTVELGDWSRFRPESLGPFLGLTPSENSSGERRRQGGITKTGNTHARRLLVEAAWHQRRPPRMSAVLARRRSGNPVAVQAQADRSARRLHSRWHALEARGKPRSIVVVAVARELAGHCWALATME

SEQ ID NO: 174180 - protein, 454 aa, unidentified
MKKDDSPKAQGAFLSQKKFGQGLPIYNPHCAGIDVGDTAHDVAIGTDSGHEVRKYQSFTEDLVKMVQWLQSEGITTVAMESTGVYWLNLYLLLEESGIEPCLVNAKHVKNVTGRKKDDTDAIWLQKLHSCGLLQKCFQPESSIRVLRTYVRQRKNVISLSSDTVRRMQKALELMNIKLHTVISDILGKTGIQMIEAILAGERDPNALIKLKDSRIKANEEEILKSLHGIWKDEYLFMLQQAYDSYAFYQSQLRQCEEKIKDHLLLLAAKVLDGDISDLDIERKKKPQKNGFSFEAGKLLKVIVGVDLCKVECISEVTAVEVISEVGVDLKQWENVKRFSAWLNVVPNTKITGGKIISSKMQKKKNQAGRSLRMAASNLSKSKSPLGDYSRKMRSRLGKKGAVTAGANKLSRIIYHMITCQQEYNPLTLVTNQEKWKEQRIHYLEKQLFQLKKIA

SEQ ID NO: 174181 - protein, 447 aa, unidentified
MSRKHRKHLQGERGEAFLRLTRGVDPARILCVSLDISKYFHLVMLHNAYGEIVTPAFEIDIFRTGFERLCTAIEEATARTQAEVILIGLEPTGHYFENIARHLKACYPNVFLINTWSVAENRTQTGMCYQKTDETDVAAIGDLLRRGEGTPYQPVQDVYLTLQHLDRARIARVKMANALKNQILGHLDRIFPGLVIQGKEAEKRYQPLFASDFWSCQTAQHLIRVCPDPRRLAQMTPQELVDAFHQHGYRLGPGGASRIIAYAQQVLLPDPQIIAVRSELLQHDLALLEAVETRIADLETRLHALLAQTPGHIWTRLKGVSPTQAASLIAAMGDPAHYRYAGQVFKRTGLVSGRDDSGTRQKKGKGKHVTKVGDVYLRRALLNLVETLTLHQPTLAPFRRRLKASKPHPGVARVATARKAMGILFAILRDQHIRDLAVKEDKAGEAM

SEQ ID NO: 174182 - protein, 347 aa, unidentified
MCVNAAKRSRPHDDYQDWVGHVQACLSDSWVDENEHPVLRRQLRRSEVEKFFGKLPPTRIGIEACGASHHWARRLRGLGHEVLLMPPQYIKPYVKRGKNDAIDAEAICEAMSRPTMRFVPVKTAEQQAALRMLGVRDLLVKQRTMLINAIRGHAAEFGVTVAKGPKQIIELLQRLANDASVPELAREMVSMLATQLDGLEVKLKALEARPMAWHRQDQTSQCLATIPGIGPIGGLSFALKVPDPKGFRSARHFAAWIGITPRENSTAGRQRLGKISREGDESLRRLLVLGATAVIQQAKRGRASAWLLGLLARKPKKLAAIALANKMARIIWAMMVSGETYRRPQEA

SEQ ID NO: 174183 - protein, 409 aa, unidentified
MRVINERCAGLDVHQKTVTVCALLGEAGKEVISEKRTFGTTTRELLQLHDWLQERGVRQVAMESTGTYWRPVWAILEGSFDLTLCNAAHIRQVPGRKTDQKDAEWIADLLRHGLLKKSNVPPQPQQDLRELTRHRAQVSADRSAVSNRVRKLLEGANIKLGSVASDVMGVSGRRMLWAMVKGETDVEKLAGLALGQLQEKREQLIEALTGHVRPHHRSMLRLLLTQWEFLDRLVAEIEGEIEVAARPFQEAVDLVLTIPGMSEVSAWSIVAEIGATMEPFASGGHLASWAGICPGNNESAGKHYSGKTRSGNIWLKRSLCLVAWAASHTRNTYFSAQFRRLAQKRGKKRAILAVGHSILVTAYAMLKHKRSYQELGPQYFDKLNEEGLKRFCIKKLEAMGNQVILQPAA

SEQ ID NO: 174184 - protein, 358 aa, unidentified
MEHNTKLDFSGQDIYIGLDNHKKNWTVSIFTKDFEHKTFSQNPEPDILVNYLHRNFPRANYHSVYEAGYCGFWIHEALKAHGINNIVSNPADVPTKDKERKRKNNRVDSRKLARSLRSGDLEGIYVPKRKALEDRSLMRARRNAVKQQTRYKNQIKGFLSFFGIKIPEQFKEGRWAGAFIHWIENITMESPTGKTSLLFYLGELKHYRNKIAELNREIRNLATHEIYQERVELLKTIPGIGTLTAMILLLELVEIARFKNLDKLASFIGLVPGEHSSGDEDDINNTNITPRSHHYLRSILIECAWVAVRKDPALTMCYNELTKRMSGQKAIIRIAKKLLNRIRYVLKNHQPYVTAVVQ

SEQ ID NO: 174185 - protein, 427 aa, unidentified
MSEQTPVELRVSVDVGYRRHSVAMGLSSGEVLEEFEIEHRIEGFQEFFSRIEKQRQEKNYPVAVAMEGYNGYARPLDSMVRERGYRLYNLNNLKFARFKEIFPGAAKSDRIDARKGLELFQLSDHLPLAKEVLQEVTGTAPENEVLKRLTRRRRRLVNERVRVVNNLQADLQAVCPGLLEITREASNQWFLNFLLSADTLPRLVRLRRSTLLKIPSVGVKTAAIIEGWQKHAHFSQEIEWVGEMIQEDARRCVELDEKIKRLEAKIAAVSRASTIAKSLRSIPGFGAVCSAELAGEIGTIERFASEGSLSLYLGMSTLDNSSGKYQGTKAPKHVNTRAKAAMMIAVDRHRKYVAESQRYYEKKRSEGKKHNQAIRALGRHLSRIIYKMLKEEREYELRPEKGNTKTKVSPRSLVKTKIRRPKISAKS

SEQ ID NO: 174186 - protein, 385 aa, unidentified
MIVIGADTHKGSHALAAVDEGTGRVRGSREIEADDAGHLAAVRWARGLDEDRVWAIEDCRACSRRLEQALLAAGERVVRVPPHRMGASRKGEREPGKSDEIDALAVSRAVVKDGVEQFPVAYLDERAMEIRLLADHRQDLIAERTRTVNRLRWHLLDLCPELERSIKRGALNQSRVLDRVDRALRKLPAGARVRIAREQVSAIRGVTRQIDQLQAELGELVKAHRPQLLAEMGCGAVVAAILIGHTAGVKQFRKPSSFGLQTGTARIPCSSGQRTQHRLNRGGDRQLNHALHIVAITRAQRDPATKAYLLRKEAEGKTTKGAIRSLKRHLARRFYKLLAEPSQELQAANGNPITEPHAAAIPERPRPEAAIEQITTAPCPMVCLG

SEQ ID NO: 174187 - protein, 428 aa, unidentified
MDYTTQNKKIELITEDTIVIGVDIGSEMNFARAFDWRGREISKKVFKFSNTLVGFNFFDGWMTDMLQRAAKMQIIVGCEPTGHYWFPLAGHLKDRGILLVTVNPYHVKQTKELDDNSPTKTDLKDPKTIAKLVIGGNYGIPYIPEGIYADLREAVSSRDRINKELNASANRIQRWLKIYFPEYLDVYKNFDSTSGLMVLEQAPLPEDVIALGIEGVVKIWRAAKMRAVGKKRATTLVESAHNSIGIKGGNCARLELQMLLEDYKTKKRQMEMIEEVLTKETMKVPNVEKLLAIKGIGIITVAGFIAEVGDIRRFDSPKQIQKLAGFELKRNSSGKHKGQTTISKRGRRRLRRILYQVVLPMLKSNPEFREVYEYYTNRVKNPLKGKQAVIAVSCKLIRVFYTLLSNGVEYDAARLRADIIRPIMLKAA

SEQ ID NO: 174188 - protein, 339 aa, unidentified
MRCYTGIDLHSNNNTVVVINEQDQVIYRKQLSNVLTVVLQALEPFRAELAGVVVESTYNWYWLVDGLEGAGYRVHLANTAAIQQYSGLKYSDDNSDAAWLAHLLRLELLPEGHIYPKETRAVRDLLRKRGQLVRQRTCNILSVENLTSRNQGIRIKGNVVKQLSTEEVETQYENQDLALAVTSTLSIVEALNQQIGKIEKRVKETVRLAPSFERLKTVSGIGDTLALTIMLEAGPISRFPSVGDFSSYCRCVSSEKLSNGKRKGSGNVKNGNAYLSWAFIEAAHFAIRHNPAIRRFYQRKKAKTLSVVALKAVAHKLARACYYVMRDQVPFEVEKCFGQ

SEQ ID NO: 174189 - protein, 318 aa, unidentified
MSDNSVVIGIDVAKAHVDVAAIGAALATGRFANDTEGQTALVAALAPLRPAVVLMEATGGYEAELACALQAAGLPVVIINPRQGREFARSMGQLAKTDRIDARVLADLAAVLARRDDLERYLRPLPDAKQQDLAALVARRRQLVTMLGAERQRLAHARAPVRPSLEAIIRAIHQQLDLVEGEMAGHVARHHAGIDQLLRSAGGIGPIASATLIADLPELGRLNRRQISALVGVAPFARDSGAMRGRRTVIGGRADVRRTLYMATLTATRYNPAIRDFYQRLVAAGKMPKVALVACMRKLLTILNAMVRQQQHFEPVHG

SEQ ID NO: 174190 - protein, 343 aa, unidentified
MEHYAGIDVSLESSSVCVVDATGKVIAEAKVASEPQALVSWLRERPETLKGIGLEAGPLSQWLFAALEAAGLPAVLLETRHVRAAFKTMPVKTDRKDARGIAQLMRLGWFRPVHCKSLGAQETRALLTARKLLQAKRLDVEMSLRGVLRGFGLKVGPTTPKTFGARVRELVEGHPTLEAVAEALLAARAELVLRFKDLEKRLMAVARADPRARLLMTMPGVGALVALTFSSAVDDPRRFRSSRQVGAHFGLTPKRYQSGETDVTGRISKIGDHGVRTALYEAANVMLTRPVKGSSLKDWALAIARRAGPKKAKVALARKLAVVLHRMLADGTCFEARPGAAAA

SEQ ID NO: 174191 - protein, 375 aa, unidentified
MLIIGCDFHTRYQQIAMAREETSELLVERRLDHESGEAHAFYRSLQSSHEPVRVGIEATGPMHWFERLLTELGHELWIGNSAKIRASEVRKQKTDERDARLILDLLLAKRFPRIWVPTPAERDLRQLLWHRHKLVRLRTMLGNQLHFLAMSQGLCRKKKLFTKKGRAELGNLTLGPWASRRRAELLKLLEQLDPPIAELDRAVLEEAQRREDAVRLMTHPGIGPVNALAFVLTIGPITRFPYSRKITSYLGLNPTEESSGGRRRLGGISKQGNTMVRWLLIEAVHHAVRQDPALRQDYQRLKFRRGHAVAKVAIARKLAVRMYWMLRSGADYAQLVRRQGCPVRGARIDGWWNQHSPLDSRNEPWSKCRKEKRSF

SEQ ID NO: 174192 - protein, 385 aa, unidentified
MVGKRKIKADPLEPERHQCARVEVSSNHSRDRGSTMNVTTYGLDLAKRVFQVHWVEPETGELKRKALARAEVSAFFARRAPGVVAMESCGSAHYWGRVLSGLGHQVRLIAAQFVRPFVKTNKTDAADAEAIWEAAQRPGMRFVALKSEEQQAVLSLHRMRAQLVKIRAMQAYQVRSLLYEFGVVAPKGFAALKAKAGAVLTEPTGCPVPELARVELLSQLEGLASLTTRIEALEHRIGGWQRREAECERLGAVPGVGRLTATAVVATVADARSFRSGREFAAFLGLVPRQSGTGGRVKMLGISKRGDPYLRTLLIHGARSVLLSQSRAGRVMDPWLRDVLSRRPKNVAIVALANKMARTIWALMAHGRTFDRNWSRTVMAVATEP

SEQ ID NO: 174193 - protein, 452 aa, unidentified
MALIVGIDLGRKSAHDVIVLRRETALQLGRTFRFHSTPSGIETLFARIEAVREAEESLAFVIDSPGKAWIPIAAVLKNKGYPVYRPSSYRVRRVRQAGHRKNKSNRIDALALARCLLTYPQDTHEVFLPQSVQAQLDQLSRQRDRIVDSLRRRKQRIQDLCEAINPGLTQAAGGFILTEAGRAFLRTYLDPRTVVRLGKKRLSTFLDKRYRLPLEEEILDGIFTACKEAVQLYQPIRQAQQMPFDESLLQEDINWELDQLEREEQRVLHLENQLKAGNQKIDPQDAFLSLPGIQHVTAAGIRACIGDIGRFSSLTNHRGFAGFYPSVRKTGDGESASMPISKMSCNRYKRYLYLAAENAYKWDVDCAAFYHKRRERGHTHTQAVCAVANGKLLPRIHQLLKQLSQAEANAQHRPRYVFRDLEGNPISKAEARAIIQAKWGHRKYGKKGLATA

SEQ ID NO: 174194 - protein, 359 aa, unidentified
MKKEQRKQISFKGQRIFIGIDVHLKSWSVTIASEHAVLKRFTQSPSPEALHSFLTREYPDAEYKSVYEAGFCGFWIHERLMELGIDNIVVNPADVPTTTGEKLRKTDAIDSGKLARSLRAGELKGIYIPDKVSLEIRSLIRLRDSVTKDQTRQKNRIKSHLRYLGIEIPQEYCERGRCWNKSFVAWLRSVESTCEYGRQTLDQLICQYEDLRKRRLEMIRLLRRLSRTERFSEPLGWLMSVPGIGQLTGMTFMSEIDDISRFKNADQLASYIGMIPMCHSSGEHDGTGDITLRCHSKLRSVLIEAAWVAIRQDAAMTQAYTEYCRRMKPSKAIIKIARRLVNRIYFVMKHKRKYVNNVA

SEQ ID NO: 174195 - protein, 348 aa, unidentified
MKIVGCDLHARQQSIAMLDTETGELTEKVIRHEGNGVREFYAALGNSVVVGIEATGSMQWFLELLEELGIESRVGDPAKIRAAETRKQKHDRRDARLILDLLERDRFPAIWMPTSGQRDLRSFLRDRHQWVQMRARLQHTLQAIALNHALRKGPALWSGRGQEALRKLPLPPYASQRRNELMSLYAQLQRRIQELDKQVEEQAQQRPQARRLLTHPGVGPVTALATDVFLGDPSRFTTANQVASYIGMIPSEHSSGKRQRLGKMSKQGNSLLRYLWTEAGMHATGKDPELKRFYRRKLIQKGMGKARVAAARKLGIRLWIMMRDEIDYEEFCRRGKLRQIGESPCGNA

SEQ ID NO: 174196 - protein, 352 aa, unidentified
MRIIGCDLHARQQTLAVLDTATGQVMEKTLTHSGSNVQEFYAALPGPVRVGIEATGTMQWFLSLMEELGIECQVGHPAKIRAAEPRKQKHDRRDADLILQLLVENRFPSIWRPSKELVDLRALLLHRHQWVRMRTRIQNALQAIALANGLRRGPSLWSHDGQSTIASLPLAPHTAHRRSELQAMYAKFETDIEKLNQRVQEQADERPGATLLMTHPGVGPITALATDVFLGDPKRFADGKALASYVGIIPSEYSSGGRQRLGGLSKQGNPLLRFLWCEAAAHAVRRDPELQRFYRRKLVQKGLGKAKVAAARKLGIRLWIMLRDQIDYHEFCRRGQMQHSSGDACAGMPGTR

SEQ ID NO: 174197 - protein, 413 aa, unidentified
MSMLGVALDPATVVVAVDPGKVANRVWVSDGNGLLEEPVSLPVARSGIAALERMLAGHEGERVFAIEATGSLHRAWAAELERLHPESIRVFAPSETKAARMQLGSGRFKTDDRDCAALTYLARQGAGRRQSEEAAVEELRAAVRHRRGLVADRKKAQQRLHDQLNALCPGLSAPAGQGPGRGRALPIETPTGQAVLACAAAFAGRPPSTRSLIARAPGKLTTMNAWFWAERWRDCLPPPADAVRRATRLGRDLDRYRALQTDIAAVEDEITALLARTDGQVLTSLPGVATIRAAAFAAHSLPIARFPDAEHLYSATGLAPAMYQSASISRRGRISRQGLAEHRDALMGIAWGLSANSPAFAERDAELRARGMRPIQARVALARNACRLMYRMLTTQQPFDEAAYRRARLNRGR

SEQ ID NO: 174198 - protein, 428 aa, unidentified
MNTSNTTNFAATIGLDWADRKHDLWICPAGQSKAEHLRLEQKPEALHEWVAKLRARFPNRRVAVAIETSRGPVISALMAYDFIVLFPVNPKALKDYRAAFCVSGAKDDRTDAMLLEELVRLHRDKLNVLEPDTELTRKLAGLVENRRHLVDERTRLVNQQHSTLKTYFPLALDLLEDQMNTLLAAEFLLRWPSLAALQKETPKVLRAFFYKHNSRNAKRIEQRIQAVPTAKPLTTDAAIIEPACALVSARAAMLRPLLKAIQHLDKAIAQAMDQHPDAAIFRSFPGAGPALAPRLLVAFGTNRQRFASAAEVAQFYGIAPVVQQSGNSKTVHVRYRCPKFGRQSFHENAACALKKEPWARCYYQAHKKKHDDKHHPACRALAFKLTRIYFACWRDKRTYQSDLYVQALQKNGSPLHKALKTQSSPSCE

SEQ ID NO: 174199 - protein, 317 aa, unidentified
MAMQVGKLIVGADVAKAELVIHHDDRDEIIRLKNSKLEIRRWLKQQPLNTAIAVEATNVYHLDLVELAHSLGFEVYVIDGFQLSNYRKSVGGRVKTDPSDARLLSRFLKNEGEDLRPWSPPPAVYGKLQSLLRRRAALVTARTAMTQSWANESLLKAAFETFVKSIDRLDQLIQKKIKEVLRDAGLQEQVARCQAVEGIGFLTAAALVMAFTRGEFKSSDSYIAFLGMDLRVSDSGQKNGRRRLTKRGCSEIRRLLHNAAMAASRSAAWKGLYEQHRSSGKATTQALVILARKLARVAFALMKNQGEYVTKGAKLAC

SEQ ID NO: 174200 - protein, 341 aa, unidentified
MKNKSFIGIDISKNVIDVSIFCEETPIKDFSHDVFNNSRKGFGEMCTWLKKNHVVLSNCLFGMEFTGSYSMELEKFLNARNYQFCMLSTHVVKHYPMGPKDKSDKIDSAKIADFLYRYNGTECVKPYNMPNKTMQRLKALMNERKFLVEQRTCFMNRRQLCITKEDAQLYDGYIKKFSRDIENIELEEQKLLATDDSLLSTYKNLLTIPGIGFVNAINVIVITRNFTAFETARQYASYVGVAPHFRTSGTSVKWRPRPSARCDGQAKADLSMAATVAVQYDAELQSFYNRKLGGKQDSDTKRKALNAVKFKLVLRMFAIGKQNRKWEPLDSKSSNEKLAIS

SEQ ID NO: 174201 - protein, 317 aa, unidentified
MSNPESFVGIDVAKGWLDVAWLTGETLRIDHAEKAIAVLVERLRSQPPALVVMEATGGLETGVASALAAAGLAVAVVNPRQVRDYAKACGRLAKTDRIDALILAAFAAAIRPQVRELPDEHTRALGDLLARRRQLVEMRVQEKLPLQRAFNVQRASLREHIVWLDERIGRLDIDLTHALRSSPAWRDKDDLLKPIPGVGSLTRATMLALLPELGTLSRRQIAALVGVAPFNRDSGQHQGGRVIWGGRAQVRRTLYMAAVAAMRCNPVIRSFYQHLRSQGKPAKVALTACMRKLLVTMNAMLKHHSAWSNRLDTQHSC

SEQ ID NO: 174202 - protein, 357 aa, unidentified
MHERTFIGLDVHARSVKAGVLDGLTGEVKSLAVPVATKALVAWVCAQPAPAVTYEAGPTGYELARALLAAGVPCLVAAPSRIPRAPGERVKTDRRDALRLARLLRLEELVAVRVPGLAEEAARDLVRAREDARGDLMRARHRLSKLLLRRGIVWEARAWTGAHELWLSRQRFAERPLQIAYEEALAAMLSARDRRDALDAAIAVEAAMEPWAETVARLACLRGVSTLTAFALTVEIGDWRRFSGRSLGAFLGLVPSESSSGASRRQGSITKTGNAHVRRLLVEAAWQQRRRPGKSLRTRLARSAQPAAVRERAVAAERRLRRRWLRCDERGKRSTVAAVAVARELAGWCWSLAVMDA

SEQ ID NO: 174203 - protein, 429 aa, unidentified
MTNETLIRIMQFRQFKEEIRGSQEYLIVGIDISKDKQHAFFGTANGKTLLRRLIFSNNLEGFSKLLSRADAIKAQNGLSKIVFGLEPTSNYHKPLGMHLIRCDREVVMVSGVAVKRNRELLNGRWDKNDTKCAANVADLISQGKCLFYDSPSSEISGLRELLSLRERIKKNHHSLRMRIRGNLLAKYFPEFDRYFGQCPSESLAIVKYCLDPGKIAGMDFEQFMCTVTTRDRGIAQQRRLRKIYDLAIESIGCSMNRFAEFEATVLVDQVQQTKQLIGQIDDRIDQAASAFIEYHCLLTIPGFGPYVSALVLAKIGDPFRFENRGQVIKMAGYDLSAKRSGKSSNKAIPVISKKGSNSLRYALFQAALIASARNKHFIRYFTNTLKGREKERGIKIKMRVKLASKMLIIAWTLMKKRIDFNPDFLLTEE

SEQ ID NO: 174204 - protein, 332 aa, unidentified
MENFYFIGVDVSKKKLDFCVMFEGKVVHEEETSNHQGAIMSLLHHLEEDYGIASGQMLVCAEHTGQYTFPLACACKAVECRLWLENAAEIKYSSGVQRGKSDKVDAKRIAIYASRFQDKVRYYERPTEDIERLKQLESERTLYVTDFAKYKGQMKDQKEYMPKSLYERKMKRLQALMDDLEEAIQSITDEMDEVIASCPVLFRQRELLMSIDGVGRVVATNMIIATEAFTRFDDPRKFNCYAGVAPFSYSSGSSQHSKARVSHRADKVMKRLLHLAAVAVTHRIGGELKKYYERKVAEGKNKMSVINALRAKIVARMFAVIKRNERYKPILS

SEQ ID NO: 174205 - protein, 355 aa, unidentified
MLADRVDYIIGVDTHTATHTAAVVAPTGAALAHRTVPADADGYLHVYRFAVEQAPGRRVWAIEGTGSYGAGLTTHLLEQGEWVVEVDRPARPARRNGTKTDDLDAVRAAREALGREHLAQPRQRGDREAIRVLVTTRQSAMQARTCAINHLKALVVNAPERLRQQLRALATDQLLARCARLRSHPTQPIEYRATIAALRRTAQRSLALAAEADDLHAELDTLIRQRARWLLAEPGIGVICAAQLLNAWSHAGRLRSEAAFAMLGGAAPIEASSGKVVRHRLNRSGDRQLNRALHTIVLSRMAYHAETRAYVARRIAEGKTAREIQRCLKRYLARRLFKLLEAPPAHAQKEKIATT

SEQ ID NO: 174206 - protein, 329 aa, unidentified
MSEHSQGRESVMVRRPNAGVDVSKETLDVAVGSRSERFGNDAQGMESLAALLREQDADVVVLEATGGYEAAAAAALQAAGLTVAVVNPRQARDFAKAMGVLAKTDKVDAKVLAAFADVIAQHEKRGSFLRAVPDEQRLHLAALVARRRQLLEMRVAEGNRLALSHKVTRKSMAAVIKILDKQISELDRDIDNHIREHFRDLTRVLSSVKGVGAVTAATLAAQLPELGQLDRRAICALVGVAPLACDSGKKAGRRHVWAGRAPVRAALYMATLTASRYNPAIRTFYQRLLAAGKTKKVALVACMRKLLTILNAMARDGTQWNDAFHAITP

SEQ ID NO: 174207 - protein, 483 aa, unidentified
MREVQEILDEEHEQVLERVAAIDVAKMSGMVCTRLPRQGGKPGARVSRVWEVAATTRAVVELAVQLVELGIQKVTVESASDYWRTWFYLLEAAGLEVQLVNARDAKNVPGRPKTDKLDSVWEAKLTERGMLRPSFVPPAAIRQLRDYTRLRVDLTHERTRHYQRLEKLLEDALIKVTGVASKIGTMSVRDMLEALIAGERDPKVLAGLARGRMKAKYAALVEALTGRFDDHHGELARILLDQIDALTRQIDQLTTRLGELIAELPEAAAPQPGDPTDQGTAVPVDPSTGEILGPEPGRPTSERATPVAGRPNQHRGDRAALSAIERLDEIPGIDVRGAQIILAEVGLDMARFRTADHLASWAKVTPRTIQSGATSRGGKTGKGNPYLKGLLGEAAAAAAKTQTFLGDKYRRLVKRRGKLKALVAVARSILVIVWHLLSDPTARFADLGPDYNTNRTDKNRKIRNHVRQLEACGFTVTLTPVAA

SEQ ID NO: 174208 - protein, 387 aa, unidentified
MSAMASGGVQTASEVILTAIFVSLELSRDKWMITSLSPGNGERMSKHSIKSDDMTGLLGHFKTLQAKTQARTGNTFPIVVIHEAGLDGFWIHRVLEREGIESHVVDAASVLTSRRRRKAKTDRIDGEALLRTLLAYKRGEPRVCAMVRPPTPDEEDRRRLCRERKTLVCERIVHVNRIKGLLFAQGVPDYEPCRRDRRERLEQLVTGDGRPLPAHLKAQLGRELDRLELTLQQIKAVEAERDALLAPKGEAAPAPVAALAGLRGIGPEFATVLWLECFFRSFGNRRQVAAYAGLAPTPWQSGSVDHEQGVSKSGNSKLRSTMVQLAWLWVQHQPTSALSRWFKERVKQNGGRGKKAAIVALARKLLVALWKFVSNGVVIEGAATKAA

SEQ ID NO: 174209 - protein, 407 aa, unidentified
MIYVGDDWAEAHHDVYLCDEAGARLAARRLPEGIEGITAFHELVASHVDDPADVVVGIETDRGLWVQALIEAGYTVYAINPRAASRYRDRHTLSGAKSDPGDAKMLAELVRTDRHNHRPVAGDSDLGEGVKVLARAHQNLIWDRTRATNRLRSALREYFPAALDTFAELADRDTLAVLGAAPDPDTARRLTPGRVRTLLRSAGRRRNIETRAQTIVEGLRTDTLSAPPAVVSAFAATTRAQVGIIAELNTQIAGLETELAAHFDQHPDADIYLSLPGIGVILGARVLGEFGDDPNRYADAKSRKNYAGTSPITRASGTRSVALARFVRNTRLADAIDQWAFCSLGNSPGARAFYDHHRALGDSHHKALRTLGNRLVGILHGCLRTHTTYNEHTAWAHRNDNPINIAA

SEQ ID NO: 174210 - protein, 447 aa, unidentified
MPAGKDITMHYQKVLKMPESIPYLSAGFDVGADFTWMSIMLPNGILTGKPFKIIHSDPQSRELAISKIKEAQEMYSLESRCFLESTGIYHIPLLCFLRDKGFDCAVINPIITKNSTNMNVRKLHNDKFDSKKAAKVGLDASLKASIVPDDAIIDLRNLVRDYYYFKDLQSAIVLKLHAELKVSFPAYLNVFSKVTTQTSLKLLEAYPLAADMLAAPKDELVEIIRSTARFGETYALARYDAICTAAKDAAVFGRALPSNALRIRLYIKMYREYQAHLDSILEELHQAVGKLEGTPDYDRISFIQTLHGVGFLSAVVLIAEMGAFDLFSSPKKLYAYFGLDPGVNDSGKFHGDRVHMSKRGSSLARRILHMVAINNLKVDKATKTPVNPVIYNYYTRKCASKKRALLSGPSCTKSATSFSLCSGIISLLSSLRRKNTVNVMQQSTRNL

SEQ ID NO: 174211 - protein, 409 aa, unidentified
MRLLVGDDWAEDHHDVEVLDAAGRRLARARLPEGVAGIARLHAIIGELAGQDVEDEHVEVLVGIETDRGPWVAALVAAGYQVFAVNPLQAARYRERHTVSGAKSDTGDAHVLADMVRTDAHQLRPVASDSAQAEAVKVVARTHKTLIWERTRHTQRLRHALREYFPAAVQAFEDLDAPDALELLAKAPDPASAARLTRAQIRAALKRARRRDIGAKTERIWAVLHAEHLGQPEVVTGAYAASVRSLVAVLRVLDQQIATLQRQVVAHFGRHPDAEILASQPGLGQILGARVLAEFGDDPTRYATAKARKNYAGTSPITRRSGKTKLVAARYIHNDRLIDALMTQAFAALSASPGARAYYDQLRARGAGHNAALRQLANRLVGILHGCLKTHTRYDEATAWSHHSKTLAA

SEQ ID NO: 174212 - protein, 346 aa, unidentified
MMIIGCDFHPSWQQVCWLDTETGETGEHKLVHAEGDAERFYRQVPAPALIGMEATGNCHWLVDLLAEIGHELWVGDAAQIRASYVRQQKTDKRDAAHILKLLAEGRFPRIWMPSSEVRDLRQLLLHRYKLVLIRTRVKNELQHLCLNQGVQRKRKLWSQAGQKLLRELPLRPWAARRRDDLLRLMTMLDQQIDPLDAAVKAEAQRDKMALLLQSQPGVGAITAMAYVLTMGDVARFPRGKQVASYLGLIPREHSSGGRQKLGAITKQGNRMLRMLLVEAAQIAVRHDPGFRKQYLHRCHQKPKAVAKVAAARKLAVRLYWMLRTQTRYPEIVRIESSPRVPLVGAS

SEQ ID NO: 174213 - protein, 426 aa, unidentified
MYYVGLDVHAKRSSICILDDHGKLVKRLEVKGDWSRLLEVVDAQVPRPFAVCYEASCGYGHLYDQFARRAERVRVAHPAQLRLIFRSKRKNDRVDSAKLSKLLYLDEVPVVHVPGVDVRAWRGLINYRRNLVCRRAAVKTQVRALLRGLGVAATVRGLWTAKGIAWLKGLAMTAADGVRRDVLLDELAHQDKQVGKVERELDRVAAKHPGVALLRTIPGVGPRTAEAFVAHVDDVARFGRVKQVGTYFGLVPCQDASADRNRLGHITKEGPAQARWLLAEAAWQGRRRSATIRAFFDRVMRGDADRKKVALVATAHYLTRVMAAMLRSGEAWREDPRCPALPAKADAKADAKAKAKAKAKAKAKTAAGAAAGVPSDPVAASYAPPGGVKVPSREYTGPPGGSTLTPPGSAGNASGHEVGGDAMRRG

SEQ ID NO: 174214 - protein, 352 aa, unidentified
MDATTMAVDLAKDIFEIACANCAGRVVERKRLTRRQFEGFLETLMTGTDVIMEACGTAHYWGRRCQARGLGVRLLPPQYVRPYVRRNKTDRTDAEGLLEANRCGGIQAVPVKTLEQQTLQVLHRVRTQWQAARTARINMMRGILREHGLPIGLGARTALTRIPALLQDDEAPLPDLVRHAVWLLLEEARAIEARLATIDQQLAQIARAHPIARRLQQIPGIGVLTSTALVGAVNHIHAFRRGRHFASWLGLTPREVSTGSRRYLGRISKRGDVYLRCLLTHGARAVLLTAQRTARAAPHRTTRFQQWAVTVAARCGHNKAAIAVANKLARIVWAVWHREVDFHAPLCGAVVN

SEQ ID NO: 174215 - protein, 320 aa, unidentified
MKNSLPAPVYVGIDVSAEQLAVYILPDEKSFMINTDPESLNNLAEKLGKIAPQIVILEATGGVERSAVSVLLRYHLPVVVINPRQVRDFARAKGLLAKNDSIDARVLADFAEAVKPDIRKLPDADQQNLNELLTRRQQMMNMRTSEINRSRRVATTTVKLSCKEHIAWLEKQISDLDEQLDKLIQSSPAWRVKDNLLRSVPGVGDNLSRTLLASLPELGKLNRRQIASLVGVAPFCHDSGKMIGKRSIWGGRAPVRKALYMAAVAAIRFNPHIRTFYQRLREAGKPPKVALVASMRKLLTIMNIMIKNNETWKYSHATTY

SEQ ID NO: 174216 - protein, 414 aa, unidentified
MPIATCGIDWAQDHHDIAIVDTDGQLLAKRRIPESIAGFTELTAMLAEAGDNPNDPIPVAIETPRGLLVAVLRASGRPVYPINPMSVARYRERTSMSGKKSDHGDAVTLANILRTDADQHRRLPADTELAQSITVLARAHQDATWRRTRASNELRSLLREYFPGFLHTFADRPGAISSPEARAVLAIAPTPAKAARLTKPQIVAALRRAGRHRGLTSLADTIQQRLRTPQLRHPTLVEDAFGVQALAVLATLDAEYDSVDRLGEATAAAFNEHPDHQIITSFVGLADLTGARLLAEIGDDRTRFADARALKAFAGSAPVTKASGRSIRITHRHVKNNRLAAVGLVWAFVASGCQGPTRAHYLARRDHGDRHAAALRHLYNRMLGQLYHCLQTSQTYDPIKAYGPPPTPPAQAAA

SEQ ID NO: 174217 - protein, 424 aa, unidentified
MKVTFQTCCGVDVHKSFLVATIIKTTGGIEPSYQKRRFSTFNNSILEFKKWLLENECLYVCMESTGKYWIPVFNLLEDEINVTIANPKWVKAVKGNKDDTKDSKWIGDLFRLGLVKGSYIPCKKIRILREFTRYRYKLVSCRSSEKNRYQNALTVCNVALDSVVSDIFGKSSTSIIDYLLEQSGTSIDHEVIASKLLKRLKAKEDAVIESIEGYQMTDSQKYRMHLVRAHMDYITAAINDVDSEIESLIASDPDYENAVELLCTIPGVKYDSAITIISEIGIDMSQFCTSKRLCCWAGLTPGSNESAGKKKSVRITRAGVYLKPALVQCAHAAVKSDKSPYYKKKYESLVKRRGKKRAIIAIARMILTAIFQMLTTGETWNPCDLYKIDMPEALLEKQKQKAIKQAQKLLIREGLLPPTEPIVS

SEQ ID NO: 174218 - protein, 338 aa, unidentified
MKAVARIGLDIAKNTFQVHGVNAHGAVVMRKQLSRGEVLRFFANVPACVVGIEACAGSHYWARELKGLGHDARLMAGQFVAPYRKSGKNDANDAEAICEAVGRPNMRFVPIKNEEAQAVLTVHRARQLLVSERNALANQIRGLLGEFGIVRAAGLAPLRRRLAQIGAGQQTLPVLARETVGELHDRLRLFDACISQYDRKIEVIARGSEPARRLMRVEGIGPVTSTALVASIGDARAFTKGRQFAAWLGLTPSQHSSGGKSRLGHISKRGNVDLRTLLIHGARSVLQFTSKKTDRKSVWVEALKARSGTNVATVALAAKQARIIWALLARGTEYQPAT

SEQ ID NO: 174219 - protein, 375 aa, unidentified
MTATTHPQLRSVNDGPLYVAFEVGKRSWTVGMTSGFGVPPWVQTMAPGEWATLQRVLAKARTRFGLAAAAPVVSCYEAGRDGFWIHRGLTAQGVDNRVVDSASIEVDRRARRNKTDRIDARKLVALLVRACLGDPAWREVRVPAVAEEAARHVSRERSDLVGEQTRLVNQLRSWLMTYGAALPARRAANWWTRVRDYAGAPLPAEVQARLTRADVRLALVQSQIAVLDAAQRAAVAAAPVDSPARRLAQLKGVGATSIATLLEEGLVWRAFQNRRQVGGVLGFAPTHYASGELVRDRGISHAGNRRLQSVAIQLAWGWVRWQRASPMTQWFVARFGTGKRARRIGIVAVARKLVIALWRVATTGAVPDGAVLKAA

SEQ ID NO: 174220 - protein, 385 aa, unidentified
MAPPRRPEIVIGLDVGKSAHWACVVTREGELLASGPIPNRENAIDGLYAQYPGALVVVDQVRNIGSLALSRAKLAGMPRAYLPGLAAHGASKLFAGDAKTDERDAMVIAKTALGIPDALLAVADRPPEIEAARSLAAQRDFLTCENTRSKNRLRSILLESCPEFEAQADLSDPATLKLMAAVGGPWSISEASPQAVGALTRGCRRAKVAPLVESVESSSRPHPAAVACEDRAVRLLARRISENAAEIESLASEISALLAADETYRCLLTVPGIGPRTASELVISIDIADFAGHDRLASYCGLAPRNRQSGTSISSVSASRQGNKRLKNLLIFSCNCLARSRNRWGEYYARCRDRGMPHGKALKAVARKRLKVIYAIMRDKVPYAA

SEQ ID NO: 174221 - protein, 429 aa, unidentified
MNMNTNPLPQPATAPAAAAPPPVAWIGLDWGHHTHAFALQDRSGPPAEGTLLHSAEALHTWLRDLEKRFGGRPVALAIEASRGAVIHALVQYPWLTVYPINPVTSARYRSAFTPSGASDDLPDARVLLELARDHAAKLRPLETQDAQTLKLTGLVEARRDTVDRRTQVLNQLTSLLRAYYPQALELVGGLDTELAVAFLSRWPDLITLKAVQPGVLKRFYYAHHLRRPERLTARLQFIQQAVALTTEDARVSVAVLQLRCLLDQLRAFRKHVAILDAEIKTTFAAHPEVALFRDLPGAGPALAPRLCVAFGTLRTLYPDPASLQKHAGVAPVREKSGQSLWTHWRWLAPTFLRQSWVEWAGQTVVHSAWAKRYYERMKAKGKGHHAILRALAFKWIRVLWKCWQTRTPYDETRYLKQLVHRKSPNAVPA

SEQ ID NO: 174222 - protein, 349 aa, unidentified
MAMTIVEPAAGAVTGGVDTHLDVHVAAALDDIGGLLGVESFEASRAGNDKLLAWLVSFGAVAQVGVEGTGSYGASLARSLRAAHVKVVEVDRPNRQARRRTGKSDPADAVEAARAALSGRAQGAGKTGEGNVEAIRALVVAKRSARSTRIKSLNQIRHLGFTAPDELRDRLRGVTRDHLAGVAAGLRPRGGSDPVIAATKTAMRILGRRVLALDEEMATIDALLGDLVTATAPRLLEVHGIGVDTAATLLVAAGDNPGRLRSEAAWAHLCGVAPIQASSGKVTRWRLNRGGDRQANGALWVVVITRMSSDPRTRAYVARRLHQGRSKREIIRILKRYVAREVFHHLPRS

SEQ ID NO: 174223 - protein, 405 aa, unidentified
MIFAGIDWAEAHHDVCVMSEDGQVLEQRRVSHSVAGIGELHALIAAHAADGEPVAAGIEVDRGLVVTALLAAGYQVFAVNPLAAARYRERHATSGAKSDRGDAKVLADLVRTDRHNHRQVAGDSDLVEAVRVLARAHQSAIWSRQRQVNALRSALREYYPAALAAFGTDLAASDAIAVLAIAPTPEAGRSLSQSKIASALRRGGRQRNIDHRVSQIQAALRADYLQAPPAVAAAYGAAARSATRLISAYTAEIAELEQALAEHFDQHPDAKIVRSLPGLGTVLGARVLGEFGDDRTRFASPQSRKNYAGTSPITRASGCSRVVLARHVRNRRLADALDRRAFCSLTHSPGAHAYYGQLRARGKTHRRAIRQPANRWVGILHICLQRGQLYDETTAWQHLHAAAAA

SEQ ID NO: 174224 - protein, 311 aa, unidentified
MKEQENRRDKITIGLDLGDRRHRFCVLGENGEVLEEGSVGNNRAALSELGGRYPEPLVVMEAGCHSPWVSRHLEQAGCEVVVSNPRKTRAIYQHERKSDRRDALMLARIARMEPALLYPVRHGSEEAQQDLLRIKLRDSLVRARVALINSLRFTLKSLGYTIANPSTERFHKVIEGQIPEPVGRVIAPSMRALEELSLQIKLLDREIIALARSKYADTAWLEQIPGVGPITALYFVLKIEDPARFKRARDVGAFLGLCPRRDQSGENDPQLRISKRGDASLRRLLVSAAQYILGPFGPPSALRQYGLALAA

SEQ ID NO: 174225 - protein, 391 aa, unidentified
MSMYFIGIDISKYKHDCCIISAADQQIVSKFTVKNDKDGFEHLLTTLNSLSNPEDIKIGFESTAHYALNLELFLENTHHSFMEVNPVLIKEYKKSTTLRRTKTDSVDCESIARWLMTVEYKPHSKGFYHSYSLKSLTRLRDRLIRQRSFYLVKITNVLDHTFPEFKPFFNERLSKTAIYLLENYGSAEKMAHMNSASYDKLRCASRGKFSIQQFLRLKELAANTVGVNNSIFDIELNSLLTLYNSLCKEIKTLEAEITKLIEEVHPHYMSIPGIGPISAAVIYAEYGDISNFSNPGQMLAFAGIEPGINDSGTESHGGRMVKHGSSQLRYVLLNACLPLIRFDITFATYYAKKRAEGKKHRVAITHVAKKLIRVIYALERQDVDFNVQKLR

SEQ ID NO: 174226 - protein, 439 aa, unidentified
MAMRRRDEEVVFPHAAGIDVGASSHWVAVPRDATEDPVREFGPMTDDLNAMADWLVASGVDTVALESTGVYWIPVFEVLEQRGLKVWLVDARQMKYVPGRKSDIQDCQWLQKLMSLGFLRAAWRPEGDVCVVRAVARQREILLAEQASWVQRMQKSLVQMNIQLTEVLTDVMGTTGQAIIRAIVAGERDPKALAKHRNRRVKASAEEIAKALTGNWRDEHLFVLCQALAMYGDIARHLTECDSKLQALLRALGQCNVDLGKAPRTGSKLREQFDARQILANWAGVDLTRINGLGLTAVMKILTELGPDLNRFTTVKHFCSWLGLCPGTKISGGKVLSAKTKRSANRVRQALRMAAMSLSHSNSALGAFYRRLCSRMDKPSANTATAHKLARMLYFMLTRGEDFVDQGQQRYEEQQRQRSIAALKRRAAALGFDINPTPV

SEQ ID NO: 174227 - protein, 434 aa, unidentified
MKVTRGMRRRSAKLERRAQLVTPDTLIAGVDLARKDSVVVFVRARDKVRLGRLRIPTTADGVRTLARRAGELQRRHQLPRLVLGMEACSHYWKVVAKAATEIGVPYLIVQSFVLARAREFDDLTRDKTDPRDAALIADLVAELRFVDAQLETGVWAELRLLAEERNERCVERGAALQVQRAFLELVWPALLQQVPDLSGTHLQATLRLGMTPLEIAALPLDEFTRRLYEEHRDRRFLRWMARRIWNAAQAASDADEMTAAVLRVQFAAERVLAAERMVEIIDRRMLAAFERTGLGWLRGQIRGLGDVSLVNLLAMTGDLRRFDDARCLPKLAGSNPTERSSGQSHAPGGIHRRGRKALRLLAYQAAVCLVLHHPDFRQRFLALTQREHHRLEKRQAYVAVANKLLRTLWAMATSGRAYDSQIACGLVPGEVHAA

SEQ ID NO: 174228 - protein, 420 aa, unidentified
MKVVYQTCCGVDVHKSFLVATIIKTTSGVEPSYQKKRFSTFNNSILQFKEWLISNHCLDICMESTGKYWVPVFNLLEDEINVAIANPKWVKAVKGNKDDTKDSKWIGDLFRLGLVPGSFIPAKPIRILREFTRYRYKLTSCRSSEKNRYQNALTVCNVALDSVVSDIFGKSATSVIDYLIEQPNNSINHEEIASRLLRSLKKKSDSVIESIEGYQRADSQKYRMRLVRAHMDYITSTINDIDSMINSLIKPYENAVQLLCTIPGVDRNSAVTIISEIGNDMTQFSSSKRLCCWAGLTPGNNESAGKKKSVRITRAGVYLKPALVQCAHAAVKSDKSPYYKQKYERIMKRRGKKRAIIAIARMILTAVYHMLSTGETWNPSDLFKIDMPEPLKEKQKEKAIKQAKKLLIREGVLTESQLAS

SEQ ID NO: 174229 - protein, 334 aa, unidentified
MLLNSDPKRVALPQMTIIGFDVSKKELVRVRTDKSTLVRDKIIINNNPESIQTFMEEAKSKYPYLLVASEATADYHRNLAAYCLKSNIPFRLINPILTKQFTRATIRKKKTDLTDAWIIAKLALQGEGSLLNIKSLDPLKSINRTAFKIQRLVGMLSAIYQRFERVFPEDKDMLEELAKPLPLLKAVVKNIRWRVNEQADQTTKKLLVSIPGIGPTIANTLIAEIGDINRFHSGKSLAAYAGLDPKVKQSGVSLKHNTKITKRGSPYLRKSVYISAYIAKRHDPELGAYFEKKIGEGKRYKEATVATARKILYRVYAVWKRGTPYVRYPQKILT

SEQ ID NO: 174230 - protein, 468 aa, unidentified
MNRRQRKELQQRLNGADPGLQVVHADAGGIDVGNESHFVAVPAGRDPHPVQEFGSWTADLHRMAEWLESCGIRTVAMQSTGVYWIALQEVLEQYGIEVYLVNARGTKNLPGRKSDVQECQWLMKLHTYGLLRNSFRPPEEIRAVRTIWRLRDRLVKDAGRAIQQIQKALTTMNIRLANAISDVGGITGLAIIRAILKGERDPRELAKLRDGRIQASQEEVARSLEGNWRDDVLFELQQVVECYDFYQQRIAACDQQLQGYLAALPDRRVESEMATEAALQAPQGSKKSKKRVSKTRRKNQPDFDVAAELHRSFGVDLTRIDGIKIMTGQVILSELGPDLSAFPSEAHFASWLELAPRRDISGGQVIKQKSRESKNRVANALRMAAESLSRSDSYLGARYRQLRGRLGGKKAVKAMARYLACLVYRLLTKGRAYVDRGAAYYERKRAERDITHLKRKAAEFGMKLVPTG

SEQ ID NO: 174231 - protein, 322 aa, unidentified
MIEPVLGVDIAKKKFDVALLINGKLKHKVFANDKEGFESLLLWLNKHGVDHTHVCLEASSTYGDEMATFLHDTGHKISIVNPARIKGFAQSELVRTKTDKVDAGLIARFCLALHPEPWMPPPLELRKLQALVRRMDAVISMRTQELNRLDASHKTVHHSLKDHIAYLDQEIKKIKREIAAHIENDPDLRTRSNLLRSIPGIGEATIAMILAELSLFERCDRVQKIVAFIGLAPRERISGSSIKGKPRISKMGNARLRKALYMPALVSIQCNPIIQIFYHRLKERGKNGKVIVCAIMRKLVHLIFGVLKSGKPFDPSFATKTA

SEQ ID NO: 174232 - protein, 412 aa, unidentified
MEEIYERVCGMDVHSASIQACVRRLGKDRRISQEVRSFGTMTRDILALADWLGAEGVTHVTMESTGVYWKPIYNILEGHFEILLVNAKHVKHVPGRKTDVKDCQWLAQLLQCGLLKGSFVPDRPQREMRDLTRHRSQLVHQTSAVANRIHKVLEDANIKLGLVASDILGVSGRDMLRALIAGRQSPNEIADLARRQLRAKIPELCVALDGHVTEHHRFVLGELMDQLEDLERRIERFNRRIEEISGPFVHAIQAIAELPGFDRRSAQNVVAEIGSDMTRFPTDDHISAWAGMCPGSNESAGKRKSGKTTKGSKWLRAALNQAAWAASRTKNSYFRAQFRRLVGRRGTKRALVAVGHSLLVVIYHVLRTGRSYQDLGVDYFDKLDSKRIVRSHVRRLESLGYDVKLTAREQAA

SEQ ID NO: 174233 - protein, 384 aa, unidentified
MDTQTPRFPAERAIGSACKPSGRLLEGVVRFKSENRTQQPNEEGKMGLYSGIDLHGNNSVISIIDERDRVMFEKRIPNELRSICSALEPYQKSIEGIVVESTFNWYWLVDGLMDNGYKVHLANPAAIKQYDGLKFSDDKSDARWLAHMLRLGILPTGYIYPKADRPVRDLLRKRGQLVRCRVSNMLSLNNLIARNQGFSVSSNRLRQLEEEDILALMVEENLSLAANTNIAVIRCLDEQIEKVEKAVKATAKLRPEFRLLKTVPGIGDILALNIALETGDIKRFPKVGDFSSYCRTVKSTRITNGKKKGEGNTKCGNKYLAWAFIEAANFAVRYSEQARKFYQRKSAKRLPVVARKALANKLARACYYIMRDKVPFDIERLFTT

SEQ ID NO: 174234 - protein, 400 aa, unidentified
MEAIHKRCAGLDVHKDTVVGCVRVRELGEVRQEVRRFATTTAGLLELAEWLRQAGCTHVAMEATGVYWKPVWHILEGDFELVLANPLHIRNVPGRKSDVNDATWIADLLAHGLIRSSMVPPGPIQELRDLTRTRKQLMREIVQHKQRIQKVLEDANVKLASVVSDVVGQSGRRILKAIIAGQSDAHQLAALGSERLAATRETLATALHGKVTAHHRFLLKQHLQMIEQLEQTVSEFEAQIEAALAPFRTAVEHLMTIPGVSATAASVIIAEIGVDMSQFATAGHLRSWAGLCPQLKESAGKVMSRRLRYGAPWLKNGTGAVRLGGHPQQAQLSTRPVPEAACSTRSEKGYPGSGGVDTYCRLLCVAISGAVSRSGTALFCPPRPGSNRSTPGTPHPRARL

SEQ ID NO: 174235 - protein, 343 aa, unidentified
MQVVRIGLDLAKYVFEVHGVNSLGKVVVRKTLRRDAVAHFFANLPRCLVGMEASNGAHYWARVLSDLGHEVRLISPQFVKPYVKSNKNDRNDAEAICEAVGRPSMRFVPPKSTDQLAVQAVHRIRRRLVADRVRLVNQIRGLLSEHGIVIARDISQLRRSLAVIVGNGDDGLSSMVRSLMRELQAEMAEIDDRIANYDRRIREIFRTSEQCQRLGRIEGIGPVTATALIAAVGDRTCFKNGRQFAAWLGLVPKQRSSGGRARLFGISKRGDRYLRTLMIHGARAVLGKAAGKQDPRSLWLGKLRQRRHPNVAAVALANKNARIVWAMLSGGTFYEHAPSVKAA

SEQ ID NO: 174236 - protein, 317 aa, unidentified
MSEPLFIGIDVAKDTFHVASCPPAINLSMPNSPTGIHNLLKALKVHRIALIVLEATGGYERSIVAELLQADLKVVVASPRQVRDFARGIGEFAKTDPIDARVLARFAQVVQPKPKPQPSPQMNELSDLVRRRSQLVDLRTQELNRSKTIRHPQVRRSVQKMLKTLDRQIAQLDQVIQQHIETDDTFRQKDKILQSVKSIGPQTSAILLSQLPELGQLNRQQIAALVGVAPYDFRSGRYAGKAHIRGGRKDIRCALYMSVLSAMRFNPVIHRFARRLSAKGKLPKVVSMACIRKLLTILNTMVRNETLWCPEKILKNP

SEQ ID NO: 174237 - protein, 349 aa, unidentified
MIIIGCDYHPGFAQIALMDTDTGEFQERRLEHREEAEKFYRELAAQGKKVRVGMEASGHARWFERLLAELQFELWIGDAAEIRAKRVRKKKTDREDAQLILKLMLKDDFPRIWVPSWENRDLRQLLWHRHRMVQARTRIMNQLQAVALNEGLRCKKKLWREGGREQLEGFRLAPWASQRRRDLLELLDRLNPTIAQLTQAIALEVEKCPEARRLQTHPGVGPLTALAFVLILGRADRFQCGKQIASYLGLVPLEESSGNRRRLGHITKQGNSLLRFLLVEAAQVTVRSQPEWRSKFFHLAMRRGRKIAKVAMARKLAVHLYWMWREDRDYSQSKKFGSHAGEPGHPDGV

SEQ ID NO: 174238 - protein, 470 aa, unidentified
MSKGSGTTRGDRRRNARRERLRAMLPRDGAVIGIDLAEDKQALAVIDHDVRVLARKTVRVKVFRLGAALDWAVGQARAKGFGQVTVACEPTGARWLQVQRLCAERGLPLVCIQPLISHIAREQQDFTRHKTDESDCVMIARLAVELHCYVPEELDETWAHLRHLGRRRAQLITAATASAQRIRDFLSVAWPAVPETCARPLESVTWLAALQVVTARCGADPGKLAAMGEQEFTALVRGAVCGWGGQKAHGPISGRVFAALTDTEGVVVSSRRGLLRRVADELGDLQRTRAQLRAVEADMVAVLDELGLSRLADIPGLTAVGAAAILAETGDPHRYDNSSSLVKHAGMSPSDNASGAFSGQAHISRRGRPGLRLVVWRAVWPMLQFNPVMAAKYQAMTRAADTAAADAGPQQGKAAQATARARRAKARVACAASLLRWIYCMVVHDTSWDPAVASGAASRHDAPHTQAEAA

SEQ ID NO: 174239 - protein, 431 aa, unidentified
MCRELLEVVEVDEIEDWVETVDRVAGLDLGKASLTACIRVPSEQRPGGRSQEVRDYATTTGSLLELADHLRAQSVRLVAMEATGEYWKPVFYLLEAEGFTCWLLNAHHVKNVPGRPKTDKLDAVWLAKVVERGMCRPSFVPPKPIRQLRDLTRYRRVLIRERTREKQRLHNVLEDAQIKLSSVITDLFGVSGRAMIEAMIDGQRDPKVLAQMAHGVMRSKIGALTEALRGHFEDHHAFICRVMLQRIDTLDAQIGQLDDKIGQMIAPFAGQVTRLDEVAGIGRTNAQELIAEIGVDMSVFATSAHLVSWAKYCPQPRQSAGHDKQRSTGKGNPYLAGALGEIGIGASRTNTFLGERYRRIARRRGKKRALVATGHSVLTIAWHLLADPDTHYLDLGPDHYQSKINKDRQARALIRQLQHITGQQVLLEPAA

SEQ ID NO: 174240 - protein, 406 aa, unidentified
MLFVGDDWSEGYHDVELMDATGRRLAKARLPEEVAGMAGLHAMIGEALGEDAEVVEVAVGIETDRGPWVAALVAAGYTVYGINPLQVARYRERHSVSGAKSDAADAHTLADMVRTDSHQLRPVAADSAQAEAVKVVTRAHKTLIWERTRHTQRLRHALREYFPAALAAFEDLDAADALELLAKAPDPASAARLTITQISAALTRARRRNIADKAARIQTVLRGQHLSQPEVITAAYAATTRAAVAVLRTLDEQVKALQGQVDANFGQHPDAKIILSQPGLGSVLGARVLAEFGDDPHRYSDAKSRKNYAATSPITRASGKKKTVMARYVHNDRLIDALIAQAFSALNASPGARAYYDQLKVRGTGHHAALRQLANRLVGILHGCLKTRTCYDEATAWSHRVEQTAA

SEQ ID NO: 174241 - protein, 411 aa, unidentified
MLFIGVDLSDKTIDSCICNSSGDVLTINKFSFDDNGFSDFVHKVNEHESDNPNCIIGIENPRSRLVDFLIQRGFNVIPTHPLSIAKYRESRIPSKAKSDPMDARLIADYIREHHKSLRTITMPDDTIRELSILLEDRDKLVEQKIKFSNQLTSTLKEYFPQALDAFGSITNKSALEFLARYDTHQEVKALLAESSKKLDDVLVECGFFRADSRERFYNAMNEKPSPISQAVIKAKVRLKNAVVGHLLLLVQQREDYEKQIQKILDETPNGGIFRTLPGADYVLGAKLLVLYASREFSSANEAQAFWGTCPYTSRSGSMTAIGFRRGCNHFGRNAFHQLAFCSLKSSQWAKKQNAKKRKEGKRSNHALRCIANTWVKITYAMWRSKTPYDESKHLASIANHIINQPTFILGG

SEQ ID NO: 174242 - protein, 426 aa, unidentified
MLNSQINKIQAITSDTLIVGVDIAKNIQWAQFINFRGIEVSKHICFENNYSGFNSIMEKIEEIKSKNNFLSVIVGMEPTGHYWKTFVTFLHNNGIKVVQVNPYHTKKAKELDDNSQTKSDKKDALVIAKLIKDGRYSAIYFPEGEYANLRNLSNTRLEVSRLLNICKNRIHACVDEYFPEFETVFKSFIKGKVALHILKRIPFPTDILGLALEDIISVIREAAKKSVGKKKAEELIRAAKVSIGVKVGLEGTRIRLNNLLEEYELCHNQLEKIEKEMVQELEKTGYKDILTSIPGIGIISAASFIGEIGDPKRFSNPQQIIRLAGYNLVEDSSGKHKSKTMISKRGRKILRTILYKISLIVVCKNQEIKLLYKYLITRKENPLKKKQALIVISGKMVKIMYSLIKKEEVYDKEKVLGIYRKQQIVA

SEQ ID NO: 174243 - protein, 315 aa, unidentified
MSRMVVIAGIDVSKDKLDIHVLPSNQTFVVGRDPRGLASLARRLRKAGVEQVALEASGDYERIVIEALEADGFVVQLLNPARVRAFAEAIGMLAKTDPIDARLIALYCQHFPDTGLTRRPEQARKLGEFLNMRAMLLKLAGEIRNSLEHVREPGLKALADTLSADIAAKLKDVDDRIAKVIAGDDATMRKARIIRSFTGAGPVLTSGLLARVPELGGVTRHAAARLCRAAPTDRQSGRTRHRSSIEGGRDQVRPVLHMAALAAIRSNPIIKAFAHRLSAAGKPKPLVIAACARKMVVILNAMLRNNTEWKYAKAA

SEQ ID NO: 174244 - protein, 459 aa, unidentified
MKKRKSKRTKGIEEARPFEGLSKVNQNAAGVDIGATEIVACVSGGDEIQLVKAFGNYTVDLLSICEWFRKHKVRTVAMESTGVYWIPLFEELERQGFECLLISSRSLRKVAGQKTDVEDAQWIQTLHSYGLLKGSFRPEGDLVALRTLLRHRAQLVEHRAPHIQHMQKALLQMNIQLSQAVTDVMGMTGQMIIRAILSGLREPKELASFRDSGCKHSEEEIAKALTGTWREEHLYVLKQSLELYDFYTEKIEACDQEINRQYGMVRPDWAGGELPVVPKKKLHAHSKNAPKEAKEIREHLYRINGVDLSLMDGFGVSLAQTVTMEVGSNVAEKFPTEKKFSRWLGLAPKHDITGGKVLSNRTLKTKNRAGQAFRMAAQSVKKADNPFGALYRRLRSRLGPAQATVATAHAMARVVYKMLKYKEEYNPLSVNEYQKKYEEQQVKYMKKRAAKLGYQLVPS

SEQ ID NO: 174245 - protein, 345 aa, unidentified
MKYYAGMDVSLEETAICIIDETGRLVKETRAASDPQSLLVALKGIDLALERIGLEACSLAAWLHDALRAAGLPAICIETRQANAAMKTMPNKTDRNDARALAQIMRTGWYRQVHVKAPQCRLWRSLLVTRRTVLNEMRSIENVARAVLREAGLKLGTPGRAKFADRVRELAGDDVLLMPLLEPLLAILATMLDQLARLTKQVLDIARNEEVCRLLMSAPGVGPITALAFRATIDRPDRFRRSRDVGAHLGLPPARYQSGETDIQGRVSRCGDELARTALYEAAHTLLVRSKKWSSLRAWGMKIAKNRGMARARVAVARKLAVILHRMWSDKTEFRFGKDPGEAAA

SEQ ID NO: 174246 - protein, 431 aa, unidentified
MSDGMASGGRDAGAVTPAPVGMGEEPGAIVAGFDVHRRQITIDALDTASGEVSRGQIESTPAAVEEWVAGFPGRVVHVAVEACTGWLFVSRALERCSAIVHLAEPVETSALRGRKRRAKTDRADAKWLRQLLWEGRLPEAWLPPEHVRQWRSRARLRNTLVDERTSWTQRIRATLYHHGIAGAPDELRTLAGRQFLAGLELPVDARERITVALEIIDLLDAQLAELERDLRALARHQAGCRALMTQYGMGEISSLVTLCELGDVRRLHASRQAVRMAGIDIGVHRSDRHAQLGKLTRQGSAPLRWALFEAAQSASHTGSPDYADYHALKARGLSHTRACLTIARKLARRSYHLLRALGPAALEPPVTPAKRSAQAHPSPMRSKHAASSSSDRGTHAPRGGPRKTERPQSLHRNDRSTIKSPAANARGRGPR

SEQ ID NO: 174247 - protein, 377 aa, unidentified
MTAPRPVPTHRHPSVKEEHRAAHALRPGRHVIGVDTHRDTNTAAVVEAATGGVVEAMQCQTDAIGYKRVFAFAVKHASGRRVWAIEGTGSYGAGLTSFLLERGEWVVEIDRPARPARRNGAKSDDLDAVRAARDALSRPHLAAPRARGDRKAMRVLLAARHGAVVAGTKAIGQLKALIVNAPEALRDQLRRGTTDDQLDRCARLRTLPTHSLEHRATISAIRATARRALFLKAEAAEHQTELEQLVMAACPNRLELPGVGVITAAQFLISWSHTRRIRSEAAFAALAGLAPIPASSGKTVRHRLNRGGDPQLNRALHTVALSRLRHHAPTKTYAARRTAEGKTPREIKRCLKRAIAREIYRLLETHARATVKINPAA

SEQ ID NO: 174248 - protein, 319 aa, unidentified
MQDILTCAMGLDIHRDVIVACLAKGELGTDPEIEIRSFSTLIPEMRKLRDWVLEAECHYVAMESTGIYWQPIYEMLEPCFDGQISILVVNARHMKNVPGRKTDMRDAQWIATLLRAGLLKGSFIPDKTFRELRHLTRYRKSIVHDITAQKNRIDKFLQSSGFRFTAFLSDAFGASGRNIIRHLMKYGNISREALDRCLKTQTRKRIDEILVALNGSLSEHQRGFLRMIFGHLEALEQHRHTVEDAITKEITKHEEALSLLCSIPGIDVTAAAAIIAEIGTDMSAFPDSQHICSWAGLSPGNNESAGKRKSAHITATCSL

SEQ ID NO: 174249 - protein, 377 aa, unidentified
MSKLRFVGLDVHAETIAVAVAEMGGEVRSLGTIPNKLESVRKLVGKLAPIGTVKCCYEAGPTGYVLYWQLTQLGVACEVMAPSLIPTKAGERVKTDRRDAEKLARCYRAGELTAVWVPDAAHEALRDLVRAREAAKKDQLRHRHRLGKFLLRHGRRPIDAGPAWTQKYVNWIRIHARFEQAALNATVAHYLEEIDHIAERIVKLEQAIDEAVQQAAPEIRAVIEALQALRGVAQTTAATVVSELGSLSRFRNPRQLMGYSGLVPREYSSGNRTQRGAITKSGNAHLRRVLVEAAWTYQHRPNVQGRVLRRQKALALSDEAKKIAWKAQQRLHKRFIAMAARGKNHNQTVTALARELLGFMWAIAVDAEAQFQQTKAA

SEQ ID NO: 174250 - protein, 356 aa, unidentified
MSVYLGVDFHARTQTVCWCDTADGLIHQRTLDHQRDDVRGFYAQFTVPTVVGLEATGYARWFHRLIEALGHRLLVGDAYVIRKCALRRQKNDRRDAELLLDLLLHGDFPAVHVPAIASQAVLRLLRYRQRLVEIQTKLRNGVQALALNHQLRLGPKLWNKQGQQQLLALELDTIDVLQRQHSLEMLQQIHTRIRAIEKELTLRAEPDARVRLLRTHPGVGLLTSLAVVHALEPVTRFDRARRVAAYCGLDPCESSSGDSIHMGHISKQGNRLLRHLLVEAAHRAVHSKADADLRNFYFRLIERKKNAAVAITAAARKLVLRLYRMLRENIDYTEFRRRGCEARCARKPASPTAGGC

SEQ ID NO: 174251 - protein, 362 aa, unidentified
MSKDYKKRISLKDESESFIKYSVGNDISKEKFDCCISLINNQQQVSIIATRSFSNTPAGFKSFEAWVNQKCKHDIPIVFLMEATGVYYEHLAWFLHKAKRSVSVILPNKAKKYLQSLGYKSKNDKIDAKGLAQMGAEQRIEQWCPPTSEILHLRSITRHRQALQETRTRLNNQLEGQRYAEHINNEVVSHLEQLIETIDTQIKQTEKMIKETVKKDEGMYRKINNITQIKGVGLVTAATVIAETGGFHMIKNQRQLVSYAGYDVVENQSGNRVGKTKISKKGNSRIRRILHLPSLSVVRNGELQFVNLNQRVFERTKIKMKGYVAVQRKLLVLIYTLWRKDEVYNKEHPVMQSGSLSFRMVS

SEQ ID NO: 174252 - protein, 354 aa, unidentified
MIIIGVDFHPEFQQIALLNTTTGEVEEKRLAHPDEAEKFYRAHASAGETVRLGMEASGHARWFERLIAELQFELWIGDAAEIRAKRGRKQKTDRQDAQHILKLMLKDDFPKIWVPNWENRDLRQLLWHRHRMVQARTRVMNQLQAVALNEGLHCKKKLWRERGRQQLESFALAPWASRRRRDLLDLLDRLNPSIAELTQAIEREVENYPAAQRLRTHPGVGVLTSLAFVLILGDAERFRCGKQVASYLGLVPLEDSSGNRRRLGHITKQGSSIVRFLLVEAAQVTVRSLPEWRSKYFHLVLRRGRKIAKVAMARRLAVQLFWMMRKEWDYEQLKKFGSHAGQPGNRHGVQSNTE

SEQ ID NO: 174253 - protein, 416 aa, unidentified
MKYAPTVLAAEPVNGLTCGIDWARDDHAVSIVDNRGVEIHRSTVEHSTAGLRTLAALLARTGVGEVAIERPDGPIVDTLLTAGVTVVVISPNQLKNLRGRYGSAGNKDDRFDAFVLADTLRTDRTRLRPLVPDTPATTALRTACRARKDLIGHRVALANQLREHLNRVFPGAVGLFADLDSVISMTFLTRYDRQDRADWLTPKRLGAWLASVGYTGGTDPTVLHARLIAAPRGATGEEGAAHAHITGALVATLKTVVEQIKTLSDTIAEQLAAHADGHIFTSLPRSGKIRAAKLLAEMGDCRGRFPTPESLACLAGVAPSTRQSGTMRSVGFRWSCDKHLRDAVTDFAADSRHANPWAADLYNRARARKHDHAHATRIVARAWLHVIWHCWQTNQPYDPAQHRALQALLKDQKPAA

SEQ ID NO: 174254 - protein, 452 aa, unidentified
MEIKKQISLEVVHPNACGIDIGSRSHWAAVGQNAEDVKEFGVYSQDQLEMCNWLHSKGVTSIAMESTGTYWQNLFSTLVGQGFEVILVNGRQTKNIKGKKTDIKDCQWIQKLHSLGLLSASFLPDSDTDTVRTYSRHRQNLLKQSASCVRRIQKYLRLMNMRLEVVVRDIVGLTGSSIIEAFLNGEHKGEDLAKLRHYNCRKSEEEIAKALQFNGRKDYLFALQQEWNSYKHLQQQITETDLQIDQLLKELIDKDDHKKQHTIEKKKHKRKNKNAVSQTDMNLIAYQYFEGVDLMAIEGVSEGLIMTLIAEIGLDGIRKFPSAKQFTAWLRLAPNNKISGGKVLSNHIPKGSSRLKIAFRNTANAIGNLKEGWLAEFFKRLNYKKGRATAVSALARKLAVIIWNMLVKGQSYQPPSLYLFLDEKRKIAAAKRIQKQITKFGLTDRDIEITKY

SEQ ID NO: 174255 - protein, 327 aa, unidentified
MIQSVLGIDVSKDTLDVVLLKAETNTYASFTNNPVGFGKLARWLISQGAGQVHACLEATGQYGDGVAEYLYQAGHAVSVVNPARIKRYGDSKLHRNKTDKADAALIAEFCRKEHPALWTPLPAYLKQLRQMVRRLEDLQANYQQEHNRLSSGISDTWVVEDITDHLKELSKRIKALQKAIFQVIADTAELKEQFDLLLTIPGIGKLTAARLLAEMGDIACFEDAPQLAAYAGLNPKGFRSGSSVHKKTRISKEGRALLRHILYMPAIVACKHNPIIHTFCDRLAQRGLPKMAIVAAAMRKLLHLVFGILKHKQPFDPNYLLQPSFTS

SEQ ID NO: 174256 - protein, 359 aa, unidentified
MTTYYIGADVHSNSTEIAIERNQKIVHRCKLTTSIAALSSVLDSLKGEKHLVIEEGPMADWLYRNLSEKVDEMIVCDPRRNKLIDSDGDKDDKIDAAKLACLLRGNYLRSVYHSNDEGRTELKRWVSLYHDRVRDAVRNINKIRACCRMHGMSIPRLVVRRAATRDKWLSDTSNTTLAKQLELLWIGYDATSRQVRIARRQLSILSSKYKIIKLWSQLPGIGLVRAVTLFAYLDTPWRFKKKNKLWKYCGVGLQRATSGTDKKGRPKPARLQLPWAVNRTLKNAVLGATSSVINQKNNLFKEYYERMLENEIMPSNARHAVARKLLTVMWAMWKTNSRFDESKCKPDTEMTLASSRLSL

SEQ ID NO: 174257 - protein, 424 aa, unidentified
MTYRIAGIDVHKKMLAVVVADVASEGEVPFERLTFYTAPEQLKVLAEWCVEHGVQEVVMESTAQYWKPVWEALERYWQPVVGKAADANPMTGSLHLAQAQSNRARGGRKNDFGDAERLVRRHVAQELVLSFVPSAEQRLWRTVTRQKQQRVVARVRLRNQMEAFLEEAHIKLSSLVSDLLGQSGRRMLRALAEGKTDPAEIALLGDQRLHATQAQLRDALSAARELHPVYRRLLNQSLEELRVLDEQIQELDQEIAALLKQHQDAVQRLAEVPGLGPDSAQQIIAEVGATAAVFPSPKDLASWVGVCPGDDISAGKSHSTKSPKGNKNMRRILNQAAHAAVKAKGSIFEVVFQRLRRGLCYKEAIWAIAHRLCRLIWVLLRRGVPYEERGPAVSAASQRMRASRMMRELRRMGYRVDPPTTQNA

SEQ ID NO: 174258 - protein, 412 aa, unidentified
MTAINQFAAHVGLDWADKKHDVCVQFKNGERIFQVVEHTPEALDIWLNELHQKVKGRIAIALELKKGPVVYALQKYPFVTVFPVHALSLARYQQTFWPSGAKDDPQDAELALELMLRYPQKIKAIEPDNGDIRLLQQLVEQRRLLVEDKRRFVNRIINTLKQYYPQPLEWFSHRGSLLLCELIIRWPSLQQLKRARRDTIRNFLNAKGGRAMALTEQRVASIDNAIPLTTDPSVIEANALMATALATQIKVVSEIIKTYDERIETLFDTLPDAGLFKSLPGMGPCMGPRMLAALGDNRDRFNSAEEIQNYAGIAPVTERSGQKSWVHWRWQCAKFVRQTFVEWAAKTVNSSYWARLYYQGLREKGKSHQSAIRALAFKWIRIIYRCWKTRTQYDEAKYLLALEARHSPLLKP

SEQ ID NO: 174259 - protein, 357 aa, unidentified
MRFYTTQHRFYFGVDLHARTMALHILDQAGHTVLATTLDADGPTFLDALKPYRDDLVVCCECLFCWYWLADLCKEEEIAFVLGHALYMKAIHGGKAKNDQIDAAKIARLLRGGNIPFAYVYPKGMRETRDLFRRRLYLVRKRAETMTHIQNTNSQYNLPPFGKKLAFAANRHELKIAERFTDPQLRKNIETDLHLLDHYDELIGDLELHLTRTAKVEDPQAYARLQSIPGVGKILALVLLYEIHQMRRFDSAGQFLSYCRLVRCAHESAGKKLGFGGMKIGNAHLRWAFAEAAVLFARHSPRAKQWLARQAKKHGKGRALSRLAARLGRTVYHLLRKGEVFDENRFWGNRERVAGSR

SEQ ID NO: 174260 - protein, 312 aa, unidentified
MTASQDVFIGIDISKDRLDVHVRPLGVGFSVSNEAAGHAALIARLRPLRSKRIVLEATGGYERALWLALSEAGLVAAVVNPRQVREFARAAGRLAKSDRLDAAVIAHFAETFAPRPGKPDPVADRLGEHVLYRRSLQEEIVALEHQRRRLETPALRERADRRHAALRAEVKEIEREMRAIVDGDPGKKALFACLTALKGVGLVLACTLIANMRELGSLTRHQAAALIGVAPLNHDSGVRRGYRAIAGGRRRVRNVLYVATLSAVRSNPVIREFYRRLSAGGKPAKVALVACMRKMLVMLNGRVRDHLATATA

SEQ ID NO: 174261 - protein, 417 aa, unidentified
MKVLYLGVDVSKKKLDLCLRSNGKDILYDVIPNDLSSIKSWLTRTFEKFFLSEDSLVVCAEHTGQYTYPLVCATKSIGVYLCLEDAAKIKYCHGIPRGKNDKIDACRIAMYAERYNDCLQPYTASELIIQKLKNLSTERSMLVADRAKYQSQLKDQVDYMEHSIYIAKCNRVEGIINTFTDYIAQIDLEIKELINQAPVIAHQMDLLMSVDGVGERVALKMIMETDAFTSFTDPRKFCCHAGVVPFVYVSGSSQRSKNRVSNRADKSIKHLLHMAALSVSQVKNSPLKKYYDRKVEEGKNKMSVLNAVRAKLVTIMFAVIRTDAFFFEKLSKFACVIHKNRGGSTRPDERDFSYLSTAFTNIFHRSSHLYALMRSNIIVCIYGIGYTFIQLFKAVICTVKKPPILDRVIHPFSQSIM

SEQ ID NO: 174262 - protein, 349 aa, unidentified
MTEAYDGRQVVGMDLHRRRSVLVRMTEDGRKLETVRITNSPAALRAVIARAGKNPRVVIEATYGWYWAVDVLEAAGAEVHLAHPLGVKAFSYRRVKNDERDSADLADLLRMGRLPEAWIAPPEIRELREITRYRHKLVKARTSYKDQVHGVLAKLGVPVTHSDIFGVHGQDWLDELPLPQPYAGKVASLRQLAGALTAEITLLDKVLADLLDGHEGYHAIQALPGIGPVLAAVIVAEIGDIRRFPGPGQLGSWAGLTPRHYESDTKVIRGHVTKQGSRMLRWAVTEAIQRQPAGSRPREVKDAIIARRGKEAKNIAKIAAARELLTLVYYGMRDGRVRRLAAPRPRPAA

SEQ ID NO: 174263 - protein, 355 aa, unidentified
MSLPMEEHEVILGVDTHLDVHVAVLIDEVGRVVATHSFPTTARGYEQLIEWAGSFGRLSRAGVEGTGTYGAGLARYMRERGVQVLEINRSDRSRRRLRGKSDPTDAENAARAVLAGDAHAIPKAQSGVVEAMRAINMARRSAVKAKTQAINQLRALLVTAPEAIRATLWKVKPEHCIARCARLQSLGETPLLKALTSTLRMLARRWMSLAKELRQLDTALDELTKRAGRRLLTRFGVGPQTAATLLVTAGDNPDRLRSEAALAALCGVSPLEASSGKTTRHRLNRGGDRAANNALWTISMVRMRSDPRTRAYVARRTTEGLSTKEIQRCLKRYIVRELYPLILADLADAARPNLT

SEQ ID NO: 174264 - protein, 348 aa, unidentified
MKVATLGIDLAKNIFRIHGVNDRGAVVLRKQLSRKQMLPFLARLEPCLVGMEACAGAHYWARQIQKLGHTARLMSPHFVTAYRKNQKNDGNDAEAICEAVGRPSMRFVPIKSASQQDIQAVHRIRFQLIKWRTALANKVRGLLGEYGIVVAQGIAPLRRELPLILDDEENQLSGLFREMLGEMAERLKLLDQRIRQYDARVERVFGQDERCPRLAQVEGVGPLVATALIAAVGNAHEFKNGRELSAWLGLVPRQHSSGGRNVLLGISKRGDRYLRTLLIHGARSAIRVVERRRDPRSLAISRLKARRGSNVAAVALANHNARVLWALLKKGEDYRPRAARRTDVAQNG

SEQ ID NO: 174265 - protein, 402 aa, unidentified
MTYDYVIGMDACKYFHHACVLDIDGTQVLSKRINQNEQSLRALFSAFSAHDHKVLVVVDQPNNIGRLTVAVAQDIGIDVRYLPGLAMRQLSRIHAGNAKTDIRDAYIIAHAAKNLPESLRSVDRVEEAFLQLKVLNGIDEDLARSYTRLINQIRSALVGCYPQFEQALRGQIIHRKWVLHLLARYGGPTKIKRLGKAKAAAFARRYKARNPEPVLDAIFAAISEQTVTIAGAHYTEMGVAMSAKDALLKLEHRQQIEKEVIELINDIPHTQFLLSMPGIGPKTAAQILMTAGDMSDFPSAGHLASYAGLSPRTNQSGTSIMSNSLNRAGNKKLKNALWQSSFASIRFHERSRQFYERKRREGKRHNAAVVALARRRLNVLYAMMRNHEHYHDPAPSQEDLAA

SEQ ID NO: 174266 - protein, 389 aa, unidentified
MIFIGIDLAKYKHCACINNPITGELLVEPFFFKNNKDGFNELLSSIKPYKDSLVGLEDTGHYGNNLIDFLRDNDFKVALINPRLTKMYRNALGWAAKNDKKDSILITKVLMDKDNYRLLSDKDLIISELKEITRRYHDGEEDINRFKNRLQKAIDLVFPEYNKLFSSKYGIVYNRILKHFGSAEVISNTDIRTLRKAFKVDGRGRRIPLTAEQLKENAKDSIGTHTDATVLEIKRLLDTIELLESYSKQYEDKIKELSLKLNSPIISIPGISHITGMTILAEIGDIHNFDHARNLVSFAGVAPYVVQSGEFNAPKTSITKKGSSYLRKALYQCSLTVITNNPVFHKYYTLKISEGKSHFGAKSHVVRKMLRIIYHLLTNNIEFDEKQLI

SEQ ID NO: 174267 - protein, 327 aa, unidentified
MSNSELDISVLGIDVSKGKFNVSLLRGGKYRHKAFPNNSRGFEQLSEWLRGLGVKELHACMESTGVYGEELAEYLHDQGFGVSIVNPARIKGFAQSELIRSKTDKVDASLIARFCASMNPSLWTPDPMETRELRSLVRRVEVLLSMRQQEQNRLEVSNKILKKSIRKLIRYIDKEIEELKGEINKHIDRDPELRDKRKLLESIPGVGEATIHIILSHFASIEKFKNAKSLTSFLGIAPRHYQSGSSVRRRTRMSKVGRSSLRKAFYMPAVVALRYNPLIADLKVKLSNAGKHNMLIIGAAMRKLVHIIYGVLKNKIPFDPDYSLKSP

SEQ ID NO: 174268 - protein, 414 aa, unidentified
MSNPLIVGVDVHRKTNTFCLMDASGQEVRSRFTLDNNRPGTQAFVQQVAELMEADGFSELQVAAEATGWYWFHFFQSLQQEALLSAWPVDLHALNPRLTANFKKSYVDMDKTDPIDAFVIADRLRWGRDIGTPFEYDETYLALRFLTRYRYHVVHNLAREKAYCTAILYLKASEYSRQDKKPFSDLFGAASRAVLQEFASIEEIAAMPFEELVEFIDVQGKRRFPDPSENARLLMQVAQDSYSLPQALQQPINLVLNLSLKQISALENQAERLDTAIAERMAAIPNTLQTIPGFGPVFVAGILAEIGNPQRFNYDQGKVAKFAGFKWRKTASADFTADETRMTRTGNPYLRYYFCEAAFSVQRCDREYAQYFQRKLQEVRKHAHKRATVLTARKLVRLVMRLLATNQPYRPRRL

SEQ ID NO: 174269 - protein, 386 aa, unidentified
MKKVNSNVSCAGMDVHYKFSNVTFRDSGGKVVSRQRLNHPDRNQLTMRMNHWPKGIPVVLEASFGWGWLSDLLIEAGLEPQLSNCYKLEQMRKARGWVKTNKKDADMLSLLPFETTDWWQVWRAPVDVRNRREQMRFRGDLVGLQTVVKNRIHAIFHRQGIFHEFSDLFGGKGRKFLAELCLENPTELSSEALLALRGQVILLDHLRRQLADVARILRKQLVKTPLIKRLKTIDGIGLILAHVLTAEIGRIERFRTHKALASYSLLAPRSHDTGQDDPSRSPQGRHLGTHGNRTLKWAFIEAAHGAVRSGGRWRAMFDRVTDGGKKDRNRGYIKVARELVKVVYVVWKKGVDYQPVAPVRPGCRKKEKSRSGTGQLLHPMVHALTA

SEQ ID NO: 174270 - protein, 387 aa, unidentified
MPQPNDLSRSLAALDENSTLIAVIEMSQSSWLVAGMIPGVERQPAKKLTPDEGGLLRLLHRWRGEAQKAGRTIDRIAVAHEAGRDGFWLARWLRAQGIEAHVIHPNSIAVSREHRRAKTDRLDTALLKRAFLGWLRGEREHCSMAAVPSLEEEDGKRPSRERENLVGERTRIGNRVKSTLARLGIRGFKPTLRTAAERLERLRTPEGEPVPPHTLAELRREMARLRLVAEQIREIETARLERLERQPNRGAHPMIRLLAQVRGLGIETADMLAREAFSRRLRDRRAVARYGGLTGAPDESGARRREKGLAKAGNARVRRGMIQLAWRFLRFQKDSALAQWYRARTADARGATRKALIIALARKLLVALWRLVTTGEVPHGVVLRPAS

SEQ ID NO: 174271 - protein, 404 aa, unidentified
MFYCGIDIAKYKHEATVIDEAGTALLDSISFSNSKEGCEKLLALFERLGVSNDGLLIGMEATGHYWLSVYGYLLEQGFEIKVINPIQSEAFRKMYIRQTKNDRKDSFIIAQIMRFGQFSATNLSEETIVALRQLSRYRLALGDTCGDCKRRVIALLDQVFPEYDALFSDTFGVTSKEVLSQYPTPEDLLTVSTRKLSNLLEKTSHGRLGKEKAEQLKAAAANSFGVSFARDAFAFQIRQLVEQMEFLERQVTELEAQISSLLKQTGSYITTIPGIGDTLGAIILSEIGDIHRFNAPNKLVAFAGLDVRVTQSGEFTGTRQKISKRGSPYLRRAIWLAASRAAFCDPILSEYYQSLRARGKHHLTAIGAVSRKLCNIIFAILSEDRPYEAIPPKEIRHHSADFTM

SEQ ID NO: 174272 - protein, 454 aa, unidentified
MPKKAKIEKTATGKILKVVNPNAAGIDIAFSEMQVCVPEDRDSECNRTFGCFTQDLKQISDWLKSCRIDTIAMESTGVYWLPLYFILKERGFDVILVNARDVKNYSGRKTDEADAEWLMMLHSYGLLKCSFQPENEARAIRNLTRHRSNLLQSSSREALHMQKAMEQMNLKLGNVISDLLGKSGMSIIRAIISGNHDPRELAALAEENCKASKEEIANSLEGSWAEDHLFELEQAFDLYNFIQEQVNKCDRQIEMHLIRYRAELDHPSDDNFQRCKKKIGKKNAVDFDVEKYAFDIWKVNIMAIPGMSAISLLQLIGELGHNFADKFETCHSFCSWLNLVPNNKVSGGKLLSGKVPKKTNICGQVFRLCANSLKRNKTTLGYYFRRIQSRCGYSQAIVATAHKIAKIFFTMIKNRTEYDESETGINERDLLERKITMTQRRLDKLNRQLEVALA

SEQ ID NO: 174273 - protein, 355 aa, unidentified
MNVKKYIGMDVHQETISIAVMTADGKLVMESIVETKASTILQFIQGLHGDLLVTLEEGTWAAWLYDLLKPHVTELVVCDPRKNALLKEGNKSDKIDARKLADLLRGGYLRSVYHGENGLRTLKELARSYLTISQDLTRVMNRVKALYRGWGIACGGQQVYAPRHRSEWLNKIGEAGVRRRAEFFYQQLDAVRTLRQAVRRDLLAESRKHGATKLLRQIPYIGPIRAALLIALIQTPHRFRTKRQLWTYSGLAIETRDSAQYRYVAGQLQRSKKPQQLRGLNENHNHDMKAIFKSAAAMASRREGPFQDFYLELLTKGIRPAMARLTLARKIAAITLILWKKGAHFDAEQLKPQAA

SEQ ID NO: 174274 - protein, 419 aa, unidentified
MTAQQCTPPQAALVAIDIAKNRHEVLIDPGPGMRRRRLTVLNTRAEHDRLVATLAGLGKPVIVGFEPTGNYHRGLVHRLIAAGFEARLISSMALARTREALHNGWDKNDPKDAQVILHMLRIGASTVYSDPGYGRLNDLQELSKTHDMVSRAKTELWHRLLTHYLPLYFPEAERFQGNSRSDWFLALLEQFPTPASITALSKDAFVEAAWDLVGRKVSKARLLADIYETARSSMALPVRPDSPAIAMFRLVLAEGRSLIRQRDQIEAQAEALLACDADAARLRQLPGIGPIIALTILAEAGDLRRFGHHRQFLKFCGFDLATHQSGMFRGQTRLSKFGNARLRRSFWLAAQVAIRQRENSFQARYSRYIVKDSDNKHLRRKAITAVAAKMARVAHAIVCSGTDYRPFYERPVPSGRTSL

SEQ ID NO: 174275 - protein, 396 aa, unidentified
MEVMDAAGKVLAKRRLPEGVAGIAQLHELIGRYLGEDAGEAEVIVGIETDRGPWVTALIAAGYLVFPVNPLQASRYRERHGVSGAKSDGGDAHVLADMVRTDSHQLRPAAGDSAQAEGIKVLARTHKTLIWERTRAVQRLRHQLRDYFPAALEAFEDLDAPDALELLGKAPGPARAARLTRAQVSAALKRARRRDIPGKATAVLAALRGEHLGQPPAVTAAYAAATRSLIAVIVTLNEQVKTLQGQVEEHFRQHPDAEIYLSQPGMGAILGARVLAEFGDDPHRYADGKARRNYAATSPITRASGKKKVVAARFIHNDRLIDALNAQAFASLRASPGARAFYDELRARGIEHHDALRRLANRLVGILHGCLKTRTLYNEATAWSHRENLPQSSVAA

SEQ ID NO: 174276 - protein, 375 aa, unidentified
MARKRTLSTLDTSIAYEAVGLDLAKEDAAIAAFGPDHEGPYLIDRIPYDKLYELLADMAPTLVAMEPCSGAHQIAEQIQELGHEVMMISGRHVQAWVKDHCNGQKTDLNDAFAILNLAYDRWLTPIRGKTREECRLLALQSSYRQLKGQRTKTMVHVKATLHAWGFPIRTGSFNQKALHELIDANREAFGDEVVETLHLMINRVHDLDHDIATVLKLLTEATQRDPRASLLRSIPGFGVLTTSRWCAVVGDIARIDTPKQTMAFIGLVPNNRITGHHTETSSGREARGQGKMSKRGDKMLRSLCILGAGALCLMVRNDRLPDCPFVASIKERLASPRPWFKVLVYVAAKLVRIATALLKYGETFSFEKAGISKGF

SEQ ID NO: 174277 - protein, 296 aa, unidentified
MTTKATVNKSVNVGIDVGKSQLDIFIYERNISFSVNNDKAGIRKALGRLGRYRLARIVLEATGRYERAFVEAALAKTMPILIANPLHIRRYAGAIGQLAKTDTIDARLIAQYAAVVQPVVRAHHSRQVLQIKDLLVRRRQLIEMLTMAKNCHHIMPKFLKADIQRSINHLQRQLEKVDRELVKRVEAETEWREKRDIMLSMPGIGPVVVNTLMGDLPELGQLNQKQVAALTGVAPYNRDSGKLRGKRRTQGGRHTVRTILFMAALTSIQHNKVIRGFYRHLVAQGKHKKVALTACI

SEQ ID NO: 174278 - protein, 339 aa, unidentified
MKITTVGLDLAKNIFHVVCINAQGKEVKKRMLRRNQVCPFFVQLPPCVVGMEACASSHDWGRKLRALGHEVKLIPPQYVKPYLRGNKNDYNDARAIAEAVTRSGMPTVGIKTVEEQDMQALHRMRSQCVRDRTALSNSIRGLLGEYGIVFTKGVATLRRKIPEVLEDADNGLSLRFRHCLARRYEQLVELEGHIAFYTKELNRLSEQDEACQRLQTVPGFGPIVASAFRSVIGDGRAYARGRDAAASIGLVPRQYSSGGKNVLLGISKRGNKYLRKQLIHGARSVVLQAAHKEDPLSCWINRIRKERGWNKAVVALANKMARIGWAVLRHQTSYQPATT

SEQ ID NO: 174279 - protein, 409 aa, unidentified
MVVGIDIGSTTQYARAFDWRGIELGKVFPFSNSREGFESFKAWMQHLQDKYKKLDAIVGIEPTGHYWFDLGAYLEDEGILLVMVNPYAVKQTKELDDNSQSKNDRKDPKVIAKLVTEGRYSAPYTPDGVYADLRIMVANRKRLIREMTQIKNRFARWFAIYFPEYTDVFGDYEAQSSMLLLKKVCTPEAIVELGAEKINQIWRDAKLRAVGMKRATTLCETAKRSIGLKKGSSAARYEMKLLLEDYEYKKAQLDAVMEEIEKLCRKIPESEQMLAIKGIGVITVAGFLAEVGDVRRFESPRQIQKLAGLSLRENSSGKHKGQTTISKRGRSKLRAVLFNAAIPLIAKNPEFKSLHEYYTTRANNPLKKKQSVIAISCKLIRVFYAILANGVTYDAQKMLSDIHRQPQAA

SEQ ID NO: 174280 - protein, 304 aa, unidentified
MVCRASCVPTAGSLTLVERAALAGAPQGTRLAVVFEPTGPAWMPIAVFFARRGHDVYRVSSAKAADLRRFLRRHAKSNGIDAETLARIPLADPRGLQRLELSGPDAAALDRRVRACERLTRAASEHKVRIKDLVRQLMPMTPLTGDLGKADLAVLECHADPRALLAAGMAGLTRLIASTSNNQQGQDRARQWRAAAAAAVDLYGDHPAVPYDALAAEVATEVRLLRAIQAELAVHAAAREQHYRRPDPGQLARSLPGFAEISAPVLVAVMGRPGRFRDATRFKSYAGLAPRASETGETDPRAHR

SEQ ID NO: 174281 - protein, 312 aa, unidentified
MTSEAYVGIDVSKRWLEVSVYGESESRKVGNDADGYRALVEQMQAVQPVLIVFEATGGYENQAAKALREAGFTVAVVNPTRVRRFAEALGILAKTDQIDAQVIAHFAFVTKPAPNGAQTPLEEQLAACVERRRQLLVEIIAEKNRLSTCPACVRAGIEEHIDWLDTHIATLESEIQVLIWQKPEWRERAEIIVSVPGVGPVTAATLVAELPELGQCNRQEIAALVGVAPFNKDSGPKKGKRRIFGGRSGVRRTLFMATLSASKHNPIIRAFYISLLSRGKEKMVALTACMRKLLVIINALVRKGETWHFSPA

SEQ ID NO: 174282 - protein, 417 aa, unidentified
MEVLYQRCAGLDVGKDEVVACTRVPAGSGGIGGGRRQEVRTYKTFSASLAALADWLHGQGVTQVVLEATGQYWKPVWSVLEERGFELLLVNARHVKILPGRKTDVGDAAWLAELLEHGLLRSSFVPPPAIRALRDLTRYRYRKRLIQAHTAEAQRIHKTLEDASIRLGSVASDVLGVSGRAMLRALLAGERDPAVLAELARGRLRQKLPELRAALAGRFDAHHALLLRLALDHVEQLERSITTLDQEVDRVIAPFAVARDHLDTITGVGKRAAEAIIAEIGADMGVFPTAAHLASWAAVCPGNNVTGGKRRSGKTRKGNVWLSAILVECAGAAAHSRDTYLAAQFWRLARRIGKKKAAVAVGHSILVLAWHLLDGDCDDAELGGDFFARRDSDRARQRAVAQLQALGYHVTLQPTAA

SEQ ID NO: 174283 - protein, 354 aa, unidentified
MRRHKYMGMDVHQATTVVVVIDSEARLVLETIVATEKGAIVRLLESISGPLQVTFEETTQAGWLYELVRAHVREVIVCDPRRNKLLTEGSKGDKPDARKLAELLRAGMLRSVYHGNHGTRTLKQLVRAHETLSSDCQRTMVRIKALYRGQGIGTSGRGVYQAKQREGWLRQLSEPGIKQRAGWLFEQLDQLRLLRKQAKEAVLVEARKHRAVKLLGTIPQLGPIRSAQIVAILDTPYRFRTKRQLWSYAGLAVVTHMSAEYEIRDGRVVRTRKPLATRGLNRNCNRGLKEVFISAATGGGHSEPYRSYIENLLKNGMREQMARLTLARKIAATALHIWKKGESFDPKKLNLATT

SEQ ID NO: 174284 - protein, 393 aa, unidentified
MKVTRIGLDIAKQIFELHGVDRHGRVAIRKTLRRERVLEYFSQLPACEVALEACGGAHYWHREISKLGHMVRLLPAHKVKPYLDGNKNNAHDAAAICEASSRPSMRWVEPKTVAQQDLQSLHRVRQVTVRQCTLLANHIRGLLLEYGIAVARGTAALQRALAQLLEPDEQRLSPLLKQLIAGQWRMLKLHEQQVKVHDRRIANIARHDASCQALLKVEGIGPLTATALVATAGNGRQFKNGRHLSAYLGLVPGHSNTGNKTVMLPITKRGNRYLRTLLVHGARSTLYHARRKTDPRSLWLQRLQAKRGHNVAAVALANKNGRIAWALLRFGQAYRPNLAHAPVAERGATPAASAPGRRAGLTLKLHRVSAASAESPIFPSRPQRVKGGTEKCS

SEQ ID NO: 174285 - protein, 415 aa, unidentified
MALKIVYKICCGIDVHKNFVVACIAKTDKQGVTTYESHHFSTYTKGLKELLKWLLDRNCKDVCMESTGKYWIPVYNVLEKDCSIVLAHPKYVKAIRGKKTDKKDAKWIADLFKHDLVAGSFMPPADIRQLRDLMRYRFKLTCFKSSEKNRYQNCLTVSNIQLASVVSDTFGKSSQKILDKILENPDDASFDIESLIHGSMKDKLPKLELAIDGYITPEQAAKLKIIKEHFDNLESRKAELEELILALASPYQQEIAIILTAPGFKNTFSAISVISEIGTNMEAFPSAKHLCSWAGLTPTNNESAGKKKSVRVSKAGCYIKPLLVQCANAAIKSKKHPEIRDRYLRIKKRRGHKKAIIAIARMLLTALYHMLKNGENYNSDLYKKSDILPTTREITVEQAILMAQFQGYRIKSATE

SEQ ID NO: 174286 - protein, 408 aa, unidentified
MKRYYIGVDWGDRLHQVYVGDHEGKKVREIKVPETVEGLAEIGRWLDEQRAEGFELWAAIEKPAGRIVDFLLDHGVEVYPVNPKAVDRVRDRYRMSGSKSDAFDAYVLAEFLRTDQAHLKGLRPSSENAQELKMLCRDQRRVVRLKSRLLNQLTTTLKEYYARPLEVFENIETEVALDFLTRYPTPAHLGALKRKEFNRFATQQHHLSKQRCEQLWEKLQKPQLAVPEHVVRAKAQLVEVLIDQLRASIKAVKTYHHKVERFFASSPAAELAKTLPGGKSGTLVAAIWAELGDAQGRWESSGHLQAEAGAVPVTKASGKSHVVHFRFACNKQLRYSMYWFSFISLNNSEWAKLYYRGQRDKGHNHPQALRALGAKWLKIIFVMWRDHKPYDEKFHLANIALQKMRQAA

SEQ ID NO: 174287 - protein, 276 aa, unidentified
MGPTPSEASVGVDVSEAELDVAAGEAPVFTVANTPKGHAELVARPAPSRPRRVVLQATGGLEGAVAAAPCRVGLPVPVVDPRQARDFAKAMGYPAQADAIDARAPAHFAAATEAEPEPLPEEAARELDASLDRRRRRIGMRTMEQDRWATAAGRVRRDVESHPRWLREHIRQVEREPDERIRRSTAWWEKDNLLGGIPGVGPVLSRTPLAGVPERGTLSDRRAAAPVGVGPMAHDSGRRRGPRRIAGGRESVRRVPSMAAVTASRSDAAWERFADR

SEQ ID NO: 174288 - protein, 407 aa, unidentified
MDMIEFPQLIERGCGLDVHRDTVVATVSGKDLPEQTLTFATHTQDLEKLIGWLQNQGVTHVAMESTGVYWKPVYYVLEGYFELLVVNARHIKNVPGHKTDKKDAEWIAKLLLSGLLKPSFVPREEMRFMRVLFRHRKKLVNQRSRAKNRLQNILQDANIKLSSVVSDVFSKTGLAIIQKLLEGITDPIVLANQAKGSLVSKKEQLQLALHGRFTDHHSYMVRFIMDTIDSHNQAIEKLEAELAICAKPFEHQLNLLQTIPGISQMAALGILAEIGTEMDKFHSDKHLASWAGVCPGNNQSAGKKLSSRVTQGNNYLKTNLIEASWACSHTLNTYLSFKYWKLAQKRGKKKAAMAIGHEILKAAYHILRDNTPYKEPQLRQEIIDERRKAEMERLEKRLQKLKSLASN

SEQ ID NO: 174289 - protein, 404 aa, unidentified
MAVVMIGVDPHKGSHTAVVIGATEELLGQLRVRACAAQAERLLAWAAAWPQRTWAVEGAGGLGHLLAQQLVAAGELVLDVQPKLAARIRLLGSGATDKNDPNDARSVAVAALRSPAACPPVRPDDHAAVLKIWAKRHRDLSRARNQVVCRMHAVLCQLIPGGVSKRITAGQAARILEAAEPRGTAGMARWQLAEQFLTDLRRIDIQRHDIQRKLAATVAASGTTVTVIFGVGPAVAAAVLGDVRDISRFPSQDHFAAYNGTAPTEVSSGNRVIHRLSLRGNRRMNHAIHMAAVTQIRYRHTKGRTYYDKKIAEGKTPKEALRALKRQVSDALYQRMKADARRAAGPGGHPGNGSAASAAGLHPADRLFGQATPGPAPSLGPEPARSKATHPGSSRQTRRPVPAA

SEQ ID NO: 174290 - protein, 391 aa, unidentified
MILVGVDVAKDKHDCYIMTSEGEVLFKSFTIANNMEGFNQLYEKILSVIDNFDNVKIGLEATGHYSYNILGYLLDKGLTPYVINPLHSNLYRKSLSLRKTKTDKVDSRIIASMLMSDVSLKPYSNTLYHNEELKSLTRYRFTKVQERAKLKISISRLVTILFPELEKLVPTLQMNSIYALLYEFPSAHAISKAHLTRLTNLLNTTSKGHYTKDKAVLIREAAKNSIGSNMPAKSLELKHTIKLIKELTSEINEIEEEIKIIMNKINSPILTIPGIGLSTGAQILAEIGDFKNFSSPDKLLAFAGLSPSTYQSGNMYSSNTKMEKRGSKYLRFALFNAAIYVSYWEPTFSQYLKKKRVEGKHYYVAISHVVKKLVRVIFHLEKTNERYSTVI

SEQ ID NO: 174291 - protein, 412 aa, unidentified
MEGETVIAGVDTHKDVHVLCLLDGLGRKIWSGSFRADPGGYDRLAEAIGDPGSCMVVGVEGTASYGAGLTRRLVELGYNVVEVLRPKRDKVRPGEGKSDPLDAERAARKAASGRGCSVPKSQDGWVEAVRQLYVARRLAVATSTSCVACAKSMLTTAPGALRERFRGRERPKDLMPLLARGRKAGDALEESVLASLRSVAAVWKEARSQVESLDERIRALLEANAPALLGVEGCGTTTAAALVVAAGDNPGRLKGEAAFSMMCGASPIPASSGKTERHRLNRGGNRQANWALYEIAIKRMAYDERTRRYVARRTSEGKSRREAVRCLKRYIAREVYHVLMDPNPDGAAPEGPELAKMRKAMRVTQKKAAAELGLSAATLGHLERGKRRSTKLERRYYELLCELERTLPQTAS

SEQ ID NO: 174292 - protein, 343 aa, unidentified
MKLSRVGVDLAKNVYQLHGVDRHGKTVWKRRLRRGQWLQALLQKAEPGCVIGMEACTGAHHWARALQSRGYTVRLIAPQFVKPYVKSNKNDANDAEAICEAMSRPTMRFVTVKSVEQQDIQATHRVRTELREQRTAKANQIRGLVAEYGLVAPQTLLALRRAIPCWLEDADNGLTDYFRSLLHGLWGDLVALDDRMTELDKQIKKLADSNEVTRRLQQLRGVGPLVATALVATVGTGEQFKKGKQMAAALGLTPRQCSSGDKQRLLGISKRGDVYLRTILIHGARAVVSQAKHRDDRLSQWVTSIAKRKHPNVAAVALANKTARMAWAMLRNDANYDPDFAIG

SEQ ID NO: 174293 - protein, 448 aa, unidentified
MPAVHAKPTQRKHAAGIDIGATSIYVAVPVDRDPQPVRSFQTFTEDLHRLADWLQRCRIKTVAMESTGVFWVPLFQILEQRGFEVCLVNARHVKNVPGRKTDVSDCQWLQYLHSVGLLQASFRPAQQVCALRSLLRHRDSLVQTASTYAQRIQKALDQMNLQLHHVISDITGVSGVTILDAILNGERDPRKLASLRDHRIKATEETVAKSLVGDYRPEHLFTLRQSLDAWRYHRKLIAECDDEVQRHLVQFASKADPKQSPLPRPRKVSSSKVYSSQPGYDLRTEHYRILGVDLTEVPGINTLLVHTLLAEVGPDLSKFRSAAAFASWLGLCPDNRISGGKILSVRTRHVQNRAALALRIAAHTLHHNQSVLGHYYRRMRAKLGAPKAITATAHKLARILYYLLTTGQPYQESIFAERETQNQKRALFSLHARARTLGYQLIPLTAST

SEQ ID NO: 174294 - protein, 307 aa, unidentified
MYVGIDVAKDRLDVHVRPTGEAFIVARDGEGLAALVIRLGALAPRLVVLEATGGFEVTVASALAAAKLPLAVVNPRQIRDFARATGKLAKTDALDAAAIAHFAEAIRPEPRPIADEQAQALGELVARRRQVVEMIGAETHRRRQMTQAHLRRRIDRHLAVLQAELSEIERELDDSIRGTPVWRENDDLLESVPGIGPATARTLLAELPELGTLGRKQIAALVGVAPLNRDSGTMRGRRRTWGGRASVRTALYMAALVAARHNPVIAAFYQRLRAAGKPAKVALVACMHKLLLILNAILRDRRPWQHT

SEQ ID NO: 174295 - protein, 331 aa, unidentified
MKKITFGIDISSKTLDICKKDDENNEFFKIKNEITEIKKFFRKYINKETEVVIGMENTGRYNWNLYEVLQNFNFKVYVVNPLHLKRSLGLVRGKSDKIDSERIAWFTNKHQQELTLWKPSSETMKKIKVLFSERNSKIKLKASLLKQQHNYLNIKLLKLDKQLLKLNQQEVSLLEKHINLLEKQLEDLIDSNQELRMQKENIQSIPGVGKVLSWMMIAKTEGFTTINQARKMACYAGVVPFDNQSGTSIKHKPRVSYYADKSLKSILHLAAMSAIRLNNDLRTYYKRKIEEGKNKMLVLNAVRNKIIHRIFAIIKSGKSYEKNYKNNLILS

SEQ ID NO: 174296 - protein, 441 aa, unidentified
MYSLFFMEPYRKEHIMHNKNYISVGIDVGSAFSFMTILAPDETVILKPFKITHNNKDSLERAVSEIKKAEELYSLESRIFLESTGIYHFPLFCYLVDCGFNASIINPIITHSTKNGNIRKVKNDKIDSKGIAKLGLSKDIPVSQFPAKLVLELRSLTRKYYDLTDERSAHINKLKGDLHTVFPQYLDVFCDVTGKTSTMILRQYGTPDKILRGHKKTMIEKISKASRKGLAKASERYEKLCAAANAAKTFGCQIDSIYFNIFLTLDLVEKLDSALDSILNRIRQLITFNKNEKFIQQIKLLNTIPGVGFLTAVTIMCEIGDFSAFRNPKQLFAYFGLDPEVNESGKFVGTQLHMSKRGSRIARRAIFAVALASIRTKRNGEGINPYLRKYYELKSGQKPKMVAIGAVMHKVCNIVFAVLRDEKAFELRSPEDTVSSIKDLL

SEQ ID NO: 174297 - protein, 325 aa, unidentified
MQIAVSFFGADVGKAEIVVADHGRAKPVTQILKNTPSSLSKWLQTLPPGSVLAMESTGGYERMLADLAHERGLKVYVLNPKALHHYAKSQGQRGKTDRLDAIMIARFIASEHERLHPYQPCAQYIERLRQMLRLRRMAVITRTQLRLSSERHHQVHAQAQVQKALDALTELANSLEDQMLAEIQAEPALAQDFKLLTSIVGVGNLTATALVTTFARIPFTSSDAVVAYAGLDPRPKESGAYKGMRKLSKQGDAILRSLAYNAATAAARSITFKPMYQALLAKGWATTQALNIIARKLLRIAFGVWKSRKPFERELFLANQACVKP

SEQ ID NO: 174298 - protein, 350 aa, unidentified
MIIIGVDFHPEFQQIASVDTDTGEFQEKRLTHREEAEKIYRALACAGQKVRVGMEASGHARWFERLLAELQIELWIGDAAEIRTKRVRKQKTDRQDAQLILSLLLEDRFPRIWVPSWENRDLRQLLWHRHRMVQARTRIMNQLQAVALNEGLRCKKKLWRERGREQLESFRLAPWASRRRRDLLELLDRLNPTIAELSQAIQQEVEKCPEARRLMTHPGVGPLTALAFVLIIGEADRFQCGKQVASYLGLVPLEDSSRNRRRLGHITKQGSSMLRFLLVEAAQVTARSLPQWRSKYLHLMMRRGRKTAKVAMARRLAVHLYWMMRQGWDYQQWIKFGSHAGQLGNRHGVQ

SEQ ID NO: 174299 - protein, 371 aa, unidentified
MDESSKTLYVGLDVHKDAIAVAYAPDDRGAEVVSLGAIGTRQCDIDKLIRKLQAKGARLVVVYEAGPCGYWLYRYLTRQGLACHVVAPSLIPRRPGDRVKTDRRDAITLARLMRSGDLSSIYVPQIEDEALRDLSRGREAAMEDLKRSKRRLKSFLLRQDIRYEGRANWTAAHLRWLSEVVCPTPPQQIVFQEYVRAVTEQQERLQRLERELHEAVKGWRLYPVVEAIQALRGVELTGAVILMTELGDLTRFDTPRQLMSYLGLTPSEYSSGARRRQGGITKAGNTHARRALVEGAWAYRYPAKVSRHLQLRLEKLPAEVQAIGWKAQVRLCKRYRQLSARGKHVNQVVVAIAREMAAFAWAIARIVPLAS

SEQ ID NO: 174300 - protein, 417 aa, unidentified
MKKHSYKQTDVNKIDWQKLRTKTEGQELLFSVDVAKQDFVGALMTTASEILYIIKWKHPQNTINLLERLCNGLGAARLEVVLESSGTYGDALVWQFRQRGIAVYRVSTKHVHDMAESFDGVPSLHDAKAAQIIADLHLHGRSALWQEIPPEQRDLRGLATELEVHQKLHQANLNRFSAQMARYWPELECEADLSSVSVLSLIVEFGDPAEVRLHQAEAEALLRKAGGYFLSEEKRQAIINSAIHSIGVPCTPGECAALKALATDLLRTHRACQEVEKRMAQAVKKHDELGNLAELCGTVSAIVLAAILGDLRKYANPASLLKALGLNLKERSSGKHHGQLKITKRGSGRARFYLYWLVMRLVQKDPVIKTWYERKVARDGGRFKGRALIAVMRKVVKALWHVARGEKFDSSKLFKLA

SEQ ID NO: 174301 - protein, 453 aa, unidentified
MSRKKTKLESVSEPPKIRADAAGIDISPEVIYVAVDPGRDPQPIRHYGSVTSELYRIANWLKACGVRTVAMESTGVYWIPLCQVLDERGFEVYLVNARHYKNVPGRKTDVCDSAWLQYLHAVGLLQGSFRPTDEICAFRTVMRHRASLVEAASKHVQHMQKALDQMNVQIHRVLSDITGVSGMAMLDAILKGERDPRRLAELRDGRVKTSEAEIIAALEGNYRIEHLFTLKQSLESYRHYQKLIAECDRQIREQLEALEGRSGGNEPPDTRKNMRTRSDEELRKEFFRIIGVDLTAIPGINVGTVQVLLAEVGPDLSRFRSAGAFSNWLGLCPNNCITGAKIKSSKTKKVENRLAAALRMAAESLCRDKSYLGQFYRRMKMHLSGGAEAVTASAHKLARIIYAMVTERVEYDESCFAEIEQRNRNRARLRFIKQAEKFGFRLIPIHAGTEFVS

SEQ ID NO: 174302 - protein, 340 aa, unidentified
MKRKTKFFLGIDVSKLTLDISLLAVIDHDKSEMITDRFDNSVEGLKKVVKWLKKQKVPFNTDTLVVIENTGVYHRLIWSCFSTNGLPLYIGNAAHIKWSLGITRGKNDRIDSQRLCNYAFRNSDELKATPPLNPVLLQLKDLMTSRSRLLVQLGGIKVYLSELTPSSSEATLAIMKEAHQMAVDGLKASIRVLEQRIHQIIEENPVIKNNYELLKTVPGIGHLTAVYLICCTNNFSTRTTGKQLASYAGLAPFASTSGTSIKGRNKVHKMANKTLKKMLNLCAMSSIKYYPEFRYYYDRKIAEGKHPYTVLNAIRNKIVLRAAAVINMQRPYVDNYNKAA

SEQ ID NO: 174303 - protein, 351 aa, unidentified
MSKESKKRSSDLAAKLLKYSVGIDMGKAEFVACVSSINFEQRFKVIASRKFANTGKGFNLFFSWVKQKTRLEERIVFCMESTGVYYENLAYFLADAGCCVSVILPNKSKNYLKSLGLKSKNDKIDAQGLAQMGAEQNLEPWRKPKQLFIELRSLTRQRQNLQENRTALSNQLEAFQNAKYVSPKVVESLKSLIDSIDTEVIKLEKEIKTLMEQDEEIHQKMKAICVIKGLSLISLATIVAETLGFAQFTNQRQLTKYAGYDVVENQSGKHVGRTRISKKGNSRIRRILHMPAFTAITHGEKPFVALWNRVYERTKIKMKAYVAVQRKMLVLIYTLWTKGGTYDPEHLVMQS

SEQ ID NO: 174304 - protein, 321 aa, unidentified
MRNAVGLDISQKTFDAAAIVNGHTKQTAFENNADGFEKFKKWLDAFHSEDLHICMEATGNYFEDVADYIGQFYTVSVINPYKISEYGKSRFHRTKTDRQDAKLIAEYCHTAMSKDLPARQKISHAHYRLKRVLTLYEQLKAEKTAQINRQKVAKDEFVRQMHQTQIEELDKHIRLVEAEIQTIVKDDSNLKTVSDSLQTIPAIGKLTAAILTNYLLSGDFKTANQFTAFAGLNPQKKESGTSVKGRSSMTRYGNRRLKAALFMPAMVALNRNYFPDFVKRLEAKNKPKMLILGALMRKLIVIAFNIYRKSGTYNPGRYKSA

SEQ ID NO: 174305 - protein, 422 aa, unidentified
MKLTYPVCCGVDVHKTFLVATIIKTDGLVPKYYKKRFSTFSRDLLAFRQWLLDNDCKDVCMESTGKYWVPVWNILEDAIRVVIANPKWVSAVKGNKDDTKDSRWIGDLFRMGLVPGSFVPSRKIRVLREFTRYRYKLISMRSSERNRFQNAFTVCNSTLDAVLSDMFGKSATAIQNYLLDTDVVNPAYCASLLQRAAKKKSADVMAAVEGFKMSAEQKERVRIIQEHFSDINARVARLDAEINKLVSEYESQIALLCTIPGVDRNLAITIISEIGTDMSEFGSSKRLCRWAGLTPGSNESAGKKKSVRITRAGVYLKPALVQAAHAAVKSTKSVYFKSKYEHISKRRGKKRAIIAIARMILTAVFAMLKTGEVFHPCDLQKYDMPEQLRRRQVVSSARDAVKLLVSLGVLQEDSVSLTALAG

SEQ ID NO: 174306 - protein, 422 aa, unidentified
MLGAGIDWAESFHDVALGRPGEGVIEQFRIEHGPAGVQRLVARCLELEPDPADVRVVLETRHGLLVEALVDAGFTVLPVNPDLVARRRGPAKKKDDAEDARICCLLALDAYLDLRKLIPHGETGAELRAIARDDERAARDERRIGNRLRADLLAVFPAAIDIAAGDLGAPVFLRLLERWPSADALAAASADDLEAFARSARHGWPARFAGRVTAAIAEPRLPVRPELARAKAGAIRLAAAQLLLLHDQRRTWERRMGELLLGAPRYGRDKTPRDPDPGKAFPGGETYLSMPGLGDRLAARVAGEIGEHFGQFTSPNALQCYAGRAPVTRRSGRSELTIARRLAYNRHLGEAVQQWAFCSLSRSAWAREFYDAKTAAGDSHHAALRKLGNRWLEVLWHCLRLGVRYDEAVHTANRDRARKEAA

SEQ ID NO: 174307 - protein, 353 aa, unidentified
MAKIDLTIVRDQAVFVGIDVSLRSYAVAVRSGGALVYRCTVPSRYEHLRSLWSRLPGCRIHAVYEAGFSGFGLYDAMRQDGIDATVTPPSKVPRSGDRVKTDRLDAQKLAAELEHGGLHRCRVPAPALRVDREWSRYLIQLTAQQTRLKNQIKMRLALHGLTPPLDGPRRWSRAYRAQVLAIADPAGPLHAILRDMLEQLAEVERRCTEVKRTLRQLARSDAYRAAVQLLQSAPGIGWLTAVRLVLEWGDLSTFSNGASFASYLGLTPSEHSSGERTRRGGITRQGNGQVRSWLIEAAWKAITMDPALGARFRRLAPRPASRTRAIVAVAHTLALRLRACWLSGQPYVIGVVR

SEQ ID NO: 174308 - protein, 346 aa, unidentified
MEISRVGVDLAKNVFQLHGADDKGETVWKRKLSRDKWLKVLFTMVKPGTEIGMEACAGAHHWARVLHAAGYRVKMIPPQFVKPFVKSNKNDANDAQAICEAMARPNMYPVSIKTVEQQDIQAIHRVREEIKTHRTAKANQMRGLVAEYGLVAPKELASLRRAVPQWLEDGSNGLTPCFRQLLDGLWKDLRALDDRMAELDRQVAMIAKQNPTAKRLQKLRGVGPLIATALVATVGDGKQYRKGRDMAAAIGLTPRQHSSGGKERLLGISKRGDAYLRCLLVHGARSAMRTAKGKDDRLSRWILNLQGRRHANVAVVAMANKTTRMAWAIMSKEVDYDPSFGAASET

SEQ ID NO: 174309 - protein, 393 aa, unidentified
MNKIIYIGMDVHSSNFTLCSFEPGYGMTDDKIFGQVQFKEDLIKNTEKYINNLKSQRKDIDIVCGYEAGCLGYVPCRELTKAGINCKILAPSTMAVQKGGKKQKNDFRDALDIARCLASGSYKAVNVPDIEDEDVRDYLRMRDDHQTALKQIKQRLNAFCLRHGFQYDKSKWTLAHIQWIKRLECTFKQKEIINEYLATYEALKSKIEAFDVRIEDFASSERYADKVKKLVCIKGIQTNTAMSFISEVSDFNRFRTAEQFAGYIGLVPGEHSSGDKVCRTGITKSGNTHLRRIAVECCNSYRRGNVGQKSAALKKRQKNVPSEVINYADKASARCQRKYYRMVNKGKNTNIAVTAVAREFCCFIWGMMTSNYECGNNEAGEVIPAEGLIRINV

SEQ ID NO: 174310 - protein, 361 aa, unidentified
MPSIKVSKDSFKGQSIYIGIDCHHKSWKVTLLTDKFELKTMTRDPDPASLVTYLEKHYPGAEYKAVYESGFNGFTVCRKLRSLGVDCQVVHAMDVPSSHKDRQQKSDKSDSRKLAQLLRSNGFEGIDVPPIHIEVDRKLLRQHFSLTRMLTSEKNRVKATLFQFGIEIPERFSSSQSRSWSKVFIEWLRSVPDIEPKLQRSINNYIETGLLLRKQLLEITKQLRSLSQTEEYKDDFSLLTSVPGIGPLGAMRILLQVYNMKRFQTMDELCCYVGLIPKMYGSGEKMITGKLSKRGRKDIKIMLIEASWVAVRKDPALTARFNKLTELMNKNKAIIRVAKNLLNRIRHILTHKIEYEIGVVS

SEQ ID NO: 174311 - protein, 357 aa, unidentified
MTGGSPTAPGSCLKAVGELGAPLVVPSNPNGRRGRRARSPIRQGRVAMDMITVGIDVSKDRLDVAVCPSGEAFVVERDAAGLERLATRLRQIAPQIVALEATGGFETVAAAALAAAGLPIVVVNPAQIRSFARALGQRAKTDPIDAAVIARFAEATRPETRPLPDKATRLLADLVARRRQIIEMIGAERQREKRMAVPHLRKSIARLLKALEKELASVDEDIDDAMRGSPAWRDKEDLLASVPGVGPTIARTLIAELPELGQLSRRQIAALAGLAPFTRQSGQWRGRSFIAGGRVAVRTALFMGAMVAKRHNSILKAFFDRLVAAGKPKMVALIAVARKLLTILNAILRDCRPWQPA

SEQ ID NO: 174312 - protein, 421 aa, unidentified
MTQTSHNTFAAFVGIDWADAKHDGCLQAAGSAKRECFQLEHTPEAIDAWVATLRTRFDGQPVAICLELNKGPLVFALRKYDFLVLFPINPLTLARYREAFTPSRAKDDPTDAELQLELLLTHRDKLQPLNPQSPTMRALEQLVAHRRRVVGDKVRITNRLTSTLKNYFPQVLQWFQDKDTHIFCDFLSRWPTLKAAQLARRTTLETFFRDHHVRSEDVIAQRRHAIKTATPLTTDEGVITPHALLVQALVAQLRVTLQAIADFDIAIAQRAQTHPDFPLFQALPGAGPVFASRLLVAFGEQRTRYASAAELQKYAGIAPVTERSGKKSWVHWRLQCPKFLRQTFVEWAAESIRHSFWAQLYYQQQRDKGKAHQAAVRALAFKWIRILYRCWQDRTPYDESAYLQALNQRGSSLVQNFAKVS

SEQ ID NO: 174313 - protein, 367 aa, unidentified
MKKVSTATAKQGRNISQQKLTIGLDLGDRNSWYCVLDEAGQIQLEQRVRTNAKALREVFGAMPRSRIALEIGTHSPWISRLLSELGHEVIVANARKVRLIGESRKKDDRLDAQTLARLARIDPQLLYPVKHRSGQAQADLMMIRARAGLVRARTALVNTARGLAKSYGERLRSCNVRNMDPEKAESLSPELQVALEPLLNAIESLSERIVEYNEGIETLAQQSYPQVALLKQIKGVGTLIALTYMLTLEDPHRFRKSRDVGCYLGLQPGRRNSGQSEPQMHISKEGDPYLRTLLVQGAQHILGPFGIDCDLRRWGLRLAERGGKNGKKRAIVATARKLAVLLHHLWVSGEVYEPLHNSNRTTLAAAA

SEQ ID NO: 174314 - protein, 324 aa, unidentified
MIDGILGIDVSKNTLDVSISSCTKVRTKSFANTFDGWHHLLDWLVAQEIRRVHACLESTGRYSLGIACALYEAGHIVSIINPAQVRDFVRTKLGRNKTDGIDASRIREYCELFKPLPWAPPSEAHRRLSELQTIRSGIIAGLTEWKNRKNSGIVDAEAQALADATILHFTSQIGAVDKAIALAIENDSDLRSKRDLLLSISGVGDTLAGVVLAELPGPDVLHSSGEVVAYAGLNPRQHQSGTSVDRATRISKIGNAVLRAALYMPALSAMRYNPAIVALVTRLKSRGRLKPKQIVVAAMRKLLVLCFGVLKTGKPFDPAIAVGC

SEQ ID NO: 174315 - protein, 422 aa, unidentified
MLEETHDTEEIIQRVAALDIGKAELVCCVRVPSPGTPGKRLQEVQTYQTMTRSLLVLADRLGELGVTRVVMEATSDYWKSPFYLLEAQGFEVWLVNATDVKHLPGRPKTDRLDAVWLCKVAERQMLRPSFVPPSPIRQLRDVARYRADLVAARTAEKQRVEKLLEDAQIKLSVVASDIFGASGRDMLGALIAGTRDPKALAQLARGRMRAKRGVLEEAFTGHFSDHHAFLLAKMLARVDLLDTDIAELDRKLEELIAPFAHAVERLDEISGVGRTAARVIISEIGVDMGRFATASHLASWAKFTPGVKESAGRKKGKASTGHGNPYLARVLGEAAVAAGKTDTFLGERYRRIARRRGAKRAIVAVGRSILVIVWHLLADPDARFHDLGPGFYDTRSNADRAKRNHIRQLQALGYKVTLEPAA

SEQ ID NO: 174316 - protein, 309 aa, unidentified
MKEQVVYLGVDVAKAYLDAAIGKQKRRLPNDATGHRQLIHWIKQIEAQVQVICEPSGGYERMLIQGLVGAQVKVSLVQANRVRQFARAAGILAKTDSIDAEVLCAFGQAMRPQTLTASKLQQEQLRELESQRRHLSRLLVMEQNRGARLGDSSVRRLNRSLNKQIQKQIERIDLLINEHIAGSQELSAKAHKLTAICGVGPRTAALLLAQMPELGQLNRREVAALVGVAPFNRDSGKLHGKRTIFGGRRHVRHGLYMAALVAARHNPILRAFYRRLRTAGKPAKLALTATMRKLLIVLNSALKPDPIYA

SEQ ID NO: 174317 - protein, 413 aa, unidentified
MLFIGDDWAEGHHDIEVEDDVGRRLARIRLPEGVEGLARLHEVVAEHLDPDSTGSSDLPEGAVVVGIETDRGVWVSALLACGYQVYAINPMSAARYRERHGTSGAKSDAGDAHVLAEIVRLDRGHHRQIAGDSPQVEALKLLARAHQGLIWDRTRHLQRMRSALREYFPAALTAFDNLAAPDTLALLRKAPDPDRAARLTTGQITVELARAHRRGDRTATATRIRDALRAPALRQPAAIEHAYAVVVAGQARMLAHLAEQIDELEQEVKRSFRGHPAAEIVRSCPGLGDVLGARVLAEFGDDPHRYRNAKARKNYAGTSPITRASGKRKTVSARYARNKHLADACHQWAFCSMNTSPGARAYYDALRAREVGHHAALRQLDNRLVGILHGCLKTGTVYDESTAWPQVPPQAAA

SEQ ID NO: 174318 - protein, 362 aa, unidentified
MFRPHTLYIRIRIVRKVSEPAFAMKDQDVTDVIRRKQQTAMRYIGIDVSKATFVVAYSSDKGGEIRTFNNTTTGIKQFIGALPKDGSIHCVMEATGNYSAMLLYLLNVAGIAVSMENPLKIKNFARAMLSTVKTDKIDARLIALYGEKMNPQPFKIQGEAILRLRQKRTVIRQLTKQITAMSNLRGSLACLPVPDKGATHTVDETIEFLEKRRDRLQSELTDLVEVEFSRQLALLTTIKGIGITLATALIITTGDFTYFQNAKQVSRYLGICPTYEQSGTSVNIRGHINRNGDAYTRGLLYVAAWTASRFNAKCGETYTRLRQNGKPGKLAMIAVANKLIRQAFAVVAHDKEYVDGFVSNRP

SEQ ID NO: 174319 - protein, 391 aa, unidentified
MEVMVETCCGIDVHQKSIVCCILDGPLDTNKPKKQHRTFGTTTKKLREALTWIQSQNVTHVFFESTGQYWIPIFNIFYDSNLTLILANPQHIKNLPGKKTDMNDAEWIAQLGRCGLIDPSYIPCEEVQQLRLLTRRRKAYTERITQCKNEIHNILQRANIKLTSYLSDIYGITGITLLEMFIDGEVITEQTILPKIHGKVKATAAELVEAMDGKLSFEDRFLLGQSLEHYRHSVNQVEEITVVIKQYVLERFEREYNLLIELPGVSAIVACVILSEIGPNVEAFKSQGNLASWAGVCPGSYESAGIKKSSHTTQGNKYLKSILFQAGGTAGRSKDEAFHNLYARISGRSSKMKAIIACAHKMIRVIYKILSTGEHYDAKKALGLRQQARAN

SEQ ID NO: 174320 - protein, 390 aa, unidentified
MAKRSTTVGLDVHKDTIDVVIAEPEADGEVRHFGTIGGDLGSVDRMLKRLRRPGRRLQFVYEAGPCGFQLYRHLTGQGVECAVVAPSMTPRRSGDRVKSDRRDAEALARLHRAGELRAIYVPTPEDEAIRDLVRAREDAVEIQRRARQRLKAFVLRHGFRYAGRAGWTFRYRHWLAGLRFPHPAQQLAFQEYIDTIGEAEKRVARLTEEITKALEGWCRAPVVRALQALRGVSLLTAATLVAELGDIARFATPCELMAYLGLVPSEYSSGAKTRRGAITKAGNPHVRRVLAEAAWAYQGPARVGRAMMCRQEKLPQAIRDIGWKAQLRLTTRFRRLAARGKARPKVATAIARELTGFIWDIARHVPLTSQLAAGGIPRVVPVAARGSAGR

SEQ ID NO: 174321 - protein, 346 aa, unidentified
MEKLIRIGMDTSKSVFQLHGVDASEQPVLKKRLRRGQVVPFFSKLAPTVVGIEACGSAHYWARVLTELGHEVRLLAPQRVKPYVPRGKNDAADALGLCEAMSRPSMTFVAAKSAEEQAGLMLAGMRDRLIKTRTQVSNAIRSYAAEFGLIAPKGLDKIEPLLLRATTDESLPALARRLFALHGREYARLLGEIREVEAMLMSWHRANPDSRRLAEVPGIGPVTGARVAMKKADAMACKSARHYAAWLGLTPKDHSTAGKLRLGGITRAGDPALRSLMVEGATAVIQQAERSPAKASPWLLALLKRKDKKRVAVALANKNARIAWKLMSSGERYNPNHVRPRIASAA

SEQ ID NO: 174322 - protein, 345 aa, unidentified
MEPMYYIGLDVHKRKISYCVKDSSGRIHSEGWIPATRFDLDRRMKSLPQPWSAAMEATMFSGWIYDHLKPHAAALKVAHPLMLRAIVLAKKKNDRVDARKICDSLRCDFLPECYMAPTAIRERRRTLRYRNLLVRQMVQMKIKISTLLMEAGVSYNKQKLHKAGYFRELLATNPHIDAGLRSLLRQCREMVVRLGKTENALIRSLQQDRLLTERVGRLMSIPAIGPITALTWALEVGEVQRLSSIKKAVSYCGLCGEQKDSGNTVQRTPLSKQRNKHLQTTLIEAAKMAPRYSPNLALLYDREKQRGNANRATLAVTRKLVAYLMAVDRGQTHFLTLDREACTAA

SEQ ID NO: 174323 - protein, 343 aa, unidentified
MKATRVGVDLAKSVFQVHGVSRLEKPVLKRRLQRNTWLNDLSQSVEPGCEIGMEACAGAHHWARQLLARGYVVKMVAPQFVKPYVKSNKNDANDAEAICEAISRKSMRFVAVKTVEQQDIQAAHRIRSQLIAERTAKANQIRGLVAEYGLVAPQHLAQLRLAVPLWLSDEENGLTPRFRRLLIGTWSDLRALDARIRELDHEVEQIAQTDPMANRLMQLRGVGPVTATTLVATVGDGSQFKNGRQMAAAIGLTPKQHSSGGKDRLLGISKRGDAYLRSLLVHGARAVLQAAKNKDDRLSRWVTSLAQRRHPNVAVVALANKTARIAWAMMRTGEDYQPSLAMG

SEQ ID NO: 174324 - protein, 342 aa, unidentified
MTRAITGGVDTHADVHVAAALDPIGGLLGVEEFPVTPAGYALLLGWLGGFGTVGLAGIEGTGSYGAGLARHVTAAGVRVVEVDRSDRQDRRRQGKSDPLDAVSAARAAQSGRARGAPKGRDGAVEAIRALMVAKRSAAGERTRTINQARALIVTGPDDLRTRFTQHTAASLVAGLASLRPRPGDVVGYATRIALRELGRRAEFLDGQLERLDDLIVPLVTARAPGLLALYGIGPNTAALLLIAAGDHPGRLRSEAAWAHLCGVAPIPASSGKTVRHRLNPGGDRQANHALWRIVFTRLGSDTATRAYAERRTAEGKSKAEIIRCLKRYVAREVYPHLRTAAG

SEQ ID NO: 174325 - protein, 356 aa, unidentified
MKVTTIGLDLAKNVFQVHGADAAGTPVLRKQLRRAQMAEFFAQQPPCVVAMEACGGAHHWGRKLRALGHQVRLIAPQYVKPYVKSQKNDAADAAAICEAATRGHMRFVSLKTVDQQSVLALHTVRSGFVKQRTALSNQIRGLLAEFGLVLPQGLSKLSGQLPVAVADQHNELPDTMRDLFRMLHAQLAHIDDLVARLERQIRVWANQDEAAKRLQQIPGVGPITASALAASVGDARQFEDGRQMSAWIGLVPRQHSSGGKSVLLGITKRGDKYLRTLLIHGARAALKAYQRAPGKIPEHLAQLLQRKHPNVVCVALASRNARVAWAMLSRREHYQGGHAVKSHALPELPALPAALA

SEQ ID NO: 174326 - protein, 427 aa, unidentified
MPYRIAGIDVHKRMLAVVIADVAVEGECKFEYRRVGTSPSELRKLAEWLIEQEVEEVVMESTAQYWRPVWGELEETWMPRRRNREDAGPMSGMLHLAQAQSNRGAAGRKKDFPDAERLVKRYVAGELTLSFVPDGEQRLWRTVMRRKYQVTCDRVQLHNRLECLLEEARIKLSSLVSDLFGLSSLRMLQALADGETDPAKLSALGDWRLKATPEQFRDALGACRNLHPIYRQLLRLMLEELQLIEKQINELDKQMASLLIAHQDAVKRLAEVPGLGVDSAQQIIAEIGVRAATFPSAKNLSSWVGVCPGESESAGVNYSHRSPKGNRQMRRVLNQAANAAVKTKGSIFELVFQRLVPRLGFAQAICAVAHRLCRLIWKILHQGVQYEERGPAVTRKRKQQRAAKMVRDLRSLGYKVEFVGLRSESPA

SEQ ID NO: 174327 - protein, 416 aa, unidentified
MNAVGIDVSSRKSTVAVLRPLGEVVCLPFDVTHDIAGLASLVEKLKALDGETRVVMEHTGRYYEAVEKALHEAGLFVCAVNPLLIKEYGANSLRRVKTDKADAIKIARYALDNWADLRDFTPMDAIRYDLKTLNRQFQLASKQRTASANNLIALLEQSFPGIRKCFDSPVRSDGTQKWVDFAHSFWHVDCVRKQPFPAFCERYRKWCKRHAYLFKLSNAEEVYALAKRAVVLTPKSKVVKVLVQEAANQLSSISRSVKVYRAEMDRLAAMLPEYPVVMAMYGVGKSYGPQLMAEIGDVRRFERKQALVAFAGIDPMPNQSGDKNVRSNKSSKRGSPYLRKTLFNVIRTYLQCAPQDEPVFQFLNRKRAEGKPFYVYMLAAANKFLRRYYAKLRDFFASLDTLQPVAPIPTILKAAL

SEQ ID NO: 174328 - protein, 343 aa, unidentified
MQSMSTIGLDIAKSVFQVHGVDAAGQVVLRRQLRRRHVLAFFQKLPPCLVGIEACASSHHWSRELQALGHTVRLMPPAYVKPYVKRQKNDSTDAEAICEAVTRRNMRFVPTKTIEQQGCLMLHRARHLFIRQQTAVINSIRAYLAEFGIVAPVGRRGVEQLLEVVADTDDHRLPEVARACLAALGSQLRALKAQILEFDRRIISWHRSSATSKRLDAIPGVGPALATALVASIADPKVFRSGRDFSAWVGLVPKQNSSGGKDKLGSISKQGDRYLRSLFTAGALAVIRYAKIHGTGHRPWLTALLARRPTKVAAIALANKLARMAWAMMAGNERYKEPAALAA

SEQ ID NO: 174329 - protein, 312 aa, unidentified
MDACIIGIDVGKDRLDVAVRPSGESFVTARTGAGIEDLAERLKKLVPRIVAIEATGGFETVVAAGLAAADLPVIVVNPAQVRAFAQALGKRAKTDPIDAAVIAHFAEATKAVPRPLPDEMTRLLADLIARRRQIVEMMAAEGQRARRVTDQRLKKSIARLRKALEKELAELDGEIDDHVRGSPVWVEKEDLLASVPGVGPVVARTLIAELPELGSLDRRKVAALVGLAPWTRQSGKWRGKSFIGGGRKTVRNVLFMAAMVAARHNPILKSFRDKLVAAGKPKRVALIAVARKLLTILNAIVRDKRQWQPKTA

SEQ ID NO: 174330 - protein, 342 aa, unidentified
MEIAVLGIDLGKNSCSVVGLDASGRVVLRRRLHREGVVKLALGLPSCVMAMEACCGAHHLGRRLRDQGHEVRLMSPEYVRPYVKSQKNDDRDAEAIAEASARPTMRFVELKSQAQLDVQSLHRSRDRLVGERTALINQLRAFLLERGIIVPQGRRKLELHLQILLAADEMPLSPRSRLLIEDMRAEWQELDRRIEAFDQEFAEQARTEEAARLLTTIPGIGPLNATALVAAIGNAQTFNRARDLPAWLGLVPKQVTTGGKPKLLGISKRGNVYLRKMLIHGARAALPTLSKRETPLGGWLRGLMARAHVNTVVVALAAKLARIICAVLRSGQPFEMQAAKVA

SEQ ID NO: 174331 - protein, 400 aa, unidentified
MNYFLGIDIAKTNHVASLINNNGDVVIRAIKFTNSNEGFNRLLNTIQSKLGDLSNIEVAMEATGHYWLSLYSALTDNNFNVSVYNPYQIKSYRGAYNNRKQKNDIIDSIIIADYLRVFGSKESKFPEEKLLSLKQLTRFRANIVANVSSLKVQVIGLLDKVFPEYKKLFCDTFGNTSKQLLLNCPTPDDIINISTTKLANLLSKNSKGRFNKDTALHIKEVAKSSFGIKFTTDACSFEIKQLINQIVFLESQIDAVSKEIKELYNKLDSHLLSVPGIGDNLAPIILAEIGDINNFDKPSKLIAFAGTDPSENQSGNKLSSNDKTSKRGSPYLRHAIYTASLVAISNEPELRAYYDKKISEGKHHFVALAGISRKLLTIIYYILKEDRDYIRYDNIKDKLN

SEQ ID NO: 174332 - protein, 430 aa, unidentified
MKSNTQNKKIEAITEKTLVIGIDVGSETHYARAFDYRGIEFSKKPFKFSNSEAGFEMFKAWILDIKEKHEKDKVVPGMEPTGHYWFNLGKFLQDNEMKPVLVNPHHVKKSKELDDNNPTKNDRKDPKVIAGLVKEGRYMIPYLPDGIYADLRTASNMRFQIQSELTRVQNRISRWFNIYFPEYKTVYGKPDAISGMMILKKAPLPEDILTLGVEGVNQIWRDAKIRAVGKKRAQTLVEAARHSVGTKEGATAARIEIRMLLEDYESRNNRLQEVMFLIEELVKQIPMAEKLMEIKGVGIKTVSGFLAEVGDITRFSSPKELQKLAGLALVENSSGKHKGQTTISRRGRKRLRYLLFEVAMSLVGKNPEFGTLHHYYTTRKVNPLKKMQSLMAVATKLIRVFYAMLTKGVEYDSAKMLGDIKRPAEYMQAA

SEQ ID NO: 174333 - protein, 392 aa, unidentified
MVVSVGIDVSKDKHDCFIVSSEGEVLADVFMIPNTMDGFRSLLQRIWECCDSQDKIKVGLEATGHYSYNLLGFLLDNGLPTYVLNPLRTNIYRKSLSLRKTKTDRVDARTIASMLLSDAGLKPYTDTAYHNEELKSLTRYRFDKVKERAKLKGSIARLVCILFPELEKLVPSLHFASVYALLEEFPGAKQIAAAHLTRLKALLETASKGRYKRDTALEIRDAARNSIGSWMPAKSLELQHTIRLIRELDNEITEIEEQIQTIMDELNSPITTIPGLGFRMAAMIFAEVGDFTHFDSPDKLLAYAGLSPSTYQSGQLKNCYPHMEKRGSRYLRYALYNATKYVCHWDPTFAAYLAKKRAEGKHYNVALSHATKKLVRLIFAIEKSRQPYCSAT

SEQ ID NO: 174334 - protein, 340 aa, unidentified
MSKSNQLDFTGVTITSGVEDFSQDADPVTLYKHLSRKYPNATYKIGYEAGFCGFNAQRILSSLGAICYVVNAADVPTTDKEKKQKKDKIDARKLCDYMQSSKAKSIYIPTVSWEHARSLARTREQIVNNQTRSKNRIRHLLHFSGLHLPEQYEEGRYWSKKMIEHLEQMDCGGSEHLHIALQLLIKDYKQTRSLLLESTRAIRKLCKEPAYQPGILWLRSIPGIGLINAAIILFEIQDIKRFKSPDHLYSYAGLVPDTADTGDKKKTKGITVRRNEYLRTALVESSWTVVRKDPALLMKYNQLRKRMHYNKAIIRIAKHLLARIRFVLLNQKEYVTGVVA

SEQ ID NO: 174335 - protein, 348 aa, unidentified
MSQSHFIGLDVSARTVNLCAVDQDGLVAHERKLSSDPDEIAQHILSLPFAIARVGLEAGMLSQHIYGRLAESNLPVVCVETRHMKAALSAQLNKTDRHDARGIAQMMRVGLFKPVHVKTPTSQRLRTILTARQLLRSKLQDVENEIRGLIRNFGYHLGKVTARDFEPRVRELIADTDLHIVADALLLARRSLREQFGRLDDILVKLARQDEVTRRFMTVPGVGPLIALTFRATVDVPSRFSRSRTVGAHFGLTPRKQQSGEVDRSGRISRWGDEMMRSLLYEAAQVLLTRVKRWSSLKAWAVRVSRRRGHKKAIIALARRIAVILHRMWIDGTEFDWGVRPEAAAPSS

SEQ ID NO: 174336 - protein, 454 aa, unidentified
MNRETPPTSLDHFPVLNRNAAGLDIGSASIGAAVPPGRAPCAVREFGTFTPDLLALAEWLNQCGVDTVVMESTGVYWIPVFEILEVRGFRVAVVNARHVKNVPGRKTDEKDCQWLQRLHTYGLLSGSFRPDDELCAVRAYLRHRASLLEHRAAHIQHMQKALVQMNVQLTQVLSDITGETGLAIIRKIVAGDRDPVALARLRDPRCKHTTDEIAKALTGNYRAEHVFALKQALALYDFYTEQVRECDRELEQRFRVLKPRHDEPTLPPLDPSDKHDSHSKNGPSYDARTLVYHWVGVDVCAITGMNEVTVQQALTETGTDMHAWRTVKQFCAWLRIAPAHDISGGRILRRRTLKTHNRATQAFRLAAQAASRSVHSAYGAYYRRMCARVGPQKAMTALAHKIARAYYFMLKHRTPFSKLSAEEDEQKARDRELAHLKKKAARLGMTLVPQPANA

SEQ ID NO: 174337 - protein, 316 aa, unidentified
MGEPEVFVGIDVASQWLDVAVRPEGTAWQVRNDATGMAALARELTSRKPTLIVCEATGGYEIPLVLAVAAQELPLVVINPRQARDFAHAVGQLAKTDKLDAAGLAQFAQAVRPPVRPLPVEAAYALSALVARRQQLQEMLVAEQNRLGTALAAVRASIEEHIAYLRGQVADLEAELADQIRTNPIWQHTSELLCSVPGIAETIATVLVADLPQLGQLTRRQIAALAGVAPYTRESGLSRRKGLIRGGRAPVRRALYRAVLTALRWNPVLAAFYRRLKADNKPTKLAMVACMRKLLTILNAMVRDDTRWLEAPMTAA

SEQ ID NO: 174338 - protein, 430 aa, unidentified
MPYRIAGIDVHKKMLAVVVSDVEVEGEYQFERRLFGSNPEQLRSLAAWLIEQEVEEVVMESTAQYWKPVWEALERCWKPMRQKREGARRTSGTLHLAQAQSNRGRRGRKRDFPDAERLVKRLVARELTLSFVPDAEQRLWRTVTRRKYQLTRDHVRLQNQVEALLEETHIKLSSLVSDLLGASARRMLKALAEGETNPAALAALADKQLRASPEQLCDALGACTDLKPVYRRLLKMVLEQLQFLEQQIGQLDQEMANLLSQHQDAVQRLAEVPGLGVDSAQQIIAEVGPTAATFPSEKCLSSWVGACPGDDESAGVNYSHRSPKGNRHMRRVLNQTANAAARTKGSIFEIVYRRLVPRLGHNQAIGAIAHRQCRLIWLILHQGVRYEERGPAVTKQSKQRRTVRMIRQLRSLGYRIEPPNPQHPSPPQGQ

SEQ ID NO: 174339 - protein, 361 aa, unidentified
MMMTTAETTATDTILAIDLGKYKSVACLSRSIPDQRFVKFSTCRAELTKLLDKLRPDVVLIEACLLSGWVHDLCAAKGVRCLVANTSSEAWKFKHLKRKTDRDDALRLVEIYRLGKFPTVHVPPKEVREQRGLIEMRQKLVGRRVALQNRIRAILVGQGLPAPRGARAWTVVGLVGIAQYAQPIADCAALELWRGRLHLTLTELAHVRELLVQAEKKLDALTKDNEAVQLLQTIPGVGPRTAEAVVAFLPKPELFRTSKQVSAYGGLVPRQYQSADTDHRGRITKRGPRTLRKLLVECAWVMLRYNAWARKVYRRLTHGGKTRKKQAIVAVARKLLVRCWAMLRDGTVWREDPTPAAAATT

SEQ ID NO: 174340 - protein, 422 aa, unidentified
MGGRLRHQSTQIKDRSQARNVDYRKVTPRQRYTRKGPAMNKNTASDPKSEALKYVGLDVHKETIAVAVADSGVAAARPLGVIHNQLDELRKMLRKVGSPARLRVCYEAGPCGYTVYRFLQRLHIDCMVIAPSLIPRKPGDRIKTDRRDALSLARLLRSGELSAVWVPDQEQEAMRDLVRAREDAVEDRLRARHRLGKFLLRLGILAPAGVRSWTIRYQQWLDGLRFERPAQAMVFTEYRQSLEEISQRILRLEKELALAVASSPQGPTIAALQAMRGIKLITAATLISEIGDLRRFGTPRQLMAYAGLVPSEHSSGGRTRRGCITKTGNAHLRRAVVESAWHYRHPPAVSGALRQRQRGLDPKVCLVGWNAQQRLHKRYRHLVSRGKIQQEVVVAIAREMLGFIWAIGHLIPTSSTPIKAAA

SEQ ID NO: 174341 - protein, 408 aa, unidentified
MLFVGDDWAEDHHDVEIQDETGRRLAAARLAEGVEGIARLHALIARHGGPDIEAGQVVVGIETDRGPWVQALIASGYQVFAINPRQVNRFKDRYAASGAKSDKGDAHALADMVRIDRAQLRAVAGDSDQGQAVKVVARTHQTLIWERTRAMQRLRTVLREYFPAALEAYAELTLSGADTVELLVKAPTPQAAARLSRAQIRGALKRARRHGAEDKATAIQAALRTPHLGQPEAVTAAYAATVVALAQVIQALNTQIAALEEQVKAHFRAHPDAEIYLSMPGIGHITGARVLAEFGDDPTRYASAKARKNYAGTSPITRASGKSKIVAARFVRNDRLADALQAQAMSAINTSPGARAYYDRQRARETGHNAALRQVANRLVGILHGCLKTHTLYDETTAWSHHTQPLAA

SEQ ID NO: 174342 - protein, 357 aa, unidentified
MDKFIGNSGVVTRVGLDLGKNAFQVHAVGGKGEIVIARKLARGRLVAFFAQLPPCLVAMEACGSAHHWGRQLAALGHEVRLIPPAHVKPYVRRNKSDAADAAAICEAAGRPGQRFVPLRSIDNQAALMRHRARELLAGQRTALLNALRGHMAEIGLVAPQGAQHAYELKRLAADGFDENGEIVVPDCVRGALSRLVDHIDALDEAILAIDKELAASVKADATARRLTTIPGVGPVTASAIVATIQDMSAFASGRDFAAFLGLTPRQSSTGGKPRLGRITKMGDRYLRKLLVVGACAVLGRRKGHKDALRLWASALLDRKTVKYKFKLTAVALANKLARVVYVLMTRGGEYDGRPVAA

SEQ ID NO: 174343 - protein, 354 aa, unidentified
MNDAKYIGLDVHQATISVAVRDSAGKLVMEAVLETKAETILQFLRGVRGSLHVTLEEGTWAAWLHDLLLPHVTRVVVCDPRRNSLLKSGNHNDRVDARKLAELLYLNELNPVYHGEHGLRTLRELGRSYIAITRDLTRVMARLKAIYRSWAIPCAGEQVYAPRYRAEWLAKISEGGVRCRAEHYYQQLDALAALRQEVRRELLAESRKHHATRLLRQIPSIGPIRAALLIAIMQTPNRFRTKRQLWGYCGLALRTYTSGEYRFVKGQLKRSKKVLAIRGLNLNHNHDLKNIFKGAATRAAAVGPFKNFYEACVARGMKPHLARLTLARKIAAITLLVWKKGVRFDAKHLKQQAA

SEQ ID NO: 174344 - protein, 386 aa, unidentified
MRTSDVSTPIAERISTIFVAIELSQKSWLVTMHCPDKDKISHHKLEGGDHGGLLALIDRMRARVARALGAVPRVVSCYEAGYDGYWLHRLLMAAGITNHVFDPASIAVDQRARRVKTDRIDGEKMLRTLMAYLRGEPRVVQIVRVPTAEMEDARRASRERARLTKEQTAHTSRIKALLRLLGMAVGNPRRRDFPNWLSAQRDWQGQAVPPRMLAEIRHEHARLMLVRERLDALMEPQPTVDLPPAAAQMAERGALLLGLKCLGPAFATTLSSEVFYKDFRNRREVASYFGLTPSPWKSGGIDREQGISKAGNPRARGAAIELAWLWLRHQPNSKLTQEYRRRTLDASKRIKRVAIVALARKLMIALWRYLTTGLVPEGAVLKAVQM

SEQ ID NO: 174345 - protein, 432 aa, unidentified
MPLFLFFETGVIRMKIIHPICCGVDVHKKTIVATIAATGKNNITTYETKSFSTMNADLFSFRDWLKERGCFHVCMESTGKYWIPVFNILEAAEMNVLLTHPKYVRAIKGKKTDKKDSKWIADIFKFDMVRASFIPPKDIRALRELARYRFKLVAAKTAEKNRYQNCMTVSNIGLANVLTDPFGKTATDIMNLVLTSSVITEAACAKLIHKSAKKKAELILESIKCCRVESDQRFKMKEARAHMDYLEQSILRVEAELFIRIQPYYHLVGHISSQLPGISQLSATLIIAETGVDMSVFESAKHLTSWAGLTPMNNESAGKKKSVRISKAGQFLKPLLVQCALAAVKSKEQPYFANKYHKLKRRRGHKKAVIAIARMMLTCIYHMISTGEEFNPSDYEEVKSPSPRERKLTDEAAIAFLAERGYDVSALVLKAM

SEQ ID NO: 174346 - protein, 370 aa, unidentified
MRYIGVDLHKTKIAVCYLSDGKYTHRNFKIDEIEKFKASLLIDDELCFEATTNSGWFHRQCINVVSRIIVVDTVRFKVISSSHSKTDKNDAKSLAFHLSKDMLPEAKVKDMLFQDLQSLFNTRKLLIKQRTMLKNEVHGYLLSHGIIIKASELSSIVGLNRVAKIAINSTAEVALSTMVNMIKSINEQIKSLDIKLEEFSKTLPGFENLNSIDGLGCNTIVMILATIGNINNFASHKQLCSYLGFVPSVQNSNETIRHGGITKKGSSALRGNLIQCAMVAIKKNYKLNAFYEKLRASKGHGKAIVATARKLIQLIYFTLKHSWFFADELTLNESTVKVTQVVDNSEAKNNKIFAIKVRKTLEINWLPRVV

SEQ ID NO: 174347 - protein, 338 aa, unidentified
MKTYAGIDLHSSNSSIGILDEQDRRLFSKRLPNDLNKILTALEPFRESLAAIVVESTYNWYWLVDGLMAAGYTVHLPNPSTIQQYEGLKQADDKWDSSWLAHMQRLGILPQGYIYPKAERPLRDLLHRRLLFVRQRTTLILIFQTMVACVKGVKLSVQEIAKLVRPELEALFVSEQMVLIAEEELAGIAALSKSIKRMEQAIRAELKLKPEFELLLTIPGVGFILAATIMLEVGDIHRFKKVGNYTSYCRCVGSRWSSNDKTKGKGNTKNGNKYLAWAYVEAANFSKRFCPPAERYYQRKAAKTKNVVAIKALSHKLARASYYIMRDGVVYDKNLLFR

SEQ ID NO: 174348 - protein, 384 aa, unidentified
MSHDHDIHSQAAIRVDLGAIFVSLELSRKTWLITSLSPGSGEKMSRHTTPAAAGLGGLLARLSELQAKAKARTGRDYRVVLIMEAGLDGFWIHRALEEEGIESYVVDAASIAVSRRGRRAKSDRIDGEALLRTLMAFKRGEPRVCSMVRAPSPEDEDRRRVCRERKVLVAERTAHINRIKGLLFTQGVGDYEPALKNRRRALEALRTGDGRPLPERLKQQIGRELDRLEMTMQQIKMIEAERDALFAVEQAPGARVARLRGIGPEFSAVLGGEAFYRHFDNRRQIAAYAGLAATPWKSGSIDREQGVSKAGNPRLRTTLIQLSWLWLQHQPASELSQWFNQRMQGGSARTKKVMIVALARKLLIALWRFETQGEVPAGAVLKAA

SEQ ID NO: 174349 - protein, 318 aa, unidentified
MAQKTTIVGIDIAKEKIDAAIRSVSVGASFADTAEDRGNLLRWLRRHRVGTAVMEASGGYESGWAKLLRAEGIEVRIVDPKRVRHFARSAGRLAKNDPIDAAMIAWFAETFPDAVGRPHDPRREELDQLVSARTALTTLKAQIANYGEHDLPAEVRKIHRAIDKTLAAQLARLEAVITAKIEQTAAFAERAAIIESVPGLGHASAAGLIAFLPELGLVSDQAAAALVGVAPYDDDSGKHRGRRFIKGGRRKLRNLLFMPIVGAATRCNPALRQYYKRLIAKGKAAKVALIACMRKLIIILNTMIARGEKWDPSRHAPA

SEQ ID NO: 174350 - protein, 280 aa, unidentified
MYQKRILLESVLIELAKEVRNYKFSNNSDAISAFLSDIAQKHKHLVIAAESTSYFHQRLALTCIKANILFRLINPITTQQFVKVTVRGHKTDMSDALIIAKLVLHGEGRYMLKKDFSFNKSISRTASKLSEMERSIGNMINRLSSIEDEEKYLVGDVLKTCRQTLKASIKKLRKYLHKRTDSTLQRLPTSIPGIGPTIADILIAEIGSIDRFYSGKALVAFAGIDPRVKQSGASLKRNTRITKRGSPHLRHVLYFATVVAQLHCKEFREHFLKKTTEGKT

SEQ ID NO: 174351 - protein, 431 aa, unidentified
MDTQQFEVIRPKCAGLDVHKKSVVAAVCTSDPVTLTASYKTKVFNTTNSDISALRDWLLAQDCRDVCMESTGKYWIPVFNILEPHMHVILTHPKYVKAIKGKKTDKRDAKWIANLFRFDIVKASFIPPADIRALRELSRYRLKLSYMRTAEKNRYQNSMTISRIRIDCVLTDPFGLSATRIMDYLLSGEPFDEEKCRSLIDRRVKASKDEVMDTIHGYHILEEQKFKMTHAKAHMDFINKSIDEIEAELFLRSRQYDVQVKRIATVTGITELSALFILSEIGADMSVFESDRHLCSWAGLTPANNESANKKKSTRCSKAGQYLKPLLIQCALAAVKSKKEPYFAIKYQRLSKRRGKKKAIIAIARMMLTSIYHMLSDNEDFHPDDYEATINPPKQKPVVLTLDNTLQFLREQGADPETLKLIQQQCVAQVG

SEQ ID NO: 174352 - protein, 310 aa, unidentified
MAEIVITAGIDVSKDRLDLALWPEPGANGSFTPGEIEPLISWLGAHRVSRIGLEASGGYEREVVRRLSAAGFVVVVANPLRVRRFAQAKGRLAKNDRADAATIAEFTATLAPQRQLREAALDRLGEYLMVRRQLQQAVTDTVNQLEHLREAELRRLVAAQRAGLKRRIQQLDRRIAALVAEQPHWQALAKQLRSVPGVGPVLAHTLIALLPELGRLTRRQVASLVGVAPFDDDSGRRNGARQIAGGRTAVRGALYMAALVAKRCNPTIAAFARRLAGKKPKVILVACMRKLIAILNAMQRDGQPWQPVAA

SEQ ID NO: 174353 - protein, 466 aa, unidentified
MQPNRRRSLGKPRVSPTVFDRLNPHVAGIDCGSGEHFVAVPPDRDPHPVQSFPTFTSDLLRLADWLAACRVTSVAMEATGVYWIPIYEILDARGFEVLLVNARHFKNVPGRKSDVSDCEWIRELHSVGLLRGSFRPTDAIVALRAYMRHRQTLVESAGTYTQRMQKALVQMNLQLPLVVSDITGVTGLRILRDIVAGQRDPQHLAAHRDFRVRASTADIVAALTGHYRPEHLFVLQQNLELFDACQAQLAACDRAIDAHVQTLTAQRPPPVTPLPDPRVTKKPHDHQPRFEIRTPLFQLTGGVDLTQIDGVAPYTALKLISEIGLDMTRWPTEKHFTSWLSLAPKNKISGGRLLSSRTPPSANRAAVVLRMAAMSLGRTQTALGAFYRRLAARIGKPQAITATARTLAALVSRALKGELVYRDPGADAYDIQQRARVLRRLRQRAATLGFSLVNRDTGEILAPAIP

SEQ ID NO: 174354 - protein, 372 aa, unidentified
MNYNTVYVGMDVHKESFSLCAYTIEAEKASHYQRTEADYKKVLNYLEFLRTIYGDDANFICGYEAGCFGYTLYHQLTANNVKCIILAPTTMLEQRSKKRIKTDRRDAEIIAKCLAQHNYSPVHIPTAKDEETKEFLRMRDDHKLALKKVKQQILAFCLRHNYRYDGKSHWTAAHLKWLKALTPEALYKEILDEYLLTYQTLSDKIERLDKRIEELATQDEYREAVKKLCCFIGVKTHTALSVLVEVGDFKRFASAQHFASYLGLVPGEDSSGDDQNRLGITKAGNRHVRLLLTEASQCYARGQVGFKSKELKSRQSGNTPAVIAYADKANERLRSRYYKMVLNKYKKHNVAKTAIARELACFMWGMMTDNIA

SEQ ID NO: 174355 - protein, 411 aa, unidentified
METTYKIVGIDVHKSMLAVVVADAAAEGEFQFERRKFGTTESELRQLAQWLAERNVREAVMESTALYWRPVWQQLEGQCDLYLAQAQSNRAPRGRKRDFADAERLLRRHVAGELILSFVPGPEQRMWRTMTRAKHQLTRDRVRIHNQLESLLEDGRIKLSGCVSDLLGLSSRRMLKALAEGERDASRLASLADPTLRATSEQLQDALYAAPTLSALHRQILGLFLTRLEVIEHQIEVLDKSVGQALRAHQDAVLRLAEVPGYGVDSAQQVIAEVGPAAATFPSPEQLSSWVGTCPGREESAEVSKNNRSPKGNRMMRRVLNQVAHAAVKTKGSVFQALYRRFVIRLGHNKAIWAIAHRLCRLTWKILHQGVRYIEFGTRSNSKAAKTRINRLIRELRSLGYQVQLSQMATP

SEQ ID NO: 174356 - protein, 418 aa, unidentified
MTVDSVARKRSVIKPDTLVIGIDLAKHTHVARARFYDGSYTQPVKVPNTRAGFLALSEQIGDWKPRPDSTVIVGVESTGSYGVNLVRWLSEHGCRVVLVPSLHVCREKELPDNGRGTSDNKDALIIADLVARGQYLGFVALCGACLELRPLVSLRARLVREQTGWLNALHQTMDVLFPEFETVFADLKSPNVRLVLGRFGTVAAAQAHSPTAMRRLLVRDGAVRVSLAKLKWLQAAAAESIGPLEVSASQERSLREMLDTLATLAERIASLETQIVRLLEQLPEAEYLMSVKGVGAMTAAVILAETGGLKQYSCAAAVLKLAGLNLYQNSSGQYQSGRHISKRGRSQLRRALYMVAVQHAKRGWPLQPYYAALVARGKPKNVALTAVCCRLVRLLFALVRDGRCYSECPPEAGRVQAA

SEQ ID NO: 174357 - protein, 403 aa, unidentified
MSPEHSIDIFLGLDVGKSEHHACALDRDGNKVFDKPLPQLESELAGVFHQLQKLGTVLVIVDQPNTIGALPIAVARDCGCEVGYLPGLAMRKAADLYPGRAKTDKRDAFIIADTARTMPHTLRAVDRNDEVLSALKMLSGFDDDIARDCTRTVNRLRSVLTQIYPSLERVFAGSTLTRTPILELLIHYKGPQGLKRAGYQRVLNWMIKRTRKDPTPLVDDIFTALKAQTVTVPGSDAAELVIPQLAANIQALKEQRNTIAEQVEEMLADFPLCEVLMSMPGVGIKTAAQILLAIGDGSDFASAGHLAAYAGIAPVTRRSGSSIRGEFPARSGNKRLKNALFYSAFAVIRSHEPSRRYYDRKRAEGKRHNAAVICLARRRCNVIYAMLKNKEFFREIPPRPVAA

SEQ ID NO: 174358 - protein, 414 aa, unidentified
MPNTLIVGIDISSQSNSIFFIDDAGNHLIKKPFSLPNNQEGANELIKRVIDCLSQYNLSCIKFGMEATSHYTWHLHLHLASSSELLPYKPTFYVLNPSIVKGFKKIYTFLPKTDNIDAIVIAECVRFSKLNPTPLPDFKFAALQRLTRMRYHLVHNLTREKNRALNLIYLKFSTYSQECPFSDIFGKASCAIIENFTPDDIASMPLEDLIKFVSDNGNNRLSDVNKIAEILKTAANRSFRLHPLLAEANDLALSMTLENIRFMQEQLKKLDKEISKLLKAFSQTLTTVPGIGDVLAAGIIAEIGDIKRFKNEAALAKYSGLVWTQYQSGNFNAQDVSLAKCGNQYLRYYLVEAANCVRVHTVRYKAFYNKKFSEVTKHQHKRALVLTARRLIPLIFAMLSKGQIYQERGDVYNT

SEQ ID NO: 174359 - protein, 349 aa, unidentified
MKIIGCDFHPSWQQIAVFDAETGELSELKLVNGEGEAERFYRGLEAPALVGIEACGNSQWSIELLERLGHEVWVGDAAQIRASYVRKQKTDKRDAGHILKLLLEGRFPRLWMPNPEQRDLRQLLIHRYKLVEIRTRVKNGLQHLALNRGVRKKSSLWSVRGRACLEALPLEGWAARRREDLLKLLAELERQIGELDRAVSEAAQADPQARLLMTQPGVGPITALAFVLTIGDVSRFRHSKQISSYLGLISSEHSSGGRQRLGAISKQRNRFLRQLLVEAAQSAVRLDDGFRKEYQARCHHKAKGVAKVAAARKLTVRFYWMLRRNVGYPEIARIESSPRVPLVGVQPDR

SEQ ID NO: 174360 - protein, 415 aa, unidentified
MQAMEVLHEHVAGIDVHRKSLSVCVRHVGADRCVRQEVRTFGTMTRDLLALWDWLQAEAVTHVAMEATGVLWKPLYNVLEGRVQVLLVNARHVKQVEGRKTDVKDCQWLAQLLSCGLLRASFIPPKPQRELRDLTRMRSQLVGGRTQVVNRLHKVLEDANIQLGAVASDILGLSGREMIEALIQGEQDIEKMAQMARRRMRAKLPQLRLALDGRVSEHHRFLLQILLDQYDAIDGQIEQLTQRIESVCVPFAPAIQKIVEIPGYDRTSAQNVVAEVGTDMSQFPSDDHLCSWATICPGNHQSAGKQTSGRTVKGNRWLKAALCQSAWAAARTKNSYFGAQFHRVAGRRGKKRAVIAVAHAQLKVLYHLLASDQSYKDLGADYFLKLNARRAARYHRKVLESMGYTVTPPQTDQAA

SEQ ID NO: 174361 - protein, 286 aa, unidentified
MDIVGGLDVHRKQITFDYVQMDTGESYRGEIRPADRENLIEWLDEFTERFGEREAAFAVEATTGWRYVVEELERAGIEAHLAEPADTKALQGRKKRAKTERIDAKHLRDLLVIERLPESWVPPEHVQQIRTLMRMRHSMVEERSAYLQRIHAQLFHNGCPRQEKELLCAEGRERLQKLDLPGAARKVVGVCLKMVEHINEELSPIEAELRAYARAQSGCRALMNHYGVGELTSVALLSELGDTRRFSSSRKAVRFCGLDVTVHSSDEKRAAGKLSRQGSPVLRWAA

SEQ ID NO: 174362 - protein, 361 aa, unidentified
MNVIHYIGLDVHKKTISYCIKTADGRIVREGKLQALRATLRSWAEGLREPWSGAMEATLFSAWIYDTLKPYAQRLVMGHPARMKAITAGKKKSDTIDARTIADLLRCDLMPTCYVLPPEMRDLRRLLRYRNMVVQQSVRMQNKMAGLLMESGTTFVKDKLHGKKYFSALMKSLEEVPESVKDLLRMSRGSMEMFESTQKQIVKRLLSERVLQQRVERLLSIRGVGPITALTWALEVSDPHRFSSIGDAVSYCGLTAAFRSSAGKQQRGPISKQRNAWLQTVLIEAAKLAPRWNPQLATVHARELELGHPNRATLQVARKLVAYLLAVDKSGQPFQVLTPPPTLENATKTKRRKRASIAKAA

SEQ ID NO: 174363 - protein, 364 aa, unidentified
MSDGICFAGLDVHARKTAAAAIQLGSGEVWKAQLAGSPSAAIEWLQTLPGQVRAVYEAGPTGFRLARAARAAGLEVMVCARGAIPRQPGDRIKTDVRDALKLARLHAAGQLRAVTVPSVPLEALRDLVRAREDLRGDLMAARHRISKLLLRRGLIYDGPGHPWESPRHAAWLSAIDVGDPLARVVLGEYLACHDGLLARRARLDALISEQADDPRWAALVGRLRCMRGVDTLTAVGLIAEIGDFAAFAHPKQLASFLGLVQTESSSGEKRKQGSITKAGSSHARRLLIEAAWHYRRRPAVSLTLRRRQDGQPPAAIEAAWRAQLRLSARWAHLDARRAKRRTTVAVAVARELACFVWEIARQPD

SEQ ID NO: 174364 - protein, 408 aa, unidentified
MDLTPMHKRVIALDVHQAKITACAVVEHDDGRVEVTKRDFGAFRRDRRALAQWSLEIRPEVVVMESTGVYWKSPFAALEAVGIIAWVVNARHVKAVPGRKTDMADAQWLATLARAGLLRASFIPPVDLRQLRLVARQRQKLVGMCSAEKNQLHKVLVDAGMRINVVVSDIHGASARAMVKALIAGQAMYEVLDQKGRLRASRDELFEALSTEQFSAAHRFVAQEIMQHIEHIETRIARMDQYLLDGLRAWQPQLKLLQTLPGIDIQGAAMLLVEIGADMGVFGSAERLASWVGICPGNNESAGKRKTGRIRKGNAWVRRLLCEFAQAAARTRCALKAKFDALAIRKGHKKSIVALAHKMLRTVYAMLANGTHYQDKEVDYEALNVQRNAPRWLKMLRKHGFIATPTAT

SEQ ID NO: 174365 - protein, 353 aa, unidentified
MRDCNAVAEGMVLGLDLGDKKSHYSLLDEQGTVVEEGSIPTNRKWVASLFGNIPKSRVVMEVGTHSRWVSRMSEQAGHETIVANARRLRWIFENDMKTDRVDAEALARVGRLDAKLLYPIEHRGEESQADLAIVRSREALVKARTQLINHVRGQVKAWGGRLAKCAASSFHGRVSESLPEELAETLQAVVETIGQLTDQIKSYEKQIRARAQQYPEIEGLKAIDGVGLITSAAFVWTLEDAGRFRRSRQVGPYLGLVPRRDQSGERDPGMRITKAGDEGLRRLLVQSAHYILGPFGKDCDLRRFGERLQPGESKKEKKRAVVAVARKLAVLLHHLWETGEVYDPFYQQKRKAA

SEQ ID NO: 174366 - protein, 345 aa, unidentified
MIIGCDFHPSWQQIAWLDSETGETEERKLVHASGDAKAFYQQLAAPALIGVEATGNSQWFIELVQDLGHEIWIGDAAQIRASYVRKQKTDKRDAAHILKLVVEGRFPRLWTPDREQRDLRQLVLHRHKLVEIRSRVKNELQHLSLNKGMQRKAKLWSQAGQKLLRELPLKPWAACRRENLLGLLAMLNQQIGTLDQAVQQAADEHPQAKLLMTQPGVGPNTALAFVLTIGDVSRFARGKQVASYLGLIPREESSGGRQKLGAITKQGNRLVRSLLVEAAQIAVRFDPGMKKQYLHRCHQKPKGVAKVAAARKLAVRLYWMLRTEKPYPEIVRIESSPRVPLVGAS

SEQ ID NO: 174367 - protein, 353 aa, unidentified
MMVVGVDPHKETHTAVVVDELGRKQAQLTVRARRDGHRELIGWARDVAPAGRLWAVEDVRHVAGGLIRELLAAGEMVVFVPPKLMAGVRRGGRERGKSDPIDALAIARAALREDAHLPAARLDKQVLEVRRLVDHRDDLVAERTRVINRLRWMVHDLAPELAPAPRALASARGCAKLEAGLRALPDSAGRRIALSQLARIIALTAEAGQAERELASLVRHLVPALLQVAGVGVITAAKILGEIGDIRRFRSLAAFARHNGTAPIPASSGTGKDGPHRLNRAGNRQLNAALHRIAIVQARCHDGARILLQRRGETAHETRKASLRVLKRHLSDVVYRALAADAWRLDDPAQQAA

SEQ ID NO: 174368 - protein, 382 aa, unidentified
MMTMTRTEESTAVATAVTPTLLLAFELGERTWKLGFTPGLGQRPRIRQMSARATDRVLEEIARAKAQFKLPADAPVMSCYEAGREGFWLHRWLVAHAVTNHVIDSSSIEVNRRARRAKTDRLDLGGLLSLLARHHQGDQRWRVVRVPSVSEEDARQLHRTRETIQQDRTRLINRLKGLMTTQGLQLPVKSNFPTQLETAQLWDGTPIPAGLQARLRRCWAQLEFLNRALEELDAERTALTVDPETSMGRYVEALPTLRGIGPVGAWTLATEIFGWRQIQNRRQLAALVGLVPAPYQSGESTHDQGITRAGNKHVRRLMVQLAWSWVRYQPDSALTQWYQGKFGRGSRRLRRIGIVALARKLLIALWRYVEHGEIPEGAIVTG

SEQ ID NO: 174369 - protein, 424 aa, unidentified
MKPHFDHTYAAYIGIDWADQKHDICLQASHADAQELSVLAHRPDTIEAWALSLKRRFHSHPIAVCLELTKGPLVYALQKYDFLVLFPANPVTLAKYRQAFTPSNAKDDPSDARLLLELLLQHGDKLKPLQPEGVEMRTLQCLVEQRRGLVDDQVRVSNQLSYALKQYYPQVLEWFKEKDTLVFCDFIYRWPTLKQARLARKVTLESFFREHNVRYPKVIEARIAAIKAATPLTHDVSVILPHQLLVQALAQQLRALLESIERFDKQIATFAQSLPDYVLFKELPGAGPVFAPRLLAAFGEQRERYQSAAEIQKYAGIAPVTERSGKKCWIHWRLQCPKFLRQTFVEWAAETIPRSFWAGAYYRQQRDKGCPHQVALRALAFKWIRILFRCWQTRTPYDESAYLNSLRRRGSPLLNSIGEAAKIT

SEQ ID NO: 174370 - protein, 404 aa, unidentified
MTQPATITQKNAKTRRFLERDKNDRFCPVPKADGVDVSRSRHLGAKVVVVINHEQEEPSTMNISTIGLDLAKNVFQVHGIDDTGKVIVRRSLRRRQVLPLFGKLEPCLIGMEACGTSHFWARALQALGHEVKLMPPIYVTPYVKRGKTDAGDAAAICEAVTRPTMRFVAIKSAEQQSILALHRTRALLVRQRTQLINMIRAQLAEFGFVLATGIQHALKLVDQLVEGRAPDIPALACKIVISLAEQIRALQARIATLEEDMKSWFRGNELAKRLKTIPGIGFITASALAASVTDPHQFTSGRQFAASLGLTPKADCSGDKQRMGRISKMGDRYLRRLLVNGMTSQLQAARRKPEAHPWVTRLLASKPNKLVAVAMANKAARIAWVVMTRGEVYRAHHPITEATA

SEQ ID NO: 174371 - protein, 411 aa, unidentified
MRRCIGLDVHREFAEVAIWEDGLVRSAGQVKTTPEALRLFAESLCELDEVAIEATCNTHAIARLLERHVGRVVVSNPMKTRAIAEAKVKTDKVDARVLAELLAADYLPAVWIADEDTHALRRQVARRAHIVRQRTRLKNRVQSILHRNLIPRCPAADLFGHKGRRWLAEQDLPTDERQAVEALLRQLDFHGEELKLIDAELARVALKREEVKRLMTIPGVDATVALSIVAAVGDFARFRSPGKLVSYIGLNPRVRQSGGQPASHGRMTKQGRAHARGMLVEAAWAAAKTPGPLHAFYERVRARRGMQIAVVATARKLAVLSWHLVIKGEDYAYGRPSLLAQKLRRLELCAGMPSRRGQRGSTHAYNLKEVRARERALSEQGELAYKQLVADWQAKASGRKTGAGAATGVRL

SEQ ID NO: 174372 - protein, 356 aa, unidentified
MSRDLKYIGMDVHKEAVVIAVRNSTGQLVMESIVETKASSLLQFIHGLQGELHVTWEEGTWAAWLYDLLKAHVQEVLVCNARRNALLKEGSKNDKVDARKLSDLLRTGMLRPVYHGEHGLRTLRELARCYQTISQDQSRVMNRVKALYRGWGIGCAGTQVYAPRYRQEWLEKIQHAGVRRRAELLYQQLDSLQALRRTLRSELLAESRKHKASKLLRQIPCIGPIRAARLLALMQTPHRFRSKRQLWTYSGLGIETRDSAQYRFVRGQLQRAKKPQQIRGLNQNHNHEMKEIFKGAATRASCGVGPLRDFYVALLDKGMKPEMARLTLARKIAAIALILWKKEERFDAEQLKTQAA

SEQ ID NO: 174373 - protein, 389 aa, unidentified
MKIFVGIDIAKLNHFAAAISSDGEILLEPFKFTNDADGFQLLVSKLESFDKNSIIIGLESTAHYGDNLVRYLVAEFYQVCVLNPIKTCQMRKNNVRKTKTDKVDTYVIAKTLMMQDDLRFITFFDLDMMDLKALGRFRQKTIKQRTRLKIQLTTYVDQVFPEIQYFFKSGLHQHAVYALLKEAPSPKEIASMHMTHLANLLKVNSHGHFTKEQAKELRVLAQKSVGANDSAISIQITQTIQQIELLDSQLEKIEAEMTDIMKFNDSVIMTIPGIGYINGGMILGEIGDIHRFSNPNKLLAFAGLDPSVYQSGNFQAKTTRMSKRGSRVLRYALVNAAWNVVRNNATFKAYYDAKRAEGRSHYNALGHCAGKLVRVIWKMLTDEVEFNLE

SEQ ID NO: 174374 - protein, 347 aa, unidentified
MRFYNRQHRHYCGIDLHVRTMYVCILDSAGQVRVHRNVKSTPEALLETIAPYRDDLVVAAECMFTWYWLADVCADEGIEFVLGHALAMKAIHGGKAKNDTIDSHKIASLLRGGLLPQAYVYPAAMRSTRDLLRRRLHLVRKRGQLLAHIQNTRAQYQIPEFKRRLAYPANRAGVSEHFPDPSVRKSIDVDLALLDRYDSLITDLELTIVREAKRHDGDAFHRMRSVPGIGKVLALTILYEIHDIARFDRVQEFASYARLVKCAHQSAGKTYGTGGAKMGNVHLTWAFSEAAVLFLRHAPGGKTLLAEIERKHGKGKALSILAHKIGRAVLYMLSRRAVFSMDRFRAA

SEQ ID NO: 174375 - protein, 369 aa, unidentified
MSVIHVPPEAVVLAMDVHKNTISTGLLEPGSTQVLVDKISTDEESIRRLIRRFADPRRVWACYEAGPTGYELARRLRGAGMGCEVIAPSLIPVRQGDRVKTDKRDARRLATLFRGGQLSSVRVPAPAEEAVRDLCRARADMVIDRTRARHRLGKFLLRHGRIWRGGDNWTLKHQVWIRAQRFDERALTETFDHYRATLSAREAAVTAIEADLLPWAEREPFAEIVARFAAYRGVTNLGGLTLAAEVGDWRRFPTAPMFMAFTGLVPTESSSGERTSRGGITHAGNTHLRTQLVESAWSYKARPAVGATITKRQHGLHPDTVARSWAAQQRLCNKFRRLDARKNNRKIVVTAIARELAGFLWAEATATNT

SEQ ID NO: 174376 - protein, 319 aa, unidentified
MAQNDLIVVGIDVAKDKVDACVRSRSLRQTCPSIAQGHRELVSWLRKHQVNKAVMEASGGYERDWAKVLRQAGLEVRIVDPKRVRNFALSAGRLAKNDAIDAQMIAWFAETFSEAPGQVHDAAQEELLVLAKARIRLVDLKARLQNQNEHVAPGLVQKGRARLLKNLVGEIARLEAAISAKIKATPHLAERAEIIESIPGFAETTSANLVAGMPELGRVSNEIAAALIGVAPYDDDSGQRRGERHIKGGRRWVRNAVYMPCVGAATLNNPVLKAYYDRLIAKGKKPKVALVACMRKLIVILNTMIARRQKWDPSRYALS

SEQ ID NO: 174377 - protein, 376 aa, unidentified
MSKVRFVGLDVHADTIAVAVAEPDGEVRSHGVIPNRPASIRKLIGKLGPANTIKACYEAGPTGYVLYWQLTQLGVACEVIAPSLIPTKAGDRVKTDRRDADKLARCYRAGELTPVWVPDEAHEALRDLVRAREAAKKDQLKARHRLGKFLLRHGRRPEGIKAWTKQYLEWIKSHVHFAQPAQEATLADYLEEVDHVAARIVKLEKAIDEAVKQAPVEIRAVIEALQALRGVAQTTAATVVSELGSLSRFESPRQLMSFGGLVASEHSSGNRVQRGGITKTGNSHLRRVVVEAAWAYQHRPNVTGFLLRRQKNLALSDEVKKIAWKAQQRLHKRYKALAARGKNKNQIITALGRELLGFIWAIALEAEKQQKLAKAA

SEQ ID NO: 174378 - protein, 416 aa, unidentified
MLRIVYPICCGLDVHKSTVSACIAATDGNGVTTYQERKFTTFTKDLKSLAYWLAASNCKDVCMESSGKYWHPVWNILEATCNLVIAHPKYVKAIRGKKTDKKDAKWIADIFKHDLVSGSFIPPNDIRQLRDLTRYYRKLVGFNTGEKNRTQNSLTVSNIKLDDVFADVFGKSATAIMDYLLEHPGETFDVTPFVDGRCKTPIEKIQAAVEGAICPEQVEKLKVIRSHIKNLELCKANLESAVLTIAEKYLPQINLVLSVPGFSDPFVAISIIGEIGVDMSVFPSDKQICSWAGLTPQNNESAGKKKTTRINHAGAYIKPLLVQCALAVSNSEKHPEIRNRYLALKKRRGHKKAVIAIARMLLTAIYHILKNNEPYNPELYRKSDKPPVNRQVSVDEAIFILQRQGYIISQPQSVID

SEQ ID NO: 174379 - protein, 262 aa, unidentified
MFPVGIDVSKNTLDLCMLYDGIKGRIKTRNIQNNRHSVENILRWLRLQHCSPEDVHVVMEATGVYHERLATELHDAGFQVSLANPHRSREFARGMGIMTKTDKVDAYMLACYAFLKKPHRWEPPAPEIRYLGALLRRRDVLLGDALREENRLEKYLSTDTPADIISSCRRMAQLLREEVGNIERQIKAHIKASPALRRDYTLLTSIKSVGPQLGMHMLIVLRSHNFVSAEQATAFLGVVPIEKRSGTSVRRRPRMSKIGPLS

SEQ ID NO: 174380 - protein, 371 aa, unidentified
MSYFIGLDISDATTNICILDKEGIIIHEAVGSTHPQSIINIIKSYNMPIEKIGMETGTKSNWLQRALNKKYPTTCYDSLKIAKLISLKINKTDKNDARIIAEVARMECFSNMINFNVHVKTEHSQEILSLIRGRHDLMQQTIHIYNSVRGTLKTHGYSIPKTSRENFTKVVRAIKNLPEMIAFTIDMLISGYDTIIQSIKKLDQKIEELSKQNSNAQLLNTIPEVGPITSLYFALIIDDPARFQQAKAAGAYCGLTPSQNSSGQRQQQGKVSKKGDVLIRTLLVSVARRLLQNKSSPNALKKWGQKKEKTSGKNRAVIALARHLAVLMLAMLMDQTAYKEKPTRSANRVGLTLEREDIESLLEPLDMRYCM

SEQ ID NO: 174381 - protein, 317 aa, unidentified
MSVANEVFVGIDVSKAELEVCWLPQRERLQVARDEGGLVRLVERLKELGPSLVVLEASGGYEMPVAMALAGASLPCVVVNARQVRDFAKASGKLAKTDRIDAQVIAEFAQAIRPQVRALPDAAAAHLVALVARRRQLVEMLTAEQNRLALSHAAVREDLKQNIAWLKSRLQDLDGELARAVRSSPLWRENDKLMQQVPGVGRVVSAVLLALLPELGRLSPKKIAALVGVCPFNRESGRWNGKRAIFGGRAGVRSVLYMAIVSAIRWNPLIKTFYQRLLAAGKPKKLAMTACMRKLLIILNAMMRDRADWNPNGALAT

SEQ ID NO: 174382 - protein, 346 aa, unidentified
MNITTIGIDLAKSCIQVHCVDLHGKQILNKKLKREQVVPFFSNRPACLIGMEAGGSAHFWANKLQALGHTVKPMEPQFVKPYVKTNKNDAADAEAICEAVSRPNMRFVPIKNSEQLAVLAMHRARQGFVKARTAQANQLRGLLAEHGIIIPKGIRHINQHLPDILEAGENGLPGRLRQLLDRLSAHFKELDKQVRELDVQLQSWHQDSPASQKLAKIPGIGPLTASALVATIDDAKQFQNGRQLAAWLGLVPRQHSSGGKPTLLGISKRGDTYLRTLLIHGARAVLRAVKSKAQHAGSWLEGGMAWRNHNVAAVAQANKTARIVWTLLANDREFDAQYGTGTILAA

SEQ ID NO: 174383 - protein, 342 aa, unidentified
MQVTTIGLDIAKNMFQVHGIDAAERVVVRKQVRRRQVLEFFKALPPCLVGMEACATAHYWAREVTKLGHQVRLMPAKDVKAYVKRNKNDAADAEAICEAVRRPTMRFVQIKSTEQQGRLMLHRARDLLMRQRTQVINAMRAHLAEFGIVAAQGRDGIKELLKIIANEEDARLPVDAHASLVVLAAGLQAVQTMIGSIEKRIMVQHRSNEASQRLESIPGIGVIGATAIAATVPDPKVFGSGRDFAAWIGLVPREDSTGGKQKLGPISKRGDRYLRRILVVGACAVLRYARHKPEKYPWLTRLLARKPFKVVAVALANKMARIAWALLAKGDTYRAPALAAAA

SEQ ID NO: 174384 - protein, 342 aa, unidentified
MKATNIGIDLAKHLFQLHGVDQHGKTVLKRQLKRDQMISFFTNLPPSLIGMEACGSAHYWANKLQGMGHTVKLMAPQFVKPYVKTNKNDAADAEAICEAVTRPNMRFVPIKNGEQLAVLALHRARQGFVKARTAQANQIRGLLAEHGIIVPKGIAHISLRLPELLEDAENNLPGTFRQLIERLGEHLKELAKQVNELEEQIWCWHKENSASQKLAKMPGIGPLTASALVASIGDAKQFENGRQLAAWLGLVPKQHSSGGKQTLLGISKRGDIYLRTLLIHGARSVLRVAERKTEYAGSWLAGVMERRNHNVTVVALANKNARIIWALLAHEREYDADHAVAA

SEQ ID NO: 174385 - protein, 345 aa, unidentified
MDIGKRNCKACIMNADGSIAEESEYDNKLTEAEIFAYSMVKKYGECVAVCESTANLWLKTYQAFEKYGIGVKLANPLKTKAIAEARIKTDTLDARTLAHLLRSDLVAECYIAPKGIREDRSLLRLRTNLVQDRTRVMNRVHSLLDKYDVKCDYDNIFGVKGTRWLSSLKLSDNDQILLHEYIMQIEFLNTEIKNTESKISYQASKNESAKILMSMTGIDYFSAMLIALEIGDITRFSTPEKLVSWSGLCPSIHQSGNSLYMGKMKDGNKKVRWILIQAANTAARKDGRLRRFYLRIAKRHGHHIAITHVANKMITIIWHMLVNKKLYNERKQNLYETKLKRIQKT

SEQ ID NO: 174386 - protein, 412 aa, unidentified
MEILYRSCCGLDVHAQTVVACLIKDGRKETRTFSTMTDDLLGLLDWLTAEGCTHVAIESTGVYWRPVFNILEGDMEVILVNARHVKAVPGRKTDVKDCEWLADLLRHGLLKASFIPPLEIRELRELTRYRRTLVREQAAVANRVQRIIESGNIKLAQVATDALGVSGRRMLRALAQGESDGAKLAEMARGRLRGKKVELQRALTGRLTAAQRFVLHELLDRYDELEAALFRVNEQIKQEVAEGTDPFVREALQLLQTIPGVGERVAEAIVSEIGVDMSRFPTDAHLASWAGMCPGNNESAGKRKSGKTTKGNIHLRAALTQAAWAATHTKQTYLAAQYRRLVKPKGKKRALVAVGHSLLVIAYHLLSRRASYQELGGDYFDQHNAEVQRTRLIRKLEVLGVKVTIEALPVAA

SEQ ID NO: 174387 - protein, 315 aa, unidentified
MSDVPCFVGIDVAKAQWDIALRPSGERWAVPNDTSGVTTLVDQLQALQPTLIVLEATGGLERLVPSALATAGLPVVVVNRRQARDCARATGPLAKTEALDARALAHFAEVIRPTPRPRPDAPTQELRALLGRRQQLIIMRTAEQNRLAGTSERLTQDITAHIAWRNARIATLDDDLETLLRASPLWRANDDRLQRAPGIGPVCARTFLLELPELGTLTRQQIAALVGVAPLNCDSGTLRGRRMSWGGRAHVRTVLYMGTLVATRFHPRIKAFYERLLAAGKVKKVALTACMHTFLTILNAMLKHRTPWQAQEVQH

SEQ ID NO: 174388 - protein, 358 aa, unidentified
MEKLIRIGMDTSKSVFVLHGVNAAEKVVLRKKLRRQQVIEFFAKLEPTKIGLEVCGAAHHWARELGGLAHEVVLLPPQYVKPYVKRSKNDAADAEAICEAMSRPTMRFVPVKTAEQQAALMLAGTRDRLIRTRTQLTNAIRGYAAEFGLTAAKGLDKIEPLLARIAAAADLPKLAKELFAAHAREYAKLKLEIQKIEARLMAWHKHNELSRRLVEVPAIGPIGASLVVMKVPDPHAFRSGRDFSAWIGLTPKDHSTAGKTRLGVITRAGDETLRSTLVLGATAAIQQVRRGRGHPSPWLLDLLKRKPPKLAAVALANKTARIVWKLMVSGERYNPARLRDACGPSARRGSEAAATSRA

SEQ ID NO: 174389 - protein, 312 aa, unidentified
MDATVIVGIDVSKDRLDVAIRPGGDAFFVKRDGEGIAALVEKLGSLKPAAIAVEATGGFETVVAAGLAGAGLPVVVVNPAQVRAFANALGKRAKSDPIDAAVIAHFVEATKPAIRPLPDAETQLLADLVSRRRQIVAMIGAERQRQKRAPVRIAKSIVRLIKALEKELASLDGDIDDAVRGSPAWREKEDLLASVPGIGQTIARTLIAELPELGSLDRRQVAALVGLAPWTRQSGQWRGKSFIGGGRAAVRAALFMGAMVATRHNPTLKAFRDKLVSAGKPKLVAIIATARKLVTILNAVIRDKQPWREQNA

SEQ ID NO: 174390 - protein, 391 aa, unidentified
MIYVGIDVAKDKHDCFITNSNGEVLFKSFTIPNNRDGFETLFQKVQSVSDDLTKVKVGLEATGHYSYNLLGFLLNKGLTTFVINPLHTNLYRKSLSLRQTKTDKVDARTIASMLMSDVNLKSYSDTSYHNEELKSLTRYRFDKVKERAKLKTSVSRLVCILFPELEKLVPTLHMASVYALLSEFPSAKHVATAHLTRLTNLLSESSKGRYGKDTAITFRDSARASIGSNMPAKSLELKHTIKLIQELDSEIDEIENEIKIIMDEINSPILSIPGINYRMGAMIIAEIGDFNRFDSPDKILAYAGFSPSTYQSGQLDGAYAHMEKRGSRYLRYALYNATKYVCHWDPTFAAYLAKKRAEGKHYNVAISHAVKKLVRVIYHLEKTKQQYIKAA

SEQ ID NO: 174391 - protein, 459 aa, unidentified
MSRIKTGKKNCSRSQTDQAPPTSTPPQPRFVGVDLHKQIATFHTMAEDGKTLEQGRFDVNPEAILKFANEKLQAADSVAVEVTSNTWAFVRLIRSHVDKVVVSNPMKTKAIAEASVKTDKVDAKVLAHLLRCNYLPSVWTPTETIENSRALAARRTALVGQRTALRNRIHSVLARRLVVVPAGGPFTQAGLTWLQELSLDPVDRTLIDTDLRLLEGIAQEMQEIEHLIVKESYDDPDIRLLMTLPGLDFTIAQALKACLADISRFPNPDKAASYLGLTPRIKQSAGKCYHGSITKAGSSQTRWLLIQAAQSVGRTPGPLGAFFRKLEKKKNRNIAVVATARKLVTIAWHMLKNKEPYRYAVPRTTENKLGTLRVRATGEKRKGGSPKGPKPEPRFENSDSRRIPSLDEIYTREDVPGRRPLSEGEKRMIREAGVENFVAELGQTRIVPRKKRVPASTAQ

SEQ ID NO: 174392 - protein, 343 aa, unidentified
MQTISTIGLDIAKSVFQVHGVDAAGQVVVRRQLRRRHVLAFFAKLPPCLVGIEACASSHHWSRELQALGHTVRLMPPAYVKPYVKRQKNDSTDAEAICEAVTRPNMRFVPTKTVEQQSCLMLHRARHLFIRQQTSVINSIRAYLAEFGIVAPVGRRGVEQLLEVVADAADDRLPEVARICLTALGSQLRALKAQILQFDRRIVAWHRSNTTSKRLDAIAGVGPALATALVASIADPKAFRSGRDFSAWVGLVPKQSSSGGKDKLGSISKQGDRYLRSLFTAGALAVIRYARIHGTDHRPWLTRLLTRRPTKVAAIALANKLARMAWAMMARNECYQEPAALAA

SEQ ID NO: 174393 - protein, 340 aa, unidentified
MSKKKLDLCLRSNGKDILYDVIPNDLSSIKSWLTRTFEKFFLSEDSLVVCAEHTGQYTYPLVCATKSIGVYLCLEDAAKIKYCHGIPRGKNDKIDACRIAMYAERYNDCLQPYTASELIIQKLKNLSTERSMLVADRAKYQSQLKDQVDYMEHSIYIAKCNRVEGIINTFTDYIAQIDLEIKELINQAPVIAHQMDLLMSVDGVGERVALKMIMETDAFTSFTDPRKFCCHAGVVPFVYVSGSSQRSKNRVSNRADKSIKHLLHMAALSVSQVKNSPLKGSEMCIRDRNSPLKKYYDRKVEEGKNKMSVLNAVRAKLVTIMFAVIRTDAFFSRNYQNSLA

SEQ ID NO: 174394 - protein, 437 aa, unidentified
MAQADFPSSPVDATSFSYVVGIDIGSQTCSLCTLKPDKSQVIKPTKFPNAPAGFGMLQEQLAQLGVPPEQILVGLEATSRYGENLYHFLESCGYQLCLLHPRQTHQFAQQRGLRAKTDKLDATTIARVLLSGEARRGYVPTELIATYRELVRLHTQLSDEVARYKNEIQALLVVLFPEFSQVFTDPCRSTAVALLKLYPSAQAIAAAGVEAIAAKLHELAPRNYGRSTAEHLVQLAQHSVSRGMAVAARSTSLKILCDQLEHTQANLAQLENEIDKLLDTDVGVKGLKSVPEFGHKTVAVLRAELGEVTRFQRTDQVVAYAGLDIEVSQSGKWKGQAKLSKRGSGRLRRILYMAAVRCIRLPGSAFGAYYHRLVARGMQKRDAMMAVMRKMLIVAYRLLRTKETYDPTKVCAGAVTQPVESQPLHTPSATKVVVVEA

SEQ ID NO: 174395 - protein, 345 aa, unidentified
MTIVEDRRAITGGVDTHADTHVAAALDPIGGLLGVQEFPVTPAGYARLLGWLGGFGTVALVGIEGTGSYGAGLARHVTAAGIRVVEVDRSDRQDRRRQGKSDPLDAVSAARAAQSGRARGAPKGRDGAVEAVRALMVAKRSARAERTQTVNQARSLIVTGPDDLRVRFAGHTVAALVSGLASLRPRPGSTVGYATRIALRELGRRAEFLDGQIDRLDELIVPLVTARAPGLLALHGVGPDTAALLLIAAGDHPERLRSEAAWAHLCAVAPIPASSGKVTRHRLNPGGNREANHALWRIVITRMSNHPVTRVYVERRTAEGLSKTEIIRCLKRYVAREVYRHLRAA

SEQ ID NO: 174396 - protein, 355 aa, unidentified
MKYYTSTTEYNCGIDLHARQMYVCVMDRQGKKLVHTNVKDNDFAYFLKLIEPYKHSLTVCCECMFGWYWLADACQAAGLAFVLAHALYVKAIHGGKNKNDRIDSEKLTHLLRSNLIPPAYVYPAPNRPLRALLRQRIFYVWRRSELLARIHSHQLAHNRIPAKQSRWTRDPWEEQLLKAEIHPLRQLALRNDLEMIRHFDHQIYEVEKELQRQTKQVAPREYALLQTVPGIGENLGLTLLYEIGEISRFPTVKDFLSYCRLVKGTVASAGKIKGLRGAKLGNPYLRWAFGEAAVIAKRDHFRIRPLAQALEARMNGNKFKANTVLAIKLARAVYFMLKNQTVFDPDRLVAALARN

SEQ ID NO: 174397 - protein, 385 aa, unidentified
MKEQNFVPREFEIFGGLDVDKKSIAVTFMSHQGILQSFSMPYRAEHLLSYVGKHFDGKKIAFAYEAGPTGWGLYDKLTSEGYLCVVAAPSMIPKVPGQRVKTNRLDSQKLSEHLRGGQLKSVHVPSESYRQLRQLVQLRDTFVQDIVAMKLRIKALLLFEGLEFPPAPSGSQWSLIVRGKLKRLSCSSAVRFKLDQLMESLESSEKRVLKTIKEIRRFYQQDPELCQAMVNLKSIPGIGEIVASHLLARIGDPQQIGNVRQLAGFIGLAPSEHSTGDRVARGHITRSGDGRLRSKLIQAAWSAIRQDPELREFYCSVYQRHPRDRAARKAIVAVARKLTTRIYAVLKQQRPYVVREIVHSAPLTQEETSPQGTTRRRGEPGETLS

SEQ ID NO: 174398 - protein, 403 aa, unidentified
MEEGCTRFFGLDIHKEYFVAVGVNPQREVVFGPQRVSNYQLDDWVSRVLTPQDSVVVEMTTNTYLFYDTLLPHVHSVIAVHSPSVSLVTRVAVKTDKKAALALAQLLAAGMLTGVWIPPHEVRDLRALIARREKMVHLSSLAKNRLHSLLHRNHLVLPEKNPFSPEQSTWWESLPLSATEQFLMRSDLDTLAFAQKQVAQAEEQIKQESVRDERVPLLIQLPGVAMLTAITILAAIGDITRFPTAEKLVGYAGLGTRVHDSGMTHNSGRITKAGRTDLRRGMVNAANHAIEHHPHWKKEFERLESHLGRSKAVVAIARKLLVAVWHVLTEQVADRFADPQNVASSFLHHAYQVGTRNLPNGQSALAFTREQLDRLEIGKDLQQINWGSKPLHLPPSTLLIDKE

SEQ ID NO: 174399 - protein, 313 aa, unidentified
MAQPAPYVGIDCSDARLDIYIHPLDVAFSVANDPGGWLELDRRLCAAQAKIVAIEASGGCERGVCRFLFEQEYSLRLVDPYRVRQFAKAAGKLAKNDRIDAAIIALFVATLPTRAMVCRKHLERLRELVTARAQLIEQVTMAQNQGRRREDDLLRRLDLRRAKALQSDIELIDRHIAELVDTSTEFKTKNAILRSMKGVGPVLAHTLLALLPELGQLTRKQIAALVGVAPFEDQSGKRQGVRFIQGGRAAIRAPLYMAALVAGGHNPVLKPFHDKLRNAGKKPKVAIVAVMRKLITTLNALIRDGVIWQPKTA

SEQ ID NO: 174400 - protein, 388 aa, unidentified
MQNIIHRPEGRAAIRTDLGAIFVSLELSRSTWLITSLSPGAGEKMSKHVVQGGDIVSLLRRLAHLQEKVRGRRRKEFPLVVIQEAGLDGFWIHRVLEHEGIESHIVDSASIMTSRRRRRPKTDRIDGEALVRALLAYHRGEPRVCAMVRVPTPEAEDRRRVSRELKTLTAERVGHVNRIKGLLFAQGVSGYAPLRRDRRTRLEELRTGDGRLLPYHLKRQIGRELDRLELLLEQMNAVAAERDALLVPAEEQAAPTPAKMLLGLRGIGPDFASVLWQEGLFRHFDNRRQVAAYAGLAPTPWQSGAVDHEQGVSKSGNPRLRTTMLQLAWLWLRHQPSSALSQWFHQRVGDNGRIRKVMITALARKLLVALWKYVTAGVVIEGATMKTA

SEQ ID NO: 174401 - protein, 444 aa, unidentified
MLPILYRRVAGVDVHKRTVVVTRMRVTDEDRAMWETETFGTTTPDLLRLHDWLLEWAVSHVAMESTGDYWKPVYNVLEDTFELLVVNAKHVKHVPGRKTDVKDSEWLAELMMHGLLKASFIPPRPQRALRDMTRYRTTLVQERTRLVNRVQKLLEGANIKLSAVATDIMGVSARAMLAEIAAGQTDPVLMAELARGQLRAKIPELEKALTGIVLPHHRFLLVKQLAHIDFLDEQVKEISAEIGRQLEAMSRLPDGSESGMGQGIEEGSIPGESKPPLTWLEAIALLDTIPGVNQQTAEKMLAEMGLDMSRFPTAGHLATWTGLAPGNHQSGGKRYSGRTTKGNEALTTTMVVAAWTAVRTQDTFLKARYHRLAARRGKKRAIVAVAHSMLVSAWHMLTNRQPYQELGGDYFDQRKKEAKMSYLIRQLEKLSGGSVSIEIQPAAA

SEQ ID NO: 174402 - protein, 390 aa, unidentified
MKQNTIQRQSGKRSSEQTLQQALQRSPKQSPRQSPRPSRKKGPGPLAIGMDLGDRTSRYCVLNACGEVVQEAAVATTKQGLARVFAPLQRSRIAIEVGTHSPWVSRLLQSLGHEVFVANPRQLKLISQSSRKDDRVDARTLARLVRVDPELLRPIRHRSEEMQLDLLAIRVRAALVEARTALVNAARGLAKAMGERLPQCAAGSLGSGQLKALAEPLRDALEPLLEQVAALTVRIGKCDQQVEQIARTKYPETELLRQVKGVGPLIALTFILTVADKERFPQSRDVGCYLGLRPKRSQSGQSAPELRITKEGDVYLRKLLVEGAQYILSRRGPDTDLKRWGARLALGGKRAKKRAVVAVARKLAVLLHALWSGGEVYEPLRNSAARQAAA

SEQ ID NO: 174403 - protein, 337 aa, unidentified
MEQEVVTVGLDLAKNVFQVHAIAADGAVLIRRKLRRSEVVRFFAELSPCLIGMEACASAHHWARELIAIGHEVRLMPPAYVKPYVKRGKTDAADAEVICEAVTRPTMRFVAVKSVEQQAVLMLHKSRDLLVRQRTMLINALRGHLAGYGIVTGLGAGGVAASLKALHEEQDQFPAHARSALHGIAAQLRALASEIDRLEAQILDWHRNDETSRRLATIPGIGPITASAIAAAVPDASLFRSGRQFAAWLGLTPRANSSGGKERLGGITKQGDGYLRRLLVVGATAVMRMTRKNPARQPWMAGLLERKPTKIATVALANKTARIAWAVMTRKEVYAAA

SEQ ID NO: 174404 - protein, 346 aa, unidentified
MSQNNNTINYVGVDVAKKSLALDGVGCCGELPNDAKGHRDLLRLLGKTARPMHVIVEASGGYEQGLVRALHEANIPVSVVEPFRVRSFARAKGLRAKTDPIDASVLRAFGEAIRPRPSLPPRSEQLRLAELVTRRAQLIDSEVAESNRSAHYLDPLVRRQAKTYLRFLRRQIEQCESAIAQLIEKDQSIKQHSARLQQVPGVGAITAATLLADMPELGTLSDETAAALAGVAPYNNDSGPFRGQRRIRGGRASVRRALYMAALSAVRHDLILKGFYQRLRAAGKKPLVALVAVMRKLIILLNRLLKNPNLTLQSHSKRVEKATQRAPKQTGQQLDGGAAVCLGASV

SEQ ID NO: 174405 - protein, 351 aa, unidentified
MNYVGVDIHKRYSVLVAIDERGRELRRGRVNGNEAAGFAQFFASLSGPSKVVLEACWNWGRIYDLLKEIDTVAEVVLANPLKTRLIADAQIKTDGLDAKALATLLRGDLIARAYVPAKQTRQRKEVLRQRLYWTRLRTRIRNRIHALVDRQRELSMPQCSDLFGRKGLAALNKLVLSEPDATLLREELALLALIQNQIKAQEARIVEFNTKDETTQRLQSIPGMGKILAAVTAAEIDSIDRFSDAAKLCAYAGLVPRTRASGGKVYQGSLLKSRNKWLQWAFIEAAWVAVGCSSYFGGLYRRHRARGKNANLAITIIARRMCQISWTLLKERRDFSETFPGRSAVRLTAAA

SEQ ID NO: 174406 - protein, 315 aa, unidentified
MIIGIDVSKSSFDSAWAVSEKASHKVYDYSDKGIAELLSDTPATSHYVMEATGVYHSKLALTLHEAGRVVTVVNPLVIKRFCQMQLTRVKSDKADAEKIRQYGEQSDLTVWKPSADEIDALRQAHGWLDDLIRDRTRLLNRQEAHQHQAKPNNFVTRQMRGAYTRLTNQIVLCEGQLSVIVKKCFPELYEHLVSIPSIGKKTAIELIVITEAFSKFAEVKGLTAYTGISPTTYSSGSSIKGKGAIAKMGNGRIRQLLYLCSLTAMRSNKDCKALYERMKEAGKPGKVIQVAIAHKLLRQAFAVATKGVYYTEKTA

SEQ ID NO: 174407 - protein, 354 aa, unidentified
MTDIKYVAFDVHQATISAAVLNLEGKLLTQAVMQTDATAIRDFLRGLSGVVHLTFEEGTQAQWLFDLTRPLVTEVIVCNPRLNHSKKRDNKSDRLDAFNLVRDLRAGLLKSVYHGSPQTQTLKQLVHNYESVTEDTTRTMNRLKAVFRSQAVKCAGRDVYYSRNRAKWLAKLNEEGWRLRAEFLYKQLDHLRELRQEAKKALLKEARQQGAFKRLCAVPGLGPIRVAQFISVVGSPHRFRTKRQLWTYCGFAVVTRSSADYKVVGDKLERRHKSTQTRGLNPNHSRRLKLVFKSAALEALKEEFFKKMYERLQAGGVRAEMARLTIARKIAAVALAIWKSGEEYDEEKLSKLAA

SEQ ID NO: 174408 - protein, 368 aa, unidentified
MKTATVHRNGVAASAAAGPQSSKPGSTIKLGVDIHSRLYVVAAQHDHALPKPPRRLAPEEFLPWVESLLALGHAVHVVYEACGFGFGLYRQLCAAGAHCCVIAPRKLDEQHTGVKTDPRDALTLCQRLSRYLEGNTRELAVIRVPSEEEERARHLSRQRAQLVRHRQKLEAAGRGLLVSHGLPAPAHWWKEQTWTHRLTPHLPAWILPHLEIYRPILLALDAQIAALTAQLEAAAPGDLPSGLGKLTSVILSHEVCDWARFKNRRQVSSYTGLCPGEHSSGGKRVQGSVTKHGNPRLRSALVECAWRLVRFQPQYPPVRKRLPILAKGAKATGAARKKAIVAVARHLAVDLWRLQTGQCTAAQLGLTA

SEQ ID NO: 174409 - protein, 412 aa, unidentified
MRRVIGMDIHRTFAEVVVWEEGRLRPLGRVDMTRAALEGFGKRLQASDEVVVEATGNAMAVVRVLSPFVARVIIANPLQVKAIAYAHVKTDKIDAGVLANLYAAGFLPEVWTPDADTEQLRRLVARRNQVVKHRTRIKNEVHAILHAHLIPRCPHVDLFNRRGREWLARQPLPCDETAAIERHVRELDRLGEDLVLLDREVAQAILGNPAAERLITITGVNVVVAAGLVAAIGDIRRFASPQKLVSYLGLNPRVRQSGLGLAQHGRISKVGRSHARAMLVEAAWAAAKAAGPLRAFFIRIRARRGHQVAAVAVARKLTVLCWHLLAKQSDYLWARPALVANKKRSLELQAGRPAKKGNQRGSAYAYNVKALRTQEMVIAEQAERAYERFVSQWRPRGPGRGVRERLKPARHE

SEQ ID NO: 174410 - protein, 353 aa, unidentified
MGRSIGVDLHRNNFVTATRAENGRTYVRTWKLEEIGRFVGGLRPDDRVAVEMTTNTRLFYDAVRSSVAEVQVVNTTQFKVIAKSVRKTDRRDAETLALYLEKDMLPTVRLKEVEQGQLAGLVSTRDTLVKQRTTLKNTINNRFAMYGRAIKREMLSSEKGLAAVEAEPFDALVQAEIRVLVAQVRALNASVRALEKSIEASAEKLKGYESLASIKGVGTMSAAILLPVIGNVNDFENAGKLAAYLGLAPRVSNSNETERSGRITKRGSKLARTALVQCGLIAKKYSPYLHAFHERVKQKKGGGKANIALARKLLEIIYRTLKNGWVFEDFGRFQLKGGMSPVKSRATVKRRAG

SEQ ID NO: 174411 - protein, 337 aa, unidentified
MKYSGIDLHSNNSVVTVTDEADRVIAEKRLPNDLAKIIGFLLPWRDELKAVVVESTYNWYWLVDGLQEAGFVVKLANTGAIKKYDGLKHSGDEADARQLAHLLRLGILPTGTILPPEQRALRDLARKRMQLVRSRTSHILAVENIVARQQGAKIGGRQIKQLTADAVDQMGLPPDVALAIKSNLEVILTLNAQIDLLEKHLQKKVGKREEFILLSSVPGIGHILATIILLEIGSIERFAEVGNFASYARCVDSQHMSNGKKKSEGNTKNGNKYLAWAFIEAANFAQRFNAEAKRFYERKKAKTNTTVATKALAHKLARACYYILKEQKPFDVTRCFA

SEQ ID NO: 174412 - protein, 419 aa, unidentified
MENSKTKKLRVVNGNTMIVTIDIGKKIHYGYFRGTDGQDIKPFPFHNVKKSYEEFWMKALQFKQQKNLEEIVVGFESTGPYAEPLMNFLSQKPVRLVQVNPMHTKRLKELTGNSPNKTDCKDPRVIADVIALGHALTVVVPEGSAAELRRLTQARQRASKNRNAMINQLHHLVFVIFPEFTQAIKMIASKSALYLLKNYPSPADIVELGLEDLQTHLRKISLGRLKQCQIKSLFEAAGNTAGIDNGRKSLLIEIKHLACCIEQESEFIDHLEKQMRQYLKQIPYSQNILSIKGIGEVTLAGLIGEVGDFRQFKTIAEIMKLAGLDLYEISSGKHQGQRHISKRGRSHLRKLLFFAAINTIRTKGIMNWPYRKMIDKGMPKVKAVVAISRKLLRIIFAMVRNHTTYEENYAQQYYEKLAA

SEQ ID NO: 174413 - protein, 316 aa, unidentified
MKETRAEKFAGIDVSKSTLDVCVVPEGKTLHVAYDETGISQIVDCLKDVGPTLIVLEATGGLEVRIATELASKGLPVAVINPRQARDFAKATGQLAKTDQVDAAVLAAFAKAIRPQVRPLKDEDTCALNDMVSRRRQLIDMRVQETLRLATAASKPLQKNLNKHIVWLDKQITEIDHDLTKRLRDSDVWRAKDNLLRSIPGVGAVTTLTLLAKCPELGALNRREIAALTGVAPLANDSGKHRGKRFIWGGRADVRAVLYMAALSAIRYNEPIKAFAERLKKSGKPPKVVIVACMRKLITIMNAMLKNNAPWNSTFA

SEQ ID NO: 174414 - protein, 357 aa, unidentified
MSNYFSEERDMGTPSYEGKQVYMGLDVHREFFVASCICDGVVVKRCRMPGTAEAVISLVSKEFGGASVRAAYEAGYSGFWLYRKLAAAGIDCMVVHAASIEVSSRDTVKTDKRDSLKIAQQLAAGRLRGVRVPTEEAEQRRLLTRTREQLMNKKRRVMVQIRMRLHYFGRFPESIQRRVKLQDVEDILVGLEGELQRTIGMLRDEWVELAKRIKEIDRLLVEQAKEDPLDAVYRSVPGVGPLISRILSAELGDMSQFRNERALFSFTGLTPSEYSSGGHICRGHISRQGNTRLRHMLVEASWKAVRKDPVIKEYYIKLSERIGKRKAIVAVARKLAGRIRAALRKHEHYTLDYRAAA

SEQ ID NO: 174415 - protein, 449 aa, unidentified
MSKKKSNEVPAPAAPEPEYAAFVALDWADQKHDWQLVAAGSQKREKGEFDNTPEAVMAWVANLSERFGSRPIAVSLEQSRGSLVYMLLKFPQLVLFPVHPNTAAHFREAFQPSGSKSDASDAGLLLSILLQHRDRLRRLQPDTAETRLLQRLVEQRRQMVNDKTRFSNRLTACLKLYFPQILKWFDDVTAPLVGALLERWPSLEELQRAHDGTLRKFFHQQNCRSEERIQERIDAIRQAVPATTDAGVLGAEAVVASCLIALIATLRDKIGELDKQIAEAFAAHPERALFDSLPGAGPVMAPRLLVAFGTDRQRFATADEMQCYSGIAPVTVASGKSEWVHFRWACPKFLRQTFHEFAGHSLVKCVWARAYYDLQIHNGKTHHAAVRALAFKWIRVLFRCWKDGKPYDEQVYLQSLQKRNSPLKGLLPSATGLGWNDVAGFQKFSDNPS

SEQ ID NO: 174416 - protein, 394 aa, unidentified
MYKLFVGIDVAKDSSVGHGLDGSSESLFLLAFPMDGEGFSKLFDAIKANCGDLSEVLVAMESTACYHINLFSFLTSKGITAVVLNPLLVSNFAKLSLRKTKTDKKDARTIAQFVMIHKDSISQLSVSQDIQDLRDLARERESLCQQISISKTEVKRLLQTLFPELEAICNLSTKVMLDFLQRFPSARLVKAAKPKAIEKALNRKGVGTRLTYTAENLIQAARSSVATISPAKEIILRGKIATLQHLDQRRNELTRALAEYCKAMMVEDLKIITSINGIDTGTATTFLAELGTINNFPSCKNLIAFAGIDPTVYQSGKYEGGSRISKRGNRHLRRVIWLMTINVIQHNATFRSYFMKRRGVGQPYKKAVLATAHKLVRVIFALLSQRTLFKEVCA

SEQ ID NO: 174417 - protein, 323 aa, unidentified
MDKDIKYFGIDISHLVFDVTDPEGTHYQFKNNPSGFRKFAKLLDGDSHCVMEATGYYHYQLAYHLLESGTRVSVENPLAVKRFIQMKLSKVKTDKSDSRLICEYAKQVELKLWKGNSREQTECLQMARLLDVYTKQCTMIKNKLHGEEVLGNPSRAVVSSLNRSKKHIEKEMAELEKKLLMTVKRAHQEVLTCVRSIPGIGTKTGVMLIVLTGGFERFSSASELCSYAGLTPIIRNSGSSVNGRSRISKMGNQKLRSLLFMCSFSAVKYNRACKAIYDRIVAKGKSKKLALIAVCNKLLKQAFAVAKSRLKYDREYKSVLVKN

SEQ ID NO: 174418 - protein, 400 aa, unidentified
MRVVFGIDVSKASSEVAILFNGEKVHGYTMSNDAIGFARLLGDLRTVHKPEIIFEATGVYSRRLQTFLEDNGYAYTRLNPLEAKKQLDSLRVRKTDQIDAEKPAQSQFVLNRKPTYVQEEVYQNLRDLSRFYQNLTEDIVRAKNRLHKVLQVTFPELETILSTPSGQQYWNLVIDFPCKDFVLELSKDELSESIRQSTSKRISDKRVAYLVEKLTALANQSYCAVKKTSPIMEEVRYYAKELLRLSEQRQTVLDQMVELAQPLPEYDILLSIPGIAETTATSIIGELGDIRRFQSANQINAFIGIDLRHYESGNFLAKEHITKRGNPYARKILFKCIHNIASASHTNPCHIADFYEKRKRQSQTTSTKPHTIASIHRLIRTMYYLITHNKLYDYRSTRNQ

SEQ ID NO: 174419 - protein, 401 aa, unidentified
MPAVWAGIDSGKRAHHCVVIDQTGEILLSQRIDNDETVLLELIATVTEIADGHEVVWATDLNSGGAALLISMLVDHGQQLLYIPGRIIHHAAATYRGDGKTDAKDARIIADQARMRTDLQPVRDGDQISVDLKLLTARRLDIIHDRVRAINRLRATMLEYFPALERAFDYSKSKAALTLLSTYQSPGALRRMGVTRLAAWLKARGCRNSATVAQKAIDAAREQETTLRTESVGATLVARLAAVITAIDEDLVDLDKTITARFNEHENAEILESMPGFGPILAATFLANTGGNLRSFESPDRLASVAGVAPAPRDSGRISGNHHRPRRFNRRLLRTCYLAALSSLKNSPASRAFYDRKRREGKSHKQALLALARRRINVLWAMLRDHTTYQEPAVTPMLKTA

SEQ ID NO: 174420 - protein, 424 aa, unidentified
MANESIQVIAGIDTHADTHHVAIINEHGRPLADKEFLAVGSGYRKIVDFITSHGTVTAIGVEGTGSYGAELTRTLRSEGLTVLEVNRPNRAARRLKGKSDPLDAYQAAQSVLDGRTTAIPKAKDGPVECLRVLRAARTSAVKARTAAINQIKGLLVTAPDKLRAKYRALGATALITALQRTRPSGHMGDPTYVCLLTLKALATRCQSLSAEITATDAALKEIIDTYAPMLCDLPGVGTEVASQLLVTVGDNPDRLGNEAQFASLVGVAPIPASSGKTTRHRLSRGGDRNANHALHSVVLVRMASCPRTKDYVNKRTAEGKSKREIMRCLKRYVAREIYRQITNPQPAPNNTDLRHMRTKLSVTITTAARELGQWPSILSRLERGLIRNDELAAMYRQWLMACQPDGQERRGRASHGERSAKGTN

SEQ ID NO: 174421 - protein, 361 aa, unidentified
MHTTTVAVDLAKSVFQLAVADASWRVIEQHRLTRSQFERWFINRNVSLVIMEACGSAHHWARTFNGMGIEVKLLPAPYIRAYVKRNKTDSADACALLEAARCADITPVRVKSIEQQALQGLHRTRSLWMGTRTARINALRGFCREFGISVAAGSRNGIEQMSRVLADPNSAVPSLIRGTMKLLIEEIRLLEARIAQLERELTALAKQSPACTTLLSIPGIGLLTATAMVAATSGNVAHFKDARHFASWFGLTPKEHSSGSTRHLGRISKKGDRYLRMLLTHGARSVLRAASVARTAGRQIDGLRRWALDVQGRSNHNKAACALANKLARICYATLRDGEIYGGNVTRMSKKLNDPTYPMPA

SEQ ID NO: 174422 - protein, 340 aa, unidentified
MKKNKKFYLGLDMSKPFFDATLQIICGNQKQELPPQQFENNKAGLKLFEQWLKNSGVSYDENTLVVIENTGIYHRLIWNFCSSKNIPIHIGNAAHIKWSLGIARGKSDKIDSQRLCTYGYRHRGELQCTPALNPEFLEFKDLMTNRTRLMSQMTGLKAYLNELKNVSDKKFVKVQQQCNKTVLEGFKKSIKAIDEQIKTRITKDEQIQTNYRLLRTVPGIGHWIALYLIVCTKNFTNGISGKQLACYAGVVPFEHSSGISIRGRNRVHKMANKELKRLLHLGALSAIKYYDEFRQYYQRKKEEGKHSMTVLNAIRNKIILRAASVVNNQKPYVNYTPDAA

SEQ ID NO: 174423 - protein, 464 aa, unidentified
MSKIVPVARKTAAQSRDRPRGKGQQFAIAYPDACGIDIGSSSHFVAVPADRDGESVREFRAFTADLQALVAWLRQCQITAVAMESTGVYWIPLYEMLDEAGFEVHLVNARHVKSVPGRKSDVLDCQWLQQLMTFGLLRGAFRPADEVCALRAVWRHRDMLLSYQARHVQHLQKALTQMNVQLHHVITDLMGVTGQAIVRAIVAGERNAEVLAALRDRRIKADEAEIARSLQGSWRDEHLFSGKQALALYDAYAEQIAECDVELERLLGALKAHELPDDGLGRPKRRTPAKNAVRHFDTRSALFEASGVDLTRIPGIDTSTALKVISEVGTDLRRFPTVKHFTSWMGLCPGTKISGGKVLSSATKRCSNRAAQALRMAAQALRRSQSALGAYHRRLCARMDRPKAITATAHKLARLIYFMLTKGQPYVDVGQQYYEDRYRERVLQNLTKRAHTLGFQLIPVAAVV

SEQ ID NO: 174424 - protein, 394 aa, unidentified
MILVGIDIGKNKHTFSIINKSSGEILLSPSDFSNNLEGFLFLIQKLNNYTKSELLIGMEDTDHYHFALLKYLLDRRYTVALINPTTTDLTRKLQGGITKNDHLDSLTIWDVISSNHRNKPYRVTKLNRFDLYEQKQLTRHHHNLKEELNTYKNRLQKCIDIVFPEFNSLFHSKYGIVYMNILKIFSSAKAIANADIRSIRKCFEFKGKGKRISLSAEQLKLIAKSSIGIPSVAEEIQIRHLVSQIELLKKQISEIDKRIEEFSLKNNSPILTIPGISHFSGTSIISELGEICNYTKASQIIKFAGVAPYHYESSQFTAQHTAITKKGSKYLRKTLYQIILPVISNNEVFHAYYTKKLNEGKGHRCAQGHCIRKLLRVIYHILSTGQPFNPELLV

SEQ ID NO: 174425 - protein, 407 aa, unidentified
MENRFAVIIGLDVGKTAHHGCALDATGHKLFDKPLPQDETKLRELFTQLQNHGEVLMVVDQPNTIGALPIAVARDVGCSVAYLPGLAMRKAADLYPGRSKTDARDAFIIADTARTMPHTLRQVDRDSDVLSALKVLAGFDEDLAHETTRALNRIRSLLTQIHPALERVFVGGTLSTGLVLDLLEKFGGPTGFKSAGRSRVLRFARTHSRRNPEELIDQIFTALAEQTVIVPATAAVELVIPRVAGQVKELKEQRATVAREVETMLEDFPLASVLMSMPGIGIKTAAQILLAIGDGSAFETAGHLAAYAVVAPVTRRSGTSIRGEFPARSGNKRLKNALFYSAWVASNHDPISKAYYDRKRAQGKRHNAAVICLARRRCNVIFAMLRDGTYYQPPTTTPTPEPAALAA

SEQ ID NO: 174426 - protein, 412 aa, unidentified
MEVIVERPAALDVHNATVMACVRVPGSGRRRAEHVAEFQTTVQGLLALRDWLEAHAVDQVAMEATGVYWKPVWAVLEDRFQCLLVNARHVKQVPGRKTDVMDAQWLCQLLEAGLLRASLVPPKPIRTLRNLTRYRKSQIRDRQREMNRLHKVMQDTGIKLDCVATDMMGKSGRAMLDALVSGTTDPVVLADLARGQLRKKIPALRAALEGRFDAEHVLVVGRILAHMDYLDEAIDELSAAIEKQLGPFAPAVELLCTIPGVGRRAAEVIIAETGGDMSVFPTAKHLASWAGMCPGNDESAGKRRTGKTRKGSKWLSQTLVECAKSANRSKNTYLAAQYARLRARRGPNKATIAVCHSILTAVWHMLTTGETYTDPGGDFYTHRDPERTRKRLVGQLERLGYTVTLQEGAAAA

SEQ ID NO: 174427 - protein, 447 aa, unidentified
MKRKQQRLEVVHRNCAGIDVGGSFHMVAIDPERGEACGEGPVRKFEAYTDDLEAMAAWLRSMGVKVVALEATGVYWIAPYEVLERHGFEVHLVDSRSCKQARKSDVLDCQWIQRLMSYGLLRAAFRPADEWCVVRSYVRQQAALIRDQARSVQQMQKALTQMNLQLGNVLSDIAGKTGMAILRAIVAGERDGEKLARLRDRRVKADQATIARSLTGNWREEHLHALGQALERYDFFAAQIEACEQRILASLERLPATGEESPAPPQGKTRASRAHRSATDERRLQAVLHRALGVDLTAIPAIGTNTALVVATELGRDLSRFPDSAHFCSWTNLAPSTRISGGKPLGGRGSKAVNRLGEALKLAAVNARRSDSFIGASHRARLMRMDKATAVKATAHQLARLIYAMLTKGQPYVERGIEHFEQERHHRQRRALERRARALGYVLTQAA

SEQ ID NO: 174428 - protein, 393 aa, unidentified
MIYVGIDVAKDKHDCLILSSDGEVMADVFTIANNRDGFENLLQQIHSYIKPTDKIKVGLEATGHYSYNILGFLLNNGLDTFVINPLLTNLFRKSASLRRTKTDRIDARTIATMLMSNVNLESYTDTAYHNEELKSLTRYRFDKVKERSKLKQSISRLVTTLFPELEKLVPSLHIASVYALLSEFPGAKQIAQSHLTHLKILLQDVSKGRYGQDMATEIRDAARASIGSIMSAKSLELRHTIRLIRELDAEINDIEDAIQNIMDDLQSPITSIPGIGVRMAAMIVAEIGDFSRFDFPDKILAYAGMSPSTYQSGQLSLSGSHAHMEKRGSRYLRYALYNATKYVCLWDPTFAAYLAKKRAEGKHYNVALSHAAKKLVRLIYAMEKSGRTYNAAV

SEQ ID NO: 174429 - protein, 268 aa, unidentified
MNRIVVGVDIAKRVFQLHWVEPETGEIVALQLKREKFLEHFANRSNCVIGMEACGGSQHWARSLQKLGHEVKLLSGRMVKPFVGGNKNDAADARGSWTAMQQPGIKAVAVKSEEQQAVLALHRMREQLVKFRTAQINGLRERIAAIPGVGLLSATAAVATMGDAKAFKSGREFAAWLGLVPRQTGTGGRVRLLGISKRGDKHLRTLLIHGARAVLTHSKSPPEWLSELVKRRPKNVAVVAMANKMARTIWALTAHERAYQSGYVSRPA

SEQ ID NO: 174430 - protein, 339 aa, unidentified
MWYSGIDQHKAFCLITTYGPQGPRVKQARVASTPLALQQYVAEFPGPHQAVVESTGGWYWLADTLAALGVELILAHATRAKAIAAAKVKTDKVDSNILALLLRADLIPAAHMIAPPQRGPRDLMRTRLRLVAKSVGAQNSIDRLLEKFNLESVADLDDLYQLQAACHAAQIHLFEEQISTLERALYPFLIPNADVQRLLWIPGLGKVPAFTVYTEIDGIARFPSVQQLFSYCRLVPGADNSAGRTRHRSGSKAGNRYLKLAFSHAGIRAVQYYPEIRAFFQAKARKKPIRIARTLVALELARIVYQVLTEQEDFNGRFKGRPISRRKHAQWPRRASPPV

SEQ ID NO: 174431 - protein, 311 aa, unidentified
MKVSIGIDVSKDHLDLYCLDDGRSARFGNDAAGFRKLKAWLPDAGCIARVVYEATGPYHAALERRFGGELPLVKVNPLQARRFAQSKGSRVKTDAVDARMLAQMGAALDLAPQAPMSESLRELRELQVARQALVKDKTRLENRIKTQSVAFAVKQGKARLALIKRQLRDIDAEIQTRIGAETPRARAFEIMRSIPGLGAVSTAAVLIECPEIGTMNRKQVASLAGLAPMTRQSGHWNGQAFIQGGRHHLRAALYMPAIVAMRFNPDLKPVYDKLRSAGKPAKVAITALMRKLIELANTLVKADRLWMQKGA

SEQ ID NO: 174432 - protein, 317 aa, unidentified
MNTINNQNEINVGVDTGKTQLDIYIRPLDIYFTVENNQSGIKHAIQILKKHPVTRVTIEATGRLEQPFIIACAEANIPFVIANPVNIKRFTGAIGQKAKTDKLDAQLIAHFGEAIKPPLSALKPEQMRLMSDLLSRRRQLMDMQTMEKNRSQIMPKTLSSLIKRILTALKNQIDKVDLKLKKLIEECDEYKAKNAIIQSVPGVGNVVAFNLLSDMPELGYVNNKEAASLVGVAPFNRESGVYQGKRMIRGGRPKIRTAMYMAMMSAIQCNAKFKDLYQRMVSAGKPKKVAIIACIRKLVVIINSMVRDGVMWDPKMV

SEQ ID NO: 174433 - protein, 313 aa, unidentified
MLYVGIDIAKNKHDVTALNVPGKTVLKPLTFSNNKAGFELLDLSLRQLNQDCLIALEDTGHYAFNLLNFLHEQGYKVYTYTPLLIKEFAKSLSLRKTKTDKKDAHGIALKLLSDPNREQFQHDNRQVELKILARHIHRLKRKQSDWKVQYTRCLDIIFPELDKIVGKHAECTYQLLTRYPNPQKRLEAGFDKLIEIKRLTASKIQDILSVAPRSIGTTSPAREFEIIKHYKRLIDKAETCVNDLMAEFNSVITTVTGIENRLGAVILAEIRNIHAFDNPAQLQAFAGLDSSIYQSGQIDLAGRMVKRGSPHLR

SEQ ID NO: 174434 - protein, 310 aa, unidentified
MAMIVQNYVGCDISKARLDLFDEASGRFQRIANQAEAIAAYVAGLCAARDFVVMEATGVHDRLLRHALAKAGIAFSRHNPAHTHHYAKSATQRAKTDRLDARMLSSYGRRYQPAAEAAPCEKGERLQSLARHRDHLVEIRAGLKRHLGEAFDEDVVTDIEALIADFDTRIDALESRIAKAIREAEDTARDYTLMVSVPGVSTITALSLLAHMPELGRRSPKSIAALAGLAPFDHESGRLKRKAKISGGRSRVRRALYMAALSAIRANDRFKAFYAALAARSGSKKLAIVAIARKLLVTLNAIIRDKTAFA

SEQ ID NO: 174435 - protein, 418 aa, unidentified
MEQEDVIYERCAGIDVHKRMIVVCLRIGRTTELRTFVTLTYELRCMTAWLKESGCQMEAMESKEPFWEPLYHIFELGGIPVMVVNAQHMKAVPGCKTDMKDAQWIAKLLSQGLLKPSFVPDREQRDMRDLTRFRKSQIEERARNLNRLQKMLEGANIKLASFVSDIDGKSAMGFLELVLGKPGFTTEDVKARRRGNMKATTEELFHSLEGIMSPVQRELFRHIIQIIREQTKQIEQTDSLIKDFMGEAYRQAAQAITELSGIGITSAQQIITEIGHDMSRFPSDGHLCKWAGVCPGNNESAGKRKSGKTGHANKTLKSTLVQCAQSGIRDKNTFFSAQYQRLVVRRGKNRAIVAVAHSMLIAIYHILKGAKFHDLGADYYTRFNREKKINAHIKQLKTLGVSIPDDVLRTAIAQGAVA

SEQ ID NO: 174436 - protein, 346 aa, unidentified
MTIVEAGRTVIGGVDTHLDVHVAAALDPIGGLLGVESFVAAPQGYKAMLEWMGAFGTVSKVGVEGTGAYGAGLGRFLRRSGIEVIEVDRPNRQVRRSKGKSDFVDAVEAARAVLSGRAAGAPKSRDGNVEAIRALLVAKRSARHARSRALAQMRQLSYTGPDQLRSQFKGLSITDLVDQAAALRPRASGDPVLYATKVSLAALGRRVLALEDEMAAVDELLTDLVTQCAPQMLGLFGVGVDTAATLLVTAGDNPERLRSEAAWAHLCGVAPIEASSGKVTRHRLNRGGDRHANQALWRIVMTRLAWDPRTRGYLERRTKEGRSKREVIRVLKRYVAREVFKHLPRG

SEQ ID NO: 174437 - protein, 339 aa, unidentified
MAQTYCGLDVSDKTTHICVVDGEGKVIWRGVCATDPQALAATIARRCPGVVRVVLETGALSAFLYHGLIERNVPAVCICARHAKGVLSTRVNKSDAHDAEGLAQLARTRWYKAVHIKDSATHMDRTQLKVREQLIKAHHAMANQLRGLLKLFGLRMGKVTTPGKRAERLEALFDQRPELRLLLTPLIDGLAALEVQIRASSRTIKARAAADPICSRLMSTPGVGPITALSFKSSIEDPARFARGEDVGAYAGLVPRRSQSGERDVKGRISKAGDPMLRSALYEAANNLLSRVKRPSPLQTWGKALAAAKGAKRARVAVARKLASLLHKLWRTDTSFQWA

SEQ ID NO: 174438 - protein, 403 aa, unidentified
MEGPLISLDVSKGKSNYRFFENGTDRKGKKGVIRHDIQGFDSIRDEAEKMEERLGIKPSVIFESTGVYSDVVEKYFTDKGFDVYVISPLLSSSMRKEGVRPAKNDSLDTLSIAKVFYSKDDLRKCSENDKKAERLREMSYELDMMNRRIRPMKCQFLRLLDKVWPCLDEVSDYSSRFMLDFIIAFGHPENIKTVKGVLSVIRKSEMGTAGRKDKIAQDLFDYCHTHLSAVSKDSSYVELLKRMAIELKAMAKKKSELIDRMAEEARNKDEFARLLTIPAVAKTTALKIMARVGDISRFRNAEALVAYCGLDPRVYQSGKMTGEHRTITKKGDCILRSTLFLAVKLMVMLYPDTKVARFVAAKAKNGLSYKQAVVAGSAKLARIIYSMLTHHENYVEFNADIVA

SEQ ID NO: 174439 - protein, 408 aa, unidentified
MNTLYVGIDVSSKSNVVYLMLPNGDKHSNFSVANSHEGSTLLVKKIYSALTSHSLDTVLIGLEATSVYGDNLVYFLREDATLAPFNRKIHVLNPKQVKKFHDAYNDLPKNDYVDSFVIADCLRFGRINKEVYMGDYRYKALQNLTRARFFAVQNLVKEKQRFMNVLFKKYSTMTQEKVFSDTFSTTALAVYDEFESAEALANMDLHELTDFIIEKGKNRFPDPDAVAKAIQKAARSSYRLPKTVNDSVNQVLSISITSMKALESQIKEFDKAIKALMELLPNVLISIPGIGPVYSAGIMAEIGDINRFDNQASLAKYAGLAWKQHQSGGFEAEVTRLIPSGNRFLKYYLCEAAFSLVRCDKEYSDFYHLKYKEVNRCQHKRALALTARKFVRLVFRLLKDNRLYCPAK

SEQ ID NO: 174440 - protein, 362 aa, unidentified
MSKASWLVSSVVPGVERQPLKKLEPDATALLRLIERWRNEAVRVGRPISRIALAYEAGRDGFWLARWLIARGIEAHVIHSASVAVSRERKRAKTDRLDAAMLMRVFLGWLRGERGHCGMVAIPTMEEEDARRPNRERESLVNERSRIINRMKSALARLGIRGFKPHLRKAPERLAGLRTAEGTGLPANIIEEFRRDMARLALVREQISSIEKTRAERLERAPDTGPHAMVRLLARVIGIGIETADMLVREILSRKLRDRRALARYAGLTGSPDESGLKSREKGLAKAGNARVRRGLIQLAWRFLMFQKDSALARWYRTRTEGPSGARKTTMIVALARKLLIALWRLVTTGEVPDGVELRTAA

SEQ ID NO: 174441 - protein, 356 aa, unidentified
MSEGSWVGLDVHARSVVAGVIDQGSGEVRSLRVPPGNEGTVAWLKTLPTPVRVVYEAGPTGYRLARACAGAGISCVVAAPSRIRPAADRVKTDRRDAERLARLLRLGEITPVRVPGPEEEAARDLVRAREDARGDLMRARHRLSKLLLRHGMVYDATAWTRAHDAWLRRQRFQGGPLAVVFDECYGRMLDAKTRRDALDRAITELAGAPPYVDVVERLVCLRGVSTLTAFALTVELGDWNRFRPTSLGAFLGLTPSENSSGERRRQGAITKAGNSHARRLLIEAAWHQRRPPRLSVTLERRRTGKSLAVRAQADRSARRLHGRWHALERRGKPRTIVVVAVARELAGHCWALATME

SEQ ID NO: 174442 - protein, 341 aa, unidentified
MDKELYFGVDVSKKTLDLAYYDGETIDWKNAHIKVSNDDAGFKKIGFWVAKVGKDFDTFLFCMEYTGLYNQNFRLWLESKEYIYGMVEPRKMHHFEPDLDDDQRSLDRIKTDELDAFRIAIYCEQNHKKILRNPSKLPSPVYFKLKRLLAERKQNTKQSTLYKQQLHDICAYDTDLSVERKKLLLKNMKENQKAIDKEIDSYMNEDASISKNYDLLTSIPGIGRIIALETIVLTENFTAISNPRKYACYIGIAPFKKESGTSVRKRTSVSKKGFSEAKADLSIAVLSAIRNNPSIRDYWIRKRKEKCGGIVLNAVKFKLVLRMFAVIKRGTPYVETDAYKN

SEQ ID NO: 174443 - protein, 372 aa, unidentified
MNYNTVYVGMDVHKESFTLCSCKYEDEKASHYQRTPASYKNVLRYLAFLRTIYGEDTRFVCGYEAGCLGYSLYHQLENFNVECVILAPTTMLEQRSKRRIKTDKRDAEIIAKSLAQHNYSPVHIPTKMDNQTKEFIRMRDDHKAELKKIKQQILAFCLRQGYQYDGSGNWTAKHVKWLRSLKTEGLYKEILDEYLLTYTILTDKLNRLDQRIEELASEEEYKEPVSKLTCFLGIKTHTALSVIVEVGDFQRFASARKFAGYLGLVPGQHSSGDDRNGLGITKAGNTHVRRLLVESAQSYTRGKIGYKSRVLRSRQAGNSPQVINYADRANERLRRRYYQMVLKDGKKYNIAKIAVARELACFIWGMMTDNIY

SEQ ID NO: 174444 - protein, 339 aa, unidentified
MNRIVVGVDIAKRVFQLHWVEPKTGEIVALQLKRERFLEHFANRSSCLIGMEACGGSQHWARSLQKLGHEVRLLSARMVKPFAGGNKNDAADARAIWTAVQQPAIKTVAVKSEEQQAVLALHRMREQLVKFRTAQINGLRGLLTEYGEVMPQGRAGMKRDIPGALGRLADRLPAIVIATLREQYARLSALDEQISQIEGRLRQWQREDSATTRIAAIPGVGLLSATAAVATMGDARAFKSGREFAAWLGLVPGQTGTGGRVRLLGISKRGDKYLRTLLIHGARSVLTNSKSPSEWLTELTKRRPKNVAVVAMANKMARTIWALTAHERAYQSGYVSRSV

SEQ ID NO: 174445 - protein, 350 aa, unidentified
MKITTIGLDLAKSVFQVHGVDGEGRAVLRKQLKRHQMAEFFANTPPCLIGMEACGGAHHWARKLQAQGHDVRLIAPQYVKPYVKSQKNDAADAEAICEAVARPSMRFVAVKTVGQQSLLALHTSRSGFVKARTALSNQIRALLSEFGVVLPKGFSALFTRVPEALEDAANELTSIVRELAQRLLDHIKDLDELIKKLELQIRQWARADETVRRIEQIPGIGPISATALVASLGDVSHFENGRQVSAWLGLVPRQHSSGGKTVLSGITKRGDSYLRTLLIHGARAAILAAQRRRQGPPDWLAKLLERKHPNVAAVALASRNARIVWALLKHKRDYEPGYGRDKHLSAAIVA

SEQ ID NO: 174446 - protein, 363 aa, unidentified
MIVIGTDTHKRTHTCGAVFAGTGQLAGELTAPARKAGFAELLDWGRRLEEERVWALEDCRHVSGSFERFLVASGERVVRVPPRLMGQSRRGERTAGKSDPIDALAVARAALREGPETLPAAHLDEAALELKLLLDHREDLIRARSEDQQRLRRHLHDLWPDFELPAGCLDRMVWLDRVARKLSRAKQGARVRVSRELVRAIRDRTKRASELEREIAAMVRVQAPQLLEFPGCGTLTAAKLLAETAGVARFSSDAKPARLAGVAPIPASSGARTRLRLHRGGNRQLNCALHRIAVTQGRMHPPAREFLARKRAEGKSNREALRCLKRHLARRVWRLLVDSEIDRSMNTPDSQRGTPAPQIAVAA

SEQ ID NO: 174447 - protein, 331 aa, unidentified
MLKCHYVGVDVGAKELVVSIDRNGSRESGGVFTNDAGGHRKLIRWATKQGATAQVVLESTGVYGLDLAFALQRAKRVEVMVANPRAITAFAKASLQRSKTDALDAETILEFSMRMPFVPWSPPEPSILELRALSRRIEAMSKTATQERNRLHANDQSEELSDFVKADIRELVELLKGRIERLRKQALLVIEQSPELANTFRHLTSIKGIADAAGIQLLAELGTLPQDMTTRQWVAHAGLDPRQHQSGTSVHKPARISKTGNAHLRRALFLPAMVASRWEPNVKAFYEKLLAKGKAKMQALTAVMRKLLHAIHGMLQHDQDFDGEKFFAVRG

SEQ ID NO: 174448 - protein, 344 aa, unidentified
MIYYAGLDVSLRSVNLCVINDQGEIKAETKLDSEVDDIAAYLHGLNYDVSSVGLEAGTLTQYLTYGLQSAGYEVICMEARQVKAALSAMRNKTDKHDARGIAQILRSGWYSRVHVKSLASHHIRLLLSSRRAVLSKCVDLENEVRGLFKVFGIKLPPKLGHGAFDKTVRGTIEVDAALAHALLPLLEARLVLYRTFRELDNRTRKMAQRDTVCQRLMTAPGVGYITALTFKAGVDDPTRFKRSRTVGAHFGLTPRRFQSGEMDNPGRISRCGDRDVRSALYTAANALMTRSSKWSALKVWGMQLAKKRGHRRAVIAVARKLAVILHRMWIDDTQFRWGTEAARS

SEQ ID NO: 174449 - protein, 421 aa, unidentified
MTEATLPAVYVGIDWATRKHDVCVMRPDGRVLAERAFPAHAQGLAELAEWLASFSDAGPASIWVAIETPRGAIVDTLLERGFAVHSLNPKQLDRFRDRFTVAGAKDDRRDARVLADSLRTDRRAYRRLSVDDPTLIELREYVRMAEDLQDERNRLANRLREQLRRYFAQTLELTDDVTKLWFLDLLAEIPTPEHARRRRRSTVAKILKRHRVRLVTAQGVLEILRRPAVHVAPGTVQAATAHIRMLSERLRVVVRQHKDCHRRLDKLLAELSADGESEEGRAGEPRDAATMRTFPGIGTVVQATLLAGASRPLQERDYHALRALLGSAPVTRRSGKRRSVLMRQACDPRLRNAAYHWARVATQHDPHWKALYAALRARGHSHGRACRGVADRMLKVLVAMLRTGTPYDRTKLRSRAPTAAA

SEQ ID NO: 174450 - protein, 482 aa, unidentified
MARRKRSTFERLQSGRLNRQQRREWGQRIAAADPSLAVVHPDAAGIDIGNASHFVAIPPDRDPVPIREFGAWTAALQEMARWLTAHGIRTVALPSTGVYWIAVPEGLEQAGLEVYLVNARGTKSLPGRKSDVQACEWLRTLHTYGLLRSSFRPPAEVRAVRTIWRQRDRWVQEAGRAVQHMQKALTTMNVQLANTISDLSGVTGQAILRAIVAGTRDPWALAKLRDPRIAASEDEIAHSLQGHWREEVLFELRQALEAYDFYQHQLAACDRELAKYTAAVASRELPPPTPVPAGAAPLPPAKPARRAHARRKHHPGFDLAAELHRTMGVDLTRIDGIDVLTAQVVFSEIGPDFSAFPDEDHFASWLTLAPRHDITGGKVIRRIPAAGRNRVANALRMAAQSLSRSHSYLGARYRRLRARLDGPVAVKAMARYLACLIYRLVTKGQAYVDRGAAHYERQRQERERLALERRASHLGLKLVPAT

SEQ ID NO: 174451 - protein, 456 aa, unidentified
MSKLSKPNVGLEEARPFAGMSQVHPHAAGVDIGAHEIMVCVQGGDSTQLVRSFGSYTVDLQAIATWLEEHGVETVAMESTGVYWIPLLEELERRGFQCHLISSRSLRRVPGRKSDVVDCQWIQTLHSYGLLESSFRPEADLVALRTLLRHRAQLIQHRSPHILHMQKALLQMNIQLSQALSDVSGTTGQAMIRAIVAGERDPHKLAALRNYRCKKDEADIAKALTGTWRAEHLFILKQSLELYDFYTKQMEVCDAEIECTYSLVRPDWEQAGLHEYPEGKRNSHSKNAPKDVQVRKHLKRICGVDITAVQGVSASLAQTIVIEVGTDMSKFPNEKHFCSWLGLAPKNEISGGKVLKNKTLKTNNRAGQAFRMAAGSVMRADCAFGAFYRRQKARLGPAQAAVATAHLIARIVYRMLKYKVEYEPLSLAQYEQNYREQQLKYLQKKAAKFGFQLTPT

SEQ ID NO: 174452 - protein, 340 aa, unidentified
MNTTTFGLDIAKRAFQMYWVETETGEIVNRRFTKQQVIEFLGQRPAGRVALEACGSAHWWARKIVALGHEVVLLHARFIRPFVQNNKTDATDARAIWTAAQQPGMRSVAPKTADQQATLALHRMRSLLVKSRTMQVNQLRGLLYEFGVTLKAGRVAGLAEVRERLHEIEEVVPGTLFDALRDQLQHIERIDGEIRKLERQIVAWQRQEAACQRVATIPGIGPLTATALVATIGDPAAFKSGRELAAYLGLVPRQSGTGGKVRLGGISKRGDSYIRMLLIHGARAVMFKSRSKGAWSEQLSLRRPTNVVAVALANKMARTAWSLLAHDKTYQTDYAAQRAS

SEQ ID NO: 174453 - protein, 322 aa, unidentified
MNYIGIDISKASFDVAIEKAGRYRYYRFGNDTQGFKSLITLLNRDTDQCVMEASGAYYQRLAVYLTTQEVGVSVVNPLVVRRFCQMRLTRAKTDKKDAMMLAEYGKAEHPDLWQAPEGFLLEMKQLQAYLSQLDKNRAGYLRQMEAFRQSPSRSESVEKGIHKMLQTLDREMERIEAQMEEIISSHYGQLYERIQSIPGIGKKTGRELIVISGGFTKFDNAKQLSSYVGFSPRLYESGSSVRGKVRMCKMGMSRVRAMLYVCTWSAIRCNAPCRALYNRLVEKGKAKQVALIAVANKLLKQVFAVATKKEFYNENLSFAPCL

SEQ ID NO: 174454 - protein, 369 aa, unidentified
MTTLSSRPVVVGLDVHKDTIMACVYDAATAEIEKPRQFKNDPSRLRRFIGDLQTAGLAPECCYEASSCGYVIYRQLAALGVPCAVIAPSSIPRRSGDRIKTDRRDAEKLATMYANKLLEEVEVPDAELERVRALVRCRQTLAEDLTQVKHRTTRLLESRGHVFREGKNWGQAFWLWLSKVELEGADQTVLRVWIDKIHYLEGQMASVESDIIRASESDRFRHTVKVLCAFRGVACLTAMVLATELGDIRRFSSPRHLMAYLGIVPSEHSSGASTRRGSITKTGNTRARKALISSAWKYAAKPARSRELIKRQKDVAPHVVAIAWKAQQRLHKRFHALAVRRPRSVANVAVARELAGFLWAALQPTPAQA

SEQ ID NO: 174455 - protein, 329 aa, unidentified
MVDNKSFSITKGGIDELLTFLLGVELTIDRIGIEGSGFLGQPLVLALAAAGYDVREVQANRTAERRKRRRRAKTDAEDAEAIAREALSDPELPPAGKHTAPSPTWQTLTVIRDWRESLVLQRVRLLTESEAVLVTLPVAIRATLPSTSRVLPQLQSLVDGVANPDLLSPAERLKLDRLAASLNDIITLTARIKELDRQIPALLSDLGCTLTEVRGVGVVTAMDLLVEIGDPCRFTTEAQFARWCGIAPVALSSGEGHGPARRHRLDLGGNRAVNSVLHIVHVTQVRCHPPAKEYMAKRVTDNKTKREARRSHKRQLANIIIRLESASRL

SEQ ID NO: 174456 - protein, 372 aa, unidentified
MKRYCGLDVHKDSVFMCILIETGEKIEEVFGTLTPELDRLRDTLLSYHVDEVALESKSIYWVPIWRVLDTEFDVKLVNPYFIRQLPGRKTDVKDAQWIATVLQKGLIKGSFIPENRIQELRGYNRRIAYLNRNLQRADQSIDLILQRCNIRLSNYVSDIGGKSMRKVVKALSMGQTDPIELTRLVHSRTKNKHGEQTIKDALTGILSASDMELLGMSLSEAEFYQQQLTACKDKLLDLCGNYFKEELELLQGIPGIKEHSAASIIAEIGVDMEAFQTASNLVGWAGLRPRNDQSAGKIKGRKTLHGNKHLRIMLVQCAWGASRTKESTFFIKYNTLKKRMNHNKALVANARKLLVVIWNILAKKQPYKALAA

SEQ ID NO: 174457 - protein, 482 aa, unidentified
MKKHNIYQNQSQELLSLFEQAANNAKVMCVPIDYAKKDHVVMFCNGYGDILRKPFSVKNSPQGVAYLTDQVTRSCRQRGISENHVFFGGEQVGSFADNFVSTLRSQGWLVAGVNAHDAKTQRENLQASTDRLDLMGIAKSLLNRRANCAPAQSGIYLDMRTLVRHRRKLVEITTEVKNRIHAVVDRLFPGFLNESKSGITPFSKSSLWLMQERFSAPQIRRRKRSSLIEALRQRGTKKPEDTADRLQQYASQVLNPPQNHVHMLQLSLAQHVKHFCCLQEGIGQLETEIALSLAQTQGAFLTSVRGIGIVLAAGVSAEIGNPFEQKPINNLVSYSGIIPRVKQTGGPQGKTKTGKVARRCNRILKDYVVRSASHLGLYGPADLKSDYQRRQATEQHADFGMGRRYLRMAMCLMRTSHIYLPRQLRKADSSMQDRADYYVMSWPLLRDKWQKSGALQTAFNAEQPLGQWRKIVQQFYGIKLTL

SEQ ID NO: 174458 - protein, 352 aa, unidentified
MDRGSKLDFTGQHIYVGMDIHKKSWSVSIHTEHFEHKTFTQPPEVKKLAYYLQRNFPGATYHSVYEAGFSGFWIHDLLTEEGIHSMVVNPADVPTKHKEKAGKADKVDCRKLARNLRSGDIKGIYIPSRVQVEDRHLIRTRQSMVRKQTRCKNQIKAILFFYGIVIPEGNHWSRNFINWIETTRMERASGDLVLKAHLEELKHLRQIIAGLNKAILALSRSDTYRDKVLLLKSVPGISTLTAMTLLTELCDITRFSSLDKLASYTGLVPDIKSSGETAYTPGITHRRNPILRTVLIEASWVAVRKDPALMMAFNKFSLRMKKTAAIVHVARKLLNRIRFVLMNQERYVPAVV

SEQ ID NO: 174459 - protein, 346 aa, unidentified
MEHYAGIDVSLELSSVCVVDGRGKIVKEAKVASEPEALVCFFKELGFPVNRIGFEAGPLSQWLHAGLTQAGFETVLLETRHVKAALSAMPVKTDRKDACGLAQLLRMGWFQPVHAKSIGSQEIRGLLVARKQLLGRLLDVEMSIRGILRGFGLKVGQVTRKTFEARIWELVTGHATLERIAEAMLSARATLKAQYEKLHKAVLAIVREDAVCRRLMTVPGVGPVVAVTFKSAVDDPSRIAKSKAVGALFGLTPKKYQSGEKDVTGGITRTGDEMVRTALYEAANVLLSRIMRFSKLKRWGMDVAKRRGSKRAKVALARKIGVILHRMWIDGTTYRWAEAKPIAAQG

SEQ ID NO: 174460 - protein, 345 aa, unidentified
MANILKQVVGIDVAQNELVVSLGRLNEELEKEVYAFRQFANKPSGFKALETWVTKHTDKQVATRYIMEATGVYHEKLAYYLSNQGHEICVVLPNKISNYMKSLDLKTVTDKTASQAICHFGIERKYEAWQQPKKIYRDLKQLTRERDQIIAERTVSKNQLHAEQAEAFPNENSILRLNQRIGLCNTQEKEIRIEIAGVIKQDKELAVRINNVVTAPGVGQLTVVIAIAETNGFDMVRNKKQLTGYSGLDVEEKESGTSVKKKPKISKKGNRHLRKAMHMPSLTAIRVDERFKAIYVRLVSKHGIKMKAAVAVQRRLLELIYTLWTTNKPYDKNHTHQTIENARAV

SEQ ID NO: 174461 - protein, 411 aa, unidentified
MLKIVYQICCGIDVHKTFVVACIASTNEKGFTTYQSKRFSTYTKNLRELCKWLEANNCKDVCMESTGKYWHPVYNILETSCNVILAHPKYLKAIRGKKTDKKDAKWIADVFKHDLVSGSFIPPAKIRELRDLMRYRFKLTNYTSGEKNRAQNCLTTSNIQLAHAFSDVFGKSATSILDYILCHPDQPDFDVTQFVDRRCKTPIQEIQLSIDGNISHEQAEKIKIIRSHMDNLATNKLKLESVILTLAEPFLPQINLVSTVPGIREFSAIAVIAEIGTDMSVFPTAKHLCSWAGVAPQCNESGGKKKSSRVSRAGAYIKPLLVQCANAAVKSKKHPEIVKRYSSIKKRRGHKKAIIAIARMLLTVIYNILKKNEPYNPGLYRKADTLSVYREQQAILLLQMRGYSISKVTPT

SEQ ID NO: 174462 - protein, 342 aa, unidentified
MKVMMIGVDLAKNVFQVHGALHTGEVQFRKKLTRTQFPVFMAKQEPCLVIFEACGSAHYWAREMAALGHEVKLIAPQYARPFVKRQKNDAADAEAIVIAARQPEMRFVEPKTVQQQSRAAIFRGRERLVHQRTADVNALRALLYEHGHVFPQGIRRLNRITALLEDKTADLQPLIREECLDLLAQIEEKTARIIERTAKLKTLAGKSDSARRLQTMPGVGPLTAIAVEAFGPDMAQFKTGRDFAAWLGLVPKQHSSGGKERLGRMTKAGQADIRRLLIIGAMSRLGWLGRRTITEGSWLSRMLARKPKMLVAIALANKMARQIWAMLTKNEDYKDPALAVAA

SEQ ID NO: 174463 - protein, 404 aa, unidentified
MSNNIFVGLDWAARSHAVCVVDESGRILERFELTHDRDGLSELRRRLSRFNARLRIAIERPSGLIVDALVDAGHEVVPIHPNALKACRPRYRCHGGKSDAGDAYILADVLRTDGHRWRALTPQSDGIQALRALVRSRDDLVATRVGLSNQLRSVLEAFWPGAACVFADIASPIGLAFLKRYPSAASAARLSERQLQAFCKRQRYCGRRTPAQLLARLRSAAPALSGPLSAQASSHIVRSLVDVLRPVVAQIAELTQRIEQAVEALPDGRIIMSFPRTGHICAAQLLSELGDVRERFPSVEQLAAEAGTTPVTYESGKSRGVAFRWACNHRLRRAVTCFADNSRHANAWAHSIYASARARGCSHPHAIRILARCWLRVLWRAWVDRRPYEPELHLAAAKLAADGG

SEQ ID NO: 174464 - protein, 322 aa, unidentified
MAMLSFGGIDVSKDRLDITVLPDEQCSSVSNDAAGWADLIQQLRGSSITAIGVEASGGYERGVVRALLAAGMSVRQINPFKLRQFAKASGTLAKNDRLDARMIASFVAIMPTRPAQRQAPMIEQLAAMLTVRRQLSDHKVATENASRLLESAMLQRLSRRRVAGLAADINLLDQRLVEIVTADPDLAYRFRLLTSMPGVGAVLACTLIALLPELGQMSRKQVAALVGLAPYDFDSGKLKGRRCIWGGRARVRHVLYMAALSASNWNPGLKAFHDRLKATGKKPKVVIVAVMRKMITTLNAMLRDGTTWVDRYSGRRSASTAR

SEQ ID NO: 174465 - protein, 391 aa, unidentified
MIYVGIDVAKDKHDCFITNSYGEVLFKSFTIPNNRDGFETLFQKVQSVSDDLTKVKVGLEATGHYSYNLLGFLLDKGLPTYVINPLHTNLYRKSLSLRKTKTDKVDAHTIASMIMSDVNLKSYSDTSYHNEELKSLTRYRFDKVQERAKLKTSVSRLICILFPELEKLVATIHMASVYALLSEFPSAHAVASAHLTRLTNLLSESSHGRYGKDTAVMFREAARNSIGSNMPAKSLELKHTIKLIQELTSEIDEIETEIKSIMDEVNSPILSIPGINYRMGAMIIAEIGDFSRFDSPDKILAYAGMSPSTYQSGQLDNCYSHMEKRGSRYLRYALYNATKYVCHWDESFGTYLAKKRAEGKHYNVALSHATKKLVRTIYAMEKTGQSYSSAS

SEQ ID NO: 174466 - protein, 460 aa, unidentified
MNEYFIGIDASKGYSDFVMINEKKQTVIENFQLDDTFQGHTRLYELLHGFNQDYPEATIYAAVESTGGYENNWFQSLLKFQASLPIKTAHLNPLGVSHNSKADLKRNNTDKISAKNVAEYMIAHPEKVSYQHQDSLASLRKQWGFVTMLTKQSTQLLNQLESLVYNANPEILIYCKGDTPQWILKLLTSYPTALRLSRAKVKVLARIPYISLDRAKQLIATAKKSVASASDKVTEQLIVATVKQIVHLKKTIKVQSEVLANECQIPEVALLKTFTGIGDYSAIGLMLQIQSVNRFLTSKKLASFFGIHPEYKKSGDGTYKYRMSKKGRKEGRRVLFIVAMSAIQSNPLIRDVYQQAVERGMEKMSAMGLCMHKILRIVYGMLKHNKAFDPQVDLKNRQKKPSRQRKVGQDKDRRYQNFDSNAPISRRQKMKRKERKQSQNVINVEYGISEASVPSTQLAN

SEQ ID NO: 174467 - protein, 430 aa, unidentified
MKDTTSKRIEAVTATTLIVGIDAAKDVHYARITDYRGINLCKPVKVNNTTDGFESLLQRVKKLKIKHKCDKVIIGMEPSGHYWRAMGWYFILHESKPVMVGVNPFHVKQERELNDNSPTKSDPKDALIVAHLIREGRYFDMYLPEAEYAELRILNAERQRLMKQVSRANNTIVAVVDEFFPEYDKIWGRTTCRTSRKIMKQFAFPSEILAVDKSELIAVIKKASGGTEGQKLADEIICASEVSVGVREGLKSAKLKLLRLIEELEFYEELIAVLESELETVMDTLELGDILQSIKGIGPVISAAFVGEVGNAERFDDWKQIRKLAGLNLTEKSSGYHKGKTKISKRGRPYLRYMLYMAGQSCCKHNPEMRQYYQYLRRRKNNPLCKDQATVAVGLKVMRIMFYMAKNKEKYNPEKALGDVRQQQILSLTA

SEQ ID NO: 174468 - protein, 456 aa, unidentified
MVSAKKAKNKRAISSELQRVNPRAAGIDVGSEAHYVAVSPEVADEPVRCFGCYTPDLHEMALWLKGCNIETVVMESTGVYWVPVFQVLESHGFDVSLVDARHVNSVPGRETDVDDCQWLQKLHSFGLLRSCYLPDAEMVPLRAYWRYRAELVEMASKQILLMQKALEQMNVQLHKALSDITGVTGMAIIRAIVAGERNPAVLAKMRDKAVKKSEDEIVRALSGEWRDEQLFLLGAALDLFDLYHTKMAECDKKTEECMRSFEDKSEPGKPAPKPNNQKRRKNEPHFCLQSELYRMAGVDLTAIDGISSITALTVVSECGTDLDGFASEKHYSSWLGLCPHNVITGGKVHKRSTRKVQSRTAKALRLAAQSLHHSDTALGAFYRRMKYRLGAAKATTATAHKLACLIFRMIRYGMDYVDRGQEQYNQQYQERVLKNLRKHADAMGYGLVNLLTGEVS

SEQ ID NO: 174469 - protein, 403 aa, unidentified
MNMNAVGIDVSKGKSMVAILRPFGEIVSTPFEVKHTVSGIRSLIGHIKAIDGESRIVMEHTGRYYEPLVRELSQADLFVSAVNPKLIKDFGDNSLRKVKSDKADAVKIARYTLDSWTELRQYSLMDEIRNQLKTMNRQFDFYMKHKTAMKNNLIGVLDQTYPGANTYFDSPAREDGSQKWVDFATTYWHVDCVRKLSLNAFINHYQKWCKRRKYNFSQSKAVEIYEASKEIVSVLPKDDLTKLIIKQAVEQLNMASQTVEQLRTMMNDAASKLPESPVVMAMKGVGKSLGPQLMAEIGDVSRFTHKGAITAFAGVDPGVNESGSYEQKSVPASKRGSGTLRKTLFQVMDALIKTKPQDDPVYLFMDKKRSQGKPYYVYMTAGANKFLRIYYGRVKEYLSSLPK

SEQ ID NO: 174470 - protein, 394 aa, unidentified
MPQQRKPNDLSRSLIALDMDTTLIAVVELSLSSWLVAGIVPGIEGQPLKKLKTDENALLALFNRWRDEAVRSGHKISRIAVAFEAGRDGFWLARWLKARGIEAHVIHASSVAVSREHRRAKTDRLDTELLKRAFVGWLRGERDHCKTAAIPSLREEDAKRPSRERESLVGEQSRLVNRMKATLIRLGIRAFNPKLRYAEQRLETLRTPEGKPIPANTLAELKRDMQRRRFICGQIRSIEQERLERLERTPDTEPHAMVRLLARVTGIGIETADLLVHEVLLRNMRDRRAVARYGGLTGSPDRSGGTNREKGMARSGNARVRRGMIQLAWRFLLFQKDSALVQWYRRRTEHSPKARKTMIVALARKLLIALWRLAREGVVPEGVAMRPGVMNTSY

SEQ ID NO: 174471 - protein, 355 aa, unidentified
MSEKFNSEIAVIGIDIGKNSFHIVGQDRRGSIVLRQKWSRGQVEARLANLPPCLIAMEACTGAHHLSRKLQALGHDARLMPAKYVRPYSKGEKNDYRDAEAIAEAAQRPTMKFVATKSADQLDLQALHRVRERLVGQRTGIINQIRAFLLERSIAVRQGLHFLRAELPGILAKRTDVLSPRMLRVIEDLARDWRRLDERIDALSDEIMTLARQDKGCERLMTVPGIGPIISSAMVAAIGSGDTFSKGRDFGAWLGLVPKQMSTGDRTILGSISRRGNRYLRTLFVQAAWVVLVKIKPEGWERYGLKSWIETAKQRLHRNVLAIALANKLARIAWAVLHKGRAFECVTNATASRPA

SEQ ID NO: 174472 - protein, 492 aa, unidentified
MPRKAKKQSVGRSIPSPRGARKSKHKTRRDPTRGLEVAHPNAAAIDVGASSHWVAAPKGGEVQVREFGCCTCDLEALVEWLGQCGVDTVVLEATGHYWVVLYDLLEEHRLAPVVVNPRYAKNMSGKKGDISDCRWMQKLHTYGLFANSFRPEEPIRKLRTYMRQRENLVGHLTQCIQYMQRALTEMNVQLANAISDISGETGLRIIDALLAGERDAAKLARLKHPRIQASFQDLEQALHGHWKDEWLFVLHQARANQLHYQGQLQQCELKIQQQMRLIQSRLPRVKAQLQAPNGKGGRAQLTAQGKPYPLEEEGFNLGAELERITGVDFSQVDGIGPITAQVLLSEIGTDMTRWPDERHFSSWLGLCPDHRITGGKILGRSTRPVVSRARNILRLAAQALEHSHSALGAKYRRLKSRLGPPKAIVAMAHHLACVVYRLIRYGKQYVDIGIAAYEQKYREQRIRWLQKAAKQVDMQLLSKNDLAKLLHLQATA

SEQ ID NO: 174473 - protein, 356 aa, unidentified
MQRKCLALPHTKAKRTIDPEAEALLAAIAGYRVRAAAMGRSIERVIAVYEAGWSGFWLARWLMSHGLEVHVVQPSSVPVDRRARRAKSDRIDSELLLRTLLAWLRGEPRVCSMVPVPDEADEDARRCVRERSELISERIGLTNRIGAILATLGVSDYNPLLRNRSRRLAELRTALGEPLPANAHAKIKHLLARLELVLTQIAELERERDAVMETEASDRASRMIQQLTTLRGIGVQSATVLVREAFVRCFANGKALGSYAGLASSPYSSGGIDREQGIGKAGNRRVRTVMVELAWLWTRYQPGVAQVCWFRERVGATGRRVRKVMAVALARKLLIALWRFVIDGVLPEGAVLKPAA

SEQ ID NO: 174474 - protein, 485 aa, unidentified
MALVLAVVLGLLILEVAMSRRKPKPTSPDPASLALLHTLHPHAAGIDVGAAELWVCVPPGAVASPHPAAALPAHVRRFGAFTADLYAIAAWLRQCQVTTVAMESTGVYWIPLYDLLESAGFQVLLVDPRQVQRAPNRPKTDVHDCQWIQRLHSLGLLTAAFRPEEQIRVWRSYQRHRASLIEDAGRHLQRIEKALEQMNVKLPEVVSDMTGLTGMSIVRAIVQGERDPKALAKLRDHRCKESAETIARALQGTWQPEHLFALQQSLELYDYYHQQIRECDRVIEAHLQGMALPEVPPLEPKKRVRRRKDNEATFDARQRLHHIAGVDLTAIEGIEESTALVVLSEIGTDMSRWPSEKHFGSWLGLAPNPQKSGGKVHSSATRPGVNRAAQALRLAAKNLQRSKSALGAFFRRIAARRGLAKAITATAYKLARIVYALLKHGTAYVAQGLAAYETAYRERVVRQVKRKAAELGLVVVERDAVGQPS

SEQ ID NO: 174475 - protein, 347 aa, unidentified
MLIIGCDFHPGFQQVAIFDKRTGEYQERALSHRAEAEQFYRALAGQAVRVGMEACGHYPWFERLLAECGHELWVGDAARIRAMEVRQQKTNRRDAKQLRTLLMEDRFPCIWVPTLEERDVRQLLVHRHKQVQARTRTKNQLHALALSQGVQRKRKLWTEVGRAELEKLELLPYAAVRRERLLAMLDRLEQEIQQLNRQVEEEVKQRPSAMKLMSHPGVGPVTALAMVLTLGPAERFTSGRQVGSYFGLIPSEHSSGEWQKLGHITKQGNSFLRFLLVEAGQSAARYDAELGRFYRRLAARKHRALAKVAVARKLALRLYLMLREDWTYAQLCKALVQASPSHSVVEG

SEQ ID NO: 174476 - protein, 324 aa, unidentified
MIDGILGIDVSKNALDVSMSSCNKIRARSFANSSDGWRNLMDWLIAQKIPRVHACLESTGRYSLGIAYALYEAGHVVSITNPAQIRDFARTKLGRNKTDGVDASHIREYCELFKPSPWEPPSQAHRRLGELQTIRAGIIAGLTEWKNRKNSGIVDVEAQALADATISHFTSQLGAVDEAITRTIDNDCDLRSKRELLLSISGVGETLAGVVLAELPGPEVLRSSAEVVAYAGLNPRQHQSGTSVVRATRISKIGNAVLRAALYMPALSAMRYNPAIVALVTRLKSQGRLKPKQIVVAAMRKLLVLCFGVLKTRRPFDAAIAMGS

SEQ ID NO: 174477 - protein, 357 aa, unidentified
MSNIHEKVDFTGEPINVGIDVHLKHWNVSLYHGQQYLRKFQQAADPLALIGHLNTHYPNAVFRLAYETGFSGFWAQRMFADAGMDCLVVNAADVPQTDKGYRTKNDVTDSRRIAAALSGGLLSSVHIPDPELESDRSVVRYRHRLGRDLTRAKARIKSFLHKFGIPIPIELQRSKWTKALLLWLKSVSLPYTSANLTLDRMIRQVEYFKLQILESSRELRTMIRSERYSQRALLLMSAPGIGALTALTILTEIGEISRFDTFYRFNSFIGLCPTEFSSGENQRTGPLTPRKHSMLRSLMIEAAWSAIRLDPAMLMAYNQYKKRMTGKRAIIRIARKMLSRVYYILQKKQSYEKGIVK

SEQ ID NO: 174478 - protein, 402 aa, unidentified
MNCVGIDVSKGKSTIAVMRPFGEVVVSPFEVRHTANELSELAGLLKSLDGETRVVMESTGNYHAPVAWLLHDAGLYVSVVNAMLVHDYGNNSLRRAKTDKKDAVKLANYGLDHWLTLPRYIPEEDTRLMLKICYRQYQQYSKVQTMLKNNLISLLDTTFPDANRLFTSPPRADGSEKWVDFVATFWHCECVCGRSEKAFTTQYQKWCRKHGYNFSEDKALDIYASACRHFGVIPKTDTAKLLVEQAISQLQTTSSALAALKQEMQSLAASLPEYPVVMGMFGVGPTLGPQLLAEIGDVRRFHSKKALVAFAGIDAPPYQSGQIDVRSRSISKRGSASLRRTLFLVMSVILQCAPIDEPVYQFMDKKRSEGKPYRVYMMASANKFLRIYYASVKAYLESLEHD

SEQ ID NO: 174479 - protein, 361 aa, unidentified
MASIALVRSDVIVGVDTHKDQHVAVALDGLGGRLGELFVPATAGGYATLLAWARDHGRVIAFGVEGTGSYGAGLASFLRRHAHKVIEVNRPARQADRRLAGKSDTIDAEHAAREVLAGNATNVPKTADGAIEAIRLIKIARDGAVKARSKAMITLKASLVTGGDELRAELEALTDHKLVLACAEFPDTLDDSADPAAAMRYLLGTLARRWLSLHDEIKVHFKLLERATAAAAPELVEAFGIGPDVAAEMLVTAGDNTDRVRSEAAFAKLCGACPIPAGSGNTNGRHRLYRGGNRQANAALYRTVIVRMRWHEPTIAYVKRRTAEGLSKKEIIRCLKRFVAREVFALLPEPAKHEIFQEIAA

SEQ ID NO: 174480 - protein, 422 aa, unidentified
MLEDTEEHEEIVERVAALDIGKAELVCCVRVPGEGGSGRRRQEVATYSTMTRSLQLLADRLLELGVTRVVMEATSDYWKPPFYLLEAHGLEVWLVNAKDVKHLPGRPKTDKLDAVWLCKVAERQMLRPSFVPPPPIRRLRDLTRYRIDLVGERTAEKQRVEKLLEDAQIKLSVVASDIFGVSGRDMMAALIAGERAPHVLAQLARTALRSKISRLEEAFTGRFDEHHAFLLAKMLARVDQIDADIADLDAKIGEQIAPFADAVAQLIEIPGIGVTAARVIIAEVGVDMSRFPTAGHLASWARFAPGVNESAGKKKGAGATGHGNRYLARALGEAAVAASRTDTFLGQRYRRLARRRGKKRAIVAVGRSILIVIWHLLSNPEAHFHDLGPDFYDKRTSSSRQMRNHITQLEALGYKVTLEPAA

SEQ ID NO: 174481 - protein, 315 aa, unidentified
MTQTNITTAGIDTSKLKLDIAIHGRAERWQVANALPGWRALAANLAKAGVTRVGIEATGGYERGVVEHLRAAGLTVLVLQPMQVKAFGRVHLRRAKNDTLDAVLIAACAATLDQPRIAPDPRLTELAGYLTFLEQAEEDIARFKTRLEHIDESQLRRLVTSDIKRLKARKAAQLRDIAKRLRVHDDLARRLDLVLSIPGIGERTALALIIRMPELGRISREEAAALAGLAPFDDDSGKYKGQRHIAGGRGRLRRSLFAAALPAAFRWNKALIDLYARLIAKGKVHNAALIACARKLLIYANTVVQRGTPWTEKAA

SEQ ID NO: 174482 - protein, 341 aa, unidentified
MQITTIGLDIAKNVFQVHGIDAAEKVVIRKQLRRGQVMKFFAALPPCLVGMEACATAHYWARELTKLGHEVRLMPAKDVKAYVKRNKNDAADAEATCEAVRRPTMRFVPVKSAEQQAQLMQHRARDLLIRQRTQVINALRAHLAELGITAAQGRDGIRDLLAIIADEADARLPIDARASLMVLAAQLQALQTLIGSIEKRIVARHRSSEASKRLQTIPGVGILGASAIATIVTEPKAFRSGRDFAAWVGLVPRQDSTGGKCKLGPISKQGDRYLRRILVVGAHAVLKRARLHPQKYPWLTQLLARRPFKVVAIALANKMARVAWALLAKGETYRMPRLAAV

SEQ ID NO: 174483 - protein, 381 aa, unidentified
MESICGRCAGLDVHKRSISACIRISEPEEKHTVTATFRTFTEDLHRLCDWLEEHKVRQVALESTGVFWIPVWNILERSEAKFELILINPQHVHALPGRKTDQNDCERIAELLQYGLLKASFIPPPAIRELRDVTRRRTHLQGERNRVLNRIRRLLETVNIKLGSVVSDINGKTARLILEQIAQGNCDPKALSKLAKASLKNKRTELIGSLNGFYSEHFRWLLAESVQELSYFDCRLEEVDKRLAKQLQPYADVMLRLCTIPGVDFTTAAVILAEIGLDMNRFADAAHLASWAGLCPGNNESGGKRHSGSTRKGNRYLRRVLTQSAWSLKRKKDCYLSALFWRVSSRGGSKKAALAVAHRILTIAYRIIRDGTVYEELGGNH

SEQ ID NO: 174484 - protein, 311 aa, unidentified
MAEHTIGVDISKSHLDVFDAERREAKRFENSISGFRAFEKWLGKLEIARVVYEPTGPYHRNFEERFCDKLPLIKVNPLQARRFVEACGTRAKTDALDARGLARMGIALDLQPDTPVAKTTRILKDLQVARTALIKERTRLNNRAHVLTHAVLKRQTKARLALVEKQIAELDKEIDTFIDTDKAIARRRQIVTSIPGLGSVASAAILTYLPEIGTLDRRQVGSLAGVVPYNRDSGQWKGKSFISGGRKPLRDALYMPALVAMRYNPDLKAKYEDLRAAGKPAKVAIVAIMRKLIETANALVKADRVWVPKNT

SEQ ID NO: 174485 - protein, 360 aa, unidentified
MAKAKTVHSSFVVGGVDTHKDLHVAAVVDQNNRILGSEFFSTTRQGYRQMLAWMASFGTVERIGVECTGSYGAGLLRYLQSVKIEVLEVTAPDKMERRKRGKSDTIDAESAAHAAFSRIRTVTPKTRSGMIEALRVLKVCRKTAVAARRIALQMIQMNIVSAPDELRDQIRHLTRMHLIRTLASWRPDVTAYRHVQDAYRIALKSLARRYLELHDEIADLDVMITSIVDELAPELIKRKAVGYECASQLLITAGDNPQRLNSESGFAALCGVSPVPVSSGKTNRHRLNRGGDRAANSALHIIAIGRLRTDVKTQEYVAKRVAEGHSKMEALRCLKRYISREVYTLLRNQNRQINSTQIMT

SEQ ID NO: 174486 - protein, 343 aa, unidentified
MSEITRVAIDTSKSVFTIHAVDARDRAVLRRNLRRSEVTEFFNKLPPLEVAIEACGASHHWGRSLQAMGHKVRLIPAQYVKPFVKRGKNDRNDAEAISEAAARPGMSTVAVKSATQQAAAMLLSVRELLVRQRTQLINALRGHAAEFGLVRPIGGKGLAGLRADIATDATLPAPAAEALAILGGEIDRIEARLAVADAKLLARHKATPESQMLAEVPGIGPISALNMVARVDFTQFKSGRHFAAWLGLTPRDHSTGGRQRLGGITRAGNEGLRQLLVLGATAVIRFAKPEHAKRARISAWLLALLERRPRKLCAVALANKMARIIWAMMTRGEAYRPPAPAQA

SEQ ID NO: 174487 - protein, 350 aa, unidentified
MKKFIIGIDFSKETVDASIVQKEQPETLIAYKKFRNNLKGVDGLIAWAKSKVAQDGEIIFCGENTGTYSTLFSDELADRGFIIWIEHSMNIVRGMGDVRGKDDKTDSLRIASYAARFYDKMKPYVRPKDETRVLKTLLAKRDRLKSFLKAEITNTKENPLMLQDSNIASSINEFFKRLEESLRKELKELERMILDVVMSSSEYAKNFNILTSMKGIGLINAVALIVYTDNFTKFNFNHRKIATYWGVVPFKNESGTSVRRGTHVSPKCNSWLKALLTEATLCAIRYNSRIKAYHDRLMARGKAIGIVLNNCKNKMLKILVAMVRDSKIYSDMDVSKDPHTTTTTSSIVVC

SEQ ID NO: 174488 - protein, 416 aa, unidentified
MNAAGIDVSSRKSTVAVLRPFGEVVRLPFDVAHDTEGLASLAEQLKSLDGETRVVLEHTGRYYEPVAKALHEAGLYVSAVNPLLIKEYGANSLRRVKTDKADAVKIARYALDNWTDLRDYTPMDTIRYDLKTLNRQFQLASKQRTACSNNLIALLEQSFPGVRKCFDSPVRNDGTQKWVDFAHTFWHVDCVRKQSLNAFCDRYRKWCKRHGYFFKHSNAEEVYALAKNAVVLVPKSKVTKVLVQEATNQLTSISRSVETYRAEMERLASMLPEYPVVMEMYGVGKSFGPQLMAEIGDVRRFERKQALVAFAGIDPMPNQSGDKNVRSNKSSKRGSPYLRKTLFNVMGIYLKCAPLDEPVFQFLDRKRSEGKPFYVYMTAASNKFLRRYYAKVRDYLATLENLPPVDLDSTGLQESN

SEQ ID NO: 174489 - protein, 309 aa, unidentified
MSTNNSIIYIGLDIGKDSLQVNLQNQNFPIPNTRPGHRKLMAQLKAVGQPLLVVCEATGGYEQAVVAACHAAAIAVAVVEPARVRHFAKACAVRAKTDRIDAALLTEFGRQTAPRAQAPLNPSTAALRELSRHRLHLQAMTQNVVQQSRHLTLSALRKQNAALLRQLRAHLQKLQKQIEALLQQDVALQTKAHRLQQVVGIGPKTIVSLLAEMPELGKLNRAQAAALAGVAPHARESGRWQGKRFIGGGRPLARKALYMAALVASRYNPTLKLRYQSLIARGKAPKVALVALMRHLIIHLNSLLKPLAV

SEQ ID NO: 174490 - protein, 342 aa, unidentified
MDHYAGIDVSLEYSSVCVVDANGKIVREGKVPSEPDGLISWFGSLGLELSRIGLEAGPLSQWLYAAMKQVGLVVELLETRHVRKAFEAMPVKSDRNDARGIAQLMRLGWFRPVHCKSIGAQETRAVLTSRKLVQSKLQDVENHLRGILRGFGLKVGKTTNLRFAPRIRELVANHASLEMIAKGLLSVHAVLLREFKAFEKQVRSMARQDAKARLLMSTPAVGPIVALTYASAIDDPGRFKSSKLVGAHFGLTPKKYQSGQTDYTGRISKIGDASVRTALYEAAHIMLTKPLKGCSGLKSWAMRLARRAGMSKAKVALARRLAVIMHRMLSDGTAFNAAAAAA

SEQ ID NO: 174491 - protein, 409 aa, unidentified
MRIIGLDIHRAFAEAVAWDDGKLRRLGRVDMRRDLLTAFAEQLLADDVVVVEATGNASAVVAVLAPHVKKVVIANPMQVRMIAHAKIKTDTIDAGVLAQLYASGFLPEVWVPDEPTQALRRQVTRRNQIVRQRSRLKNIIQSILHSHLIPSCPHADLCGTKGRAWLVEQVVPEDERLAIERHLREFDRLGEDLKVIERDLARSALADEGVKRLMTIPGVDMVVALAMTAAVGEVTRFDEPQKLVSYLGLNPSVRQSGPGPAHHGRITKQGRGHARGMLVEAAWAAARAPGPLRAFFLRVRARRGQHVAAVATARKLAVVIWHLLTKGESYVWGRPSLHAKKLRDLELKAGYKAARGQKGAAHAYNSKSHRDEERRWVEQAETAYARFVTGWNPQGPKKVRTGAATEVRR

SEQ ID NO: 174492 - protein, 344 aa, unidentified
MDHCAGLDVSVNETSVCIVDDSGRIIREVKVASEPGALLQVLKTGSYRFKRIGLEAGPLSQWLYSALAEASLPVICVETRHMRAVLKTQINKTDRNDARGIAQMMRAGLYRPVHVKTLRSQKLRMLLTHRKLLQSKAIAIENDLRGTLRNFGLKVGMVGTTKFEARIKELVENLPDLAALVEPLLVVRRVLREQLGILHRRLLVVVRDDEVCRRLMTIPGVGPVVALTYRATIDVPARFRNSRAVGAMLGLTPCKYQSGESGYTGGISKCGDEMMRVMLYEAAQILLTRTVKWSWLKAWAMKIARHRGMKKAIVALARRLAVIMHRIWVDGTEFRWTRQETAAA

SEQ ID NO: 174493 - protein, 444 aa, unidentified
MKSLPLLDSKAAAIDVGSEKLHVSIAGASPKVFTTFTTDLERLRQWFQEQEVRTVAMEATGVYWLYLYEVLEAAGLEVLVVNGRHVRNVPGRKTDMADCQWLATLHAHGLLRGGFVPTAEIRQLQDYQRLRADHIIGAAAQVQKMQQALERMNIKFHDVISDLTGVSGLKVVRAILKGERRPGELLALCDVQIQKKKSTAVKESLRGCWKKEQLFALRQALELWETYQQKIADCDRELESLLQQLAGPQDPEGGGGLIGPIRLTRGKELGKNAPVIERCQELLARICGGRDATQVPGLSMHMVLQLISEVGTDMTCWATEKHFTSWLGLAGGHNQSGKRKGSVKAHRNRAGRMFCAAARALAQSVDKALGGFYRRLRGRVGGLAANVALARKLAQLFYRLLRYGMDYVEQGLKTYEAKVLETEARLLRKLARKQGFTLIPSAPH

SEQ ID NO: 174494 - protein, 364 aa, unidentified
MQCVITNTELSSHEGTRCQFSGSRGSIKLGIDVHQDFYVVVEQVEGTNPKPAQRFAKEAFLHWAARLRQSGAKVYAVYEACGFGFTLQRQLSVLGIDTYVVCPQKLDERNKRVKTDGLDAKALCLKLDRFVQGNQEALALVRVPSEVEEQQRAIHRQREQLVKVRKQLEARGRSLMVNHGLEPVKNWWKERTFAALSVPSWMRQLLSHSQPILVALQEQITLLTVKLQSAAEPEQARGLGRLSSVVIDREIGDWQRFKNRRQIGSYTGLCPGEYSSGTTRLQTCVTKHGNPRLRAALVEAAWRLVRFQPNYKPVAKWRATLAKGALTTGAARKKAIVAVARQLAIDLWRIRTGRLTPAHLGLTI

SEQ ID NO: 174495 - protein, 387 aa, unidentified
MAQVDDLSRSLVTFDQQSTLVVIVEMSQTRWLIAGTVPGLDRRPLKKLEPNAPTLLHLVKRWADEATKAGRTITRIVLAYEAGRDGFWLARWLRARGIEAYIIHSTSVAVSREHRRAKTDRLDTEMLMRVFLGWLRGERRHCSMVAIPTLEEEDAKRPSRERESLVGERTRIINRMKATLARLGIRGFKPDLRKAPQRLDALRTPEGVPIPPNTYDEIRRDMARLAWIREQISAIEVARVKRLEQAPAQGPDAMVRLLARVIGVGIETADMLVREVLLRNLRDRRAIARYAGLTGSPNESGSKRRERGLAKTGNARVRRGLIQLAWRFLRFQKDSALVQWYRTRTQAPEGARKTTMITALARKVLIALWRMVITGTVPEGIVLRSAA

SEQ ID NO: 174496 - protein, 389 aa, unidentified
MKIYVGIDIAKLNHFAAAISSDGEIIIEPFKFTNDADGFQLLVSKLESFDKNSLIIGLESTAHYGDNLVRYLVTELYQVCVLNPIKTCQMRKNNVRKTKTDKVDTYVIAKTLMMQDNLRFVSFFDLDMMDLKALGRFRQKTIKQRTRLKIQLTTYVDQVFPEIQYFFKSGLHQHAVYALLKEAPSPKEIASMHMTHLANLLKVNSHGHFTKELAKELRVLAQKSVGANDSAISIQITQTIQQIELLDSQLEKIEAEMTDIMKFNDSVIMTIPGIGYINGGMILGEIGDIHRFSNPNKLLAFAGLDPSVYQSGNFQAKTTRMSKRGSRVLRYALVNAAWNVVRNNATFKAYYDAKRAEGRSHYNALGHCAGKLVRVIWKMLTDEVEFNLE

SEQ ID NO: 174497 - protein, 340 aa, unidentified
MSEITTIGLDLAKSVFQVHGIDERGAVVLRKRLRRAQVVTFFAGLGPCLVGVEACATAHYWARELRAVGHDVRLMPPQYVKAYVKRNKNDAADAEAICEAVRRPSMRFVPVKTREQQSVLLMHRGRELLVRQRTMLANALRGHLAEFGLIAAQGLHNVAGLIAIVRDDKDRRVPDIARQVLGILADQIETLSRRIATTEAQIMAWHKDNPISQRLATIPSIGPIIATAMVATIADPTEFRSGREFAAWLGLVPRQNSTGGKARLGGISKRGDSYLRRILINGAHAVLLRSKAAKLDPWLTSLRARKHRLVVAVALANKTARIAWAIMSKQDTYRHAVVAA

SEQ ID NO: 174498 - protein, 353 aa, unidentified
MNVNHYIGFDVHKKSISYCVKTADGTIVEEGTLQATHLALREWAEKRREPWHGAMEATLFSGWIYDTLKPYAVELQMGHPAMMKAIAASKKKNDKLDARKTADLVRCNLLPVCYVAPREIRELRRMLRYRNLVVAQAARMKNKMSGLLMEVGAEYNKQRLHGKGYFHELLDTIEEVPESVKDLLRLSRGALEMFQTTQWQLLDQLQKQPLLAKRVTVLMSIRGVGEVTALTWALEVGDPQRFPSVGDAVSYCGLTSALDSSADQQKRGPISKQRNAHLQTVLVEAAKLAPRWNPQLAAIHAREVQRGHRNRATLEVARKLVAYLLAVDKSGKPFEIRTTAATVEQHVQEVAAA

SEQ ID NO: 174499 - protein, 410 aa, unidentified
MKLFVGIDVSLKDFKARIFDVEGEEIAKRLRAKNDDPGAESFVKYLVEICSANDVDSLRIGLEATSVYGWHLQMHLAGEPALVPFHPQVYVFNPKVVANFRKQYVDIPKDDWFDCLVIADRLRFGRLPESCQVDFRYLPLQRLTRFRHHLIQTITREKNYFLTNLFFKFNTICQNKVLSDTFGAASEAILTEFLSPEEIAVRPLDELIDILMEKGKSHFSDPEATALKHAASCAYRLHGSLLEPVNLILATSLQTIRTLEQQVKGIDKAIEKELSHFKNTLQSMPGIGPVCAAGLIAEIGDIHRFDNEAALAKYAGLTWRKHQSGEFEADDTPLTKTGNAYLRSYFVLAANSVRIRDPKFAEFYHRKFKESTTHHHRRALVLTARKLVRVVDALLRSNQLYVPQGQRRVT

SEQ ID NO: 174500 - protein, 401 aa, unidentified
MSVSGAEVARPILLERGLLGWAEPILITGGRAVVHSTEVFVGIDVAKARNAVAIADGERGGEVRYLGEVDASAESMRRLVKRIAAKHGLVHFCYEAGPTGYGLYRLISALGYPCMVTAPSLIPRKPGDRVKTNRRDAVALAKLLRAGELTPVWVPDEGHEAIRDLVRARAAAVETVRVHRQQVSAFMLKHGRIFARKTAWGARHLRWLQEQRFDHPAHQIALQEMVEAVRISKERVERLEAAIEEFVPTWSLAPIVQALQALRGVELIVAVTFATEIGDMRRFDSPRQLMGYLGLVPSERSTGDTVRRGGITKAGNGRVRHMLVESAWTYRHPPRIGKAKLYRLEAVPPKVREIAWKAQTRLTARYRALSGRGKKTTVVCTAIARELVGFMWSVAREAQTA

SEQ ID NO: 174501 - protein, 427 aa, unidentified
MDDAVSEGEGFAGLIGIDWSDEKHDVVILDTKSGKRDQMVINHTPEALSDWVTGLGERFGGDPVAVCVEQAKGALVHHLMMYGFITIYPINPHAFSEYRKSMRVSGAKDDPSDAVLLLDYLEKHRDRLRAWEPEDESVRLLKILSRDRRKAVDQRTKLSNKLRATLKGYFPQALTWAGEGLSTPMGCDFLLKWPTLRDVQKASAQTVRKFYYGHKSREGHLIEERIRQIQDAKPLTTDKAIINGSVVVVKMLASQLRVLHGTIAEYDEMIKEIFAKQDDRDIFTSLPGAGPSLAPRLMSAMGTDRERYESSDDIQCMTGIAPVREQSGKTTFIHWRWACDKFTRQSFHEFANCSRQYCEWAGAFYQLQRDRGKGHHAAVRSLAFKWIRIIYRCWMDRVPYDDSRYLESLKTRGSSLCQYIDQAAQTG

SEQ ID NO: 174502 - protein, 411 aa, unidentified
MLAAQIHYVVGVDVAKRAHVYCLIERETGTVRVKSQTVAATAAGYDQLVVQLRSWGEPGSVLIGLEATGCLWEPLYEALSHAGYTVLVLNPRQTSAWSAALGLRAKTDGIDAHTLARGLCAGYGQASTVPSEAVQALRTLTRARADLVQTQTAAKQRVRDELVVLFPELPEQTPDGCDLFAPDMLRVLHAYPSATALAQVSIDALAADLETLTGGHWTKTHACALQALARQSSASTRAVVARGMVVRTMAQHLLDLRQRLAELEAAIAAVLAEDADGQRLQRVVGIGPVHAATLRAELGDIQRFSRVDQVVAYAGLDPRTHQSGSFVGQKHLSKRGPGSLRHTLYMATLALIQRCPTWQTRYARLLARGRAKKEALTILSRALLKVIYRFLLTGRVSDPTMLKSCSAPSTT

SEQ ID NO: 174503 - protein, 311 aa, unidentified
MYYIGIDVSKKDLSVFDGKDLNFINKEGLKSFKKYLKKKYRLSEIAIIFEPTGIYSFYLKEFCAGNSIKAYIINPKQSHNFARALGIRPKNDKIDARTLYKFHKLIEAKDIKVPKIDQQAKTLSGYLVSYEFALKQRISLSNHLESLRDKRLITLMKKDLKRAKMLEDKLFHDIKEYVSKNQNLREDYQRLLTISGVGEKTAIALLTLFKTYQGTNRAQITALAGLDPVKRESGSSVKYKVKISKNGKGIYRKIFYLPTVCATVHNQKIRVFYQRLLANHKPKKLAIIASMRKILLIAHAMYRDKTEYVTV

SEQ ID NO: 174504 - protein, 312 aa, unidentified
MKIICGVDVSKAKLDACIEPGAAFASFDNTPAGITELAAFCRQHQAELAVMEATGGYERPAFLLLWEAGMPCAMTNPRSVRLYAEAMGVLEKTDRIDASVIARFADAKNLQPTPAPTSAQQRMKALVARLRQVTDDLIVQKQRRSSLLDNAEILASLDEVITLLKRQSRTLEGEIASMIDDDPLWAHLSDTFRSIKGVADRTVAWLAADLPEIGTYSNKAIAKLVGVAPIANDSGKRRGKRPVRGGRAGVRSILFLVAATAARYDKSLGDFRDRLLAAGKEKMVVRIALARKLLVRLNAKARDARAQYANAT

SEQ ID NO: 174505 - protein, 425 aa, unidentified
MTTTDFAATIGLDWADQKHDLWLHPTDGSKAQHLRLEQTPEALHAWVAQLRGRFGRHPVAIGLETSRGAIISALMAYDFIVLFPVNPKALKDYRAAFAVSGAKDDRTDALLLEELVRLHRDKLHALEPDTELTRRLVGLVQNRRHLVDERTRLVNQLHSTLKTYYPLAEHLLGCDMNQPMAAEFLTRWPDLESLQKADAQTLRAFFYKHHSRGAQRMEERLRAIQQAQALTTDTAIVLPARLQVQALTALLKPLHRAIAQHDQAIQQAMDQHPDAAIFRSFPGAGPALAPRLLVAFGTQRQRFASSVEVAQFYGVAPVVQQSGNTKTVHMRYRCPKFGRQTFHENAACALRQESWALTYYVEHKHSHENHHHQACRALAFKLIRIYFACWRDRRPYDSNRYLAGLAKQGSPLHAKLKTAPKTLGE

SEQ ID NO: 174506 - protein, 430 aa, unidentified
MKSNTQNAKIESITDKTMVIGIDIGSETHYARAFTNRGIELSDKPFSFSNTESGFQEFKAWMEDLMKKNGMEAVAPGMEPTGHYWFNLGAFLQDSGIQPLHVNPYHVKQSKELDDNNPTKNDRKDPKVIAGLVNAGRYSKPYIPRDVYAEVRCLSNQRLQAQENLTRAKNRLARWFSIYFPEYKDVYSTPDAVSGIMILKKAPLPADIIALGVDGINQIWREAKLRGSGLKRAKTLISAAEHSIGSREAQEAARIEVAYLLDDIERYTKRVKDLIELLDQKLAEIPHVDKLLAVPGIGKRTVCGFIAEVGDIGRFDSPKQLQKLAGLSIVESSSGKHKGETHISYRGRKRLRYVLYEAALSVVARVPEFRAVHDYYTHRRQNPLKKMQSLIAISCKLIRLFYAILSKGIDYDGTKMLSDIRRPGGQIQAA

SEQ ID NO: 174507 - protein, 413 aa, unidentified
MESNRGVAGIDVHKKMLAVVIRRQSGTQVEYIKRQLGTMRVEIEHLAAWLQHEQVSEVVMESTAQYWRPVWYGLEGHFQLHLTHPLKTKAPRGRKRDFRDAQRLADRWVSGDLGESFIPGAEQRSWRWLTRARVHAKRKMGVIRCQVEGLLEQGGIKLTAVASDVFGASGWAMLEKIAKGETDVEAMVELACGALRQKRAKLREALRGRLEPIYQLLLRQHMDQVRLLRKQVDELNEALAVAMKDQVAVLCRLSKIPGVDLYAAQELLAEIGPRAAAFPSAEQFASWVGVCPGSHESAGVNYSRRSPKGNRYLRRLLMQTAWGAIHTKKTFYASLFQRLKTKIKPKGAAWAVAHRMASVIWLIMHEEVEYEERGQAAPNPRTLARKLRKLVREFKLQGIDVRALLDQTLEAHA

SEQ ID NO: 174508 - protein, 408 aa, unidentified
MRIIGLDIHRVFAEAVVWQHGKLKRLGRVDVRRDRLTAFAATLSKDDVVVVEATGNASAVAAVIGPHVKRVVIANPKQVRIIAHAKIKTDTIDAGGLAQLYASGFLPEVWVADEPTQALRRQVTRRNQIVRQRSRLKNIIQSILHAHLIPSCPHQDLCGSKGRAWLGEQVLPEDERLAVERHLREFDRLGDDLKVIERDLARSALADESVTRLMTIPGVDMVVALALMAAIGAVERFEAPQKLVSYLGLNPSVRQSGPGPAYHGRITKQGRGHARGMLVEAAWAAARAPGPLRAFFLRVRARRGQHVAAVATARKLAVLIWHLLRKGESYLWARPALHAKKVRDLELKAGHKPSRGQKGAAHAYNIRSHREQERRWVEQAETAYARFVAGWNPTGPKVRTGAAKEERR

SEQ ID NO: 174509 - protein, 353 aa, unidentified
MEQFIGCDAHKKFSLFIAMNQEGQYGKPMRIAHDRERMREFLEALPAGSRIGLETSGSYYWLVEEMQRAGHQVQLAHALTAKRRMEGRHKTDERDARGLAMLLRNGTLPQVWIPPAELRDQREMLRWRMSLVEARSRIKNRIHGALLRYNIQAKAADLYGMAGREELKDRLSELPEWTRQSVNEQLETVDHLDGQIEDCEKQLEALLDANAERDLLKTMPGVGKILSAVIALEIGDIGRFASAQNLASYAGLVPAARESAGKKRKGKCPADCNTYLKWAFIEAGNVVSLHYKQWPDRHVAQLYERVKQSSRMHGKATVAVGRHLAEASFWMLTKQEIYREPNTHRQALSSTHG

SEQ ID NO: 174510 - protein, 321 aa, unidentified
MNKNTVYFGIDVSKDVLDVYDHQGNFHQFSNSIRGFKKLLKMTSYSSICVMESTGYYHVRLAYFLLENGVGVCVENPLKIKRYIQMNLSKIKTDKSDAKQIYNYALSQSPSLWKGESKVQQECLQIVRLLSVYTKQRTQLKNKIHGEEVLGIPSKFVLRSLKKQLKSLNKEVVSLEELLTLKVKEEHQKELSLLTSIPSIGSKTALALIVFTDGFQRFDSAKELCSYAGITPIIRESGSSIKGKPRISKIGNTKLRNLLFMCSFNAYKYNKACKALYQRLVAKGKSKKLALIAVCNKLLKQAFAIVKSGLPYDENFVSKLS

SEQ ID NO: 174511 - protein, 389 aa, unidentified
MKIYVGIDIAKLNHFAAAISSDGEIIIEPFKFTNDADGFQLLVSKLESFDKNSLIIGLESTAHYGDNLVRYLVTELYQVCVLNPIKTCQMRKNNIRKTKTDKVDTYVIAKTLMMQDNLRFVSFFDLDMMDLKALGRFRQKTIKQRTRLKIQLTTYVDQVFPEIQYFFKSGLHQHAVYALLKEAPSPKEIASMHMTHLANLLKVNSHGHFTKEQAKELRILAQKSVGANDSAISIQITQTIQQIELLDSQLEKIEAEMTDIMKFNDSVIMTIPGIGYINGGMILGEIGDIHRFSNPNKLLAFAGLDPSVYQSGNFQAKTTRMSKRGSRVLRYALVNAAWNVVRNNATFKAYYDAKRAEGRSHYNALGHCSGKLVRVIWKMLTDNVEFNLK

SEQ ID NO: 174512 - protein, 391 aa, unidentified
MRRVAGRAATRRDSKISQSAADRTATADDRSIVPGSPKTEQKQDRRRSLGISPNSRRSRRRPRADTSSHPQDWDPSMHRVTHFVGIDIAKHSLEVAFRPTGQQLKLAYDTAGLQQLLRTLPEPETCLVVVEATGGYQRRVVTELLTAGHLVAVANPRQVHDFARAHNILAKTDSIDARIIARFGEEVELRLVSKRSGKHEELAQLVARRRQLVDHRASEKNHRETISSKTVKKSVQHVIDVLTKEIARLDKQLLALVESDDDWNQTAEIVSSVPGVGPVVSATLVADLPELGDLNRQEISALVGLAPFNRDSGRSSGKRSIWGGRKNVRKALYMAARTACRCNPVIKAFAHRLRKRGKPYKVMITACMRKLLVILNRMVHTQTPWTPAGVH

SEQ ID NO: 174513 - protein, 349 aa, unidentified
MEKTTTIAVDLAKSVSEVPGRVSERKRLNRGGLAAFFANRPPAVVLMEACGSAHHWGRELTKLGHDVRLLPPARTARYRIGNKTDRADADALLEANRNEKILPVPVKTIPQQTLSSVHRLRLAWMATRTARLNALRGLTRELGVAIPVGAKAVLPQVTEAMAQGRVPEDLHPLLLASVAEILKLEENVKECDRLLARLARSIPVARALQEIPGIGPLGSTALIPAVGDPHRFRSGRKMSAFFGLVPREHSSGNRRRLGSITKRGNTYVRTLLIHGGRSVLLAAHRRKNPDRLHRWALEVERRQGRNRAAVALANKLIRIAWAVWARGTRYDGALTVPSAGSTPQTTRTF

SEQ ID NO: 174514 - protein, 346 aa, unidentified
MNQIIRIGMDTSKHIFQLHGVDAAEQPVLRKRLRRKEVVTFFAGLAPTVIGIEACGASHYWARELEQLGHEVKLIAPQLVKPYVTRNKNDGRDAEALCEAMSRPRMRFVPVKTAEQQTALMLAGMRERLIARRTQLSNAIRGYAAEFGLAAARGLDKIEPLLARISQDESLPALTRELFAIQGRDYAQLQVELKAIEVRLLAWHRADTCSRRLAQIPGVGPIGATALVMKTPDPRAFLSGRHFAAWIGLTPKDHSTGGKTRLGKITRAGDEVLRSLLVAGATAVIQQVRRGRGHPSRWLLALLKRKPPKLAAVALANKIARIAWKLMTTGEDYDGARMSGVSAFAA

SEQ ID NO: 174515 - protein, 314 aa, unidentified
MKMAMLSFCGIDVSKDRLDVVVLPEGWFFSVSNDTAGWAELVVRLRPLTVSAIGLEPSGGYERGIIRALLAAGMSVRRINPNKLRQFARARGVLAKNDRLDARLIAEYVAIMPTRVVQRDAAVERLAEIVTMRRQLCDEHVAAENQAAHLEDAMLRRLSKRRQTRLEADIRLLDKRLAEMVAANGALAQRYELLTSMPGVGPVLAFTLIALLPELGKMTRKQIAALVGLAPYDFDSGKLKGHRSIYGGRMPVRNVLYMAALSASRYSPALKAFHKRLADADKKSKVIIVAVMRKMITTLNAMLRDNAAWQPQSA

SEQ ID NO: 174516 - protein, 350 aa, unidentified
MLIIGCDYHPSFQQIAFVDTETGEFQEQRLSHREEAERFYRDLAAQGMKGRVGMEASGHARWFERLLAELKVELWRGDAAKIQAKRVRKKKTDREDAQHILQLMLKDDFPQIWVPSWDNRDLRQLLWHRHRMVQMRTRIMNQLQAVALNEGLRCKKRLWGERGRQQLESIGLAPWASRRRRDLLELLDRLTPTIAELTKQIEQEVEKYPAAQRLMTHPGVGALTALAYVLIIGEPERFECGKQIAAYLGLVPEEDSSGERRRLGHISKQGSGLMRFLLVEAAQVTVRSDPEWRSKFFHLALRRGRKIAKVAMARRLAVRMYWMWRQQWDYEQLKKFGPHAGQPGTAHGVK

SEQ ID NO: 174517 - protein, 500 aa, unidentified
MSSELVYVGLDVAKATLDVALRPSGESWQTANDDAGVADLVARLRALTPTLIVCEATGGFERPAVAACAAVGLPIVVANPRQVRDFARSTGQLAKTDALDAAILALFAERVRPTPRPLPSDAAQLLDALLTRRRQLLEMLVAEKNRLGFAPRPLHRGIRQHIRWLERQLDDVTGELAALIEASPVWQAKSDLLQSVPGIGPIVSAVLLGELPELGALSHKQIATLAGVAPLARDSGTLRGKRMVWGGRGGVRTALYLAALCGRRWNPQLRVFYERLRAAGKPKKVALIACARKLLTILNAMVRDQARWAIPTSGIQYSCLRIAPKLRRHTVHCTNAMLPQTTGAASFRRMLGGHVGYAELRPLNDCLTRRRHHPSVKSRRRFVMFSARIPAAECRRHPAKRSTQRLHGSAYSASVAGRCRRAPAARRSARSVVVELMAEYADEALPSQPLLLAQRAAHVGEHEQLMGQPSLAKRPAPQLPVPLPRTSRKRDLEHAGRIAR

SEQ ID NO: 174518 - protein, 447 aa, unidentified
MQRRTVGIDLAISAVQVAQIFDDGVPVGKPLRFRLTANDLKQFVDAVVRDVPLGVPIVAVMEPTGMAWFPVASWLEGVGVRVIRVKGQRVKALRQYLSEHAKTDLADAHVLGALPSFGYRSLDPVHVPSPQHHALQRLTKQRHRYQELICSSRRRILDLIRWACPELEPVLPDTTTRLTLAILADFFDPHRVLKTRRDTLARFIADNASGNHPHSGPFVDDLVKSLKETARKTIALHADRLDFQALQFEVRQEVEMLRLLSQNIAELEKRSELLYEQVHPSDALRSIPGIGITLAPLLAGVIARTERFRNERQIRGFCGLFPKKNSSGGIERPGQRITKSGSDRIKRALFLAADTARKIDPDLAAVYWRLMVKKGHHHKQAICAVATRLVNRIYKTMKTGQRYILRGPNGQEISVAEAKRIVRDQFTVPEEIRRARRRHVEIAPSPA

SEQ ID NO: 174519 - protein, 310 aa, unidentified
MEITVGIDVSKARLDVHLHPLGEHFVVDNDEAGVAGLCVRLLGLKGVQTVGLEASGRYERLAVAALADAGLPVMVLNPAQVRAYAQAIGQRGKTDPLDARLIALFLEATRPEPRPLPDAATQELAALMARRRQLVGMLVAERARYKQAGPGVVRVSLLRIITSIEDALKELDRDIDTHVRGTPVWREREDLLASVPGIGKTISRTLLAELPELGRLNPRQIAALAGLAPFTRQSGKWRGRSFIAGGRAPVRAALFMGAMVACRHNPVLKAFKDRLVQAGKPKLVAIIAVARKLLTILNAIIRDQKPWTTT

SEQ ID NO: 174520 - protein, 411 aa, unidentified
MDVVVACCAGLDVHQASVVACVNSTGRGGRSHKEVRTFGTMRDDLIALRDWLKHAGVTQVVMESTGVYWKPVYAALEDDFDTIVANAQHIKNVPGRKTDVKDCEWSSDLLRHGLIRRGFVPPREIRDLRELNRYRRKLAQVQAGERNRLIKVLETAGIKLAGVASDVFGVSGRAMLRALIEGEDTPEAMAGLARGKLRGKRTPLARALDAPLQPHQRFILRTQLARIEQAETDLQRLDTTLKQMIAPYDRQMRLLMSIPGVDWITAVTIIAEIGVDMSAFVSAAHLASWAGLCPGNNESAGKRRSGKSRKGNVFLKTALITAAITGSRRGGGSYLGEKYRRLSARRGKLRAAVAIAHKILISIWHMLSDGTFYQDLGAAYFDRLDRTRTARKLVGRLAAMGFDVQLQEKAA

SEQ ID NO: 174521 - protein, 377 aa, unidentified
MGKSRAKSSSKASKKKSLDSLKPINLNAAGIDIGADSHWVSVPPDRDEQNVREFRCYTADIYALADWLKQCQVETVVMESTGVYWIPVFQILETRGFEVLLVNSHHVKTVPGRKSDVLDCQWLQQLHSYGLLAGSFRPRDEICVLRSYIRHRDNLIRSAGTHVQRMQKALTQMNLQLHRVISDITGKTGLKIIRAMLAGERNPETLASLKDGRIRRTSEEIAAALTGDYRAEHLFVLQQELQLYEMYQQQIAQCDQEIETYLTNLDSQVELEKVEGEKKLPPTKKYSSNTPAFDLGGHLHRISGVDFTRIDGLGVLTVQTILSEVGLDPSRFPTVKHFTSWLGLCPGSRVSGGKVKSSQTRQVVNRAANSFRMALML

SEQ ID NO: 174522 - protein, 363 aa, unidentified
MARTSLWIGIDAGADEMSMCATDDRGAVMFEHCCVTKAKAVHELLKRERRRIELIGLESGSSGTGLTRALRKLGYPVAVFEARQASKFLSIRRNKTDKNDAKGLADLARLARESVSEVRVKSPECQRMRSTLIMRQKLVQLRVTMEGALRSLISLNGGKLKSSSSARSFEKNVRSEIDRLRKVEKVDLREDTAPLIALSVATRGYVEMLDNRLRREADANAVCRRFMDIPGVGPLTALSLVSAIEDPHRFRRSADVGAYFGLVPTVRESGQLRTKRRISKAGDKLTRTLLATAAQQHMRWADTAISTWAKGLSSRLQKKGVQTAVARKLAVTMVAMWKAEKAYEPYPNLGRGRVITADTNLAS

SEQ ID NO: 174523 - protein, 413 aa, unidentified
MDVILERCAGLDVHQATVAVAVRLPGPGKARTQLIQTFGTTTPDLLTLRDWLSAHGVTHFALESTGVYWKSVYYLLEDAFTVLLVNASHMKNVPGRKTDVQDCAWIAQLLEHGLLRGSFVPPPPIHELRDLTRYRKALIQDRTREANRLHKVLEDAGIKLATVATDVLGVSGRAMLAALVGGTTDPAVLAELARGRLRAKLPALRQALTGRFRARHAFLIAQILAHLDYLEETIATLSAEIAAQLAPFAAAVTRLRTIPGVDQRTAEVVVAEIGVDMSRFPTANHVVSWAGLCPGNSESAGKRHRGTTRKGCKWLRATLIEAALGAIRKKDCVLGARYRRIMRRRGHKIAVVAIARTLLEIAYLLLARETTYQELGADFFDRRDKERATHRYVRLLQQLGHHVTLESTTPIVA

SEQ ID NO: 174524 - protein, 333 aa, unidentified
MVEGTEGSHHKEGTTKMAKHSMVCAGIDTGKHKLDVALDQGPEQLQVDNSPDGHKSLAAWLRQRLVRRIGIEASGGYEQAAVAALRRDGFSVILFQPAQVRAYAKFILQLAKNDKIDAALIAACTAATKTIREPPDPRLAALAGHLTMIEQITEDIARLKTRRESCRDERIRQCWKEQITRLRALARSEFKQLLAAIREHRDLAERLDLMASVEGVGLKTAVDVLIRMPEIGSLSREAAAALAGLAPYDDDSGTRTGERHISGGRERLRTSLYAAALPAAFKWNPQLIALYRRLIAKGKSHKKALVACARKLLIFLNTVVARGTPWDSNPAEV

SEQ ID NO: 174525 - protein, 267 aa, unidentified
MYKYIGIDISKATLDVYDGDKSYKVSNDLSGFKEIMRLASKKEELCLIFEPTGIYSHDLILYCQKHQIKATIVGSKEARDYARSIKQRSKTDKIDAKVLHHYHRQIDTKDITVPFLDTAMRTITQRRNVYEKYQQMIRQLKNLIEATDKTDKLLLASLKKQIKSLEKASQTLLEKIEETLLTDQENQTAITHLQTIPGVAKKSALVILMEILRYPNAKSNEFVALMGLDPVLKDSGIFKGKSRIIQTGRKILKRKALYVYSSSDTTQ

SEQ ID NO: 174526 - protein, 411 aa, unidentified
MELLHARCAALDIGKKELKVCVRLPPAAGRRARHQEIRTFATTTQALLGLRDWLVEQQVSLVVMEATSDYWRSPFYLLEDALNVILVNAAHAKGLPGRKTDVADAAWLCQLGECGLLKASFVPPEPIRQLRDLTRYRAALAAERTREANRLEKELEDAGIKLSTVASDILGVSGRAMLSALIEGERDVHVLAELAKTRMRTRIPDLVAALEGNFREHHAFLCRIHLERIDQITASILQLSMRIEEAMRPFARQLELLETIPGVGRSTAQVIIAETGADMTRFRTAGHLASWAGTTPGHRESAGKRKPAATRHGNRWLAASLGTTALAAARTKDTYLGTRYRRLIARTGKKKALVALQHSILIAVWHMLTHDIAYHDLGPAHFDQLNPERAKHRALAQLHRLGYHVELTPAA

SEQ ID NO: 174527 - protein, 343 aa, unidentified
MVHYIGLDVSLKKTSICVVNQAGSVVREGVVDSEPEAIAAFVRSKSPGAIRIGLETGPTATWLWTELKQLGLPVICIDARHAKAVLKMQINKSDRNDAAGIARIMQTGWFKEVRVKDLDSHSVRALLASRALLVKIKRDLENQIRGLLKNVGLVIGRAKFNVFAVRAEELIEDRPELIAVVGPLLKARKAIEQQTDDLDRKVLKLARYDAQVRRFMTVPGVGPITALCFKATIDDPTRFKRSRSVGAYVGLTTRRHASGEIDWTGRISKCGDAMLRSYLFEAAGVLLTRVPKWSALKAWGMRLAKRNGLRKAKVAVARKLAVILHRMWIDGTEFNWSKKEIAA

SEQ ID NO: 174528 - protein, 345 aa, unidentified
MEHFAGLDVSVNETSVCIVDDTGRIVREAKVASEPEALLAALKNRAYHFKRIGLEAGPLSQWLFSALAEAGLPVICVETRHMKAVLKAQINKTDRNDARGIAQMMRAGLYRPVHVKTLRSQKLRMLLTHRKLLQSKAIAIENDLRGTLRNFGLKVGVVGKVKFEARIHELVENLPDLAVLVEPMLTVRRVLREQIVILHRRVLAIVRDDEVCRRLMTTPGVGPVVALTYRATVDVPARFRKSKSVGAVFGLTCAKYQSGELDWSGRISRCGDEMMRSMLYEAAQSMLVHSKKWSWLKAWAMQIARRRGMKKAIVALARRLAVIMHRIWVDGTEFRWTREQAAAAA

SEQ ID NO: 174529 - protein, 407 aa, unidentified
MSNEPHNVVGIDVSKGKSTIAVMRPFGEIVIPPFEVTHTSSDLKMLADTLMKLDGETRVVMEYTGKYYQPIARYLYESGLYVSVVHAKIIHDFANNSIRRIKTDKADAVKIANYGLSNWEVLPPYSKEDDTRLILKTLNRQYNHLMNQYVVARNVLISIADQVCPGLNEVFTNPRKADGRIKWAEVFQRFWHCEYITSFSRNKFISTYNEWCTKNGFRGSDEKATEIYLLAKECVPTLPKSEYTKRLVQQATAEVITLSAAMASVHREMLSIAQTLPEYPAVLSINGIGETLGPQLMAEIGDVRRFSKRSNITAFAGVDAPPFQSGKFDSKSRRISKRGSCELRKQLFQVVRIIVQLNLYDDPVYQFVMRKKAEGKPYYVYMVAGCNKLLRIYYARVKEYLASENAV

SEQ ID NO: 174530 - protein, 343 aa, unidentified
MQTVTTIGFDIAKSVFQVHGVDAAGQVVVRRQLKRRQVIALFQKLRPCLVGIEACASSHYWSRELQALGHNVRLMPPAYVRPYVKRQKNDMADAEAICEAVTRANMRFVPTKTPEQQSGLMLHRTRHLFMRQQTSVINAIGAHLAEFGIVAPVGRRGVEELLRVVADANDKRVPEVVRTCLAALGSQLLSLKQQILDFDRMIMAWHRSNQTSKRLNCIPGVGPLLATALVASVADPKTFRSGRNFSAWIGLVPKQRSSGGREKLGSISKQGDRYLRSLFVTGALAVIRYAKIHGAKHRPWLTALLARRPTKVAAIALANKLARMAWAMMATGARYNYPASLRV

SEQ ID NO: 174531 - protein, 319 aa, unidentified
MAQIAFVVGIDVSKAWLDCYRHPDRLQVRVSNDADGWAALRRWLGDEPIRCVGLEASGGYERGVAEQLIAAGFTVRVLDPVRVRYFARALGRRAKNDRIDARVIAEFLATCEGNGSTTLPDKDRRRLAELLGFRQVLLDNRNGLANVAEHLRERRIAALAARRIAQFERDVAALERDIADTIAANPQFAHAAQLLLSAKGVGLILTATLIARLPELGTLSRRQIAALVGVAPYDHDSGDTTGRRQIQGGRAAVRRVLYMATMGAATRSNPALKAFYQRLRKLGKLPKVALVACMRKLLTILNAMLAHGTPWRDTTSAAA

SEQ ID NO: 174532 - protein, 410 aa, unidentified
MDAIRECCAGLDVHNKTVVACILNGPLDHTPQKQISTFGTTTRELLRLQDWLIANRCQEVAMESTGVLWKPVWNVLESTCNIVLANARTIKNIPGRKTDMNDAFWIAKLHRCGLVQASVVLPEQLRDLRDWTRYRVKMVQAITAEKNRIHKLLQDGNIKLSSFITDVFGVSGRLLLEQLMNGEVLDEEQLRGLVKTKLKKKVPELMEALNGRVRRHHREMMRLHWDHLLYLEKQIEQVEARIEGKLAPYAEELEWLDSIPGIERNTAAAIFAELGPEVHQRFETEEQLTSWAGVSPGNKESAGRKSKTKCLPGNKFLKRALTQAAWANEKSSNRIGQHFRRVRKRRGDKKACVATAHLLVKIIYSLMKNRSGYEEKDVPESTSKEKALAYYLKQIEKLGLTVQVTSPEMS

SEQ ID NO: 174533 - protein, 402 aa, unidentified
MNAVGIDVSKSKSVVAIMRPFGEIVSTPFEIKHTASDIHSLIELINSVEGESRIVMEHTGRYYEVLAHQLLEANLFVSAINPKLIKDFDNDSLRKVKSDKADAVKIARYALDKWQNLKQYNVMDELRNQLKTMNRQFGFYMKHKTAMKNNLIGILDQTYPGVNTYFDSPARSDGSQKWVDFASTYWHVDCVRKMSLNAFIDHYQNWCKRKKYNFSQSKAEEIYGKAKELVPVLPKDAITKLIIKQAVDQLNSASTTVESLRTLMNETASKLPEYPVVMAMKGVGTSLGSQLMAEIGDVSRFTHKSAITAFAGVDPGVNESGTYEQKSVPTSKRGSADLRKTLFQVMDVLIKTHPEDDPVYQFLDKKRAQGKPYYVYMTAGANKFLRIYYGRVKEYLASLPES

SEQ ID NO: 174534 - protein, 258 aa, unidentified
MSPIFIGIDVSKARLDVAIRPSGQTESVSNDTAGIEALVKRLSESRPALIVLEATGGVERSVTRALASAELPVVVVNPRQIRDFAKATGQLAKTDGIDALVLARFAEAVRPAIRPLPDEVSFELRALIARRRQITQMIVAERNRLSGASKAVRKRIEAHIRWLESELDRADKDLDQSIRQSPIWQENQDLLKSVPGIGPVISRTLLAELPELGHLNRKQIAALVGIAPLNRDSGTLRGRRTIWGGRASVRAVLYMAAW

SEQ ID NO: 174535 - protein, 402 aa, unidentified
MRNIKIRFTVSTLLPQIIHNNAKRMKGTSPSRGGGGEGARQRSAKMVFASSVNRTRKGKSMNKSITVGIDLAKNVFAVYGVDEAGKPALVKPKVAREQLHELIAQRPPCIIGMEACSGAHHWARQFRAHGHTVRLMAPKFVTPYRMSGKRGKNDAADAAAICEAVMRPAMRFVPVKEEHPQIILCLHRTRNGFVEERTATYNRLRGLVSEFGIVLPLKVTGLRRTIGDHLEELPGYANQCVGDLLAHADRLDERVAEYDRLITQAARADTRSKRLMERPGMGPVTASALLASIGGGHDFKNGRQVAAWIGLTPGQYSSGGKTRLGRITKAGDPYLRSLLVMGARAILSGLGDKRDGFSRWARTLQARRGYWRAVVAIAAKNARLAWAVLRYGEDFRLKPDMT

SEQ ID NO: 174536 - protein, 485 aa, unidentified
MAKRRMSTFERLESGRLNRKQRRELGRQVAVADPGLTIVHANAGGIDVGNESHYVAVPPDRDPNPVREFGCWTAALNQIAEWLQSCRIDTVAMQATGVYWIALYDVLEQHGIQVVLANAQHTKNVPGRKTDVQECQWLMKLHTYGLLRDSFRLAQEMESVRTIWRLRDRHVKEAGRAVQHMQKALTKMNIQLANVISDINGLSGQEIIAAILQGERDPWKLADLKHYRVRASREEVARSLEGNWREDVLFELQQAVDSYHFAHRQMQECDRKLEGYLASLPARMLDVPVQPEDTQATTPKKKTKKAKRPSGNQPHLDLKTELKRICGVDLTSIDGIDVMTALTIVSEIGTDVSRFQDETHFASWLGLTPAKDITGGKTIGRGKRKVKNRVAVALRTAATTLLKSDSYLGARYRSLRRKLPSFASAVKAMGRYLAVLIHRLLTKGEAWVDRGATQFERRHTEQELASLSFKARAKGFKLIPITEAS

SEQ ID NO: 174537 - protein, 338 aa, unidentified
MTIHTLGVDIAKNVFQLHGVDRSGAVVLKRRVMRDSLMQVIAQMAPCTIAIEACTGAFYWQRRFEEHGHAVKIISPQYVKPFVRRQKNDGNDAEAICTAARQPHMRFVPKKTIEQQDIQTLHRARQRLVNHRTAVVSQIRGMLLDRGIAIGVSITRARRAIPEILTGQHPELTDLAREAISELYDLFCDLDRRIRSFDRKIDRVFETSEPCQRMARIKGVGPKTATAMVAAIGDGSEFRNGRHLAAWLGLVPSQHSSGDRRVLMGISKRGSQPLRAMIVHGARAVVRTAPGKTDPANQWVNQLRERRGFHRTTVAVANKTARIIWAVLRTGEPYRVAA

SEQ ID NO: 174538 - protein, 340 aa, unidentified
MNIKRIGLDLAKNIFQIHAVDHHEHVVLRKTLRRDRMTAFFSQLSPCLIGIEACGAAHYWARELTRMGHTVRIIPPQRVKSYLKGQKNDANDAEAICEAISRPGMRFVAMKTERQQTLQAEHRVRARLVRARTALSNEMRGLLGEFGLVLPVGIRQLRKALPEILSQQELWDDRFIRLLSELAEELQMLDERVARHDRRLEQSVRDDIRIKRLLAIEGMGPVVASALVAAVGDGRQFKSGREMAAYLGLVPRQHSSGGKARLGSISKRGDSYLRTLIIHGARAVLNACQNKTDRRSQWLKALSERRNRNIATVALANKNARIAWAILSREEDYHGLQAAG

SEQ ID NO: 174539 - protein, 361 aa, unidentified
MAKSTTIVAFDQHAATTVAAVLLPGQRTPALHTLTSDSPTILRFVQRLRATSVQCCYEAGPCGFELQRALTGHDIPCEVIAPTLIPRRAGDRVKTDRRDARQLAVLYRAGALTVIHIPSEQEEAARDLLRCREDIRADLLRARHRLSKFLLRHGRRFTGTKKAWTARHAAWLQAQRWPIAALEHTHRAYGRAVDEAVGRLHAVDAELRDLLTIEPLRARVERLRCFRGIDDLTALTIAAELGDARRFPSAPRVMAFTGLVPSEYSSGAKQARGRITKTGNAHLRRGLVESAWQYRHHPFLGRALRLRQRGAPAAIIEQAWHAQHRLHRRDRRLAARGKAKQHIVTAVARELSGFLWAALTH

SEQ ID NO: 174540 - protein, 342 aa, unidentified
METFYGGIDLHAKNGQACVIDEKGVKVAEKKLENELPCIREFFEPFGPEVQIAIESTVNWYWLVDGLIDAGYDVKLAHPFGLKLITEVKVKTDRRDAYKLANLLRLNALPEAHIYPKETRPLRDLLRRRADLVVERTRCYLGLRMQFLQYNTNTMSQSALKRFDDEDLNLLELPEVVKMNGSLALRRIELLNSQIDHIERYLETVTTADPHFGLLTDITGIGRVLGLTIYYEIGDIRRFENVRRFSSYCRLVPGTHQSSDKIKRGKGSKQGNRYLKCAFTQAAMHAARYDKDIRAYRDRRANKTSGSNKNMKANAILAHKLGMAVFHILKDGVPFKKELLFG

SEQ ID NO: 174541 - protein, 458 aa, unidentified
MRIIGIDLATTAQHRAIVVDGRSEFITPLLKFETRLADLERLRDRALRGAKPDEELVVVMEATDINWYPIAVYFCQRGTRVHVVNPRMSADLARFYKRHAQSDRLSAKILARLPLVSPESLYPLVLSSADHLALQRTCEELDRLTVRISAHKNRLQAIDRLAWPGLKARVFKTPNSPLGRWFREQFYEPQQVLAAGVAGLRQAWRAAGCYDEDESWIEPLLELAEELLQLYGSQGTYLDYAALAGEVQREQHRLAEVEADARHVRLRLMRPRYRRLHASRHLETMPGVGQDGAAVYVGFVGTSSRFANGRSFRGWSGMVPRSRQSGESESKGLKISQAGPDLIKKYAYLDADSARHRDPQIAAIYYDQMVNRGQHHTQAVCACATHLLDRVRVILTEDRAYELRDVDGSPVTPEQAEAIIAERYTVPKEVRERNNRRARRERAEEKSERKDERRSRAR

SEQ ID NO: 174542 - protein, 339 aa, unidentified
MGEVSTIGLDLAKSVFQVHGATASGGVVLRRRLRRDELLRFFAKQPKAVVAMEACASAHYWAREISALGHDVRLIPPAYVKPFVKRQKNDAADAEAICEAAQRPTMRFVEPKSAEAQACAVVFRARDLLIRQRTQLINAIRGHLAEFGFIARKGPFHVEGLIDRLDDPDLPPEARPALDALVEALRALQVRIGALDGEIAKRAKADATARRLMTIPGIGPVAATALVALAPAASTFRRGRDFAAWLGLTPLQHSSGGKERLGRTSKRGERSLRRLLILGASAVARIAALDSARATPWLAGMLARKPRMLVTVALANKTARVVWALMAHGGVYRAPAAAA

SEQ ID NO: 174543 - protein, 365 aa, unidentified
MPRIAEQALPVTGGVDTHADMHVAAVVDQVGRVLGTEVFPAAEAGYRAALAWMRSRGELAKVGVEGTGSYGAGLARYLAARGVEVVEVIRPNRQARRRRGKSDAADAVAAALAALNGEAAGVPKSRDGAAESIRMLRVARCGAVKARTQAGNQLRDLIVTAPEQVRQQLAGLTRERQVQTAARFRPRGLAGPAEGARAAMASVARRHQALTTEIARLDVALGQLVRHAAPPRFLAKPGVAIQVASTLVVTVGDNPGRVRREASFAALCGASPVDASSGKQLRHRLNRGGDRQANSALWRIVVTRMAHDHRTQAYVARRTTEGKTKREIIRCLKRYVAREVYKALTSPARAATAGPKQDTLAQFLT

SEQ ID NO: 174544 - protein, 402 aa, unidentified
MNAVGIDVSKGKSMVAIMRPFGEIVSTPFEIKHTSSDINSLVKLIKSIEGESRIVMEHTGRYYEVLAHQLSEANLFVSAINPKLIKDFDNDSLRKVKTDKADSVKIARYALDKWQNLKQYSVMDELRNQLKTMNRQFGFYMKHKTAMKNNLIGILDQTYPGVNTYFDSPARSDGSQKWVDFASTYWHVYCVRKMSINAFIDHYENWCKRKKYNFSKSKAEEIYGKAKELVPVLPKDDITKLIIKQAVDQLNSASITVESLRTLMNETASKLPEYPVVMAMKGVGTSLGPQLMAEIGDVSRFTHKGAITAFAGVDPGVNESGSYEQKSVPTSKRGSSDLRKTLFQVMDVLIKTHPQDDPVYQFLDKKRAQKKPYYVYMTAGANKFLRIYYGRVKEYLASLPES

SEQ ID NO: 174545 - protein, 343 aa, unidentified
MEQISTIGLDIAKSVFQVHGIDASGKPVLLRQLKRRRVLAFFAKLSPCLVGMEACATSHHWAREIAKLGHEVRMMPPRYVKPYVKRNKNDAADAEAICEAVGRPTMRFVPIKTPEQQSVLMLHRTRQLFVRQRTMLINAIRAHLAEFGIIAGIGRNGVEKLLELIAKGEDARIPPAARECLMALAAQLQLVKRQILGADRRVLAWHRASKTSKRLEAIPGVGPLIATALVASIPDPTIFRSGRDMSAWIGLVPKQNSTGGKEKLGSISKAGNRYLRKLLVVGALSVIKRAKILGYTKHPWLVRLMQRRSTMVAAIALANKIARMAWAMMARNETYRTPLPQPA

SEQ ID NO: 174546 - protein, 348 aa, unidentified
MYHVGVDLHKETSWFYIIDSNGKKVDSKNILNKPEILRKYFEQIPKPFVLAVEATYNWYYFVDLAQEYAKEVFLANSYELKAFAKRHKKTDKIDAGLIANILQKGFLPVVAIADQHTRQVRELLRYRIRLVIDRSRNISRLKALLDKLGINSNGDFTTYKRLKTIIMGELPSIYIQLVKNYIEIITELTQKLKTIEKDITTVSCNNHHMVNLMSVPGIGDFSAALIKSEIIDISRFVSFNRLCAYAGLSPRVSASANKIHHGPLNKNRRKNLQWILLENVYHFIKAIPEKQEKYEILKQRKGHNTAKVAMAREMLKIIYHVLKEQRPFYFSNKKYQIQSVAAPALSGV

SEQ ID NO: 174547 - protein, 319 aa, unidentified
MQTNHHTVYAGIDVAKATLELHLQGHRAEFANQPEGLAQLCKKLQSVPHLQVICEATGGYERALVQALHQAQIPVSVANPAQVRAAAQAKGQRAKTDRIDAALLSDYGQRFQPKLTPANSVSQDKLIALTQWLKQLIQGQALAKTQSEHHQDPFVRRQHTKLLTHLQTQIAAVEKQIKALLATDAALQQRVDRLDEIQGVGPRTAWMVLAHMPELGRLNRQEVAALAGLAPWTRESGTMKGMRCIGGGRPEVRLALYMASLSSVRSNPVLRSVYQHLRSKQKPAKVALTAVMRRLLIYMNYQIKNLADNKPTEKIHEPR

SEQ ID NO: 174548 - protein, 398 aa, unidentified
MTAVMIGVDPHKASHTATAIDGSEKVLAKIRVRATNHQVEQLLEWAQAWPERTWAIENATGLGLLLAQQLLRAGERVLDVPPKLAAKARLLSDEAVNKNDPNDSRSVAVAGLRSAKVRPALVEDYSAVMGMWSDRYLELAAAWTQVVCRLHAVLCELVPGGYAGELTVPAAKKMLEAIEPATGPDHARLLLAWQLHDDLVRIGQQRKDTKKHMTAAVKASGTTMTEVYGVGPFVACAVAGHVGDISRFDSRAAFAAYNGTAPIEVSSGEKKVYRLSRRGNRRLNHAIHMAAVTQIRYADTPGRIYFERKRAEGKTGKEALRALKRRISDLIYARLVADAKAAGTWTRGPGGQPGNVTDSSATGSHPEKPALRKSHSRTGLNTTTSPHRRPKRKTPCVA

SEQ ID NO: 174549 - protein, 346 aa, unidentified
MKTTTIAIDLAKSVFEVGISHQPGHVARTHRLCRKELAAFMASQPAASVIMEACGSSHYWGRKFQGFGHDVKLLPPRAVRPYVQRSKTDRADVKGMLEASRNTDIHPVPVKSESQQQLTTLHRVRSGWIRTRTMRINGARGLLAELGIVLPQGAYKVADRLSGIVEDAQTPLPLAIRELLYELVLEIGELETRIDAAEKQLEALSSETPVVQRLQTIPGIGPITSTALVGFIGEASRFRSSRQFACYLGLTPREHSSGGKRQLGRISKQGDPYLRRLLIQGAHTILNWAGRKNNPDRFRRWALGVMQRRGRRKAVVAVANKLARLVWAVWTSGKPFQSVEAGTPNP

SEQ ID NO: 174550 - protein, 353 aa, unidentified
MNTTPTNPNIYCGVDTHADTHHAAIVTEHGVFIEDRQFPTTRTGYDELAEWMNNLGHVIAVGIEGTSSYGAGLARHLRNIDTAVVEVPRPNRRLRHDHGKSDPIDAEAAARTVLARHQLSEPKYGTGVIESIRALRIARNSAVKAATAAINALRSMIVTAPEQLRTQLRGHSQGKLLDACAALTPNLADLADPAEATMVALRSLARRVGELRKEARDLKKQLTQLINDSAPRTAGVFGLGPDTAAALLITVGDNPERLRSEASFAHLCGVAPIPASSGKTNRHRLHRGGDRRANQALHTAVVVRLRYRDTAREYAKRRTSEGKSMPEIIRCQKRYLAREVFSALRADYQGLTT

SEQ ID NO: 174551 - protein, 408 aa, unidentified
MNPLYVGIDVSSKSNVVYFMLPDGSKHCNFSVANSHTGSSQLVKRILSAMTSCSLDTVLIGLEATSVYGDNLVYFLREDAALARFNSKIHVLNPKQVSKFKEAYNDLPKNDLIDSFVIADCLRFGRINKEVYIGDYRYKALQNLTRARYFAVSNLIKEKQRFMNILFKKYSTMTQEKVFSDTFSTTALAVYDEFESAEALADMDLHELTAFIMEKGKNRFPNPNAVAKAIQKAARSSYRLPKTVNDSVNQVLSISITSIKALEAQIKEFDKAIATQMELLPNVLISIPGIGPVFSAGIMAEIGDINRFHNQAQLAKYAGLAWKQHQSGDFEAQTTRLINSGNRFLKYYLCEAAFSLVRCDKEYSDFYHLKYKEVNRYQHKRALALTARKFVRLVFRLLKDNRLYCPAK

SEQ ID NO: 174552 - protein, 346 aa, unidentified
MAAFAALDVSKKSTSIHIVDEKGVCSWRGKTLTNPAALAEALSPFSDDLTLVGLETGSWTTWLWHELTERGFPMVCMDARQAHAALSVTINKTDANDAQGLAHLLRTGLFREVRVKGWEDVQKRTLLRARSTMLRCVLDLANAIRGALRTFGISLPAGTGNGGAKTFERRVVACLTARADLAIIIGPLLEAWRAGRTQVARHDRAIRAIVRSDPRCQLMMTVPGVGYLTALGFVGAVGDPETFRSGRTAAAWIGLTPRRYQSGTINQQGRISRQGDKLLRAYLYEAAAHILTRSSKDSALRRWGLKLRDRIGFKRANVAVARKLAVVLHAMWRSGRPFEAEGCATG

SEQ ID NO: 174553 - protein, 392 aa, unidentified
MDKPKLQKPINDLSRSFTPFDPNHTLIAVIELSKSSWLVAGIIPGVERQPLKKLEPDENQLLKLLGRWRTEAEKAGHKIKRIAVAFETGRDGFWLARWLRARGIDAHVIHAASVAVSREHRRAKTDRLDTEQLKRAFFGWLRGEREHCKMAVIPSSAEEDAKRPHRERETLVGEQTTIINRIKGTLARLGIRNFNPKLKKAPERLEHLRTPEGEPIPPNTLAELHRDMQRRRLVNEQIRKIEKSRLEHLKQAPNTGPNLMVRLLARVIGIGIETADMLVQEILSRNLRDRRAVARYGGLTGSPDESGKKRREKGLARSGNARVRRGMIQLAWRFLEFQKDSALAKWFRARTENARGSRKKMIVALARKLLIALWHFVHTGAVPEGVLIRPAH

SEQ ID NO: 174554 - protein, 380 aa, unidentified
MNTTTVGIDLAKSIFAVCEGDYRGHGSRSSILKSGEFLKWLRTLPTGTVVAMEACSSAHSWGRTMQALGLEPRLIAAEFVRPYRKNQRIKNDTRDAEAVLTALHAPGMRFVTIKTEDQQQRLAWHRLREGWKAERTALFNRIRGLLTEFGIVVELGAAKIRRKLAELESDTAYPQSIQLMAQSVRAQIGILDQRLAECERQIARQSKSDPAVARLRSRPGIGPLTADAIVATVGNARQFKNGRQFAASLGITPRQHGSGGKTHLGAITRRGDSYLRCLLVQGARCVLQAALRLHKNKPNTLNRLQLWMITLNERVGYHKAAVAIANKHARQVWAMIARGEAYNAEAYKDWEAAHATVRPGDIQEASDYDLSTAALAAASV

SEQ ID NO: 174555 - protein, 427 aa, unidentified
MSKSQNSKFNAIENTDAIVGIDIAKNVHWAGIILPNGKEIKKPFSFNNNKIGFKSLVETVKNILTMLNFKKVIIGMEPTGHYWKCCARYLKKIDWIKVVTVNPHHVKKSKEFDDNCQTKSDKKDCMTIARLIKDARYFEPYLPEGVWAELRNLSNTRAELVRKQNAVKTRLIATMDEYFPEYAKVFKQILSRTSEEILKECPFPEDIKSKGKEGLLKHIKETVKRGYSKKQVEKIYKAAEESIGSEEGINGAKFQTKMYIEEAEMLKKQIKMTEEELEKQLKETGFYESIISIKGIGVVSAAMFIGEVGDINRFDSYEQIRRYAGLNLVENSSGTHKGRTTISKRGRSLLRSILYRMAFTMVNQNEELKELYKYLTTRKENQLKKKQAIVAVIGKILQIIYAVVTKNEEYKATRVFTQERREQLKVA

SEQ ID NO: 174556 - protein, 317 aa, unidentified
MTPAFVGIDVSKDHLDIHLRPAGEAFRLPNDPAGVAALAARLRGAAPALVVLEAGGGLERPAVAALVEAGLPVVVVNPRQARDFARALGRLAKTDALDAAVLAEFAERVRPPVRPLPDAQARELADLFARRRQLVEMRAAEQNRLHAAAGAALRRGIREHIAWLDRRLRGLDGELAALIEASPVWRVKDQLLRGVPGVGPVVSRALLAELPELGTLSRQQAAALAGLAPRARDSGRFRGRRCIGGGRAGVRSALYLAALSAARYNPLIRPLYRRLRAAGKAAKLALVACARKLLTILNALLRDGRPFDPARCGTERG

SEQ ID NO: 174557 - protein, 408 aa, unidentified
MRVYIGIDWSEQKHQVCFMNEAGAVIQQMSVEHSVDGFLKLEAARQILGVSPKEVVVGLETAHNLLIDMLIERSYPAIYILPPSQVKSNAGRYAQSGAKDDSRDAWVIADMLRTDRGRLHAWQPDTLLTRQIQAQVRMVLFLTRMIQRQSNHLRAILVRYYPAMLDIFSRLDSPTSLAFLEAYPIPQEAARLTYEQFTQFLRVHHHTHRSKWATMYAQLNHDYPQAHPDTVAVLAPQAKQCAILLLPFIQAKKHALVDLQKLYRRHPDVAIYDHLPGAGDFLAPALLAKLGDDRLRFPNRQVLQAIAGTCPITRRSGKSKFIQFRRACDLQFRYIVHQWAVQAIKQSPWVQTYYRDLLKRHIGKNDSTRRVANRLLAILYKLWQSRASYDETYYLQQRALRAKPLPKA

SEQ ID NO: 174558 - protein, 411 aa, unidentified
MEHQNYVFVGVDTHKNQHTACVLSCFHQKLGLTQTPNNPANFESFIQDINSFKSPDKKLVFGLEDTQGLGHSLAQWLLEQGYTVKEINPALTKRERHHSANPDKSDEIDAEAIANVLLTDFNKLPDALYDANFKAIRQLNNQRQTLIKERTILKNRFHNLIHQQYPEYKKLFSDPFGKTAMAFYEEFPHPSDLNYYGETRLQDFLEDQVKSIGNDKAATILSLVDKDKKKTADAKARNTIIKNTIEHLRLLEKSLEKINNQLKKAIEKSQYQLTTMPGINFKLAALFIANIKNIDRFESASKLARYAGLAPVEHSSGTSKKLSYKKYGCRDLNHAFYMLAFEQIGKTKNSKIKNPVSYKYYQKKLKEGKSRAVALTCLQRRLVDIIYAMMRDRSAYKLPENIDYEVLDKAG

SEQ ID NO: 174559 - protein, 364 aa, unidentified
MNPDPDSRLTSIVKVIRLSSSPFFLKSVKDKSMENFYFIGVDVSKKKLDFCVMFEGKVVHEEETANHQGAIIALLHQLEEEYGIAGGQMLVCAEHTGQYTFPLACACKAVECKLWLENPAEIKYSSGVQRGKNDKVDAKRIAIYAKRFQDRVQYYERPTEDIERLKQLEAERTLYVTDLAKYKGQLKDQKDYMPRKLYERKMKRLQALMDDLEEAIQAITDEMDEVIASCPVLSRQRELLMSIDGVGCVVATNMIITTEAFTRFDDPRKFNCYAGVAPFSYSSGSSQHSKARVSHRADKVMKRLLHLAAVAVTHRVGGELKKYYERKVAEGKNKMSVINALRAKIVARMFAVIKRNEKYKPILS

SEQ ID NO: 174560 - protein, 369 aa, unidentified
MAKPITYVGLDVHKDTIAVALAEAGLRGEVREHGKIPNTPAALKALTVKLAAARRELRFCYEAGPCGYGIQRQLTEAGHECAVVAPSLIPRKPGERIKTDRRDAINLAKQHRAGELTPVWVPDQAHEAIRDLVRARQAAVRTLRQARQQLSGFLLRHGRHYHRPAWTLLHRRWLASLKFDQAVHHIVLEDCIAAVEAAMARRDRLEAHIEAVLPEWSLAPVVEALQALRGVRLVAAATLVAELGDITRFTNPRQLMAYLGLVPSEHSSGRTRRQGGITKAGNGGARRMLIEAAWSYRFPARIAREQLLRQERLAKPIRDIAWKAQERLCRRYRKLARAGKLPTVITAAIARELTGFIWAIAKQVQPIAS

SEQ ID NO: 174561 - protein, 458 aa, unidentified
MPAHRTVPSLVPNAPAPVDFDWYVGIDCGGATHQACVLDAVGREVGVRAVPHSGAGLAAFEAWLHEVAGPSLTRVAVGLETPHGAPVALCLAAGAAVFAINPKQLERFRERVSAAGAKDDRRDARVAASALRTDRGVFHRVPVEDARLVAVRELARMGDELRTEAARLSNQLRAQLERYFPQVLTLVPAADEPWLWALLDEAPTPAAAARLTERRLTRLLREHRIRRLSGAAVRAALQAPALPVAPGLVEAVSGHVTLLLPRLELVTRQVRGCATQLEAALAALAGPDDAGPDAGPDAGPDAGPRAGGAPDAPNAPSGAPTGDLGTVVRVLRSLPGVGVGVAGTLLAEAAGPLLAANYHALRTHGGTAPVTKQSGKQRLVAMRYACNQALRTALFHWARVSIQHDPRARAYYTTLRQRGHTHARSLRSVADRWLRILTAMLTTGSLYDPARFAIAATP

SEQ ID NO: 174562 - protein, 453 aa, unidentified
MTKVNTVDHPDLKMVSPNAAAIDIGSTMHMAAVNPDTGTMPVRAFGTFTQDLHDLAAWFRSCGITTVAMESTGVYWIPAFEILEEHGFEVILVNARYAKNVPGRKTDVSDAGWLRQLHSYGLLRGSFRPEAEIATLRAYMRQRERLIEYAAAHIQHMQKALMEMNLQLHHVVSDITGATGMRIIRAIVDGERDPEVLAAFRDIRCKSSVDMIKAALVGNDRDEHVFALTQSLELYDFYKAQIEACDRRLEAAVGALTVRADGDLVPLPKARIRGKQHNAPSFDVRAALYGVLGTDLTQIHGLGPSLALKLVAECGTDLRAWKSAKHFTSWLCLAPGNKISGGKLMSSRTRRSSSRAAALLRLAAVTIGRSDTALGAFYRRLSARIGKQKAVTATARKIAVLFYNAIRYGMTYQDQGAAAYDERHRQRVLSNLQRRAKTLGYALAPMPGEWAVS

SEQ ID NO: 174563 - protein, 462 aa, unidentified
MPRREERETSDRSTRPIEGLPVIRASVAGIDLGSERHWVCAPTLDRSAREVASFGATTAELLRMAEWLKARQVDSVAMESTGVYWIAPHEVLEGQGLQVLLVDTRQLARVPGRDKKTDPTDCEWIQRLHSCGLLRGSFRPEEAVCMLRTLVRDKANLVAESGDWLRRMQKSLDQMNVRVHRAVSDIDGVTGMAILRAIGGGERDAQKLAKFRNARCSKTEQEIAEQLNGHWREDHVFSLQQGLKMYDAVQERIVAYEQEILRKLGEMEADEPPQPTAPPLQNTNKAKAIKKRGQEAKRQALYRMSGVDMTQIDAVGVETVEVVLSEYGPDLSRFPTEKQFVSHVTLAPRVPQSGGKPVKKKKRNSASTRVAAALRMAALSLRHSQTALGSYYRRIAQRRGGDIAVFATARKLATLIYRLLRWGQPYVDEGAAAYENRYRQHRIAHLAATAKQLGYQLTPVTA

SEQ ID NO: 174564 - protein, 372 aa, unidentified
MKTTTKKTSPTPSVVTTSTPAVISGFTLGLDLGDRQHHVCVLDAAGQIIREAALPNTRPALAQLLADFPRATVALEAGTHSPWISRYLTDLGATVIVANPRKLHAISRNERKCDRRDAQMLARLARVDAALLHPIQHGSAQAQHDLLGLKLRDALVRTRVSLINAVRFTLKSLGHPVRNPSSESFHKHVLQDIPADCLPVVQPLLTVLAHVTEQIKAMERDLVRRSKQAYPATQRLQQIAGVGPLTALCFVLKVGDPQRFSRGRDVGAYLGLCPRRDQSGGTDKQLRISKCGDGLLRRLLVSAAHYVLGPFGPACALREHGQRLTGTGSAREKKRAVVAVARKLAVLLLSLWKYGTDYEPRVTTPKLVLLPA

SEQ ID NO: 174565 - protein, 440 aa, unidentified
MGMIVGVDPHKRSVTLEVVDDDGKVAATGRFGTGSQDYRAMLGYVRRQWPHHRWAVEGAQGVGRPLAQRLLADGETVVDVPAKLSARVRVFDTGNARKTDPVDAHAVAMAALRAPKLKVLTFDEELVALRLLADRRDELSALRIQTVNRLHRLFAELIPGGAPRNLSATKAKTLLAGVRPRTLIGRTTRRVAVEELADLVRVDTKLKALNRELKTAVLARGSHLMDLHGIGPAGAARILADVGDVARFPDRDHFASWTGTAPLDASSGDHIRHRLSRAGNRRMNHVLYVAAISQIRQDSEGRRYYRRKLAQAKTPKEALRCLKRRLSDLVYRQLRADAVTAAAAQAQTEQAGPGGQSGASDVPSAADLHTPVIGSSDQPQPEPAAPTLPARRPSPTPHAASAHTPPRRRAGAVTVERPTGRTTLTATSTGAHSSVPKLRP

SEQ ID NO: 174566 - protein, 415 aa, unidentified
MTSPSPQTSVRYLAIDAHKHYVMVGGVNAQKEVVLSPRRVNIHHLHKWASTHMRPTDSVVIEATTNVWDLHDLVKPLVAQVVVAHPPAVKLIASARVKTDKIDTINLARLLAANLIPEVWIPPTEVRELRSLMAHRRRLVKLQTQTRNRLHSMIHRYNLLPPKEDSLFSAEHRDWWNELPLPRSEHLRVHQDLAILDAVVLQIEEVDQELLQISTEEPWAAMAPFLMQLPGFGLTVAMTVLAAIGAISRFPSDKKLVGYSGLGASVHRSGTKCYTGRITKQGRKELRWVLVQAARTAAHHHPHWKREFTRLAKRTGDHKAYVAIARKLLVAVWHVLTKRKADRYAIPQQVASKLMRWSGKLGQERRDGLSTRYFIRLQLMRLGIGDELTHVRRGQRRHPIVSAQEVLDLRPDLRL

SEQ ID NO: 174567 - protein, 338 aa, unidentified
MKVTTVGLDLAKSVFTLQGVDEHGRAVLRKTVRRAKLLELFAQLPPCVVGMEACSGAQHWARELRKLGHEPRIMAAEFVEPYRQGGKNDTNDAAAICEAVSRPKMRFVAMKSVEQQAVLAVHRLRQGLVEERTALANRLRGLLTEYGVVVGVGLDRLRRALPEIMEDGANGIPGIAREVFADAEQQLHELDARIAAYDRRIAALARASEPAQRLMKIEGVGPVTATALVASVGDAKVFRNGRQFAAWLGLTPRQHSTGGKQRLGAMTKHGDVYLRTLLIHGARAVLRVTAHRSDAKSRWVESLRRRRPDNVAAVALAAKHARIIWALLARAQDYQPAA

SEQ ID NO: 174568 - protein, 460 aa, unidentified
MDKKTSKKEKKQSFVAMSLMNPNAAGIDIGGTLHAVAVPADRDAEPVREFGTMTCDLAAIVAWLQQCGIQTVAMESTGVYWKPLFTMLVQAGMEVYLVNAQHVRNVSGRKNDQSDAQWLQQLHSCGLLRSSYLPDDIQEALRTLVRYRKTLTQDSSRFILRMQKALELMNIKLHTVINDLTGKTGMAIVAAIIAGERSATNFVPLIDARIKADHGAIVKSLEGNWRQEHLFTLAESYQCYCFYLERIKACDKQIEQQLQQYEASRQEGLIGSIERASTQEISPAIKRKKKNKNAPAFEARSYLTAIHGVDVLAIYGMSEIAALEILGETGTDMSKWKDEKHFVSWLNLCPNHKISGGKLISSMLMKKKPNIASQAFRAAANAIQRSDHWLGDYFRRMKAKGGNKYAIVATANKIATIYYKMVRYKQAFKPVDLQQYQEKYKKAKIAYLERKLQQLKQEAA

SEQ ID NO: 174569 - protein, 412 aa, unidentified
MEVVYECCCGLDVHAKRVVACLITKGRKEIRTFATMTDELLQLGDWLSSVGCTHVAIESTGVYWKPVFNILEGLLTVILVNARHIKAVPGRKTDVRDCEGLADLLRHGLLKASFIPPPEIRELRELVRYRHTVVTEHTAVANRITKLIESANIKLGQVASEVLGRSGQLMLRALAAGETNAETLAEFAQGKLKNKKAELRRALTGSLTPVQRWVLTELLTRAEELEAARGRVETRINEAVAMCTDPFGAEAVELLESIPGIGQRTAQTIVAEIGVDMSRFPSANHLASWAGVCPGNHESAGKRKSGHPTKGNKSVRTILTEAAWTAARAKETFLHAKYHRLAKRMSKQKALGAIVHRLLVICYHLLKRRVPYAELGTAPLDEQQVARQRRRLVEQLVGLGLKVTIEEGATVS

SEQ ID NO: 174570 - protein, 329 aa, unidentified
MVLLGMDVAKTSLDCAILTSAGGKPLGRRSFPNSPEGVDRAARWVAQVSGAEVADMHLIVEATAAYHELAAHRLAAAGMRVSIVNPARVRSFAKALGILGKTDRIDAHLLARYGQLVRPKLWSPPAKALLDLQNLIARLDDLEADLRREENRLEQARARGCPDLVERSLLTSIAGLKAQAAEIKQGIAAHIAADADLQSGLERLMTIPAVGPKTATRMLLMLRTRAFDGARQAAAFLGLVPVERTSGTSVRGRPSMSRAGNPRLRAALYMAAVVGIRKNPDIKAQYERLLGRGKCKMAALGAAMRKLVHLCFGVLKNEGGYRPGVASRA

SEQ ID NO: 174571 - protein, 428 aa, unidentified
MDHSASLTNPIVAWIGLDWADQKHDVCLQATGSTEVEHLVVEQKPEALQAWVAELRRRYPHGPIAIALEQSRGSLFYALMNYEFLRLYPIPPKALADYRKALYPSGSKDDPVDAQLLLEFLRKHPQRFRPWVADNVETRQLALLNEHRRRLVDDRTALTNRLTALLKGYFPEALGWAEDLRTPLAWDFLAQFPTLELAQQASRLDVLKVYRAHTRRPPEQLEALCDEIRTARPLTTDRAIIASSVLMVEILVEQLRVLGAGIERVEQQLADVFATHPDRAIFQSFPGAGKALAPRLLAAWGSDRQRFPTAANMECFAGPAPVTVRSGKTKWVHRRYAGPTFLGQTFHEFAAQSRLKSPWAKAYYQQMRSKGADHHPAVRALAFKWIRIMFRCWQDRTLYDELHYQQALTRRGSPLATELNRLALEQKS

SEQ ID NO: 174572 - protein, 435 aa, unidentified
MLGDPVNAFSSPFQYEEVSFVKVVFPTCCGVDVHKRFLVATIITSPTDSLQPRYQKKRFSTFNSDLNRFADWLHENACLDVCMESTGKYWVPVFNILEKCGIRVVIANPKWVKAVKGNKDDTKDSKWIGDLFRFGLVKSSFIPDKNIRILREFTRYRYKLISMKSSEKNRFQNALTVCNVALDSVVSDMFGKSATAITDYLTSNEPFDAEHCVSLLQRSLKKKAGAVLEAIEGYSITDEQKMRISIIREHLNHIVGLIDKVDDCINTLISEYEGQINLLCTIPGVRRDTAITIISEIGIDMSQFGSSKRLCCWAGLTPGNNESAGKKKSVRISRAGVYLKPALVEVAHAAVKDKSHPYYALKYERIAKRRGKKRAIIAIARMILTAIYEMLSTGEVWNPVDLYKVDMPEYLKEKQLEMAVKQAIRFLEEQGLKVS

SEQ ID NO: 174573 - protein, 312 aa, unidentified
MNTPTLVHAGMDIAKDTLELSLQGQAFQFSHDAPGCAALIETLSAINEPVQVICEATGGWERPVLRALHGANIAVSVINPRQVRDFAKATGRLAKTDRIDAQMLARFGSQLKPAATPAPSAAQQELCAWVTRRDQVQAMLQGEKTRLIPGLPKTILKELKASIARLERQLQKIKLHLNQLLCDSCELAEKARRLQAFQGVGPATTATLLGHLPELGTLNNQQIAALAGLAPFNDDSGPRKGARRIAGGRTSVRCALYMAALSAARCNPVLKPFFERLRSKGKPHKLAIIATARKLLCALNSSLLNPLFSPCQ

SEQ ID NO: 174574 - protein, 351 aa, unidentified
MIIIGVDYHPSDQYIAFVDTETGEYGERRLNHSDGEAEKFYRELAARGISVRVGLEATGYSRWFERLLAEVGIEVWIGNAAEIKTKRVRKQKTDREDARLLLKLLRENNFPRIWVPSRENRDLRQLLWHPHRMVQMRTRIMNQLQALAMNEGLRRKKTLWSDQGRAQLEKLSLGTWTSRRRKDLLELLDRMNPSIEELTAAVEQEAKKWPEVLRLMTHPGVGPLTALAFVLIIGTPERFQCGKQIGSYVGLIPEEDSSANHQRLGHITKQGSSLLRFLLGEAAQAAARCDADWRRRYMHLAVRRQRNIAKVAMARRLAVRLYWMWRNGWEYAQWVAFGSHAGQLGTGHGVQ

SEQ ID NO: 174575 - protein, 411 aa, unidentified
MCKEIEGFPLTKIRKGVYIMFYLGIDIAKVNHVASLIGEDGSILVKAIKFTNSNEGLQKLIDSISEYDLSKIYCAMEATGDYWLSLFSALTDKDFNVSVFNPYQIKSFRGAYSNRKQKNDVIDSIIIADFLRFNGIEQTCLPNDDLLALKNLTRYRSNLVDNISKAKIQVKGILNKVFPEYSDVFSDTFGDASKQILLNCPTPSEVANFNTRKLANLLKKASRGRHGTDTVRKVKELAKNSFGIKFTGDACSFEIKQLINQIIFLENQVDELNLKIKELYSKLDSHLESIPGVGKAIAPVILAEIGDINNFSTPSKLTAFAGIDPSENQSGNKKSTDEKTSKRGSPYLRHAIYQAAFIASNNDPVMHDYYVKKRAEGKHHYVALAGVERKLLGIIFHVLKENRDYRPPKST

SEQ ID NO: 174576 - protein, 395 aa, unidentified
MEINPIYRSAVGMDVHLAQVTVCAIVAGTDGEVKVETREFGAFKRDRRAMAEWIAAWQPEVVVMESTGIYWKSPYAALEKVGIRTLVVNAHHVKKVPGRKTDVSDAQWLAMLARSGLLRGSFIPPEHLRHLRLLARQHNALTGQLAAEKNRLVKVLGDGGIRLSALVSDMHGQSARRMIDALLAGEAPAEVVRYADRRLKAPHEELMLALDGELSPQHRFLGEQLRAHIDFLEQMLAHFEARLLAEMASYEAAMSLLKTLPGVDDLSAAKVLVEIGTDMEAFGSPERLASWAGLCPGNHKSDGKQKSGKTPKGNRYLRRVLCEIAHAASRTTSYFKTKYQGLAIRRGAKRAIMAIAHKVLKTAFILLQRQEVYRDSTVDYEALLIKRRAPAGSNS

SEQ ID NO: 174577 - protein, 338 aa, unidentified
MTQFTFFVGVDIASASFMACVGATPWKLTVKPEKFENMEDGFASFLNWLKNNNLLPEKTVVCMEATGVYGEGLAYFLFASGYTVAVEPPLNIQRKFPANASKTDELDCQYIAEYACRYVDKLAFWKPRADILEKVKVLLTTRQHFSVQLTGHKNALIAVNRKKVTSELAKQVHQDMIEQINKHIKAIDKEIRRLIDDDPTFKQTFLLLMSVPGIGLQLAAHLLIHMQETLDPKVLAAFIGICPIKHESGTSVYSAPTSRHYGPPVIRKLLYLGACSVRTHKKLFQQYFFRKVAEGKHKKVALNNIENKILKIACAVVRSQKPYIPNYVSVNPLVLKKA

SEQ ID NO: 174578 - protein, 331 aa, unidentified
MSHIIGIDVSKATLDCAYLRDPDQDKAKRKSCQNKADCFVSLITWAEAFSGLPCQSLAFVIEPTSIYHEQLVQFLHGKGTTVYLVNPGRVRKFAEGIGILSKNDVIDADLLARYGLMAKKLIVFEPAPQEVNDLRSLLNRLDVLEKNLRRELNRQEKAGKSLTFHRLEQQSITRSIKRHEVEIVSFKNAARDCVNASPWLQRGVELLCTVPGVGERTAWLMMVVLSSRQFHCAAEVASFLGLNPIEKRSGKSEYRKPRLSKSGSSHYRQALYFPAMVATRRNPDVQALYERLVDAGKPKMCALGAAMRKLVHICYGVYKNQQPYQPLVSLT

SEQ ID NO: 174579 - protein, 346 aa, unidentified
MTESSDYESVQVFIGVDVGKDTHHAVAINRSGKRLFDKALPNDENKLRSLISDLKQHGQILLVVDQPATIGALPVAVARSEGVLVGYLPGLAMRRIADLHAGEAKTDARDAAIIAEAARTLPHALRTLKLADEQIAELSMLCGFDDDLAAQTTQASNRIRGLLTQIHPAPERVLGPRLEHPAVLDLLQRYPSPEKLASLGEKKLAAQLCKLAPRLGKRLAADIAQALAEQTVVVPGTNAAAVVLPRLALQLITLRKQRDEVALEVEQRVLAHPLYPVLTSMPGVGVRTAARLLTEVACRAFASAAHLAAYAGLAPVTRRSGSSIRGEHPSRRGNKALKRALFLSVQ

SEQ ID NO: 174580 - protein, 385 aa, unidentified
MKKNNTAKKSPKPKALSNFKKNQIREVAAKQRLTIGLDLGDRTSRYCILGEAGEVVSESQLPTTKAGLSSLFEKMPSSRIALEVGTHSPWVSRQLAGMGHEVIVANAHKVKLITQSVHKNDRIDAEQLARLARVDPKLLSPIRHRGPEAQADLAVIRARAELMEARTRLINCARGLVKPMGERLKKCDADQVKETLGEGLSEAAQRVIGPLLKSVEAISKQIAEYDQRIEEIAKRYPEQKLLTQVYGVGTLIALAYILTLEDAERFAHSRDVGPFLGLKPKERDSGDSHPQLGITKTGDGLLRSLLVQGAHCMLRKGAPDSDLGAWGLAKMKSGDKNAKKRAIVAVARKLAVLLHALWSTGEVYDPLFNRKVSQVAAKRKAPKAA

SEQ ID NO: 174581 - protein, 356 aa, unidentified
MSREVKYIGMDVHKEAIVIAVLNSSGQLVMESIVETKASSLLQFIHGLQGELHVTWEEGTWAAWLYDLLQPHVQQVLVCDPRRNALLKEGNKSDKIDARKLADLLRTGMLRPVYHGEHGLRTLRELARSYQTISKDLIRVMNRIKALYRGWSIPCAGTQVYAPRYREEWLHKIEQVGVHRRAELLYQQLDGLQTLRRTLRPELLAESRKHKAAKLLRQIPCIGPIRAARLIALMQTPHRFRSKRQLWTYSGLGIETRDSGQYRFVRGQLQRAKKPQQIRGLNRNHNHEMKEIFKGAATRASCGVGPLRDFYVALLDKGMKPEMARLTLARKIAAIALTLWKKEERFDGEQLKTQAA

SEQ ID NO: 174582 - protein, 413 aa, unidentified
MLFIGDDWAEGHHDIEVEDDVGRRLARIRLPEGVEGLARLHEVVAEHLDPDSTGSSDLPEGAVVVGIETDRGVWVSTLLACGYQVYAINPMSAARYRERHGTSGAKSDAGDAHVLAEIVRLDRGHHRQIAGDSPQVEALKLLARAHQGLIWDRTRHLQRMRSALREYFPAALTAFDNLAAPDTLALLRKAPDPDRAARLTTGQITAELARAHRRGDRTTKVTRIRDALRAPALRQPAAIEHAYAVVVAGQARMLEHLAEQIEELEQEVKRSFRRHPAAEIVRSCPGLGDVLGARVLAEFGDDPHRYRNAKARKNYAGTSPITRASGKRKTVSARYARNKHLADACHQWAFCSMNTSPGARAYYDALRAREVGHHAALRQLGNRLVGILHGCLKTGTIYDEITAWPHAPSAVAA

SEQ ID NO: 174583 - protein, 428 aa, unidentified
MASVMIGVDPHKGSHTAVAIDAAEVPLGELRVRASAAQAGKLLEWAAEWPVRTWAVEGAGGLGHMLAQQLVTAGEQVLDVQPKLGARVRLLSAGKSNKNDPNDARSVAVAALRSPMCQQVRADDHAVVLRVWSRRHRQLSSLRTQAACRLHAVLCELTPGGVPAVITANRAAAILNACQPAGPAAQAWHDLAAEHLDDLRRIDTRLREARKKINAAVRASGTSLTEIFGVGPVIAATAIGDVADITRFPTADRFASYNGTAPIEVSSGARKIYRLSMRGNRRLNHAIHMAAVTQIAHKHSEGHAYYQRKLAEGKTPAEARRALKRKISNAIYARLRADAHSAASAPQAGPEGQPGNDPEFQRGQLTPRTPALRTSHSRARRQPTPARAPQHKDATSAGGTRDDRPQGAIPAGSTTATQPASPHQRKRP

SEQ ID NO: 174584 - protein, 429 aa, unidentified
MRTESTPGARGPVFCGVDTHADSHWLCVLDWRGRKVLSRQFPADAAGYEALAGAIAAAGEPACVAMEGTSSYGAGLTRHLASLGMPVREALSPARTQRRRPGQGKCDESDAERAARAAMSGSKLGTPKSQDGWVDGVRCMLAARSGAVKARTSAINTARSLLTTAPEGLRSRFRGMGGPRLMEELPSVRAEGALGAALGALADLWAAARDAALDMELAIEASLEENCPALLAMYGCGPVSAAKLAVAAGDNPGRLRSEASFAAICGACPIPASSGKTVRHRLNRGGDRQANSALHEIARQRVMRDPETAEYAERARGRGKSDREVMRCLKRYVAREAYRALMRPHEIRRPEDASGLVAARRAAKVSQVRAASILGTSEKYISMLERGQRELKPIRRAYEAWVEAGLPLDWDRQAFEAERKMDSKKHLAK

SEQ ID NO: 174585 - protein, 359 aa, unidentified
MDSPTSPNAEVSVTLGVDTHKDAHVAVALDELGKHLGALSVPTTVTGYKRLLGWARGFGTVEHAGVEGTGSFGAGLARFLRVEGIEVFEVIRSKRRDQYRSGKSDPIDAEAAARAVLAGTATGQPKGANGEVEMIRTLRSARRSALKARTQAVNQLRALLITAPEELRSELRGLSTARLVARASRLRPGANPPDVEAATKFALRSVARRYHQLSEEISELDEQLDRLIAQAAPELLALEGVSTDTAASLMITAGDNPERLKSEAAFAHLCGVAPIPASSGKIVRHRLNRHGNRDANRALYVIALGRMSRDERTRAYVARRTKEGKTKKEIIRCLKRYIARELYRILTSSSTSACPITVP

SEQ ID NO: 174586 - protein, 345 aa, unidentified
MEITTVGLDIAKRVFQLHGVDAAGKAVLRRKLQRSEVLAFFKALPSCLVGIEACGTAHYWAREIRELGHEVRLMPPSYVAAYVKRGKTDASDAAAICEAVTRPTMRFVPIQTAEQQAVLMLHRSRNLLVRQRTMLVNALRGHMAELGIIAPQGIARVADLTAVLLGEDTTNVPALAREALRGLAAELEALDRRVKEIEVAIVAWHKDNEASHRLATIPGVGPITASAIVATITDPFQFHSARHLAAWIGLVPRQHSSGGKQRQGGISKQGDRYLRRLLVLGATAVVRHSRNKPTAEAGWLKSLLKRRPARLVSVAQANKTARIVWALLVHGEAYRMPAAVPSGVA

SEQ ID NO: 174587 - protein, 351 aa, unidentified
MTEYIAFDSHKRYTWVDREDHSTRKNSGHRLEHAPGAVRDYLSGCEPGTAVAVEATGNWYWIIDEIEQAGLKPRLVHPRKAKLMMGLTNKTDKLDAQGLNRLQRNGTLPTVWIPPGPLRDLRELTRTRLVLVAQRTRLKNRLSATLAKYGAPASEASDPYGKRGRAELEKHLERLPEQTRWVSGQLLAQLDFVSAQVRQLEQRLNQLVEVTPEMQWLLTMPGVGVILAATIALEIGEVERFPSALHLASYAGTTPRVHASGGKVRYGPLRADVNRYLKWAFAEAGNSVAVNHVRCPDRHVSQLYRRLRQRKGHPKAIGAVARHLAEAAFHVLRKKQMYQDPSLGRGRTSQV

SEQ ID NO: 174588 - protein, 301 aa, unidentified
MDKITAVGLDLAKQIIQVHGIDAAGRVVLRKAVRRERLLALLAQLPRCVVGMEACSGTHHWARELRQLGHEPRIMAAEFVRPFRKSLAVKNDANDAEAICTAVVQPNMRFVSIKSVEQQALLSLHRIRQGLIEERTATINRLRGVLAEFGVVFPQSVALLQRALPAVLADEQGLPALVQRSVQMLREHLHDLDARLAEFDRDIAQHAKSSAPAQRLVALSGVGPLTASAVVATVGNAQDYRNGRQFAAWLGLVPRQYSSGGKRKLGRITRRGDAYLRALDPRRALNATIGIAPSAGTTRSA

SEQ ID NO: 174589 - protein, 412 aa, unidentified
MKDLLEISCGLDVHKEKIVACILTGPLGKPTRSEIREFSTLIPDMIALRNWIVSKNCHHVAMESTGIYWMPIYEILEDAFSGDITLLVVNARHMKNVPGKKTDMRDSEWISTLLRAGLLNGSFIPEKRIREFRDLNRYRKSVIRDITSQKNRIEKFLQSSGFRLSSFISDIFGASGRNIILHLIEHGQIDKTALDSCLKTKTRNRIDEILMSVNGTLSEHQKAFLRILMTHYDSLKKHLAEIETSLEEDMAPFALQVEQLNSIYGISTTASCAIIAEIGIDMNPFKTAEHICSWAGLCSGNNESAGKRKSTSVTKGNPYIKSMLCEIAWVIAGKRNTYLSAWYWRIKQKKGAKKAIVALARKLLVIIYTMLKQGTLFDESCFETRRKNCEQKQLSRYIRELEKHGYHVKAQS

SEQ ID NO: 174590 - protein, 389 aa, unidentified
MLYLGIDLHSKQMTVSVRDAQGEILLRRQVSTRPQKSEDFLQQMNELAGHDGYTAILEVCGFEEWIVLRLQQQTACREVILIQPEKPSKKKTDRRDAAALSELLWVNRERLADGQKVHGVRRVLFPTSDDRQDRQLTASRRNLAAARTKTLNRIHFVLRKNNLEWHYPTKTFQTKKGRAWLKAVELGETDRWEMDLLLEQWELWDRQLEQVDGRLEQRAERNVDARLLGTIVGMSHYMALAIACRIGDISRFPSPRSLANFFGLTPGSRSSGEKERSTSITKQGSRMVRFLLGQLVVHVLRRDGQMRTWYKRIKKRRGAKIARVAVMRRLCVIIWHMLKHRESYRYGGVPVSERGSSDAAGSACATDLEKIKANYFAELSEVSSAEEAA

SEQ ID NO: 174591 - protein, 391 aa, unidentified
MIYVGIDVAKDKHDCFITNSDGEVLFKSFTISNNREGFETLFHRIESVSLDLTKVKVGLEATGHYSYNLLGFLLDKGLPTYVINPLHTNLYRKSLSLRKTKTDKVDSRTIATMIMSGVNLKSYSDISYHNEELKSLTRYRFDKVKERAKLKSSISRLVTILFPELEKLVPKLHMASVYALLSEFPGASYVASAHLTRLTNTLSEASKGRYNKETAILFREAARTSIGSVMPAKSLELKHTIKLIQELTSEIDEIESEIKRIMDEIESPILTIPGISYRMGAMILAEIGDFSRFDSPDKILAYAGMSPSTYQSGQLTNCHSHMEKRGSRYLRYALYNATKYVCHWDTSFRIYLEKKRSEGKHYNVALSHATKKLVRLIFALEKSKKAYLPAV

SEQ ID NO: 174592 - protein, 416 aa, unidentified
MNDVAWFVGIDWGSESHAVCLVDATGRRREVRRIAHTAEAVETCLAWILECAEVPPTRIAVAIETPRGALIDACLVCGFRVFAVNPKQLDRFRDRHTVAGAKDDRRDAWVLADSLRTDAAAFQPVHQEDPIVVQLRELSRAEDDLDGEFRRLANQLRSQLHRLVPEILALCPGADEPWLWALLTVAPSPMEQRRLTRARVDHLLRAHRIRRWRADDVLARLQAPHFPHAPGVAEAVEAQIRLILPRLEVVHAQRLVCGRQLEQLLQQLRDRPRDADERGEHRDIAILESLPGVGRKVAVTMLAEAAGPLAHRDYDRLRAHMGTAPTTSASGKRRLVSMRRACNRKLRWAAYHWGRASVQHDPASAAYYRALRARGHRHGRALRSVVDRWLRILRAMLRHNTLYDAGRFAVAAENGA

SEQ ID NO: 174593 - protein, 407 aa, unidentified
MIFVGIDWGEAHHDAAVMDESGRVIARERVDDGLHGVRRLHALIGDQTDDADQVIVGIETDRGLLVNALVAAGYQVYAVNPRAADRYRDRYALSGAKSDRGDAKILADMVRTDRHNLRQVAGDTPAVEAVKALARSHQSLIWARQRQVNQLRHALREYYPGAIAAFGGDLADRDALAVLTIAPTPEAGGRLSTRQIAAALRRGGRQRHVDTRAAVIRDRLRAAQLAAPREVADSYSAIASAQLAVITTMTRQIAELEAALATRFEQHPDAEILRSLPGLGVVLGARVLGEFGDDPDRYVNAKARRNYAGSSPITRRSGSRRVVLARSVRNRRLADALALWAFCSLTASPGARAFYDRHRSNGDGHHQALRALANRWVSILHGCLRHRTCYDENIAWPTATTTDSAAA

SEQ ID NO: 174594 - protein, 412 aa, unidentified
MDVYCGIDWAEDHHDIALADRDGKLLARRRIGDDAAGLAQLLELLAGHGDSAGDLIPVAIETPRGLLVACLRATGRKIYPINPMAVARYRDRHSVAGKKSDHGDSVVLANVLRTDIGMHRPLPDDSELAQAIAVLARAQQDAVWDRTTAHNKLRSHLREYFPGFLVAFADARGGITRPEARAVLAAAPTPAAAAALTLTQLRALLKKAGRSRGIDIEATRLRDAFRIPQMRQPRLVEDAMGRQAIALLRQLDAACVAADDLEHAVTESFNLHPDAGIITSFPGLGPLTGARVLAEIGDDRSRFQDARGLKAYAGAAPVTRASGKTKSVTYRRVKNNRLNATGYTWAFSALTASPGARAHYDRRRDDGDRHAAAQRNLFGRLLGCLWHCLITGQHYDETIAFPVIGKKVRQAA

SEQ ID NO: 174595 - protein, 376 aa, unidentified
MNRNLPEGSRIIGLDLSKKSFTGCILSGPGFVKKQFFSGKMTQDEQGWELIHSHIHVGDLVLMEAGTSSFSLARYLQQHSAAQEVIVLNPGMLRVIWMSQKKNDKADAAKIACIARDMSEEAWPRVSVPTVQEQAERSSITSYVFFKREETQLINRLYALYNSLGYPEISRSVLRELPKERYALAGKLLSNYPCALDEAVLMIEQLDLTQHHIAVKLDHLRKICFEHPKQALCWFSIPGIGLINAATLVAYIGDGSRFSNPHQLLNYAGLVPRQDQSGSVDKHLGISHRGNAYIRRNIVQGGWVVSQMKPACPITKFAYRKKKEGKQKQKVAIAVANKMLRTGLSMLYSGELYRPMIQEGYQKLEAKLRSYKVQAL

SEQ ID NO: 174596 - protein, 373 aa, unidentified
MKKVRFLGLDVHADTIAVAVAEPDGEVRSLGIIPNQEESVRKLVKKLAPADQLQACYEAGPTGYVLYWQLTALGVKCEVVAPSLVPVKAGDRVKTDRRDATKLARSYRAGDLTAVWVPNQEHEALRDLVRAREAAKQDQLRARHRLSKFLLRQGRRVPSGFKVWTQRYQDWVKEHVHFEQPAQEYTLWDYLHEVEHMDDRIRRLDLAIAEAVKLAPPGMQEVIQALQGLRGIAQISAVTVVAELGKISRFDRARQLMGYSGAVSSEHSSGKRMQRGQITKTGNAHLRRIAMEAAWAYRHRPAIGPRLRKRQEGLSEEVKEIAWKAQHRLHKRYCNLSAAGKEKQKVVTAIGRELLGFIWAIGVQAERNSKRVA

SEQ ID NO: 174597 - protein, 343 aa, unidentified
MDHFAGLDVSVKETSICIVDETGKIVREVKVPSTPEALLAVLKNPAYHFKRIGLEAGPLSQWIFSALAEADLPAVCVETRHMQAVLKAQINKTDRNDARGIAQMMRVGLYRPVHVKTLRSQKLRMLLTHRKLLQSKAIAIENDLRGTLRNFGIKVGMVGKVSFEARIKELVENLPDLAVLVEPLLIVRRVLREQIIILHRRLLAIVRDDEVCRRLMTIPGVGPVVALTFRATVDVPARFRKSKAVGAVFGLTCSKYQSGEIDRSGRISRCGDEMMRVMLYEAAQAMLRSKKWSWLKAWAMQIARRRGMKKAIVALARRLAVIMHRIWVDGTEFRWVREQAAAA

SEQ ID NO: 174598 - protein, 407 aa, unidentified
MAKVIIGVDPHKLSATIEVVDSHEKLLGSGRFSTDQPGYTAMRAYAKTWPERIWAIEGSNGAGRPLAQRLLEAGEHVVDVPAKLAARVRLFDTGHNRKTDALDAHSIAIVAVRTKTLRVLRPDGELEALRMLCDRREELTRLRVQTVNRLHRLLAELVPGKAKKDLTALQAKAILATVRPRDIAGKTRRKIAAEELADLLTVEAKMKKATAELKVLVKARGSRLMDLHGVGPVVAARTLADVGDIARFADRNRFASWTGTAPLDASSGEQNRHRLSRAGNRRMNHMIHIAAVSQIRLDTDGRAYYRRKQAAGKTKLEALRCLKRRISDALYRQLLADAEQAQLLCAAQPVDTGPGGHCGASQESSAVDLPPHIDTSDQPLPGPATQTLQPAGPTGKTSQPRTPQTTG

SEQ ID NO: 174599 - protein, 411 aa, unidentified
MKKDTVAFEQVVSRGCGMDVHKEIVVVTIQGKGIKTMTKSFHTYTSSLIKLRDWLKKHKVTHIAMESTGVYWKPIYNVMGDDFEILLVNARHVKNVPGHKTDKKDSRWLCKLLLSGLLKGSYIPERKIRELRDLTRYRKKLVQMISSEKNRFQKILEDANIKLSVVLSDTFCKTGLKMLNVIVNQENYQAKELLSMVHGRVKANRKDIEEALTGYVTNHHRSMLKMIWDNMIRIEDTLLEVEIAIEQATASLGVELDLLQQIPGVGKNGAIGIIAEIGVDMSQFPDQKHLASWAGMCPGSNQSAGKNKSGRITYGNKYLRSTLVELGWAASRTKNTYFESKFKSMVGRRGKKKTIIALGHKILIACYHIIKDKVDYKELGANHLNNFRRDKLLAYYKKQLTNLGEEIIQVA

SEQ ID NO: 174600 - protein, 345 aa, unidentified
MQSGYTYVGLDVHKKTITWCAKKIDGTRVGHGTIAANRAGLSQWLEQLPRPWIGVMEATLFTGWIYDYLKPHAEELKVAHPLMMRAIAASKKKNDKIDAQKLADALRADLVPECYMAPEQIREMRRMLRFRNLLVRQSTRMKNKCGGLLMELGVEYNKKRLHQKQYFSELVGGFDPEIVPASVISLLGMSRNHVELFRVGQKHLVKQLNSDPRLKERVARLQTIPGVGEITALTWALEIADPARFPSIARAVSYCGLTSAQIESAGKMQRAPLSKQRNKHLQTMLIEAAKLAPRHSEQLRALHERELKRGNRNRATLTVARKMVAHLLAVDKSGKDFEEKTMKEA

SEQ ID NO: 174601 - protein, 371 aa, unidentified
MKEKENTIFVGLDVHKNSIVIALADAGRDGDVRSYGTIDGDLEAVHKVVRKLQSKGSTLRFVYEAGPCGYGLYRSLTNKGFDCIVAAPSKIPRKSGDRIKNDRRDALSLARLHRSGDLTPVYVPTEEDEAMRDLTRGREDAVKALRVARQQLLAFLLRYAHRYSGKSYWSKAHWNWIAGIKMPHRAQQIMLQEYVHAVHENFERVQRLNDQIHELIPHWHLAPMVKALQALRGVSLVVASTTLAELGDLTRFSKPKQLMAYLGLVPSEHSSGDSKHRGSITKTGNGHVRRALTEAAQAYSYPPRESCLLLRRLEGLPQQIRQTAWKAQVRLCGRFRRLMAKGKTRNKVVTATARELSAFMWAIAQQMQPEK

SEQ ID NO: 174602 - protein, 353 aa, unidentified
MKLRMESNTSPPTVVGVDIGKDVFHLVGFGAGGKIAFRRRIRRLGLKDAFEKLPPCIVGMEACLSAHFVSRTLCALGHEPRIVPAIYVKPFVKGQKNDYNDAEAIAEAALRPNLRFVQEKSQDQLDLQACHRVRSRLVSRRTATINQIRAFLIEQGIAVRTGPRALRNSLFAILENRKDEISARTARLIRGLYEDWCYLDERIETVTGEIEVLSRTEAKCRQLMSIPGVGPLISTAMVAAIGSGEAFERGRDFAAWLGLVPRQYSTGGRSILGRVSKRGSKYLRTLLIQAAKVLLMRPHNWARYSFGAWLNSASARLHRNKLAVALANKLARIAWSVLRNDKAFDTHLEVAAI

SEQ ID NO: 174603 - protein, 415 aa, unidentified
MEVVVERCTGLDVHQKTVTACVRSPGEGKKREEKVREFSAFNHGLRELRDWLKAEQVTQVAMEATGIYWRPVWYVLEELDGVEVLVVNARHVKNVPGRKTDVKDAQWLAQLLECGLLKGSFVPTAVMQRLRDLTRYRSRLVNDRAREVLRIHKVLEDAGIKLDAVISDVLGVSGRQMLEALIAGERNPEVLANMAKRRMRAKIPELNEALVGRFGEHHAHMARHHLDHIDHLDAAIDSLDQEVADELVPFKRQTTRLETIPGIGQTVAEVVVAEVGVDMSRFPTPEHLASWAGLCPGNYESAGKSKSGRTVKGNAALCSAMCEAAWAASHTKDTYLAAQFKRFARRFGRRSLNKAIFALAHTMIVIVWHVLAHDTDYKELGYDYFQRLNDPESQKRRLIRQLEALGVKVTLEPAA

SEQ ID NO: 174604 - protein, 468 aa, unidentified
MMEKHQQERNKTTEFRTMHPHAGGVDVGASSHFVAVPPGSDAEGRRVREFEAFTCGLRSIAQWLRACGVETVVMESTGVYWIALFELLEAEGFEVLLVDARHVKNVPGRKSDVRDCQWLQELHSYGLLAGAFRAPEQICVLRSYLRQRGMLVQHAGQHIQHMQKALTQMNLKLQQVVGDISGVTGMKIIRAILGGARDPQKLAQLRDARCKHTAAEIAKSLAGSYRAEHLFALRQAVDLYDTYQRKITECDVQLEAHLKTLDPQDGQIPPAETPAHRKAQGNAPQFDLRSSLCRILGVDLTEVDGLDAYTVAKVIAEIGTDMSAWPTIKHFISWLGLCPANKISGGKVLSSRTKPCANKAATALRIAAQTLYRSHSALGAFLRRMKTRLGPQAAITATAHKLARIIYSLLRKGGKYQDSGEAAYEERYRDRMLKSLQRKAKQLGYKLVSMAVETAPTATAASALVAGG

SEQ ID NO: 174605 - protein, 408 aa, unidentified
MDAILESCAGLDVHQETVVACVLFGPLDNKPNKEIKTFSTLTNDLLALADWLDKHNCSHVAMESTGVYWKPVWNILESCSFKLILTNAQRIKNVPGRKTDIKDAEWIAQLLRSGLVECSFVPPTEIRDLRDLTRYRKKLIQDATQEKNRIHKILQDANIKITSYLSDIFGVSGRNIIESVINGERITPEKISLMVKGQVKNKVPQLVDALNGRLRRHHRDMMRFSWNHLMYLEKTVADIEEQIDQCLSPYRQEIELIKSIPGINSKAAAVLLAEIGADMSVFPTDKHLSSWAGVSPGNNESAGKKKRSRAKPGNKALKAILCECAWASSKKRNSRLSACYWRWVKRMGIKKALIALAHLLLRIVYQILLTKTPYQELGPEYLENREIQKELRLIKLLESKGYQITKAG

SEQ ID NO: 174606 - protein, 461 aa, unidentified
MCRLPFQAQISVTLSTQTYLCINITRFIAGQSVNAVNPFKLLKGVFPMALKIVYQICCGIDVHKTFVVACIASTNTKNVTTYKRHRFSTFTKGLKELSQWLCENNCRDVCMESTGKYWIPVFNVLETTCTITLAHPKYVKAIRGKKTDNKDAQWIADLFKHDLVNGSFMPPLAIRQLRDLMRYRSKLTNIITGEKNRFQNSLTVSNIQLGNVVSDTFGKSSMAIIEQLINNPRDQSFDIAALIHGSMKKKIPELELAIDGFITPEQTEKLRIIKQHYDDLNDRKSDLEDLILCLSLPYAEEINLILTVPSFKNIFSAITIISEIGANMDVFPTAKHLCSWAGLTPTNNESAGKKKSVRISRAGCFIKPLLVQCATAVVKSEKHPEIRNRYLKIKKRRGHKRAIIAIARMLLTAVYMILKKQEPYNAELYKKSDILPVSREITVEQAIALAKSQGYQILTGT

SEQ ID NO: 174607 - protein, 435 aa, unidentified
MSSLSKINPHCAGIDIGNESIFVGIEDCDVTSFGTFTDDYINLIAFLKEHNITTVVMEATGVYWITLFEMLEAAGISVTLVNGKQVKYLPGRKSDVADCQWLQQLHSFGLLRPCFIPDDITRTLRTYTRLRADHLSLASSHIQHMHKALTLMNIKVQNVISQLHGVSGMRIMTAIVLGERNPERLADLCEKSILKTKRERVVASLKGNYKSEHIFALKQALCAYDFYQNQITECDKQIEALLNDHTDTLPPPTILTPPKPIRHNPPQIDDLHTKLMKMTAGNDPSQITGLTDKTLLELIAETGTNLQKHWITEKHFASWAALSPNMHQSGKTNKRRKIKKNSRAGQIFREAALSIAASKHAALSAFYKRMKAKKGFLHALKATARKIAVLYYRIMTKGLAFVEHGIQLYQQRLKEQQLRLLHKKARSLGLLLVPG

SEQ ID NO: 174608 - protein, 348 aa, unidentified
MLADQLDYVIGVDPHRDSHALAVVHVVSGAVVFEATVVASSDGYAQVLKLADQHAPGRRAFAIEGTGSFGAGLTGFLTGRSEWVLEVGRLRRERRSGGKTDALDAVRAARNVLTSERPATPRAGGERQALQALVAAREGAVNAKRAGLCQLRDLLITTPEPLRSQLRPLTRARLLQRLAATRPGGGRDPELRGSMLALRSIARRVLQLTAEERELAREIETITRKLAPQLLEQPGVGPHAAAQLVLSWSHQGRITSEAAFARLAGAAPIPASSGQTIRHRLDRSGDRKLNRALHMILVTRKRSHPATIAYIERRLQQGKTRREANRCLKRYLARNLYRLLEHGPPAAT

SEQ ID NO: 174609 - protein, 357 aa, unidentified
MKHVIAFDISMGKSYMVVYNALKKCQLEKEIAHNRPGFRDLKKLIDNLIEGYDEQPHIVFESTGVYSRTLERFMQENNYSYCLLNPLEAKLQCDSLRIHKTDRSDAHRLALTHFTHERRIETDSNDVYRQLKRLSRHYSELDDELSVTRSRLHKVVQETFPELENIFTTKSELFLNVVQLYPHPDLVLNHSKTIIKNRILANTNKRMAVNKAEEKAIELIEAAKQSYPAASSTDVVCDQVRVYAKRFQELLLQKEQCISKMESIAERLEEYSIIRSIPAIGANSAVRIIAEIGNIQRFDNNRQLNAYTGIDIRRYQSGKFIARDKINKRGNKHLRKIMYLTVQNMIRQRRFGGNHIV

SEQ ID NO: 174610 - protein, 388 aa, unidentified
MKPSDHTDTLAACGEHATLYVAFELGKAKWKLGIVVPASNKLSKYTVDGGDVEAVQALIGKAQEKARKRSGLPVRVVSCYEAGYDGFWLHRWLQAQGIANRVLDPASVEVNRRSRRAKTDRLDLEKLMGALMRHEAGDRLACKMVQVPSPDQEDDRRPSRERQRLIKERTGHVNRLKGLLHGQGIRDLWGRCKDFGAWLATLRTGDGRALPGHLTDELKREHARLRVVQEQIDELEAQAAAARSTAPAHGIAAKINQLLELKSLGPVGSQTLVSEAFFRDFKNRRQVGSYFGLTGTPYNSGDSRREQGISKAGNARARTVAVQLAWLWRRHQPGSALSRWFEERVGKQNGAGKRIAIVALARKLMVALWRFLCEGLVPQGAVLRAAHG

SEQ ID NO: 174611 - protein, 367 aa, unidentified
MKKVSTVVARASRNISQPKLTIGLDLGDRNSWYCLLDETGHIQVEQRVRTSAKGLCEVFGGMPRSRIALEIGTHSPWISRLLNELGHEVIVANARKVRLIGESRKKDDRLDAQTLARLARIDPQLLSPVKHRSAQAQADLMMIRARAGLVRTRTGLVNTARGLAKSYGERLRSCNVRNMSPEKAESLSPELQTALQPLLAAIESVSEHIAEYNERIEKLAQERYPQVALLTQIKGVGTLIALTFLLTLEDPHRFRKSRDVGCYLGLQPGRRNSGQSEPQMHISKEGDPYLRTLLVQGAQHILGPFGIDCDLRRWGLKLAERGGRNGKKRAIVATARKLAVLLHHLWVSGEVYEPLHNRGRVPVAAAA

SEQ ID NO: 174612 - protein, 371 aa, unidentified
MDESSKTLYVGLDVHKDSIAVAYAPEDRGAEVLSLGAIGTRQCDIDTLIRKLQAKGATLVFVYEAGPCGYWLYRYLTGKGLACHVVAPSLIPRKAGDRVKTDRRDAMTLARLMRSGDLSSIYVPGIEDEALRDLSRGRDDAMQDLKRSKRRLKSFLLRQDIRYEGRATWNAAHLRWLSEVVCPTPPQQIVFQEYVRAVSEQQERRQRVERELHEAVKGWRLYPVVEAIQALRGVELTGAVILMTELGDITRFETPRQLMSYLGLTPSEYSSGARRHQGGITKAGNSHARRALVEGAWAYRYPAKVSRHLQLRLEKLPAEVQAIAWKAQVRLCRRYRQLTARGKHVNQVVVAIAREMAAFAWAIARLVPLAA

SEQ ID NO: 174613 - protein, 380 aa, unidentified
MNATTIGVDLAKHVFAVCEGDGRGHGARSSTMKRGEFLKWLCTLPVGTVVAMEACSEAHSWGRTMRARGLEPRLIAAEFVRPYRKNQRVKNDARDAEAVLTALHAPGMRFVAVKTEEQQQRLAWHRLREGWKAERTALFNRIRGLLTEFGIVVEVGASKIRRKLAELEGDDAYPQSIRLMTQSVREQVAVLDQRLAECERQIARQSRGDPVVARLRSRPGIGPLTADAIVATVGDARQYKNGRQFAASLGITPRQHGSGGKTHLGAITRRGDSYLRSLLVQGARCVLLATLRLYKNKPDTLNRLQQWMVKLHDRVGYHKAGVAIANKHARQVWAMLARGEAYNPDAYKDWEAAHAAVRPGDMREASDYDLSTAALAAAGV

SEQ ID NO: 174614 - protein, 344 aa, unidentified
MWIIGCDYHPSFQQIAFVDQTTGEYGDLRLEHKGGEAEKFYRSLTGQQVRVGVEATGGMRWFERLLGELGIELWVGDPARIRAAAARKPKTDKEDARLLQRLLLEKRFPRIWVPTVQQRDARQLVLHRHRLVQTRTRAKNQLQDMARNEGLHPKRRVWSQAGQKELMALPLSPWATVRRQDWQELLGELNRRIDPLDRALQQEAAQRPEVQLLMTHPGVGPVIATAFVVTIGEPGRFQTSKQLAAYLGLVPLENSSGKGRQRLGHITKQGNSLLRGLLTEAAHIASKHDPEWRRKYMRLAMKKNRSIAAVAVARCLAVRLWWMWKLGLDYGQMKESRSHAEQLV

SEQ ID NO: 174615 - protein, 456 aa, unidentified
MKMKRKKKVLQVPKLESLKQINPNAAGVDVGASELYVCVPEDRDPRPVRVFQTFTSDLHEIAAWLKRCRVTSVAMESTGIYWIPLYEVLEEAGFEVKLVNAREAKNMPGRKSDILDCQWIQQLHSYGLLTASFRPPKDIVALRSLVRHRDRLIVARAVHIQHMQKALHLMNLQLDNVLSDITGVTGMRILRALVAGERNLDTLASYRDPSCKSSAQVIRESLKGNYQEEHLFPLRQSLELYDYHTTMIQQCDREIEQKYRALPSRVDLQRKPLPPSKKQQKKPRKNAPTFDLRSRLYEMAGVDLTAIDGCNAATIQVVLSETGVDMEPWRTCGHFTSWMCLAPHNDISGGKVLRSRAKKTKNRANTALRLAAQALTHSDSWLGAYYRRQRARLGAPKAIIATAHKIARIIYYMLKYQREFVDLGANHYEAQHRKRQINSLTKKAASLGLLLVPAKA

SEQ ID NO: 174616 - protein, 383 aa, unidentified
MRIVCGLDVHKDSIYLCILSSTGEIIERVFGVLTCQLQEMRDLMLTHHVEEAGMESTSVYWIPVWRVLEPHFRLKLINPYFIRQLPGHKSDVKDARWIAECMMKELVRGSFVPPERIQQLRQYDRRIYDLDDEMVRKLAKIDAVVQRCNIRLSNYVSNTDSKSYKSVIDRICEGVTDPKVLVEEIHGRIINRHGKAAIISSLTGCVTECDMDILRQLKAEIDMAGQHKQECMDKMQAVCEREYSAALQNLQTIPGIKMRAATSLIAEIGTDMGHFQTANHLTSWSGLRPRNDQSNKTIKSRRITHGNRYLRRTLIQCAWGASRTQGCFFNRFSYHQTQVRRKNRMKVQVAIARKMLVCAWHILSRNVQYKDFDNRIGTSDENG

SEQ ID NO: 174617 - protein, 343 aa, unidentified
MQTITTVGLDIAKSVFQVHCVDADGKVVLRRQLKRRYVVAFFQKLPPCLVGIEACASSHHWSRELQALGHTVRLMPPGYVKPYVKRQKNDAADAEAICEAVTRPNMRFVPTKTPEQQSCLTLHRTRHLFIRQQTAIINSIRAYLAEFGIVAPVGRNGVERLLEVVADAKDTRLPDIARACVAALGTQLLALKAQILAFDRRIMAWHRSNETSKRLDAIPGVGPALATALVASIADPKAFRSGRDFSAWIGLVPKQNSSGGKDKLGSISKQGDRYLRSLFTTGALAVIRYAKIHGTKRRPWLTALLARRPTKVAAIALANKIARMVWAMMTRGERYKEPVALAA

SEQ ID NO: 174618 - protein, 334 aa, unidentified
MQFNNFVGIDISKNTFDLALIKDNNASIFISDAFSNTHSGLVHLEEFLKKQGLKMEETLFCMEHTGIYCRLLSQYLTERKYAVWIEMPVKIIHSLGLQRGKNDRLDAKRLAEYACSKKGKAVLWDPPREVIIRMNDLLTLRDRLVESRKSLKQPIKELRDSGFTDAAELIESKCKTTLNAIDKEIKQIEKDLEDTINKDTNLKKLYRLATSVPGIGKITAMFLLYFTNEFKLFGNAKQLACYCGIAPFEHSSGTSIRGKTRVSHFANKKLKKLIHLVALSTISRNKELSVYYTRKVAEGKNKMLVINAVRNKILHRLCAVIRRGTPFQSEYQFA

SEQ ID NO: 174619 - protein, 428 aa, unidentified
MNEEDRTRLEEFRQFKKEIRGSGEYLIVGIDVAKDKHHAFFGMATGKTLLRRLVFDNNIEGFERLLVQVEALKVQQGLRQVVFGLEPTANYHKPLGEHLIRCGHKVVLVSGVAVKENRKSLDGRWDKHDVQDAANVADLLCQGKCLFYEYPEVVVRDLRDLLSLKRRLKRMEHGMRVRIRNHLVAKYFPELDRYYERSESGSLGIVRWCLDPSVIAGLEYGQFAQRVAPGKRRLSQESRLQAIWKLAVDSIGCEVGSAVEFEGKVMVEGLKQIREVLQATEEKIEEICSPFPEYSCLQSIPGFGPDVSAKVLGAIGDPFRFQDGKQVLKLAGLDLNAERSGKTSEAAVPVISKKGKADLRYALYQAAFIASSKNQGFMVYYTDKLRGREREPGIKTKMRVKLAAKLLIIAWTLMKKKEPFNPDYLKLE

SEQ ID NO: 174620 - protein, 402 aa, unidentified
MTYDYVIGMDGGKYFHHACVLDIDGTQVLSKRINQNEKSLRALFSTFSAHDHKVLVVVDQPNNIGRLTVAVAQDLGIDVRYLPGLAMRQLSRIHAGNAKTDIRDAYIIAHAAKNLPESLRSVDRVEEAFLQLKVLNGIDEDLARSYTRLINQIRSALVGCYPQFEQALRGQIIHRKWVLHLLARYGGPTKIKRLGKAKAAAFARRYKARNPEPVLDAIFAAISEQTVAIAGAHYAEMGVAMSAKDALLKLEHRKQIEQEVIELINDIPHTQILLSMPGIGPKTAAQILMTAGDMSDFPSVGHLASYAGLSPRTNQSGTSIMSNSLNRAGNKKLKNALWQSSFASIRFHERSRQFYERKRREGKRHNAAVVALARRRLNVLYAMMRNHEHYHDPTPSQEDLAA

SEQ ID NO: 174621 - protein, 392 aa, unidentified
MEYLKYGIGIDVAMKKFDVCLSLIDMVQKVTIKSSKAFPNSSKGFEDFLKWVDKNVKLPLPKVLLAEATGIYHENLAWFLYLKKCPVSIILPNKAKKYKESLGLKSKNDKIDAQGLSRMACEQAHRPWEPISENLYKLRMLTRQIQTLNEQATVVKNQLHALEHGMFRDRELEKMLKKHIALLDSHIQKLQRQVEKTVNEDPLLKERIDKITTVKGVGIQTAAVIVAELNGFELIHSQAQLVSFCGYDVVENQSGKRAGKTKISKKGNSHVRRALYFPAFNVVSRQVKPFEQLYQRVYERSKIKMKAYTAVQKKLLITIYALWKNNEAFDAERATNKDVTFRDAESKPSFSSVSEKLAGNEKKLAPGNPRAKQDGHSSKLRRMPSFSLNKIM

SEQ ID NO: 174622 - protein, 487 aa, unidentified
MVPMSVDESLAVRDLIEAYDVRDIGLGFLTPKLITMAKLAKKKQTAKGLRFEVVNPNAAGIDISPKEMQVCVPADRDGDCNRTFDVYTEDLHYIAEWLKACRIDTVAMESTGIYWLPIFRVLKDAGFDVILVNASDVKNYSGRKTDASDAEWLMMLHSYGLLKPCFQPENIARTMRNLIRHRDNLIRSASREVLHLQKAMEQMNLKLDNVFSDILGKSGQAIIKAIISGERDPKKLSALADPRCKTSKEEIEKSLQATWDEEHLFEMKQSDSLYQTYQRLIAECDDKISEIATEYAAMVDAPKAKLLRSEKYNTKKNQVGFDVEKAAFELWGVNVMRMPGMSRASLLRLLGELGQDFTTKFADVRHFVSWANLVPNNKISGGALLSSKVPKKKNPVGIIFRQAANTLKAAKCPLGDYFRHMRAKGGHLQAMVATGKKLASIFYLMVQRKVEYDENIYTNHRKTELQNKVSYLQKRLTRMQLELSNCG

SEQ ID NO: 174623 - protein, 450 aa, unidentified
MSPLALDVVTKTGKTPVLGRMLSKYVGRKTSSIENGITKARNHSRQRGNIMRVVFGIDVSKASSEVAILVNGEKIHGYTIPNDAIGFNRLLEDLGTVYQPEIVFEATGVYSRRLQAFFEDNSYAYIRLNPLESKKQLDSLRVRKTDKIDAEKLATSQFILNRKPSYVQEALYQELRDPSRFYQNLTEDIVCSKNRLHKVLQVTFPELENILSSPTGKQYWNLVMAFPCNSFVLELDDAALRAIIRQSTSKHISENRVTYLVDKLTKLANQSYCAVKKTSPMMEEVKYYAGELLRLSEYRQSVLEKMITLAQPLPEYEILLSIPGIAETTATSIIGELGDIRRFHSANQINAFIGIDLRHYESGDFLAKEHITKRGNPYARKILFKCIHNIASASHTNPCHIADFYEKRKRQSQVTSTKPHTIASIHRLIRTMYYLITHNKLYDYTSTQNR

SEQ ID NO: 174624 - protein, 359 aa, unidentified
MAQYYTGLDVSMEQTNIATVDDKGKIVFESSAKTDPKSIDTALKQAGFSIQKMSLESGAWSHWLVREISAMGWNITCIDARSIAPLLALKTNKTDRNDARGIAEAVRMQAQYIREVYQKSQESVNLGTLLAARRTLVEHRTAISNTTRGLLKAFGLHLGAAGADTFAISLKTKMDKQWPPLASCAEEKPNSNSKEYPVLALEALSKCFEVLRKEINAIDVILNLLSKKDDVMKRLTTVPGVGFLTAMTYKTVIDNPKRFKISRLVGAYLGMCPTQYSSGQTKRQGRISKRGPKELRTLLASAGMKLLTHCKKPSNLQTWGLKIAEKHGKKKASMAIGRKIAIIMHRIWSKNTLFEAEKK

SEQ ID NO: 174625 - protein, 344 aa, unidentified
MNKLNRIGIDLAKNVFQLHGTDRHGKVMWKRRLSRNKWINALQEVATTDCDIGMEACGGSHHWARVLHSYGYTVKLIPPQFVKPYVKSNKNDANDAEAICEAMSRPHMRFVAVKTVEQQDIQALHRIRAGLMSDRTGLANRMRGLVAEYGVVAPQTLTALQRSIPDWLEEADNGLSDRFRSLLHDLWGDLKYLTRRIDELDKAIRLLADENAVTQRLQQLRGVGPLVATALVATVASGQQYAKGKQMAAAIGLTPRQHSSGNKDRLLGISKRGDAYLRTILIHGARAVVSQAKHREDRLSRWCTDIARRRHPNVAAVALANKTVRMAWAMMKDESDYDPEFVST

SEQ ID NO: 174626 - protein, 359 aa, unidentified
MSLQQAVRPVIVGGVDTHKDLHVAAAVDGQDQVLGTNTFPATRHGYKTMLAWMRSFGEVTRIGIECSGTYGAGLLRYLQQASIMTLEVTSPDKSVRRKRGKDDSIDAENAAHAAFAGIRTVTPKTRDGMVESLRVLKVCRKTAIAARRVALQMIQTQIVSAPEELRDQLRSMTRMQLIRTLASSRPDLSGYRDVMMAYRIALKSLARRYVELHDEISDLDTMIKAIVDELAPDLVARTAVGYESAAQLLITAGDNPDRLGSEASFAALCGVNPIPASSGKTQRHRLNRGGDRAANSALHIIAIGRLRLDVKTQEYVARRLTEGHSKLEAIRCLKRYIARELFYLLRHRQREIGQSKIAA

SEQ ID NO: 174627 - protein, 340 aa, unidentified
MKIIGCDLHAAQQTIAMLDRETGEIVEKTLKHEAGIVREFYAALPAPVLVGLEATGSMGWFLQLLDELSITYRVGHPATIRKAETRKQKHDRRDAALLLQLLSENRFPAIWIPSTELRDLRALLLHRHQWVRLRTRVQNALHAIALGYGVQRGHALWNRDGQAMLAMLPLPPHAAHRRDELRALYQQLDEQVDRLDDRVKDAAAQRPRATELTTHPGVGHVTALATEVFLGDPTRFADGKALASYVGMIPSEYSSGARQRLGGLSKQGNPLLRFLWGEATMHAVRRDPELQRFYRRKLQQKGLGKARVAAARKLGIRLWIMLRDQIDYAEFCRRCPRRQS

SEQ ID NO: 174628 - protein, 354 aa, unidentified
MSQIPNTAIAVIGIDIGKNSFHVVGHDARGAIVLRQKWSRGQVEARLANILPCLIGMEACVGAHHLSRKLASLGHDARLMPAKYVRPYSKGQKNDFNDAEAIAEAVQRPTMKFVATKTAEQLDLQALHRVRERLVSQRTGIINQIRAFMLERGIAVRQGIGFLRKELPTILATRTDALSPRMLRVIEELAGDWRRLDQRIEGLTGEIEALARQDQACSRLMTVPGIGPIISSAMVAAIGTGDVFSKGRDFGAWLGLVPRQISTGDRTILGKISRRGNRYLRVLFVQAAWVVLVRIKDWERYGLKSWIEAAKRRLHHNVLAIALANKLARIAWAVLAKGRAFELTRTDDASVRPA

SEQ ID NO: 174629 - protein, 360 aa, unidentified
MSKYITIGMDLGNKKHTVCALGQAGKVLWRKDVANTPEALKPFFEENAGETVAMETGLCCRWISALAKSCGCDVLVGNARKLEAIWKSKRKNDSRDALLIAQIAQANRELFHPVELRDDERHEMVQIIELREVSVSQRTQAVNSVRGLCKAMGVFIPKCDASCFHKVAKEAIPAGMAWKFEPMLLHLKEIAATVKRYDAMLEKYARDHFKEEVELLQTIPSVGPITSCAFVALIADPGRFGSARDAGAYFGLTPGQDQSSETDAPKRITKTGNTLMRRLLVTAANYVLRASSPDTALKRHGERICARGGKVARRKAKTAIARKLAVVMLAMLKSGKAYDDGLAAGKATAGNAAGTVELIA

SEQ ID NO: 174630 - protein, 435 aa, unidentified
MDEVSDEPLYRDRVCGIDIGKAGMVATIRVPSERDPARRAAETREFGTTRREVLALADWLRSWQVPAAVMEATSDYWKGPFYRLEAEGFDCVLADAKQVRHLPGRPKRDPSDSRWLAACFERGAITPCFVATEEFRIIRLHTRYRRDLTGERTREKQRAEKLLESAAIKLSSVVTDLHGVTGRDIMNHLIAGQRDPKALAQLARGRARRKISELQAALDGAEFFTAAHAALLAAMLDRIDRLNGDIDRLTEVIEHLLAPYEEQLQQAESMPGWGRRAAEDVLAETGADMSRFPTGGHLASWAGRTPLDHQSGKRTGRARHKKGNKYLAAVTGETAVAAGKTQTREGARYRKIARARGKNKACVALGNTQLKVYHALLSRPGTRYEDLGPDYYDRQADTRRQIAHHVGKLGALGFEVTLCRIPEPEPGGPASTQAA

SEQ ID NO: 174631 - protein, 403 aa, unidentified
MSNYFAGLDWASKTHALCVIDERGGVVERFDIDHDAGGLTELRRRLRRFGSPPVAIERPSGLLVDTLVDADFTVVPIHPNAVKASRPRYRSHGGKSDASDAYVLADLLRTDGHRFKALTPQSDEIRALRALVRGRDDLVATRVHLANQLRTLLESFWPGAAAVFADIDSPIALAFIERYPTPESASRLGPKRMAAFCAQHAYCGRRSPDDLLARLQEAPSAVSAETEMEAKGELARCVARTLTRLVEQLRLLSSRIEHLVASLDDGRILMSFPRAGRICAAQILAELGSVRERFATDAQLAAEAGVAPVTYESGKSKAVTFRWACNHRLRAAITCLADNSRHVNAWAAHVYANARARGCDHPHAIRILARAWLRVIWRAWTDRKTYDPMQHRAAQLLLKTAGG

SEQ ID NO: 174632 - protein, 419 aa, unidentified
MHEERRWFVGIDWASQEHVVSRCDGQGKKIGQRKFAHGGTGLGEMVVWLLKASGGEPGEIHIAIETPHGPIVEALLERGFNVYSINPKQLDRFRDRFTVAGAKDDSLDAYVLADSLRTDMQLFRRLTISEPLIVELREWSRIDENLKKDRLRLANRLWDQLWRYYPQILELADDLAAEWILDLWEAAPTPEKAARVSKTTVARILKNHRIRRFDTAHVISELRKPALSVAQGTIEVATAHIRVMVAQLRLVNRQLTDAQRQLDRLCKKLAEPIAGEEGENVSGQQQEHRDVTILDSLPGVGRNVLVTMLAEAPDAVQRRDYHALRNLCGAAPVTRRSGKSCIVMRRRACNRRLSNAAFNWGRTAIQNDPTSRAKYDAHRARGHGHARALRSVVDRLLYVACAMLENGTLFDPSVAAKKT

SEQ ID NO: 174633 - protein, 486 aa, unidentified
MELLYSRCAGLDVHKKSVSACVRVSTDGKTQKDNAVFGTFTGELEQLRAWLEKNKVTHVALESTGVFWMPVWNVLERSLANFELVLINPQHVHALPGRKTDQKDCERIAELMQYGLLKGSFIPPVPVRELRDLTRRRTHLQGERNRVLNRIRRLLETVNVKLGSVASDISGKTARLILAQISKGNYVPEELAKLAQASLKNKKGELIASLQGFYTEHFRWLLAESLQELVQLDGKLERGDKRIAIHLQPHADLIRRLCTIPGVEFTAAAVILAEIGFDMNRFPDPAHLASWAGLCPGNNESAGKRYSGTARKGNRYLRRVLTQSAWSIKRKKNCYLTSLFWRIAGRAGQKKAALAVAHRILTIVWHLIADGSTYQEFGANFHDQKHPDRSARRLIRRLEQLGFEVDAKPKAETATRITIEQPLQLSPPSPTPKLNTPQPAVAEASEVRPRPAKPSKPKFQKLLVKRKPRTPKPTSTTDANPAISRI

SEQ ID NO: 174634 - protein, 339 aa, unidentified
MVLYGGMDLHGDNVFCTVMDQEYRPVYERRLPNDLTTVLAALAPYRERLAGVAVESTYNWYWLVDGLRANQYSARLANPAKMQENIGLKSANDKTDSRFLAKQMAMGVLPEGYIYPKEERPVRDLLRRRMCLVHTRTGEWLRLEGHVARHSGKDLGIQALQNLDAGELNELLGKDTLTLAAAQISYRHIAFLDREILRIEKAVEGRVKLADGYERLIGVPGIGRILAMTIMLETGPIGRFPGPGNYASYCRAVKTEHTSNERKKGEGNGKSGNRYLAWAYIEAANFAVRYSPELRAWYQRKAARTKRVVALKALANKLAKACYFILRDGVEFDVKKLVG

SEQ ID NO: 174635 - protein, 334 aa, unidentified
MEKVTTVGIDLAKAVFSLHGVDGAGRAVLRRTVRRDQLVEVVAGLSPCLIGMEACSGAHEWGRRFQEHGHMVRLMAPKFVAPYRKGGKNDGNDAEAICEAVTRPSMRFVPVKSLEQQALLALHRVRQGFVVERTATINRLRGLLTEFGVVLALRSVTVRRQAALAAEALPELAKRAIGDLLEQLRGLDERINGYDREIEAQAKLCEPAQRLMKIRGIGPTTALAIVATVGNAREFKNGRQFAAWIGLTPSQYSTGGKPRLGHISKRGDAYLRNLLVQGARSVLNSAGMHQDRMSRWILQLQPRRGYYRTLVAIANKNARTAWALLAKNETLRVA

SEQ ID NO: 174636 - protein, 340 aa, unidentified
MDATTYGLDVAKRVFQMYWVEAETGEIVNQRFGRDELIRFLARRPPGRIALEACGSAHWWARRIKALGHEAVLLHAKFIRPFVQTNKTDAADARAIWTAVQQPGMRTVAAKTEDQQAMLSLHRMRALLVKFRTMQVNQLRGLLYEFGATFRTGRAAGLAEIRARTAELEDAIPGTMMCCLQDQLRRIEELQLDIDLLEKRIGVWHKQDAACHAITAIPGIGRLTATALVATMGDAKAFRSGREFAAFLGLVPRQSGTGGKVRLGPMSKRGDPYVRTLLIHGARSVMYNAKVPTPWQRDIQARRPANVAAVALASKIARTAWAILARGQEYQRDYVSVRPA

SEQ ID NO: 174637 - protein, 353 aa, unidentified
MNSLTDLRDVVDVVIGVDTHVNTHSAAVVDTATGGVLDEITVEATAEGYAELVEFANNHATLRAWAIEGTGGHGAGLSRHLMEMSEIVIELDRPKRSARRNGAKSDPLDAIRAAREAMARPRLGTPRSGGERQALSVLLAARRSAINASTEAQQQVFSLVIAAPEPVRARFRGQKLAAMLNTAARLRVHSSWDVETASTVVALRTLARRAHAMLKEARELQKAILVIIRSWRPDLLEEFGVGPIVAATVLCAWSHPGRIHSEAAFAMLAGVAPIPANSGQVTTRYRLNRYGDRQLNNALHTVVQSRIQYQPATRDYVARRTAEGKTGREIKRCLARYVARDLYRLLENTATTA

SEQ ID NO: 174638 - protein, 332 aa, unidentified
MNMHPQGGVANRDHRPNVGVDVCKQHLDVCLGTLELRVVNDATGWDVLIAKFKEEDVDLVVLEATGGYERGLVCALQGAGITVARVNPRQARDFAKSMGVLAKTDQVDARTLRDFGDVLARHKDRGKFITPLVDEQRQVLAELMTRRRQLVDMRVAENNHLEHAGKHSVRSIKSVLKTLDRQLEAIDHEVDDHLDRHFKDQRTLLDSFKGVGPVTILTLTAALPELGSLGRRQIAKLVGVAPLADDSGPRKGKRRIWGGRADVRSVVYMAALAAIKHNPAIEVFHSRLIAAGKPKKVAIVACMRKLLTILNAMLRDQSMWNAAKHLQNTKTA

SEQ ID NO: 174639 - protein, 367 aa, unidentified
MGDIIYCGVDFHARQQTICCLKTETGELTSHELKHDHKEALRKFYSELGGPVIVGLEASGYTPWFEQLLEELGHQVWLGDATEIRRRARRRQKNDRRDAELILELLCHDEFPRIHRPSPESREILRMLRYRHKLVKLRTIVKNSLQSLSIQAGLSLQARLFTRQGTQQLEALAMSPVMRQQRQQWLELLQELNQRITGTEGWLKQQALADPRISLLRTHPGLGLLSSLGIVHTLIPVSRFPNPRKLAAYGGFDPMERSSADKKRYLGISKAGSRLLRFLLIEATQTAVKTDPDLKRFYHRLVQRRGKPKAKVAVARKLLIRSFIMLRDEINYAEFQQRAIAARLAREFARPNVPVPLIGQPASPAKG

SEQ ID NO: 174640 - protein, 316 aa, unidentified
MNPQVFIGLDVSKQHLDVAVRPQNRHFVTPNDDRGIKQLVKRLAALKPQLIVLEASGGYEFLVTAALAEAQLPVALVNPQAVRKFAGATGKLAKTDKIDAQVLAHFAEALRPEPRPLPDQEQQLLKAALQRRVQVVKMIGQEKNRLEKTFIPSVRQDIQAHLAWLHQRLEQLDRDLNDQIRRSPLWRDRDRLLRSIPGIGPVVSRAVIAQLPEAGTLPGKKAAALVGVAPYNRDSGRFRGKRMIRGGRSYLRRMLYMAAVVASRWNPVIRTFYQRLLAAGKPKKLALTACMRKLVLILNAMVKNNQPWNQFITQVP

SEQ ID NO: 174641 - protein, 371 aa, unidentified
MNTVIHIGIDVHKDSYSLSAFNFSSNRSFGQSRIDSKSSLVIKYVERLHKEYHGCEFICGYEAGPTGYGLYRDLERVGIPCVIMAPTTLPKASGNRVKNDRLDAQELARHLAFGTYGMVHVPTPQDEAVKNFTRLRNTRKEALRKAKQNLLSFLLRMGRSFDESKTYWTHLHFKWLKGQKFNDMVAQETFDEYLQEVHDQQEKVERYNQRIEELAERDEYREKVAKLCCFRGIETHTALSLVSEIGDFSRFATAQQFSAFLGLVPGEESSGQKERRGAITKAGNTRLRMLLIEGAKSTLRSSIFGKKSKRLLARQKGNDAEVIAYADRASRRLHRVYGRLTTRGVHYNKAAVAVARELSCFVWGMMNDRID

SEQ ID NO: 174642 - protein, 387 aa, unidentified
MPQLNDLSRCLAALDQDSTLIAVIEMSQSTWLVTGIVPGVERHPAKKLEPDEGALLGLLHRWRDEAGKAGRMITRIAVAFEAGRDGFWLARWLRARSVEAYVIHATSVAVSREHRRAKTDRLDSALLKRAFLGWLRGERDHCSMAAIPTLEEEDAKRPSREREGLVSERTRIGNRMKSALARLGIRGFKPSLRTAPARREGLRMPEGTPLPPNTLAELQRDLARLHLINDQIREIEAARRKRLEQRPDDGAHPMVRLLARVIGIGIETADMLVQEILSRNLRDRRAVARYGGLTGSPDESGARRREKGLARAGNARVRRGMIQLAWRFLMFQKDSALAQWYRGRTADARGATRKTMIIALARKLLVALWQLVTTGEIPHGVVLRPAA

SEQ ID NO: 174643 - protein, 295 aa, unidentified
MPQEARIVGIDVSKLKVDACIRSLRQRLSQPSTPQGEAALIAWLRQNRVGLAVMEASGGYERGWAEALRKAGIAVRVVDPKRVRYFAKSAGRLAKNDPIDAEMIAWFGETFSPQAEPIHDPERLALDQLVTARRRLVGLATQLAQLAEHRQPPVVEQAQRAIARTIKTHLARVESAIDAKIGANPGFVARAAIVRSVPGLGPHFAAGAIAWLPELGRISNKAAAALVGVAPYDDDSGGHQGERRINGGRREIRDLLYMATLAAAGRHNPVIKAYYQRLAPKGRRPRWPSSPACAS

SEQ ID NO: 174644 - protein, 407 aa, unidentified
MGITCGIDWSESHHDVALIDEHGTVVARTRIDTGATGFHILLALIAEHGGSVDDTPIALETDKNLLVVALAKAGFTVYPINPRAVARYRERYGQAGGKSDPGDAAVLAHILRTDRHLHRPLPAVSEGGRAVKALARQHQEAIWALHQTVSRLRSVLLEFYPQALQAFPNLKHKAALTVLAAAPTPAAGQRLTRGRVVALLRRSGRGNHPALVEQILTDLHTPALGQPPRVEEAYGHTVRGLVAIVIAMGQAVDDLDTELAREFDQHPQAAILRSVPGLGPVLAARVLGEIGDDPARFDNPQGLRAYAGTAPVTIASGRLRYVKARKVRNKRFGDACHWWAYTMLTKSAGARAHYDRRRAAGDHHNAALRNLANKLLGRLWWCLVNNQPWDEHGAWPDHGHTENPTAA

SEQ ID NO: 174645 - protein, 466 aa, unidentified
MENNYILYVGMDSSKGKADAAILKVSDRRSVKPKFLRKKLSFKFVKSEVTSFLETVRSYSDDNCTSICFALEVTGIYSTNVYNFIKDSLNDNESIRFLNTDFVNQWRNAHNIAKSDPLDAQTISTIIGTDSDVQYVNDNVFENKNGYQDLKALVHRHYQIKKIYSQEINRLIAQCDCLFPELQYVFEPKSAAFIAVLSSYPTTHDIINASRLEVFNIVYKATKHRCSMDKIDKLFELCHDTLVPDNISSYGRSIILDLVENIKTIKGQLKMIERYIRDVASLNPAYKLLLSITGCGPLTAATVIAETGDIKRFKNADCFVSYSGTSPRNKRSGTSVETLGKISKKGSRYLRHAIYMIAEFARRHNPVLKHQFERIKNGNKKRHKLANIAIANKIARYIYSIMKNKSSFVILHEHIMRLPEETRYAFFNSISLDFPKNTRKQIYQYSDINGEVHKFVYTKLEETMII

SEQ ID NO: 174646 - protein, 326 aa, unidentified
MATIGIDVSKKKLDLCWLRDAQAGKVKTRVFPNAHDHYPALLAWLLKQTNEEAGDLQVYLEATGIYHEPLAYWLHQAGVTVYVLNPARVRYYARSLGDQGKSDKKDSKRIVHFAQANPELTPWQPEPEEVRTLRQLAKRLETVQKDIQREQNRLEKAQFNRDTQAEHSITHVLALLRREAKRLIKEVDDHIDRHDGLKRDRRLLESIPGIGEVLSVHLLVTLRSRRFKSGRQVAAFMGLVPVEWTSGSSVRHAPRLSKNGDPALRQKLYMGAVVAMRHNPSIRRQYQRLCAAGKRKMSALGAAMRKLVHIAYGVLAHQKEYEPQPM

SEQ ID NO: 174647 - protein, 371 aa, unidentified
MEYQAFVGMDVHKETISLAVAEPGRDGEVRNLGVITNTPELIAKTVQRLIKRYGVVEFAYEAGPCGYVIHRQLESLECECRIVAPSRTPKRPGERIKNDTRDAALLARHLRSGDLSYVWVPDEIHEAMRDLTRARQIAANDVRTCRARIQTFLLKHGRRYDRKRWGYRHREWLANQSFDHCSQQIAFQSYINALEQAESRKGELEKQIAELVPAWSLGPIVHALQALKGIGLVIAATLVAEVGDFRRFTKPRQLMAFLGLVPGEHSSGANIRQRGITKTGNSPVRALLFEAAWCYRTRPKVGSWMWARQPDIEQEIKDISWKAQIRLCSRYRRLVARGKKSSVATTAVARELVGFIWDIATRVTPVDCAAR

SEQ ID NO: 174648 - protein, 432 aa, unidentified
MAEGKTGSEPEFAALVGIDWADRKHVWCLQAAGSRKREAGELEHKVETVEAWVAELCRRFGHRPIAVAVEQVKGALVFLLNKYECLHIFPVPSTTTAKMREALYPSGAKDDPRDADLLLDILGQHRDKLHRLSPDDETTRRVQNLVEERRKLTAERTAQSNRLTSYLKIYFPQMVEWFEKLDMPLVCDLLERWPTLEELQKVSPEELRTFFCQHHCQRGLRERRILAIGGAIPAKGDRAVIEAKSAVVKVIVQLIRSLLEGIAELDRKIAEAATEHPDFFIFDSLPGAGAVMAPRLLAAFGSQRDRYLCAAELQTYSGIAPVTERSGKRKWVHFRWACPKFLRQSFHEWAGHSIAQSVWARAYYQQQRDRGSDHHAAVRALAFKWIRILFRCWKDRVAYDERKYLAALAKRGSPLGKLLVVDMAACEIPCGS

SEQ ID NO: 174649 - protein, 403 aa, unidentified
MRPEAQIEVFIGLDVGKTAHHATLIDRNGEVLSTRAARNDQAALEALLRFAAEHGPAALVLDQPGSIAALTLAVCRQHGVPVAYVPGLVMRRAADLYPGEAKTDIRDSFVLADFARTHPGNLRWLEVADETLEELRLLSGYDDDLADDRVRVVNRLRDLLTSLHPPLEALLGPRLDHPAVRALLKRYPTPSALREAGRGRILRLLRQRAPRIAERLADDDVVVLNAQTITVPAEPRLGAIVMELASELDRLDERRDRLAGEIEAVFRSHPLGPILISLSGVGPRLGSKLLVEVGDGTRFASGAQLASYAGLAPVTRQSGTSIRGEKRSRRGNHRLKNALFLAAFCSLRHPASKAFYDRKRLQGKKHNAAVICLARRRCDVILAMLSTATAYDPHHADRTAVAA

SEQ ID NO: 174650 - protein, 383 aa, unidentified
MQPTQAQDFTQAGEVLAVSLELAVKGWKVGLHDGRREKPVVRRVASEVAGQRLAEAVKVMEETKKRWQLGPGCRVVVVYEAGQDGFWIKRALEQQGYEVWVVDPASIPVARRARRAKTDRLDAIKLVLSLLGWLRGERDRMHVVRVPALEVEARRHWVRDRGQLQKEIGQHRDRLRKLLRTLGCWESVEGEFAQRLEQGRVRCYDGSSLPRELQERLRRECARLALVEQQLAAVEEALLGQLPQAVVERIEQLSRLKAIGRIGAMRLVLELFWREFSNRRQVGACVGLVPQPYDSGESRVDQGISKQGNRRLRALLIEMAWMWLRYQPDSALARWFAQRTQGSGRSKRSRRVAIVAVARRLVIDLWRYLASGVLPAGVQLKAR

SEQ ID NO: 174651 - protein, 384 aa, unidentified
MESMVYVGMDVHKESYSLCCFSLGEGSFFGETKIDGRPELVKKYLDEMSKSLGDGGKEAKFICAYEAGCLGFSLQKALAKLGVECRVIAPTTLAREAGSSAKKTDRKDAKMLARNLAYGTCSFAHIPDEEDRETREYIRMRCAHRREPERMKQCILSFCLRNGHKYEGRTYWTGSHISWMKGLPFGETLKDILLEYLDTFEKLADKLERLDGELLKISDKPRYKASTDKLACLKGITKQSALTIVSEIGDFKRFGTPSELRSYLGLVPGESSSGEKTAGLGTAKQGNSIVRTQLAESSQSIVRGMRGYKSKRLKSRQMGQKADVISYADRGTERLMLKYDSLVARLVPHNKAIAAVARELACFIWGIMTGSMEGRPQAKKGRAA

SEQ ID NO: 174652 - protein, 343 aa, unidentified
MHKSSAELLTCCGIDVSALQLAVAVQTEDARCWQRGFPNRASGHRALIVWLQKIGGRVRVCLEATGLYSLDLALALHAASGIEVAVLNPKTANRFAATLCRSKTDPADAQVLCEYARRMPFQLWQPPSSIALQLRALTRHIAALAQQHTRDSNRLRAVSASIAGSGCVRQDLQRSLRQLQHRAEKMRAAALALIQQDAELRPRFALLLSMPGIGEISALHLLGELALLAPGLSVRQWVAHSGLDPAHHESGSSVRKPARISRAGNRYLRRALYMPALVAVRHDPHLRAFYQTLLARHKAKLQALMAVARKMLRAIFGMFRWRSDYDGSRLLPKIELPALAAVA

SEQ ID NO: 174653 - protein, 347 aa, unidentified
MKKLTTAATNWIGKQERLTIGLDLGDRSSHYCVLDESGRIVTESKTATSPKAMEAVFGGMTRSRIALETGMHSPWVSRLLSQHGHEVIVAHARNVRLIGESRKKDDRLDAQTLARLARIDPELLCPVKHRSAKAQADLSLIRARAGLVRARTALVNTARGLAKSYGQWLRGCNVRNLNPEKAEALSPELQVALQPLLAGIEAVSEQIGEYNERIEKLAQESYPEVKLLKQVKGVGTLIALTFLLTLEDQHRFSKSRDVGCYLGLQPGRRNSGQSEPQMHISKEGDPYLRTLLVQGAQHILGPFGPDCDLRRWGLKLAERGGRNGKKRAIIATARKLAVLLHHLWVSG

SEQ ID NO: 174654 - protein, 386 aa, unidentified
MPDVSSCAPAEVRLWVALDAHKLSIVVATLPPSGGRPEVSRIENTPKAIRRLIDRLGGRAGLAVAYEAGPTGWAIKRLLDELGVACDVIAPSLVPVRPGDRVKTDRRDAKKLVRLLRAGELTFVMPPSPEQEGLRDLIRCREDLRDARTRARHRVIKALLRYGHVYTDGKHWTIKHRTWLAQQQLVDPVAQLALETMRAHLEMIETQMRTVDAQLERLAHQDRWKPGVRVLRSFRGIATLTALSLLAEIGDFGRFGSARELMSYLGLTPSEYSSGESQHRGHITKAGPVHTRRLLIEAAWHYRHPPRLTERQREAETAAHAAGDELAPLVAARAWQAQVRLNHRHRVLSRDRGKRATVTNVAVARELVGFLWAAMTDQPLRQELAA

SEQ ID NO: 174655 - protein, 353 aa, unidentified
MTSLTDLREVVDVVIGVDTHVHTHSAAAVDARTGGMLDEITVETTADGYAQLVEFADEHAALRAWAVEGTGGHGASLTRVLERGGEAVIELDRPERAKRRHGAKSDPLDAIRAAREALARPRLGTPRRGGDRQALSVLLAARRSAVNAATDAQRQLFSLVIAAPEDIRERFRGRTLPGMVTIAAGLRVRACRDVETRTTVTALRSLARRARALAEEATAHENAIRAIVRSWRPDLLAQLGVGPIVAATVLCAWSHPGRIHSEAAFAMLAGVAPIPAGSGQVSNRHRLNRYGDRQLNRALHTIVLSRIRYDQTTRAYVARRTGEGKSTRDIKRCLKRYIARDLYRLLEQQPIEA

SEQ ID NO: 174656 - protein, 347 aa, unidentified
MFPFYLGIDLHLKRSYMVLMNAEGEVIDKRRLKNTEMASYISKNIPKETYAVMEATRNWPFFYDLLEKHVDRVELAHAKGVRMIAAAAVKTDQIDASVLAHLARLNFLPIAYAAPQEIRDLRQHLRYREWLIDERRRAKNRVHAVLAGYNLASPVTDLFGRAGREWLKEVAEKKLRPTSRKVVLETLTMIDQLDTQIKELAKDIPLPEELKPKAEILMSMPGIGKLLSAVILAEIGDISRFNSPKALCNWAGLTPRVHKSDEVVRHGRISKQGSRYLRSAMVCAAMTACRISPRWYGVYEHLARKIGRRAAKVAVGRRLLTVVYFMLKRNQPYEEDYEQRRAAEQGA

SEQ ID NO: 174657 - protein, 347 aa, unidentified
MHSTTIAVDLAKSVFEVALSERPGKVRTRRRLSRGQFSRFLAEQPPATVVMEACGTAHFWGREASERGHRVVLLPPHAVRPYVPRNKTDGADAKGLLEAVRNEAIRPVPVKSIDQHVLAGLHRLRSAWMATRTARLNTLRGLLRELGFAIPVGARQVVPTVRALLSEAESGLPAALRPALAEAAREIAELEARIREVERSLESMAEESELLAKLRTIPGVGLLTATALVAFVGDVRRFPSGRHFASYLGLTPREASSGLRRRLGAISKRGDPYLRMLLIHGARSVLLHAKRRPAHEHDRLRSWALDRERARGHNKAAVALANKLARVVWAVWRSERPFGSHERRGTN

SEQ ID NO: 174658 - protein, 425 aa, unidentified
MNDDVLIAVDPRQAGNTAAVLDPVTKTVLEAARSANSEDGHAQLTAFTSRWDRRRWAVEGCCGAGRSLAQRLVADGELVLDVPAKLAARVRVYSRGQGRKTGKHDAVSAGLAALHGTGILPVACDDATVSLRLRCDRRAELIAQRTQAVGRLHRLLAELTPGGMRRELTANQAQALLARIRPAGDVAVVRVHIARDHLAGIRALDARLKYLSGQIAALVTAPGTGLTGLFGIGPVIAGRILAEVGDVARFPTKDAFASDHGTAPIDASSGDQVRHRLSRAGHRRTGHARHMMAVTQIRCPATPGRLYYQRKRREGKTPKEALRCLKRRLSDLVHHQLLADRRGTIEACRSPTTPRPARPASTSPAPRSSRPHHPSGRHTAGHERVRRAGLERPPPRQHRDPRTPAPAATPTSPTRPKFSAETAPS

SEQ ID NO: 174659 - protein, 385 aa, unidentified
MKTNSQMTLDKYFRQCVGIDISKDKFTACLYMYDMASDAGCCTESIDFPNNRTGFNQMVKWSRKESQKGFPLVYLMEPTGSYYEPLAYHLHKIGQTLYVVLPNKARKFCEYEGIKTKTDAMDARCLALMGCKNRKLRPWEPPLPIYRELRQLTRLRADLVKMQTQMLNHIESIDHMEDVAPEVRKSYEKLLDTIEKQLEKNEKDIAAKLAQDKELETKVKRIATAKGIRVGTVTCIVAETQGFHLISNRKQLTSFAGLDVKARQSGKDDPRHHITKKGNAHIRAALYMPALSAAHCNRQMAQAYGRICAKHPDVKMIGVTAIMRKMLLLVYSLWKSGEEYDETRDNTHTPRKKEPQPTNSPEDCLKPNAEPPDWNAADKEGNPPF

SEQ ID NO: 174660 - protein, 319 aa, unidentified
MKTAIGIDIAKRKFDVAALRQGKYKTKTFPNTPQGFEALIGWLDGFSDLHVCMEATGVYGQALAVFLADRQVPLSVVNPARIAAYAKSELARSKTDRGDAKLIARFCHEKRDRLNLWQPPAPNERALQALVRRLDSLLEMQQMEHNRLAVAEAAVRPSLEAVSATLAAQIEAVREQIRRHIDNDPDLRQRRDLLHSIPGIGEATSAALLGLLGDVARFENAKQVAAYSGLSPALRTSGEWTGRTRLSKTGDSLLRKVLYMPALVAWRHNAVIRAFCERLKANGKNGKAIACAAMRKLLHIAYGVLKSGRPFDPEIALAR

SEQ ID NO: 174661 - protein, 352 aa, unidentified
MTAGLDLGDRYSYLCLIDTENGEVIEEGRLRTTPEAFRRRFASERPLRIAIEAGTHSPWASRVLEECGHEVLVANARKTRLIYANKRKTDEVDAENLARLARVDPKLLYPLKHRGESAQAHMALIRSRQALIGCRTQLVNHVRGAVKSFGARLPKCPARSFHKSASEHIPEALGPALGPILEQIGSLTERIRDYDRQLETIAKEHYPHETDLLRQVEGVGTLTALTFVLTLEDPYRFAKSRSVGAYLGLVPATDQSGDRDPQKRISKEGDEMLRKLLVGSAHYILGPFGHDSDLRRHGQKITSQGGKNAKKRAAVAVARKLSVLLHRLWVTAEVYDPLYNTHHRRQEQKQAA

SEQ ID NO: 174662 - protein, 391 aa, unidentified
MIYIGIDVAKDKHDCFITNSDSEVLFKAFTIFNNLDGFNDLYQKIESVMDDVTKVKVGLEATGHYSYNLLGYLIDKGLPTYVINPLHTNLYRKSLSLRQTKTDKVDARTIASMLMSDVNLKSYSDTSYHNEELKSLTRYRFDKVKERAKLKTSVSRLVCILFPELEKLVPTLHMASVYALLSEFPSAKHVATAHLTRLTNLLSKSSKGRYGKDTAITFRDAARASIGSNMPAKSLELKHTIKLIQELDSEIDEIEKEIKIIMDEINSPILSIPGINYRMGAMIIAEIGDFNRFDSPDKILAYAGFSPSTYQSGQLDGAYAHMEKRGSRYLRYALYNATKYVCHWDPTFAAYLAKKRAEGKHYNVAISHAVKKLVRVIYHLEKTKQQYIKAA

SEQ ID NO: 174663 - protein, 395 aa, unidentified
MASEYGFLHYLTEAEFDNSTSTVRKNDQETNFIGMDLHLDNVVVVVARNEIKDNTVRSKTVLSKKIKTVGQLNIDELFKVLEMYCQDKPHMAVVESTYNWYWLADEFEKRNWNLRLADPSTVSKAGFKYSDDYTDASYLAECVRNGSIRSMAIMPKDDRAVRDLARYRMTLVEDRGRLKTILVNMTANHLSIKLNADKLLKVIDEAVEKAASASDEGAADEVLSHYYDNRQIRTKMRSLLRRIRFLTNEVEALDEELTELIKPNVYATSLQSIKGCGYVTSMLIGLEIGDICRFRIAQGFRVLLSSGPDFQTLKRKSKGLGNAKNGNAYLSWALTELATFVVRYNPEAKRVYDRYFNRSRLRVKAIRSVAAKIARGIFMMLKNGEVFDMKRCFGG

SEQ ID NO: 174664 - protein, 410 aa, unidentified
MQTLVERGCGLDVHQATVVACLLIVLQNGKVQKQIRTFGTTTRELQSLREWLLSEGCTHIAMESTGVYWKPVYAILEGALEIVVANAQHVKKVPGRKTDVKDAEWIADLLCHGLLRSSFVPPKPIRELRDLTRYRRKLVESQTAERNRLLKLLETANIKLASVATDVFGVSGRRMLEALVEGKATPQEMAELAKGRLRQKIDELGPALEGKLEEHHRFLLRLQLDRLEAAEKDLAVLEQRLQEKLKPYAEQLTLLDEIPGVDWTLAAVIIAELGVDMSVFGSVSQLASWAGVCPGNNESAGKRKSSRIPKGNVYLKTALVEAANSAAKAKGTYLRDKFYRLKARRGYKRAAVAVAHKILVAIYHMFSDRVCYNELGDVYLDKLNKHHLTRNLVHRLERLGYTVTLEQKAA

SEQ ID NO: 174665 - protein, 331 aa, unidentified
MYVGIDYHKRYAVATSMDDKGQVVETVRLKNEPGDLIGFVDRLPEDSKIAIEATGNWYYFYELLEGKSPEIHLAHPLKTRAIAEARIKTDKIDSTILAHLLRTDLLPESYIPPREIRDIREVLRHRASLVSLRTALKNRIHAILSKNGIIIEYTDILGKKAKAQLKSLEIRSCYRLGIDGYIRLTETLQQLIEEVTKTIEAIVENNPQAKLLTTIHGISYYSALLIVSEIGDITRFPNAKKLCSYAGLVPSVYSSGGKTRHGNITKLGSKWLRRIMIEQSQHFAKSCNRLERMYARIAYKHGKNTARVAVAREMLKIIYSMLTNNRPFAKE

SEQ ID NO: 174666 - protein, 353 aa, unidentified
MTTTFTKEYDTFIGIDVDKSNFSFTIIDNDIMKKPKTIPSAPEQLYNYIRKHYPDKRVLCAYEAGPTGYGLYDHLALNECECLVVSPNTIPKASNEKVKNNNMDSRKIAENLRAGRLKSIRVPVGSYRELRNLVKIRENYADARKVAKQRIKSLLLHASLYQFIKEPDKSWSNRFIQDLKQIPCTNAVRTRLDMLLMDLDYARNQLLESHRYLRKFVNNTADIHRNIEFALSVPGIGFITAVTFFAKSGDPAHLQNTRELAGFIGLTPTEHSTGDTEHRGPISHLGDSKLRILFVEAAWVAIRRDAELRHFYHRIASRNHPKGASQKAIVAVARKLTERLYRVLKDQRKYLVH

SEQ ID NO: 174667 - protein, 332 aa, unidentified
MKYIGMDIHKEFCVVVEMDKEGNLIRQDKIDTSKEAIQEYFSSIDEAKVAIESTGIWEWIYEIIDAIGLEVKLVNPVKTRAIAEAKIKTDKVDSTILAHLLRSNLIPEVYVGNKEMRELKRLVNERLFLKKQIVQIKNRIHSELLRRGIRTEMNIFTKNGRKYLRELKIDSIDRELNILESIEREIKSINEELLQYYEKNEDAKILATVPGIGYYTAVALSAVIGDINRFSSSEKLSSYFGLAPSTKQSGNKTYYGNITKEGPAEIRWLLIQCAWTHVNYCKNSFLTKFYERIARKKGKRKAIVATARKMARVIYWMLKNKEPFHIEGYEPR

SEQ ID NO: 174668 - protein, 468 aa, unidentified
MLVPSRRRVSTCSGRADGALLLDRAPGRSVRGSTAGGMSCLEHRSISALRVLSGLEGMSSGRRSGVIYVGIDWAEAHHDACVMDEAGTVLAKGRVPEGVEGLAKLHEMVSAHAEEPEQVVVGIETDRGLLVGALVASDYRVYAINPMAASRYRDRHQVSGAKSDPGDAKVLADLVRTDRRNHREVAGDSELAEAIKVLARAHQRMVWARARQTNQLRSALREFYPAALEVFDDLDSSDALAVLGVAPTPALGRQLSRSKIKKALEREGRRRNLDQRTAEIFEGMRTPQLEAPQLVAEAFGSTVVSTVAIISSMNTEITRLQDELERRFESHPDAEILRSLPGLGSVLGARVLAEFGDDPTRYADARARRNYAGTAPITRASGTRRVVLARMARNKRLADGMYLWAFCSLQTSPGARASYDRQRSAGKTHHQALRSLGNRWAGILHGCLTHRTVYDEDVAWPSRIEAAA

SEQ ID NO: 174669 - protein, 339 aa, unidentified
MEVTTIGLDLGKDVFQVHGVTADGTVAFNRSIRRRQLPAFFEKLPSCLVGIEACGSAHHWARELRAIGHDVRLMPATYVKPYVKRGKTDAVDAEAICEAVTRPTMRFVAVKEKEQQALLAMHRVRQLIVRQKTQILNVIRGLLREFGHVIGRGPVAAMRFVKACQAGDDPDIPDLVKSVLKTLCDQAIALDERVVFYDKLIDYHSRIDERAKLIRTVPGVGPVTASAIAATIGDGTQFRNGREFAAWLGLTPLNRSSGGKERLSGITKKGDRYLRRLLVIGMTSQVQRARTYPERVHPWIMQLLERKPVRLATIAMANKTARIIWAVLTTGTAYRQSAA

SEQ ID NO: 174670 - protein, 348 aa, unidentified
MLADQLDYVVGVDPHRDTHALAIVDVRTGGVVFEASVEASSIGYARALELARGQAPGRRSFAIEGAGSFGAGLSRFLSGEGERVLEVGRLRRERRSGGKNDALDAIRAARSVLAESRAAEPRAGGEREALRALMAAREGAVKARRAALCQLRALLITTPESLRSELRPLTRAQLLRRLGSVRPDRRRDVELRGTLRALRALARRVRQLTSEERELAGEIERLARALAPQLLEQAGVGPLTAAQLVISWSHQGRIRNEAAFARLAGCAPIPASSGQTIRYRLDRGGDRRLNRALHMILVTRRRSHPATIAYIERRVQEGKSSREASRCLKRYLARNLYRLLEHGAPLAT

SEQ ID NO: 174671 - protein, 430 aa, unidentified
MTITSTMFLGIDVSLDTNQVCAMNYNQDVFFNKSFKNTVTGSEELVNNVLSVISSKKFSHLTVCMESTSIYFFHIANYLSTDNQLAQYNCKVYCVNPKMIANYKKSYLDRPKNDPSDAWLIADYVRVGRCNKLRQCRGASYVALQRLTRYRFHLAQDLSREKNYCLNNIYLKFSNLRKKDGKDDKDNPFSDIFGATSTAVLTDFLTIDEIATTPVEDLVAYLNEKSRGRFADPNEVAMLLKKCVSQSYRLDKLSYDALNITISSNIRMIKALETELKSIDKQITDYAKGIDSNAMTVLQSIPGIGPVFAAGILAEIGSIDCFDNEKALARYASLTWKDHSSGKVISEDNELVHSGNPFLKYYLEMACGLLINHDIKYKAYYSRKYNEAKTHKHKRALVLTTRKFVRMIYSMLRYNTLYCDQATGEVQIIE

SEQ ID NO: 174672 - protein, 391 aa, unidentified
MIYAGIDVAKDKHDCFITNSDGEVLFKSFTIPNNREGFETLFQKIQSVSDDLTKVKVGLEATGHYSYNLLGFLLDKGLPTYVINPLHTNLYRKSLSLRKTKTDKVDAHTIASMIMSDVNLKSYSDTSYHNEELKSLTRYRFDKVKERAKLKSSVSRLVCILFPELEKLVPQLHMASVYALLSEFPSAHAVASAHLTRLTNLLSESSHGRYGKETAIIFRDAARNSIGSNMPAKSLELKHTIKLIQELTSEIDEIENEIKIIMDEINSPILSIPGINYRMGAMILAEIGDFSRFDSADKILAYAGMSPSTYQSGQLDNCYSHMEKRGSRYLRYALYNATKYVCHWDESFGTYLAKKRAEGKHYNIALSHASKKLVRTIYAMEKSGQAYLPAI

SEQ ID NO: 174673 - protein, 316 aa, unidentified
MSQSDVFVGIDVAKAQLDVALRPTGDTWTAPNDEAGLAHIVERLGPLRPALIVVEATGRLELPLLGALMAAALPVVVVNPRQVRDFARALGHLAKTDRLDAQVLALFGERVRPTPRPLPDPATQALSALVARRRQVIEMLTAEKNRCGQAPPALQPDIAVHITWLETQLQHLDDALGQQIRNSPGWRTQDELLQSAPGVGPVLSRTLLADLPELGRLSRKQIAALVGIAPLNRDSGTLRGVRTCWGGRAPVRAVLYMATVAATRCNPVIQAFYRRLCAAGKAKKVALTACMRKLLTILNAMMKHRTPWHAERLQRA

SEQ ID NO: 174674 - protein, 340 aa, unidentified
MNYMGIDHHKQYSQMTLMDEEGKELKNERVWNFRSEVEKFLQGAGDEVKAVIEAGRSSYTMVDLLEELGVDVKIANPKEVKAIAKAKIKTDKRDSRILAHLLRANLIPEVYQRSGENRRRQRVLRQRAFFVGTMTRVKNKIRALLAQQKEEIGIEISRVKNLFSRKGLEALNGLDLPDTDSELVDGLLKMYQQLEERIKESDELVENLYNKMPETQLISTVPGFGKFFSVLVATEIADVGRFSRVEKLHSYAGVIPSTYSSGERHYHGRIIKEGNKWLRWAAVEAVWPAIKSDFDLRLFFNKQAKRKNINAAKVATARRLLTIIYRILKERRSYVPYKRS

SEQ ID NO: 174675 - protein, 316 aa, unidentified
MNHKETFIGIDVSKKQLDVAVLPDAKNKVYPNNEQGIDHLTGFLKSLAPTLIVLEATGGLEMPCVGVLAAEGLPVVVVNPRQIRDFAKATGRLAKTDAIDARTIARFGEAVRPEIREIKSPETQELAALNTRRCQIIQMITSEKNRLATATKWTREDIKENLAWLKERLNGVNDELNKSIRNSPVWREKDDLLQSVPGIGPVASATLLSQLPELGTLNRRQIAALVGVAPLNRDSGIMRGKRCVWGGRAGIRTVLYMATLVATRFNPIIAAFYRRLCNAGKAHKVALTACMRKLLTILNAMVKNNSHWSPVCPANS

SEQ ID NO: 174676 - protein, 467 aa, unidentified
MALTLGIDVAVRAAHQATLARDGMTVWRGRKFMTRPGELERLWADVGAQDPAEVTVVLEPTRNAWIVIGEWFRRRGAKVVMVPTTQSADLRKYYSKHAKNDRIDSELLARLPLLHPEGLRPYSGQGPADPLRRLTKQRSTMVKRRTAVYARLDALIELLGPAWYAVLGSNYGNAALEFLARYADPHAVIRLGQARLARFFIARSRGNWRDEHAGGLIVAARETLALWNSDSADGMDFAELSADIAHEAEQALFLTRQIKEIDERIANLYTDADPQGIVASAPGVGPTVSAVIAGRIGDPHRFTSLAAIRAYTGLVPKVSQSGVVKTESSITKAGDPLLREMLYTAADQARRVDPQFAAKYQRLMAGDRHHDSVICHLATMLVTRIATCMRAGQPYQLRDIDGTAITESEGRAIIKERYQLDPRQRDHVRHKLMRRRRNKAGQESQKSPSAPTSQPAEPKPTTSPQVA

SEQ ID NO: 174677 - protein, 372 aa, unidentified
MTSIIYVGMDVHTTNYTLCCYSMEDDRFFAEVQVEPDAKNILKYLARIEKQQSRDCRIVCGYEAGCLGYSLYHQLHAHGIDCVILAPTTMMTKPGKRIKTDRRDARLISKCLAFHTYSPVYIPTEVDNAVKEYIRMRDDANSALARVKQQIVAFCIRHGKIHDGKSYWTNKHLEWLSSLDLGNKILSEVLQEYLIRYYQLREQVDMYDMRINELAQAEPYRQKVEKLGCFRGIAAHTALSFCVEVGDFRRFATAQQFASYLGLVPGECSSGDKQQYTGITKAGNSHLRKLLVETAQVFGRSATKSGKSVALKERQAKCDSLTVAYADKANARLKKKYFKIAMRSKVNIAKTAVAREMACFIWGMMTDNISCA

SEQ ID NO: 174678 - protein, 406 aa, unidentified
MEVLYPRCAGLDVHKATVVACVRCVSRPERREVRTFGTTTNELGVLAEWLQSSGCTHVAMEATGVYWKPVWHVLEGRFELVLANAQHIRNVPGRKTDVNDATWIADLLAHGLIRSSFVPPARIQDLRDVTRTRKQLVREIAQHTLRIQKTLEDANIKVASVLSNVIGTSGRSMLGAILAGEEDPERLADLAVGTARRKHGELVEALRGHVTPHHRQMIKLHLDLIAALQKALDELDDAAGKLLAPIHERAALLTTMPGIADIAAQVIVAEIGVDMSRFPTAGNLVSWAGLCPRNDESAGKRRSTRVRKSGTWLKTTLVTTAWAAVRKKDTYLQAQFLRIKSRRGAKKAILAVAASMLTACYFMLRDGVPYRDLGPAHFDRRDRTKTIRRLIRRLGDLGCRVEVHAA

SEQ ID NO: 174679 - protein, 428 aa, unidentified
MNTPTSNPPVVAWVGLDWADQRHEIRLQAAGSPRLESFSVEQKPEVFQAWVAELRARFPQGRIALALEQSRGAVIYALMNYDFFLLYPIPPKTLARYREAFASSGAKSDHSDADLLLELVRTHGDRLRAWQPDDALTRQLRLLVEYRRKTVADRTRLTNRLTDLLKTYFPQALDWLGDLRSLAACEFLGAWPTLEAVQGANRPALRRFFHDHRRLSAEEREKLLDQIRHARPLTQDRAVLEASELMTQTLVEQLRAVITALARLDQALEELFGQHPDQQLFDRLPGAGEALGPRLAAAFGTDRDRYQSAEEIQQFSGIAPVTAASGKMRWVHWRWACPKFLRQTFHEFADASRKKSLWARAYYQQQRQHGVSHHAAVRALAYKWIRILYRCWTTRTPYDEALYLRALQRRHSPLWLAAASLSTQEAHP

SEQ ID NO: 174680 - protein, 451 aa, unidentified
MNHYSLFVGIDVAMRKHDCCIMDKDSKILLKKFTFSNTLPGYQKLVDKLTAITTDKACISLGMEVTGIYGDNLYERLKMDGFNVIMIQPESVNSYRKYKKLPKNDKLDARCISEILVRNEAVPVSPQKKEYAELKSLTRRNACLKKTLTQEKNRFLARINVYFPDLLNVFKTGFTTMKAVFSSYSTPYSIINADQEELLTLIKSASKNRYGEEKMKELVEAAQNSIAIRTHISDEERFHILSLMDFVHYLESQIHELERLIDAKASHFPAYRMLLSFTGCGKPTAATIIAELGDLSRFHKASQIVSFAGLFGYNSDSGDSVNKRGKLSKKGSRELRHALYMVAEFARRNNPILKDYFTRKKNGDRKKHILAVNTVANKLCTILFSIMRNESLYVIKYRDLAKLPELTRNEFFHNIETDFSATTRKKKYFYEDALGEVHEFVYRSTSMLSIE

SEQ ID NO: 174681 - protein, 398 aa, unidentified
MAAIIVADEQGGLRKEVRTFATMTADLLALSDWLLGLGVSHVAMESTGEYWKPIYNILEANFEVLLANAQHIQKVPGRKTDVLDAEWIADLLRHGLLRGSFIPPIGQRELRELTRHRTNFVRERATLVNRVQKTLESANIKLGSIASNVMGVSGRAMLEAIIAGTANSAEMAGLAKDRLREKREQLDKALEGRVKPHHRFVLSELLSQIDNLDETIARFDAEIEKYCRPFEEAVELLDTIPGIARRVAEIIVSEIGTDMSRFPTADHLSAWAGVAPGNNESAGKRYSGITRHGNQALTAALVQAAHAAAHTRNTYLSAQYHRLAGRRGKKRAIVAVAHSILVSAYHIIQRKEPYHELGGDYFDKQRPEATAKRLLKRLQQLGYDISRLEQPMALPIPA

SEQ ID NO: 174682 - protein, 371 aa, unidentified
MKQFSKYVGLDVHKETIAVAVADSDGGEVRYFGEIGNTPEAIQKLVRQLRKGDASLSFCYEAGPCGYVIHRQLSDLGWDCQVVAPSLIPKKAGDRVKTDRRDALSLARLHRAGELTAVWVPDGAQEALRDLTRAREDMKHLQRQAKQRLLAFLLRHGKRYDGKSKWTQAHDRWLEGVKFEQATQQIVFQEYVDTVAVLSKRLDALDGHLQSAASASVFWPVIEALMALRGVNLLTATTIVAEIGDLKRFASAPQLMAYLGVVPSEHSSGQNKTRGGITKTGNGHVRRVLVEAAWTYRHPARKTAVLQRRAERTPEVVQDIAWKAQTRLCARYRTLEARGKLKVQACTAIARELAGFIWAIGQELPQPAAKA

SEQ ID NO: 174683 - protein, 324 aa, unidentified
MQGKDTPEAKAEVQVYVGLDVSKAAIDVYLHPLGHVFRIANTNQGLRQLKSRLAGLKVVLVTIEATGKFHRQAHRTLHAAGYPVAVVNPLRSRLFAEAIGKLAKTDPIDARTLAVMGESLKLAASPPPAALIAELQELVLARRAAVTEKTALENRLGAAQSRFLIAGIKKLLKAVERHVAHLDTEIDRLIAGDPALARRQEILTSIPGIGRVVASTLVACLAELGMLSSKAIAMLVGLAPVACDSGESKGRRRIRGGREHVRSPLYLAAVSAVRCNPDLKAFYRRLRDEKAKPAKQALTAVARKLVTLANTLVHDDRLWVEKPA

SEQ ID NO: 174684 - protein, 331 aa, unidentified
MDEIIRIGLDTSKHVYQLHGVNAAEEPVLRKKLRRKEMMTFFERLTPTVIAIEACGGSHHLARSLETFGHEVRLIPPQYVKPYVKRGKNDAADAEALCEAMSRPTMRFVPVKSAERQAALMLVGLRDRLIRNQTQLANGIRGYAAEFGLIAATGLCKIEPLLGRIAADENLPALARELFAVQAEEYGLIQAELKVIEAKLTAWHRASSCSRRLAQIPGVGPVGASMLTMKTPDPGLFRSGRQFAAWLGLTPKDHSTAGKVRLGVITRAGDEALRSTLIVGATALLRRVREGSRKNASPWLLDLLKRKPPKLVAVALANKIARIAWKLMVSG

SEQ ID NO: 174685 - protein, 418 aa, unidentified
MELIHDRVAGLDVHRDSVTACARRTGPRGGTVTDKERFKTTTSGLGRLAGWLADQQVALVAMEATGVYWKPVYYALEDRFQVWLCNAYHVKNVPGRKTDMADAEWLADVAAHGMVRPSFVPPLPIRELRELTRYRKTQIDARAAEIQRLEKVLQDAGIKLTSVASKVLTQSGRAMVEALIAGERDPARLAALAKGKLRPKIAELAEALAGHFGSHHAVAARRILDHLDFLDVSVTALTEQITVRTAPYAAAIELLLPVPGLDRLTIEVVIAETGADMGRFPSPAHLASWTGLCPGNHESAGRRRRVGTPPGNQWLRRALIEAARAAARTKGSYFAAQYRQIARRRGPNKAAVAVAHSLLDVIWHLLSTGECFEDLGADFFDRRRDPERETRRLVHQLQQLGYSVTLTTTTTTTTTAAS

SEQ ID NO: 174686 - protein, 358 aa, unidentified
MADTDAGYRLFVGIDIAADTFTAAWRVAGGEVFPPDTGEQTPAGRAGLQQRLRATGLAPAATLVVLEATGPYWVALALGLHEAGYRVAVVNPRQAHHFAKAQLRRAKTEALDARDRTHLAATRQPTPWTPPPTVYHDVRQRLVARDALLAMRTQARNQRHALLPWPIVVEAVRRHRDELIADLDRRVACLDAAIAAVLKERVWAESLACLTSAPGIGLVTAAWLLVSTLNFTTSPEPTALTAYAGLAPMPYESGRSVRGRPRIGHDGNGRLRTALYMATLSAARYNPAIRAFYQRLRAAGKPVKVARCAAARKLLHQAWALGSKLQRFDPDHQQQQHEALPARAGGLTDQYRICLIAR

SEQ ID NO: 174687 - protein, 400 aa, unidentified
MQRIDYHVRSRAAAHEHDTSLFVALELSRSIWLVAVSAPGCDKISKYRIEAGDNDALLKLLSRLEAEAERRCGGPVKIVSIHEAGLDGFWVHRLLEANGMESHVVDAASIEVDRRSRRVKTDRIDVEKLLRTLMGWARGERRICSMVRPPTPTEEDERRLTREREILVTERTRHVNRTKSLLATQGVFGFEPMHKDRRTRLEQLQCWDGQPLPPRLKIELVRELDRLELVMSQLAELEAERDRALRARQAPARNVEQEPSPARSSVGDAGRQLLRLRAIGPEIASVLSLEAFYRSFGNRREVAAYAGLAPSPWRSGGIDVEQGISKAGNARLRKTMIQLAWLWLRHQPGSALSRWFHERVGDRRGKIRRITIVAVARKLLVALWRYVTQGIVPEGAEIKA

SEQ ID NO: 174688 - protein, 410 aa, unidentified
MEPILMSCAGMDVHEKKVDVCIVHGSFDKPPKFEIRTFSTMTSDLEDLMIWLKKYGVTTIGMESTGIYWKPIFNVMESDFTIVLANAQRLKAIPRKKTDIIDCKRIANLLRYGLLPNSFIPPREIRELRDLNRTRRKLVGTMTSEKNRLIKVLEAANIKLSSVVSKIYGVSSLALIQSLLEKDKLSREEISQLAKGKLKKKVDLLEKALNGKLTEHHRFLLRMHLENIDHTAKQIKKIDEEIQRKMVPFQKESKLIQTIPGISEVNASAILAEIGVDMSQFPDEAHLSSWAGVCPGNNESAGKKKSSKTQKGNSFLKGALTESAWAASKTKDTTYNAFYHNILRRRGKKRALVALAHRMLIDIYYVLKTGEAYQDMGFEAVRERAVKKQERSMIRFLEKAGYSVIKAEAA

SEQ ID NO: 174689 - protein, 324 aa, unidentified
MLATLGIDISKADFHVELSVNEKLRHRRFVNRKEGFKELCVWLTRHKAESVHACLEATGRYGDELALHLYEAGHVVSVINPAQIKAFGQSELLRNKDDRPDAGLIRRFCEKQQPTAWQPPSPQLRELQALTRHLENLHDTRQQQVNRLEGVNNKAVLKSLRKLVAHLDSEIQRTEKQIQDHIDNDPDLHRQQQLLSTIKGIGKLTAAKLLAELGDISSYKSARQVAAYAGLTPRNNRSGTLRGKTRLSKTGNARVRKALFFPALVAKRYNPIVRAFCQRLTRNGKNKMEVVGAAMRKLIHIVFGVLKFGKAFDPDHEFLLNSNS

SEQ ID NO: 174690 - protein, 525 aa, unidentified
MRLRSSSLLPLPVRYKIMENMYYIGIDISKKKLDICVLSSQGVLKEITVANHQQAIICQMKEIIEEFGMAEGGFVVCAEHTGQYGYPLRRACDVLGCTLWMENPAQIKYSIGMTRGKNDRIDARRIAGYARRFSDRLRPFKSLPHELERLKHLEAERSLYLNDLSKYNAQMSDQKEFLPEDVCRRKAGRMAPLIRALKLSIKSIEDEMSGIISRSEKLSRQMELLKSVDGVGPVVALNMIVATEAFTRFDNARQFCCYAGVAPFAYTSGSSLHSRSRVSKRAAKRIKSLLHMAAVSVAHRKDGQLKEYFLRKVAEGKNKMTVINAVRAKLVARMFAVIKNNQFYQGTYSGNTEVTEGKICSYPSNHRYYGSNIVDLSQSTTSHVNVNIELLRAYCTLTFESKDIPQGDIIEITLSGTSPFTILGTGGDGTIKTEERLLALSKTADRWNGGINASDQSSILVRYYSTKDKEWHSIYQDAPLITLKRNKRNIIKFINIDQATGESHFTMGEGEIAGTPTDSEHQEII

SEQ ID NO: 174691 - protein, 363 aa, unidentified
MEDVAVLSAHPSGGGHHHRPDGGDSHQQHAAPQPSRRVAVGVDTHKDIHVAVACDQLGVRLDELHIPTTNAGYDQLVHWATELGTVAAFGVEGTGSYGAELARMLRRRGYRVIEVNRPDRATRHRVGKSDPIDAEMAARAVLAGIAAGTPKTSDGDAEIIRMLKMAKDSAVKARTQAMNQIKAILVTSPAEVRESLSGLTDPKLLTRCAAFEPEQLTSPAAAARHTLRLLARRNLELRGEVKTLQVEIGRLAAKAAPHLIRKSSAWDPTAPRRMPVAAGDNPDRLRSEAAFAALCGSNPIPASSGKTNRHRLNRGGNRQANATLHRIAVCRLRWHEPTQHYTKRRLAEGKTKPEVIHCLKRDL

SEQ ID NO: 174692 - protein, 357 aa, unidentified
MVAGGRPLGPWSEDRFAAWSSARVLYPPKPAQLHEAAPTDLARTGIGFMKIHPGFVGIDISKHHLDVFDSTRATACRIANQPAAIAALLDSLEGRPALVLFEATGSYDRALRHALGAADMPFARVNPARARDFARAAGYLAKTDTIDARMLAAMAQALSLEADARADPLREQLARLHQRRDQLVACRKQERMRQKEESDDPLRSLETHLAFLDEAIAAFDDAIAALIKAHDELRDSCSLMLSAPGIGKVHAATLLALMPELGARSSKTVAALAGLAPFNADSGLARGKRQIRGGRRRVREALYMAAVAATRTKSRFAEQYRALRQAGKAPKLALIAVARKILVTLNAILRDRKPFYP

SEQ ID NO: 174693 - protein, 465 aa, unidentified
MTAYNQGQDGVKANQAIGGFDIIHPDAAGIDVGADEMWVCVPPGSVTENVRRFGTVTSQLHSIAQWLKECGVKTVAMESTGVYWIPLFQILEAAGLDVYLVNAHHVKNVPGRRKTDRMDCQWLQKLHACGLLNASFRPPGDICRLRSYLRHRETLVIAGAQHIQRMQKALREMNVLLDQVVSDITGTTGLRIITAILDGNRDFAQMAGWRDRRLKASVEQIMEALRGDYRAEHLFVLRQALEAYRFVEQQIQTCDREVEQLLISMEKAADKPKRPLPEGGLTGCEKRRGNAPEYDVQSHLYQLTGVDLTQAPGLGAAAVQSLIAETGTDMNRWLSEKHFASWLGLAPDPKISGGHVIGHNHRHVQSRAAKLFRISAMTLHRSPSWLGAFYRRMKGRRGGRTAVNATAHKLAVLYYRMLQSGRAYQDMSAEEYERRFQERILQNFKRRARQYGYELVQRPQPVPAL

SEQ ID NO: 174694 - protein, 429 aa, unidentified
METVSDRETIFARCAFLDVHKKTVEATVRLLQGQQVQAETRRWGTMTGQIQALAEWLETQGVTHVGMESTGVFWKPIYNILETRFTVVLTNPGHMKQVPGRKSDVRDSQWGAYLLQYGLLRGSFIPARWQRELRDFTRYRAQLEAERTRVANRLHKHLEDANIKLGSVATDILGMSGRAMIKALMEGEQDAAQLADMAQGKLRTKLPELQLALEGKVTPHHRLMLRLLWKELEAVEELMAEVDRQVQEVTRPYTPQIEQMDPVPGVDRRVAEVVLAEVGPNVDPFPSDQHLSSWAGMCPGNEESAGKRRTGRTTKGNRWLRAALVQAAWAASHTKRSYLGAQYRRLAGRRGKKRALVAVGHSILVILYHLLKDDRPYSDLGRDFFDRMNHDRLIRYYSRRLAELGQKVTVEPLPEVTPGEGMVNVPSPC

SEQ ID NO: 174695 - protein, 377 aa, unidentified
MRKNIRFVGLDVHAETIAVAVAEAKGEVCSLGIIPNRPEAVRKMIRKLGPPASLRVCYEAGPCGYVLYWQLTRLGVHCEVIAPTLVPVRAGDRIKTDRRDALKLARSYRSGDLTAVWVPDEAHEALRDLVRAREAAKKDQLRARHRLHKFLLRHGLRPREKIKAWTGKHLSWAKTLRLEPPALEATLLDYLTEVEHACERIARLERAIDQAIEAAPAAIRAVIDGLQALRGIARISAATIVAELGQLSRFSRPKQLMGYVGAVPREHSSGEHVRRGAITKTGNAHLRRILVEAAWSYRHRPNVGSQLRRRQRRASEQVKEIAWKAQQRLHYRYVRLMGRSKLKQQVVTAVARELAGFVWAIGVEVEKHLASRPVRAA

SEQ ID NO: 174696 - protein, 387 aa, unidentified
MGKVDDLSRSLTALDQEETLICVVELSRSSWLIAGMVPGIERQPLKKLEPDAQGLMRVIERWRDEAIRAERMITRIVLAYEAGRDGFWLARWLRARGVEVHVIHSTSVAVSREHRRAKTDRLDTAMLMRVFLGWLRGERGHCSMVAVPTIDEEDAKRPGRERASLVDERTRIINRMKAALARLGIRDFKPDLRNAPARLESLKTPEEVMLPPNTLGEIRRDMARLDVIREQIKTIEQARLESIGRSPDEPAHAMVRLLARVIGVGIETADMLVREVLLRGFRDRRAVARYAGLTGAPDESGTKRREKGLAKSGNSRVRRGLIQLAWRFLLFQRNSALARWYVERTSGTKGARKTTMIVALARKLLIALWRLATTGLVPDGVVLRSAV

SEQ ID NO: 174697 - protein, 323 aa, unidentified
MEVIVERAAALDVHKAQVTACVRTPAGGQGGAQEVAEFRTTVHGLLTLRDWLHAQQVSQVAMEATGVYWKPVWAILEDDFELLLVNARHVKQVPGRKTDVCDAAWLCQLLEAGLLRASFVPPKPIRALRNLTRYRKAQIRERSREANRLHKVLEDTGIKLDCVATDILGVSGRAMLDALVAGTTDPELLADLARGRLRAKLPALREALEGRFDEQHALLVGAILAHLDFLDEQIELLCGAIGEALAPLAAAVELLCSIPGVQRRSAENLLAEIGLEMSRFPSAGHLASWAGQCPGNHESAGKRRSGRTRKGSTCSSPSVRCDE

SEQ ID NO: 174698 - protein, 334 aa, unidentified
MKSEKLHIGVDVSKAKLDVFVPAQKEGMRPTTMEVDNGAEGFRAVRDLARKAGATVCVEPTGGYELELVAFMHRSGVPVAYADALRVRHFAKAEGSLSKNDRIDAALISRFADKIGVRALGPADIEAVELRRKAKLRQALVESRTALVSRLETEPDAGIRSMMEEQVRHLDGLIDRMERSCLETVAGNAETDALRERFTKVGGVGDLTAISILAGLPEIGRLPDEKLNRLVGISPEQRQSGTKERQRCIRGGRKDVRNALYMAAVASVQWNSILGAYYRRKRAEGHPHKWAIVPTMRKLLSLLNRIAGDPGFNPMPEPESTRQNAKAGRKRKSA

SEQ ID NO: 174699 - protein, 355 aa, unidentified
MDSTKYIGMDVHKESISIAVRNAAGKVVMECVIETKASMILEFIEGLRGDVLVTFEEGTWAAWLHDLLKPHVTRLVVCDPRRNALLQEGNQNDRVDARKLAELLQNNQLRPVYHGDHGLRTLKELVRSYLTITKDLSRTMTRVKAIYRSWAIPCTGQQVYSSRHRAEWLGKIVEPGVRRRAEFYYQQLDALRSLRQEVRRELLAESKKHKAWKRLCQIPSIGPIRAAVLLGILQTPHRFRTKRQLWTYSGLGIEVYSSADHHVVKGQLERKKKHVEIRGLNDNCNHDLKNLFKGAAVVASTKPGPFEEFYAALLAKGTRPEMARLTLARKIATIVLIVWKRGVCFDANHLKPQTA

SEQ ID NO: 174700 - protein, 337 aa, unidentified
MNNYIGIDVAKATLQVYIPKIDLDIEIANTNQGLKTLHSKLKKQYKKDINEIVLVYESTGAYSTILEHFAEEKKVKCFKVGAYQSASFSKVVKNRSKTDIVDARMLSTMHVIANDEDIKIPSRDIKAHQIRSYIKYYQSLVKDEIRAKNYLEAATFNLEDKFVIKQVEKKVQNLQKEQIDIIAKTMEIIKSNNEYYESYKNITSIKGVGEKSGIILLYLFLRYPNASRQHITALCGLDPIQRSSGTSVQHKERISKQGLSLVRAMLFMPTMAAIQHNEEMKLIYDRLVQRGKPKSLAQIAVMRKIILLAHSLYKNKEQYDEHRYLKFTQTKVDKDIE

SEQ ID NO: 174701 - protein, 392 aa, unidentified
MYIVGIDIGKNHHEASIVSPEGKQIGPSLRFATTHKGADSLMSFIFKNIGNSPCVFGMEATGHYWYPIYSFLKAKGYTIYVINPIQSDTLRKMYIRQTKNDSIDSFLIAEVIRFGQFTTTSMADENILAMRQLCRYRDSVISSRTEIKLRISTIMEQIFPEYEKQFSSLWLSTSMGILEKYLTPENIENAPIDELFEIIKDKSHNKLTMKKAISIREAAADTFGIKIAQDAFSFQLKQLIDRMNFLDKQIEALDCQILEYYEKFDCYLHTIPGIGMIAAATILAEIGDINRFKSSSALVAFAGIDPTVRQSGEFSSTHNHMSKRGSPYLRHAIFLAATARSFHNSPLNAYYKKKRDQGKHHLTATGAVARKLTTVIYAVLRDSKPYEPKKFC

SEQ ID NO: 174702 - protein, 316 aa, unidentified
MSAAPVFVGIDVSKAALDVAVHRPATRWTVDYTEATLPPLVARLTALAPALIVLEATGGLEGPLVGALAVAGLPVVVVNPRQVRDFAKATGRLAKTDTLDAAVLAHFAAAVQPAVRPLPDAATQGLAAVVTRRRQLVDMLTAERNRLSCAPVGLRKELQAHIRWLERRIAGLDTDLDHAIRTSPVWRAQEDLLRSTPGVGPIVARTLLAQLPELGTLPHKSIAALVGVAPLNRDSGLFRGRRKVGGGRAAVRAVLYMGTLAAVRFNPVLRPFYQRLRAAGKLPKVALTACMHKLLTILNALLKHQRRWDPAYAQTH

SEQ ID NO: 174703 - protein, 353 aa, unidentified
MNSSIKYVGMDVHKEMTVIVALDAAGIQLSRLIVRTNSTAILSAIRAIDGEVHLTFEEGIHSTWLYDLLKPYIAHLLVCNPNKIKKPLSQNKSDDIDAFNLANLLRLGDLKGVYHGEQSLRTLQELAHCYQYLVADCTRIKNRLTAIFRARAIAYRADALYRSQERKQWLAKLEPAVQHRARLLFAQLDALLPMREKAEAEMVKEARKHPAFKLITSIPYLGEIRTALIIATMLTPFRFPSKRPLWCYSGFAVVMSSSADYEQVDGRIVKTSKRAYSRGLNHNFNRTLKYVFKSAANAANTGVFKQYYDGLRAKGMKDSLARLTLARKIAAVTLTLWKKGEKFNPEKFLMATK

SEQ ID NO: 174704 - protein, 349 aa, unidentified
MEIDTIGIDLGKTVFHVVGLSRAGEVVVRRKFSRPQLLRFTANLGVRLIGMEACGGSHFLGGRLRGQGHEVRLMPAQYVKPYVKTNKNDYVDAEAIAEAVGRANMRFVPIKSDEQLDMQSLHRVRDRWVARRTSVINQIRGLLLERGIIFRKGRRHAEASLPAVLEDADNRLSGLLRMLLAQLRDELRQLQSQIDQADALIAKRASEHEPCRRLMAIPGIGPLTATAVAASIGNGSEFRKGRSFAAWLGLVPKQESTGGKQKLLSISKRGNHYLRRLFVSGARAVLQCRDKQSSGLSAWLGQLASRVHTNVAAVALANKMARVAWAVLAKSDAYRPPLAVIATEALACN

SEQ ID NO: 174705 - protein, 415 aa, unidentified
MALKIVYKICCGIDVHKTFVVACIASTNSKGVTTYESHRFSTYTKGLKDLLQWLLKHNCMDVCMESTGKYWIPVYNVLENDCTIVLAHPKYVKAIRGKKTDKKDAKWIADLFKHDLVAGSFMPPADIRQLRDLMRYRFKLTCFQSSEKNRLQNCLTVSNIQLGNVVSDTFGKSAQAILDKLLENPADTSFDLEPLVYKSLKKKLPELRDAIDGYISPEQAGKLKVIKAHYENLESRKAELEELILALAAPYQQELAILQTAPGIRSNFTAIGIISEIGTNMEAFPSAKHLCSWAGLTPTNNESAGKKKSVRVSKAGCYIKPLLVQCANAVVTSKKHPEIRNRYLRLKKRRGHKKAIIAIARMLLTALYHMLKNGENYNAELYRKSDLPPVDREITVEQAIIIARNQGYKIKSATA

SEQ ID NO: 174706 - protein, 300 aa, unidentified
MKLTTIGIDSAKNVFQIHGADERGTAVLKKQLKRDQVVPFFANLLPCKIGMEACGSAHDWARKLQALGHSVQLIAPQYVKPFVKRNKNDAADAEAICEAVTRPNMPAVPIKNASQQAILSVHRARQGFVKARTAQANQIRGLLAEFGIIIPQGISHIAKRVPEIIEDGENELPGSFRLLIQRLVDHLKVLDQQVGELEREIQAWHRENEASKKLAKIPGIGPMTASALVASVGNARSFRNGRQLAAWLGIVPKQHSTGGKATLLGISKRGDTYTGYPPRRPPPVVRDLRRPAPWISLRHV

SEQ ID NO: 174707 - protein, 425 aa, unidentified
MKITQTAQKIKVNFAMDVSVDVHKETLNFFFETKGKEYVDECSNRTTVIQKKLKAYHEVAAEHGMKTLRIICEPTGEYQNKMFRIARKMGFLTCFVNAESVSKFRIVESNDNGKTDTKDPRVIRTLGQLNKTIKHRRLDDDYLTLRKLNKVLDEVDDIKKGIRCRVSKLLVELFCDYSFEKDFLYGSSGKALVDKYGCNPYRIIKTGYRRFSTYMKKAVPRIRQMTLERLWDDAQSSALNEQPEEYIDVIEIQLKQLMEDYWRNEARSDAIIERMIEILNNLRKKDPNIPKATKGVINDKHIARLLGETGPLGDFTNWRMLMRYAGINIRMRQSGKFSGQNKITKKGRPLLRKVLQRIVFPLVRQNWLYGPYYHRKKEIDKMPGNKIITCVSRHFLKKFYGWYKSGEAFNQQRFFSCETQHRKAA

SEQ ID NO: 174708 - protein, 372 aa, unidentified
MGPTPDNMNKCCLHTELSSHEGTRSEFNSSKAVIKLGIDVHQEFYVVVLQEGGGNPKPAQRFKKEAFLSWAAQLKHKSGAEMHAVYEACGVGFGLQRQLAALGIACHVVCPQKLDERNKRVKTDGLDAKALCLKLDRYVEGNREALALVRVPTEEEEQLRAIHRQREQLVKARKQLEAQGRSLMVNHGLEPVQRWWKPRAFAVLAVPQWLKELLANSQPILVGLEEKIRALSVQLQAAASPGQPRGLGLMSSVVIDREIGNWHRFINRRQVGSYTGLCSGEYSSGQTRLQTCVTKHGNPRLRAALVELAWRLVRFQPEYRPVVKWRRVLAKGALATGAARKKAIVAVARQLAVDLWRIRTGRLQPEQLGLSI

SEQ ID NO: 174709 - protein, 424 aa, unidentified
MKVTYQTCCGVDVHKSFLVATIVKTTGGIEPSYLKKRFSTFNNSILEFKQWLLDNDCHDVCMESTGKYWVPVFNLLEDEINVVIANPKWVKAVKGNKDDTKDSKWIGDLFRLGLVKGSYIPCKKVRILREYTRYRYKLVSCRSSEKNRYQNALTVCNVALDSVVSDIFGKSSTSIIDYLLEQSGTSINHEEIASKLLRSLKSKEDAVIESVEGYQMTDAQKYRMRLVRAHMDYITAEINDVDKMIENMISSNPDFENAVQFLCTIPGVKRDSAITIISEIGTDMSQFSSSKRLCCWAGLTPGSNESAGKKKSVRITRAGVYLKPALVQCAHAAVKSDKSPYYKKKYESLVKRRGKKRAIIAIARMILTAIYQMLSTGEQWNPSDLYKIDMPVALVEKQKAKAIKQAKKLLQREGILPPDEPLAS

SEQ ID NO: 174710 - protein, 375 aa, unidentified
MSKVRFLGLDVHADTIAAAVAEPDGEVRPLGIIPNRLESIRKMIAKLGPAKELKACYEAGPCGYVLYWQLTAVGVACEVIAPSLVPTKAGDRVKTDRRDAAKLARSHRAGDLTPVWVPDANHEALRDLVRTREDARQDQLRARHRLNKFLLRHDRRPPEAVKKSWTLKYMTWIKEQVHFDQPALEATLLDYVHEVDHMAARIQRLEKSIDVAIEKAPPEIRAVIEALQALRGVAKITAVSIVAEVGKLSRFEKPRQLMGYSGLVSSEFSSGNRIQRGGITKTGNAHLRRVIMEAAWAYQRRPWVGGALLKRQQGLDQEIKDLAWKAQWRLHHRYSKLTARGKNKNQTVTAVGRELLGFIWAIGVRVEGRAAARAA

SEQ ID NO: 174711 - protein, 338 aa, unidentified
MYYTGVDLHKFSSYLTTVDSSGTIVKQDNLKNVAHNFVQYFNSIPGDHQATVESTMTWYWLNDLLTSLEIPLVLAHAKYVKAIAYAKVKTDKVDSHTLAQLLRMNFIPVAYKISSDNRTLRDALRARLKIVQRHTSITNSMHLLLAKYNYDSPTQLTGIPQFQYQQLSEVEALLNEQILDLEKQLYPFLIPNDDIQRLLWIPGIGKMNAFTILLEIDDIKRFPDVKNFFSYCRLVPSARNSGGKSKQRSSKDGNKYLKIAFCDATIHAVQYYPVIRKYHNALLRKKNKQVAKTIIAKEIAEIVFYILKNKTNFNNKFKGVELQHKKSLQWPRVVNPYA

SEQ ID NO: 174712 - protein, 485 aa, unidentified
MQVLYQRCCGLDIHKKLMVACLLIWTSQGVRKEIRTFSTMLDDLFRLRDWLKANDCQVVAMESTGVYWKPIWNVLEAELELLLVNAQHLKAVPGRKTDVKDAEWIADLLQHGLLRASFVPPRPQRELRELTRYRTKLVEERARLVNRIQKVLEDSNVKLASVATDITGVSGRAILNALLDGQDDPEALAELARGRMRSKREELAQAVQGTLREHHRFLLKSQLRQLDFFDAQISELDQEIARRLGVESGPDELGPLGSGSAAVNRFEEEKGTIPDEPGPLGGGSASERAVPSLGHASEGAERPEQPGAKHEPARQMSQAEARRILDEVTGSNRRIAEIVLAELGTRLDQFPSEAHLASWAGLCPAARISAGKRLSTKTGKGNRWLRQALIEAAHGAARSKNTFLGAYYQRLKKRMGSKKAIVALAHRILIILYHLLKEQQSDREPGPGHADEQAADSSKRWAIRRLEQLGFAVTLTPKDHQEGVA

SEQ ID NO: 174713 - protein, 346 aa, unidentified
MRFYDGQHQFYCGVDLHTKRMYLCILDHEGNKRLHRNVRSKPHDFLNAIKDFRDDLVVGVECMFTWYWLADLCLDEKIKFLLGHALYMKAIHGGKKKDDKLDSEKIARLLRGGTFPLSYVYPREMRATRDLVRRRMFLVRRRSELLAHVQLVNQQYNHDPFEKMLKYASNRDVLDRFAEESARLNVEADLQMVGHYDQLLKQLEANLLRQARLHDPKACCLLRTIPGVGKILSLVMLYEIHTIDRFPSIGDFMSYARLVTPKQTSDGKVTGHSGAKIGNVHLKWAFSEAVLWMLRYSEDAKALVKRKEKKLGKARAMTMLGRKIARAVYHMLKRKEPFDVVRFFAS

SEQ ID NO: 174714 - protein, 408 aa, unidentified
MDVLYPRCAGLDVHKDTVVARLRCVSQPRADEVRSFSTTTSALLELNEWLGSHGVTHVAMEATGVYWKPVWHLLEEHFELVLANAQHIRNVPGRKTDVNDATWIADLLAHGLIRSSFVPPAPIQELRDLTRTRKQLVREISQHSLRIQKTLEDANVKLGSVLSNVLGSSGRAILQALIAGQTDPEQLADLAQGTARKKRTELVAALHGRIKLHHRRLLKVHLELIAALEQALREIDADVGKTLAPIHSSARLLTSLPGVSDLTAQVMVAEIGVDMARFPSAAHLISWAGLCPRNDESAGKRRSTRVRKGAPWLKTALVTAAWAAVRVKDSYLQAQFHRLRSRRGAKKAILAVAASMLTAAYHMLKNGLQYRDLGADHFTRRDRSKAIQRLVRRLNDLGCNVQLIPQAA

SEQ ID NO: 174715 - protein, 329 aa, unidentified
MEVPQIIGADISKKNIDFACSLTKKNFRISNDDDGFKALSTWISEHGIDRSRLRVVMEHTGTYSYRFEQFLHSQSLPFAKVSALAIKRSMGLVRGKTDKQDAKRIARYGMEKADQLVLAQPVAEGLQRLQMLYSIRERFIRNRASMKTAVKEMQGAFGLKDTDSLIATQLKMIKSFDQQIENLEAQISDIVKADKSMDQNYQLVQTIKGVGKVLALATIVKTQNFTRFTDARKFACFCGTAPFENTSGTSIKGGTRVSHLADKGMKTLLDLAAKSAIRYDPELKQYYCRRTAAGKPKMSTINVVRNKLLYRIFAVVKRQTPFEPLSIAA

SEQ ID NO: 174716 - protein, 378 aa, unidentified
MIECLPESGYGRSIDLGLNKTVGQRGRHTLIPNKARTVARVNQTRMMQRRAKREEKLTTEEEVCVGMDIARDVLDIAVSNLSEVRQFNNDRKGITGAVRYIAGFKPARIILESTGTYGMPLAASLQSKCLPVIIVNPRQVRDFARATGVLAKTDRIDARILALFGLRIKPEVRPLPNKQAREMKSLLTRRRQLIEMLSSERNRLLQADEGVRPGIEIHINWLEEAISAITETLDSQIRSSPAWLEKDNLLKSVPGIGKVVATTLLIELPELGQLNRRKIAALVGVAPLNRDSGTMRGKRMVWGGRAKPRAALYMAALVATKYNPIIATFYRRLLDAGKVKKAALVACMRKLLTIINAMMRTMTLWNPELSNYFAAVVK

SEQ ID NO: 174717 - protein, 353 aa, unidentified
MAKRRRIIVGVDTHSATHCAAVIDQNGRLLGNDDFAASEAGYGRLVRWARSFGQIESVGVEGTGAYGAGLARHLVESDITVLEVPRPDRRLRRSRGKSDPIDAEAAARAVLAGTATVAPKHADGPIEAIRALRIARLGAIKAKTAAINTLRAMIVTAPEPLRATLPATGLPNKVIDACLRLRADSANLTDPTQATKAALRSVAARAKALGAEIAVLNKQLTQLVTNVAPTALATFAMGIDTTSALLVAVGDNPERLRSEAAFARLCGVAPIPASSGKTNRHRLHRGGDRSANRALHIAVIVRMRYCERTRAYVERRTREGLSKPEIIRCLKRYLAREMFQALRSDYKALVAPT

SEQ ID NO: 174718 - protein, 446 aa, unidentified
MSTPSLPVLDPTAAAIDVGSEQLHVSIAGGPPKVFGTTTGQLYELRDWLLAHGVKSVAMEATGIYWLCPYEVLEKGGLEVVMVNGKYVKNLPGRKSDMKDCQWQATLHAHGLLKPGFVPPEHIRRLQDYLRLRTDHITMAGSHEQHMQKALERMNLKIHDVISDLTGVSGLKMIEAMLGGERNPVALLALCDAQIQKNKAGALRQALEGTWKDEHLFALRQAYELWQSYQKKIAECDQAIGTVLQELAGPEDPKNPAPPATKRGGVNAPQIAGLHGLLWRLCGGKDPSTLPGVADYVLLQLLSEVGTDLRKPWPTEKHFTGWLGLAPGSRQSGKRRGSQKRGRNRAGRLFCVIARSVGRSVDKALGGFYRRLKGRRGGLIANLALARKLAELFWRLMVHGIAYVEQGLKKYEQKVAQTEQRLLQKLASKYNLVLQPKAPGPSTLPT

SEQ ID NO: 174719 - protein, 358 aa, unidentified
MQRNKISFKGQKIFIGIDVHKRNWDVAIAPEVGNVKRHSQKASAKELFDFLKKHYPDGDYLAVYESGFSGFATYYALKDVGITSIVIHAADVPTTQYEEVMKTDRIDSVKLVRALKAGLLKGIYIREKENIDDRSVVRVRKTIQKQLSGYKTRVKHMLYCNGVSFPERFEKPGSHWSRAFIKWLKEDVTLLSSTRNSLDLLIRQVETIRMTLLEATKMVRSLSRTERYKNKFELLMTVPGIGVTVSMCILTEVYDVRRFNNEKQFAAYLGLIPTSHSSGDKVAHGEKTFRGNKLLGPIIVEAAWISVFKDAGLASLYLHYKERMKPQEAIVRIARKLSNIIFAVLKNEKKYVPYHVGK

SEQ ID NO: 174720 - protein, 348 aa, unidentified
MDRYIGLDAHATSCTIAIVGPSGRRLGSQVLETNGQSLVEAIKVIPRPRHLCIEEGTQSAWLYELLSRHVDELVVVSVTQSRGPKSDASDAFGLAEALRLGAIETSVFKAPTRFTLLRELARTYSMITRDVVRTQNRLKSVYRSRGVATAGRRVYGQEEREDWLAKLPPPSRAAAMLLYGELDALRELKDDAREQLLAESQRHAISRVLETCPGLGPIRVAQLVPIVVAPERFRTARQFWSYCGLGIVMRTSSDWVRDGDHWSRSEVQKTRGLNRRHNSTLKEIFKGAATTVITKLSDEPLRHHYERLCAQGTKPNLAKLTLARKIAATALAMYKRQEVYDPSRHSKP

SEQ ID NO: 174721 - protein, 343 aa, unidentified
MDHFAGLDVSVKETSVCILDDAGRIVREVKVASEPEALLQVLTNPAYHFKRIGLEAGPLSQWFYSALAEAGLPVICVETRHMRAALKAQINKTDRNDARGISQMMRVGLYCPVHVKTIRSQKLRMLLTHRKLLQAKAIAIENDLRATLRNFGLKVAMVGTVKFEARIKELVENLPDLAVLVEPLLIVRRVLREQLAILHRRVLAIVRDDDVCRRLMTVPGVGPVVALTYRATVDVPARFRKSKAVGAVFGLTCSKYQSGEIDRSGRISRCGDEMMRVMLYEAAQSMLFHSTKWSWLKAWAMKIARHRGMKKAIVALARRLAVIMHRIWVDGTEFRWTKEVATA

SEQ ID NO: 174722 - protein, 340 aa, unidentified
MHTITTIGLDLAKRVFQVHGLDQNGQPVLRKQVRRGQVLKFFATVSPCVVGMEACGSAHHWARELQAQGHEVRLIPPQYVRPFLKTNKHDAADAEAIAEALVRPTMRFTPIKSADQQAVLMLHRSRELLVKQRTMFLNAIRGHCSELGMIASQGASRVKDLIAIIDDPEDARLPAIAREALGVLIAQLEAVKEAIRTLERKLQAWHRSQQASQRLTTIPGVGVITATALIATIGDGSQFNSGRHLSAWLGLVPRQHSSGGKSRLGRISKRGDGYLRRLLVHGSRAVLRWQRGAPKKPSPWIGELLTRRPTNVVLVAMANKTARTVWAMMRDQQTFTAVVR

SEQ ID NO: 174723 - protein, 453 aa, unidentified
MARKIRKLKMKKIQPLHTLQPNAAGIDVGATEIFVSVPQDRDVEHVRCFTTFTDDLHKAARWLKKCEIKSVAMESTGVYWIPVFQILDAHGFDVMLVNAHHVKNVPGRKTDVEDCQWIQYLHSVGLLRGSFRPGQDICSVRSLLRHRGNLIKIASTHVQHMQKSLTQMNVQIHNVISDITGVTGLTIMDAIVDGQRNLNKLANLKDPRIKASKDTIKKSLKGDYRPEHIFTLKQALQSYRHYRQMIYECDIEIEKHLKDLESRIEPDQPARPPGDIKPRGNAPNFDLKHHMHRLLGTDLTLVDGIDVGTAHTIFTEVGPDLSCFPTPAHFCSWLGLCPNNKISGGKILSSKTKPGSNRVAQVLRMASISLLRSRSYLGEFYRRMRAKSGAPKAITATAHKLARIVYHLIKYQKAFDQSVFNKEQEMHKIRMEKNLRKQAKYLGYQIVPAVTMS

SEQ ID NO: 174724 - protein, 361 aa, unidentified
MEQFIGCDAHKKYSVFVALNERGEASRAVRVDHERQPYRQFLERLPAGSQIALEAGGHYYWMVDEMEYAGHNPRLVHPLEAKKRMGKTGKKTDKVDAKGLGILLRNGTLPEVWIPPAELRDQRELLRLRMFLVQQRTRFKNRIHAALARYNIQLGVRDVFSVEGRGRLGIQLTELPQHTRASVELELVTLDFIDMQIEEAEKQLEAVLRVSAEADLLKTLPYVGPILSMLMALEIGKVERFPSAAHLASYAGLVPRVHSSGGHTRLGQICGDVNQYLKWAFVEAGNLVVIHQKHLAGRHVVRLYQRVKRKRNYQKAVVAVARHLAEAAYWILTKQEIYREPQSKLKSSKAEIANALSSTHG

SEQ ID NO: 174725 - protein, 343 aa, unidentified
MSIVILGIDLGKNVCSVVGIDAAGGVVVRRSMRRQTLIDYVAKLPACVVAMEACCGAHYLGRLFAAQGHEIRLMSPEYVRPYVKAQKNDDRDAEGIAEAASRPTMRFVELKSEEQLDIQTLHRVRSRLVNERKNLINQMRAILLERGTTFPVGRRKFEQGIDAMLAGEDTTLSPRLRQLMEQLRAEWRELDARIEALNGEFVELARNDAAARRLTSIPGVGVLNATALIAAVGNASSFAKARDLGAWLGLVPRQHTTGGKPRLLGISKRGNTYLRTLLIHGARAALPSLARSETPLGRWLTGMIERGVHRNAIVVALANKLARIAWAALRKEATFERGYPVAA

SEQ ID NO: 174726 - protein, 390 aa, unidentified
MKYGPRDGDRALNWVPSITTSQYVPLSTNRYLSLCPKIRNTQEVKSPMMRTTYVGMDIHKNFIQAAALDEQGNIIKEQKLKTDEKEIKRFIETLKPQKIHAAIEATCTWYHVYETLNALDVETTLVNMRRTKTIAESKIKTDKLDAKTIAQCLRTGFIATAYIPPKAIIEQRNLLRHRMSLRKEIIRYKNKIHAILLRNGVHHPDYSDLFGVGGMKFLRSLTTLPDSEHYSLTSYLNIVETLIREKTQTAKNIETLCKNNHQAMLLTSIPGVSYYSAMIILTEMGEVQRFSNPKKLCSYAGLVPRTIQSGNHVYQGRILKECNHNLKWILDQCAHIHIRHCPNSSITRLYHRVETKKGAGKATIAASRKLLTCVWHMLMKDETFKYHNDN

SEQ ID NO: 174727 - protein, 421 aa, unidentified
MTDEIEWWAGLDWASEKHHVCVLGRTGQMIGECDVPHGGAVLTALSDWLIQRTGGRPQQIAVAIEVPRGPVVEALLERGFQVYAINPKQLDRFRDRFTVAGAKDDSRDAHVLGDSLRTDRQAFRRLAADDPVIIELREWSRMAEDLQQERNRLANRVREQLWRYYPQALQLTDDLAADWFLALWHQAPTPAKAAKLRKTTLERVLQAHRIRRLDATAALRMLREKPLTVAAGATEAATAHIRILAARIRLVNGQLKLVHHKLDELCAKLQQAMERAPGQASEQRDVAILRSLPGIGRINLATLLAEAWEPLRRRDYHALRALSGVAPVTRRSGKSCIVIRRLACNKRLERAVYHWARVATQHDPLSRQRYAQLRRRGRSHGRALRTVGDRLLSVACTLLQRQIFFDPDHSVDKVEQGAAAA

SEQ ID NO: 174728 - protein, 377 aa, unidentified
MSKIRFIGLDVHADTIAVAVAEPDGEVRSLGMIPNRLESIRKMVAKLGPAKQLKACYEAGPTGYVLYWQLTALGVACEVVAPSLIPVKPGDRVKTDRRDATKLARSYRAGNLTAVWVPDADHEALRDLVRTREDARQDQQRARHRLGKFLLRHGCRPPEDVKKNWTNKHMDWIKRQVRFDQPALQAAFLDYVHEVEHAADRLQRLEKAIDDAVAGAPAGIQEVVRALQALRGVGQLVAVSVVAELGSLSRFRNPRQLMGYSGLVASEHSSGNRIQRGGITKTGNAHLRRLIVEAAWAYQHKPWIGGWLAKRQQELDEETKAIAWKAQWRLCTRYKKMAARGKNKPQIVTAIGRELLGFIWAIAVRTESKFQPDREAA

SEQ ID NO: 174729 - protein, 450 aa, unidentified
MRVFIGVDIGKEVNVASFLNENGVEIDKRFKFKNNHLGFLKFKDNIDKLTYDYNLKSYDVLIGFESTGHYWINIDWFITEKLNIKTVMVRNDAVKHTRALNSQGKGKNDSLDSRTIAECLKNGYYFDVQGRKEDHIVLRRLTRERSKLEKEIARYKNRFRAWLDVNNPIFLDVFVNLFSTGAFSLLKVYPSPLDIIQDSYLEVKEKLREVGYNRTNQTFKIYYEEAKTHKNNINGISYADRLEISDYIETLEMYMKKKESLDEKIEALIKILEENVFTSLSEIKGMPEAQVCSLLAEIGNTNNFKSARHLISYAGLNIQGEGSGKSKGHSWISKTGNRNIRKELYVITFNLVRHNDYFRGLYCYYKSYKRENEKANKEMLIALMCKILRVIYGMLKYNIEFDLNEMLKNYDFRNINKEKFIDEFLGNSEKRQKIIPQEIEEIFLSNKKSN

SEQ ID NO: 174730 - protein, 336 aa, unidentified
MEVKFVHFAGVDVSKSKIDVCVIANNHRSEIVHNCFEQSKKGFNALKKWLQQVTNQQAEKLLICVENTGLYDDALLHYLWSHSLAASLENAANIKRSIRDNRGKTDKLDARNIALYALKHCDELTLWEKPRDQVVELQQMLSERSRLVNALKMLKQVQQERKEFSWSKVVQAKSYQSGIKGLQEDIKQIEKDIWELVKSDKELLQMFVLITSIPSIGKVTACHFICYTNEFKLVKSGKQLASYCGVVPFERSSGSSLKKRARLSHQANKILKTLLHLCAITAIKMKGVFAAYYRRKIEEGKSSLIAINGIRNKLALTIAAVIRNNEPYNKNYIYHH

SEQ ID NO: 174731 - protein, 457 aa, unidentified
MKQRGRRTKGMEEAHPFAGMSQVNKDAAGVDIGAEEIVVCVAGDEHTQIVKAFGNYTVDLQNIGKWLHEYDVKTIAMESTGVYWIPLFEEMERQGFECLLISSRSLRRVSGRKSDIQDAQWIQTLHSYGLLESSFRPQAELVGLRTMLRHRSQLLEHRAPHIQHMQKALLQMNVQLSQALSDVTGETGQAIIRAIVAGEREPEKLAAMRDRNCKKSAEEIGKALTGTWREEHLFIVKQSLELYDFYTKQVEECDAEIERMYAMIRPDWEGGELKPLPQKKRNSHSKNAPKNKEEIRKHLKRISGVDLSVVDGFGVSLAQTVIMEVGTDMNKFPSEKHFCSWLGLAPKHEISGAKVLKNKTMKTKNRAGQAFRMAAQSVKRADCVFGSLYRRLKSRLDKAQATVATAHAIARVVYRMLKYQVEYEKICVEEYEQKYKEAQIKYMKKKAEKLGFQLVPA

SEQ ID NO: 174732 - protein, 455 aa, unidentified
MQTYYLGIDVSKGYADFVILDVCKKTVEPNFQLDDTFDGHCKLYEILSRFLQEHPEGMLSAAVESTGGYENNWLHSLMKFQATIRMRSARLNPLGVNANSKASLNRLITDKISARNVAEYMIAHPEKISYQQEDYFGSVRKLWGFFNMLTKQKAQLRNQLEFLLYSANPEVMAYCKEKIPCWMLETLKRYPTAQKLSEAMPASLAAIPYVSSRRAQELIDNAKRSVASTSDTVTEELIVDTVGQIAHLKKILQLQEKKMSALCTLPEVALLKSFKGIGITSAIGLLIEIQAIERFASVKKLAAFFGLHPVFKSSGDSAGGFHMSKQGRKEPRRILFMVAMASISSNSHIRGIYEEHTQKGMKGMAALGLCMHKILRIIYGMLKHNRPYDPQIDLTNRAKMSQEKAFAKDKNRRYQELDSKAPISRRQRKNRMEKEPSHSDNLTKCGIMAPSPSHG

SEQ ID NO: 174733 - protein, 340 aa, unidentified
MEKASMIGLDIAKNVFEVHGRNAAGEVVLRRSLKRSQMEKFFAKLAPAVIGLEACGSAHHWARLLGKLGHEVRLMPPAYVKPYVKRNKSDAIDAAACWEAVGRPDMRFVPVKTVEQQAALSLHRSRDLLVSQRTQLGNALRALLSEFGFVAGKGKAGLARLVDELRAGTLELPADAVVAAMALADQHAALEAAADALERRITAQAKADEKARMLKTAPGVGPLSAHATLATMPDPSLFKSGRDFAAWLGLTPRLNGTGGKTRTGRITKQGNQPLRRLLVLGATAWLRQVRARPEKASPWLRGMLARRPSKVVAVAQAARTARILWAMLTHNQPYRAPAIG

SEQ ID NO: 174734 - protein, 401 aa, unidentified
MKIFVGIDIAKLNHFAAAISSDGEILIEPFKFTNDADGFQLLVSKLESFDKNSIIIGLESTAHYGDNLVRYLVAEFYQVCVLNPIKTCQMRKNNIRKTKTDKVDTFVIAKTLMMQDDLRFITFFDLDMMDLKALGRFRQKTIKQRTRLKIQLTTYVDQVFPEIQYFFKSGLHQHAVYALLKEAPSPKEIASMHMTHLANLLKVNSHGHFTKELAKELRVLAQKSVGANDSAISIQITQTIQQIELLDSQLEKIEAEMTDIMKFNDSVIMTIPGIGYINGGMILGEIGDIHRFSNPNKLLAFAGLDPSVYQSGNFQAKTTRMSKRGSRVLRYALVNAAWNVVRNNITVVSNLYSFNLFLSNLNTPYAIISFISLTLTNDSCDVFSDMLKSEGYTLSIITPPI

SEQ ID NO: 174735 - protein, 389 aa, unidentified
MKIYVGIDIAKLNHFAAAISSDGEIILEPFKFTNDADGFQLLVSKLESFDKNSIIIGPPSTAHYGDNLVRYLVAENYQVCVLNPIKTCQMRKNNVRKTKTDKVDTFVIAKTLMMQDDLRFITFFDLDMMDLKALGRFRQKTIKQRTRLKIQLTTYVDQVFPEIQYFFKSGLHQNAVYALLKEAPSPKEIASMHMTHLANLLKVNSHGHFTKEQAKELRVLAQKSVGANDSSISIQITQTIQQIELLDSQLEKIEAEMTDIMKFNDSVIMTIPGIGYINGGMILGEIGDIHRFSNPNKLLAFAGLDPSVYQSGNFQAKTTRMSKRGSRVLRYALVNAAWNVVRNNATFKAYYDAKRAEGRSHYNALGHCAGKLVRVIWKMLTDEVEFNLE

SEQ ID NO: 174736 - protein, 403 aa, unidentified
MGAVAGLDWAAEKHDVLIADGRGALLDARVVEHSEHGVRELVCLLVDHRVQRVALERPDGLLVARLLDAGIEVLAIHPNQVKAARERFRPAGGKSDPFDAFVLCELARTDHHRLPRLAPSGDETVALRALSRSREDLVAMRVELANRLRAELDAFWPGARSIFADVDSKIALAFLERYPSPLEAKALGPKRLGGFLARNGYCGRRSAQELLERLRRAPVGCAGEDELEARRAIVLALVAALRPLVEQIGLLTSQIRGALAAHPDAAIFGALFCDPKSAVTAAGLVAEIGDNRARYPSADALAADAGMSPVAVESGKRRSAAFRRGCDHRLRSHFACLADSTRHWHPWAGEVYRRARARGCDHPHAIRVLGRSWARVLWRCWQDEAPYDPARHGNLRRLQTQGG

SEQ ID NO: 174737 - protein, 401 aa, unidentified
MNAVGIDVSKGKSMVAILRPYGEIVSKPFEIHHTSSDICSLIEQIKSIEGESRIVMEHTGHYYEPLAHELAHADLFVSAVNPKLIKDYGDNSLRKVKSDKADAVKIARYILDRWIELKQYCLMDELRSQLKTMNRQFNFYMKYKTSMKNNFISILDQTYPGINAYFDSPVRADGSQKWVDFAATYWHVDCVRKMSLKAFTEHYQKWCKRKNYNFNRLKVEKIYGTAKELVPVLSKDNLTKLVIKQAVEQLCFVSKTVEEFRKLLNETASKLPEYPIVMEMKGVGISLGPQLIAEIGDVMRFKHKGALTAFAGVDPGVSQSGTHDQKSVRASKRGSSKLRKTLFQVMDILIKTMPQEDAVYKFMDKKRSQGKPYYVYMTAGANKFLRIYYGRVKEYLTLMAQ

SEQ ID NO: 174738 - protein, 342 aa, unidentified
MKIIITIGIDLAKNSFAVYGVDAKGKPVLSRTMSRSGVVRFFANLPSCLVGMEACASSEYWARTIESLGHEVRRIHPRYVKAYLLGAKNDVNDAAAICEAAQRPNMRFVPHKSPEQTDIQCIHRIRQGYVKSRTALINQTRGLLAEYGIVIRQGICAVRTQLPALIADEENDLSTLMRRNLASLYEALCFLDERVLEQDKMLKAVAKENEACQRLMQVPGIGIMTATILLTIAGVASKFKNGREFAAFLGLVPRQNSTGGKVRLLGISKRGDRYTRTLLIHGERAALSRMIGGYTPEHRRNQWAVELAARRGKNKASVALANKTARVAWTMLTQGTEYKQAA

SEQ ID NO: 174739 - protein, 370 aa, unidentified
MEKIVKQSVGIDCSKDELDVCFGQQNELWQIHHKATTTFKNNKQGFSQLVRWSMKLADKSVPVNFVIEATGVYHERVTHHLFDAQKRISVVLPNRARHFAQTLTVRTVNDKESSKMLATLGLEKQLDAWQKPESVFTLLKQLTREREQLKNESTMCKNQLHAESHSAFPIKSSMQRINKRIGMLEKQCTEIETEIEQIVAAHPNIAEKVEKISTIKGIGRLTVVTVVAEANGFNLIRNYKQLVSYAGYDVVTKDSGTSVRGKPHISGKGNKHIRRVLHFPALTNVKYDEHHKNLYTRIEAKSGIKMKGYTAVQRKLLVLIYTLWKKNEPYDPNYKNGNVHKNLEQPIGAALTELDLVRSTCPKARINLVL

SEQ ID NO: 174740 - protein, 370 aa, unidentified
MSVRRILAKTINTDLEYEAIGIDLAKNCVSAALLTTDGEVVCIDRLDYSELEKSAQVLCPTTFAMEPCTEMNYLVQKLEAWGHRCLVIGGKNVQNYVENHYSGQKTDLNDAQALAFLAQDTQLRTIKAKDMEQQKYASLTTLREQYIKQYRQTIVSLKGICQAWGLNISKGISGKARLKDLIENHAAFPEELKESLVDMVTHAQTAQKALNKITKTLELLAKNDKVCQLIQTIPGLGPICSCRLRATIGDIQRFKNLKDFPAYYGLVPRSIATGHNEKKGRITHRGDKTMRSLMVQGAGSVVNMATKGKLKSKQLTKWILKKQKEKMPWGKLVCAVAAKLLRIVRAVLISRKPYNPKIAGVAKCSLPKGT

SEQ ID NO: 174741 - protein, 356 aa, unidentified
MSRILAIDLGKFKSATCLLDSDTNQTEFWAMATDRHYLLAVLKNYDPDLVVIESCGLAGWVHDICTEEGYEVLVCNPNQEAWKWKHIKRKTDRDDALKLAKLAALGQLVPVYIPCRQQREYRRLVKYRQVVLGRINRVQNNIRAIFAQRGMEMVRGQKAWALERLELIAQHRKLLAECSLDDLWRGELDLELIQLEHLRQHQHEVHKQLKALARADERVQLLETIPGVGRKTAEVVVAYLDDPHRFHNARQISSYAGMVPRRYQSGEMDRQGRIHKRGPRQLRSALVEAAWLMLRYNPWAKSVYERLTSGQKTRKKKAIVAVARKLLVRCWVMLLRKEPWNKETMIRQPAGIAVAV

SEQ ID NO: 174742 - protein, 382 aa, unidentified
MEMLHRCCAGLDVHKRTVVACIRRVTDAGRLEEQVGTFGTTTAELMALADWLAAPGVRQVALESTGVYWKPVYNLLEPHFQVMLVNAQHIKQVPGRKTDVTDSRWIAELLQHGLLKPSFIPPRPIRELRDLTRQRSQLARHRATACNRIQKVLEDCNIKLAGVARDILGVSGRAMLEALIRQVDDPAELADLARGRMRSKIPALRAALRGQVLDHHRFELRELLDQVTDLEGRIARLSARIATVIAPYARAVERLQTIPGVDRRAAEVIVAEVGTDMTPFATAGHLCRWAGMSPGNHRSAGKRKGGRITQGDRWLRSALVQAAWAASHTKATLLGATYRRWVKRMGRKRALVALGHKILVIVYKLLSEETDYEERLEPEEAA

SEQ ID NO: 174743 - protein, 347 aa, unidentified
MVIVDSARLIVGGVDTHRDSNVAAVVDMNGGLLGVESFRTTADGHRCLSPWMAGFGTIERVGIEGTGAYGAGVARHLSSSGVVVIEVDRPERQKRRKQGKSDRIDAVEAARGALSGRCDGQAKSGDGHAEALRALLVAKRSARSTRIRTIVQLRHLMFTAPDELRAKLGSLSATQLVNEAAKLRPRPGGDVALHGVKTAAVILARRVHALDVELDVIDEQITPLVKAAAPDLLNVYGVGVDTAAVLLVTAGDNVERITTEAKWAMLCGIAPIPATSGLTVDQFRLNYAGDRHANNAIWRIVITRLGQHEPRTIAYMQRRLAQGKSKRYIIRCLKRYVAREIFKALPR

SEQ ID NO: 174744 - protein, 427 aa, unidentified
MLKILNVGIDISLKEAVISLLTWEGKYLGESFKISNNLPGAGELENRILGVLSTGTFEHVRFGMEATQNYGFHLAEQLASSDKLSAWKPLVYLINAKYIKDFKGAFPEKDKTDLIDSEFIAEYLRFGKLPHPFEANNRYLPLQRLVRYRYHLVKNIEREAKFFLANLFLKFPGWVQRRPIRSLGKSAMDVLHEFYSLDEIVQMPLEELALFVAKAGKNRSPNPEKIAEEIKKAAGESYRLRADLADSIQFILESIMVNIRALKSSLKEVNRAIEKEMKGFSNPLLSVRGIGPVYAAGILACIGNIKRFSTHNQIAKLAGLVWKRKQSGKFEAQERRLIRQADRYLRYYLVEAANSLRVYNEEYRRYYQKKYWEVNKYQHKRALVLTARKLVRLVFVLLSKNQLYEPARAFQCVQPSLTLSRKSKSRR

SEQ ID NO: 174745 - protein, 341 aa, unidentified
MTVKVIGLDIAKNVFQLHGVNEAGEVVLRRRLRRSDVLRLFKEIEAAIVGIEACHTAHYWARELIALGHDVRLMPPQFVKPYVKSQKNDAADAEAICEAVQRPTMRFVPIKSAEQQAALLLHRARDLLIRQRSSLISAIRAHFAEFGIVTSRGVRDIDRLLQLLTDTHTRLPELAREMLEVLGDQLREVAARVRTVEARLLAWHRSNAVSRRLATIPGIGPITASAIAATVVDANQFSSGRQFAAWLGLVPQQRSSGGKERLGGISKRGDGYLRRLLIHGARAIVGWRKRSARTIDRWIGGLLSRRPMNVATVALANKSARVAWALMKNECEYDHRRARAA

SEQ ID NO: 174746 - protein, 425 aa, unidentified
MSYVKAAVDVHKKMLAVVISDVSVVDEFEFTKRKFGTTPTQLQQLAEWFIENKVEEVVMESTAQYWRPVWAGLERYWKPVAQKREGAGPKSGSLHLCKAESNKAPKGRKNDFRDGIRMLKRLEAEELRLSLVPDPEQRLLRTITRRRYQLTRAKVSFKNQLESLLEQAHVKLSSFVTDLLGVSARRMLRALADGDTDPAKIAALADSRLRATPEQLRDALGACSEMSGVLRRLIDLALEELEMIDEHIAKLDKEAMALMKGKEEVVERVAAIPGFCVTSAIQVIAEVGHDASAFASCKKMSSWVGVCPGDEESGGQSKSTASPKGNRQMRRILNQAAHAAVKVKGSIFEIVLRRWNPKLGYKSAIWAIAHRLCRVLWIILHQGTNYEERGPAVSAKSKRTRESRMIRELRKRGYRVEKEPAPAQA

SEQ ID NO: 174747 - protein, 340 aa, unidentified
MQHNLTVNFKIMKNYKEAIGIDVSKKTLDVSCHLLGKHKVFTNDIRGYRSMLSWVGKEVKDSFFYCFENTGNYSLKLSCYLSRQGVDYVEENPLRIKRSLGLVREKTDKVDSRLIARYAWLCREELTVSEAKSLVYQELGRLLGLRDQMVRNRAGLLGTLKEMEHLLGSPSTDIGCISIKRAIASLDKQVKAIEARMDQILREDEELSGNYGLLLSLRGIGFVVACQLLYHTQNFRQFDSWRKFSSYCGLAPYDHQSGSSLRKRKQCHWIGDRKMKTLLSMAGISAIQHDPELRAYYKRKIAEGKPKMVALNNVRNKLLARAFSVVKRGTPYVVLQKFAA

SEQ ID NO: 174748 - protein, 344 aa, unidentified
MEHYAGLDVSLELSSVCIVDERGTIISEVKVASEPEALIGFLRTQEVKIGRVGLEAGPLSQWLHAGLADAGFEAVLLETRHVKAALSAMTVKTDRRDARGIAQLLRLGWYRPVHAKSASAQEVRALLTARKLIQAKLLDIESGIRGVLRGFGLKVGPISRGRFEARILELVDGHATLEEVIGAMLSARAALETEFKRLHRALLALVRDDPVCRQLMSVPGVGAIVAITFKSGVDDPSRFRRSRDVGPHFGLTPRKYQSGELDVTGSISKVGDRMVRTALYEAASVMLTRSVRFSALKAWAMAVAKRRGTKKARVALARKLAVILHRMWSDGTSFRWTNEETAIA

SEQ ID NO: 174749 - protein, 457 aa, unidentified
MGNARARKIPAQLVEDEDYQLRHERVAGIDIAKAKADVCTRLPPAREGGRRASRVEDSVPATAREILALAGRLLADGVQLVVMEATSDYWRIWFYLLEGAGLNVQLANPSQARQLAGRPKTDRLDAQWIARLAEMGLLRPSFVPPPEIRALRDLTRTRLQLVRDRTREWQRLEKLLEGALVKLSSALSSLARTASARAILEAIAGGETSPRALAALAAPNVKGGRAAVEESLEGMALGGHHPMLIRLHLDHIALLDRQIAALDDEIEAALAQIPAARGVGADGVPSADPGPGAAALPADQRLAEIPGVSLELARAIIAETGLDMTRFPTAARLASWAGLAPAARQSGPRNRKPAKGHGDAYLKGYCTQAATGAARTDTFLGERLRRLSRKLGGTRARCAVGRSILVIIWHLLSDPGARFADLGPDWHQRKADRDRKTRSHLRGLQALGYEVTITPAA

SEQ ID NO: 174750 - protein, 575 aa, unidentified
MGERELLLPAEKFPKQRFPLVCDVNSAGSRVRPGTPVNQALLRDLTSGAKSWTLGTEVDDGRTLGEEVADVIVFGTSAARRQKPAAKCCCCCFGDYLSHRAMVPESPACFSRNITGGHSGLTFRPSAERWKADHGIPNPGACTARAPRIAGHLANASGINVEMDQKMLWGGRRGRGNFVAASNRWSAAMPQPNDLSRSLVALDQNSTIIAVVELSQSSWLVGGVVPGIERQPRKKLEPSPERLLAVLHRWRDEAVGAGRTITRIALAFEAGRDGFWLARWLEARGVEAHVIHPSSVAVSREHRRAKTDRLDTELLKRGFLGWLRGERGHCSMVRVPTIAEEDAKRPNRERECLVGERTRIVNRIKSTLARLGIRNFKPTLRKAAERLATVHTPEGMPLPPNVLAELQRDMARLGVVVSQIREIEDARQKGLEQRPDTGPHAMVRLLARIVGVGVETADMLVHEVLSRPLRDRRAVARYAGLTGSPDESGAQRREQGLARAGNARVRRGMIQLAWRFLMFQKDSALARWYRARTADSRIGTRKTMIVALARKLVIALWRFVTTGEPLEGVVLRPAA

SEQ ID NO: 174751 - protein, 344 aa, unidentified
MDIAVLGVDLGKNVCSVVGLDKSGAVVMRRKVRRETLIALAEKLPPCVIGMEACCGAHHLGRLFAAHGHAVRLMSPEYVRPYVKAQKNDDRDAEGIAEAATRPTMRFVELKSQDQLDMQTLHRSRDRLVGERTALINQLRAILLERGMVAPQGKRKLEQFLAVLMDGQGAAGLSSRMIVLVADARKQWAELDRRISAFDAEFVRWARENEDARRLTTIPGFGAIVASALVAAVGRAEAFDRSRDLSAWLGIVPRQFTTGGKPRLLGISKRGNTYLRKQLIHGARAALPFIAERDTPLGRWAKGLMSRAHRNVAVVAFANKLTRIAWAVLRRGERFAVGGLSMAA

SEQ ID NO: 174752 - protein, 399 aa, unidentified
MASPSTGIRVSIDIGCYQHSVAVGLPDGQLLDEFDITHEPAGFTEFFNRIDTRQLEYGGTVKVALEGYNGHARPLDTLVRLHEYQLFNINNLKLARFKEIFLAAAKSDRIDARKGLELFQLADHIPLAKGVLQSVSATPVVNDQLKRLTRRRRGLVDEKTRISSRFQADLQAVCPDLLAITGNAENSWFLSFLTHCDQLTKLSRLRPDSIKKIKSVGPKFAAIITQWQPTARFSHEADYVGPMIIEDALRLIDLKAQIKALRHQCEGLMEASHIATRVDSIPGFSVICAAELAGEIGTIDRFRNDGSLALYLGMAPLTKSSGTMRGAKAPRHVNKRAKAAMMIGVDRHRKQVPESQRFYEKKRLEGKGHNQAIRALARHLCRVLFTMLKQRREYEQRSP

SEQ ID NO: 174753 - protein, 340 aa, unidentified
MKVHVCGIDIGKTVFHLVGLSKEGHIVTKKRFSRKQLVTFTVNLPTCLIGIEACPGAHFLARILLKQGHDVKLMPAEYVRPFVKSNKNDYVDAEAIAEAVQRPTMRFVPVKNEAQLDLQALHRVRDRWMGRKTAVINQLRGFLLEHGITVAAGPAHLKRQIPSILEDAENMLSPRMRTLLLELRDEWMKLEEQIDASNQELAQFAKKEDGCRRLLTIPGIGPLTATALTAAIGNGAAFRKGRDLAAWLGLVPRQHSTGGKARLLGISKRGDPYLRRLFVHGGRAVLAQVKRERHQFGGWLDRLEARSPRNVAIVAMANKIARMAWAILTSGQSYNAAFST

SEQ ID NO: 174754 - protein, 421 aa, unidentified
MTRRIAGIDIHKNVLMVVVATVLEKEIDGGMEQHIEYEGRRFGSGTQERGHLVAWLRERQAEAVVMESTAQYWKPVWMDLELHFPKLHLAQAHSNKAPKGRKNDFADARRLTRRMAAGELILSFVPDGEQRTWRTMTRGKQQLVRDRVRLQNQTEALLEEMRIKLSGVVSDLFGVSGRRILEALAGGETHPEKLADLGDDRLKCGREALVDALTGHSEPMHLQILKLSMERLKLLDRQIEALEQMAAGALKKHGAAVTRLAGVPGFGVDSAQQVIAEVGSDAKSFSGAGELASWVGTIPGSDVSAEQNHSSRSPKGNKFLRRIFTQAAQAAVKTKGCHFQNVFRRLVPKLGYKGAIWAIAHRLCRLAWKILHDRVSYIEQAAETTPQAKKRRAQRLTQALRRLGFQVAITPIAPKAEVAQG

SEQ ID NO: 174755 - protein, 442 aa, unidentified
MTPPPYDLVIGLDRSDKKADLCLINTRTGQRRSEVIDTAPEALWEWLAALRQQHPSARVGLCLEQPAVHLIAFLEAYEWITLHPINPITLQKYREAFVTSRAKDDTKDAEYLADLLLTHQAKLPMWAPQDSATRAVQQLVFHRRAVVDERTALSNRLIALLKQYFPQALELCGQDLWRPLATAFLLKWPSLPAVQKVKPPALKQFYYLHGSRSTKLLDQRLALVAKAVAVTHETAVIASFVLRVQLVCRQLQLVQHSVMEFDRQIAAAYAVHPDRALLASLPGAGAVLGPRVLASLGAQRERFDSAASLQCYTGVAPVTKRSGGSCHIHRRYLCPKFHRQSFHEYAKESILWSRWAAAFYLQQRTKGCPHHTAVRALAFKWQRVIWRCWQDRKPYEEKIYEAALRKSGSPVVALFDRVELGKSPWKNPAKKNKKTIDGLPQR

SEQ ID NO: 174756 - protein, 385 aa, unidentified
MRSEATRAGETIVGGQVLYMALELSERTWKVLFASPAGRRRERSVAARDVAALVGEIAAAKRRLGLPAQARVVSCYEAGRDGFWLDRALRANGIDNLVVDSSSIEVARRARRAKTDRVDLVKLMGLLLRWVAGERKVWSVVRVPDTQAEDIRQLSRSIERLKGEHGRHVTRIKALLVTQGLKLARIGGAGWGKRVGELRCWDGSALGPWLQRDLVLEGERLAVVAEQLAALKAERDRLVKEGREAAAVKARELARLGAIASESSFVFATELFGWRTFSNRRQLAGSVGLTGTPYNSGQSAREQGISKAGNKRMRTMLVEIAWCWLRYQPASALSRWWRERFANTGGRARRIAIVALARKLLVALWRYLERGVVPQGAHLKTRAAA

SEQ ID NO: 174757 - protein, 342 aa, unidentified
MEISTIGLDLAKSVFQVHAINDAGEVVVRKTLRRSQVLSFFAKLPPCLVGMEACGTSHHWAREILKLGHEVRLMPPAYVKPYVKRGKTDANDAEAICEAVTRPTMRFVPVKSPEQQAALALHRTRDLLVKQRTQLVNMIRGVLAEFGIEMARGLHHALALAKRLMDGDAAEVPTLAQRVVASLAHQIGAVQEQLASLEKELVAWHRSSDLSQRLATIPGVGVIAATALAASVSEPERFRSGRQFAASLGLTPLQQSSGGKEKMGRISKMGDRYLRRLLVVGMTSLVRRARTAPASVDPRIPAMLERRPARVVTVAAANRTARIAWAIMTRGGSYRKPVPAIA

SEQ ID NO: 174758 - protein, 316 aa, unidentified
MANGGREVFVGIDVGRDRLDVHVRPLGQHFVVDNDPAGLAALAARLEAHAPRLIVLEASGGYERLAAIGLVDRGLPVAVVNPRQTRKFAAALGQLAKTDKIDAAMLAHFAEAIRPAARAVTDDAIDRLQKLLARRRQLVVMRNAEKQRLGKATDPITRRSLKAMITSLDKQLGVIDKAIGRLIEADPALAEKLERLKTVPGIGDVSARTLLAELPELGLASRHEIAALSGVAPIARDSGRFRGKRRIQGGRVEVRAPLYMATLVAIRHNPVIRPFYRRLRAAGKPAKVALVACMRKLLTMLNAMLRDRRAWAPAEA

SEQ ID NO: 174759 - protein, 405 aa, unidentified
MQHASLFVGIDISKLKHDIAVFAEDKKPVAKPLVIKDDYAGYQQLLGHLRALAEQFQTQEFYIGMEATADYWKNLYFFLKKHADNVHLTLINPVQTRAFAKTELRRAKTDPVNAKDIALFMVEKRPRPSVDRPRVFDNLKDIDKRIYQINKQKTMLTNKLRLELGKVAPEIEKATRYIQGFRVLALLAQYPSAEAIAKASVTELAQIKCGHRNWSLPLSFIEKMHSLAQNSVAYKSGPGAGVVVQSLVQSILDAQKEIDSLQKQSLTLYKTIRTEDSLLATIPGIRVQTAITLEAYIGNVNRFATAKQLIAYFGMNPTVNRSGKSKRASYLEKKGNPIVRHKLFMAVLSMVSRQKEPIYSYYHRLLAAGKPKLVALCAAMRKLLNIIYSMLKNQKPFNNQSQICP

SEQ ID NO: 174760 - protein, 374 aa, unidentified
MENTITYVAMDTHKKQHKIALHYPCQEEIVEFTINNTVQDIKKMVNKIKKQAPGKVEFCYEAGVCGFTLKRRVEQFDCRCIVIAPSLVPRKPGERVKTDRRDAKKLLMMFKAGLLTEVHAPNEHQEAARELTRLRETAKDNLKRIRHQLLKLLTRHGYVYKEGRHWTRKHITWLRTVEFAVSTLTNVFENYFDEMIYCIGRLEALDKEVELLANSQEYKEIVGLLRCFHGIDTLTAITIITEIFEFGRFESPRHLMSYLGLTPSEDSSGDKQKKGAITKAGNKRIRRLLNEASWHYRHMYVPSAALKKRRKGQPQWAIEIADAAGRRLSTRHRYLVNRGKMPCKANIAVARELAGFIWFVVTQYHARKNTKGAA

SEQ ID NO: 174761 - protein, 401 aa, unidentified
MDIVFGIDVSKHSSNIAILIEQKVYKEFKIQNDRHGFEILEDELDGLTSPQIIFESSGIYSRSIRAFLIRNGWQYTEINPLAAKKDMDSFRHNKNDRLDAVSLAMAMSQHHYKPTFQEQPVYSELHDLERTYQELNEDIVRAKNRLHQKLQLAFPEIERFLSVTDGALYWHIVQQFPHPSLVLEMGITELARLIIEATPKNMGERRSLVLAQHLQDLAYNSAPAVENCTHAVQAVIYLAGEVERLDTLKKKTIDEMTEISANLQEIPILQSIPGIGIKTAVCLVAELGDIRRFRKPNAINAYIGIDLIQYQSGDFEMGQHIRKRGNTYARKILFKAVLNIVSVSRYHPSNISLFYQRKKQSSGDIHTKKIAIAAMGRLNRTIYHLIKNNEFYDPMKFTPEL

SEQ ID NO: 174762 - protein, 391 aa, unidentified
MKVVCGLDVHKDSVFCCILCANGEKIQHKFGVLTEELVTLRDLMVSEGVEECAMESTSIYWIPIWRVLEGSVKLHLVNPYFIKQLPGKKSDVNDAEWIATCLSKELIASSFVPDDKIQRLRQYDRRIFDLNVSISRNLVKLDQCIQRCNIRISNYISTTDSKGYRSIVKLISQGVTDAEVLVKELHGRTINRHGRETLVKALTGVVSETDIDIIKQLVEEIELQQRHKDEAQEKMTALCMEWFPQEVENLQTIPGVKERSATSIIAEIGTDMTHFQTPKKLVSWVGLRPRNEESAGKIKARGITHGNRFVRKTMIECSWGAARMKESFFAEFSYRQCIERRKNKMKVQVAIARKILVAVWYVLSQGTQYIKPTDHYTACLLYTSPSPRDTR

SEQ ID NO: 174763 - protein, 366 aa, unidentified
MNGEYYTTIGMDVSDRTTKVCVMAKERGARRIVEEATIPTSKESLRTYLSGKSPDWPVVFETGAHCRWMKREVESLGMKAIVANPSKLRMVTESNTKNDRNDARELARIALADVGLLHPVRLRREPCQQALRLLKARDGLVKVRTALVNELRGFAKSMGFRLPDCPANRAHALDKSGWPADFEAVAWPLMDVLETVDLKIRAYESQIRAVVGSPELGEKVERVREVYGIGLLSGCALVASIDADPSRFRKARDAGAYFGLVPRQRQSGDVDEQCHVTKAGSALVRRLMIEAAQMVMRNSSRDTDAKLKGERICARGGRIAKKKALVAVARCLVVTAVALLKKPEAKYVPLSEAARREFEALRTTAA

SEQ ID NO: 174764 - protein, 356 aa, unidentified
MDEYIAFDSHKHYTLMERLNVRTEQVVLRRIEHSPGAIRQALAGCRPGTPVAVESIGSWYWIVEEIEQAGLRPLLVHPRKAKLMMGMINKTDKLDVHGLNRLQQNRTLPTVWIAPGELRDLRELTRTRLVLTRHRTRLKNRLTSSLAKYGLCVEGFSDSFGVGARRQWPRVVAKLPAQTAWTCRQLLEQLDLVCRQIAEHEKRQRRLIAITPEMQLLQTLPGIGEILAPTILLEVGDVGRFGSAEKFACYAGTTPRVHASGGRTRYGKLRPDANRYLKWALIEAGNTIALHSGRQPARHVSQLYRRLRRRKNHAKAVGAVARHLAEAVWWVLTKKEPYRDPNADWVCQEGVSAAET

SEQ ID NO: 174765 - protein, 439 aa, unidentified
MQEATQHDAVDVFVGVDVDVDVDVDVGKGRHHAVALDRNGKRLYNKALPNDEVKLRALIAELKTHRRLLFVVDQPSTIGALPVAVARAEGVLVAYLPGLAMRRIADLHAGEAKTDARDAAIIAEAARSMPHTLRSLRLADEQLAELTMLRGFDDDLAAQVTQTSNRIRGLLTQIHPALERVLGPRLDHPAVLDLLERYPSPSALAAANEKTLANRLTKLAPRLGKNWAAEIVQALNEQAVIVPGTQAAAIVMPRLAQQLAALRKQRDEIAAEVERLVLAHPLWPVLTSMPGVGVRTAARRLTEAAPKAFATAAHLAAYVGLAPVTRRSGSSIRGEHPSRRGNKVLNAPCSSPPSLPYETQSHGPIPRARSSRASATTKYSSRSHGDAATSCLPCCATAPFTHPSQPLTLDERHRAPARAVPQHRRAAPRPCAGCDPAPM

SEQ ID NO: 174766 - protein, 349 aa, unidentified
MIIGVDYHPSFQEIAFLVEETGECDEGSLKHSNGEAEKFYRDLKARGISARVGMETTGYSRWFERLLAELGFEVWIGDAAEIKTRRAKKKKTDREDARLLLKLLLEDLFPRIWVPSPENRDLRQLLWHRHRLVQMRTRIMNQLQALAMNENRCWKGKLWSERGRAELERLPLALASHRRQGLLELLDRMNTAIDELTAAAEREAKKRPEAVRLMTHPGVGPLTALAFVLIIGTPERFGCAKQICNYVGLIPSEDSSGGRQRLGHISKQGSSLLRFLLVEAAQAAVRCNADWRRRYRHLAMRRQRNIAKVAMGRRLGARLYWMWRNGCEYSPSLEFGSHAGKLGTGNGGQ

SEQ ID NO: 174767 - protein, 386 aa, unidentified
MQKFDDLSRSLTTLEPGGTLIAVIEMSLSSWLVAGIVPGVERQRLKKLAIDESALLKLLHRWREEAKKAGRRIERIAVAFEAGRDGFWLARWLKARGIEAYVIHASSIAVSREHRRAKTDRLDTELLKRSFLGWLRGERDHCKMVEIPTIKDEDAKRPNRERDNLIGERSRIINRMKAALVRLGIRGFNPKLKRAAARLDGLRTPEGEPIPPNTQAELRRDMERRRLVSDHIRQIEEARLERIEQAPSNEPHATVRLLARVMGVGIETADMLVHEVLSRNMRDRRAVARYAGLTGSPDESGRKRREKGLARSGNARVRRGMIQLAWRFLLHQKDSALTKWFRSRTENARGTRKPMIVALARKLLIALWRLVRDGVVPDGVVLRPAQ

SEQ ID NO: 174768 - protein, 433 aa, unidentified
MGLIVPTVMQPERAEQPPPYDCFVGIDWGSQQHQVYVLDRDRRRLGERVVDHDGASLAQLVAWLWGLSAGQPQRVAVAIEVPRGAIVEGLVERGFHVFAINPKQLDRFRDRHSVAGAKDDRRDAFVLADSVCTDRPSFRRLHLDAPHLLLLRELRRVEETLLEEFRRSANRLREQLHRFYPQMLQLCSAADEPWLWDLITLAPTPAHAMLLSEEQVQRVLKAHRIRRLKAPAVLACLQAPALPVAPGTPEAAQAHCGFLLPCLRVLAEQLQACSPQVSTLLRAMADEPGEEESPSDVAIVQSLPGVGRKITAWLFAEAAQPLAERDYQVLRTHGGVAPVTKQSGKRRQVVMRHGCNPRLRHALYHMARVAMQRDAHFSSVYAALRAKGQRHGQALRNIGDRLLRILMAMLRHRTCYDASRIRCEPVAQMGQKM

SEQ ID NO: 174769 - protein, 411 aa, unidentified
MEPKLVVASIDVHKKMLAVVVVVDEDHPHQALEQRKFGTNGGELKHLAAWLASHGVNLVVMESTALYWRPVWLAPEGQYILHLAQAQSNAAPRGRKSDYADALRLARRFLAAELRLSFVPDAEQRTWRCLSRGKHQKRRRRVQIQNQIEALLEESQIKLSSVITDLLGVTGYRILKALSEGETDPAKLAAMAAHNLQASQEQLAEAVSGPMQSRHRTVLAMQLEELDLLDKHIAELSRQLGDALRLHQDAVLRLCEMPGLREDAAWQIIAELGPAATAFETAEQMASWIGVCPGRKESAGASKSNRSPKGNRTMRRVLNQVAWSAVRTKDSFFRELYHRLIPRLGVHKAIWAIAHRMAKVAWKILHHKVRYIERGPLALDPAAMKRRVTRLARQMRRLGYTIEIKPVVATT

SEQ ID NO: 174770 - protein, 346 aa, unidentified
MLYAGLDLSRHKVDVHVLNKAGETVTTTWVSPTVDGLRSLVGRLELYRDEVTAVVESMTGGRFVHDQLELAGWDVEIADAVKAKGLAPLAAKTDKIDARVLAELARRDLVPAIWLPDPSVRAERERARFRLHLVKHRTALKNRIHSTLTSFGHPVPVSDLFGSAGRQLLARLEIPEPWSTTLQTSLALLDELERKIAGCEADLRTMGADHPYVPLLQTVPGIGWVLGYTIASEIGDIGRFASPKRLTGYTGLCPKVYQSGGTDRRGPLAKNGPKYLRWALIEAATHAARTERYHTKYEHTKRRLGKQRGSKVARIELARELASVIWYMLTRQEPFRAAGPTSCPVA

SEQ ID NO: 174771 - protein, 416 aa, unidentified
MDYCLAIDVGKGRSCYGLMKNVDVTLGIRDGMETVIRPKFFRHTAEDLDAILKAVAKYPKEEVAVVMESTGIYHLPLARSFRARGFTVIVVNPLITGRDQPTLRKTKYDEGDVAKIANSYFKGNCNIQYIRTKEEEDAAELSREIEHSKGVLAAYKNELRQLLYKTAPAYEIVYGKSSLFEKATLALIRKCPHADRIASVSEEALDAMCGAGLPRYRESYREGFRRLRKENASRLFSLDSDSPAVEGIEHLIDSILALKAEIRKREEDLVNREKDRNEFRALESFRGIGGVLAAHISAEAGDLSRFSKPQKLISYAGLDPSKEQSGTSLDTNGAVTKRGNRHLRKWLYVAVMSILMHPKADDREFTDYYQMKRGDKRKGGQSHHHFYAMTACCNKLIRKIYFRYLDACKAETEKTK

SEQ ID NO: 174772 - protein, 398 aa, unidentified
MVNVGIDLHKTQFTVCVRRRSGDKFEQYPTTENGYEMFLKKAATWQKKGQKVRVGVESTGNTRYFKNRMEAAGIGVTVINTLKFKVVNESVKKTDKHDAATIAEFLEKDMLPESRLCSAKSEQIRRLLKVRTTLVRAQVVIKNQIHALFNAEGQAGVKSASLQSKRGRQRVLDALKQCKNGLEAQPLLETIERLEENVKAIEGQLRSLVAGDRMIALLMGIPGCGEISAWTIRAYTDDIKRFSSAKKYASFAGLVPWVQNSNEIIHHGRITKRGPKELRTALVQVVMGLRRMKAKTLTWRLMQRYEAMRKSKSSGKAIIAAARKMAVFIWHMLTEDVEFDFSKMVDLKLEKKSEVMSNSAVLAKTALIERTETPIATKTGNKGEKKSGVAKERKRKVG

SEQ ID NO: 174773 - protein, 353 aa, unidentified
MTNGSSLNETMGLDLSDKTGVYVVLDHEGEVCREGKVALTRQALSRAFGGGSPCLVAIEVGTHSPWVSRELALLGHEVVIGNPRQVKLISQNKKKSDREDALLLARLARLDRRLLRPVQHRGEQAQADLAMLRARSLLVAGRTSLINSVRGMVKTTGLRLPRCSAESFAASAQPHLPRELVPALEPLLAEIASLTARIKQITHAIEHAAAERYPETQQLRQVPGVGLICSLTYVLTLEEPQRFRRSRAAGAYLGLVPRQRQSGEQQPQMHITKAGDVALRSVLVQSAQYILGRYGPDSDLRRWGLKLAGEGNKARRKKAVIAVTRKLAVLLHHLWSTGQVYEPLRQADLQTVG

SEQ ID NO: 174774 - protein, 354 aa, unidentified
MAVASIVEAHDPVRVIVGVDTHKHSHVGHAKDELGRDLGHLEVPTTGRGYATLLAWARDLGEVAAFGVEGTSSYGIGLARYLQSEGHLVLEVIRPGRQDRRFRGKSDTIDAEAAAAAVLSGKARNLPRASADKVEMIRALRIARGSATKAKTQAINAIKALVVMAPEEVREQLRELPSAKLVGTCARFRASRIVDPTSAVKASLKSLAVRHRALDVEIRELEDQLDELTSATDPLLRSRFGVGPDTAAALLLAAGDNPARLRSEASFSMLCGSSPVPASSGQTKRHRLNRGGDRQANSALHRIVMVRLRWHETTQAYMRKRLAEGKSKREVVRCLKRYVAREIYGVLMVRSERP

SEQ ID NO: 174775 - protein, 328 aa, unidentified
MTDQYIGIDLHKAFFQACAVNREGTRLWEGRYPRTPGGLAALTAQCTRRTALAVEASTPTWHFADAIAVHVGDLRIVDPWKTKLKAGYAAKTDRLDARRLADALRRESVVGIYYPPLAIRELRELCRARYAVVQMRTGLVNRLRAVLLRQGLVDARRLAKTTDDRWLTAYALPPRAAASIATLRQRLATVRQEADAAEQEVRRVTETDPIACTLQQLRGIGPVLALTIRAEIGDIHRFPTGAHLASYAGLVPRVEMSAGRYRYGRITRRGSPWLRWALVEAAMHGPKRSDRIGRWGRGLAVRKGALKARVALARVLCDEIHRLWATVA

SEQ ID NO: 174776 - protein, 342 aa, unidentified
MKITTIGVDLAKNVFQVHGVDERGKVVLKKALKRDQVAPFFANLQSCLIGMEACGSAHYWARKLEGLGHTVKLMAPQFVKPYVKTNKNDAADAEAICEAVSRPNMRFVPIKNGDQQAVLALHRARQGFVKARTAQANQIRGLLAEYGIVIPQGMTSLFKQLPDIQEDGENGLPGSFRLLVKRLGDHLKVLDQEVAALEVQIQTWHRENAASQKLARIPGIGPITASALIASIGDARNFDDGRQLAAWLGLVPRQHSSGGKQTLLGISKRGDSYLRTLLIHGARAVIRVAERKANHAGSWLAGVMERRNPNVAAVALANKNARIVWALLACDRDYDADYGVPA

SEQ ID NO: 174777 - protein, 378 aa, unidentified
MPSETTVYVAVELSVSSWLVAARSAGAEKSRLHRIQGGDTTTLLALITKLRSRASTKLGRAVDVACCFEAGRDGFWLHRLLTTHGIAAYVLEPTSILVNRRARRAKTDRLDAEGMLRVLATWLAGDRQVCSMVRVPTPEEEDAKRPHREREHLVQERLRIENRIEALLFTQGIRKRPSLRSWVRDVAELRTGDGRELPCLLRIELERLRRRLVLALELIHEVEADRAEALAATADDKMTQKIAALQRLRGIGPNFAAVLVREVLYRSFANRRQLASYVGIAPMPYQSGGMDRDRSISRAGNPRARTTLIQLAWLWLRYQPGSALAAWFRERVGMLQGRTRRISIVAMARKLLIALWRYVETGVMPEGVKIRAEADATA

SEQ ID NO: 174778 - protein, 428 aa, unidentified
MTTDRVPCRKFILGGAIMDKIYDSCCGIDVHKKLIVACLRKGNRQEVREFGATTRELLELADWLKTSDCKMVAMESTASYWKPLYNILESSDLNAMVVNARHMKAVPGRKTDVKDAEWIADLLQHGLLQPSYIPDKDQRELRELVRYRKSLVGERTRELNRLQKMLEGANIKLSGTVSDINGKSARSILEYLLTGECIDGAKYDEMYEQKIIAHNLKATKEQIIDDLNGVMTPLQRRMMKELLSHLDELNTHIKNLDDEIDNFMKPEEKQASQAIQDVTGIGNTSAQAIISVIGTDMERFSTDRHISSWAGLCPGDNESAQKRKSGKTRKGNSLLRTTLITCAHAAVKNKKSYFYAQFMRISAHRGKKRAYVAVAHSMLIAIYHILKDGVIFKDLGADYYNQFNKERKINAYLKKLKALGWEAPVVAA

SEQ ID NO: 174779 - protein, 409 aa, unidentified
MPNSLLVGIDVSSTDNKVRLLDSSGNSLSKFSVANNQPGAKTLVSKIINAMTLNRFDSLVIGLEATSVYGEPLVHFLKQDADIGSFKPRIHVLNPKQVNAFKKAYSDLPKTDDVDAWIIAENLRFGRINQEVYMDDRITALKKLTRARYYAARNLTREKNHFLNSLFLKFSSLTQEKVFSDTFGTTSLAVVEEFLSVDEIAYMPIEELSAFVNEKGKGKFDVPEDVAKLIQKAARSSYRLPKTVNDSVNQVLAISLVAIRALKDQLKLFDKAIEEQMKVVPNTLTSVKGIGSVYAAGIIAEIGDINRFKNQAALAKFAGICWSKYQSGKYTADNTHLISSGNRYLRYYLMEAANKVRMHDPEFKRFYDLKYRETPKTPHKRALALTARKLVRLVYALLHDNRLYIPPTE

SEQ ID NO: 174780 - protein, 345 aa, unidentified
MLYLGLDVHSKWMTIRGFDDESGGEIYLKRVSNESESVRETFSSLGSPVHAVMESGTNSWAMYRELKCYCERLVVADPAKLWDRRRDREAKTDGRDALRMAIMLYNGEIEPLYIPDEHTQDLRVLTRGKVRISRWVTRLTNEIGSLLRSWGYVGSRSLLSKSGKSRLDEAQLPPHSARVLQLWREMLEKAQEIEDELQAAIEEEAATDPDCQILETIPSVGAFTALLVRAEIGDISRFAKSDQLISYIGLSPRVFQSGERCYYGGLGNWGNRWLRYALGLLAQRIAASRKDNSLRRTYWRASFRKHRNTAKIAVARKATKIIHQMLTKNEAWNDSKAMMRTKIAA

SEQ ID NO: 174781 - protein, 316 aa, unidentified
MKTNQTESAPVYAGIDISKDGLDVAVAGQSPSHYANTAKGIAELIPALAQLPAPVQVICEPSGGYERDLLEALWAKKIAVSLVNAARVRAFARARGLLAKTDAIDAVVLREYGELLRPAALAAPAPQRQRLAELVRRREQLVNLLAMEEQQLAQSRAAEIKKLGTQLIKALQKQIEELDTLIAAQIDEDATLKEQSARLQQVKGVGPVTAATLLAELPELGQLEDKQIGALAGVVPYNQDSGQHRGRRLIRGGRVQVRRVLYMSALVATRFNPILKAFYQHLLKAGKPKKLALTAVMRKLIILLNRLLKNPQFKLA

SEQ ID NO: 174782 - protein, 356 aa, unidentified
MTKTLMAGIDLHSNNLMIGMVDQEGKRVRHEKLACELKAVLEFLRPYQRRLKSLAVESTYNWYWLVDGLRAAGYPVVLANPAKIEQYNGLKHADDKSDAYFLAELQRLKILPTGYIYDAELRPVRDLLRRRVSLVQQRTALLLSFKSLYARTTGEAMSLSRLKGMTVEAARELYEHPANQLIATLQQEHIAVLNRSIAQLEKLVLARARTLPWYEQLDTLPGVGRILGMTIALEVGEIGRFAGPGQFASYCRTVAAERFSNEKSKGRNNRKCGNRYLAWAFVEAANFAKRYDERCRRWFDRKAARSCGVLATKALACKLAKAAWHVMSDNVPYDGERVFGKAAANQGNGLAKSQRD

SEQ ID NO: 174783 - protein, 329 aa, unidentified
MTNLDQHGKVHLGIDVSKRTLDACILPEDASQEGESFVVTNDQEGVEEEILSRLAKLGTSVELAVMEATGRYERLAATMLAANGISVAIVNPRQARDFAKAIGKLAKTDKIDSFVLARFARAVEPRISVIPDEEAQRLQGILARRRQLIDMLVSENNRTRMAPKALAKRIRAHIEWLEKEIERIDADLDRAIEDNAAFKANEALLRSVPGVGRVLSRTLLAELPELGTITHKRLCALVGVAPFNRDSGQRRGKREAWGGRAPVRAVLYMSALVATRHNPHIREFYERLLAGGKPKKSVALVGCMRKLLSILNALMRDRATWRCPHALTP

SEQ ID NO: 174784 - protein, 409 aa, unidentified
MDAIIERCCGIDVGEATVTACLLTGKADEKPRKVVRTFSAVTRELLALKDWLLAEGCTHVAMESTGVYWKPVYAILEDSFDITVGNAHHIKNVPGRKTDVKDSEWIADLLRHGLIAKSFVPPEPIRKLRDLLRYRRKLVQSRTSEKNRLLKLLESANIKLSSVASDVFGTSGMLMLRALIIGEATPEEMAQLAKGALRKKLAELELALEGRIEQHHRFLLGLQIRRLEQLDADIALLDARVEERLAPYRAQHELLQQIPGVSVVLAATLIAELGVDMSAFPSASHLAAWAGVCPGNDESAGKRRNARVRKGNVHLKTVLVEAANAIPRTKGTYLKDKFFRLKARRGHKRAVMAIAHKILVAAYHMLSSGAGYRDLGESYLDTIRQTRVARSLVHRLERLGYTVKIEKAA

SEQ ID NO: 174785 - protein, 342 aa, unidentified
MQITTIGLDIAKNVFQVHGIDAAEKVVVKKQLRRNKLMEFFKKLPPCLIGMEACATAHYWARELTTLGHEVRLMPPRDVKAYLKRNKNDAADAAAICEAVRRPTMRFVRVKSAEQQGQLMQHRTRDLLMRQRTQLINALRGHLAEFGIVAAQGDAGLKELLAIVADDRDGRLPSDARACVIVLAAQLDAVQTMLRLLDKRIMKQHRANEASRRLETIPGIGIIGASAIAATVSDPMVFRSGRDFAAWIGLVPRQDSTGGKQRLGPISKQGDQYLRRILIVGAHSVLRRAKENPLKYPWLTQLLARRPFKVVAVALANKMARIAWALLANGGTYRMLQLAPAA

SEQ ID NO: 174786 - protein, 367 aa, unidentified
MDTIYIGVDFHSRQQTICYLKTETGELVTCELGHQDKEKVRAFYQQFPGPVIVGLEASGYSPWFENMLEQLGCEVWVGDATEIRRRARWREKSDRRDAELIWDLMTHHEFPRLHRPAVQSREVLRMLRYRQKLIKIRTMSKNSVQSLALQAGLAKGNRLFTKGGRQELSCAEMSPAMDWQREHWLSLLEPLNQQLLETMIWFKAQSKGDAGVTRLRTHPGIGLLTSLCLVHTLQPVSRFRNQRKVVAYAGLDPMIRSSADRAIHLGISKAGSRMLRYLLVEATHTAGRYDEDLKRFYKRVAERRGRPKAKVATARKLLIRAYIMMRDEIDYAEFRRRAVAARLARRGQGPTSVVPEVLIGQPASPGV

SEQ ID NO: 174787 - protein, 327 aa, unidentified
MLQTVIGIDVSKQSLDVVMLQGKGSWHKVFENGVNGYERLQDWLVQHRAGPVHACLEATGQYGEGVAEYLFECGQGVSIVNPARIKRYGESKLHRNKTDKADAGLIAEFCAKEKPPFWVPSPAFQKHLQALVRYLDDLEGMYQQERNRSLSGIQDEFVLAELQAHMTYLQQRMQAMRKLIQEHMQNTPRLKQQQDLLLSIPGIGKITSARLLAELGDISTFENAPQLAAFAGLNPKGFRSGSSVHKKTRISKEGRAFLRYILYMPAIVAQRHNPIIRAFCDRLAQRGLPKMAIVAAAMRKLLHLIFGVLKHAAPFNPDYLSSSAAAP

SEQ ID NO: 174788 - protein, 338 aa, unidentified
MTYIGFDHHKKWTQAAAIDDQGKIIREMRVLNDSSSLKGFLKGLPKPLKGVVEAGPTWGWIYDTLTELGVKMIVANPSAVRAIAEAKIKTDKIDARMLASLLRVGLIPEVYVPTEEVRSQKMLWRERIWLVRMHVRLKNRIHRLLNHYHIEVPEFSDLFGAAGRRFLEELKLPEPGNRILNAQLKLLQSYRLQIEEVQRWAVKATQGHPNRAYLESLPGFGKVFAPIVALEIDDPKRFANPAKLASYCGLVPSLYSSGGKSWQGGIGKEGNHWLKWAFIEAAWTAIRSSAYFRLVYQRLRQRKTAQVSIIACARRLCEIAYHLLKERRCYEERPLRCA

SEQ ID NO: 174789 - protein, 313 aa, unidentified
MNTIGIDVSKDTFHAAFSCTEVQIFKNTNSGIQKFIETLVEKCFSAHDTEIGCEATGVYHLLLCSELKKANWIIKVINPLITHRMISSSLRSVKTDRHDALAIRKTLLLGSGYIYLDTPEVLALKTLVQERDALCRMRADLKLRMHAHKIKSEAANLPFHDSFTSTFKLLSYEMRQIEKKLCEHVPDTQKLLRSIPGVGLMTAATLVAHVGDIRRFPSAEKLTAYIGLDCRVHQSGISIHGKGYLSKRGNRHLRCMLFNAAFIARQKNPDLKKYFEKKISERLHYTKALCAVERKLVHLIYAVWTRGTPFENR

SEQ ID NO: 174790 - protein, 354 aa, unidentified
MNTIKYIGIDVHQATSVFAIMNQQGKMVGEATLETKPATIIDFLKGQRGTLWVTFEEGTYANWLYDVIEPQVAKLVVCDPRKNKLDGNKSDKIDARRLAELLRLNALTAVYHGKYSVRTLKELARSYVSLQQDSTRVMNRVKAMFRSRGIECRGTSVYQPKNRQEWLEKLDGQGPRHRAERLLKQLELLQELGLEAQKDLIREGRRHKSYKILRGIPGLGPIRVALILAFVMTPYRFQSKRQFWTYTGFSVVRRGSAEYEITEGELKRTKNKPLPRGLNRNYNHVLKNVFKGAALTAAYRGPFQKAFDRRVADGVAPNIALLTLARKIASITLALWKKGEPFDIKRHCLGEQTT

SEQ ID NO: 174791 - protein, 460 aa, unidentified
MKGRTSVHNNDNPVTVENPRQSGRTLVGIDAAITARHHIAIRGGDGEKLTRFSVEPTLAGLRTLTDKLRGYDDIDATVEPTSMTWLPLTIAVENAGGTMHMVGARHSARLRGAIVGKSKSDVIDAEVLTRASQVFDLTPLTLPTPAQLALRRSVIRRAAAVIDANRSWRRLMSLARWAFPDVWTAFAGSLPTATAVLQRWPDIRLLACARRATLTAVIAAHTRGVDDTPARAEAIKTAATGWAAFWDGHLDLDALTVDVTEHLTDLTDDQARVARFTAHSTRWWEHLYGDDELLLSVPGMGPVTAATIRAFLGDGSSFSSAKKAASYVGITPSTWSSGTISQPRRAITKEGPAPLRLALFQAAGAARRTDPQLAAFYHRLMTTQGHCHTQATIAVARKLAERIWVTITTGRPYQLRDTNGDPVTARRAKELIAAHYRVDTSTRAQTRAHTHTIRKSKLTR

SEQ ID NO: 174792 - protein, 357 aa, unidentified
MNTILKQCLGIDVSKLNLSLSLGYLSSDLNKEFKTHVDVSNNLSGYKDLIKWLEKSLDTEVDFIIIMEATGVYHQQVAHYLYQQGYDVCIMQSGRVKRYAQSLDQRSKTDALDSRMLSMLGLERSLRLWHPPSKSLQELKALSRERSSLLKDKTVEINRQGAVLSSVSNNTKATKRHQARLKLLDLQIASIEDEMRCLVAKDSELKRKLEFLESIPGISFISAATVVGETLGFESITSGKQLTSYAGYDVVLRESGNFRGKTRISKKGNSHIRAALHMPSMTCVRCNPTLKQFYNRLKPNKVKPLVALVAVQRKLLILMFTLWKNEENYDAEFENKKQQKHKAFAAQDNNLINQLAS

SEQ ID NO: 174793 - protein, 394 aa, unidentified
MIAVGIDISKAKSTVAVIDSDGTVLASPFTMAHTQPEMEAFVTYLKGLGEPTTILMEYTGHYHYQVPKKLQDEGFPVCIVNPYQMKKYGDVEIHKAKTDKKDALRIAAYALEKSYKLVPYSSMEQKYEDLKFLSRQYSQRITYVAKLKVQLIALLDQTMPGITRILPLNSRNPEKCALLLFIKRFKSFDEIQRIGKARFLASYDVLAKKASERSASSKGLSIYELAVDSITTRGEDPYIWLSQNQCVDLLSATQNAADEIISQMRNIAETIPEYKVLRAMRGVGDRLILAEIGDVHRFHSGKALNSYAGNDAPPYQSGQFESRNHHISKRGSSTLRKACYEVMQALKLTKPQDDPVYLFMLKKEQEGKPFNVAKMAGVNKFLRIYYARAMELYK

SEQ ID NO: 174794 - protein, 319 aa, unidentified
MAAEVFVGIDVARRSLEIATRPTGERWQVGNDPNGISALVARLRAVRPVLIVLEATGGLEVSVLAALGSVGLPVVAINPRQVRDFAKAVGKLAKTDVLDAHVLAHFAEAVRPAVRPLPDAATQALSALVSRRRQLVEMLTAEENRRKTAPSAIRADIQEHIAWLRTRLHGVDRDLGQAIRSSSLWREQEDELRSVPGIGPVVSTTLLADLPELGTLGRKQIAALVGLAPLNRDSGTLRGKRTIWGGRATVRAALYMGALVGSRCNPVLRALYTRLVAAGKTKKLALTACMHKLLTILNAMLKHRTTWAPAAPGYANTSS

SEQ ID NO: 174795 - protein, 398 aa, unidentified
MAKGSGLTRGDRRRNERIAAVRAVVRTDRAVLAIDLGEDRQVAALLDHDGRVLGRRSVRAKAHGLGGLLGWAQAQAAGQGFAGVVVGCEPTGHRWRAVMALADAAGMGFVCVQALRVHLAREADDYTRDKTDHKDAVVIGKLVARLDCYLPERADADWARLRHLGQRRFRLVGQAVAYRLQVADLLACCWPAALSAAAKPLGSTTWLACLAVAVAGDGDPANWHRVGRETFVAAVRRQLPRLGGKRVCRRILEAFFDALADRAGAVEQRRGGLERIGFLLDDWCATSQRLSEVQTRMVGVLDALRLTGLVTSIPGLSALGAAVILAETGDPSRFATGRSVVKHAGLNPAENTSAASRGVTKVSRRGRPGAAGGRLAGGMGHAAGQPGPGRQVHPPERP

SEQ ID NO: 174796 - protein, 344 aa, unidentified
MLYVGLDLSRKRVDWQALEPEGERVAIGAVPPDRDGLGKLVQRLGDAPVLAVIESMSGARFVHDQLELAGWDVRIADAVKAKGLAPLACKTDKIDCWVLAELARLNLIPEIWLPDPAVRAERERARFRLHLVKHRRSLKNRVHAILFQHGVPNPSSDLFGAGGRRLLARLQLPEPWASTVTASLALIDTLDEQITACERELRQLGADHPYIPLLITCPGIAWILGYTIAAEIGDISRFPTPRKLVGYTGLTPKVEQSGERDRRGPLRKNGPNYLRWALIEAAHTAGRDPRYRPIVERMRARHGKKRGSKIAAIEIGRRLSEAIWHMLTHERPFAPAGATTPLAA

SEQ ID NO: 174797 - protein, 442 aa, unidentified
MTTEKMKNKVSPDEIVAWVGLDWADSEHRISMYEVGTGQIEERVLKQSGEALQQWLAELQKRYAGGKVAVILEQSRGGVVYGLMGYDFIVLYPVNPQSLASYRKALYPSGAKDDPVDAALLREMVQKNPERFRQWAADDPETRSLRLLVEGRRKLVNEMTRLTNRLTSQLKGYYPQALEWAGELNSRQACDFLEEWPTLEAVKTARPARLRKFYLKYGRPRPETLDRRIESIREATWLTRDPAAVIAGSMMVQAIVKQIRPLIAAIEDYDDEIKRLFQRHLDRLIFESLPGAGPVLAPRLLAAFGADRDRWSLAAEVEMLAGIAPVREKSGKQCWIHWRMACSKFLRQTFHEFAASSIRWCNWAKAYYDYLREHGKSHHAAVRALAFKWIRVIFACWKNRTPYDNQVFLDALAKRGSHLALRAALAVPPCRAHRTVITVENL

SEQ ID NO: 174798 - protein, 333 aa, unidentified
MKTLQHYKHFIGCDVSKNTLDFAIFQAGKEYRTFEHIQVPNTLDGFREVRKWLGSFKVKKAELVFGLEYTGVYSNEFTDWCFKKGYAFVMLHPMDVKNACSRGRNKTDMVDAQFIADYIYLMRERLETSTPESPVIKQLRDLYNERALAVKTRTMYINQSKTLNDKASINRVKKTLETLSHQIKSIEAQILSVLNSDENLKNNYDLLLSIPGIGLVNAVQTIISTGNFTRFRNARQYAKFSCVSPMHIQSGTSVKGGCHVSRIGHNEIKSVLTEAARSAVTHDKQMRAYYERKRKEGKSHGCVMNAVKFKLICRMFAVITRQSKYVDIDKYRS

SEQ ID NO: 174799 - protein, 410 aa, unidentified
MYKICCGIDVHKTFVVACIASTSDKGITSYESHRFSTYTSGLKTLLQWLIDRNCKDVCMESTSKYWIPVYNILEKGCSIVLAHPKYVKAIRGKKTDKKDAKWIADLFKHDLVAGSFMPPSDIRQLRDLMRYRFKLTCFKSSEKNRLQNCLTVSNIQLGNVVSDTFGKSAQAILDKLLENPADTSFDLEPLVYKSLKKKLPELRDAIDGFITPEQAGKLKIIKDHYDNLESRKAELEELILALAAPYQQELAILQTAPGISSNFTAIGIISEIGTNMEAFPSAKHLCSWAGLTPTNNESAGKKKSVRVSKAGCYIKPLLVQCANAVIKSTKHPEMRNRYLRLKKRRGHKKAIIAIARMLLTALYHMLKNGENYNPELYQKTDLPPVDREIIIEQALMLIRNQGYKIKSATE

SEQ ID NO: 174800 - protein, 407 aa, unidentified
MNTSTDVFAGLDWAVHTHAVCIIDASGAVRDRFEVAHDRQGLAELMRRLARIDASVRIAIERPSGLIVDALLEAGHQVFPIHPNAVKASRPRYRSHGAKSDASDAYLLADLLRTDGHRWAALSPQSDSIRALRALVRSRDDLVSTRVALGNQLHSTLETFWPGAACIFADITSPIGLAFLRRYPSPASASRLSEAQLLRFCRAQHYSGRRSPAELLARLRAAAQALPGKLINESMAHVVRSLVAVLNPLVAQISGLTRRIERFVASLPDGQIIMSFPRAGHVCAAQILAELGDVRQRFPTLDRLTAEAGAVPVTYQSGKTRSVTFRWACNHRLRQAITCLADNSRHANAWAHRIYTEARARGCDHPHAIRILARAWLAVIWRAWMDRKPYDPKLHRGALKLASDTGG

SEQ ID NO: 174801 - protein, 355 aa, unidentified
MEYFAGLDVGVKETAICVVNSAGAVVLEASAETTADAIHQALEGYARRLRRVGHEAGALSPWLHRGLQRLGLEVVLLETRHVHAALKAQRNKTDRNDARGVAQLVRSGWYRDVHVKSDDSYRLRLLLTHRRTLKRKFLDLENEIRHSLKVFGVKLHAAGRGSFDAHVRDAVAGDAFLAAMAEPMLRARAALWAEYTRMHALVVQITVHDAVCKRFMAIPGVGPVTALAFKTAVDAPERFARSRDVGAHFGLTPKREQSGTSIDFDGHISRQGDKEMRTLLYEAASCLLTRSKVWTSLKAWGMKLARHRGHKRAVTAVARKLAVIMHAMWRDGTDFRFAAAPTVQPEAAARALAPA

SEQ ID NO: 174802 - protein, 359 aa, unidentified
MQTQFKELDFTGQNIYTGIDVHKKSWQVSVFSEALFHKTFNQPPKPEVLYGYLTKHFPKGTYYSVYEAGFCGFWIHDKLQSLGINNIVVNPADVPTTDKEKKRKTDKVDSNKLARQLRNGDLEAIYTHKRAVLEDRSLLRMRRTLIKDLTRNKNRVKSDLHFFGIEIPEQFTRNPSYWSKKFITWLEEQEEHQQWTGKDSFRILMDQVKSLRAQLLEVNKKVRILSNENYYQKRVALLGSLFGVGLITSMTFLTEIDDIHRFANLEKLRSYVGLTPTSHASGDKDLHGEMIHRGNKFLKSAIFESAWIAARLDPVLHMDYINFCKRMKPNKAIVRIACKLLDRVHYVLKNEVPYKSGIR

SEQ ID NO: 174803 - protein, 405 aa, unidentified
MEVVHPRCAGLDVHKRTVVACRLTPGPGAEPAREVRTFGTTTRELLALVDWLAGAEVSHVAMESTGSFWKPVYNILEAGFELLVVNAAHLKAVPGRKTDVRDAEWIADLLPHGLLRASFIPTRPERELTRYRTSLIRERASEVNRIQKVLEGANIKLASVASNVAGVSGQAILRALVAGQADPAALAGLAVGRMRSKRPALEEALTGSIGPHQRFILATMLRRLDELDRHIIDGSAEIEARLRPFEPEIDRLVTIPGVGRRTAETLLAEVGADMSRFPSARHLASWAGMCPGNRESAGKRMSGRTRKGSPWLRGILIDAAHGAARTTTYLGAQYHRIAARWGGKRAAVAVGHSQLVIAYNVLRRGEPFHDLGANYFDERDREHVRRRLTHRLEALGYQVTVAPAA

SEQ ID NO: 174804 - protein, 483 aa, unidentified
MKSKQPEKNKKAICRPAQNNWHQMNRKQRREMTRKIQSEDLSLEVVHPDAAGIDIGNESHYVAVPLTRDSQPVRRFGCTTSELKGMAVWLKQCAIRTIALQSTGVYWIAVYDILEEAGFEVYLVNAKETKNLPGRKSDVQESQWLMKLHTYGLLRNSFRPSQEIRTMRTYWRQRHDLVRAAGRHIQRMQKTLTQMNIQLANVLSDVSGMTGQAIVKAILAGERDPYQLAALRNWRVKASEEEIARSLEGNWQEDLLFVLQQEQDGYEFCQRQMAECDQRLQQYLQQLEDRSHGAGLPEEKRKERLRKKKKGNAPQFDLRAELFRMTGTDLTQIDGIDVTTTMTILSEAGWDMSKWKTEHHFVSWLRLCPDNRISGDKIIGKGRLPTNNRVTNALRMAASTLRLSNTYLGAQFRRLRTKLGAPVAIKAMAAKLARLVYRMLRHGMTFVDRGAEFYDAQHRKLQITYLKRKAAHLGFQIIEAPAA

SEQ ID NO: 174805 - protein, 340 aa, unidentified
MQNTTRYVGLDVHKEIIAVAVCDESGFAQSLGNIPNTPDAVAQLMRKLAARGSLQVAYEAGPCGYVLYHQLHKLGIPCLVAAPTLIPVRSGDRVKTDRRDALKLARFLRSGDLTAVFVPDEHHIALRDLLRCRQDAKQDQRRARNRLTKFLLREGLSPPQPCKPFSEPYQRWLRSLSLALPAKQRVLCDYIAEVDHVDQRVKLLEADLASLMPSMPEPMQKVVAALQSLHGVQLLTAATVVAEAGELGRFEHAGQLFSYAGLVPSEYSSGGPAGQHRGGLTKTGNAHLRHILVEAAWHYQKRPGISAALLRRRQGLDPVSYTHLDVYKRQPLRRYRAGCL

SEQ ID NO: 174806 - protein, 387 aa, unidentified
MPQPNDLSRSLAALDENSTLIAVIEMSQSSWLVAGIIPGIERQPAKKLSADEGGLLRLLHRWRGEAAKAGRNLTRIAVAYEAGRDGFWLARWLRAQGIEAYVIHPNSIAVSREHRRAKTDRLDTALLKRAFLGWLRGEREHCSMAAIPSLEEEDAKRPSRERESLVGERTRLGNRMKSTLARLGIRGFKPTLRTAGQQLERLRTPEGVPVPPHTLAELRREMARLRLVAEQIREIETARLERLERDPNRGAHPMIRLLTQVRGLGVETADMLAHEAFSRSLRDRRAVARYGGLTGAPDESGARRREKGLAKAGNARVRRGMIQLAWRFLMFQKDSALAQWYRARTADARGGTRKALIVALARKLLVALWRLVTTGEVPDGVVLRPAR

SEQ ID NO: 174807 - protein, 433 aa, unidentified
MTTSLFAGREALRNVDVAIGAVDGRVEHDRRTHVIETGDIDVFLGLDVGKGEHHATAVTPAGKKAFDKRLPNTEPKLRELFAKLQAKHGTVLVVVDQPASIGALPLAVARDMGCPVAYLPGLTMRRIADLYPGEAKTDARDAFIIADAARAMPHTLRSIDLEDETIAELEMIVGFDDDLTGEATRVANRLHGLLTQIHPSLERVLGPRLQHPAVLALLERFGSPAQIRKAGRRRLVTLLRPKAPRMTERLVEDIFTALDEQTVVVPGTEAAALILPSLATSLQAVLDQRKLLAGRIEKLLEAHPLSPVLISMPGVGIRTGARILIEVGDGSSFPSAAHLAAYAGLAPATRNSGSSIRGEQPSRRGNKQLKRAFFLSAFAALGDPASRAYYDKRIGQGKHHTQALLCLARRRADVLFAMLRDGTFYEARATTTA

SEQ ID NO: 174808 - protein, 309 aa, unidentified
MKQSVVYIGIDVAKTHLDVAWAGTFRRWPNERSGHAALVRWIKQSATPVQLICEASGGYEQALLESLQKSQVKVTLVQAVRVRQYARAAGILAKTDRIDAKVLAAFGSAIQPQPTPPLSAEQKRLRQYEAQRRHLSRTLVAEENRLAQLSCAELRSLSRSLISKIKTQIKTLDRGISDLIAQDQTLCVKAQKLTAISGVGARTAALLLAQMPELGQLNRRQAAALAGLAPFNHDSGSVRGKRAIFGGRPALRSGLYMAALSAARFNPILSNFYQRLRAKGKPHKLALTAVMRKLILALNQTLKPLQCSA

SEQ ID NO: 174809 - protein, 343 aa, unidentified
MQIAVLGIDLGKNSCSVAGLDATGRVVLRRRLHRNSVAKLTADLPRCVMAMEACCGAHHLGRVLQGQGHQVRLMSPEYVRPYVKAQKNDDRDAEAIAEAATRPTMRFVDLKSVDQLDMQSLHRARDRLVGERTALVNQMRGVLLERGVTVPQGRRRLERYLEMMMVDAAVALSLRTRALIEDMRAEWRDLDRRIAAFDEEFVMRARTDETTRLLTSIPGIGALNATALTAAIGNAQTFGRARDLAAWLGLVPKQMTTGGKPRLLGITKRGNVYLRKMLIHGARAAFPSLSTSDTPLGVWLRGLLTRAHKNTAVVALAAKLARIIWAVLRNCRKFDMNAMMPTA

SEQ ID NO: 174810 - protein, 346 aa, unidentified
MLYAGLDLSRKRLDFHLLDGEGGTVDVGASPPDVDGLRGLTRRLDRHGQPIRAAIESMNGARFVHDRLELGGWQVEIADAQKVKGLAPLACKTDRIDAWVLAELARRDLVPAIWLPDPRVRAERERARWRLHLVRHRSSLKQRVHAVLLTHGKPCPVSDLFGVRGRRLLANLGLPQPWQGTVEASLRLIDELEREIDACERELRRLGADHRYVPLLLTVPGISWVLAYTIAAELGDIGRFASPRKLAGYSGLCPRVYQSGERDLRGPLSKQGPRYLRWALVEAATHACTHPVYRDRYQQTKTRIGKQRGAKVAQIDLARRLSEAIWHMLSRGECFAPKGATDPLAA

SEQ ID NO: 174811 - protein, 398 aa, unidentified
MRFIGMDVHRDFCEVAVWEAGEVRSAGRVKSTEADLELFAGSLGEDDQVAMEMSGNARAVAAAIEPHVARVVLADPKKVRERLGNGPKTDRLDARALAQLGAGGFLAAVWMPDEPTRVRRRLISRRYQLVRQRTREKNQVHAVLVRNLRGKAPMSDLFGANGRSWLATQPLPTDEAETVDACLRQVDFLDAEIELIDRRVAEQVVASPEIRRLMSLPGFGAVAATALMAAIGDVSRFPSPRHLVGYLGLDPKVAQSGSEPARHGRISKRGPGYGRHVLVEAALHARRSTGPMKAFGERVAGRRGQNVATVAVARKLLTIAWHMLTRGEDYAFARPTLVAQKIRKAELDAGAKRRRGGGGKRPKVSATERKRLEKELAAQAEVAYRRLVADWQPSGRGA

SEQ ID NO: 174812 - protein, 310 aa, unidentified
MPSIKYVGVDLCKRELMADLSAEAKPRAFPNDAAGITAFIAALPAGAHVVCESTGGYERGFAQVLYDRQIPVNIVQPGRVHYFARSKGKRAKNDRIDAKLLTAFGETMALAAPPPPTAQAQELQDLFRARQQLTAQLNEQASHDEHVRLPFLAAQAKERRELLQKQIQAIEKRIRTMIAADRQLRQRAERVQQVQGIGEVSAWTVLAEMPELGSLRPGQAGYLLGVVPHPDESGPRSGQRHIGGGRAHARKVLYMAALTASQHNPVLAPFYRRLTQAKHKPHLVALGAVMRKLVELLNRLLHDPNFVLAS

SEQ ID NO: 174813 - protein, 312 aa, unidentified
MKIICGVDISKARLDACIEPGSIRASFDNDASGIAALATFCQLHRVELVAMEATGGYERRAFLQLSEQGLPCAVTNARQVRLYAEAMGVLEKTDEIDAGIIARFARAKDLQQTPLPSPAQLRLKALVARLRQVTDDLTVQKQRRASLLDNAEMLASIDEVITLLKRQSRTLEGEIGSMINDDPLWACLAESWRSVKGVASRTVARLMADLPEIGTYDNKAIAKLVGLAPIANSSGKREGKRPVRGGRSSVRSILFLVAEIASRYDQSLADFRARLVAAGKEKMVIRIALARKLLVRLNAKARDARASYANAT

SEQ ID NO: 174814 - protein, 318 aa, unidentified
MNSIIYLGIDVHKETYTICSFFYAEDAVKYTQTFSADYKNILKYIDWLRTMYGVDAYIVCGYEAGCIGYSLYHQLTNHGVNCIILAPSTMAITNTNRVKTDKRDAGNIARCLAFKTYSEVYVPTKQDEAVKEYIRMRDAQKDHLKRCKQQILAYVLRLGFRFDDGSYWTVKHFKWLKSLEMDPLFKETLDEYLITYYQLTDKIQHLDERIEEFALEDAYREKVSALKCFIGIKTHTALAIVAETGDFNRFPKAESYAAFLGLIPGENSSGQKQNRFSITKTGNSHLRTLLIESAQGYTRLYCYLQRIKHITKLNCLDG

SEQ ID NO: 174815 - protein, 350 aa, unidentified
MQQFIGCDAHKKFSVFVAVDERGKASKPVRVEHKREVFRAYLESLPASSEIAIESMGSWYWIVDEMERARHIPHLTNPLEAKKRMGKPNKTDNLDGRGLGILLRNGTLPECWIPPRELRDQRELLRTRMALRDLRTKLKLRIHAALDRYGLQAEGISDLFGKAGRTYLAECAAELPTETRRMVVTQLEALDEMTEKIERIEQRIQEQIAPSAEVQLLLSMPGVGAILAPVIWLEIGDVNRFPRAEQLASYAGLVPRVIASGERMRLGSVSRCVNQYLKWAFVEAATCAVKLNAYRSEHIGRLYRRLLQKRGHGRAIVAVARHLAEASYWVLRKQQSYRSPQAKLSSSRNG

SEQ ID NO: 174816 - protein, 342 aa, unidentified
MEISTIGFDLAKSVFQVHAVDAAGRVVLQRRLRRSAVKAFFAQLPPCLVAMEACGSAHYWARELSGLGHRVKLLPPSDVAAYVRRNKTDAADAAAICEAATRPHLRAVAVKSPAQQAVAAQHRVRDLLVRQRTQLINALRGHLSEFGLVAARGPGGLRTLVAALAEAFDDELPGLARAALQEIVAAIAALEERLTRIDRAIVAANKESETARRLLTVPAVGPIGASAFAGLVGDPSAFRSGRDFAAWLGLTPREHSSGGRQSRGRISKKGDRYLRRLLVIGATSVLRRPDSAGPALAAWIRQLLASKPARLVTVALANKIARIVWAVMARNDTFRRTAQAAA

SEQ ID NO: 174817 - protein, 368 aa, unidentified
MTKYYSHYKSGTMNKAKTLNFSGHTIFCALDVHKNSWRINNRDKDFELEDYSQDPCADSLYKHLKSRYPGANFKIAYEAGFCGFGIHRCLSKHDDVECLVVNAADVPTSDKEKKRKTDKIDARKISRELSKGNLAGIYIPDPVMEHGRSLVRQRTRLVQDQTRCKNRIWHLLMFSGLKLDADKPKQYWSKKFIESLRKLPVTDDGLKQTLEIAIDEYLAIRMLIMKAILYMRKISGQSLFQPVQKVLQSIPGIGLINAMIIHTEIMDMKRYPRLDALCNDCGIVPDTEDSGDTKKDKGITHRCNHYLRPAIVESSWVIIRKDPAMLMKYNQYCQRMHENKAIIKIAKHLLSRIRYVWLQQKEYVIGVV

SEQ ID NO: 174818 - protein, 348 aa, unidentified
MSTMTDDESRVTVGVDTHGEVHVAAVLDERGRLLGTHSFPSTLNGHRHMESWASGFGGIDVVGVEGTGAWGAGLARHLTAEGYRVLEVDRPDRKTRRRRGKSDTIDAEAAARAVQAGTTSGTPKTRTGIVEAIRVLRVARRSAVKSRSQAAVQMHSLVSTAPDELREHLRKLGFAQLVARCSRFRPDGVANTVSATKASLRSISRRWLALDQEIDGLDELLGPLVRAAAPNLLALNGVGTDVAGQFLVTAGDNPDRLRSEAAFSHLCGVSPIPASSGRTDRHRLNRGGDRQANAALYRVVLCRLRWDPRTIAYAERRTKSGLSKPEILRCLKRYIAREIYRELLRLPT

SEQ ID NO: 174819 - protein, 350 aa, unidentified
MQIIAFDSHKRYSQVCVENKEGKRLAEERVQHKRGNIKEFLNKWDHGSPVAIETIGNWYWLVDEIEAAGMQPRLVHAHKAKLMIGSVNKTDKLDARGLNMLQRCGTLPTVWIPPGELRDKRELARTRMVYAAQRTKLKNRIHSVLAKYGLQDQFEDISDIFGGSGRQKLVSVKELLPQETRFTLEQLLETLDHIEVQIKELEKRMHMAFKETDEVRLLQTLPGVGFILAVVIWQEIGDVERFASSGQLTSYGGTCPRIHSSGDKSRFGPLRNDVNHYLKWAFSEAGNSVAVNRNRMGNSKIAQLYNRIRSKRGHAKAVGAVARQLAEASYWILKKREFYREPGTGVLTVA

SEQ ID NO: 174820 - protein, 403 aa, unidentified
MNSVGIDISKGRSMVAVMRPFGEVVVSPFEVRHTDSELSELAKLLKSLDGETRVVMEATGNYHTPVAWLLHGAGLYVTVVNAKLVHGYGNNDLRRVKTDRKDAVKLANYGLDRWLTLPRYIPEEDTRLLLKNCYRQYQQYSKVQTMLKNNLISLLDTTFPGMNRLFNTPARADGSEKWVDFAADFWHCGCVCECSEKVFMNKYQRWCRKHGYNFSERKALDIYTEASGHIGVMPMSDTTKLLVAQAVSQLRATSAALAVLKQEMQTLASQLPEYPIVMEMFGVGPALGPQLMAEIGDVRRFHSKKALVAYAGIDAPPNDSGDVTGRHKGMSKVGAPSLRRTLFLVMSVYLQNAPLDEPVYQFMDRKRAEGKPYRVYMMASANKFLRIYYATVKAYLESLEHTA

SEQ ID NO: 174821 - protein, 347 aa, unidentified
MVRSTTEPTYRLFVGVDIAAASATVAWTESAAATPTRAITIEQNAKGVASLVEHLGATTVQPNETLVVMEATGSYWISLATRLHQDGYALSVINPAQAHHFAKSLLKRAKSDAIDAQVLAKLAALLKPECWTPPPAIYEELQQRLAHRDSLLSIRGQLRNQLHALVQRPRVIASVREQLEKLIDTVDGQIAELDAELAAAICQDDVWAKAAARLRSIPGFGLLTAAWVLTTTVNFSICADAAGAVGYAGLAPIERRSGTSVRSRPSIGHSGNSRLRRALYLATLSAARFNPVIKGFYQRLRAAGKPAKVARCAAARKLLCIAWAVVTKDCAFDPNHSHSLQTQATDP

SEQ ID NO: 174822 - protein, 366 aa, unidentified
MSSLWLLKPFPPYMEFTMIARSDAACFVGIDLHKDTLTACVVRRTDREVSYKKIACKCREQIRTFFSSLPRPSVVAIETVGFYRWLWTELEPLADQLVLCDARGARALAGRRIKTDREDALNVALLLADGRLPLAWAPPEQVQLLRNWTRHRNGLTRQHAKMLHHVKSILHRLNFAGPVRLDAAALQRYLLASVERFCADDLTMLWQHQRRLVEIEQDRAQSERRISELMRAAEFAGLRGILESVPGVGLVTSATVIAEIGDFSRFADSKAIGRYAGLAPTVYASGNSNRLGHISKTGSPDLRWVLQQAAWTAIRCDAAFKKTWLRIAKTAGKKAAAVAIARKLLVLMWTLQRKDEPYKSREPVAA

SEQ ID NO: 174823 - protein, 405 aa, unidentified
MDVLYSHCCGLDVHKKNVVACALTPEGKEIRTFSTMTQNLHELRDWILSKGCTHVAMESTGVFWKPVYNLLEPENLQIMVVNAKNIKNVPGRKTDVKDAEWIASLLRHGLLTGSFIPKREQRENRELGRYRQSLIEERTRAINRVQKVLEGGNIKLSSVTSSVLGKSSRAMLEAIINGEDDLNRLADLAHGNMKASSEQLKQALTGVMGAHQLLMLESLLRHIDFLNEEIEKLDKEIEERLRPFELELELLDTIPGVGRRTAELIVIECGIDMGQFHSAAHFVSWAGFAPGQNESAGKKKSTKTRKGNKKLRSGITQASKAASRQKNTYLSSFYHRLARRVGKNKATVATGRKMLTIVYYVLKNKEPYKELGPNYYDEKIKVRVINQAIKRLESLGCKVTIESVA

SEQ ID NO: 174824 - protein, 361 aa, unidentified
MQSTTVVAFDQHAETVVAGVLVPGETVAAVHSLSSDLPTIGRFLASLQRRGAVQCCYEAGPCGFGLQRYLESRGMACDVIAPSLIPRRSGVRIKTDRRDARQLAVLYRAGALTAIRVPSALEEAVRDLLRAREDACEDLVRARHRLTKFLLRQDRRFTAASRPWGTKHREWLRAQRWPLLPLTQTFASYLRTVEEGEARIGAFDHDLREYLTTPPFAESVRRLRCFKGIGDLTALTIAAELGDARRFATAPQLMAFVGLVPSEHSSGGHRGRGAITKTGNAHLRRVLIEAAWHYRHYPSVGAPLLARQRGAPPAVVQRAWAAQHRLSRRYRRMVARGRPSSVAVTAVARELTGFVWAALTQ

SEQ ID NO: 174825 - protein, 339 aa, unidentified
MKLTPVGIDIAKSVFQVHHVDEETGEVLNKPIKRAKLLEYFANRAPCLIGMEACGGAHHWARQFVRMGHQVKLMPGEYVKAFNIRNKKDAADALAIWRAVQQPSKAVAVKTEMQQAMLALHRVREQLVKFRTMQINCLRGLLTEYGEVMGTGRAAFDKGMPEVLARISERLPTALIDTLREQWNGLRLLDEQIGAIERRMREWKKDDQAVKAISEIPGVGVLTATAAVAMMGNPKAFRSGREFAAWAGLVPKQTGSGGKVNLYGISKLGDMYLRTLLIHGARSVLTRGKELDPWLVQMKMRRPLNVVIVALANKMARTIWAILAHDRPYQKGYVSAKQA

SEQ ID NO: 174826 - protein, 312 aa, unidentified
METKYVGIDISKLTLDFDCRPVSAPQQFANDSDGVAALVALLQGSAVERIVVEATGGYETAVVSALAVAGLPVVVVNPKQVRDFAKAISHFAKTDKLDAKVLALFGERIQPPLRVFADEAQRALADVLNRRLQLVTMRAQEKTRLATVPAVARKDIEQHIAWLDKRIAKLETDLGDRLKRSPVWCHKATLLDSVPGVGDVTTFSLLADLPELGTLNRQRISALVGLAPFPDDSGTRQGQRYIRGGRAEVRCVLYMATLSAKTHNPTIKAMFDRLTKAGKPFKLAMTACMRKLLTILNAMLKKNETWKIQPSS

SEQ ID NO: 174827 - protein, 343 aa, unidentified
MQIVRVGLDLAKYVFVVNGVDARGNVVLRKTLRRSAVSNFFANLPPCLIGMEASNGAHYWARVLSELGHEVRLISPQFVTPYVKSNKNDRNDAEAICEAVGRPTMRFVPRKSVDQLGVQAIHRIRSRLVGSRTRLVNQIRGVLSEHGIVIARNIAKLRQGLADMVGSNERNVSDLVRALMGELQVELAEFDRRIAAWDRRIRELYRGSELCQRLGKIEGVGPLSATALMAAVGDRRCFKNGRQFAAWLGLVPKQRSSGGRERLFGISKRGDRYLRTLLIHGARAVLCRAGTKQDPRSRWLGKLRERRHPNVAAVALANKNARIAWALLSGNEPYDPTLTVGTA

SEQ ID NO: 174828 - protein, 315 aa, unidentified
MTNLKKSKSKVNVGVDVGKWFLDVCLYEKDLHWQVENTPEGIKKLLGRLARYQVERLVMEATGRYQHLLVEKAFEKDLPVCVVKALSVRRYAQAIGQTAKTDRIDAQVIAEFSARLKPPVTMRKSKNLLAIRDFLSRRRQLVSMRTRELNRVKIMGKALETSCKRIIRVLDQEIGRMEKKLQTYIEQEAEWSEKRTVLKSAPGIGDTMVYTLLADLPELGSMTNKQAAALVGVAPMNRDSGKMRGKRRIKGGRYEVRTTLYMATLSATLCNPVIKEFYQRLVAQGKHKKVALTACMRKFIVILNAMVRDNCEWQY

SEQ ID NO: 174829 - protein, 369 aa, unidentified
MMKAMRRGVRWPPDPSRGGRRPIPLRPQPWVSNGTAAAVTYDRTVAWLPTACARQVTVTKIICGVDVSSENLDARVGPHGPSLRVERNAAGIEQLAAFCREHAVELAVMEATGGYEKLAFGLLWAAGIPCAVVNPRSVRRFAEGMGLLEKTDRIDAGLIAWYAEVKRIAACPPPSEAQERLTALVGRLRQLTELQVMQINQRRLQTAVAVLASIDAVIALVRGQIREFERDIAKLIAADKLWYKLDRTFRSIKGVADRTIARLMADLPEIGLITNKAIAKLVGLAPIANDSGKSKGKRRVRGGRATVRSILFLVAEIVRRYDPDFAAFHRKLTQAGKAKKAVRVALARKLLVRLNAKARDARKELAFAA

SEQ ID NO: 174830 - protein, 383 aa, unidentified
MKMAQETLSAINNTKESVLYTAFELSNTKWKLAFSDGNKFRLVSIESGDLPRLRIELENAKKRFKLDEDIRVVSCYEAGRDGFWLHRYLASRGIENLIVDSASIEVDRRKRRAKTDRIDASKLLRMLMRYHGGEKKLWAIVRVPSVEDEDARNIGRERDVLKRERTSLRNRIKGLLIQQGLRVNNPSNKKFLQELTSLRTWDGREVSSDLKARIEMEYKRLRLVEDQIGILEKEKKERLKEPNTESLRKVNQLLLLRGIGSVSSWNFVMEFFGWREFNNRKEVGALAGLTPTPYDSGGSIHEQGISKAGNKRIRALSVEIAWAWLRFQPNSKLSHWYIKKFGHGGKRLKRIGIVALARQLLIALWRYLENGIVPEGAYIKPIE

SEQ ID NO: 174831 - protein, 466 aa, unidentified
MTFVNGDLQARFMTRVRGLDPQRCLAIPVDVGKAVAVALVADHYGEIIVAPFEFALTEDGFAVLSAAITRAQHDRGALIVRVGVEAAGHYHRTLVARLQAASLEVVELNPRAVKDARGQQLLRTLKNGARDCGAMAELLIRGSGRPPQCRDEALVEQAAWVAHRRSKVAAQVVLGNQIHGQLDLIFPGLTGCFAHGLEAASLRVLIRDLPDPDRVRRLGVEGVMRFVRRRGVHMTRPKAEQVVRAAHAALRLPSTERRAPLVVLAADWALFEALDQQIRDATTQLAALLPKTPAGVLLGIPGVGILTASSYGAAIGDPTRYANAAAAYRASGLVPISYESAGHARSRTGISREGSVELRRAIIELGRGVGLHHPDFITYRRQLLARGKPPLVALIAVAHRTHRLAFAMPRSQRPFDADRWARAVAGHRHPTDEQARHGDTPAFGGPPARRDLPAQHTLTHAEVLSN

SEQ ID NO: 174832 - protein, 351 aa, unidentified
MTIIGLDYHPSFQQIAFVDTETGECGERRLVHTNQEAEGFYRELKERGVSVRVGMEATGHARWFERLMTELGFELWIGDPAQIKAKRVRKQKTDRQDAQLILTLLIENRFPKVWVPSLENRDLRQLLWHRHRLVQMRTRLMNQLQAVAMNEGVRRKKGLWSKSGRAQLESFLLAPWATRRRQDLLDLLDRLNPNIAELSTAIEQEGKKRPEVVRLMTHPGVGPLTGLAFALVIGPPERFRCGKQIGSYLGLIPCEDSSAGKQRLGHISKQGNSLLRFLLVEAAQITARDDPNWRRKFVHLAMRRGRKIAKVAMARRLAVRLYWMRRREWNYQQLLEFGSHAGQLETGHGVQ

SEQ ID NO: 174833 - protein, 320 aa, unidentified
MMAQNDRVVVGIDVAKGKVDACIRALSQRRTFESTAEGRRQLIAWLRKHKVGKAVMEASGGYERDWAKALREADIEVRIVDPKRVRSFARSAGRLAKNDVIDAEMIAWFAETFGEAPAQAYDADREKLAQIVNARQALLDVQTELQNRNEHSVPDVVRKMQARLLKKIALEMAKPEAAIAAMIKATAHFTELAEIIESVPGLGGGTSAGLIAAMPELGQVSNKAAAALLGVAPYDDDSGKRRGERQIKGGRRKVRNLFYMACLGAATQHNPMLKAFYGRLIAKGKEKKVALVACMRKLIVILNIMIARREKWDANRYAMG

SEQ ID NO: 174834 - protein, 346 aa, unidentified
MKVLIGVDPHKASIAVAVVDEVVGELVECATFLQNRAGLRGLERWAKRFPERRWAVENASGLGRHLAQRLSAVGESVVDVPPKLSARVRVLSTGNARKNGGLDALATALAAWRNERLRTVDLEAGSEVLRLLSERREDLVAERTRALNRLHGLLRDLVTGGVPGTLSSRRAARILRGIRPQNTSDLLRRRLASEVLRDIRALERKIADLNERIEAEVEALGTSLTEIFGVGPILAAKIMGTVGNATRFSTKAHFASYSGTAPVEASSGEVVRHRLSLAGNRRLNNALHMVAICQARSDVRGRAYYRKKIAEGKSRKEALRCLERRISDAVFKSLMADLQEPSCNAA

SEQ ID NO: 174835 - protein, 413 aa, unidentified
MPEPPVKPDRFVALDVHKQYVMVAAVDHERRVVLPPRGVTFDHFDGWIAQHLRPSDAVVLEATTNAWHLVDQLRPLVAAVTVAHPLKVGEIAGARVKTDARDTLVLARLLSVGMIPAVWIPPAEVRDLRALVAHRQRLIRQRTQARNRLQIVLHRHNLVPPAGALFGPERRAWWAGLELPPLERLRVRQDLALLDSLGPLLAEVEEEFMRLSTAEPWAADLPFLVQLPGLGVVTALILLSAIGDIARFPAAKHLVGYAGLGAAVHDSGQTHRGGGITKQGCRELRAALIEAAWVAVEHHPHWKEQFTRLAQRIGKGKAIVAMARKLLVVVWHVLTERTADRQADELAVARKMMRWGAHGHVATRQGLSRGAFVRRQLARLSLGAALTDFAYNGKTVRLPAAEGGTSPPTASVA

SEQ ID NO: 174836 - protein, 414 aa, unidentified
MEQIHDRVAGLDVHRDSVVACVRATGPRGGAVADRERFGTTTAQLSHLKGWLTDRRVSLVALEATGVYWKPVYYAPEHRFAVWLCNAQHVKNVPGRKTDLSDAEWLADVVAHGMIRPSFVPPPAIRELRELTRYRKSQIDARVAEVQRLEKALQEACIKLTSVASKVLTQSGRAMVEALIVGQRDPAELAELALGKLRPKIPALREALAGHFGPEHAVAARRIGDHVDFLDASIAALTEQIDARTEAYRGVFQLLLPVPGFDRLTIDTVIAETGADVSRFPSPGHSAKWAGVCPGNHESAGKRRPVGVGPGNRWLRRALIEAARAAARTGGSYFGAQYRQIAQRRGPNKAAVAVAHSLSDLIWHLLSTGECDQDLGNDYFQRRRDPEREPMRLVRQLEQLGYRVTLTATPPPAA

SEQ ID NO: 174837 - protein, 479 aa, unidentified
MVKKNHSEFLCDSETGEVLETGTEIQYTKDYGVGIDCHSRFLQISVLVKNGPSVFEYRNQFDTDWQSVVNAKEWVVSVIETNSSPFVHITDELHYCIESTSVYHVVVLKAWEGIPSVINPSIAGASKKKTDVLDAKMLAVQDLTGIWPSSFIPSSEVDQLRLLLAERDNFNRLAARTSNRINNSLLKFGYTVGRDGSVTKNTKVREMIEDQISDDPSDHYNVCPEGIPENVKCVFIEEYMQYDMYRELVRDYDKRIRSMVCSMNWETADSQIPGRQMLKILCTAPGIGEQTAILWLAKIVTPRRFRNEKALAAYCSLDPSLKVSAGKVTSTVKRGGCKDLHSALCVAASNLVRRHNEPFGRWGYNIAVNSGRWKKGISAVARKLAVSLYFMSLRGEEFSYEKYRMMTEPDVIDISIEELANKEPAFKRYVRILISGNIHTTKQLVHSYYLCDLTNIKGLGKKFYGLLKEYIGNQEKYRS

SEQ ID NO: 174838 - protein, 407 aa, unidentified
MIFVGDDWAEAHHDVYLCDEAGNRLGKARLPEGIEGIGRFHELIAGHAGEPADVVVGIETDRGLWVQALVEAGYRVYAINPRAASRYRDRHTLSGAKSDPGDAKLLAELVRTDRHNHRPVAGDSDLGEGIKVLARAHQNLIWDRTRATNRLRCALREYFPAALDTFAELADRDTLSVLAVAPDPVTARKLTPGRVRTLLRNAGRQRNIEVRAHAIVEGLRAETLTAPPAVVSAFAATTRAQVALIAELNTQIAGLETELAAHFEQHPDADIYLSQPGIGVILGARVLGEFGDDPNRYADAKSRKNYAGTSPITRASGTRSVALARFVRNARLADAIDQWAFCALTNSSGARAFYDHRRDQGDSHHKALRALGNRLVGILHGCLRTHTTYDETIAWSHRQDRPDHIAA

SEQ ID NO: 174839 - protein, 435 aa, unidentified
MTLINFVAANQKYYAFNLLSVFIMVFWSVQYLLQHLLVQTQVSHQLLQPLILILQLPQTPQFRHAWPGKFFLPVNGMDYLLPLRLTVRNVLTRRITMNILFLGIDLAKNVFQLCGLNQAGKPVYTKRTGRKELLQTLANIPACLIGIEASTGAFYYWQREFEKLGHKVKVISPQYVKPFVRGQKNDGNDAQAIAVALMQPTMQFVPPKSPEQQDIQALHRARQRIVNHRTATVCQIRGLLLDRGIPIGSAVSRARRAIPLILEDAENGLSSRMRRTIAELYDLFNDLGRRIHFFDKEIETVFRQSEACQRIAKVKGIGPETATAVVAAIGKGTEFKNGRHFAAWLGLVPRQHSSGDRQVLMNMTKKGDKHLRTLFIYGARAVVRVATNNNDGHMNQWVNQLKERRGFNKTTVAVANKNARIIWSMLRNDTGYQVV

SEQ ID NO: 174840 - protein, 412 aa, unidentified
MRRVVGIDVHRTFGEVVIWENGLTRHEGRIDMTRTTLEGFGRQLKKTDEVVIEATGNCMAVSRVLSPHVNRVVIANPLQVKAIAHAHVKTDKIDAATLASLHAAGYLPEIWTPDAATERMRRLVARRYQIVRHGTRIKNEVHAILHQHLIPKCPHADLFNKRGRDWLTRQRLPEDERAAIARHVRELDRLAEDLAILDRDIAQHATDDEAIQRLLTITGVNLTVAAGLMAAIGRIDRFNSPQKLVSYFGLNPRVRQSGLGPAHHGRISKAGRSHARAMLVEAAWAAAKAPGPLRAFFIRIRARRGHQIAAVAVARKLATLCWHMLKKGEDYRWARPSLVAHKRRATELAAGRPQKKGNKRGASYAYNVKELRQQEVQIAEHAERAMNSSLPPDGPVSPGNAVGVRSPQTGRD

SEQ ID NO: 174841 - protein, 465 aa, unidentified
MKPNRRLPRKKQAAGSSLLERLNPNAAGIDCGAATHYVAVPADRDPTPVRAFQTFTADLHRLADWLTACGVTTVAMESTGVYWIPLYEILEGRGFDVVLVNARHVKNVPGRKTDVVDCQWIQELHSVGLLRGSFRPTAAITALRAYLRHRETLVQSAATHVQRMQKALVQMNLQLPIVISDITGVTGLRILRDIIGGQTDPQTLAQHRDHRCQASAAEITAALTGHYRPEHVFVLRQNLELFDAYQHQLTACDAAIEAHVLALAAQAPTPARPVPAARTRKTPRNNEPRFEIRLPLHQLTGVDLTQIDAIGPYSALRLLSEIGTDMSRWPTEKHFTSWLTLAPHNKISGGRVLSSQTQPSANRAAAILRMAAMNLGRTDTALGAFYRRLAYRVGKAKAITATARKLAILVYRTLRDGLVYQDPGAAAYDARHRVRVLHRLRQRAAHLGFSLLNRETGELLEGAVS

SEQ ID NO: 174842 - protein, 449 aa, unidentified
MFVGHRFRTDPDELDTLWARLPKDAERIEVVMEPTRNAWVALAAWFRRHGATVVMVPPEQSADLRDYYNKHTKTDRLDSKVLARLPLLHPEGLHREDSLGPGDELKRAVKIRSGLVHRRTACMARLDGLLEILGPAWIVALGSDMTLTALRFLARYANPVQVKRLGKARLAAFFRRSSRQAWADGRADAVIKAAATTLRLWGADGGELDFDALGADIAAEARLALTLTDEINGFDKRIGALYDKADPAGIVRSVPGAGRVCAPQILGRLGDPTRFANLAAVRSFAGLVPAADSSGQADGHRGPTKAGDCCLREALFIAAGHPRKVDPTLAVRYQRLMLAGKHHDSAVCTLAAVLLTRIAACPRAGTHYLLCDTDGRVITEAQGRAIVAERYTVPPEVRAARRKVTPTDTHDATSGTSVPRQESPRAPRHRPFRNQHEPPTAFVATLDIG

SEQ ID NO: 174843 - protein, 431 aa, unidentified
MQTARIMNTNNDWTKHTHFAALDWASDHHDVVIVDHSGAIAAEFRFAHTAAGWAEFTEKMQPYAGAPFALETSSGPAVDQLLQRGWTLYPVNPKAAERYRERKVPSGTKTDRHDGWSLADALRTDGHGWRPLLPQDEATATLRALCRDEIALIEQRTALVNQLIAALREYYPVALEIFDDWTQPFTWALIQQFPTPLTLQSAGKRKWEKFLHTHRLWRTDTAPARLELFARANALPASAAVRNAKSLLATSLVKVLQTLETQLREYRRRITETFAQHPDHDLFGSLPGAAEKIAPRLLGELGAIRAVYPDADALCCQAGVSPVSFQSGKLDKARIRWACDVVLRHTVHLWADCSRKKSAWAAAYYQGKRQQGHDHASALRCLGKRWLKVLWRLWQDGQKYDATRHEQSLKVHGSWVQAHLDAALQATPATL

SEQ ID NO: 174844 - protein, 375 aa, unidentified
MGEITRALIARVGVDLAKRVIQVHAVDGTGRRVVSRALKRDQFIAWCAMLPPGCLVAMEACSSAHHWARRLRAMGLDARLIAANFVTPYRMEGKGGKNDATDAAAICEAASRPSMRFVPIKSCEQQGMMSLHRVREGLKEERTACVNRIRGVLAEFGLVFGKSPKVLRAVLIDVLEDASNELSTTARLVLQRAFEHWRELDAHMLWCDQQVGQHVRNTPAAQRAAKVIGIGEIGASALTAGVGDFRQFKNGAQFGAWLGIVPRQDSSGGTIRLGRITKRGDDYLRTLLIQGAKAAVLSADKRDDPISRWLVQLTARVGWQKACVAMANKNARILWAVMTREEGFDPKHVSVKPDAKRPVRERAGAAPELAAACPA

SEQ ID NO: 174845 - protein, 313 aa, unidentified
MAQIVTTVGIDVSKDRLDVCIGPADEQFSVTNDPAGWRQLVRRLQPLMARAIGLEASGGYERGAIDALLEAGLPVRLVNPWKLRKFAQAFGVLAKNDRLDARVIAQFVASAPSREVHRDRAIDHLAELVNTRRQLVDALQQIGNQAQLLRDAALRRLQARRIRQLERDVVRLDQLIGQAIAADAPLSARRDLLCSMPGVGPVLAATLLALLPELGALPNRSVAALVGVVPYDCDSGKIKGLRCIFGGRAAIRRVLFMAAQVAARFNPVLKAFNQRLIGAGKKPKVAIVAIMRKLIVTLNAMLRDNASWQTIPA

SEQ ID NO: 174846 - protein, 364 aa, unidentified
MFSDQGCRERSRALNIIGCDLHTRYQQIAGLDRATGEMVSRRLEHENGEARTFYKSLAPGARVGIEATFPAHWFERLLAECGHELWVGDAARIRASEVRRQKTDVRDAELLLDLLLKDSFPRIWVPSVEERDLRQLLIHRNKVVRARTAVKNQLHAMAISQGVCRKRKLWSDRGRAELSGLTLLPWASRRRKELLLWLDQLDATVKELDQAVEEAAAGRAEVRRLRTHPGVGAVTGLAFVLTLGQVERFANSRKLVSYLGLNPLEHSSGGRQRLGAITKQGNSMLRWLLVEAGHTAARGDPELGRRYRRLKIRRASGTAKVAVARRLAVRLYWMLRQRIDYAQLVRMSGSPSSAVVPPPAESKV

SEQ ID NO: 174847 - protein, 326 aa, unidentified
MHGYRCDKEVGILGIDISKDHLVSSEGRVYENNKKGYEEILKVKLNTIVVEPTGAYSIKPCQYFKEKGIKILQVSPNILWKEKDLRGKKTDFYDAQKLINMANKAKEYNYNPLKELVTLYIFLKDLEVKYKNRVKRALFLVSDEEKISKEMLEEFSKGNFKIQLYNLEYTKIVLEEIEVLSKALLETSEKIKEVEKMIQLQSENHVLLTIPGIGKLSSGIIIGIVGDIKRFPNPESFVAYCGLDPIVERSGKATVSKGISKKGNKYLRSLFYFLAEMNYSRNPTLLEFYENHKEKLKGKKLYTALARKLARIVWSVWYNNKPYEPK

SEQ ID NO: 174848 - protein, 408 aa, unidentified
MEAIHDRCAGLDVHKDTVVACARLVSAGKVQQEVKTFETTTQGLLALCDWLSEHGCSHAAMESTGVYWKPVWHILEGSVELVLANANHIKNVPGRKTDVNDAMWIADLLAHGLIRASFVPPTAVQELRDLTRTRKQLVREVAQHTLRIQKALEDANIKITGLISNVLGRSGRAVLEALIAGESDPNRLVELTHGRLRASRGSLVEALRGRVREHHRFLLRLHLAQVDALNAAIQKIENRVGRTLDPIRERAQLLTSIPGVSDTVANVIVAEIGIDMTRFPSAGHLVSRAGLCPRNDESAGKRRSTRLRKGAPWLKTTIVQAAWGAAKTKNSYLRAQFLRIKSRRGPMKAIVAVAASMLTAIYHMLRTGQPYHDLTGAFFDSRDRTRLAKRLLRRLADLGFQCQVAAPT

SEQ ID NO: 174849 - protein, 412 aa, unidentified
MEVLYPHCAGLDVHKDTVVACVRHMATGSVEREVRTFKTTTKDLLALSDWLAEHGCTHVAMEATGVYWKPVWHILSDGDFVLVLANAAHVKNVPGRKTDVNDATWLADLLAHGLIRGSFVPDEQTQEMRNLLRTRKQLVRECSRHIQRLQKTLEDANIKLDSVISDIMGLSGRAMIEALIAGESDPERLAQLAHRRIKAPPEALCEALRGRVTRHHRFLLRLHLKQIDAVNVAIDDIDQEVDAQIEPFRTAIQLLITIPGVSELSACVILAEIGHDMNRFPTAAHLISWAGLCPKNDESAGKRRSTRMRKGAPWLKTTLVQCARAAARKKASYFQAQYHRLRARRGDKKAIGAVAASILTTAYHMLKYGTLYEDLGPDYFDKRGKGKHVHRLINRLQNLGFAVQITPVEAAA

SEQ ID NO: 174850 - protein, 406 aa, unidentified
MRILYERCCGLDIHKKSVVACLLTPEGKEVRTFGTMTRDLLGLSDWLAQQGCTHVAMEATGVFWKPVYNLLEDSGMTLLVVNATHIKAVPGRQTDVRDAEWIADLLQHGLLKPSFIPDRGQRELQELIRYRRSLIGERAREVNRIQKVLEGANIKLGSVISNTMGVSGRAMLEALVAGTTDSKELAKLATARLEATPEQLEAALEGRMGAHQQMLLALQLQHVTQLDEAIDRVSAEIEERLRPFENHLVRLDTIPGVSRRGAEEIIAAIGVDMSRFPTHRHLASWAKLCPGTNESAGKRGSATTGKGNPYLRETLVEAGWAAGRTKHTYLAAQFHRLKARRGAKRAVVAVGHSILIIAYHILKEDGTVYQDLGPNYFDERSKEETTRRTVKRLERLGYKVTLEPAA

SEQ ID NO: 174851 - protein, 354 aa, unidentified
METAYDGRQVVGMDLHRRRSVIVRMTEDGHRLATARITNSPAELRREIARAGKSPMVVLEATYGWYWAADTLAAAGAEVHLAHPLGVKAFSYRRVKNDERDAADLADLLRMGRLPEAWIAPPDVRQLRELTRYRHKLVHLRTSCKDQVHAVLAKLGIPVTCSDIFGRAGSAWLDSLSLPQPYAGKVTSLRQIIGLLDTEIAMLGAVIADLLAGHRGYQVIQQVPGIGPVLAAVIIAEIGDATRFRSAGQLCSWAGLTPRHRESDTKVARGHVTKQGSRMLRWALIEAIQRVPADTVTGGVKAAIIARRGKEAKNIAKVAAARRMLTLIYYGLRDGQIRCLSQTPGQPAVTEPAA

SEQ ID NO: 174852 - protein, 449 aa, unidentified
MSHFTNMSPTNEVGKPLNSHGPVRCLYHSAIGVDVHAQLLVCCFQKHLPETNQLLSEQAQFGTSNSQIKQFVDWVSSHKPEIILMESTGVYWMSPYEALESAGFTSQQLAVVNARDIKAAYGRKSDKADARRLTEFARMNSFKRSFVPSRDIRTARLIARRLHHATQDCTRESNRMQKLLSCSGTRISSVFSSFKGKAAQKIINSFLDDSCPEFIACVRSNCSRLRATFTDIVDAFRQLNTPTFKELLLEQRKSWRQAMERRDRLEALLRIQMKPYKKTVDQLCAIPGVKELAALKILSEIGTDLSSFRSSEAFCSWIGICCGNNESAGKAKKSGTPKGNNYLRAYLTEVGQAIALVKTYTTVLRKVFQAFKERRGHNRAVVAIAHKIARIIYTMIKNSIAYVEISSPTLEKIRLKKLRASINNAKEVGISLQKLSVVKDSTGEILSDT

SEQ ID NO: 174853 - protein, 390 aa, unidentified
MIYVGIDVAKDKHDCFITNSDGEVLYKPFTIQNNGEGFDKLYERIRSVSNDFSKVKVGLESTGHYSYNIQGYLVKRGLTIYPLNPLHTNLFRKSQSLRQTKTDKVDARTIAYLLMSNVNLKSYSETSYHNEELKSLTRYRFDKVRERAKLKVAVSRLVCILFPELEKLVPSLHLPSVQALLYEFPGAAHVANAHLTRLTNILKEASRGRYDKNTALTIKAAAKSSIGLNMPAKSLELKHTLALMKELDKEIQEIENEIKLIMDKLESPILSIPGIKYRMGAMIIAEIGDFARFENADKILAYAGLSPSTYQSGKLDSCYSHMEKRGSRYLRYALFNATKLVCMYDPKFREYLNKKRAEGKHYNVAISHATKKLVRLIYALETSGRQYITA

SEQ ID NO: 174854 - protein, 327 aa, unidentified
MFTTQPVVGVDVSKATLAVCHQVGAHVQHLEVANTPAGFRQLVRCGGVTSLYVLEATGPYYLAVAYHLVAAGAQVAVLNPLVVKRFIQMHLGKGKSDRKDAQWLLRYGQQQATPRWQPEEAVLVECRQVEQVVELLIRHKTRVHNALEALQAQPIVSPAALEQLRQTLLHLEEQVQQLETKLLTTVEARYPPEMQLLCSIPGIGRKTAAYLLLFTDGFTSFRNYRQLIAKAGLCPREFSSGTSVRGKARISKMGGALIRSKLFSWSARRANGAYRLLYDRLVAKGKNGKLALIAVCNKLLKQAYAIVTSGVPYQADFTKKVVAALAF

SEQ ID NO: 174855 - protein, 339 aa, unidentified
MFIIGIDPHKRSHTAVAVDRSETVLDTIRVDADRHQRSRLLEWATRFEPRTWAVEGATGLGAMLAQQLVGAGEHVLDVPPKLSARVRLLERGRIDKTDPNDARSAAIVAWRTPALNVVTVNDEHRVVLRLLADRDHQITAQRTRSICRLHALLCVLIEGGTAKSLTVARAEKLLASVHADGPIILERLTMARQLIEEVRTLDAARAEIRRRHVTALEASKTTVTNVFGIGPLTAAIIVGRVGDVRRFPTAGHFARHNGTAPIEASSGPKTRHRLNPRGDRQLNHAIHMAAVTQVRNDTPGRAYYLRKQAEGKSRKEAMRALKRRISDAVYQRLITDAHR

SEQ ID NO: 174856 - protein, 403 aa, unidentified
MTMYKTCGLDVHKDTIFCGVFDGKHHQAVKEFSTLTSSITSLGEYLKSEAIEDVAMESTGIYWIPIWNILEAMGFNLTLVNPYLIKQMPGRKSDVKDAQWIAALLHKGLVRGSLIPCKEIRELRTYSRKYIRLQQRLTSILQEMERNLEMCGIRITSFVSNISGKSVMKVIHALVEGENDPEVLAGYIHGRIVNRHKRETIVESLRGHTTPQHLFQLELSLEEYELLCGQRDRCEEEMSRLCHLHYPKELALLQTIPGISLLSAMIVIAETGADMKAFENSGKFAGWTGLRPRNDESAGKFKSTATTKGNRYLRAILVQVAWAASRTKGSFFKEKFSRLCLRKNRKKALIAIARKMAVLIWNVLYYKEEYNPQKLIVYEPGKVQAKMDYHQKEFKRLENLLKN

SEQ ID NO: 174857 - protein, 472 aa, unidentified
MNMRYADTHRGPVNVGDAWYCESAMSLTWELPAPRIVALSTQSRVVRTRLLRATAIPNPKEGAMEQLIARCAGLDVHKETVVVCVRVPGPGLDRLQHVRTFGTMTVDLLALRDWLTAQDVTQVAMESTGVYWKPVYYVLEEAVTCLLVNAAHMRNVPGRKTDVQDCVWIAQLLEHGLLRGSFVPPVPIRELRDLTRYRKVLIQERVRETQRLQKGLEDAGVKLASVATDILGASGRAMLEALVAGTTDPEVLAELARGRLRAKLPALRTALAGRFRGHHGFLVGELLAHLDDLEEAIDRLSQQLEDPLRPFAPLVQPLDAIPGITPRAIEGIVAEIGVDMRPFPSAAHLVSWAGICPGHHESAGKHTSGKTRKGNRWLRTALIEAALGAIRTKDCRLAARYRRIMRHRGHKKAVVAVAHTILVIIYHMLTHHVPYQEVGAAYLDQRDREQATRRYVKQLERLGHRVVLEPAA

SEQ ID NO: 174858 - protein, 421 aa, unidentified
MLAETQDNEEIIERVAALDIGKAELVCCVRVPREDRPGRLQEVETYSTMTRPLLGLADHLRCLGVTRVVMEATSDYWKPVFYLLEAHGFETWLVNAKDVKHLPGRPKTDKLDAVWLCKVAERQMIRPSFVPPPEIRRLRDVTRYRADLVAVRTAEKQRAEKLLEDAQIKLSVVASDIFGVSGRQMLAALIAGERNPKVLAQMARAAMRGKITALEEAFTGFFTSHHAFLLEKMLARVDAIDADIAALDARIEEMVIPFAAAAQRLDEIPGINAIAACAILAETGIDMARFPTAGHLVSWAKFAPGVKESAGKKKGRNATRHGNSYLARVLGNAAVSAGRTDTFLGERYRRIARRRGKKKAVVAIGRSILVIIWHLLADPGARYADLGSDFYDTRINPEHRKRNHIRQLEALGYTVTLEPDA

SEQ ID NO: 174859 - protein, 392 aa, unidentified
MRTSVGIDIAKEVHWVTAVSPDGVVLIDRKLLNTPTDLAGLVEQLAALGGTIRVGLDVVGGIAGLAEAMLAQAGFALVHVPGLAVNRARQGTVGGENKSDPRDARTIADQVRIRTDLRAIEPATELNLEIRLLVGRRRDLVQAQTQRLSRLHDLLVGIFPGLERSLDLTTKGPLHLLTRFVTPAELRAAGKKRLVRHLQAGGGLPKVEDLADRALTAAAEQTSAVPAERMTARLIRELAAEALASRARLIELDRELEALLDRHPDAALIRSLPGMGAVLTAELIAEAGNLSRFRSADALASAAGMAPVLRQSGRVRFLKRPTGGNKGLKRVFYQSAFCSLGHTDSRTFYDRKKREGKRHHQAVIALARRRVNVLWAVVQTRTPFKADFKKAA

SEQ ID NO: 174860 - protein, 372 aa, unidentified
MVERWCAVGCDAHKQTLTVAAVDAAGSDVKVASFSNDPDGFGAIVAWLRGLGIEVIRVGVEGSSSWGRHLSVSLATAGYDVREVPPTRTTDRRHRRRRPKTDREDALAVARETLADSTLPPAKPTLDVSEAQAELTVVCERRRSLIRRRQRLLNEAEGLLNKLPPELIAGMPKQVAPRLRKVARLDRTLLAPSPSLAEMLDWLAELAADLDQWEARIGELEDRLPPLLDSCGSTLAEEFGIGVVSASELVAAVGKPSRFKTEGGFARWCGVAPVAVSSGEGDGQPIRHRLDLLGNRQVNRILYTMSVTQARHLPSAKEFLARKRAEGKSKKEARRAHKRQLAKRVIRRMWADQRRLGALSQSIQPTPSIRVA

SEQ ID NO: 174861 - protein, 320 aa, unidentified
MESISVYRSALGIDVCAERLDWHRLPERSRGEVANTPDGIQSLVADLRKVGVDIVVIEATGGLQRQVASALVAAGIAAAVINPRQVRDFARASGQLAKTDQIDAQVLALFGLRLQPQPRNLPDAAALELADKLARRSQLVEMSAAEKNRRHRASTAMKRSIDGHLAFLDQAIKTLDQDLDDTLRGSPAWAEKVALLEVVTGVGPQTLRRLLIDLPELGKLDRHGIAKLVGVAPLNRDSGTFRGKRAIWGGRVKVRNTLYMAALSASRFNVPLKAFFERLKAAGKPHKVALVAVARKLLTILNAMLRDTSAWNPKLVEKRA

SEQ ID NO: 174862 - protein, 365 aa, unidentified
MARSVVTEDRAWKEASYIMLHVGLDLSRKRVDVCLISDQGELVDELAAPFDEDGLRRLSERVAAKHAGRVRAVVESMNGARFVHDTLEAHGWDVLVADAQRVKGLAPLACKTDKIDARVLAELSFRDLVPAIWLPDPRIRRERELARFRLHLVRHRSSLKNRIHSTLITFGKPCPVSDLFGVAGRKLLERLAVPAPWRENVEASVVLIDQLDRQIDAVASELKYVGADHPYVPLLMTAPGVGWLVGFSIACEIGDISRFSSPTKLCGYTGLCPRVIQSGEVDRRGPISKHGPKYLRWALFEAALNACDHPLYKERYERTKKRLGRQRGPKVAQIELSRKLTEAIWHMLTRNQPFAPAGAPFRLAA

SEQ ID NO: 174863 - protein, 364 aa, unidentified
MHELTHIGLDVHKDTIAVAVLRSGTTTCDERVIPNTPEAVRKLLSRHADPSLLRTCYEAGPTGYDTHRLVTSLGIACDVIAPSLIPKRSGVRVKTDRADARNLARLHRAGELVAVRVPTPAEEAVRDLVRAREEIKADRRIARQRIRSFLLRYGKRYPKPTDRWSFRFEVWMRALRFEEPLSQATFEHLLGAYFVRDSQLAAIDRQIEELALLDPLAEPVARLRAFRGIDTLSAVTIASETCDFRRFGTAASYMAFTGLVPSEHSSGASTRHGGITKTGNQHIRRVLVEAAWAYRYAPAVRGKFKKRLEGQPPEVVAYSWAAQCRLSGTYRKLAAKKGANKAVVAVTRELSGFVWGAMTGNMGT

SEQ ID NO: 174864 - protein, 458 aa, unidentified
MRKKSKRTKGIEQAHPFDGLSRVNPHAAGVDIGAEENVVCVATNETTQLVRGFGNYTIDLHAIAAWLTEHKIKTVAMESTGVYWIPLFEVLEQKGFDCLLISSRSLRRVPGRKSDVTDAQWIQTLHNYGLLESSFRPQADLIALRSLLRHRRSLVDHRSPHVLHMQKALLQMNIQLSQAVSDITGVTGQTILRAIVAGVRDPKMLASLREPGCKNSEEEIAKALTGTWREEHLFVLKQALALFDFYSQQILECDQEIQRMYAKTRTDLAAELQPLPKRKRNSHSKNQFHETEKIRGHLKRISGVDVSLVDGMGVSLAQTVILECGTDMGKFPTDKHFCSWLGLAPKHEISGNKVLQNKTLKTKSRAGQAFRMAAQSVKQANCPFGVFYRRLKARLGPSQATVATAHAIARMVYRMLKYQIEYDPLSVNEYQKHYEEQQIKYMKKRAAKLGYELLPVAA

SEQ ID NO: 174865 - protein, 351 aa, unidentified
MDLIAFDSHKRYTLACIESEDGRTRREARIDHAPGMIRRFLERCPKGSPVAVETIGNWYWIVDEVEAAGMTPRLVNARKAKLMMGQTNKTDRLDARGLNRLQRTGTLPTVWIPPMELRDLRELLRTRMDLVVQRTQLKNRIHAALARYCLSLEEASDAFTIEGRKEMAQLFEKLPPQTRFANTLLLEEVDAVQNQIDRLEERMEEVLEDTPTVQLLRTLPGVGKILSAVIALEVGDIGRFPSAGQLASYAGTTPRVSSSGGKTHFGKLRNDTNRFLKWAYIEAANVVARFHRKHPETHLSRMYAKLRKEKGHAKAVGAVARQLAEATYWMLTRNEGYKEPARTGTGSSTEA

SEQ ID NO: 174866 - protein, 390 aa, unidentified
MIDCYNQKLGEITFPNRPADFPKLVAKVKKCNTDGKTIVLGLENAYGYGRALAVWLIDKGYLVKDVNTAISHRQAKHRGAMYRKSDSDDAEAIALATLNMLDKLPDAYPNDAYWSLGQLVHRRDNIVKQRTRLVNQLHEQLCIAYPSYKQFFNDISRPTALYFWEHYPSRKYLKGKSVEDLRAELVPVSHNKCSTKTCEKILDAVASDKVKNNAYQDARDMVTLSIVSDLQHYDKQLAEVDKMLEQMYKMLGCTLTTIPGVNVITAVKILAEIGDIKRFSNANKLAQFAGIAPLHLSSSGKGKDVATKQGNRRLQATIYFLAIQMVQVSSKGTPRNSVVRAYYEKRKAEGKTSQQALICISRRLISIIYGMLKHGTEYRMPVVESAGENR

SEQ ID NO: 174867 - protein, 336 aa, unidentified
METVCAVVGIDVSKKKLDIALLVNGKTKAKVVENSADGYKLLLEWLSKSKVAKETLHVCMEATGVYYEPVALALHDAGVVVSVINPACIKGFGHSENIRNKNDTADAGLIARYCAAMKPAPWVPPPLEQRQLRAWSLRVQALKDIRQQEENRLEANTFTGMTDVAEHVKQHIAWLSAEIQKLEGDIDDHIDRHPGLKQDAELITSIPGIGATTVARILGQLGDIRRFDSAKAFAAFLGVTPKQRSSGTSIKGRTMMSRAGSTSMRAALYMPSLVACRHNPTLRRFAERLSATGMAKKAVIGAVMHKMTHLIYGVIRTGKPFDPNYLTNGLAIQDGI

SEQ ID NO: 174868 - protein, 373 aa, unidentified
MEGIAGNGAKTAYVAIELSKRSWMVGALLPDRDKPSIYRLSGGDTLGLLSRLARLRQLGVDRLVLCFEAGHDGFWLARFLLCHGIDVRVFDPASLQVNRRARRVKTDRIDVLSLLNALVAVDRGDRHVCSIVRVLSAEEEDARRSHRERDRLIQERTAHINRIKGLLFAQGIREVEPRLRRARIDFTVLRTGEGHPLPPRLRAELEREYARLNMVEDQLRTVEKERDLADAQDPAVEVKRQRLEQLQGVGGAASSIMAREVFARSFASRRHLASYLGLTPSAYDSGAVTRCQGISKAGNSWARRILIEISWLWLRYQPQTALAQWYGRRTRGQGPRVRRVMLVALARKLAVVLWRYVETGALPHGATLSRKAA

SEQ ID NO: 174869 - protein, 338 aa, unidentified
MYIKTLGVDLAKNIFQIHGVDNVGKKVINKAIKRNKLPEFINQLPPCLIGMEACGGSNYWGQKFTDMGHKVKLISPQFVKPYVKSNKNDAVDAEAICEAVTRPNMRFVAIKNKVQQDIQSIHKVRARLVKERTAQSNQLRGLLHEYGIVIPQGIRYVMNEVPSILEDENNGLTSCGRELFSDLYAELRNVDFKVSEYDKKITTLCASNPICKLLCKLPGVGPLTATAISALVGSAELFKNGRELSAYLGLVPKQYSSGGKSKLLGISKRGDRYVRCLLIHGARAVLFQTKNLPISKANWLKELKTRRGFNRAVVALANKNARTIWAIMTKGEDFIWNM

SEQ ID NO: 174870 - protein, 405 aa, unidentified
MLNAVGIDVSKGRSTVAVLQPGGVVIRKPFDVYHNQSDLNNLVAYIKSLDGDTKAVLECTGRYHRPIVEALHRAEIFVSAVNPHLIKNFGNNTIRKVKTDPTDAKKIARYTLDNWQELREYSDMDDTREQLKTMNTQFDFFMKQKTAAKSNLIALLDQTYPGVNKLFDSPVRADGSEKWVDFAYSFWHVDCIRKLSLNTFKERYRSFCKKHDYNFNEAKAEQIYSSAKEAIATLPKSPVYKDLIHCSIKQLNLESEHVEKLRSDMNAVAAQLPEYPVVMGMYGVGTTFGPQLMAEIGDVMRFTHREALTAFAGVDPGKDDSGQRVSKSVKASKCGSARLRKTLFQIMTCLLQNMPEDDPVYQFLDKKRFEGKDYYVYMTAGANKFLRIYYGKVKEHMRKLQADQS

SEQ ID NO: 174871 - protein, 373 aa, unidentified
MSDRTATSSAPAKESSTTTTSHVILALDLGKFKSVACRYDPVTGEHAFETIATTPPAVHDLLIEASPAVLVIEACSASGWISDLAESLGIAVRVANTMGEAWKWKRVKRKTDRDDALKLAKLAASDQLPQVHVPALSVRQHRSLIKHRHALIDRRTGIKNTIRSLLDAQGLSMPMRSRGWTIESINELKQLSRPLSECDARTLWRGQLDLELRLLEAVSTLIKEADKKLDAIASQDERVKRLKTIPQVGSRLAELVVTTLDNAKRFKTARQVSAYAGLVPKQYQSGQMNRLGRITGQGPGLLRRVLVQVAWGLQRREETRGHAVFERLCHGQRTRRKQAAVALARKILIWCWAILRDGSVWDDTRDRRLAMTG

SEQ ID NO: 174872 - protein, 335 aa, unidentified
MQSYGIDLAKEKFDVSFFDLTSKKVSNQPSHKVVKNNLKSIGRFLETLPSDAVLVAEHTGVYGDTLLKCCMDSNVKIAFVGGYVIHRYRATPDRAKTDVLDCALLRDFGERYPDKLKYKTFPEEALYELRQLARHREMLVEQRKQLITADKSEDCRPVRSIAVKRSMDRIKEMLDTEIAETEKEMLKVINGHDSIHHNYELVKSVDGVGLITAVELLVKTENFTKITTARQYSAYAGTAPYEKSSGKMDKGAHISKIGNRRSKTLLYICAESARLHNKEIKLYYERRTLIDKKPCHYVLNAIANKLLRIIFTLVEKGEYYDANFIRQDPRVVKYN

SEQ ID NO: 174873 - protein, 340 aa, unidentified
MKKVSTIGLDLAKNVFQAHGADASGAVIFRKKLRRAHVLEFFATQPACTVAMEACGGSHFWGREIGNYGHRVRLIPPAYVKPFVKRQKNDAADAEAICEAAQRPTMRFVAVKSEAAQGAAVVFRTRDMLVRQRTQIINALRGHLAEFGLIVAQGPAHVAKLIMAVQDPKQPLSEAARPILCVLVDMLGLLDQRIKLLDIAIARRAKEDDVARRLMSIPGVGPVIATAMAALAPPAETFKRGRDFAAWLGLTPLQHSTGGKQRLGATSKMGERTLRRLLIIGASSVVRWAARKGAPAGSWLASMIARKPAMLVRVALANKMARVIWALMAKGGTYRAPVVA

SEQ ID NO: 174874 - protein, 383 aa, unidentified
MKKNSIAKLQANKSQIRKMAAKQKLTVGLDLGDRTSRYCILDGAGNKVGEDQLPTTKVGLDSLFGKMAPSRIALEVGMHSPWVSRQLAALGHEAIVANPRKVRLITQSVKKNDRMDAEHLARLARVDPQLLAPIRHRGVEAQADLAVIRARAELVEARTKLINAARGLAKPMGERLKSCDADYVKESLADGLGEATQNVIRPLLKSVEDISQQIGVYDKKIREVEKRYAETELLKQVHGVGTLIALTYMLTLEDAERFEHSREVGPYLGLTRKQRDSGDRQPELGISKAGDELLRRLLVQAAHCILRDGAPDSDLKVWGMTKVQTGAKTGNGKKGSKRRKKKAAVAVARKLAVLLHKLWVTGEVYDPQYNRKAVEAGKGKAAA

SEQ ID NO: 174875 - protein, 409 aa, unidentified
MRYYLGVDWADQEHAVWGIDEAGQKVTARTVPHTADGLSEWGRELDEWRGQGIELWAAIERPEGRVVDVLLDHGVVVYPINPKALDRARDRFRQSGAKSDPFDARVLADFLRTDHPHLTALHPSSEAAQELKYLTEDCQRLIRQQTRLVNQLTATLKAYYPRALEAAELTTALAREFLQAYPTPEAVARLTERQWRQWAKAHRLSDARTAELWTVLQQPQLPVPAHVVRAKAQMMLALVAALAPVVEAVATYRRAVEDFFARMPVAHWARTLPVGEHGITVPTLWARLGDAPARWTSFRHLQAQAGSVPVTKRSGKQQVVTFRFACDKLLRAAVDQLAFLSLRSSEWARAYYEAQRARGHRHRHALRALAAKWLKIIFVMWQRQVPYDEQYHLATMARQALRHPEKKIA

SEQ ID NO: 174876 - protein, 357 aa, unidentified
MTDIRMAQRTDRVVVGVDTHADLHVAAALDPLGRMLGRLEVGTSTRGYAQLLKWAHTFSPTTTFGVEGTGAYGAGLARFLVDAGCEVIEINRPDRRARRGHGKSDPIDAEAAARSVLAGGPLCIAKRDHDRVGMIRTLRVARRSAIKMRTQVGNQMHALVVTAPDSLRHQLRDLPLDKLVAVTAAARPGTVTTPSAASKLALRSLAIRHQGLAAELVVLDRELGRLTMEAAPALCDLTGVGPDVAGALLVAAGDNPERLRSDAAFASLCGVSPVPASSGKTNRHRLNRGGDRIANNALWRIVMVRLTCDQRTKTYVARRTAEGMAKRDIVRCLKRYVAREVFHALLATAPALTRISA

SEQ ID NO: 174877 - protein, 314 aa, unidentified
MQPLPVCVGIDISKAQLDLVVEPGGESLTVPYDDQGLATLILRLSQIAPRRIVVEATGGLERVLLRALVDAALPVIAVNPRQVRDFAKATGQLAKTDALDAAVLARFAVVIQPPERTLPDPQTQELAAVLARRRQVLAMQRAEQNRTDRASIRVRKRIEAHLRWLNAELARLDEDLDDMIAQSAVWRDRDNLLQSVPGIGPVMSRTVLAELPELGLLNRKQVAALVGVAPFNRDSGRLRGHRTIWGGRAPVRTALYMATLVATRWNPVIREFYRRLRTAGKPPKVALVAAMRKLLTILNAMVHHRTPWRSAVVQ

SEQ ID NO: 174878 - protein, 364 aa, unidentified
MTAVWAGIDSGKRTHHCAVIDAAGRMVLSQRVANDESALLELITSVLALAGEDQVVWATDLNAGGAALLIALLADRGQQVLYIPGRIVHHAAATYRGDGKTDAKDARIIADQARMRLDLQPVRSGDQISTDLRLLTSRRTDLVCDRVRAINRLRATMLEYFPALEAAFDYSKKAPLILLSGYQTPDTIRRVGTTRLTAWLKKRGCRGSATVAGKAVDAANAQRTVLRTEPVAAQLVAQLAGQVAAIDTEITQLDEQISERFDQHRDAPILLSMPGFGPVLAATFLANTGGDLNAFETVDRLASVAGLAPAPRDSGRITGNHHRPRRFNRRLMRTCYLAALSSLKNSPASRTFYDRKVRHEALDV

SEQ ID NO: 174879 - protein, 450 aa, unidentified
MAQGSGLTRGDRNRNRKLADLRDVVRRDRAVLAIDLGEDKQVAVVMDHECRVLARKTVRAKAHHLDTLLAWGTERAGKSGFAGVTVACEPTGHRWKALMGLADGAGQAFVCVQSMAVHRSRETDDYTLGKTDHRDAYLIGKLVTRLECYLPERADETWARLRHLGARRAALVTDVTAVRQQAADLLGCAWPAALGAAARPVESLTWRAAMAVVTARCAGRPERLRKIGYDRFLAAVRRELPRWGGKVVRHRIVKALWDALTDRRGVLQQRPGAIERIELLLEDWRGLRRAVAETEKRMLAVLDELGLTGLASSIDGVTALSAAVILAESGDPRRFSSGRALVKHAGLNPSERTSATISGQTQISRRGRPGLRTAAWRAVWGALRYNKVLQARHARLTGREEGRRLADGQARMACAAALLRWLWAVITTGRAWEPAIASGQAAARTMAGAA

SEQ ID NO: 174880 - protein, 408 aa, unidentified
MNPLFVGIDVSSKNNVAYLMKPDGSKHSSFSVQNNLGGAKLLSERIVSALSSMRLSDVVIGLEATSIYGDNLVYALREDGGLGRFRRKIHVLNPKQVKKFKEAYPDLPKNDWVDAFVIADHLRFGRIAKEVYMDDYRYQALRTLTRARFDVIQNLTREKQRFANYLFLKCSGMAQDKGIQNTSATTIALMERFETVDNLANADLDDLTAFVAETGRGRFADPESTAKAVQAAARGSYRLPKTVNDTVNQAMAVSIASMRALKEQVKVLDKAIEQQFEIIPNTLTSIPGVGKVYSAGIIAEIGDIHRFASQASVAKFAGLVWTQHQSGEFEAEHSRMIKSGNRYLRYYLLEAANSVRRCDSEFRRYYDLKYHEVNKYQHKRALALTARKLVRLVFRLLKDNRLYLPPEG

SEQ ID NO: 174881 - protein, 410 aa, unidentified
MKRDKHIYIGLDLHKFQHTAVIVDCWFEKLGEKTIQNKPTAFPSLLEYVNKYLTEGLTPVFGLEDVGGYGRDLALYLIEQGYIVKFVNSSLSNAERNSYAMTVKNDSWDAQCVADVLIRKLPYLPDVTPSDIHWIIAQLVGRRNAIVKAQTALKNQLHMQLNYHYPSYKDFFSEVDGKTALAFWESYPSPSHLEGETVEDLRKFLLEVSNNACSTRKAEQILSFVQADGEVKREYQTSRDFIIQSIVRDIRFKKQEIKKVDKELKVTIQTLGMQLETMPGIDTVTASALIAEIGDIYRFTNSDKLARYSGIAPIKMGSGGKETMKKTKQGNRKLYDIFYNLSVQQAQVCRGSKIPRNPVFYDYYNRKLSEGKSKSQSLLCIMRRLVRIIYGMMKNKTAYIMPDQPETIAS

SEQ ID NO: 174882 - protein, 351 aa, unidentified
MENSITETIGCDLGDKTSEVCVLRADGTIQRATVRSTRAAMRLFFTRAQAHVVVEVGGHSRWVSALLTDLGHRVTVANARRVQLISQSNNKTDQNDAELLARLGRADIGLLSPVVHRKPETQAHLAVAKARDVLVATRTRLVNHVRGTAKSFGDRIPKCRAETFVRHTRELVPELLKPALDPIYEALEAIEKKIREYDKTIDRIAEGLPDVAAVSQVTGIGNLTGLVYVLTLEDKHRFAKSRMVGAYLGLRPRKSMSGNDDPQLRITKAGDPFLRRLLVNGAHYVMGPFGPDTDLRRWGLELAKRGGKNAKKRAVIAVARKLAVILHRLWVTGEVYEPTGYHARQLEARAA

SEQ ID NO: 174883 - protein, 343 aa, unidentified
MKLIRVGVDLAKSVFQVHGVDRSEKAAWRRKLSRAEWLKAVQETVPVDAEIGMEACGSAHHWARQLRALGYSVKLIAPQFVKPYVKSNKNDATDAEAICEAMSRPGMRFVSVKTVDQQDVQAAHRIRSELMNQRTAKVNQIRGLTSEYGLIAPREIVHLRRAIPLWLEDQENGLSQRFRRLLTGLWDDLCVLDARIAELDTEIATIAASDPVAKRLQQLRGVGPLIATALVATVGDASQFGNGRQMAASLGLTPKQNSSGSKERLLGISKRGDCYVRCVLIHGARSMLHGAKTKTDPLSLWVLRIAATRHPNVAAVALANKTARIAWAMIRHETHYRPDLATH

SEQ ID NO: 174884 - protein, 357 aa, unidentified
MKEYIAFDSHKRYTLAEREDRGTGRCRQCRIDHEPGAIRKYLKACEPGTPVALEATGNWYWIVEEIEAAGLVAQLVHPRKAKLMMGMINKTDKLDVHGLNRLQRNGTLPTVWVPPGELRDQRELTRGRMVLSRHRTRLKNRIHATLSKYGRLVKGVSDLYGKKGRQWLSEQLAHLPEHTRGMTELLLNQLDLTDKQIAEVEKRLDAVLRATPEMELLRSLPGIGPILAAVLMLELGDMGRFAIAERYASYAGTTPRVHGSGGKFRYGKLRPDVNRYLKWAYVEAGNSVALNCKQFPERHVSQRYRRIKQHQGHSRAIGAVARHLAEATFHVLTRKEPYREPALHRGRAMQGLSASAS

SEQ ID NO: 174885 - protein, 309 aa, unidentified
MSAYAGIDVSKATLQVALYPEVSELCVTNDAAGLEAITRYLKSHAVERVLIEATGGYERLSVKLLAKAGLKVQRINPVRARQFALAMGKRAKTDPIDARMLALFASASKDKHFVVPDDAREELTELVNQRDSLVQQRDDNRRRIKQASLPVVLEHYKTLESTLRILIKACDKQIAEQSRRVDADLLERLSEIKGVGNVTIASLFCFLPELGDLNRAQVAALAGVAPYNNDSGAKNGKRHVYGGRAKLRRAAYMCALVMTRVNPDFKARFARLRASGKPAKVALVACMRVLLVRLNAMVRDGKPWCDQPV

SEQ ID NO: 174886 - protein, 345 aa, unidentified
MKMTTIGLDLAKNVFQLHGINERGRVVLKRQLKRAQVLPFFANLEPCCIGMEACGGAHHWARQFEQLGHTVRLMAPQFVKPYVKTNKNDAADAEAICEAVARPSMRFVPIKTREQQAVLALHRARQGFVKARTAQANQIRGLLAEHGIVIPQGIGHIAQRLPEILEDGENELPGVLRELLQRLGAHLKALDRQVDELDAQIQRWHREQAASRKLAAIPGIGPLTASALVATVGDARQFENGRQLAAWLGLVPKQRSSGGKPTLLGISKRGDTYVRTLLIHGARAVIRVAARRSNHAESWLARLLARRNRNVAAVALANKNVRIVWALLARDRAFRSDYTPAVVSG

SEQ ID NO: 174887 - protein, 382 aa, unidentified
MSGTEPHAWETGRMNSITYVGLDVHKATVSVALAERGRGGEIRQLGVFENRPEVLSKLVRRLSNGDRRLSFCYEAGPCGYGLHRLLTGCGHDCVVVAPSLIPMKAGDRIKTDRRDATMLAKLHRAGELTPIWIPDAAHEAMRDLVRARATAGRVLSKARQHLQSFLLRHDRIYRGLRAWTLAYRRWLTTVCFDHPAQQIVLQDYIHAVEDAEARRDRLTRQIDELLPSWSMAPVAMALQAMRGVALVVAATVVAEVGDFRRFANPRQLMAYLGLVPSEHSSGSSIRRGGITKAGNTLARRVLIEGAWTYRMPARVSRKLHDRLEPLPAAIRDIAWKAQIRLCARYRRLAAGKPKVVVTTAIAREMVGFIWAIAQIAQPPLPA

SEQ ID NO: 174888 - protein, 465 aa, unidentified
MHDLIGAWPLPSDPARTMVACPVNVLSAPQAPGRHPNTWKGTTTMTPPNEVVWAGIDTHTDTHTIALLDERGRPLGAETFTADPDGYDRLIGMLPEPRVVAAVGVEGTNSFGAALARRLTAAGYEVREVLRPRRSVRRRDGKSDPLDAVAAARSVMAGDGTSLPKSSDGWVEALRHLNAQRSQLVSAMTAISNSTNGLLVTAPESVRERYRGLRGETRMNRLAECRPAGGLVEHSVLAALKSAAKAWKALKRQAGLLEERMRLILEEHARPLLDMYCAGTVIAATLAIVAGDNPERIRSEAAFAKLCGVCPIPASSGKTNRHRLNKGGNRQGNMALHRIAIVRLRYHKPTRDYMAKKTREGKGKLEIIRCVKRFIAREAYRALISIRNGEAGRGTPAERGAKLRELRVSRNITQQQIGEALCVPSSRISEIERGARDLPELEQRAIQWIHSTTNPKQHTQTLDNV

SEQ ID NO: 174889 - protein, 361 aa, unidentified
MKRHTQDLIAEVPRGCSQAGMTIGIDLGDVWSHYCTLNEDGEVVDRGRFRTNPSSVDKWFTDLPRVRIAMEAGTHSIWISEQLQELGHEVIVANVRELRAISHSDRKSDQVDAEKLARFARLDPKILRPIAHRTVAQQEALTLIRARNLIVRLRTAAVNAVRGLAKPCGYRLPASSTLCFAKRCVAVLPPGLARALGPVLQQIADMTVKIKEYDRAVKQLIETEYCETQALVKVYGVGQLTALTYVLTLGSKERFQRSRDVGCYLGLRPKRSQSGERDPQLGITKAGNVYLRSLLVECANHVLGRHGKDSTLRQWGLSLASRGGKQSRNRAIVAVARKLAVLLHRIWVTQQPYIPFYAKAA

SEQ ID NO: 174890 - protein, 342 aa, unidentified
MTAIGIDTHKATLAACAVDELGRPVGEATFANDPAGHLEFIAWARAIAPEATVGVEGSSSFGAALARSAQSAGLVVREVPPHLSRVERLRTRRPGKSDPGDALAIARVTARESNLPPIRLPDRTTELRLLLEAREDLVAESNRARNRLHAHLLTLAPGYGGTVTNLVAARHRATVGRLLRGVGGVQAELARGLLLRLARLEREVKALASRIGALVAGHPLLGLPGAGPITAARLIAEVGDVRRFRSADALAALAGVAPIPASSGQVQRMRLNRGGNRQLNRAFYFIAVIQSRFYPPAKAYVTRRMEVDGKSWREAIRALKRMLVRPVFRLLVEGAAAQVEAA

SEQ ID NO: 174891 - protein, 426 aa, unidentified
MDYPYSKVAGIDVHSQIHVVTVMDHKGSRTTQQFYNSPASLAALRDWIVSEGCEVVAFESTGDYWRPLYETLSPFVDVIVAHPRDIKKKYSGKKTDKIDSEWIAYLTLHNMVPRSRIPSGKELEMRILTRERESLTNQRTRHQNKVNHILVRNGINLKKFVSKPFGKAGVSLIKLISTYGSVDKIIEHLPKKLRKHEERISSCLPTGLSVNDRLILQAELHQIDALNNSIASIESRITSVSRKFKREISLLTTVPGIGYITAWTIIGEVGIVKDFVKAANLASWAGLTPWVNQSAGKMRMGNITKRGSTHLRRVLIQAAHAAARSGNNYMRVFFERVKKHSSYKKAIIALARKILTIAWNVLIRDEPYNDDKARGIQKKPSSKSQRNNNSQILSVHDAYRILEEAGEITKLEGDEGYLWHGPAASI

SEQ ID NO: 174892 - protein, 264 aa, unidentified
MNNTEIQTPVNVGVDVGKANLDIALHPSGQFHTIPNTEAHIRHFVKILQNYNVERIVVEASGRYEHALVQACDQAGLPIIVVNPVSVRRYAQAIGVLAKTDRIDAQVIALYAATLKPEIKPIPDKTPQKIKDLLIRRSQLLEMSTMEKNRLQILPKYLHRSIRSLLRMLQSQIETVTRQIDQEVAKVDQWRTKMEIMTSVPGVGKVLAYTFLSELPELGSLNRKEIAALVGVAPINRDSGKLNGKRRIRGGRHRVRTVMFMAML

SEQ ID NO: 174893 - protein, 379 aa, unidentified
MDHANTDTPAETILHGALELSKNSWLLALQFPDRVQPSLYPISGGDTVGLIAKLMAARDRWAKVSGKAPSIVLCYEAGYDAFWLARFLKARGFECLVVDAASMQVNRRARRAKTDRIDVGMLLRALIAWGQGDRHVWSVVRVPSVDEEDLRRSHRERDRLVRERTAHINRIKGLLFAQGIRGINVKTKYKTLQIDKLVTGDGGPLPPRLASEITREIARLALIQEQITALERERDQAPTPCKATEKKRLQLMCLTGIGPAIAAVMTREVYYRQFGNRRQVAGFLGLATSPHDSGDVERSQGISRAGRGQVRGIMIQAAWLWLKHQPKSAITRWFVQRTAGQSTRIRRIMIVAVARKLAIALWRFLEQGLVPQGAMLANR

SEQ ID NO: 174894 - protein, 408 aa, unidentified
MCKVIMIGCDLHDATMVLRVADGPGASVRITFPTSNRTGLIAWLQQFAHERNASRIVFAYEASGQGFGLSDDLVEAGIECHVLAPTHLPHNAHSRKNKTDDKDAEMLLDEVRAYVLAGRPLPSVWVPDRQARDDREPVRLRLELAAQRTRIKNQIRNLLKRSQLACPEWFTTSGDWSKKSVRWLQDVVAGVTGGLREGARTALGSLVVLYETLSGQMAALDKALEQLSRTSRQTRPFRKLQTLPGVGPLTALVFLTELGDLSRFRNRREVSAYLGLAPSCHESGERNDRKGRITRQGSARVRQVLCQAAWAALRYSPEWRSKFERIKRGSKSRGKIALVALMRQLGVLMWHTAQSRELEQILEEQDRLSASAPAPRKRGRPSRIAIPSTQPGEAEATATRKGLATAPV

SEQ ID NO: 174895 - protein, 370 aa, unidentified
MVLPSGKHRSRPCPDVFWLKDKEPYFERIANMAVYYVGADVHCNNTELAVEHNKEIIKRFSIPTTIPAIRSVLKELGGRCHLTFEEGPMAGWLYRNLKGTVESITVCDPRRNKLIACDGDADDVIDSGKLAALLRGKFLRAVYHDHDVKRLELKQWIKLYHDFVKSATRNINKVRGCCRGEGIQIPRRAIKAGVYRQQWLDGVENQVLAEQVRLLWQDYDTAASQARAARRQLARRAKGNAVLQRWSELAGIGIIRATTVYAYLDTPWRFKRKSQLWKYCGVGLQRSASGKDAKGRPRQGQLELAQHTNKIIKNALMGAAMSAIQQKDNEFTQYYERMLSNGVIPANARHSVARRMVTVMWGIWKQQIRQ

SEQ ID NO: 174896 - protein, 332 aa, unidentified
MLTESGYRERHPQQASAKTLFDFLKKHFPDGEYHAVYESGFSGFATYYALKEYGIDCVVTHAADVPTTQYEEVMKTDKVDAAKLARSLRAGDIRPIYIRERENIDDRSVIRIRKTIQKQLSGYKSRVKHLLHCNGVEIPDRFASPGTHWSKAFIKWLKEDVVLLSPSRLSLDLLVKQVETIRQTLLDATRAIRRLARTDRYGSNCELLMSIPRIGVSVAMCILTEIYDVKRFRNENQFASYLGLIPTCHNSGGRTSSGEKTFRGNRHLGPMVIEAAWIAVYRDYGLGLAYARYKQSMKPQEAIVKIARKMSNIIFSLLKNGRKYEPYRWDKE

SEQ ID NO: 174897 - protein, 413 aa, unidentified
MPFALPEALFFTGIDWAAETHAVCVTDAAGKIAAEFAIEHSADGITVLLRRLARFGDPGGMPVAIERPDGRLVDLLLEAGHPVVPVKPNAIKAWREGEVLSGAKSDAGDAAVIAEYLRLRAHKLRVAAPYSDETKALRTVVRTRGDLVEMRVAATNQLSALLDAHWPGARAIFADVESPISLEFLTRYPTPVAAAHLGEKRMTAFCAKHGYSGRRTAAELLARLRHAPAGAAGEALSEALRDAVLAAVGVLTALNASVKNLDRSTAAHLGEHPDGAIFTSLPRSGQINAAQVLAEWGDTRQAYEHPDAVAALAGCTPVTKESGKHRSIHFRWACNKRFRVAVTTFADNSRHASPWAAQIYNDARAAGKDHPHAVRILARAWIRVIWRCWQDGIPYDPARHGAASRLARPAEAA

SEQ ID NO: 174898 - protein, 405 aa, unidentified
MNAVGIDVSKGKSTVTIRRPGDVVLLPPCDIPHTQTAVNALIEKIKSLDGETKACMEHTGRYYEPVANWLSDAGIFVSAVNPILIRDFGDDSLRAPKTDKADSKKIARYALDRWAKLKQYGSMDKTRNQLKTMNRQFGFYMDQKTAMKNNLIALLDQTYPGANDFFDSRARSDGSQKWVDFVYTYWHVDCVRGKSLQAFTEHYQKWCKRKGYNFSASKAEEIYQSSSDLIAVFPKDDSTKTLIQQAVTMLNTASQTVESLRIKMDQTASALPEYPVVMAMTGVGPSLGPQLMAEIGDVTRFTHREALTAFAGVDPGKNDSGKHSQKSVRTSKKGSPSLRKTLFQIMDGLIKRSPTEDPVYAFMDKKRSEGKPYYVYMTAGANKFLRIYYGRVREYLASLEKSQES

SEQ ID NO: 174899 - protein, 400 aa, unidentified
MISVGIDVSKGKSTVCVLKPCGEIVCRPFEMQYVEKDLEAFHNLLQKLDGEIRIVMEATGIYHLPVLTFLHERRYFLSVINPFAMKKYAKDNSIRGAKTDKLDSIMIANYGIEKWFKLQRYEGDEETYAELKLLGRRYRYYMELHVKALQELTHILDYVMPGIKKMFNSWNEANGKDKLSDFVERFWHFDLIISMSLEKFTEEYLVWAKEKKYHQSRSKAEAVYGLASSGIPTLSSSTPSTKMFVQEAVSVLRTVDSSLSLILARMQALAKSLPEYSTIREMGGVGDVLAVKLIAEIGDVRRLHNAKALIAWAGIDPPPYESGQFIGSKRKITKRGSSTLRKIGYEVMRVLKSHPAPKDDAVYNYIIKKESEGKSKKHAKIAGLNKFLRIYYARVIAVYQ

SEQ ID NO: 174900 - protein, 361 aa, unidentified
MTATMTWVGMDVHARSIDAAAVDVLTGEFRRVRFGGDGGPVVDWLSGLPQPVHACYEAGPTGFHLYRAAEAAGIRVDVIAPTKTPRASGDRVKTDRKDAELLVRLLMAGGLTTVSVPPSALEAARDLTRAREQVRRDLLRCRHRVSKLLLRQGRVWEGPAGTWTQAHRRWLAGQRFEHPAGELAFLDTLAAVDGLVARKTALDERLARLALDPQWWPTVARLRCFRGIDTLSALVLHLEVHDWQRFQRPTQLSSWLGLTPSLAQSGQSCAYGPITKTGSGYARRILVEAAKHSGRPPLIGVTLKNRQSGQPDHVLQIAWRAQRRLHRLSSRLRERGKPANVVAVAVARELSCFLWAAAVAP

SEQ ID NO: 174901 - protein, 370 aa, unidentified
MEKRSMFVGMDVHKESIDISVAEEGRQGEVRHYGVIPGDLEAVAKVLRALRAPDRVLRFVYEAGPCGFGIHRYLTAQGEDCGVVNPSSMPKRSGDRIKTDRRDGEALARLHRAGELTAIYIPTPDDEALRDLVRAREDAVGLSTQAKHRLKAFLLRQGRRYPGRAGWTLAYRRWLADLSFPLAPQHIALQEYRDTIDETERRVERITDQLRQCVPTWRWAPVVDALQALRGVSFVTAVGLVAEVGDFRRFQHPRHLMAYLGLVPSEHSSGPSVRRGGITKAGNPHARRLLAEAAWAYQGIARIGRQMLYRQEALPKGVCDIAWKAQLRLTARFRRLVARGKAKPKVATAIARELTGFIWAIAREVPAPPA

SEQ ID NO: 174902 - protein, 342 aa, unidentified
MSGAYEGRQIVGMDLHRRRSVLVRMTATGEHLETVRISNDPDYLRQVMARAGEAPEVVLEAAYGWYWAADTLAEMGAQVHLAHPLGVKMFSYRRLKNDQRDAADLADLLRMGRLPEAWIAPPVTRELRGWVRHRAKLVGLRSGLKNQIHAVLAGAGVQVPMSDLFGPGGQQLLADTALAVESRSRVDSLLRVITTLDFEIDTFARLVTGRLRTDPGYVAIQLIPGVGPLLGAVFVAEIGDIGRFTRPEQLASWAGLTPKHHESDTTVHRGRITKQGSTLVRWAAVEAVQRVSAHTRLGQIRDRIGERRGRNIGVVAAARELITLVFYGLRDHHIRCLSARAG

SEQ ID NO: 174903 - protein, 345 aa, unidentified
MNSVGIDLHRKRSHVAALDEGGRELFSRRIVNDPDTFVALLSELDGESKIALEATYGWEWLAELLEDHGYELHLAHPLRTKAIASARVKTDAVDARTLAHLLRADLLPEAYVAPRELRDLRDLLRQRVALTQMRTALKNRVHALLARHGLHHGQSKLFDSKAGRAFLEQAELREPARRRLEVLLRLIADFDREIDALAGEIDQRAKTDPRVKTLCQIKGIGRYTAMLVIAEVGEVERFRSARHLCAWAGLTPTVRSSDGKARLGHISRQGSVALRWALVEAAQKANLSGGPLRESFERIAKRRGRKIAKVAIARKILTLCYYGLRDGEIRCLARRPSATNATAAA

SEQ ID NO: 174904 - protein, 338 aa, unidentified
MTIVAVGIDLAKNVFAVHGVGASGKPELVKPDVKRKKLLELIASLPPCLIGMEACSGAHYWAREFQKFGHTVRIMAPKFVAPYRLGGKHTKNDAADAAAICEAVTRPQMRFVPIKTLDQQSHLFIHRAHQGYVAERTALINRARGLLSELGIVLPQAYKAFKQGVHQVLEDLPGYCNQVIGDMLSEIAHLDERIEQDAKLIAKLAKEDEQSRRLMQLSGVGPTTATAIVASIGKGHDFKNGRQFSAWLGLVPRQNSSGGKTKLGSITKAGDSYLRMLLVLGARALLLSAPNKTDPVSRWALQLKERRGYGKAVVAIAAKNARMCWAVLSLGEGFRVPA

SEQ ID NO: 174905 - protein, 356 aa, unidentified
MQKVNKNSFKEQQFFIGIDVHLKNWEVTIRNNHMLLKTFSMNPSPRELSRHLKQNYPGGVYFSVYEAGFCGYWIHRELERLGIHNIVIHPADVPTSDKEKQNKTDGIDSRKLARELENQTLKSIYTPDEAHQQLRALRRLRGRQVQNMTRVKNRIKGHLHMNGIEIPSHAEMSHWSGRFIQWLESLEFSTPAGKDYLEICIEELKTCRTRIVQIVRLLRSYCTEFRITELIGYLRSIPGIGFITAITFYTEIMDIYRFRTLDHMSSYVGLVPSVHSSGEHEWHGRLTNRKNSYLRHMLVEAGWIAIRKDAALLLAFNELTRKMSKQKAIIRIARKLLNRMRYVWLNQKSYVYAVVE

SEQ ID NO: 174906 - protein, 345 aa, unidentified
MELDKVGIDLGKTVFHLVALNRAGETVVRKKFSRSQLLRFTANLQVRMIGMEACGGAHYLARTLCGQGHDVRLMPAQYVKPFVKTNKNDYIDAEAIAEALDRPRMRYVPIKSNDQLDMQSLHRVRSRWVKSRTSLVNQIRGLLLERGITIRKGRRHAEATLPAVLEDAEINLSGTLRFILAQLLSELRQLNSQIVEIDATIQRGADEQEACQRLMAIPGVGPITATAIVAAIGNGAEFRKARSFSAWLGLVPGEYTTGGKQKLLGISKRGSVYLRQLLVHGARAILQCREKQSPGLSAWLEKLISRAHPNVVTIALANKMARTAWALSHGETYRPPMLSPAISAA

SEQ ID NO: 174907 - protein, 318 aa, unidentified
MAQKRTLVGLDIAKEKVDVAIRSTAVEATFANSAAGRRQLLDWLKEQSACKAVVEASGGYEKSWVELLRAAGLEVVIVDPKRVRHFAKSAGRLAKNDSIDAHMIAWFGEVFGEMPGQSSDEGRQELDRLVTARLGLMRLQGQIESWGEHEQPKAVQKIHRALLKAVATQLAMLQNMIRVKLATTPRFSQRAEIIHSVPGLGDAAAAGLIAFLPELGCVDRQAAAALLGVAPFDDDSGKRHGPRRIMGGRHKLRCLLYMPIMGAATQHNPVLKAHYQRLLAKGKEPKVALMACMRKLIGILNTMLARGEKWDATRHAVA

SEQ ID NO: 174908 - protein, 313 aa, unidentified
MAQMVKTAGIDVSKLWLDVAIWPTREEIRVSRDAAGLALLIAWLGEREVARVGLEASGGYEREVVDTLQAAGFEVAVLNALRVRRFAQAKGRLAKNDRVDARTVAQFTAVMLEEVVPPQRRRDLDELVELLTYRRQVKNWCTDCANQLEHLRDRALRKTIAQRLASFERDLAKIDPKLADLIAEHDDWNALARRLRTVPGVGPVVSASLIALLPELGSLSRRAIASLVGLAPFDDDSGNRQGERHIKGGRKTVRDALYMAALSAKHHNPIIAAFAKRLNGKKPKVITTACMRKLLVMLNAMVRDGTDWKVQAA

SEQ ID NO: 174909 - protein, 360 aa, unidentified
MEPEGKTSRITGGVDTHKDTHTAAALDATGRVLGNATFPASAVGYEELLAWLRRFGPLDRVGVEGTGSYGAGLMRYLRESEVPVIDVNRPNRQARRQHGKSDPADAEAAARATLSGDASGVPKSQDGTVEVIRMLRLERRSAIHARTQAANQLHAVVSTAPEPLRTKLRALSLAALLDHARKCRDVLPTDTVSATQRVLRGLTARWQHLDREVNQLDAQLAALVKTAAPDLVALRGVGIDVAGALLVAAGDNPERLAHEASFAALCGVSPVDASSGRQRRHRLNRGGNRDANRALWVVALVRMQCDPRTRAYVLRRTGQGLGKREILRCLKRYIAREVFKLLRAPSVVAGDGETRLEHVA

SEQ ID NO: 174910 - protein, 340 aa, unidentified
MNHYAGIDVSLECSSVCVVDASGKIICEGKVASEPEALISWLALVGVSLARVGLEAGPLSQWLFAAMRQAGLAVELLETRHVRDAFKAMPVKTDRKDARGIAQLMRLGWFRPVHCKSMAAQETRAMLTARKLVQAKLHDVEMSLRGILRGFGLKVGKTTPRRFEGRIKELVGGHPSLEGVAAALLAVRAVAWREFDALEKRVRSMARDDARARLLTSVPGVGAIVALTFASAIDDPARFKSSKSVGAHFGMTPKKYQSGETDLSGRISKIGDGGVRTAVYEAANVILTRPVKGCTSLKSWAMKLAKRAGMQKAKVALARKLTVIMHKMLADGTTFTNRPA

SEQ ID NO: 174911 - protein, 416 aa, unidentified
MNAAGIDVSSRKSTVAVLRPFGEVVRLPFDVSHSSEDLAGLARQLKALDGETRGVMEHTGRYYEPVANVLHEAGLHVSAVNPLLIREYGGNSLRRVKTDKADAVKIARYALDNWADLRDYTPMDTIRYDLKTLNRQFQLASKQKTATANNLIALQEQSFPGIRKCFDSPVRQDGTQKWVDFTYTFWHADCVRKHSLNAFAERYRKWCKRHGYIFKQSNAEEVYALAKSAVTLVSSSEVTKLLVQEAANQLTGISHSVETYRAEMNRLASMLPEYPVVMEMYGVGESFGPQLMAEIGDIRRFEHKKSLVAFAGVDPMPNQSGEKNVRSNRSSKRGSPYLRKTLFNIMGIYLRCSPADEPVYQFLDRKRVEGKPFYIYMTAGANKFLRRYYAKVRDYLATLDGLPPVDMDSTGLSQPD

SEQ ID NO: 174912 - protein, 342 aa, unidentified
MEKIATVGLDIAKSVFQVHGVDAAGEVVVRKRLSRARVIPFFAKLPRCLVGIEACSNSHHWARELIALGHDVRLMPAQYVKPYVKRGKNDAADAEAICEAVTRPTMRFVTVKTPEQQSVMMLHRVRLMLNRQRTQLSNATRAHMSEFGIVAPVGRIGLEHLLAIVADKDDESIPPDARLCLEMLGAQLAIVKEQILENDRRIRASARDTEVGQRLMEIPGIGPLLASAFVASVGDPGIFKTGRDLAAWIGLVPRQNSSGGKERLGGISRAGNQYLRQMLVVGSMAVIRHAERHGTKRPWLIELMKRRAKKIAAVALANKTARMVWALMTSGERYREPQVAHA

SEQ ID NO: 174913 - protein, 426 aa, unidentified
MTSPPPIPTAAVDFDTTLVLALETSARNWVIAAQVPGLGQVKAKQVIGPDADQLAAAIEGYRRRAAKVGKAVERVVLIYEAGYGGFWLARWLTAKGIEVHVIQPSSVPVERKKRRAKSDRIDADLLLRTLLAWLRGEPRVCTMVPIPDEAVEDARRQVRERAELITERVALTNRIGAILATVGVGGYNPLRRDRRARLQALRTPLGQPLPDHAKAKIARALERLELVLAQIATLEEQRDAVLEEKAPDAAERMIQALVLLRGIGAQFATVLVWEAFVRHFPTAKALGSYAGLVGTPFSSGGTEREQGISKAGNRRLRATAVELAWMWRRHQPDSELTKWFEQRLAGAKGRMKKVLIIAASCSSRHQREGACTFGRSRRESGLRSRIGGPHGAALPAVGGGTHAQRRQDLAHVRTRRRERVPAAAMA

SEQ ID NO: 174914 - protein, 404 aa, unidentified
MELTAIYRCVAALDVHQAKLTVSVLYENDHGDVVNEMREFGGFKRDRREMAAWVASFHPDLVVMESTGIYWKSPYAALEWHGLNLAVVNARHVKQVPGRKTDIADAQWLAILARSGLLRGGFVPPQHFREYRLIARQLQKLTGIASGEKNRLHKLLTDAGIRLSVVVSDLYGKSAKAMIMGLLDGDTPEQLLVYADPRLKATPDELREALDGDLSDSHRFVIRELMAHIDELDARMRKFRQTLLASLSSYQSILQNLQTLPGIDELSAAMILVEIGDDMCAFGSAAKLASWAGVCPGQNESAGKRKSAKARKGNPYLRRLLCEAANAASRTRCGLQEKFKGLMIRRGRKRAIFAIAHKLLKIVFLLIQRGDYYRDAETDYEALTVQRNAPRWIKKLIQYGYISA

SEQ ID NO: 174915 - protein, 318 aa, unidentified
MLIHYIDIAKRNFVIAVSSLSKTKTETNNPKGIAHTIEYLKKHKVALVVTESTGGLEIPAAKAIRRAGIAVIIANPRQTHQFAQSQPLTKTDAKDAKMPAFFTQMMTQKEDWQTMPYQPPTEAEEVLEALVNRRNQSADMRTAEKNRLHQVHETQVGSVKQLIAHFDRLIDELDKQIDDHTHTHFDGKAQVAEQIKGIGSITTATLMAMLPELGRLSHKRIASLAGIAPHPRESGETKFKSRCFGGKSAVRKALYMATVAATRFEPLIRDFYQRLLSEGKPYKVAVTACMRKLLETFAKFLSLPTAETQTQVFVYFRS

SEQ ID NO: 174916 - protein, 347 aa, unidentified
MEHEPANYQLYVGIDIAATSFTAAWMPPDGSPTPPITHPQTPQGFAALQRQFAATGSAPDTTLVVLEATGSYWIALAVTLHTAGYGVSVINPLQAHHFAKAQLRRAKTDPLDAQNLTQLAAALQPAVWTPPPAVYHDTAQWAPGQRLTARDALVVMRQQTRNQRHALLQWPVVVASVHDHLDAVIALLDARIADLEAEIATVLQASDWAESLACLTSAPGIGLLTAAWLLVSTMNFTLCATPEAATAYAGLAPMPHTSGTSVRGQARIGHGGHGRLRTALYMATLAAVRHNPALKTFYTRLRAAGKPSKVARCAAARKLLHLAWALVTKRQQYQSNYRIVDPALAAA

SEQ ID NO: 174917 - protein, 386 aa, unidentified
MRFVGVDIAAERHVFAILGEDGAVLTKPTPFGEDAEGYARLLEALAGGPALVVMEATGHYWKNLFAVLVAADHPVALLNPLRSRRFQDQDLARTRTDAIDALGLARFAREKRPAPTRLGAAATEELKELVRHRDRLKQDFDDRVRQLHRLVDLGFPEFTRYVRGLDSQLATAILADYPTAQALAVAAPHRLAKLRYDGRHKVGLELARQLVAAAQRSVGQHHGPAYRIQVRDICQDLDLWRRRLKAREDDIERLLEDHEVGRLLTTIDGIGPLSAARIVAEVGDPARFATPAALAAYVGVVPALRQSGKRQPGRAGLTPIGHARLRTALWMPVLTAVRRNAWLKAFYERLIARGKPAKLALVAALRKLLHAVHSVARHRRPFVARA

SEQ ID NO: 174918 - protein, 383 aa, unidentified
MRSVALDLGVRETSYCEVSRGLVVGRRTVGELRELEDVLGPGSKRATVAIEACREAWYVHDVLEGWGHEVVLVDTTRTKQIGIRHHGRKTDRIDAELLARAVEHGGIPVAHVLSPARRELRDVLGVRRALVETRTQYITSIRGLARSRGERVGSCAADNFLAKLAKTQLRSETLQTIDPLVSALQRVSVELARTNERLETLARQEPMIERLTTAPGVGLVVATAFVSVVDEARRFEGAHQLESYLGLVPREASTGGKRKLGAITKQGNSYMRQLLVQSASGILRVGDADDPLRRWARELVGRRGRKIAVVALARRLAGVLWAMWRRGTVYEPARLGLRVPPGQDASIETLGMKRAAKKAHCRSLDTARALRTADAADRKEADA

SEQ ID NO: 174919 - protein, 338 aa, unidentified
MFVIGIDPHRGSHAAAALDEQEQVRAVLHLCADGQQRQRLLRWADSFVPRVFAVEGATGTGALLAQQLVAVGETVLDVPPKLAARVRLLDNDHSDKTDTHDARSTAIVALRNHRLRQVSLEDHTAVLRLLAKRHHDLIAARTRAICRLHTTVTFLVEGHLPRRLRAERAARILAGIRPTTAIDVERKAMARDLLAEVRRLDRELAAHHDRICEAVIASGTTLTELFGVGPLVAAYLIGHSGDIRRFPSAGHFARYNATAPIEASSGPVIRHRLNPRGNRQLNHAIHMIAVTQVRHDTPGRAYYLRKQTEGHSRKEAMRALKRRISDAVYRQLVIDSRH

SEQ ID NO: 174920 - protein, 348 aa, unidentified
MISMPDSVIDVVGGVDTHADAHVAAAVDRLGRVLGTGAFATTRSGYLELIAWLESFGRVTTVGIEGTGAWGKGLTRVVQDTGIDVVEVIRPNRQTRRRYGKSDMVDAIAAARAVLNGEATATPRDTDGTIEALRLLRIARRSAITTRTRTANQLHAVITTAPDPIKAQLNGLTMTRITRIATNYRPGTNLTNTTHATKYTLKTLAQRWRTLTNEITHLNTQLDTLVAHAAPPGLLDICGVNTHTATDLLIAAGTNPHRITSDQSFAALCGVSPVDASSGHHIRHRLNRGGDRQANAALYRIVIVQLRYHQPARDYMTRRLQQGRTKPEVIRCLKRYVARTIWTHLNPN

SEQ ID NO: 174921 - protein, 457 aa, unidentified
MGNARARKIPAQLVEDEDYQLRHERVAGIDIAKAKADVCTRLPPVREGGRRASRVEEVPATAAAVLALAGRLLADRVQLVVMESTSDYWRLWFYLLEAAGLNVQLVNPAHARQLAGRPKTDRLDAQWIARLAETGLLRPSFVPPPEIRALRDLTRTRLQLVRDRTREWQRLEKLLEGALVKLSSAVSSLARVKSARTILGAIADGQRDPKALAALAAAQVTGGRAAVEASLEGMLVGGHHAMLIRVHLDHITFLDRSVAAAGDEIAAAVDAIPAAWGIGADGVPSPGPGPGAAAPTAVERLAEIPGVSPALARAVIAETGLDMTRFPTAAHLVSWAGLAPVARQSGPRSRKPGKGQGDAYLRGYCTQAATGAARTDTFLGERLRRLSRRLGGNRAKCAVARSVLVIIWHLLADPGARFTDLGPDWHERKAGRDRKIRTHLRQLQALGLDVTITPAAA

SEQ ID NO: 174922 - protein, 347 aa, unidentified
MPRATSNANVIATIGIDIGKNTFHLIGLDDKGAIILRHKLSRGQVYARLANIPPCLIGMEACVGSHHLGRQLSALGHHTRLMPARYVRPYSKGQKNDFRDAEAIAEAVQRPTMKFVALKTVEQLDLQGLHRIRERLVCQRTSVINQIRAFLLERGIAVRQGPRALRTEMPIVLAKTDKLSQRMIHMLEDLCTDWRHLNGRIEAVSKEIETLSEQDDGAKRLMTVPGIGPIISTATVAAIGTGEVFSKGRDFGAWLGLVPKQMSTGGRTILGPISKRGNRYLRMLFVQAARAVLLRPQSWEKHGLKLWIEAAARRLNRFKLAIALANKIARIAWGVLHGGRNFEVRPM

SEQ ID NO: 174923 - protein, 345 aa, unidentified
MTEAYDGRQVVGIDLHRRRSVIVRMTEDGRKLETVRITNSAAALRREIAKAGKHPRVVVEATYGWYWAADVLEAAGAEVHLAHPLGVQAYSCRRVKNDQRDAADLADLLRMGRLPEAWIAPPEIRELREITRYRHKLVQARTSVKDQVHAVLAKLGIPVTHTDIFGVHGQAWLDGLRLPQPYAGKVTSLRQLAGELSAEITLLEQVLGDLLAGHEGYAAIRQLPGIGPVLAAVIVAEIGDITRFRKAGQLACWAGLTPRHRESDAKVTRGHISKQGPRILRWALCEAIQHQPAGTRPQQVKDGIIARRGPQARNIAKTAAARELLTLIFYAMRDGRVRRAASPAA

SEQ ID NO: 174924 - protein, 400 aa, unidentified
MNPVIGLDVSKGESHAQAFLDRGVPHGKIFRFNHDLEGLSSFLNYVRAVESAAGMSPCIVMEATGHYHSPVVQFLDEHQYLYIVINPLISYEAKKTNLRRVKTDAADAYQLGALFYKEEFEPIKKRGQHLMNLRYLTRQYESLTGMYVQAKLQFQAILDQVFPEYHGVFGDLYSKVSLRFLALHPTSKEVLDMTVEEITTTIQRLTGRGRSVSWCLERAHILVAAASRNPFKETAFPSHLISMQLLIKLLLQYQDHLADLNKSIETLAEELLEYDLIQSIPGIGTKIAATILAEIGEIDRFDHAKKLVAFAGVDPSVFASGKFVATQNRITKHGSRRLRTALYQAVRCGIRSNRNKKLRAYYDKKRAEGKLFKVAVIACVNKLIHWIFAILTSKEAFRLE

SEQ ID NO: 174925 - protein, 351 aa, unidentified
MLIIGCDVHAAKTMLFWIDTATGETSEAYEVPTSELLTHVPGLPGEERVVVLEAGTQSAFLARHLGTLGCTVHVVDPFKVRRLFEALYGLKKTDKIDARGLCLAWAEGYLREAEVWVPDAALAALRELTRTRQTLVEQNAELRTQIRQLLGRENLRCPYQDLMGVKAQAWLDQAAAQLPADAEFALGTLRRMLQGMVAEIQALKARIAEKVAGNEDVALLQTITGIAESSAAAVMAEIGTGTRFASAKALRGYSGLVPQVQQSGERTRHGPLTKRGNRRLRRLMILAAQHFVQTRAVRHSSLGKWYAGQAFRHGRNPAKVAVARRLLTILFVLLRDRVPFDGARYELPPAA

SEQ ID NO: 174926 - protein, 325 aa, unidentified
MNLSVVLGVDIAKLKFDVCLIKENGKAKHKVFTNTTHGFEQLVVWLASHQAGSLHVCLEATGSYGEALALYLFNAGYRVSVVNPAAVKAFAASRLTRTKTDKVDAELIARFCLAQQPQAWTPPAPEVRQLQALVRRLESLIEMRVAEENRFSSGIMINAVRQSLEEHIAYLREQIKQTEKMIREHINNHPDLKEQSDLLDSIPGIGQTTAALLLAEIVNIKQYKSARQVAAYAGLVPRERRSGSSVRGRVQLSKIGNARLRKALYFPAMTALRCSSFFQQWASGMRERGKCKMAVIGAAMRKLIHLAFGVLKTGKPFDPNWAKTA

SEQ ID NO: 174927 - protein, 348 aa, unidentified
MPEEHIEVIVGVDTHTDTHAAVAIDQHGRRLDSIEVEANRAGYRELLAWAHRLGTLSAVGVEGTGSYGVGLSRFLTAAGVMVIEVGRVNRQHRRRYGKSDPADAEAAARAVLSGEANGVPKSRDGIVESIRTLHVVKRSAIKARTQAANQMANLIVTAPDTTRAELRGLSALKRARRAAKWRPGTGHDPATVTRRAIRTLARRWLDLTDEITAHNHDLDELVALAAPHLVAEHGVSRDVAAKLLIAVGDNPDRIRTESSFAALCGVNPVSASSGKTNRHRLNRSGDRQANNALWVIAMVRLRSDPTTRAYSQRRKEEGLSHREIVRCIKRYLARRLYPIILKDLAALT

SEQ ID NO: 174928 - protein, 344 aa, unidentified
MDYGAIDLHKKESQIRIVIESGETIDQRVATTRERFTQVFWGRPRMRILVEASTESEWVAQHLEALGHEVIVADPNYQPMYGHRSRRIKTDRRDVAALAEACQHGIYRRAHRRSAAQHLVQCHLNVRRELTDARTRAVSLARAITRAAGFRMTGGRPEGFLTKLAALDLPAWMKAVLSPLRSVIELLNDELATADAQFEARVAADPMVQRLTTMPGIGPITGSAFVAALDTVSRFERAGQVTSYLGLVPQEHSSGEKQRRGRVVRSAHPYVQALLVQAAWTLQRSTDPRTAPLRAWAQGVARRRGKKIAAVALARRLARTLFAMWRDQTEYHPNRTRPRPLKAA

SEQ ID NO: 174929 - protein, 412 aa, unidentified
MSVVQFTQVLSRGCGMDIHKKVVVAAVQGEGICKETRSFDTFTRSLTQLREWLVSLGITHVAMESTGVYWKPIYNVFEGFIPHIWIVNARHIKNVPGHKTDKNDSEWICQLLMAGLLKPSFIPPKAQRELRDLTRYRRKLIQFVSANKNRIIRILEDGNIKLSSVLSDTSGATAVKLIDMLCDGKQITLSDIESVRHGRCQHTAEDMLEACTGCINEHKVYMLSKIRECNASLKEDILDFDKRIKDVLSSYHDAIERMCEIPGIQNRVCEDLVAEIGLDMSNFPTSAHLCSWAGMCPENNESAGKKKSGRTNHGDKQVKETLVEAAWAASRAKGTFFMERFNRLAPRKGSKKALIAVGHSLLKCIHYVLSTGGRYKELGDNYVPNKKEQKRKEYLKKELQKLGYSVKLSKED

SEQ ID NO: 174930 - protein, 430 aa, unidentified
MDIVGIDWSWNFHTCYSIEQDKVFKIKDGIAGYEKLLKMVSEDAVFVIEESFNRLGDFLLSRGKEVYLLPPKRSKEARGYHSNGVKTDSTDARCIALTYKEHPEYCIKATHDELGMLFRELLRHYRYYTDMSSRLKNKLQNELHNYFPEYARVMGNSWTDCDGRIFLLTICPDVTELRKISDKEINRHFKANHLRYTSSLKRKVKELREKAIDWGMSKYTRDMIANVATQLLEAKREKKKITKEMEKELRKSKYNIILTLPGVGVATGMALVTAFLTHEFKNYRDFQKYCGTMPIVSQSGNFRMCRMRKNCDKKLRGILHMMAINAKKCGAWMKGYYDKKTNKEGKKPSLALRALANILVKIAFAMLRNLKAYDEELFLSSRGNKSPRLNYTTRNSIPGTKKMKKEKLSLPVSVAQTNCHLGTVSGSLSP

SEQ ID NO: 174931 - protein, 429 aa, unidentified
MRTESTPGARGPVFCGVDTHADSHWLCVLDWRGRRVLSRRFPADAAGYEALAGAIAAAGEPACVAMEGTSSYGAGLTRHLASLGMPVREALSPARTQRRRPGQGKCDESDAERAARAAMSGSRLGTPKSQDGWVDGVRCMLAARSGAVKARTSAINTARSLLTTAPEGLRSRFRGMGGPRLMEELPSVRAEGALGAALGALADLWAAARDAALDMELAIEASLEENCPALLAMYGCGPVSAAKLAVAAGDNPGRLRSEASFAAICGACPIPASSGKTVRHRLNRGGDRQANSALHEIARQRVMRDPETAEYAERARARGKSDREVMRCLKRYVAREAYRALMRPHEVRRPEDASGLVAARRAAKVSQVRAASILGTSEKYISMLERGQRELKPIRRAYEAWVEAGLPLDWDRQAFEAERKMDSKKHLAK

SEQ ID NO: 174932 - protein, 312 aa, unidentified
MDFLHTPPLRCLGVDVAKDNLVASDGKRVVTFANDRCGILKLLKAMQPDFVICEQTGGFELMLLDACLKAGIACHRADVMKLKAYIRSLGTLGKSDAIDATHMVAYGYERWTRLALWHAPDPDEVELQALVRRRADLVAFKVAEQNRAGAPGAKAVAASFKAILAAIKRQIDKLDSQIDALVARSVNLARRIRICTTVSGVGTISAASIIAQMPELGSLHRRQAAALAGTAPHPSESGNTKGRRRQRGGRPQVKTALFMPAMCAAQGKGQFASFYKRLIENGKPPIVAIAATMRKIIITINARLREDLAQQS

SEQ ID NO: 174933 - protein, 340 aa, unidentified
MKLYGAIDLHSNNNVTVLINEKDEVVYRKRLPNDLKLILGQLAPHQSKIEGIVVESTYNWYWLVDGLMERGHRVHLANTAAIEQYSGLKYTDDDSDARWLAQLLRLGVLPQGYIYPKEQRPVRDLLRKRSQLVRYRTANLLSIQNLFTRNTGQSMSANQIKGLQVEEIDGIVPANDLALAIKANLSVMRSAEEQVEVLEQTVTGRVKLRPEFRFLKSVPGIGPILSLTIMLETGDIRRFSTVGNFASYCRCVGSQKLSNGKRKGSGNTKNGNKYLSWAFVEAANFAIRFSPKVRSFYQRKKAKSHPVVAIKAVAHKLCRACYYIMRDRVPFDMKKAFSAK

SEQ ID NO: 174934 - protein, 382 aa, unidentified
MTKYLSTPTSGVLVAIDMSKHRQEVLIERPEGGRRRRMTVMATKDDYDRLVAELVSMARPIVVGFEATGNYHRTLAHNLLVAGFQLRLISSVALARTREALHNGWDKNDPKDAQVILHMLRIGATQVYVDPLEAGINDLQELSKTHEVISKAKTQTWHRILNHYLPLYFPEIAHFAGNSRSDWFLALIERFPTPTSITSLGREAFVAEAWSPVGRKVSKARLINDIFETACSSVALSIAEEAAAISMFRMIIGQGRSLIRERNRIEQIAQSLLADHQDYRLLCKIPGIGPINALAILAEAGDLRRFRHHRQYLKFCGLDLRPRSRAPSEAGPNYRSTETLASAGLSGWPPKSHPANVITASATSLEDTWLATPMIQIADVRR

SEQ ID NO: 174935 - protein, 366 aa, unidentified
MIVLEPHGRSSKEVPVSIVGGLDVHRRQITFDWVDRATGQAQRGQITPATREGLGRWLAQLPDHHGAFVVEACTGWRFVVEELQAVGWQAYLAEPAETAMLRGPKRRAKTDRTDAQLLRELLEQGRLPQAWIPPAHLLELRVLVRLRKTLVDQRTAWQQRLHAVLFHHGLPCPDHALLTQATRGWLAQVALPAASRLQVTTALRQIDQLDLELDPLERWLRTFARRQPGCRALIDRHYGIGLLLAPTILAELGDARRFANGDAVVRHTGLDVTVHSSDSKRSPGHLSRQGPQVLRWALFEAAQCAARPTSPDHDLYTQVKTRVDGNRAALTVARKLARRVRHTLIGLGDAALAPVPDLPLPLPVAA

SEQ ID NO: 174936 - protein, 353 aa, unidentified
MKKYIGCDMHKKYSVFVATDEKGRLEPAVTVANDNLELRSYLATIPAENPIAVEASGGWYWFVDELEQAGLEVHLVNPLEAKKRMSGRNKTDRLDAAGLAMLLRNGTLPEVWIPPAQLRDLRGLLRTRLGLRNHTTVLKNRIHAALRRYGQYLPGEPKNLFAGKGRVQLAVYVGSLPEETRLATRHEWDLVEEVEAHIKALEMRIRLSIGRLGWVRLLKTLPGVGAILSATIYLEIGDVNRFASPERLASYAGLTPTVQASGGKVRLGRTSPVANHYLKWAFVEAANCVVMRKQKLQNTHAVRLYERLRASKNHGKAAVALARHLAEASWWMLNKKQAYREPAPASMSSSENG

SEQ ID NO: 174937 - protein, 392 aa, unidentified
MVVSVGIDVSKDKHDCFIVSSEGEVLADAFIIPNTMDGFHYLLQRIRHCTAPQDKIKVGLEATGHYSYNLLGFLLDNGLTTYVLNPLRTNLYRKSLSLRKTKTERVDARTIASMLLSDAGLKPYTDTAYHNEELKSLTRYRFDKVKERAKLKSSVSRLVCILFPEMEKLVSTLHTASVYTLLEEFPGAKQVARAHLTRLKSLLETASKGRYKRDMALEIREAARNSIGSRMPAKSLELQHTIRLIRELDTEIVEIEEQIQSLMDELASPITTIPGMGFRMAAMILAEVGDFTRFDSPDKLLAYAGMSPSTYQSGQLKNCYPHMEKRGSRYLRYALYNATKYVCRWDPTFAAYLAKKRAEGKHYNVALSHAAKKLVRLIFAMEKSRRPYCLAT

SEQ ID NO: 174938 - protein, 355 aa, unidentified
MNDAKYIGLDVHQATISVAVRDCTGKLVMEAILETKAETILQFFRGLRGSLHVNLEEGTWAAWLYDLLQPHVTRVVVSDPRKNALLKDGNKNDRIDARKLAELLYLNKFNAVYHGQHGLRTLKELARSYLTLTRDLTRVMARIKAIYRGWGIPCAGQRAYAPGHRAEWLGKLSEAGVRRRAEFYYQQFDALALLRQETRRELLVESRKHSAVKLLRQIPSIGPIRAALLVALMQTPYRFRTKRQLWAYIGLALTTHTSGEYRFERGQLLRSKKVLAIRGLNRNHNHDLKNIFKGAATWAAANSGPFKDFYEACVARGTKPHMARLTLARKIAAITLLVWKKGVCFDAEYLKPQAA

SEQ ID NO: 174939 - protein, 363 aa, unidentified
MDKYIGFDIDSNKTIACVVQKGKKDMYTTLKTDIGQMKNFLQKQRQDGEKLYLTFEISGEAGYRYDSLIDLVDDITVSNPTKMTWIYRTAKKTDRIDARKQAILLSIGEVPKVHIPSKEIRQWRVTIQHRRKIVNKITQVKNRIRALLKANGFIRPAQRGSWWKLSNRAWMRQFTEEIGITSEQLWRMSLADMLDELELLESQLKRVTKYLDGYLENQAGGKLLMSIPGVGPRTAEAVLAYTDDIKRFGRSKQYCAYFGLTPKLDESGSNRRLGHISKQGPSVVRWLIVEAAWRAIKKSPALRQFHEHVMSGQKGRKKIATVAVARKLLSIMRAMQTSGELFNEGLVCRECGFGRLVEVAKSA

SEQ ID NO: 174940 - protein, 338 aa, unidentified
MNTTTFGLDIAKRAFQMYWVETETGEIVNRRFTKQQVIEFLGQRPAGRVALEACGSAHWWARKIVALGHEVVLLHARFIRPFVQNNKTDATDARAIWTAAQQPGMRSVAPKTADQQATLALHRMRSLLVKSRTMQVNQLRGLLYEFGVTLKAGRVAGLAEVRERLHEIEEVVPGTLFDALRDQLQHIERIDGEIRKLERQIVAWQRQEAACQRVATIPGIGPLTATALVATIGDPAAFKSGRELAAYLGLVPRQSGTGGKVRLGGISKRGDSYIRMLLIHGARAVMFKSRSKGAWSEQLSLRRPTNVGKGSRSTVLMGGESVGMERPHETPDTATHLQ

SEQ ID NO: 174941 - protein, 362 aa, unidentified
MTQSTTIIAFDQHAATTVAAVLLPGQRTPALHELTSDSPTIVRFVERVRRGHQVQCCYEAGPCGFELQRALSTRDVPCDVIAPALIPRRAGDRIKTDRRDAGQLAVLYRAGALTAIHVPTEQEEAARDLLRCREDIRADLLRARHRLSKFLLRHGRRFTGTKKAWSKGHDAWLRAQAWPLPALDQTHVAYLRTVDEAAARLRTVEDDLRGLLTLEPLGRRVERLRCFRGIDDLTALTIAAELGDPRRFPSAPRAMAFVGLVPSEHSSGTKRARGAITKTGNAHLRRVLVEAAWHYRHRPFVGAALRRRQCGAPPASVAHAWAAQQRLHRRYHRLAGRGKVTQQVITAVARELTGFIWATLIQ

SEQ ID NO: 174942 - protein, 347 aa, unidentified
MTIVEAPPGITGGVDTHLDKHVAAALDPLGRLVGTESFDADAAGYKALLVWLEDFGEVTKVGVEGTGSYGVGLSRFLRRKGIEVVEVNRPNRQSRRNHGKSDPLDAVEAARAAISGRASGVGKTKDGPVEAIRVLVVAKRSARQARVKAIVQMRHLGFTAPDQLHSRLKGLSVTALVAEGAKLRATKSADTVTAATKASLSSLAHRIQSLDQEIAGLDEKIESLLLATAPDLMARFGVGPDTAASLLLAAGDNPERLHSEAAWAHLCGVSPVPADSGKNAGHLRRHTGGDRQANSALWRIAMVRIAHDPETTHYFERRVKEGRTKRDVIRILQRYIAREVYRYLPRG

SEQ ID NO: 174943 - protein, 348 aa, unidentified
MMIIGCDYHPSWQQICWLDTVTGETGEKKLEHASGEAEKFYRGLPGPALIGMESTGNCQWFVEMAAALGHDVWIGDAAKIRAADVRQQKHDRRDAALILKLLLEGRFPRIWTPSREEKDLRQLLIHRYKLVRIRAQVKTELQHLAMNQGVTKKRKLWSKAGEKALRELPLKPWASRRREDLFRIREMLNGQIGLLDQAVVEAAEKNEKARLLMTQPGVGPITSMAFVLTMGDVSRFQRGKQVASYLGLIPREYSSGGHRRYGSISKQGNRFMRMLLVEAAQGAVRCDPGMRSEYLHRCHRKAKGVAKVAAARKLAIRLYWMLRTNTGYPEVVRVESSSRVPVVVRHGG

SEQ ID NO: 174944 - protein, 321 aa, unidentified
MQGKVEDQSLPEVHVGIDVSKANLDIHIHPRGERLRVSNDSAGHDRLTESLGRFAVKLVLMEPTSRYHRTIQRRLHGAGLPVALVNPLRARLFAEAIGKRAKTDAIDAAMLALMAERVGLEASEPVSRRQEELQELVSARTAALAEQTALRNRLSVTQNAFLKREHNKRLRSISGHIDRIEAMIEALIKADAEMTRKARILRSIPAIGAVSTQALLAQLHELGRISSKQAAALVGLAPYARDSGGMHGKRSIRGGRAELRSILYMAALVASRRNPDMKRFYDGLVARGKAKKLALIAVARKLVALANTLVAKNREWVPDPA

SEQ ID NO: 174945 - protein, 454 aa, unidentified
MRKPQVVPDEDHEVVYERVAAVDVAKASGVVCLRAPDPARPGRFVNRIWDNVPAMRAQIAELGGELLRCRVQMVTLESTSDYWRIWYYVLESIGLAVQLVSASQAKNLKGRPKTDKLDAMWLARLTQWGMLRPSFVPPAAIRRVRDFTRARQDLVAERTRCLQRVEKLLEDAMIKVTSVAKDGMKAKSVVAMVAALAAGERDPRALADLAKGPLRARRDQLAQALDGMFDSHHGMIARSLLDQVAFLDRQITLMEDQAIAALAGVPESWGVDADGQTGPQAGTSPDSPVLAAAHRLAEIPGISLWLAIVIIAEIGLNMTCFPTPAHLVSWMGLCRSAASSGTRHGKGKPKKGNSYARAAAGQAAIGAARTATFPGERYSRIARRRGKAIAQAAVARSIMIIAWHLLNDPQARYRDLGPDFYASRINRDKKIRNHIRGLQALGLTIAITGDEQAA

SEQ ID NO: 174946 - protein, 341 aa, unidentified
MQITTIGLDIAKSVFQVHGIDAAGEILLRRRLTRARVLPFFAKLGPCLIGIEACATSHYWARELRELGHDVRLMPPSYVKPYVKRQKNDTADAEAICEAVTRPTMRFVEVKTTEQQSVLVLHRTRLMLMRQRIQLSNAIRGHMAEFGIVVPIGRQGLQALIDTIHDESDDRVPAEARCCLQMLASQLRLVNEQILENDRRIRTSARATDVGRRLMGIPGVGPVLASAFVASVPDPAAFKSGRNLAAWIGLVPRQNSSGGKERLGSITKQGNRYLRQMLVVGALAVIRYAERHGTRRPWLVKLMARRTTKIAAVALANKTARMVWAMMISGEAYREPELRAG

SEQ ID NO: 174947 - protein, 376 aa, unidentified
MLLPRQQAKLARGAKDKEHAMSRKLNTTIAVIGIDIGKNSFHVVGLDQRGAIALRQKWSRGQVETRLANLPPCLIGMEACVGAHHLSRRLQRLGHDARLMPARYVRPYSKGQKNDFRDAEAIAEAVQRPTMRFVATKTAEQLDLQALHRVRERLVSQRTGIINQIRAFMLERGIAVRQGIGFLRAELPSILATRSDVLSPRMLRVIEDLAGDWRRLDERVEGLSSEIAALADQDAACKRLMTVPGVGPIISSAMVAAIGAGDVFSKGRDFGAWLGLVPRQISTGDRTILGKISKRGNRYLRVLFVQAAWVVLVRLKPKDWERYGLKSWIEAAKKRLHHNVLAIALANKLARIAWAVLNKERNFECIRTDKMASRPA

SEQ ID NO: 174948 - protein, 369 aa, unidentified
MFKVGAKSKSVSADEGRQPKLILTPEEPMSKSTHSQQRMVFCGIDVSAATLDVALIEPDRPLQQRQFANHASGHKALIGWLARCQSRVRVSLEATGIYSLDLALALDAAPEIEVSVLNPKIVNRFAQTLRRSKTDAADARVLAEYSQRMPFVAWTPPSLSGLRLRAVGRHIAALAAQHARERNRLHAAQSSQAVPGCVIQDLKRSLVSVERRLVKMRREAMALVRNDAEFEQRFRLLTGIPGIAEVSALALLGELALLPPHLTARQWVAHSGLDPVHQESGTSVHRRSRISRQGNRYLRKALYMPALTATRFDPHLKAFYAELLARHKAKLQALTAVARKMLHAIYGIFKTGTSYDGAKLFPARAAAIA

SEQ ID NO: 174949 - protein, 353 aa, unidentified
MISIGVDAHKSIHLAVALDAAGQVCGQWQGANSADGWADVHAWAKGLSAERQWGIEGAWNYGRGLAQHLVAADEAVYDINARWTAAERRRARNRSKSDQRDAQAVALYLRREVTSLPPVLADDETAILGVLVAQRDAAIAEATRLRNQAHQLLLQCDPTYRAHLPALTTPDGIAALESYDAPGASALDQTRAAAVQMLGQRLRLAVSQAEDLKSQIEARAQAGFSPLIQLKGVNALTAGMLAAILGPGRRFRTDADLALYAGAAPLEVSSAGRVRHRLNRGGNRRLNALLFRIALTQLRAWPDAKAYVARRMSEGKTKREAIRALKRYLIRAIWRLWQECVPPTPCTRGGTAV

SEQ ID NO: 174950 - protein, 366 aa, unidentified
MEKSSTAFVGMDVHKESIDIAVADAREARHFGRIGGDAASVDRVVRRLRAAHRKPVFVYEAGPCGFWIYRRLQAQGLPCMVVSPSMTPRNVADRVKTDRRDAMKLARLARAGELEPIYVPDALDEAMRDLVRAREDAVCVQRQARQRLQAMLLRNEIRYVGRSSWTRAHRRWISKVKLPNPAQQIAFEEYVQACEECERRVERFEQAIGAQLEQWRWRPVVQELQALRGISALHAVRIAAELGDFQRFETPRKLMGYLGMIPSEDSSGARRRQGAITKAGNSSARRAMVEAAQAYAHPARVSWVIARRQVKASKRACDIAWKAQLRLCARFGRLSARRLPRNKVIVAIARELAGFVWAIAREVKPL

SEQ ID NO: 174951 - protein, 345 aa, unidentified
MTTMNYIGLDVHKKTISYCVKDVSGRIQQEGKVGSTRRELDYWMKTLPQPWAVAMEATIFSGWIYDHLLPHATQIKVAHPLMLRAIAAAKKKNDQIDASKLADCLRCDFLPECHMMPRAIRDRRRTLRYRHLLVRQMVQMKNRVSGLLMETGVEYNKQRLHKVSYFRELLSANGEVPPSLRPLLKLSRETIERCQKTEYALVSSLQRDPVLADRIKRLRTVPGVGPITALTWALEIGDVSRFGSIKKAISYCGLCGDERSSADKAMRMPLSKQRNKHIQRALVEAAKLAPRQSHELAVIYDQERQKGNSNRATLAVARKMVAYLLAVDRQQRDFVPAEERRTSGA

SEQ ID NO: 174952 - protein, 363 aa, unidentified
MVESTTVAVGLDVHARSIRVAAVRADELLEERTLPYDEEAVERVLRRWPGARCCYEAGPTGFGLYRHLVERGIDCAVVAPGLVPQRPGDRVKTDPRDARKLARLLAGGLLEPIHVPSPELEAVRDLVRAREDARLDRMRDRQRLSKFCLRHGRLLPTSAWTIIRRKWLGEQRFEHAAEQVTFDTYLHAVDLVDRRIEALERSIRETAEQGPWRELVARLRCLRGIDTLTALALVAEISDFSRFYCAEEFMAFVGLVPSEHSSGEQRRQGSITKVGNSHVRRLLVESAWHARRRPKVGYDLARRQRGQDAATVERAWRCQQRLYQRWQRMAGRGKPHQKIVVACARELAGFVWAIATEQPLRIT

SEQ ID NO: 174953 - protein, 339 aa, unidentified
MNRIVVGVDIAKRVFQLYWVEPETGEIVALQLKREKFLEHFVKRSSCLIGMEACGGSQHWARSLQELGHEVKLMSGRMVKPFVVGNKNDVADARGIWMAVQQPGIKAVAVKSEEQQAVLALHRMREQLVKFRTAQINGLRGLLTEYGEVMPQGRAGIKRDIPGALGRLSDRLPAIVIETLREQYARLSELDEQISQIERRLRQWQREDSATQRIAAIPGVGLLSATAAVATMGDAKAFKSGREFAAWLGLVPRQTGTGGRVRLLGISKRGDKYLRTLLIHGARSVLTHSKSPPEWLSELVKRRPKNVAVVAMANKMARTIWALTAHERAYQSGYVSRPA

SEQ ID NO: 174954 - protein, 370 aa, unidentified
MKKHSEVFVGLDVAKAKNAVAIAEGGRNGEVRYLGEIENTAEATRRLVAKLSKTYTKMTFCYEAGPTGYGLFRWIGDLGHDCIVVAPSLIPMKAGDRVKTNRRDAENLAKLLRAGELTAVWVPDARHEAMRDLVRAREAAAQDQTRKRQQVTSFLLRHDRIYPRKKTWGATHARWLTEQVFEHVEQRIAFEELAMAARQATERVARLEATIVEFVPKWSMAPLVEALQAMRGIDLVAASILIAELGDLTRFDNPRQLMGFLGLVPSERSTGDSVRRGGITKTGNTRARRVLIESAWSYRLPPKLGTRKRFLVARAPRAVREIAWKAQTRLSARTRALTAKGKRSTVVVAAVARELAGFIWAIGREVAPAR

SEQ ID NO: 174955 - protein, 345 aa, unidentified
MTEAYDGRQVVGMDLHRRRSVLVRMTMDGRKLETVRITNSPQALRAEIAKAGEHPLVVLEATYGWYWAADVLAAAGAEVHLAHPLGVKAFSYRRVKNDERDAADLADLLRMGRLPEAWIAPAQTRALREVVRYRHKLVQQRTSCKDQVHAVLAKCGVTVRHSDIFGRWGSAWLDELVLPAPYAGKVASLRALAGVLDGEIARLGQQAADMLAGDRGYAAIRELPGIGPVLGAVIVAEIGDVSRFRKPGQLCSWAGLTPRHYESDTRVIRGHVSKQGSRMLRWALAEAIQHQPAGTRPRDVKDAIIARRGAEARDIAKTAAARQLLTLVFYGLRDGHVRRAISPAA

SEQ ID NO: 174956 - protein, 346 aa, unidentified
MKKIFIGIDFSKEKFDATVIKAEGVMECAQRQHEVFDNKVSGFRRLLRWVKSVVDEQDSSLWLFCGENTGGYSKALCNFLYGSGYDMWLENALSIKRSSALQRVKSDKADSGVIAEYAMRNYDQMRLYKPLGKNLERLREVFLYRHNLVKLKVCMTLRKGEKKLTQEKSDISRFMAMSSKHLISEFNKKIAECDKRIQQIIDEDEELQRNFEIITSVPGVGTQNAVCLMVYTDNFSRFGYDSRKLACYYGVAPFGRQSGTSVNTPPHVSPFANKLIKSLLTQSALASIRFCTQMAIYNHRLLEAGKKKPVAINNVKNKLLHVIMAMVRKGEKYNPDYDYHAAIEAA

SEQ ID NO: 174957 - protein, 432 aa, unidentified
MSTDPLGRVGCLPGFVETDQRKVNGVIFVGDDWAEAHHDVYVCDEAGGRLATRRLPEGVQGIGALHELLAEHAEDPGEVHLGIETDRGLWVHALVEVGYVVYAINPKAASRYRDRHTLSGAKSDSGDAKMLAELVRTDRHNHRPVAGDSDLGEGVKILARAHQNLIWDRTRATNRLRSALRESFPAALDTFDDLADRDTLAVLARAATPAEARALTPGRVRTLLRAAGRTRNIDTRAQAIVAGLRADTLTAPDAVARAFAATTRSTVAVIGELNRQIAALETELADHFEQHPDADIYLSQPGIGVILGARVLGEFGDDPNRYADAKSRKNYAGTSPITRASGNRSVALARFIRNPRLADAIDQWAFCSLRNSPGARAFYDHRRRLGDSHHKALRALGNRLVGILHGCLHTRTTYDEHTAWSHRKDDQTDIAA

SEQ ID NO: 174958 - protein, 370 aa, unidentified
MNKIIRVGVDTSKSVFVLHGVDAAEQSVLRRKLRRGQVVEFFAKLEPTKIGIEACGATHHWARELGALGHEVLLLPPQYVKPYVKRNKNDAADAEAICEAMSRPTMRFVPVKTAEQQAALMLAGRRDGLIRRRTQLSNTIRGYAAEFGLIAAKGLDKIEPLLTRIAADQNLPELARELFADYGRDYAELGKQVAKIEAKLKAWHKNNELSRRLAELPTIGPIGASMLVMKVTDPHAFGVGRNFSAWIGLTPKDHSTAGKMRLGVITRAGDEALRSVLVAGATAVIQQVRKGRGHPSPWLLELLKRKPPKLAAVALANKIARIAWKLMVSGERYDPQRAAGRFVPPTGRIAPRSPRQGRFAPPAGVAVGQP

SEQ ID NO: 174959 - protein, 416 aa, unidentified
MKKNSNSSVKKEPKARQAKAQRIVQREAKEVLAELVEKLRGKLEVKATSASPAEAGPRAELGPNMDRLTVGVDLGDQWSHYCILGLQGETLSEGQLQTRGAEVAEFFQALPPARVVMEVGTHSPWMQEIIAGEGHEVVVANPRLMEGSKRRKRKNDRIDAKKLARLGRVDPQSLHPIRHRSREVREDLVVLRAREALVAARTELINATRGLVKSMGTRLPKCSSPSFGQKVKDAIPEKVRAALLPLVQFADALSDSIQSYDQKIEELSSEKYRHTKLLRQVKGVGPITALAYVLTLENPEHFAKSRDVGPYLGLVPKQEDSGESQPQLGISKAGDTMVRKLLVGSAQYILGPFGPDSELRRYGLRLCERGGKNAKKRAAVAVARKLAVLLHRLWVSGEVYEPLGYASSRVMAQQAA

SEQ ID NO: 174960 - protein, 351 aa, unidentified
MSRKTEAGLACTIGIDTGKNTLHLVGLDAKGAVVLREKLARGRIAARLANVPPCLIGIEAGMATHYVARELLVLGHDVRQVPPSYAKPFRQGHKNDFRDAHAIAEAVQRPSTRCVPVKTDAQLELQALHRVRSRLIGGRTAAINQIRSFLLERGITVRQGLRFLRQQLPQVLATRTDVLSPRMIRIIEDLSSDWRRLDERIEHVTEEIKLLASDSEACRQLMTVPGIGPIIASAMVAAIGNGAAFAKGRDFAAWLGLVPKQMSTGDRTILGRITKRGNRYLRTLFMQGARVVLLRPTNWAKHSFGPWIAAAAKRLHHNVLATALANKLARIAWTVLAQGRSYERRAVPGIV

SEQ ID NO: 174961 - protein, 386 aa, unidentified
MKTVAGLDVHKDSVYLCILRENGEKIERVYGVLTPQLDSMRDFMAENKVSEVAMESTSVYWIPIWRVLVDSFELKLVNPYFIRQLPGRKSDVKDAQWIAECVMKELIRGSFIPSPLVQRLRLYDRRIFEINAELVRKYSKIDAILQRCNIRLSNYVSNTDCKSYKAVVKQISEGVTSPQELLRHVHKRIINKHGEDTILAALTGVVSDAEIDMLAQYVAESAILEDNKNKCIEKMREICNSEFKEQMKNLQEIPGVSERSALTVLAEIGPDVNAFPSAKHLVSWCGFNPRNDESNKKIKSNKITHGNRFIRIASVQCAWAASRTKDCYFSKFYAFHTQVRKKFKLKVVVAVARKVLVCIWHILKFNVPYKDFEPQKSVTKDCTQLA

SEQ ID NO: 174962 - protein, 467 aa, unidentified
MAARKQKQKRMSAQVVEDEDYQLRYEVAAGIDVAKDSAVVCVRMPPAAGRKHRTSHLQTVPATVPAITELAAELKELGVQMVSMEATSDYWRVWFAVLEEAGLAVQLVSSSQARNLPGRPKTDKEDARWIARLTEMGMLRSSFVPPPEIRALRVYTRHIWDLTADRTRYWQRLEKLLEDASCKLTSVVSRLAGHQTARAVIEAMIDGERDPRALAALGRGKMRNDKLPALAEALTGMRFGPQHAHAAASLLRAIDLLDAELRDLHERVTAHLAAIPASWGVDSDGVTGPEAGRAVDAAVLPAAERLDEIPGLGREAAAALIAEIGLDMSRFPTAEALVSWAGLTPTARQSGPRKSRGKKGHGNTYAKRICVLAAYAAANTETFLGERFRRLTSRPGGGGRKKAGCAVGRSILVIVWHLLNDPAARYRDLGPGWHARHTDRSRKARNAKRQLEALGYDVTITLREDAA

SEQ ID NO: 174963 - protein, 345 aa, unidentified
MEIRTIGIDLGKTVFHLVGVNARGEVVVRKKCSRMQLLRFTSNLRACLIGMEACGGSHFLGRALREQGHDVRLMPAQYVKPYVKTNKNDYIDAEAIAEAVTRPTMRFVPIKSDDQLDLQSLHRVRERWVVRRTAVINQIRGMLLERGITMHKGRKHLEASLPHILEDAENKLSGALRALLTQLQIEMQYLHRQIEGSDQLIVRIASELEPCRRLIAIPGIGPVIATATIAAIGNGAAFKKGRGFAAWLGVVPGEHSSGGKQQLTGTSRRGNKYLRKLFVLGAHTVLLQRTKQSSGLSTWLASLSARKRKQVATVALANKMARMVWAVLFKGEAYRPPLVPQQNTA

SEQ ID NO: 174964 - protein, 314 aa, unidentified
MADEKWNVGIDVSKAGLDVAWLPSGEYWQFENTSRGIAKLTRQLRPLALERIVVEATGGYEAALVEALVEAGLPVCRVNPARVRRFAQGMNWLAKTDKIDAKVLARFGEKAQPRLLELPTEAEKRLAALVKRRQQVLEMLTAEQNRLELADQQVLASLTDTIQFLQKQVAELDAQIQDQIDQDPGLKKKQELLQSVPGVGKVLSATLISHMPELGACDRKEIAALGGLAPYSRDSGRYRGRRMIQGGRPFVRRVLYMATVAAIRFNPIIQAMYGRLIEVGKRVKVALVACMRKLLTILNAILRDQTAWKPAFSA

SEQ ID NO: 174965 - protein, 346 aa, unidentified
MEQYVGLDVSLKMTAICIVDRTGKMDREGMVASDPAAIAAFVRLHAPRVARVGLETGATSTWLWTELNKMGLPVICIDARHAKAALKMQINKSDRNDAVGIARIMQCGWYKEVRVKGLDSHAIKAVLVSRALLVKIKRDLENQIRGLLKNLGLVIGRAKMNVFVVRAAELIEDRPELAAAVEPLLKAREAVERQIADLDRKVMRLARNDVQVRRFMTAPGIGPITALCYLATIDDPTRFKRSRSVGAYVGLTSRRYASGEVDWTGRISKCGDPMLRSYLYEAAGVLLTRVAKWSVLKAWGMRVAKRSGLRKAKVAVARKLAVILHRMWVDGTEFNWSSKEVATQPA

SEQ ID NO: 174966 - protein, 389 aa, unidentified
MRSVGLDLGSKKTSYCIIEDGRVIERGTVTCIDELEGKLGPGTPPATVAFEACREAWYVHALVTGWGQNAVMIDTTRVRRIGVGEHGRKNDRIDAEAIAWATERNQIPPAHVLSVERQKLRTELMTRRAIVESRTQMATTVRAIVRTEGLKLPSCDTDNFVSMARGQPLPPVVRAAVQPLLAVLAVVQQQLCTMDERIEKLAAAEPATRLLMTVPGVSLIVAAMFVAVIDQAKRFRSARQVAAYLGLVPREDSSGKRDQRLGAITKQGNSYMRALLVQAAWTVLRRTDESDPLVRWGRALAVRRGKRVAVVAIARRLACVLWALWRRGTAYDPAHVAELSAEGLERNAEVIAGQAESVRREALKSKQRVSALQRRRAAASRLALAQSTS

SEQ ID NO: 174967 - protein, 360 aa, unidentified
MQKPSTIDIDPVIYLAIELSASTWLVASKIPTSEKTGLHRMEAGDSQALLALIADLRKKVAAKLGVEASVMSCFEAGRDGFWLHRLLSEHGVINHVVEPTSILVNRRARRAKTDRLDAQGLLRILAAHAKGDHDVCSVVRVPTIEEEDAKRQHREREHLVQERVRIENRIAALLTTQGIRKRPSLRSWEKDMEEMRTGDGRPIPSLLRAEVNRLRRRLVMTLEMIRELEAEREQALQTQDDMASRMIRALCRIRGIGDNFAAVLTREVFYRPFQNRRQIASYLGLTPTPFQSGGMDRDRRISRAGNARARKTLIQLAWLWLRYQPDSSLACWFRERVGNLQGRTRRIAIVAMARKLLIAI

SEQ ID NO: 174968 - protein, 389 aa, unidentified
MYLIGIDISKYKHDCFIATETGEIIKDTFSFTNNQQGFSEFLDVLQNLDPNQTKRIGLEATGHYGRNLKVFLDKQGYTYMEFNPFLVKKFATGLTLRKTKTDKVDSKLLSMILLSVEYKVYPVKSYHMEDIKSLTRYYKTLTKNRSKEIVNLTNILDYIFPEFKPFFHNKFSKTALFILENYQTPEKISNMNSKSHEKLNSISRGKFSYARFIRLKILAKETIGSSSLVLDSQLQSSMRVYRVLDQEINTTFDQLLELSKNIDSPVFSIRGIGPISALSIISEYNNFISFNSPAKMLSYAGLEPSVIQSGTMEQTGKMVKRGSGYLRETIMNTTPFFYMYNPKVYDYYHKKRNEGKSHRVALTHVAKKLIRIMFHLVKNNEPFDDDKLK

SEQ ID NO: 174969 - protein, 349 aa, unidentified
MATTILAVDLGKFNSVLCWFEPESRSSALRTVKTNHDDLRRELTRHPVAQAVFEACSQAGWVHDLCEELKLPALVASTTGTAWQWKRVKRKTDRDDALKLARLAAVGEIEGVPVPPRAVRQWKSLIGFRKRLVSERVRCQNRIRGLLVCQGLPAPMGAKAWTAAGLAGIGQFTRPLADCGPDDLWRGELDRSLERYRFLDEQTRLVESKLDLIAKSDSRVSLLESVPGVGTRTAEVIAVHLPDAKRFRTAEEVSAYAGLVPRQFQSGETDRRGRITKRGPRLLRAALVECAWCSLRYNRWAKATWLRLQANGLSKKKAVVALARKLLVRCWAILRTGKPWKSPLPAPAA

SEQ ID NO: 174970 - protein, 277 aa, unidentified
MKALLNICSGLDVHKEIIEVCILKGDSSDDVNVVRASFSTLRGDLFKLRDFLVMNDCFHVAMESTGIYWMALYDILQEHSGFTVYVVNAHHMRNIPGRKTDVKDAQWIAELFRFGLLNSSFIPCKAVRELREYTRFYKKVNENRAQLVTRIEKFLQIHGFKLSSLYILGEIGDDMSSFATSSNITSWAGLCPRNNESAGKKKSQKILHGNTYVKSILCQCAWAAVRTRNTRIAKWFWSHQGKIGQKKSIIAVARKLLVYIYMILSSRSPYNAKLDMT

SEQ ID NO: 174971 - protein, 436 aa, unidentified
MTSHCQSYNYKSQEVILLSFKILKNNCCGLDVHKTWIFACIGITDPYNRTEYKQARFSSYTKGLQELCDWLAKYNCNDVCMESTGKYWIPVFNILEKNNIWVTLSHPKYTKPQKGNKTDRKDARWICDLYMCGMVKPSFIPPADIRQLRDLVRYRFKLICMITGEKNRAHNCLTVSNLKLDDVFSDIFGKSSRSITEQILQHPGEYFDVAPFVHGRCKTPIEEIQAAVDGAISNEQAVKLRQCLSHIDELEMHKTEIEREILRLSEKYEDALSLIRTVPGFDKNPMTAIQVLSEIGGDMSVFPTAKNLVSWAGCCPRNDQSNHKIKSTRISRAGSYFKPVLVQVANALIKSKKNPEFAIRYRRIKARRGHKKAIIAICRMILTAIWHILSDLKPYTPEGFLAPPSVNESKVLTTSQALNLLKQRGYVINDAASPVI

SEQ ID NO: 174972 - protein, 341 aa, unidentified
MSLIAPVFSFDLNGYTGSGLALQDKAEKSLMQITIGIDISKETLDAYRFPDNQHIQVANGRAGHKSLVRWIGKQNGSLVVFEATGAYHRNLEAALAANGTAFAKVNPRQARRFAEATGRLAKTDRVDAVMLAKMGAILGLTAHEPKTEALHILRELITARRALMKDKVAAKTRLQTTRQTLLKNQINARLKQIKIQIQQVDAAITEKVAQDEALSNKLDILTSIPGIAETTAFSMLIEMPELGTLDGKQAASLAGLAPMSRQSGKWQGKERIKGGRASLRRAIYMPALVATRYNPGLKAKYDQLIRAGKSGKVALTAIMRKLVVMANALLRDGRTWSELRS

SEQ ID NO: 174973 - protein, 348 aa, unidentified
MIHVGVDLHQRFCYMTALDSRGRQLNAQAVANEVAALRAYFRQFRKPVRAAVESCGFWPAFRAAVGDEVEVKLVHAQRVKAIAAAKLKNDRIDSATLAHLLRCDLLPEAWMADEPTRELRQQVRLRATLVRQRTRLKNQVHAILHQHGLKPGASDLFGKAGREWLNQAVVGEGARGALGTYLHLIDEFTGHVKQQDQQVKHFVGQDQRAQWLMTIPGIGPYSAMLLLAEIGDIRRFADKQALSNYAGLVPWVRESADKRRSGGITRVGSPWLRWIMVEAAQVAVRTSPAVRCYFERLRRRKHRNVAVVAVARKLLVAVWALLQRGECFDENTFAGDCGKDGAVRLGKR

SEQ ID NO: 174974 - protein, 450 aa, unidentified
MNLYIGVDIGKELNYASFLNEKGVEIDKRFKFKNNYLGFLKLKDNIDKLTYDYNLKYDDILVGFESTGHYWINVDWFLTEKLNIKTVMVRNDAVRHTRALNSQGKGKNDSLDSRTIAECLKNGYYFDVQGRKEDYIVLRRLTRERSELEKEIARYKNRFRAWLDVNNPIFLEIFSNVFSSGALALLKVYPSPLDIIKDSYLEVREKLREVGYSRTNKTLKIYYEEVQTYKNIINGISYADRLEISEYIEALEMYIKKKENLDERIEALMNFLEGKVYNSLSEIKGMPKAQVASLIAEIGNINNFKSAIHLLSYAGLNLQGEGSGKNKGHSWISKTGNRKIRKELYVITFNLVRHNDYFRGLYCYYKSYKRPNEKSSKEMLIALMCKLLRVVYGMLKYNVEFNLNEMLKNYDFRNINKEKFIDEFLGNSEKKQKIIPQEIEEIFLNNRKSN

SEQ ID NO: 174975 - protein, 321 aa, unidentified
MNASEQIVVGIDVAKDTLEVATSAAERWACSNDPKGQRALRERLRHSGVSLIVVEATGGYETALVSTLAQANLPVVLVNPRQVRQFARALGKLAKTDRIDAEVLVRFGQQAAPEVRPLPDEQTQLLDALLTRRQQLLEMIQAERNRLEHALGPIRTDIRETIAFLVKRLKQTDRDLDDQLRHSPVWREKEQLLKAIPGVGRQMLLTVLATLPELGRIPRKQLAALVGVAPYNCDSGTLRGRRHCWGGRAQTRQVLYMATLSATRCNPQIRPYYQRLLAMGKPKKVALVACMHKLLLIMNAMVRDNTAWNPPHAEGQLTEIS

SEQ ID NO: 174976 - protein, 357 aa, unidentified
MISIGSDYHPRFQKIAMLDKETGELTERRLEHENGEAKKFYASLPKGTLVGIEATGCTQWFERLMAECGHELWVGDPAEIRARRVRRQKTDTRDAEHLLELLLTNRFPRVWVPSVEERDARQLLQHRHKLVRMRTAVKNQLHALAMSQGLCRKHRLWSALGRQQLEGLELGPWASRRRQELLKLLDELDPQIAELDRAVEAEALRRPAVRQLMELKGVASVVGLAYVLTLGPVSRFLRSRQVVSYLGLNPREDSSGGHQHLGHISKQGNTMMRWLLVEAGQSAARCDPELSRVYKRLKFRRGANVAKVAIARRLAVRMYWKLRQAQETAPPVRMPGSPTHSRVDHRPDSVGTTPSTL

SEQ ID NO: 174977 - protein, 414 aa, unidentified
MEVIHPRCAGVDVSKKDAKVCVRVQGRGGRPTTSTVTTWTAVTGRILDLKEHLLNEHVSLVVMEATSDYWRPFYYLLEDDGLDVILVNARDARNVPGRKTDVSDAAWLADLGAHGLVRASFVPPAPVRELRDLTRARTVITRERTREVQRLEKLLEDACIKLSSVASEITGVSGRLMLQALINGERDPAVLAELAHGRMRSKIPELTDALTGRFSDHHRYMAELYLHRIDAHTRDIDDLSTRIEAAMEPFRFARELLRSIPGFSIMIAEVFIAETGADMTVFLTPQQLASWAGTSPGANESAGRVKATKTRPGNRYLKGALGIAALSAARSNGTYFSAKYRRIASRRGPVKAVVAVERAMLTAAWHMLTTGELYRDPGADYFIRHTPAKTKSRAIGQLESLGYKVTIEPLTQTG

SEQ ID NO: 174978 - protein, 347 aa, unidentified
MNGDYAGRQVVGMDLHRHRSVLVRMSEDGRKLGTARITNNPAALRAELARAGENPRVVLEATYGWYWAADTLAAAGAEVHLAHPLGVKAYGYQRVKTDARDAANLADLLRMGRLPEAWITPPEIRDLRELTRYRQKLVGLRSSCKDQVHAVLAKLGIAVTCSDLFGAWGSAWMDGLRLPQPYAGKVTSLRQLTGELNTEITMLSEVIGDLLAGHAGYRVIQRLPGIGPVLAAVIIAEIGDVTRFPTAAQLSSWAGLTPKHRESDTSVTRGHVTKQGSRLLRWALIEAIQRARAGSWPGDARDAIIARRGKQARNIAKVAAARRLLTLVYYGLRDGQIRCLPEPAAAA

SEQ ID NO: 174979 - protein, 342 aa, unidentified
MTDRNLSAIDLAKSVFQVCVFSPTGRVVTNRRHRRAELKTFMAQQRPSLVVMEACYSSHYWGRLLNGYGHEVRLIPAQHVKAFVRGNKNDANDAIAIGEASLRPNLRAVPVKTIEQQDLQAVHRIRARLMKNRIALSNQVRGLLSEYGIVFARGHKALVENLRGLIEERREDLSVRMQSELVELLAEYDQLCTRLRRIDRQIDQHAHGNALCVRLMTIPGIGVLVASALVAAIGNAAQFSSPRELAVWLGLTPRQYASGDRNHMGAITKRGDRYLRRLLIHGARAALHRRRRDDRLSRWAKAVAERRGNAKATVALAHKIARLAWVLLQREQSYRSLSCAAH

SEQ ID NO: 174980 - protein, 314 aa, unidentified
METSAQPVFVGIDVSKNKLDVALWPSGEGFAVERNANGLNSLCAKLAALNPVTIALEATGGFETVVAAALAAASLPVAVVNPAQVRAFAQALGKRAKTDPLDAAVIARFAEAARPAIRPLADAETQLLADLIARRRQIVDMIVAEKQRLGRAPAKRLKKSIERLLKALEKELSNLNGDIDAAVRASPLWRANEELLTSVPGVGPTTARTLIAELPELGTLTRKEIAALAGLCPFTRQSGQWRGKSFIQGGRASVRAALFMAAMVAARFNPILKTFYDRLAAAGKPKKAALIAVARKLLTILNAILRDQKPWQIA

SEQ ID NO: 174981 - protein, 404 aa, unidentified
MIFVGVDWAEAHHDVCVMAEDGRVLEQARVGHSVAGLGELHALAGAHAGDGEPVAVGIETDRGLVVTALLAAGYQVFAVNPLAASRYRDRHSVSGAKSDRGDAKVLADLVRTDRHNHRQVAGDSDLADAVKVLARAHQAAIWSRQRQVNALRSALREYYPAALAAFGTDLADRDAVAVLAIAPSPEAGRALSRAKIAAALRRAGRQRNTEHRAQEIQAALRADYLQARPAVVAAYAAAARSAIRLITACTAEISELEAELSAHFEQHPDAKIVRSLPGLGTILGARVLGEFGDDRTRFASPKSRKNYAGTSPITRASGLSRIVLARHARNRRLADALEQWAFCSLTQSPGARRYYDQLRQRRKTHHQALRQLANRWVGILHACLEHHSHYDETAAWQHLQADAA

SEQ ID NO: 174982 - protein, 402 aa, unidentified
MTYDYVIGMDVGKYFHHACVLDIDGTQVLSKRINQNEKSLRALFSTFSAHDHKVLVVVDQPNNIGRLTVAVAQDLGIDVRYLPGLAMRQLSRIHAGNAKTDIRDAYIIAHAAKNLPESLRSVDRAEEAFLQLKVLNGIDEDLARSYTRLINQIRSALVGCYPQFEQALRGQIIHRKWVLHLLARYGGPTKIKRLGKAKAAAFARRYKARNPEPVLDAIFAAISEQTVAIAGAHYAEMGVAMSAKDALLKLEHRKQIEQEVIELINDIPHTQILLSMPGIGPKTAAQILMTAGDMSDFPSVGHLASYAGLSPRTNQSGTSIMSNSLNRAGNKKLKNALWQSSFASIRFHERSRQFYERKRREGKRHNAAVVALARRRLNVLYAMMRNHEHYHDPAPSQEDLAA

SEQ ID NO: 174983 - protein, 335 aa, unidentified
MKHYAGLDLSMESTQVCIVDDNGRKVVSEKVGSSPEAIAMMLERYGPIERAVIETGRMSPAICLGLRELGVPVACIDARQAHQSLEAMKANKTDPHDAAGLAQLARTGFYKEVHVKSPAAHGVRSVITARSHLVEARVRLDNTIRGLCATFGYRPGAGQGKAFLERIMQAAHIPGLGDAIASLLSVRAELVEQIKEMDRRLRLIASQSQACEILMTIPGVGVQTSAAFAAAADEAGRFRQSRNAGAYFGLVPRRHQSGELDWTGRITKQGDGSVRKLLYEAANSILTRSRETFALKTWAMKIAKRRGLKMARVALARRLAVIMHAMLRDGTLFQA

SEQ ID NO: 174984 - protein, 343 aa, unidentified
MKLHVIGIDLGKTVFHLVGLDSTGRVVIRKRCSRTQVLAFTANLQVQLIGMEACSGAHFLGRALREQGHEVRLMPAQYVKPYVQTNKSDYLDAEAIAEAVQRPRMRFVPIKTEEQLDLQALHRVRERWVMRRTAVVNQIRSLLLERGLTLPKGRSHLDEQLPRILEDAELNLSDSFRVLLGQLKLELEQLAARIEEMDRVIQKTAKENEDCQRLTEIPGVGPVTATALIAAVGNASAFGKGRKLSAWMGIVPGEYSTGGKQKLLGISKRGNKYLRRLFVQGARSVLQQRHKQAPGLSEWLAQLLARTHQNVVVVALANKLVRMAWAVLCKNERYRAPVSAITT

SEQ ID NO: 174985 - protein, 409 aa, unidentified
MRVVYRCCCGLDVHKRTVTACVITPEGRETRTFKTMTAELLELADWLVAKDVTHVAMESTGVYWRPVYNLLEGLDMILLVVNARHIKAVPGRKTDVKDAEWIADLLRHGLLRGSYIPDRPQRELKEVVRYRRILIRERGRIICRIQKVLEGANIKLSSVASDIVGMSGRMILQAMINGIEDPKELAAMAKGKLRKKTQSLEDALLGLMGTHQRRLLEYELEHLDFLDLKIARLDTDISENMRPYDSIIELIDTVHGVGRRGAEELLAEVGPDMVSRFPDAHHLASWAKICPGNNESAGKRKSGKTGHGNPWLRSVLVEMAWAAIRVKGGYYSSLYHRLAGRRGKKRAIVAVAHSILLTIYSMLKNNTVYQDLGERFHDLLNPEQVLRRAIKRIERLGYKVSVETPALVT

SEQ ID NO: 174986 - protein, 404 aa, unidentified
MPELWAGTDAGKAEHHCTAIDTDGKTVLSRRVPNNEAELLELLSDVLELADGNPVTWAVDLNAGGAALWIALLVNHSQKLLYIPGRTVHHASAAYRGNGKTDAKDAFVIADTARMRRDLQPLDQAGEIAVDLKILTARRMDLSADRTRAINRLRAQMLEYFPALERAFDYSVSKSALVLLTGYRTPAALRRIGRARLAAWLKSHGVRTAPTAKSTAEAAVTAAEAQFTAVPGEKTAARMVHTLAREVMSLDQEIAELEALLEGRFREHPHAEVITSMPGIGDMLGAEFIAATGGDMAAFGSPDRLAGVAGLAPVPRDSGKVSGNLRRPRRYSRRLLRMFYLSAQVAAVHCPVSKAFYRRKRDEGKSHKQAVLALARRRLNVLWALIRDSRTFDAVAPKNAAPAQ

SEQ ID NO: 174987 - protein, 321 aa, unidentified
MNKYKEIYGIDISKDVFDVYGSKSGHNQFKNEAKGFVSFMKHLPKDVLVVMEATGYYHYRLAQFLYKSGVSVSVVNPLSVKRFIQMKLAKVKTDKSDAKAISEYGEMNAVPLYTALTDVQSECLQLFRLLDSYIKHRTATKNKLKGEEVLGIPSKFVYRSLKRNLKHLNKEVESLELRLLDLIKQDQQHQLTLLKSIPGMGVKTALFLIVVTEGFEKFETASQLCSYVGITPTIRQSGSSVRGRSRISKVGNKKLRNLLFLCSFSACKHNKACREIYERLVAKGKSKKLALIAVANKLLKQAFAITKSGRPYDENFVSRLA

SEQ ID NO: 174988 - protein, 349 aa, unidentified
MTSTMTRPDSGITVGVDTHKDLHVAAALDDRGAVLGTETFCATAAGYEELRSWALEFGELVSVGVEGTGSWGAGLARHLSAAGVAVIEVNRTNRQHRRRHGRSDTADAVGAARAVLSGEAAATPKTGTGPVEAVRVLRVTTRSAIKARTQAANQMRSLIDVADPQLRDQLGRLNAARLAQRCARLRPGTDPTDPTAATKTALRSLGRRYQALSVEIDELRGLLERAVKAAAPPALLAEHGVGTDTAAALMIAAGDNPHRMHSDAAFAALCGVAPVDASSGRQQRHRLNRGGNRDANNALWRIVLVKMATDTETRDFIAERLARGKTKREAIRTLKRHLARRYWKLLVTA

SEQ ID NO: 174989 - protein, 350 aa, unidentified
MTLRNKPRDAEVYGVDIGKTVFHVVGLDAAGKPIQKASFRRDTLLKFFEAAKPALVDMEACAGSQWLARKILALGHKVRIVPAQFVKPYVKSNKSDIIDAAAIAEAVTRPTMRFVEVKSVAQADLQALHRIRDQMMTARTRLINQMRAFCLECGVAMHQGAGKFKADFPRIIADEGNDISAAMRRLLLDLFEDLKRLELRIGQVTKEIEAIAAVDDRARRLMTVPGIGALAATAIVATAGDGQQFKKARDMAAWLGLVPRQFSTGGKTTLLGISKRGNQYVRGLLVHGSRSCLLHLDRSRDRLGAWLDALQRRMHNNKVVVALAAKIARIVWVILTRPGALYERHQPIPA

SEQ ID NO: 174990 - protein, 342 aa, unidentified
MAEYVGLDVSKEETSFCVMDISGTVLSSGKALSDPDALFRMLRQHTLCPERIVLETGTLSNWLARGLRDHHMPVDVIDARQAHAVMKLQHNKTDANDAHLLATIARTGFCLPVAVSSETAQKHRILVKARRHLVNQRRDTQSAIRGFLASLGLRFAKGSGTFVARVREALMARPDLSPMIEPLLTSAEAQAEQIKRLEGEVKAQAWELASCHLLMTIPGVAHNTALAYVATIGEAARFASSRAVGAYLGLTSRRHQSGEMDYSGRISKHGDGLLRSLLYEAANSLLTVVKKSHPIKDWARRIKKRSSHKKACVALARKLAVIMHRMLISGETFRWPEKATAA

SEQ ID NO: 174991 - protein, 430 aa, unidentified
MKSNTQNAKIEAITEKTLVLGIDVGSETHYARAFDYRGIEYSKKPFKFSNTEAGFVTFKEWILDIKERHEKDKVVLGMEPTGHYWFNLGKFLQDNEMKPVLVNPHHVKKSKELDDNNPTKNDRKDPKVIAGLVREGRYMIPYLPDGVYADLRTASNIRFQLQAELTRIQNRISRWFNIYFPEYKTVYGKPDAKSGILILKEAPLPEDILTLGIDGVNQIWRDAKLRAVGKARAKTLIEAAEHSVGSKEGAVSARMEIRMLLEDYESRSIRLQEVMTLIEGLVKQIPMAEKLLEIKGVGIRTVSGFLAEVGDISRFNNPKELQKLAGLALVENSSGKHKGETTISRRGRKRLRYLLFEVAMSLVAKNPEFRELHNYYTTRRLNPLKKMQSLMAIAAKLIRVFYVMLTKGVNYDPKKMVNDIKRPAVYLQTA

SEQ ID NO: 174992 - protein, 348 aa, unidentified
MPNYNKPHQFYAGVDLHARSLFVHVLSAKGKTVFERDLPAEPDAFLDAVKPFRKNLVVGCECMFAWYWLADLCEDKRIPFVLGHALAMKHIHGGKAKSDKIDAGKLANMLRGGMFPLAYVYPRAKRQTRDLLRRRSFFVRQRAQLITHIVNTNSQFNLPPFAKKLSYAANRSAEIAERFTDPSTRLMIGADLRLIDAYDAQIAAVELHLLRSAKVDDPVTFGFLRTIPGIGPILGLILLYEIDRIERFPEAGNFLSYSRLVRCAHESAGKVKGFGGKKIGNAHLKWAFSEAACLMLRSCAPVKAWMQRQEKKRCKRKALSVLEAKIGRTVYHLWRKQQAFDVKKFLHS

SEQ ID NO: 174993 - protein, 407 aa, unidentified
MEVVIERACGMDVHKDNITACIMTPEGKEIQTFSTKTVFLIQLVDWIKKNNCTHVAMESTSVYWKPIVNLLEAEEIEFLVVNAQHMKAVPGRKTDVKDAEWIAKLLRHGLLKASYIPDRNQRELRELVRYRRSIIEERARQHNRIQKVLEGANIKLGSVVSDVMGVSARDMLNAIAEGEEDPEKLANFARRTMKKKKDELELALKGYINSHQRLMLKTILKHIDFLTEQIEMLDQEVEERVSPYQEDVERLDSIPGIATRMAEQILPEIGTDIKKQFPSAAHMCSWAGLVPGHNESAGKRKSAKTKKGNKYLRSALTEAAHSVRGSKNYLGALYRRTASRKGKKRAGIVVAHAMLRISYYLLTRKEMYVDLGEDYFDKQRQQSIFRHSLRRLESLGYTVTLQEPEAS

SEQ ID NO: 174994 - protein, 343 aa, unidentified
MKNYIGVDLGKQSSYFVIKDHQGVLLRRMKVFNDSRVIAQALKPFTSVPCKAVMEATCNYYWMYQQLTCLGCEVILAHPLKTRAIADAKVKNDRLDASILADLLRANLIPRSYIPTEEIRALRELTRQHIRLVQIRTRIKNQCHALLTKLNIHCTEHLSDLFGVKGRRWLQRVSMPDVFEFQKDPLLEQIQSYNALIEKTDRKIETLLCRFPQTGLLKKIPGIGTFGAAMLLAEIGEIDRFSSPKQLVAYAGIAPGLYESGQTTHSRGITHEGNKYLRWILCEMAHRHIRKPGVLRQFYVRLKDKKGHGQALVATARKFLIQVYYLLKGQPSFRSDFAGYARA

SEQ ID NO: 174995 - protein, 339 aa, unidentified
MQQDVVTVGVDLAKNVFQVHAVGADGKVLVRRQLRRGEVLKFFSSLPPCLVGMEACASAHHWGRELLALGHDVRLMPPAYVKPYVKRGKTDAADAEAICEAVTRPTMRFVAVKSVDQQAVLMLHKTRDLLVRQRTALINALRAHLSEYGIVSSKGPGGVTALMKLLHEGQENLPTHARSALHTIGAQLRSLASEIDRLETQILAWHRADDTSRRLATIPGIGPITASAIAAAVPDASLFRSGRQFAAWLGLTPRAHSSGGKERLGGISKQGDGYLRKLLVVGATAVMRMARKDAARQPWVAQLIERKPVKIATVGLANKTARIAWAVMARKEVYAAAAA

SEQ ID NO: 174996 - protein, 341 aa, unidentified
MKPEMSVLGIDIAKRLFHAIGMDERGTIVFRKRLSRHDLIPFIAKLPPVRIGIEACGGAHYWARRFREYGHEVKLMAPQFVKPYVKSNKNDSRDAEAIAEAVTRPTMRFVPIKDVAQQDIQALHRVRERLMGERTALVNEVHGLLHEYGIVIPKGVAKFRQAVVSKLESAKDKLSALSQEMFWQLVEEFAALEKQLAYYQEKLEALATTHPECQRLMTIPGIGPLTATALVAAVSAASAFKNGRQFAAWLGLVPRQHSTGGKERLLGISKRGDSYLRKLLVHGARATIRWVGRKTDRRSQWMRQLIERRGKNRTAVAVANKNARIVWALLTSHQAYDLAKG

SEQ ID NO: 174997 - protein, 372 aa, unidentified
MHQSSTLYVGMDVHKESIAVAYVAKDHDAEVISLGTVGTRQCDIDTLMRKLQSKAKHLVLVYEAGPCGSGLSRSLTKKDSVCWVVAPSLIPNKAGDRVKTDRRDAMPRARLMRSGDLTPVYVPAGDDEAIRDLSRAREDTLRDLKAAKLRLTAFLLRHAIRYTGRANWSPAPLRWLSEVVCPTPAQQIVLQEYVQTVTEQTARLGRLELERHEQVQTWRLQPVVEAFQALRGVPFTVAVTTGAALGDLTRFENPRQLMKYLGLTPSEYSSGARRQQGSMTKTGHTHARRALVEGAWAYRYPAKVSRHLQLRLETLPKAIQAMSWKAQVRLCKRYRQLMAKGKNANQVVVAIAREFSAFMWAIAKEVAGSPKA

SEQ ID NO: 174998 - protein, 311 aa, unidentified
MKALKSHVAGIDVHKEMLAITVLIGELDGEPKEYQFESSTFTDDLMALGLKLKEMGVTDVAMESSGIYWKPVFNVFNPLGLKVVVANAAHIKNVPGRKTDMNDSRWIAELHRFGLIRASFIPDGEFQRMRLLSHHRTNLTEDLARVKNRIQKVLEDGNIKLSIVVSDIFGVSGLKVLKQIAGGYTHPNILITEVTTKIKRMKEMKKALTNCLTTEHCFVINVLMKQYEELKNRIEEDENELCKKVEPYAHLVEELDKIPGIDAILAMGIIAEASANMSSFKDERAFAAWSGVASGNNESAGKKKTSKMSKR

SEQ ID NO: 174999 - protein, 338 aa, unidentified
MSLYCGIDLHSTNCYLAVLDEQLRPVLGRRVANSLETILAALAPHQEQITAVAVESTFNWYWLVDGLMEAGYQVELVNTSAVRQYEGLKYVDDRHDARWLARLLQLGILPTGYIYPKEQRSLRDLLRRRTFLVNQRTANLLSIKNLYSRLTGTQVPTKDLKRLTIDQVAEQFPDPLLAQAITCGVTVADALKTEIAKLEKTVLAQARQRPEYALLESIPGIGQTLAMTILYETGSLSRFPDAAHFCSYCRCVPSKHLSNGKVKGKGNTRNGNRYLSWAFIEAAHFAIRFEPLAKKYYERKKARTNPVLALRAVAHKMARACFYVMRDQVPFQAAQAFG

SEQ ID NO: 175000 - protein, 405 aa, unidentified
MDIQPIFRCAVGIDIHLALLCVCIIIAEPGVEPVVHRREFGGFQRDRRAMADWIASFKPDIVVMESTGIYWKSPYAALEKVGIHAQVVNARQVKKVPGRKTDTSDAEWLAMLARAGLLRGSFIPPERLHTLRQVSRHHQKITAMRAMEKNRLVKVLSDAGVRITAVVSDPHGVAATAMINCLLDGGTPEQALSLAGRLQAPREELLAALQGELSADHRFVANTIRHHLQALEAQRADLERYLVEALQPHEAALQLLMTMPGIDRLAAAKLLVEIGVDMTAFGNAGRLCKWAGVCPGNDESAGKRRRGDTAPGNRYVRTLLCQIAWAAVRTTSQFKSRFQNLVSRRGTKKAIVAIGHKVLKTVFVLLSRQVPYHDSTVDYEALAVKRNAPRWIKQLRKFGYLPKMA

SEQ ID NO: 175001 - protein, 339 aa, unidentified
MSNLLKNFVGIDISKTYFDAALIKAENATQIIHQQFAQKAEGFLKMMNWLKQQGITPGEDTLFCMEYTGLYNHGLVNYLVKAKAKLWVEMPLRIKKAGGFERGSDDKTAAIKIAFYALRYQDQMRLWQPLDSSLEKIKNLIAQRDRIVNAITQLNVPVEELKTCGCMEEAKMMEKIQKPSINALEKTKSAIEAMILKTVQSEEELKTKVQIVQSIKGIGPVTAVALLVYTKGFTAFSNAKELACYCGVVPFKKESGTSVRFKPSLSPYANKKLKTLLHLCALSAIKNDQELKGYFERKVIEGKNKMSIINAVRNKLVHRVFAVVRDNRFFEENYVRKCA

SEQ ID NO: 175002 - protein, 445 aa, unidentified
MMDLSKGFNPIHQGGALTMKFKQSDGQNQRIERISTSHLVVGIDIAKETHVAQATNFRGIVLSKRHLTFSNTIEGFEKLERWIDGIRQKHRLKGLIIGMEPTGHYGYNLANWLADKGNSVVMVNPATTKRNKENRDNSPSKSDPKDALVIADVISRGYYYEYSRQAIVFQRLRTIMSDREYWVTNSVRFQNRIIRWIDIRFPEYFSVFKDWTCKRSLATLKEFPSPQDLESLSVPEVITGWRKHMKRAGGSTGMQKAAELIAHAKSSIGETTALNEAKQDLQWLLEEFERVVEILERIEKDIQVLLSEIPMADHLRSIGLGTICIAAILSGAGDLRQYAHGRQLLRRAGLNLAESTSGKRKGQIVLSKRGDATLRKYLYLATLQLCGNHPVFRQLHENNVQVKQMKKQQSVFKLLGKLARIIIGIVQRGETFSPEKVAPICIQAA

SEQ ID NO: 175003 - protein, 338 aa, unidentified
MNKFNHFVGIDISKKTFDAALIIGGNTANIKHQVFKQNAMGFAEFSEWLDYYKIAKDELLICMEHTGLYTYGLIDFLVAAGFNLWVEMPLRIKRSMGLQRGGDDKAAAIQIALYTYRYKDQVSLWKPEQEIVLELRQLSAQRDRLKLALKQLMIPLQEIADCCLDAAIVKVQLKLQAPVIKAIEKSIALIEIQIDNLIAADPAIQATIARVSSIKGVGKQTAIHVFIYTKGFTTFSSGKQLASYCGVVPFTKTSGTSVRFKTQVSPFANKHLKKLLHLCAMAAIQHNEELKQYYNRKVGEGKNKMSVVNAVRNKLVQRIYAVVRDGRNYVENYQYQRA

SEQ ID NO: 175004 - protein, 373 aa, unidentified
MNPITTSPQSVYFIGLDLHSTNVFVCIKTAQFGINGMQSQTLVSKKFNVETRAAIEKLLSFLQPYCDNTQHYAVVESTYNWYWLADEFEARGWNLRLADPCTVSQANLKYSDDKTDAEYLAECLYRGSLKTATILSRDMRDIRDLCRFRMTLVQERAMKKITIINLYTNQLSSKAYLSDLLKYAYFLLENDKPLTELLDTERDSRLVDGAQLRVRMLVEQIIRLDKDIQELEAIIFPKLKQNMYGKLMLSIKGCGPILASLIAFEIGDISRFRTAKDFKSYCRLAPTAKLSNGKSKGLGNAKNGNAYLSWAMTELANLIVRFNPVASQYYERKLKKTRLRVKAIRTLAAKIAGAIFMMLKHGEVFDVNRCFSS

SEQ ID NO: 175005 - protein, 358 aa, unidentified
MNFYTQQHKHYCGIDLHAKAMYVCILDQAGTILVHKNLPTTPQAFLRIIAPYREDVVIAVECLFTWYWLADLCSKEGMAFVLGHALYMKAIHGGKAKNAKIDAHKIAVLLRGGRLPQAYVYPTEMRATRDLLRRRCPLARKRAELFAHSHNTNSQYNLPEIGKRLANKANREDVAEHFPDPSVRKTIEVDVSLIDHYDQLLGEVELSLTRSAKAPDVQTFARLQSVPGIGQILALVIFYEIQDIARFPRVQDFVSYCRLVKCAKESGGNRLGTSGKKIGNVHLRWAFAEAAVLFIRQSQPGKALFAKLEHKHGKAKALTVLAHKLGRAVYDLRTREHAFDLNRFVTASPLRGEPEPIV

SEQ ID NO: 175006 - protein, 376 aa, unidentified
MNPLFVGIDVSSKNNVAYLMKPDGTKHSSFSMQNNLGGAKLLSERIVSALSSLQLCDVVIGLEATSIYGNSLVYALREDGSLGRFQRKIHVLNPKQVKKFKEVYQDLPKNDWVDAFVIADHLRFGRITKEVYMDDYRYQALRTLTRARFDVIQNLTREKQRFANYLFLKCSVMAQDKDIKNTSATTIALMEHFETVDDLANADLDQLTAFITEIGRGRFTDPDATAKAVQAAARGSYRLPKTVNDTVNQAMSVSIAAMRALKEQVKVLDKAIEQQFEIVPNTLTSIPGIGKAYSAGIIAEIGNIQRFDSQASVAKFAGLVWHKNQSGNFEAEHSQMIKSGNRYLRYYLMEAANSVRRCDSEFRRYYDLKFKEVNKY

SEQ ID NO: 175007 - protein, 409 aa, unidentified
MDQQVERVAGLDVHRDTVVACVRLGGGRRPEVHKESFATTVAGVDGLARWLADFGVSRVVMESTGVYWKPVYYGLEGLFGELWLVNARHVHNVPGRKTDMADAEWLADVAAHGMVRPSLVQPPPIRELRELTRYRKTQVNLRAQEVQRLDKVLQDAGIKISSVASKVLGVSTRAMIEALIAGERDPAVLAQMARARMRSKIPALSEALVGRFAAHHGVVARAILDHIDFLDANITALDHQIAPRLDPFRPAVSLLMTIPGWGETVAQVFVAEAGVDMNRFPTAHHLAAWSGLAPANHESAGKHRPAGTRQGGTWLRRTLIEAALAASHTNTYLGAQHRRIASRRGPNKATVAVAHTMIIAAWHMLATGQTYQDLGADWFTRRHDPERETRQLVDRLQALGHTVTLTPAA

SEQ ID NO: 175008 - protein, 353 aa, unidentified
MKAKTESDTALPSVVGIDIGKEVFHLVGLGADGKITFRRKIRRLALKDAFEKLPPCIVGMEACLSAHFVSRTLRTLGHEPRIIPAIYVKPFVKGQKNDYNDAEAIAEAALRPNLRFVQEKSQDQLDLQACHRVRSRLVSRRTATINQIRAFLIEQGIAVRSGLRALRNSLFTILENRKDEISPRMAKLILDLYKDWCHLDERIEAVTGEIEELSRVEPKCQRLMSVPGIGPVISTGLVAAIGTGEAFERGRDFGAWLGLVPRQYSTGGRSVLGRISKRGSKYLRTLLIQAAKVLLMRPHNWPRYSFGAWLKTASQRLHRNKLAVALANKLARIAWSVLRHDKAFDTHLETAAI

SEQ ID NO: 175009 - protein, 412 aa, unidentified
MELLHRRCCGLDVHKETVVACLRLVSDGKVTTEVRTFQTTTADLLRLSEWLAANECTHVAMEATGVYWKPVWRILDDGEFALVLANAAHVKNVPGRKTDINDAMWLAELLAHGLIRASFVPDAQTQEMRNLLRTRKQLVREQSSHVLRVQKTLEDANIKLDSVLTDLMGKSGRAIIEALIAGETNPVKLAGLADRRVKASFEEFREALRGRVTRHHRFLLRLHLNQIDALDAAMATLDAQVEANLGPFRTAVELIGSIPGIKNLGAHVIVSEIGIDMSRFPSAAHLISWACICPRNDESAGKRRSNRVRKGGTWLKTTLVQCAWAAVKKKDSYLQAQFYRIKARRGPKKAIMAVVASILTAIYHMLKDGTMYKDLGRNHFDRRSSDQQKNRLVKRLAELGYAVEIKPLAATA

SEQ ID NO: 175010 - protein, 373 aa, unidentified
MPKYSTAFGMDVHLRSTTVCALDADTGEAVTRRFPGNPWGEIAGWMDGFPGPSLAAYESGYLGFAPQRELAGLGVECVVAAVSKIPRSAADSASKNDRNDAARMAKAILAHDISPAWVPSPEVEGIRDLAGAYDGATARLATAKQRLLAFLAKRGFVYGGTTPAGNPRKYWTYDFLRWLDKVRPEDDGGVRALAALRNEVEAAAEARADLLSEYRAAVDASPIAAEVAALQSIKGCAFALAAAFSAEVGDFTRFRSGRQVTAYFGLAPSQRSSGDSVRLGGISGAGNALVRKLAVEGSWCYAAARHQPKLMPRDTGVPLEIRMHGRKGSERLLRRREEMLARGVPAAKANAATAAELVRWLWALGTMCREGAE

SEQ ID NO: 175011 - protein, 361 aa, unidentified
MKKHTQDLIAEVPRGCSKVGMTIGIDLGDIWSHYCTLNEEGEVVDRGRFRTNPSSVDKWFTDLPRVRIAMEAGTHSIWISEQLQELGHEVIVANVRELRAISHSDRKSDQVDAEKLARFARLDPKILRPIAHRTVAQQEALTLIRARNLIVRLRTAAVNAVRGLAKPCGYRLPASSTLCFAKRCLAVLPPALARALGPVLHQIADMTVKIKQYDRAIKQLTETEYPETQALLKVYGVGQLTALTYVLTLGSKERFQRSRDVGCYLGLRPKRSQSGERDPQLGITKAGNVYLRSLLVECANHVLGRHGKDSTLRQWGLSLASRGGKQSRNRAIVAVARKLAVLLHRIWITQEQYIPFYAEAA

SEQ ID NO: 175012 - protein, 348 aa, unidentified
MIIGVDYHPSFQQIAFMDQQTGECGERELNHSDGEAERFYRELKQRGVGVRVGMEATGHARWFERLLAELGFELWIGDPAEIKAKRVRKKKTDREDARLMLKLLLENRFPRIWVPSPENRDLRQLLWHRHRLVQMRTRIMNQLQAVAMNEGYRWKKKLFSEKGRGLLEKLPLAPWASRRRKELLELLDQLDPKIAELTAAVEQEAKKRPEVLLLMSHPGVGPITGLVYVLVIGTPDRFPCGKQLGSYTGLIPCEDSSGGRQRLGHISKQGNKLLRYLLGEASQAAARCNPDWRRRYVHLMMRREKRIAKVAMARKLAVRLYWMWRNNWQYSQLVEYGRTRESSGPSMA

SEQ ID NO: 175013 - protein, 388 aa, unidentified
MEARLVDTTSTARNDAPARCLIAIELSKASWVVGVQTPLSNKTSQYRLTAGDWKSLLKLIERIRRQVGGELGRPVEMISCYEAGYDGFWLHRLLEAHGVRNHVLDPASLLVNRRARRAKTDRIDVERMLRALGRYLRGEPDACSVVRVPSVEQEDARRLHRERHRLIRERVQHVNRIKGLCATQGIYDYEPLRSDRKAQLEGLRTGDGRALPARLKAEIIRELHRLELVLKMVAEIEAERDAIVTEAAPQHLNAGKIKALANLKSIGPEFATTLVGEVFYRSFDNRRQVGSYPGLAPSPFSSGSTDRDQGISKAGNPKARSTMIELAWMWLRYQPDSTLSIWFRQRVGDRKGRVRRIAIVALARKLLVALWRYLETGLVPAGAVFKTR

SEQ ID NO: 175014 - protein, 386 aa, unidentified
MQKLNDLSRSLTALEPDGTLITVIEMSLSSWLVAGIVPGVERQPLKKLAVDESALLKLLHRWREEAEKAGRGIERLAVAFEAGRDGFWLARWLKARGIEAYVIHASSVAVSREHRRAKTDRLDTELLKRSFLGWLRGERDHCKMVEIPTMKDEDAKRPNREHDSLIGERSRIVNRMKAALVRLGIRGFNPKLKRATTRLDGLHTPEGEPIPPNALAELRRDMERRRLVNNQIRQIEEERLERIEQAPCDGAHVMVRLLARVMGVGIETADMLVHEVLSRNMRDRRAVARYAGLTGSPDESGRKRREKGLARSGNARVRRGMIQLAWRFLLHQKNSALTKWFRSRTENARGTRKPMIVALARKLLIALWRLVREGIVPDGVVLRAAQ

SEQ ID NO: 175015 - protein, 374 aa, unidentified
MKEKVRFLGLDVHAETIAVAVAEQDGEVRSLGTIANREESIRKLVKKLGPVEQLRACYEAGPTGYVLYWQLTQLGVECVVAPTLVPVKVGDRVKTDRRDAAKLARSHRSDDLTAVWVPDEGSEALRDLVRAREAAKQDQLRARHRLSKFLLRTGRRPAMGLKAWTERYLAWVQQIQFSQPAQEFTLLDYLHEVQHMDERVQRLEQAITEAVKLASPQVQEVIRGLQALRGVAHLSAVTIAAELGNISRFESARKLMGYSGAVPSEDSSGKRQRRGNITKTGNAHLRRIAVESAWSYRFRPAIGPRLRQRQEGVPEEIKEIAWKAQIRLHKRYLKLMAAGKDKQKIITAVGRELLGFVWAIGIKAETAGKLQMAA

SEQ ID NO: 175016 - protein, 368 aa, unidentified
MSVYVGIDVHRKRSQVAVVAEDGKVQLNRNVVNGSEPMLRLIGGLPAGTPVAFEAAYGWGWLIELLEDYGFDPHMVHPLRCKAIASARLKNDKVDAAILAQLLRADLLPEAWIAPLEVRQLRALLRHRASLVRLGTQLRNRIHAVAADHGYDRTASYWTGPGRGWLAELDLPPVSREIITDCVAFIDALAPQIDRLDSEVRARAKADPRVKVLTALPGAGQFTALVMLAEIGDITRFASARKLASWAGLTPTVRGSDLSVRHGHISKQGSAWLRWVLNQAAQTAKRSPEFSATYAAISKRRGKKIATIAISRKLLTRAYHLLAAAQAAQAPGAAGTTTTPPQAGRVTKPRASSLQRHEPATGRARSSD

SEQ ID NO: 175017 - protein, 325 aa, unidentified
MEIPVLGIDIAKSSFDVFLIHGEKQQHRSFPNRAEGFEQLSNWLRECGVQQVHACMEATGRYGDELAEYLFEQGHRVSVVNPARIRDYARSKLTRNKTDKLDAKIIAFFCLNEKPALWQPPAPEIRELQALVRHLEALQDMRTQENNRLKSGVPSKQVCSMLEEHLAFLDQQIRQIKKRIKEHIDQHPGLKRDHDLLITIPGIGDTTANKLLSENIQAFSDGRALAAFAGLNPSLCFSGTSVHHRGRLSRVGRSTLREALYFPAISAMRFNPQIILFCDRLAEKHKPNMVVIAAAMRKLLCLSLGVLKSGLPFDPSYTQNAYAIP

SEQ ID NO: 175018 - protein, 316 aa, unidentified
MLSIVPSAGVDVGQQYLDLGFFPFAKPMRVTNTQEGIDKIVSTLRRKSTTKVALEAIGSYARRLVCALSEAGFQVFVVNPRRIKAFRDAEGLIAKTDRLDAALIARFAHKMSQDLRPLPDAELLTLKALSTRRRQLTELVAMEKTRLKQAADAMIALSCRELIAILETKCAAIEEELTRRIEANSRMARNRDILLSIPGVGARISTLVVVQMPELGTIDRKAAASLAGLAPHPSQSGLSKGRNAIAGGRPCVRAAFYMAALVAARTNPKFKQLYKNMRDAGKPAKVALVAIARRIVALANALIRDNLTFDESHFVS

SEQ ID NO: 175019 - protein, 406 aa, unidentified
MSEKVCGVDVHRDLLVATILSGETETKETRHFANDPDDIDHLKEWLKGHECKRAVMESTSIYWVPLYLALEESGFEAVLANAHQVKGIPGRKTDQSSSEWLAHLLRGGQIKPSYVPDKRLRELRELTRLRVKYVQNRTAFKNRCQKVLNRVNIRLRSKLSDVFGKAGMEILNGLMAGKSVEYILEHTESKRLKSRCDEIKSVAKGALSENDIFVLKHLTETIKHLDEQIHQLEARIEMVVNKEDIEIVSSVPGVGSRSAAAIVAEVGDAKRFSSGKQIASWTGLVPSVYQSAGTFVLGSITKQGSKWLRWSMVEVAHAAVRVRDSRFRALFLRVMAKKGKKTAYVAVARKMLTVIWHLLVNGEKYVEDGFEKPVRGSKVAYGGHVPLEEMAEVLRSAGYIVSRPNG

SEQ ID NO: 175020 - protein, 351 aa, unidentified
MERYLGGDVHAASVTFSVLNESGKQLRRDVVETNGQALVGYLKQQPGNLHLCIEEGEWSQWLYEILSPHVAEMVVYRSEWKPGMKSDAIDAHGLAEKLRTGTVGRPVYKDAKRFTALREQARAYAMVTRDVARVKSRIKAFYRSRGVPCAGEAVYRPAERAKRAQALPPATRRAVELLGRELDALLVLKAEAERAMLRESHRHRIARILETAPGFGPVRVGLLLPIVITPWRFRTKRQFWAYCGFGVVTRSSADWVRVDGRWVKARMIQTRGLNFNHNHALKALFKGAATTVIAHSGPNPLRAGYDRLLANGTKPNLAKLTVARQIAAIVLAMWKTEAKYDPGRIQAPMNR

SEQ ID NO: 175021 - protein, 347 aa, unidentified
MVIIGCDFHPGFQQIAMMNMDTGEVRQLRLAHREEAQAFYAGLRGRELLVGMEACGYTQWFEQMLEEMGHRYQIGDAAAIRASYVRKQKTDRRDAGHILRLLLEGRFPALWVPRAAERDARQLIVHRHKRVQMCTRVKNPLHALALNQGLRLRWKLWSREGLEQLRALPLLPHAAARRADLLKQLEEMNAEIDRLDRAVRQEAAARPAAVRLMSHPGVGPVTALAFVLTIGDARRFEKSRQVASYLGLIPSEHSSGGKQRLGHISKQGNSLMRFLLVEAGQSAVRKDVELRRFYMRVQHRHSTGVAKVAVARKLALRLYWMLRRTMEEAQFQAGPYAGKPESFCGRG

SEQ ID NO: 175022 - protein, 314 aa, unidentified
MIIALHCVGIDVSKSMLDIFDDAIGAPERVANAPQPIAQQVARWRNNEVFVVFEATGVYDRALAEALRQAGIRYARVNPARARDFARASGRLAKTDTIDARMLADFARAMAPAADPPPEPARSTLAFIAKRRDQLVHMRAQEKNRRSEAHDPAMAEHIAVHIDFLSREIEAIDARIKALIKAAPQICEQARLLRSAPGVGPVACMQLIAQMPELGRAGPKQIAALAGLAPLNVDSGSYRGKRAICGGRKRVRDALYMAALNAVRRDPNIKSFYQRLRTAGKPAKLALVAVARKLLTILNAMLRDQKIYAVPSHT

SEQ ID NO: 175023 - protein, 339 aa, unidentified
MAHLTQSQPMPLRFQGIDVSKATFDVAWWGDQPFQGMVTLAFPRTLAGVQAWLARFKPDELPGMAVVMESTGGYCKELAGWILEAHPGLHVAIANPFRVKSYGRSLGLRNKTDRVDARLLAKFGQERQPGAWAPLSPAQEALRELTRTRSKLKATMVVYRNRLAGHTVVSPLVRTAQEELLECLDQQVKALEKGILELCRKDPRLKVDLELLMSIGGVGLITAAIVLGAAGDLRRFRKRGELCAFLGASPRQFQSGSSVQGKTHMCLMGGKHVRSALYMGAMSICRSKGPLGDFYRRLVTAGKPRKAALGALMRKLIVVMRAVLIQGKPYQAPNTPTAA

SEQ ID NO: 175024 - protein, 464 aa, unidentified
MLIARGFSYLTQPGINLLLQVPQIQIGKDGDIMLKINFMSTLFVGIDVSSKSNVVYAMDFHKNKYISSAFSNNQPGAEELAAIILGCLKKHPGLTTVVAALESTSVYSIHIANFLSTCEALMPYKPYVFCLNPKMTANYRKAFIGMSKTDPLDAFIISDYARAGCIECEPWRGSQYLALKRLTRHRLHLADCITREKTYMVSNLYLKFSELQLLQDDEQPFSNLYGATASALLTEYMSVQDIIDAPEEELLRFLAEKSRSRIPDLSRTSELLKKAARDSYRLDKCMYEPINVSLASSFNCIEAYRKEIKAIDKAILKAIQGMSPNALTILQSIPGIGPVWAAGMIAEIGSIAAFHSSDALAKYAGLTWLRNDSGDFEAEDTPITKAGNTYLRYYLGEAANSVRRHIPEYRDYYARKYAEVPKHQHKRALALTSRKLVRLVFGLLAKNQLYTGELLDAELNSEPN

SEQ ID NO: 175025 - protein, 483 aa, unidentified
MAAKKNAKTGTDRTSAAAAAERGGDAAEVAEDRVQVVERAAAIDVAKGSGMVCTRVPGSRPDRRRQQVWQVGAAYGEVTALMDHLRCQGIQRLVLESTSDYWRVWYYLAESAGLEVWLVNARDVKHLPGRGKSDRLDCVWHCKLNERGMLRRSFVPPEEIRDLRALTRTRARLAQDQARHQNRVEKILEDALLKISVVISDLFGASGRRFLDALVAGERSPAALAALGDKRLKATRRELEDALTGRFRDIHAFEIKTHLRLIDAINEEIARLDEAIGQQLAQVPRTAPCCIACGLAGGDHAPGCAGQGTPLLGLAGRLDEITGVGAVNARAIIAELGTDPSQFPTPGHAAAWARLTPRSRQSGETVRPGRTGKGNRYIRGALGQAAMATARTDTRLGAMYRRIARKRGKQKAIVAVSRVICEIAWILICDPAARYEELGPDYYRPRSPARQTRDKIREIERLNPGKKVILAPIDPGPEASAAA

SEQ ID NO: 175026 - protein, 334 aa, unidentified
MKRTQSITKNRAAKPSKSATKTKVRVSGGIDVGKTWLDAAIHKASGKFLRQPNTPQGRSAIVGFFFEHEVTRVGVEASGSYEFEMVDAMREAGLEVIVFQPAQVRAYATFLKLRAKTDAIDAALIAQCAAAQGEARDKPDPRLVPLAEHLTYLDQASEDIARLRTRLDRYRDQRFIAGIREEIDRLTRRQRAEFALLRKKVRIHADLVERLRLLLSIDGIGEPTALTLLIRMPELGTISRERASSLAGMAPFTQKSGRWVGQTHVSGGRGRVGKALFAAAQAAAQRWNKALIDLYRRLKAKGRHHSVAVVACARKLVIFANTVLARGTPWVPQN

SEQ ID NO: 175027 - protein, 377 aa, unidentified
MNDLIRIGMDTSKSVFVLHGVNAAEQPILCKKLRRRQVLEYLGKLPPMRIGIEACGAAHNWGRALTALGHEVCLLAPQHVKPYVRRNKNDAADAEAICEAMSRPRMRFVPIKTAEQQAALMLAGVRDQLVRRRTQLSNSIRGYAAEFGLVAARGLDKIEPLLTRIAAEETLPALARELFAEQAEDYAELTRKLRRIDAKLQAWHRQNALSRRLAEIPAIGPIGASLLAMKVPDPAAFKTGRDFAAWLGLTPKDHSTAGKMRLGVITRAGDEGLRRTLVVGATALIQQVRKGRGHPSPWLIALLKRKPPKLAAVALANKTARIAWKLMVSGGHYDRNHAAASGAGRCASLADGFAARPAPEANALPRRIAAPAAMPKI

SEQ ID NO: 175028 - protein, 498 aa, unidentified
MILPPQDGARNKLGRKALQKAVARAQGRKTKKSVKKRGRRERTSRREGQAVPTTPSLNQLERVNRNAAGIDLGAMVHYVAVPPGRDPETDVRCFETFTEDLEAIADWLSGCGVDTVAMESTGVYWIPLYELLEQRGFQVLLINPADFKKFRRKTDVSDCQWLQTLHTFGLLQGSFRPEEKIVTLRAYLRHRDRLVKCASDEVRRMQKALEQMNVKLTEVISDITGMTGMAIIRAILAGQRDPQRLAALRHSGCKNDVQTIALALRGNWRQEHLFALRQALELYEVHLEKLKDLDGQIEAYLQTFEDRTEGEGQQLEPSRRKRALDPCLNSRDLVYKMTGIDLTEVDGIGGTAALQIVAEIGTDMSKWETDKHFVSWLCLCPELHLTGGRRKSDRSHTQPSNNRAAAILRMCAQSLLNANCALGAFGRRIRARKGGAHAVTALARKLGIIVYHMLKERRPYKDQGASYYEERYRQRMVENLRRRARQLGLGLVPLALPE

SEQ ID NO: 175029 - protein, 412 aa, unidentified
MNVYCGIDWAEEHHDIALADADGGLLGRRRISDDAAGFAQLLDLLAEHGDTAADPIPVAIETPRGLLVAALRATGRKVYPINPMAVARYRDRHSIAGRKSDHGDSFVLANILRTDLHVHRPLPGDSELAQAIAVLARAQQDAVWDRTTAHNKLRSHLRQYYPGFLAAFADARGGILRPEARVILAAAPTPAAAATLTPAQLRALLKRAGRSRGIETEATRLREAFRIPQMRQLPLVEDAMGRQAQALLGQLDAACTAADDLEQAVTQSFNQHPDAGIITSFPGLGILTGARVLAEIGDDRSRFHDARGLKAYAGAAPITRASGKSTAITHRRIKNNRLAAVGYIWAFAALTASPGARAHYDRRKDKGDRHTSAQRNLFSRLLGCLHHCLITGQEYDEPIAFPDASKKLPRAA

SEQ ID NO: 175030 - protein, 315 aa, unidentified
MMNRIESFVGIDVSKTRLDVRIAPCGTSRQGAYDEAGVEQLVQHLHDLQPTLIVLEATGGMETLIATSLAGRGLPVAVVNSRQVRDFAKASGHLAKTDRVDAAVLAAFAQAIRPPVRPLKDEGSRALGELLNRRRQLIEIRVQESQRLDTAVSKAMKASLMDHIQWLDKQIDDVDRDLKRRLRQSPIWRAKDDLLKTIPGVGPVTTLTMLAKCPELGTLNRRQIASLVGVAPLANDSGKRRGKRFIWGGRAEVRAVLYMATLSAKRCNEVIKAFAERLRQAGKPPKVVIVACMRKLLTIMNAMIKNNTPWTPKMA

SEQ ID NO: 175031 - protein, 337 aa, unidentified
MKYSGIDLHSNNAVVAVIDDRDRVLYCKRLANDLQLIVAALEPYRDELQGVIVESTFNWYWLVDGLMADGFAVHLANTAAIKQYEGLKYSGDEHDAVFLAHIFRLGLLPEGYIYPSHERALRDLARKRMQLVQQRTLNILSIESLLARQLNLRINGEHVQRLDDAAVRALALPPHVERALMANLAVLHTLCTEIQALETILHKEVKLRPQFDILKSAPGIGNILAATIMLETGTIARFASVGHFSSYCRCVDSKRISNGKKKGEGNARNGNRYLAWAFVEAAAGALRCCPQARRFYDRKKSKRLPVVAMKALAHKLARAAYYMMREGKPFDLNRCFG

SEQ ID NO: 175032 - protein, 358 aa, unidentified
MNRSTAPGAGQIIGQIEGRQVVGLDIAKSVFQLHTVDMDTGEIVNMQLKRAKVLEHFANRAPCVIGIEACGGAHHWARELAAQGHTVRLIHAKAVRPFVAGNKTDATDARAIWLAIQQPGSRFVGMKTLVQQATLVLHRQREMLMRMKVMQTNALRGLLYEFGATFARGKNALFSEIEATLESLVDDIPQYVVDSLREQVQRIKQLALDIAALEVRLNQRLRTDEDMSRVAKIPGVGLLTATAAIATMGDASAFKSGREFCAWLGLVPKQRGTGGKVKLLGISKRGDTYLRTLLIHGARSVLLHTKEPGAWMEQLKARRPSNVVIVAQAAKMARTIWAVTARQQDYQRSWQSTKPNTV

SEQ ID NO: 175033 - protein, 362 aa, unidentified
MQKHIFVGIDLGDKNSVARIAVDREKSERFGFVNTRAGRARLMAEVKRRGEQAGSAVIVMAYEASSCGFVLRDLAWAEGIDCKVLAPTKMEKSVQLKKNKNDDRDADDVLEKLRGHVLAGNRLPTVWVPDLETRDDREVLRTRLALSERQTQVKAQIQMLLKRHGLEKPSDLGSSRSKQYRHWLESLSECETVGWGTRQSLSSLLRQLKGIGGEMENLDKLVKHLGGQPRHKPIVEALMKETGVGLLTALVYRTEIGQASRFHRGRHVGKFVGLTPTSHESGQQSDRKGHISRQGPPRLRKVLCQASWVHVRYDPQSREVYQRLVVKNPKKKKIALVAAMRRLAVRLWHRMREAELQQQTQP

SEQ ID NO: 175034 - protein, 337 aa, unidentified
MGLYCGIDLHSNNHVVTVIDEGDRRLYERRLPNDLAITRAALEPFRAQLVAVAVESTFNWYWLVDGLMDAGYEVRLVHTGAVVQYDGLKHTDDEHDAFWLAHLMRLGILPTGYIYPKSERGLRDLARQRMRLVQHRTSHITSVQNQVWRSNAVRLSSHTIKGEGKQPWPELRDADLALSVATGRAAIDALTAQIERLEELLLKRVGLSPQFQVLKTVTGIGPILALTIALEVGDIKRFPGVGEFASYCRCVDSQRLSNAKKKGEANRKNGNPYLAWAFMEAAHFAIRYLPAARRFYERKCRQRNALLAVKALAHKLARACFYMLRDQVPFAPERLFV

SEQ ID NO: 175035 - protein, 504 aa, unidentified
MDWFEFVWRASEVSHRGKRKPVPVDKSAPEVIPDAEHELVIERVAAVDVAKAAGKVCVRLPGKAGRRFSRVWDVPARTGAITDLGEQLVESRIEKVTVESTSDYWRIWYYLLEAAGLSVQLVNARDVKNVPGRPKTDKLDAVWLAKLTEKGLLRPSFVPTTEIRRLRDYTRLREDLTHERTRYWQRLEKLLEDALIKVSVVASGLDTMSTRDMIEALIAGERDPQRLAELARGKMRAKRSELITALDGRFDDHHAELARLLLNQIDALAAQINTLTGRIEDLIAELPEAGAVDHGGSEDTDITAPGAADRSHAAPQPARGAHEPTGSAPCRVDPAIEAECARLGAIERLDEITGVGEHNAQVIIAETGLDMTRFPTPAHLVAWAKLCPRTIQSGPVTRGGRTGKGNPYLKGALGQAAAAAARTDTFLGQRYRRIVKRRGKLKALVAVARSILVIVWHLLADPLARFHDLGPDYHARRINIERRMRNHIAQLTALGYRVTLEPAA

SEQ ID NO: 175036 - protein, 343 aa, unidentified
MDYFAGLDVSVKETSVCIVDDAGKIVREARVASEPEALLQVLTNTIYRFKRVGLEAGPLSQWLYSVLAEAGLPVICVETRHMRTVLKAQINKTDRNDARGIAQMMRVGLYRPVHVKTLRSQKLRMLLTHRKLLQSKAIAIENDLRATLRNFGLKVGIVGTVKFEARIKELVENLPDVAVLVEPLLVVRRVLREQVGMLHRRLLAIVRDDDVCRRLMTVPGVGAVVALTYRATVDVPARFRNSKAVGAVFGLTPSRYQSGESDRIGRISRCGDEMTRTMLYEAAQSMLVRSAKWSWLKAWAMKIARHRGMNKAIVALARRLAVIMHRIWVDGTEFRWTREVAAA

SEQ ID NO: 175037 - protein, 317 aa, unidentified
MAKHTTICAGIDTGTRKLDIAIDGRAEQLQVNNTAHGHEKLIDWLRQHRVKRIGIEASGGYERAVVAALRRNRFVVVVFQPAQVRAYAAFHLQRAKNDKIDAALIASCTAAVKKIHAPPDPRLEPFADHLTMIDQISEDIARLKTRREPCRDPRIRQLWKEEIARLKKLEKTELKSLVAAIRQHRDLAQRLDLIYSIDGIGLRTAVAILVRMPEIGRITREQAAALAGLAPYDDDSGNLVGVRHIAGGRERLRGALYAAAFAAAFHWNTQLIALYKRLNRAGKLHKVALIACARKLLIFANTVVARGTPWTTQAATA

SEQ ID NO: 175038 - protein, 338 aa, unidentified
MELKRIAIDTSKHVFTVHAIDEKERAVLRRDLRRRQVEGFFAALPPTEVVLEACGGSHHWGRRLSALGHRVKLIAPQYVKPFVKRGKNDRIDAEAISEAAARPTMRFVPVKSAERQAQASVLSVRELLVKQRTQLINALRGQAAEFGIIAAKGAGNAAALAARIAGDAELPIVVKEMLARLGQEIARLNQTIAALDSQLAALHRASPVSRRLCEVPGVGQITALTATLTVDPDQFKSGRHLAAWVGLTPKERSTGGKRRLGAISKQGNERLRQLLVLGAMAVIKVAKPGHRYATPWLLRLLERRPRRVAAVALANKMARILWAMMTSGESYRHPPVAA

SEQ ID NO: 175039 - protein, 355 aa, unidentified
MTASYEYHIGVDYHKSYSHLVVQDSSGKTLRSGRVKNERQSLGGFLERYRENSHAVVEATRNWMVMYDWLDEICDDVVLAHPLKVKAIADAKIKTDKIDATVLAHLLRADLVPEAWAPSDEARELRVALRERMFYVRLRTMTKNRIVTVFDRYPEQTAQLKKLGDLFGKAGRVQLAQVNVSEIDRIQIDRGLAFIGDIDVRVKQSEATIRAMTKANTNVKLLKTIPGIGEFFARLIDAEIDEIKRFRNAKKLAAYAGLVPSTYSSGGKTFHGKIIKQGNKWLRWAFVEAVAPALASDPQLRAQYEHLKSRGVNKARVAIARKLLTIAFQILRDQRPYERRGGRSEDCASTISRLS

SEQ ID NO: 175040 - protein, 372 aa, unidentified
MRKNNSKEKKVEGSDQPWKGPITVGMDLGDRTSRYCVLDGRGEVVEEGNVATTRTALKALYGPMKKCRIAMEVGAHSPWVSRLLKTMGHEVIVANPRQLKVITESSRKDDKVDAEMLARLARVDPKLLRPIRHRGEEAQLDLMAIRARAALVEARTGLVNAVRGFSKSVGERLASCDTDQMGVEKLAELPVSLQTVLKPMVEQVSSLTASIKKYDKELEQIAKVKYPETRLLTQVGGVGTLIALTFVLTVEDKDRFEHSRDVGCYVGLRPKRGDSGESQPQLRITKEGDMYLRSMLVQGAHHILSERSEDSDLKRWGLRLAERGGKNAKKRAIVAVARKLGVLLHVLWVTGEVYEPLRNSKAVERQSRKKAA

SEQ ID NO: 175041 - protein, 340 aa, unidentified
MHDSITWVGMDVHKESIVVAAVNGAGGTAARWETPNTLKGKERLAKRLSEFGMIRCAYEAGPCGYDLRRFLTGKGISCDVIAPSLIPKKPRDRVKTDKKDAEKIARAHRMGELTAICVPSPAQEALRDLLRAREDANEDLVRRRHRPQKFLLRQGRRFEGKTWTRDHWRWIRAQKFEDRNSETVLCEYIAAIDIVPAIARLKALRGVDTLTAMTILSELIDLNRFDSPRKLMGFVGLVPGEYSSGGKQWRGSITKSGNSHVRRVLVEAAWHYRHSPRTTGEAIRKRREGQPPEVIETARKAEQRLYKKFTRMVMRGKKTTVAATAVARELAGFVWAIGRI

SEQ ID NO: 175042 - protein, 376 aa, unidentified
MNALGEVFNKHFTIDNTRQGYKKLLEQISLAKEFFKDSNVRIGLESTGHYSRNILHFLILEGYDVMFINPLLTNMDRKASSVRKTKTDSIDAKAICMFLIRNQNDFKPYTLSSYHIDELKILVRQRKSLKKQLNQITNQLHAFLDQAFPEYHTVFKNILSNASLTLLSSYASLSELKRVRVNTLSELLKKSSKGRHGLVKVEFIKTLIKDSIGIDSTSLSLSIKQSVQTIRTIQSQIDQINQLLEHHITESKTTLLSIPGIGTQTGAIILAEIGDINRFKSDDALLAYAGLDPSVYQSGNYEGSFKTSKRGSSILRWAIFQAAKVAVIHDPVFNAYYEKKKSEGKHYLTIIGHVTKKLLRVIRSILKNNSVYTVSH

SEQ ID NO: 175043 - protein, 433 aa, unidentified
MGLIVPTVMQPEREDQPPPYECFVGIDWGSQQHQVYVLDRDRRRMGERVVDHDGASLAQLVPWLWGLSAGQPQRVAVAIEVPRGAIVEGLVERGFHVFAINPKQLDRFRDRHSVAGAKDDRRDAFVLADSLRTDQPSFRRLQLDEPQLLLLRELSRAEETLLEEFRRSANRLRDQLHRFYPQMLQLCSGADEPWLWDLIDLVPTPAHAALLSEAQVQRVLKAHRIRRVTGTEVLTCLQTQALPVAPGAAEAAQAHCQLLLPCLRVLAEQLQACSQQVSALLSTLAEERGEGEGPSDVAIVLSLPGVGRKITAWLFAEAAQPLAERDYQVLRTHGGVAPVTKQSGKRRVVVMRRGCNPRLRNALYHMARVAMQRDAHFNSVYAALRAKGQRHGQALRSIGNRLLRILMAMLRHRTCYDASRIHREPVVQMGGKI

SEQ ID NO: 175044 - protein, 400 aa, unidentified
MLSIGIDVSKGKSTVCGMKLGGEIVYTPFEIQHTREGMSELVSLLRSSGEEVRAVLESTGSYHCPVVAALLENGIFVSVINSLRMKRFCSQSIRKVKTDRIDAMQIALYGLAYWQELQPARLPEDTYRELQLLARQYYQMTSMLIKAKVDFNAICDQVLPGMQELMSDHAGRHKLSDFVLRYRHTTHILEMGETRFRKDYCKWAEKKGYRNCERMAVLIFATAQNGIPVLPNAPSTQIVITEAIRVLHTVEASRDAILTQMQALAKTLPEYSLVREMPCIGDTLAPRLIAEIGDVRRFHSKRALIAYAGIDAPPYQSGKFCANNRHISKRGNRYLRKTGYEVMQSYVMHKPANDPIFTFIEKKRGEGKSGKLAMVAGLNKFLRVYYGKVTELYRSSSAIE

SEQ ID NO: 175045 - protein, 342 aa, unidentified
MKFYCGIDLSARDCHVCVIDEQLKIVVQQKLRNELPKIVQLLEPYKGSLKIVVESTFNWYWLIDGLQAAGFEVVLAHTLGLYLITGAKVKTDRRDAYALAKLLLVGAVPAAYIYPVETRPVRDLLRRRLHLVQVRAGEYGSLRRLLLRQGILSSKQQEIKTATEAELEQWFEHPLVRLHASQELQRIELYSQQIAELEKTILGLAQTEQSYELLLKLPGVGQTIALTILYEVGELTRFANVKVFSSYCRVVPGIAQSGKVTGRGRASKQGNHYLKAAFSQAAVHAVRCYPKVRRYYERQLKRHQGRGRQMICYNIIAHKLAQAAFHVLKEQTEYRAELLFGR

SEQ ID NO: 175046 - protein, 329 aa, unidentified
MIGSKSRMQGKKPSVGAVTQVYVGIDVCKAWLDVYLHPIGQGFRVANSKEGIKLLRQGLAGADVALVVVEATGKLHRLVHRLLSQAGYRVAAVNPARPRKFAEALGQFAKTDRIDARLLALYGAAIGPGATPVPAKAVAELQELVLARQAAKADETALKNRHAAAESKVLNQLLRRQLDACARVIEALDAAIAAVLESNAELGRRYRILTSIKGIGPVVAAMLAACLSELGLLSAGKIAALAGVVPFDDDSADRRGLRRIKGGRPHVRQALYMAAVSAARCNPDLKAFYQRLRARGKQAKLALTAVMRKLVILANTLIREDRHWMPKHA

SEQ ID NO: 175047 - protein, 373 aa, unidentified
MPRYSTAFGMDVHLRSTTVCALDAETGEAVTRRFRGNPWGEVAEWMSGFPGPSLAAYESGYLGFAPQRELSGLGVDCVVAAVSKVPRSAADLSSKNDRNDAARMAKAILSHDVTPVWVPSPEIEGLRDLAAAHDAATARLAAAKQRLLAFLARRGYAYGGTTPAGNPRKYWTYGFLRWLDGIHPADDGGIRALAALRNEVEAADETREAVLAEYRAAVAAGPLSAEVEALQSIKGCGFALAAAFAAEVGDFSRFRSGRQVTAYFGLAPKQRSSANSARLGGISGAGNALVRKLAVEGSWCYAQAGHQPKLMPKGSGVPLEIRMHGRKGSERLLRRREEMLERGMPQAKANAATAAELVRWLWALGAMCREAGE

SEQ ID NO: 175048 - protein, 345 aa, unidentified
MNKISVIGLDLAKNVFQVHGIDLDGEVVVRKQLKRSQVRQYFAKLEPCLIGMEACGGAHYWSRELTGLGHTVRMMAPIFVKPYLKSNKNDRNDAEAICEAVQRPSMRFVQPKTPEQQAVLHLHHGRRLLVRQRIALSNHMRGVLSEYGIVLPQGAKAIFQRLPELLEDADNDLPMLARHLLAELKEEYDQLIERIERIEAWIKAWHANNSVSQRLASIPGIGVLTATALAATVGEGQDFSSGRQLAAYLGLVPRQVSSGGKARLLGISKRGDGYLRGLLIHGARAVIYHIQRRLRAGQPGGNPWVEQLLLRSHPNEVAVALANKMARIAWVLLVRNEIWCPARPV

SEQ ID NO: 175049 - protein, 341 aa, unidentified
MRLYAATDLHANNNFLAIIDETGRRVFQRRLPNDAAVVLEVLGHYRDDLVGAVVESTYNWYWLVDALMEAGYQVHLANTAAIQKYTGLKHVDDRHDAFWLAELLRLGILPEGYIYPKEERPVRDLLRKRGHLVRLRTSLIVSLQHIITRSCGLRVSVNDVKVLGSDRVTPLLADRDSEELVLVGSISKESIDFFTRKIRTIERAVVQRVVLQQPYRYLLTMPGVGTILGLTIMLETGPISRFAKVGNYVSYCRKVASRWVSNTKVKGKGNKKNGNKYLAWAFAEAAHLSLRNSAEARVYYNRKLSKTNVAVAHSALAHKLARAAYYVMRDQVPFAPEKLFS

SEQ ID NO: 175050 - protein, 369 aa, unidentified
MKQTITYVGLDVHKETIAVALAERGSRDEVREHGKIANTPAALATLAARLGHGGRDLRFCYEAGPCGYGIHRQLTAAGHGCVVVAPSLIPRKPGDRIKTDRRDAINLAKLHRAGELTPVWVPDRAHEAIRDLVRARLAAVRTLRQARQQLSGFLLRHGHHYNRPAWTLMHRRWLAGLRFEHAVHHLVLEDCIAAVEAATARRDRLEAHIEAALPDWSLAPVVGALQALRGMALVGAATLVAELGDITRFTKPRQLMAYLGLVPSEHSSGGTRRQGGITKAGNGAARRMLIEAAWSYRFPARISREQLLRQEDLARPIRDTAWKAQERLCRRYRKLARAGKPPTVVTAAIARELAGFVWAIARQAQPTGA

SEQ ID NO: 175051 - protein, 431 aa, unidentified
MTNRLQVGIDFSQKRADVCLMFPNGQPLERHQAFGNSCSGYSLAKQLLLDALDSYQFDGVDVSGEATGYYWLPFFLQLAADPELEPHNLNLFLLNPRWVHWYKKCFAQDDKSDQKDSYYIADRTRTHRPDVVWSPQMDTLPLRFYTRFRFHLVQTLACEKCYFSAFLFLKASAYRRLEPFSDVFGATSRLVLTQLPSLDELAELPVEALTDYLHELSGHHLRDPADNARKLQRVACESFPLHPALTLPVQRILELTLDHIRFLEGQIQQVEAWIAAELVPHTAIRQLATIPGVGPVFSSGIGAEIGDVRRFLQGTKWDKRRRRYRSRNLRDAEDAVAKLAGLWWPRSDSGGFEAEDRRMARSGNRYLRYYFIQASNQMRLNISDYADFYARKYREASKHHHKRALVLTARKSVGLVVGLLHRDEPYRSKEG

SEQ ID NO: 175052 - protein, 344 aa, unidentified
MDHSAGLDISVKETSVCIVDDTGRIVREVKVASEPEALLSVLTNPDYHFKRIGLEAGPLSQWLFSALAEAGLPVICVETRHMRAVLKAQINKTDRNDARGMAQMMRAGLYRPVHVKTLRSQKLRMLLTHRKLLQSKAIAIDNDLRGTLRNFGLKVGMVGTAKFEGRIKDLVENLPDLAVLVEPMLVIRRVLREQIGILHRRLLAIVRDDDVCRRLMTIPGVGPVVALTYRATVDVPARFKNSKAVGAAFGLTPSKYQSGESNRSGAISHCGDEMMRVMLYEAAQVMLTRTNKWSWLKAWAMKIARRRGMKKAIVALARRLAVIMHRIWVDGTEFRWTREEAAAA

SEQ ID NO: 175053 - protein, 340 aa, unidentified
MTVFAGFDVHRAQITFDALDTETGEITRGRIESTPAGVERWVGRFPGREVHVEVEACTGWLFVCQALDRAGAIAHLAEPVETSALRGRKRRAKTDREDARWLRELLSEGRLPESWIPPEHVRQWRTRARLRKTLVDERTAWHQRIRATLYHHGISGSPEHLSTLAGREFLAKQALPIDATERITIALEMIDLLEIQIARVESEIRTLARRQTGCKALMTLYGMGELTSLITLTELGDVSRMHASRQAVRCAGIDVGVHRSDRTARVGKLTYQGSAELRWALYEAAQSACRPSSPDHQDYLALKARGLSHTRASLTIARKLARRSYHVLRELGPAALEPVS

SEQ ID NO: 175054 - protein, 409 aa, unidentified
MRVFCGIDWAETHHDVAVVDAEGRLLARRRIRDDAAGYQQLLQLLAEAGDTATEPSRSPSRPAAACWWPSCAPPAGACTPSTPWPCTGYRDRHGVAGAKSDHADAVVLAGILRTDAAAHRPLPADSELVQAIAVLARAQQDAVWSRQQLAMKLRWLLREFFPAALAAFHRKHVGLTAPEARAVLAAAPTPTQAASLTTAQLRRLLRCAGRQRNLDAWTKRLRASFHADQPRQLPLVEQAMGQQVLALLAQLQAACQAADDLAEATVAQFRRHPDYQIITSFPGLGELTGARVLAELGDDRSRFADARGVKAYAGAAPVTRASGKRLQVLARKVKNQRLAAVGYVWAFAALTASPGARAHYDRRKHAGDRHAAAQRNLFNRLLGMLHHCLATRQTYSEAKAFPAPEALAA

SEQ ID NO: 175055 - protein, 369 aa, unidentified
MKTHKYVGLDVHSVDTVIAVAEGDRSGEVRLYGKVSSDLHAMEKVLRKLGGEGVVLHVVYEAGPTGFVLYRRLQQLKIDCAVVAPSKTPQHTGVRQKTDRRDAVQLARLHRAGELSAIHVPDAMDESIRDLTRARADAVDDLRRAKQRLKSFLLRQGYHYKGKANWSEAHQRYLRELVLPLPALKAVLEEYLLAIDQTTQRVQRLDQLISVQVPLWRMYPAVEALMCLRGFQLTAAATLVAELGDVRRFAHPRHVMAFLGLVPREKTTGNTRRLGGITKAGNPHARWILIEAIQHAYLPPKVSAHLALRQRGQPAKYRELAWKIQMRLHARGWHLLHRGVMKAKVNVALARELAGFVWDLLRQVPAPTP

SEQ ID NO: 175056 - protein, 338 aa, unidentified
MKLYSAIDLHSSSNHLAIMNEEMKRVLVKKLANNAQLILDTLAPHREEIAGIVVESTYNWYWLVDALMEAGYQVHLANPSAIQRYNGLKYSDDTHDACWLARLLSLGILPEGYIYPKQDRPVRDLLRKRGHLVRLRTSLLLSLQNIITRSFNVKVSSKDLKKLTEDCVSAHMCGHEALELCGTVSKETIDVLTRQIQRIESSVLKTLKPTLAYRNLITLPGVGPVLGITISLETGPISRFSTVGSYASYCRKVASIWLSNDKRKGTGNRKNGNRYLAWAFSEAAEHARQSHRPSKRFYDRKIRNSNLWVAHNAHKLSRAAYYIMRDNVPFAEHKLFCS

SEQ ID NO: 175057 - protein, 344 aa, unidentified
MKITRVGLDLAKRVFQVHGVNEYGAAKLSKKLSRAEVLQFFAQLPPCMVGIEACGGAHYWGRELGKLGHTVRLMAAQFVNPYRKSGKNDANDAEAICEAVGRANMRFVSVKSEEQQAVLMMHRARTLVVSNRTAQVNQIRGLLGEFGLIVPVGIKRLRTQLPQILEDAENGLPLLAREIFANLLHELHYLDERIERYDRQLQQLASQSEPARRLMAVEGIGPITATALVASVGDARVFKNGRQFAAWLGLTPRQYSSGGTTRLGRITKRGDRYLRMLLVHGARAHLRFVDRKNDPKSLWVKVLKARRHINVAAVALAAKHARIIWALLAKGTTYRSPAAATAVT

SEQ ID NO: 175058 - protein, 342 aa, unidentified
MGQVTTIGLDIAKSIFQVHGVDPIGDVVVRRRLTRARVVPFFEKLAPCLVGIEACATSHHWARELGKLGHDVRLMPPSYVKPYVKRQKNDTADAEAICEAVTRPTMRFVEVKTPEQQSIMVLHGTRTMLMRQRIQLSNVIRGHMAEFGVVAPVGREGLLTLIDTLHEETDDRVPAEARYCLQMLAAQLRLVNAQILENDRRIRANARATDVGRRLMGIPGIGPVLASAFVATVPDPHAFRSGRSLAAWIGLVPRQNSSGGKERLGGITKQGNRYLRQLLFVGAMAVIRYAERHGTRRPWLVQLLARRTTKVAAAALANKTARMVWAIMTSGQSYREPELRAA

SEQ ID NO: 175059 - protein, 354 aa, unidentified
MPKTAITQIAVIGIDIGKNSFHVVGLDRRGAIVLRQKWSRSQVGERLANMPPCLIGMEACVGAHHLSRKLNVLGHDARLMPAKYVRPYSKGQKNDFRDAEAIAEAVQRPTMKFVPTKTVAQLDLQAMHRVRERLVSQRTGVINQIRAFLLERGIAVRQGRQFLRTELPTVLAARSDVLSTRMLHMIESLARDWRQMDERIDKLSSEIEMLAHEDAGAERLMSVPGIGPIISSAMVAAIGTGATFSKGRDFAAWLGLVPKQISTGDRTILGPISRRGNRYLRALFVQAAWVVLVRVKSWERYGLKSWIEAAKKRLHHNVLAIALANKLARIAWAVLARGSNFEMRRSNELSTQPA

SEQ ID NO: 175060 - protein, 344 aa, unidentified
MDHFAGLDVSVKETSICIVDDTGRIMKEVKVASEPQALLKVLGNPAYRFKRIGLEAGPLSQWLFSGLAEAGLPVICVETRHMQAVLKAQINKTDRNDARGIAQMMRVGLYRPVHVKTLRSQKLRMLLTHRKLLQSKAIAIENDLRGTLRNFGLKVGMVGKVRFEVRIQELVENIPDMAALVEPLLIVRRALREQIVILHRRLLAIVRDDEVCRRLMTTPGVGPVVALTYRATVDVPSRFRKSKSVGAVFGLTCSRYQSGEIDWSGRISRCGDEMMRVMLYEAAQSMMHSKKWSWLKAWAMQVARRRGMKKAIVALARRLAVIMHRIWVDGTEFRWTREQAAAAA

SEQ ID NO: 175061 - protein, 402 aa, unidentified
MRVGIDAHKMKCTTVMFDGDSVTGSFDFQTTRQGVYEFMEKVPEGSIAVIESSTTGKVLSRMLSGKYEVHMVAPPERKVSIKTDRRDAERIVMEDMLNYLRRCYIPSQYIENIRFVVTQQIQIGRRIARVKNQVHALLEMNMIQHELDDMADIFGVKGLNKLSKIQLPRQDMIALARYLEELKMYVSHHRHLDTEIARIAASDNDVQLLMTIPGINCFTAVAIKSRIGDDVSRFATKKHLCSYAGVVPKANNSGEYISEHNHVKQGDIVLKYALTCAVRGAILANKNSSIKLFYRKISKKGVSPQKAQIAAARKMACIVWKVLSSKQPYTEQDDHMTKRKMKIMSSKAMRIMPTSVMPSKVSELVRNLVDNIDVLGKYPEDSDYIIGKDLSNRNRLKEDILR

SEQ ID NO: 175062 - protein, 351 aa, unidentified
MKYIGLDCHKQYDHATMIDTETGEIKAKRLPHIKEEFKEFIGDRASTRMVIESCRDWSRTYELSKDLVEEVILAHPLKVKAIASAKVKTDAVDSRMLAQLLMADLIPQAHLRKSDNRVKQRVIRHRAFMVVMRTRVKSRIHALVDSQLLPRDVLQTKPINLFSKKGMKWLNSLEWARAEDKELVESHLRVMEVINREISITNEMVKEIYEEDKDAKLLATIPGIGITLAMLISTEIDGIERFRSPSKLCSYAGLVPSTHSSGGKTYHGNITSEGNKWIRWALVEAAVPASYADIEIKKRIDTLRKTKGANVAKTAIARWLLKIVYHILKERRPYVTAYGKMVEAGAAFYFT

SEQ ID NO: 175063 - protein, 429 aa, unidentified
MNFRPIAGIDVGKFFSEMAILSPSNEVIARMKIRHDSSTDVERAVELLKKTEKDFDSRPFVVMESTGHYHKILFHSLYKAGFEVSVINPIQTDSIKNIGIRKVKNDKVDARKIALLYRFQELKTTNIPDEDIECLRSLCRQYYKLSDELTAYKNRFMGIVDQLMLNFKDVFPNIFSKAALAVLEKYPAPVHILKANRNKLIALIQKNSRRSLKWATAKYELLNSKAKEFAPLSISNSSNVAMLGVYISMIKTLEENLEKVLKAIRSLIIEDMAKDMPMLALTLELLQSIPGIGLISAVTILAEIGDFSAFSKPGKLVAYFGIDPSVMQSGEFTGTQNKMSKRGSRLLRRVLFTIALANIRTKRDKTAYNPVLMEYYKNKCQSKPKKVALGAVMRKLVNYIFAVLRDRKPYELRSPQEHAQMLAAKHTAA

SEQ ID NO: 175064 - protein, 342 aa, unidentified
MQITTIGLDIAKNVFQVHCIDANEKVVVRKQLRRGKLMAFFEALSPCLIGIEACATAHHWARELTKLGHEVRLMPAKDVKAYVKRNKNDAADAEAICEAVRRPTMRFVRIKSPEQQGQLMQHRTRDLLMRQRTQLINALRAHLAEFGIVAAKGDGGVKELLAIVADKEDTRLPINARASVIVLAAQLEAVQTVIGAIEKRIKMQHRANEASRRLETIPGIGVIGATAIAATVSDPTVFRSGRDFAAWIGLVPRQDSTGGKQKLGPISKQGDRYMRRILIVGAHSVLRRAKQNPGKYPWLTQLLVRRPFKVVAVALANKMARVAWALLAYGGTYRAPKLAEAA

SEQ ID NO: 175065 - protein, 344 aa, unidentified
MLYIGLDVHCKWITVAGFNPATGEIIERDRVANDPDSLSRLFDELPGPLHGIMESGINSWAIYRDLRPLFETLTVAEPAKLWDRRRDRKAKTDRADALRMAHMLYRGEVEGLYIPDEKTQDLRVLVRGKVRMSRWVTRLTNEIGSVLKCWGYVGHKRLLTKGGRLELEQAELPERSARVIQLWRELLDKAQQIEDELQAAIEEEAAQDSDCALLQTIPGVGAFTALAVKVEIGDIRRFEHSSQLISYAGLAPRVFQSGESRFYGGLGNWGNRWLRYAIGLLAQRTAHSKQDNALRTTYWRVMFRNHTNAAKMAVARKVVRVIHQMLTHGSAWDNSKAAPRKAAA

SEQ ID NO: 175066 - protein, 345 aa, unidentified
MKKVYAGMDIGSKECAAVVIDSKGKQVDSAVFKTSERNLRAFFSKHPSSSLLVEECEMAAWVRETVKPHVARVTVCDPKRNAWVAKGTNKNDRVDAAKLAELNRLGSYAEVWHTDDADIAGFKVLVKHYDDTSARLAALKCQIKARFRKQGVVARGEAVYGARRHEALCRVENTFARIAIEQDYDLLDYLVEAKAASRSSVIEASRRFPVIGRLRQIPGVGPILAARFVAYVADPHRFNKRTLASYSCLAVVKRSSDGSPIGREHLSRAGNSALKDLSRTAFERSMATRAPNGIKEFYASSLAKTNDKTKARLNTQRKILALMLAIWRDGTDYRDDLVTRAFTGA

SEQ ID NO: 175067 - protein, 349 aa, unidentified
MVVLGIDAHKRTHTVVAVDEVGRQLGVRVTMATSTAAHLDLVAWADRFGNERRWAVEDCRHLSRRLERDLLGAGEQIVRVPPKLMAHARDSARTYGKSDPIDALAVARAALREPGLPVARLEGPERELRLLVDHREDLVAERTRAINRLRWHLHELDPSWDPKPRSLSRRKNIAAAAAALAGLDGLVARLAAGLAERIAVLTADINALEREINARVRVLAPSLLALPGVAALTAAKIVAETAGAGRFKSKDAYARHNGTAPLPAWSANPVRHRLSRTGNRQLNCAIHRIAVTQKRCHPAAQAYLQRRAAAGDTPTEALRALKRRLSDIVYRTLLADSADTTTAPVGQAA

SEQ ID NO: 175068 - protein, 378 aa, unidentified
MHSMKHQDTLIIGGVDSHADTHHAAALDQRGALLATKGFPTTTPGYRELLGWLSAFGEVDVVAVESTGSYAAALVRYLREHGVRVLEVNQPHAHTRRRRGKSDPIDAEMAARFALSGKATTVPKQTDGIVESIRLLRTARHSAVKSRTAALVQLGALIISAPQELRDQLAYRKTIRGKASLCRRLRPSTDELCRPAHAAKFALRSIAQRIDALDDEIAVLDRQLEQLVRLAAPRTIGLLGVSTGHAGRLLVTAGENIDRLRGEGAFAALCGASPVPASSGKTTRHRLNHGGDRQANRTLHLIVVCRLRYCERTRAYAKRRTAEGKTKPEIMRCLKRYIARETYHTLLADLTMLQPPTPPATTTITCDAGPIGITRHRT

SEQ ID NO: 175069 - protein, 360 aa, unidentified
MFTERTSVGLDVHARSVAAAAIDGVTGKLVQAKLTPSHDHIRSWLTGVPGPVAVAYEAGPTGFGLYRALTAAGVRCVVVAPSKLQRPSGDRVKTDAKDAVHLARLLRLDEITPVAVPSVDQEAARDLVRAREDCRGDLMRARHRLSKLLLRHGIVYSGGQAWTGAHDAWLRRQRFSSPVVRMAFESDYDAVLTVKARRDRLDKTIAIMAADSEFTGLVRRLGCLRGVSTLTGFALAVELGDWHRFTGRGIGSFVGLVPSESSSGASRVQGAITKTGNTHARRLLVEAAWHHRPRYAPGKTLRDSWELAPPAARARGDAGNRRLHDRWIGFNLRRKRAVIANVAVARELAGWCWSLAVMDD

SEQ ID NO: 175070 - protein, 365 aa, unidentified
MKHVTTYVGIDAHKKDLFVAMLIGHEATPVTWTVPNEPNAVRRLVRRLERDAPGPVRACYEAGPCGYVLQRQITTPRVSCQVIAPALVPRKPGERIKTNRRDARKLAELLRANVLTEVRPPTPEEEAVRDLCRARDDAREDLQRCRHRLGKFLLRRGLHYNGRNWTRAHRQWIDSLAWTHAAERVLLEDYQLAIDHVEARLIELDRRLVEIAEAAPYREPVGWLRCFRGIDTLTAMLLLAELHDFRRFKSPRALMAYLGLVPGEDSSGEKHRRGRITRTGNALVRRLLIETAWHYQHRPSVGAALLRRRKGQPGRVIAIADKAQQRLCRRFRRMAEQHKAAPKIAVAVARELAGFLWAALQAPAA

SEQ ID NO: 175071 - protein, 451 aa, unidentified
MAGTKKSRSKRDICPTHLNAAAIDIGATMHVAAVGPDQASEPVRSFGTFTGDLHRLADWFTKCGVRTVAMESTGVYWIPVFEILDQRGFEVIVVNARDAKHVPGRKTDISDAQWLQRLHEYGLLRASFRLKGEVAVMRAYLRQRERLLDYAASHIQHMQKALTQMNVQLHHVVADITGVTGMAIIRAIVAGERDPMVLASYRDPRCHASAETIRQALVGNDREEHIFALTQALELYDVYQAKVALCDVRIEAVLKRLRKASSTPVGKPPTVRTTQKQSNDPAFDVRAALYGLLGCDVTQIHGLGPYLTLKLVGECGTNLSAWPSAKHFTSWLCLSPSNKISGGKVLSSRTRRSGSRAAALLRLAAVAVGRTQTALGAFYRRLSARVGKAKAVTATARKIAVLFYNTLRHGMEYSDPGASHYEQNYRRRVLTNLERRAKSFGYTLQPAPTSG

SEQ ID NO: 175072 - protein, 313 aa, unidentified
MIITSRCVGIDVSKHHLDIFDEGIGVSERVANAPHAITELVARWRCDALVVFEATGVYDLELRAALRAADIRFARINPARARDFARASGQLAKTDPIDARMLAAFARAMRPATEQVSTPARNALARLAKRRDQLVLMRAQEKNRRSEAGDRAMVERICRLIEVLDHEIAEIEADISALIKAEPEISDDAQLMRSLPGVGPVACMQLIAQMPELGHVGPKQAAALAGLAPFNVDSGAYRGKRKIGGGRKRVRNALYMAALNAVRRADRFKAFYAKLRQAGKPAKLALMAVARKLLTILNAIMRDRKAYIPAQQS

SEQ ID NO: 175073 - protein, 362 aa, unidentified
MWIIGCDLHARQQTLAILDTATGEVVNETLAHEGDGVREFYSTLPGPVRVGIEATGSMKWFLNLMEELGIDCQVGHPATIRAAEPRRQKHDQRDAELLLKLLVENRFPSIWQPSKELLDLRALLLHRHQWVRLRTRIQNALQAIALANGLRRGSSLWSQRGQQAIRSLPLATHTAHRRSELQAMYERFEAEIEELNERVLEQANRRTTAGLLMTHPGVGPITALATDVFLGDPKRFRDGKALASYIGIIPRENSSGGRQRLGGLTKQGNPLLRFLWCEAAVHAVRRDPELRQFYRRKLVQKGLGKARVAAARKLGIRLWIMLRDQIDYQEFCRRGQKQQRSGDACAGMPGMRYGAKSHRLID

SEQ ID NO: 175074 - protein, 423 aa, unidentified
MEEIFGEEEEAELVARVAALDIGKATLTACVRVPHENKPGRRRQEVRTFATLTRSLLELRDWLICQGVSLCVMEATSTYWKPPFYLLEDAIGCWVVNARDVKNVPGRPKTDRLDAVWLAKLAERGMLRPSFIPPPWQRELRDLCRYRRTLIQERTREKQRAEKLLEDTQIKLSSVISDIFGKSGRDMLEALIAGQRDPHALAQMARGSMRGKISVLQEALTGHFRDHHGYLLRMMLDRTDALTAQIEALTGRIDEAIAPFAHQVAQLDEIPGVGKTGAQELLAEIGTDMARFPTAGHLVSWAKYAPKARQSAGKSKPATTGKGNPWLAGTLGEAGMGAARTKTFLGSRYHRLARRRGKPRALVAVGNSILVIAWHLLADADARFTDLGPDWHDRLAPLRRKRQLVAELERLSGKKVVLQEAAA

SEQ ID NO: 175075 - protein, 390 aa, unidentified
MFEHFAGIDMAKDTFSFCVTDLNGKEVEKGCCNVDKEGFDKFFSVISSFSNIAVAVESTGTYHITLLSALVSANFTTYLITPILVKKFAQSCSLRTIKTDRIDAKIISVFIARNHSTLIPAVSTGNEGLRELARLREGIAGDVGSTKTKLKQLLTTTFPELVGNFNIFTASMLVLIEAFPSANAFVNASETEIETPLKTKGKGRKISVSVKQFQELASKSVGKSDPMIEKAVLHQIRKIRFLTDELKKVTDELVEAAHICSGKEIEILTSIPGIGDTTAAQFIAEIGNIDKFDSVKQLTAYAGTDPGINQSGMSLKRKKISKKGNASIRRVGFLMTVHVIRFSDVFNKYYFKKRNEGMAKKKAIIATFNKLLRCMFAMLKNHSHFLFVYS

SEQ ID NO: 175076 - protein, 407 aa, unidentified
MEVLHQRSAGLDVHKDLVVACVRLVEADRVRRESKRFGTTTRELLRLLEWLQSYGATHVGMESTGVYWKPVWHVLEGHFTLVLGNAQRMRNVPGRKSDQNDASWIADLVAHGLIRSSLVPEAPMQELRELTRTRKQLVRERAQHVQRIQKVLEDANVKLSSVLSDILGLSGRAILEALAAGKTDAQQLAALAHPSVKAPRSEIAEALEGRVGEHHRFMLQLHLDQIDALEAAVGRVEGRIEKALSPFRAEIERLCTIPGFSTTVAAAFLAETGGKMEAFATDGHLAAWAGLSPQQNETGGKRKNTRTRPQRWLKPMMVQAAHAAVKKKDSHLRAKYYRIRARRGSKKAILAVAATLARIAYHLLTNQTEYQDLGSDYFDRRDRERATRRLIQRLERLGYKVEVQAAA

SEQ ID NO: 175077 - protein, 411 aa, unidentified
MNNTLFVGIDISKRSNVATFMNCEGKVVGRLTFSNNGSGADRLVAKILSYYEKEDFEAIRIGMENTSVYSKNLVWFLYEHEALNEHKLSIIPLNAIMVANYKKSFLDMDKDDITDSFAIADFIRIRPGLLPFKLDDRQEALKIMTRSRYNYVQALSRMKSQFLTRLFLSFSEMEAGKPFYSIFSKTSLSLLEEEFTLDELAEKPIPELVEFLQEKGGGKFQNPEEIAKVLKKAASSSYRVPTMVRESLNRTMASDMEIMRILENEIHNCDKNIEKLMKSVPAILVSIPGIGPVLAAGIMSEIGDISRFQKQESLGKMAGFKWKRNQSGKKESEDKAAVLSGNKKLRYYLVEAANRVRIHDPVFEAYYRKKYAESKTHAHKRALILTARKLVRVIFYLLKENKLYKPDVGIS

SEQ ID NO: 175078 - protein, 393 aa, unidentified
MKRQPVQPAGVPTFIGIDYHKAYSVYCVLDAQGSNLERGGIDHARPEDFRTLVRRRAGCHVVFEASMNWHWLFEILEREVPSERIVLANPFKTRIIAEAQIKTDKVDARILADLLRGRLVSSVHIAGRETRQIREVLRQRCFFVRQRTMLRNRIHRLLGGQHEVKLPQCSDLFGHKGVGFWERLELPAPVRLLLIQQLTLLKELAVRIREDEKTLEGLLEQSLALQHVRSLPGMGPILAAVVVSEIDNIERFRSAQKLCGYAGLCPSTSSSGGKTFQGKLLPHCNKWLRWAFVEAAWVAIGCSAYFGDFYKRKRALGKKPNLAILAPARLMARITWQLLTQCRNYTSVAETQYLRSQPAERIACAVSLAKEVQKSLKDPSDFPRRRLSPVAPK

SEQ ID NO: 175079 - protein, 369 aa, unidentified
MQNTMFVGLDVHKATISVAIAHGARDGEVRHWGTLPNRADHVRRLAEKFGSDGRQLYFCYEAGPCGYGLHRQLTELGHDCMVVAPSLIPVKAGDRVKTDRRDALMLAKLHRAGELTAVWVPDRAHEAMRDLIRARATAVSVAGKARQHLQGFLLRHGRIHPGKKGWTKAYRRWLSTVRFEHSAQQIVLQDYVHAVTDAEARIEWLTKQIADLLPSWSLATVVEALQAMRGVAFIVAVTVVAEVGDFSRFDNPRQLMAYLGLTPSEHSTGKTIRRGGITKAGSGLARRVLIEGAWSYRMQARVGRKLVDRIEALPATVRDIAWKGQLRLCQRYRHMMAAGKPKVVATTAIAREMVGFIWAIARAVTPVSA

SEQ ID NO: 175080 - protein, 411 aa, unidentified
MDRLVERCAGLDVHKDSVTATVRVPGSGRERLQETRTFSATTRGLLTLADWLASYGVTLVGMESTGVYWKPVFYLLEERFECWLLNARHLRNVPGRKTDVQDSAWICQLLEHGLVRASFVPPRPIRELRDLTRYRKTQIEERSREVQRLDKVMQDAGIKLSSVASKTLGVSVRRMLEALIAGTHDPELLAELACGRLRAKLPALREALAGRFRSEHHGLLVAQILAHIDYLDETIATLSARIEEVLAPFSRQRELLETIPGIGRTAAQVLIAELGVDMSVFPTSAHLASWAGQCPGNHQSAGKRRSGRPRHGSKWLQATLTESAKAAARTKGSYLSAQYTRLRGRRGPSKATGALRHSILVAAYHILDQNVPYHELGADYFDQRSSEQRTKRLVRQLEQLGHNVTLEPLVA

SEQ ID NO: 175081 - protein, 417 aa, unidentified
MDTEKEIVCGADIHRDFLVATMISRNGLKLQEQFDMDEDGLLAFRSWLLGHKCQRVAVESTGNYWYPIFTILEGHVEFILANAFQIRNIEGKKTDRLDSERIAIYCLNNLIKPSRIYPKDYRELRSITRSREALVNLRSKLKNQIHQSLAVCCIKLSSVISDSFGKSGRYIIERLLEGKTIEQIISGIPSKQVKKKADELRKAIRNGLDPVQILLIKTNLDAIDYISEKIQLLDAEIAIKVKPFEEDLNIILSVPGIGFISAATILAEMGDYRDFQNADKLAMYFGIVPAVYQSAGKLRTGKITKRGSKHMRRILVQVAKAISKMKKNSKLKRFFLRVFTRSGKKNVAAIALARKVLCIIYHLLVKREDYQEPEIEKNKPKIPSRASPVGMMDIDEMIKTISQAGYLVKKGFQEGCG

SEQ ID NO: 175082 - protein, 343 aa, unidentified
MQTVTTIGLDIAKSVFQVHGVDGGGQVVLRRQLKRRYVLAFFEKLPPCLVGIEACASSHHWSRELQALGHTVRLMPPAYVKPYVKRHKNDAIDAEAICEAATRPNMRFVATKTREQQSCLTLHRTRHLFIRQQTSVINAIRAHLAEFGIVAPVGRNGVEELLTIAADASDKRLPDVARACIVALGAQLRALKAQILQFDRLIMAWHRSNQASRRLDDIPGVGPALATALVATVADPRAFRSGRNFSAWIGIVPKQHSSGGKDRLGSISKRGDRYLRGLFVAGALAVIRYAKIHGTKRRPWLTALLARRPTKVAAIALANKIARMAWAMMAKGEHYKEPVALAA

SEQ ID NO: 175083 - protein, 412 aa, unidentified
MELLRQAVPAAALVVAVDPGKVSNRVWLTSGERGLLGRPVSLPVLREGIDTLAELMAASGVAGAPTIAVEATGRLHQAWVAELERRWPGAVRLFAPSETQAARAQLGSRRSKTDDRDCAALVWLARQGAGRPAAAHGTVDALLGAVRHRRGLVADRRVLQQRLHDQLQALCPGLSAPAGHGRALAIEGPSGQAVLGCAAAFAGRAPTVRSLLARASGRVTQATARFWVDRWRRLLPPPADAELRAERLGRDLARHQLLQADIAAVEGQLTTLLGATDGQVLTSLPGVAAVRAAAFAAHSLPIQRFPTPEQLYAATGLAPAAWQSASLKRRGRISRQGLPEHRDALMGIAWGLSQYSPSFRERDTELRARGMRPIQARVALARHACRLCHALLTTQQPFDEARYRLARHSRGR

SEQ ID NO: 175084 - protein, 355 aa, unidentified
MIIIGADYHPGFQQIAFVDTDTGEFQERPLQHREEAEKFYRELAAQGRKVRVGMEASGHARWFERLLAELNFELWIGDAAEIQSKRVRKPKTDREDARLLLRLLLEDRFPRIWVPSWENRDLRQLLWHRHRMVQARTRIMNQLQAVALNEGLRAKKKLWGESGRQQLESFRLAPWASRRRQDLLALLDRLNPTIAELNQAVEQEVERCPAAQRLMTHPGVGPLTALAFVLIIGEAERFGCGKQIASYVGLVPLEKSSGNRRRLGHITKQGNSMLRFLLVEAAQVTARSIPEWRSKYFHLVMRRGRKIAKVAMARRLAVGLYWMMRKQWDYEQLKKFGSHAGQPGSGDGVYQTPRN

SEQ ID NO: 175085 - protein, 352 aa, unidentified
MQHFIGCDVHTRNQVVAWIEEETGEIKKRRLEHEGKEVKEFYAQFPLGTVVGIEATFPAYWFERLMGELGHELWVGDAARIRASEVRYQKTDSRDAELLLDLLRTGRFPRIWVPSLRERDLRQLLVHRMKQVRARTQVKNQLHALAISQGVCRKGKLWSVKGRKELESLALLPWAARRRKELLESLDRLDEQVRELDRAVEEAGREREEVALLRTHPGVGMVVGLAFVLTVGPIKRFSNSRKLVSYWGLNPRENSSGARQRLGSISKQGNTMMRWLLVEAAQTAARLDPQLRRIYQRLKKQKTSGVAKVAVARRLAVRLFWMLRTRNNYAQLVHMSGSPSSAVVPPTAEPKL

SEQ ID NO: 175086 - protein, 452 aa, unidentified
MPAGKDITMHYQKVLKMPESIPYLSVGFDVGADFTWMSIMLPNGILIGKPFKIIHSDPQSRELAISKIKEAQEMYSLESRCFLESTGIYHIPLLCFLRDKGFDCAVINPIITKNSTNMNVRKLHNDKFDSKKAAKVGLDASLKASIVPDDAIIDLRNLVRDYYYFKDLQSAIVLKLHAELKVSFPAYLNVFSKVTTQTSLKLLEAYPLAADMLAAPKDELVEIIRSTARFGETYALARYDAICTAAKDAAVFGRALPSNALRIRLYIKMYREYQAHLDSILEELHQAVGKLEGTPDYDRISFIQTLHGVGFLSAVVLIAEMGSFDLFSSPKKLYAYFGLDPGVNDSGKFHGDRVHMSKRGSSLARRILHMVAINNLKVDKATKTPVNPVIYDYYTRKCASKKKSVAVGAVMHKICNIIFAMLRDNKPFELITPEEHRERYAAEHPESVNTAA

SEQ ID NO: 175087 - protein, 408 aa, unidentified
MKLFVGIDVSSQKLDVCFMDSEDHILHEATLLNDITGASKIKEIILKLNEKLEYDVIKVGMESTSVYSFHPATFLAEDAELKNLGTEVIVQNPKAIARFKGLFEEDKTDTIDARRIADFLRLGLHGTTVIKEEKYIALQRLTRSRLQLIEQMTECKQHFLENLYYKCNTLTRDVETSVFGATMMDLLTESLSFGEIAEMEVEDLAVILQEKGRGRFGNPAKLAKAINKAIRDSYRLGKVLEGSVDVVLGTYAMMIKTLKQQIKELDKAIEALLETIPESQCLLSVPGIGPVFAAGILAEIGQIERFEDQAKLAKYGGLYWKKKQSGSWESERTSLTRTGNHYLRYYLVEAANSVKNHEPVYKEYYYKKYDEVPKHKHKRALVLTARKFVRLVDVLLRNHQLYTPERSV

SEQ ID NO: 175088 - protein, 347 aa, unidentified
MHSTISKEPISTLAIDLAKSSFHLHGADTSGHQVVSKPVSRQKLFAYVAQLPPCTVVMEACGGANYFARQFSEQGHSVKLIAPQFVKPFVKSNKSDAADAQAICEAAQRPTMRYVQHKSINQQDIQSIHRARSLVKSQRVALSNQIRGLLSEYGIVFPVGLSVLRKQIVELLSGTDRLTPLFIEMLTHHYGTLCHLDAEIEFFDRKIDHIARADERCRRLMTIPGIGPIAATALLVALGDGSSFASGREAAAYLGLVPRQHSTGGRSNLLGISKRGDKYLRSLLIHGGRTVVLHAAKHDDCRSQWITEVAQRRNVNIASVAVANKNVRTAWALLTRNSEYKTTPLAA

SEQ ID NO: 175089 - protein, 353 aa, unidentified
MDKYIGLDMDCKKTVGYAIVPGQSESSATFGPDLPSIRRYLHQQAAGGYRVHAVFEISGQAGFLYDALLDDVASLHVANPTKMTWIYRTAKKNDRIDARKMAVLLSIGELPEVYMPSREVRQWRQTILHRQKIVQKVGQVKNRLRAVLKSEGYRKPAHSGGWWKCVNRVWMQQLCDDGANIGSLWRLQVQNLLDELSLLEKQRDRITRYLDGYLDKQSAAKLLMSIPGVGPRTAEGVLAYTDDIHRFGNYKQYCAYFGVTPKLDESGSFRRLGHISKQGPAVVRWLLCESGWKVVRHCPGLRAFYERVMAGQANRKKIAIIALTRKLLCIMRAMLMTGELFNEKLVFDVLKAA

SEQ ID NO: 175090 - protein, 359 aa, unidentified
MYYSGIDLHRDTCTITTLDDSGTKVKAKNVPTDPTQIQQYFADLPGDHRAVVECTTGWYWLSDLCQAIGIDLILAHAKHLKAIAYAKVKTDTVDALTMAQVLRLGFIPQAHQVSRERRGLRDLLRHRLRLVDTRRRLQTQAQAVLLKENHGPVAGPLLREVPALEAHLDTLLDPSTRLQLETVAGQLQQLDTSLRTIRSQLRTDLIQVPDVQYLLTIPGVGLLTALTIFLEVDGIQRFPTVGQFFSYARLVPGAHNSGGKHHHVRRKDGNRYRTMACGQAAPRARQYYPVIRGWFERKQRRKGFAIANTLVMKELARCAYYVLKKHEPFHGKWKGQPVTHQKHRHWPQPVNSPNSLPLQ

SEQ ID NO: 175091 - protein, 345 aa, unidentified
MKLSRVGIDLAKNVFQVHGVNEQGELVWKRSLKRATWLGVFFKTVEPGCEVAMEACTGAHHWARELQARGYQVKLIPPQFVKPFVKSQKNDANDAEAISEAMIRPAMHYVAIKTVAQQDIQAVHRVRSELMSHRTAKANQIRGLVAEYGLVAPQQLGPLRAAIPCWLEDAENGLTDRFRGLLQGLWEDLINLDQRVKALDAEVATIASTHPDAKRLQQLRGVGPLVATALVAKFGDASHFKQGRQAAASVGLTPRHHGTGGKNRIFGITKHGDPYLRSILIHGARAVVSQAKRRDDRLSRWTTELAQRSHMNVAAVALANKTVRMAWAMLRNGTDYDPELAVAEA

SEQ ID NO: 175092 - protein, 355 aa, unidentified
MTSIKYIGMDVHTESTSIAVRNSSGKIVMECVIETKASTLLQFLDGLRGDLRVVFEEGTWATWLYDLLKPHVTEVLVCNTRKNAVRKGSKSDRIDARKLSEQLYMNNVKSVYHGEHGLRMMKELARSYLTIIKDLTRVMNRLKALYRSWGIPCAGKEVYARRYRAEWLAKISEAAVRRRAEHYYQQLDALLPLRQEARRDLLIESRKHKIWKLLRLIPAIGPIRAAILIAVMQTPHRFRTKRNLWTYSGLGLETYDSAEYRAVQGQLERSRKQATVRGLNKDYNHDLKDIFKGAAMRASTAPGPLRDFYENLLAKGRKPTMARLTLARKIAAITLIVWKKEVRFDANYLKPQQAA

SEQ ID NO: 175093 - protein, 413 aa, unidentified
MDNETIDFEQVVAKGCGLDVHKETVVATVSGIGIKRETRTFSTFTRSLKELKEWILSLGITHVAMESTGIYWKPVFNILEGSGLTILIVNARHIKYVPGHKTDKKDSAWISKLLLAGLLKGSFVPPVEIRQLRDMTRYRRKLEGAITAEKNRMIKMLEDSNMKLSSVLSKVHGVSGTRIIDALLEGQTDPVYLASLCHGKVKAEQKDIILALEGNLTDHHKFMIRIIRQDIRQTEALIKELDAEIEKQLLPYAQEIALLSQIPGVGEQTAGELISEIGVDMEVFATDKHISSWAGVSPGINESAGKKKSGRTTHGSKQVKAILTETAWAASRTKNTFLSSKYKKMVGRRGKKRTIVAVAHAILVIAYHLIKEKKDFVELGANYMDEKKREAQLKYYQKRIEELGAEIPENKSA

SEQ ID NO: 175094 - protein, 342 aa, unidentified
MSYYVGLDVSLKETHLCVLAPGGRIVARGCVATDPLALSIWLGEHAPGASVVVLETGGLSSWLAGELVALGVPAVIVDARLAKKALSGRANKSDANDAEGLAWLALTGWYRRVAVKSEAARIRRSLLVARSQLCGQRRSLDNVVRALFRGFGVKFGSVGKAAFEARARLLLEDRPELGDAVLALLAARRALLAELAGLEKRIKAVAQDSEVCRRLMTVPGVGPMTALAFTAAIDAPGRFEDSYDVGAYLGLTPRLFQSGEVAYNGRISKWGDALARHMLYEAANSLMVRVKAWSPPKAWAARLARRIGAKKARVALARKLAVILHRIWRDGTVFQWTKEAAA

SEQ ID NO: 175095 - protein, 408 aa, unidentified
MDILCKCCCGLDVHKKTITGCIITPQGKDIATFGTMTKDLRALLAWIKDHGCTHVAMESTGVYWIPVYNLLENEALTVIVANANHIKNVPGRKTDVSDAEWIADLLRHGLLKGSFIPPRGQRELRELTRYRRSLIAEHTREVNRIQKVLEGCNLKLSSVVSRITGTTASHILKALIQGEVDPEVLANFAKGRLVRKKRELMEALDGFIGPHQKKLLALQIDHLEYLEKQIKALDQEVAERLRPFEDDLARLDTIPGVGRRNAEDILAEIGPNMDPFPSAEHLSSWAGISPGNHQSAGKWKSGRTTKGNRYLRVTLCESAQAIGRMKPNFLSHQYHRIAARRGKKRAAIAVGHSILVICYHLLKRKTEYVELGANFYDERKEDSIVKHYLKRLESLGYTVSLKKVEACP

SEQ ID NO: 175096 - protein, 285 aa, unidentified
MKKTYFCGVDVSNDTLDLCFLTNNDNIKPKYEKLPNNKEVLKAYFNSFVNDDILVVLEYTNNYHIALQEALSELKIKYSVLNPNKTSHFLKHLTHIKSDLTDSYGLALYCKMFKSDINPSKYNKEYMLIKSYNTTSELLSKITTQLKNLKKSQSLTYDKNIEVIVKDLIKHIDSIKEKLNNIAFELLKQYIPQTEQIIKDSKGIGKDLALKLFPQLYFNRFKNAKEFISFIGLSPRIYESGTSVKKSKKINKIGSNTIRKALFMSAMSCIRFNDKFKTRYNRIVL

SEQ ID NO: 175097 - protein, 278 aa, unidentified
MSEATQLKRFSQSPDPDALYAHLVRNYPEADYHSVYEAGFCGFWIHYRLVGLGIHNIVVNPADVPTTTSEKLRKTDAVDSAKLARSLRSGELKGIYVPGSESLETRSLIRLRDSITKDQTRLKNRIKSHLRYLGIEIPEEFSGPGRCWNRRFVVWLKGAETGTAYGRQTLDFLVRQYEALRGQRLEMLRAVRALSRTERFEKPLENLMTVPGIGQLTGMSLLSEIDDIRRFKSADQLAAFIGMIPMCHSSGEREGVGDITVRRSGGSGPSLSKPHGWR

SEQ ID NO: 175098 - protein, 349 aa, unidentified
MTLYIGVDFHPHQQTLSWCDSETGETQTRDLPGDPETVRNFYSSLPEPAIVGIEASARARWFENMLFETGHKLFVGNPVLIRKRATSRHKSDRRDAELILQLLLREEFPSIWRRPPESESVLDMLRLRQSLVRQRTGIYNRLQALAHDVGLPKGRIKTKSFQKLLVGVELDEVASIRRKHLFSLVDKLDEQISELSAWLEKIAARDSSVQLLLSQKGVGYLTALATVHTLGDVSRFPRLSKQIVSFVGLDPVEKSSAGTTRFGSISKAGSRLLRHHLGLAAQIACRSDAKLKSFYKRLAKKKPKPVAKVAIARKLLVKLAIMLRDHITADEFDQRGRTVGNARLTTDLK

SEQ ID NO: 175099 - protein, 393 aa, unidentified
MHNCLAIDVAKGKSMVTLVSSCGEVLIDPYEVNHSINDFSNLLNRINKFKLDNISVIMESTGVYHRPIERFFLENNFKVFVINPIYGKMKKRNLRKTKTDKEDCFNLVNLFMSNTFKEYIKPNQLYLDLNALSRQYFALDELCVNIKNRYKNLLYLCFPEYEDIFKGNTIYSSTALEFIEVYPHADIISNTRIDKLQNFFKKREYRTWKYKPIKIKELALKSYPSVNMNDELVSNLSQMARLVNEYQKAINIIKYKITFLAKKSKYFEPINSIYGIGEFTTSIIIAELGDINRFNNIKELTAYCGLDPSIKQSGKSVNVHGPISKSGNKYMRKILYIACSNIVRLTAISKQENDIEIYYRKKRNEGKHHYASIVACTTKLLRKILALCKQLNN

SEQ ID NO: 175100 - protein, 409 aa, unidentified
MTDLSYQIYVGVDWGTEEHRVVILDAERRVLHDRRVRQEAMALETFATWLSDLVGGRVDTVAVALETPRGALVETLLARGFHVFALNPKQLDRFRDRFTVAGAKDDRRDAHVLGDALATDRPAFRRLAPEDPRLIELRELSRLDDDLVAELGRLSNRLREQLSRFFPQPLQLCPAADEPWVWALLERVPTPAAARALPRAAVGHLLTRYRIRRLSADEVVTVLRTPALPVAPGTVNAAQRHLTVLLPRLRLVHTQRAACEARLEELLEQLADTQEHRDVAILRSLPGVGRVVTATMLAEAARLLAARDYHGLRAHSGVAPITKQSGKRKLVVMRYACNPRLRAAAHYWGQSAVCHDPRSQAQYARLRAAGHSHGRAVRGVVDRLLRLLVAMLTTQTLYDPARGVPAMAS

SEQ ID NO: 175101 - protein, 318 aa, unidentified
MNTNTLQNINVGVDTGKSQLDIYIRPLDIYFTVPNTDKGISDAIKTIKKHKPQRVVIEATGRLEMPFILACDKAKLPYVVANPLRIKRFAEAIGQRAKNDRLDAALIAHYAERVQPELTKLKSENIRLMSDLVTRRNQLLTMQTMERNRLQILPKNISSTITPVLTALKNQLEKVEAKIAKLIESSPEYQAKSTILQSMPGVGKVLAASLISNVPELGFITNKQASSLIGVAPITRESGRFKGKRMIKGGRPQVRTVMYMAMMSAIQCNPVFKATYERLLAAGKPKKVAIVACMRKMVVILNSMIRDGVMWDKGSAKN

SEQ ID NO: 175102 - protein, 341 aa, unidentified
MMGNVTTIGLDIAKSVFQIHGVDAASEVVVRRKLTRGRVMAFFESLPRCLVGIEACSSSHYWARELIARGHDVRLLPAQYVKPYLKRQKNDAADAEAICEAVTRPTMRFVPVKSPEQQSVMMLHRVRLMLNRQRTQISNALRAHLSEFGIVAPIGRNGIEQLLVVVNDENETRIPADARLCLRMLEAQLRVVKKQILENDRRVRANARETELGRRLMEIPGVGPLLASAFVATVADAHAFKSGRCLSAWIGLVPKQNSSGGKERLGSISKAGNRYLRQLLVVGAMAVIRYAERNGTRRPWLVQLMARRTAKVAAVALANKTARMVWALMTNSERYREPVIA

SEQ ID NO: 175103 - protein, 412 aa, unidentified
MDNTAYYVAGIDVHKRMLAVVVANARDRELQFEGRRFGTTISELQKLSTWLQERAVQEVVMESTAQYWKPVWFVLEGQFQLWLAQARSNRGPRGRKTDYRDAKRSVSRLLSDDLILSYVPDAEQRGWRTLTRTKYQLRRDRVRLQSQLESLLEECQIKLSSVVSDLLGASGQRILCAIAAGETDPARLKALGDKRLRATDEELRDALNGQPQPLHRRLLKLYLERLNLIEGQIAELESMIAEAMKAHQDAVVRLSQLPGLGVDSAQQIIAEIGPRAESFSSAGQLASWVGVCPGLQESAGESSSNRSAKGNRAMRRLLNQLAHAAVRKRDCYLQIVFKRLSPRLGYAKAVWAIAHRLCRLIWKVLHEAVQYVEYGPAVSALTLKRRKQRLVTQLAKLGYSVQLTPILARAGS

SEQ ID NO: 175104 - protein, 371 aa, unidentified
MKSDSTTKFIGMDVHSKTISVAIADEGRKGEVRHYGTIENTFEAIDKVIKSLTATGDELRFIYEAGPCGFALYRYLTGNGFTCIITSPAMIPKRSSVRIKNDRRDALKLARLYRAGELTGIYVPEPEDEAIRDLGRARDDARVAERKAKQRLNSFLIRNNLIYSGKTKWNRTYFNWLGSVGMKYPAQKVALQEYIEAVNECTGRVARLREQIGLAVEEWRMAPMVKALQALRGVSLICATVTVAELGDLSRFNKPKELMAYLGLVPSEHSSGESIRRGGITKTGNSHARRVLVEGAWTYKHHARVTYPLIKRQRELPKSICQISWKAQLRLCARYRKMVARKKPNNVVVIAIARELAAFMWAIAQEVRTAA

SEQ ID NO: 175105 - protein, 419 aa, unidentified
MSNRLGQRLATIPSGTLFAGVDLSLDSLVVVVLDANGQRLDRFRTTNDVTGYAYLRERLQRLVTKRYAAGVLVGMEPTNYYWKQVGYDLEQHQVPFRLVNALTVKRHREGDQLDRAKDDWRDAFTIADLLRTGKFTETHLPHGAYAELQTGYTAYLRLHRDRGRQVTLLRNTVRQLFPEFEQVFKDVSGLTATAVIAVGLNPHPISRQSEAEFVTTVRCAFAGERLALRQLRELYALAPHSQGFTEATTALQLMAQHQAETIRLLDTQAEQLQTPLLSLFHTLPEAPYLLSIQGLQAADGLALVATAGDLAQYPSGAALIKLAGTAPTPNTSGRKTYSLTPFSHQGRSDLRTVLYFITLRLITQNDALHYHYQRLTTRTPRPLPKMQALGACMNKLLWYAWHVVKHREMYDPDRWRLLA

SEQ ID NO: 175106 - protein, 358 aa, unidentified
MAMKTAIHSDEEKPVVKITRVGVDIAKNVFHVHAVDRDGRCVWQAKLKREGWVEAVATRMPSGVEIAMEACGAAHHWGREFQKRGFIVKLIAAQFVKPFVKSNKNDRVDAEAIAEAMARPSMRFVAVKSAEQQDLQAIHRIRTELVKQRTAKANQIRGLVGEYGIVAPVGIAQLRRAIPIWLDDGSNGLSAMFRALLRELAQDLMALDDRVDAQDSKVAVHVRQCPAAQRLMKLRGVGPLSATALVVALGEGTSYTRGRDFAASLGLVPRQHSTGGRERLLGITKRGDPYLRKLLVHGARAMIRHSKSRDDELSRWVNALVARKHANVATVALANKTARMAWAMTHGGVEYDPALAAH

SEQ ID NO: 175107 - protein, 339 aa, unidentified
MQVTTVGLDLAKTIFHVHGVTEAGEVAFNRPLRRSQVLAFFDRLAPCLVGVEACASSHFWARELSKLGHTVRLMPPMYVKPYVKRGKSDAVDAEAICEAVTRPTMRFVEIKSEEQQALLSLHRARDFVVRQRTQLINMLRSLAAEFGIAIARGVVRAIDFAKGIIEGRQADLPELAQEVLRVLSRQLVDLHNRLGWYEITMRIQARLSRQAQLLQTIPGVGPVTASAVAATIGSGHQFRSGREFAAWLGLTPRNHSSGGKERLGKITKMGDRYLRQLIVVGMTSRVRQVANHPDRADPWLADLLQRKPARLATVAMANKTARIMWAVLTRNEPYRPHTA

SEQ ID NO: 175108 - protein, 359 aa, unidentified
MSSIALERTDVIVGVDTHKDEHVAVVIDGLGGRLGEYYLSVTSSGYAELLAWAKTFGRVHVFGVEGTGSYGMGLARFLRRHAQTVIEVSRPPRAGQRRLDGKSDPIDAEHAARQVLAGQATATPKVSNGAVEAIRLTRIARNTAVKAHTQAIVTIKATLVTASDELRAKLEPLTDYKLMTACVGLDSDGDPSDPEVAMRHVLCSLARRWLDLHEEIKTHTKRLKKLTTATAPRLLDAFGIGPDIAGELLVAAGDNTDRIRSEAAFAKLCGVCPIPAGSGKTGGRHRLNRGGNRQANAALFRVVIVRMRWHAPTIAYVERRTTEGLSKKEIIRCLKRYVAREVYNLLPPPRGNEECLSPA

SEQ ID NO: 175109 - protein, 343 aa, unidentified
MQAVKTIGLDIAKSVFQVHGVDAEGQVAIRRKLKRRYVLAFFEKLPPCLIGMEACATSHHWSRELQALGHRVRLMPPAYVRPYVKRQKNDAADAEAICEAVTRANMRFVETKTAEQQSCLVLHRTRHLFIRQQTSLINAIRAHLAEFGIVAPVGRKGLEQLLAVVADARDQRIPATARACIAVLGAQLRALKTQILEFDRQIVLWHRSHETSKRLDEVPGVGPALATALVASIADPKAFRSGRDFSAWIGLVPKQHSSGGKDKLGSISKQGDRYLRSLFTAGALAVIRYAKIYGTQHRPWLTALLARRPTKVAAIALANKLARMVWAMMTRGERYKEPVALAA

SEQ ID NO: 175110 - protein, 353 aa, unidentified
MLAETVDAVIGTGTHRDTHEAVIADAPGKPIAVMRIGNDSAGFTRLLAAIAEVVPGPRVAVCIEGSRSYGIGLARALAAAGLLVLECEQPSRKQRRGKGKSDPIDAHLAVLAALRLDTGRLPVPRADGDREALRILLVARQEITEASTAQASRLRALLLAGDDADRRAARATLSGKALAALAGRDLPADAGREQAVRQAEIGRLAEALGQARRQLKDNQAQLLAIVDDIAPGLTSRYGVGPVSAAQAIVSFSHPGRCRSEAAYAALGGTSPIPASSGMTVRHRLNRGGDRALNRAIHAIALVRMRGCPRTRAYVARRTAEGKTTREIRRCLKRYIARELYRHLTRTMNPPVGP

SEQ ID NO: 175111 - protein, 445 aa, unidentified
METQTEFVPGERRCIGLDVHREFAQVAVWQGGLVWQAGRFSTTPEGVRAFAEQLGPADEVALEATGNTWAIATLLASQAGRVVVSNPVKTRAIAEAKVKTDKVDAEILAQLLAADYLPAVWRPDPATAALRRQVLRRAHIVRQRTRLKNQVHAILHRNLVPRCPAADLFGHKGRRWLAAQDLPLDERAAATALLRQLDFHAQELRLIDTDLGCVALDRPEVLRLMTVPGIDATVALSIVAAVGDFTRFRSPEKLVAYLGLNPRVRQSGGQPASYGRITKAGPSHARGMLVEAAWSTSKAAGPLRAFYQRVQARRGMQVAVVATARKLTVLCWHLIIKGEDYAYAQPSLVAHKRRKLELRAGAPSARGQKGKAAGYSLKAVRAAERDLIAQAERSYQVTVATWQPTRPTSRGSAARSGAARAGVDVAATNGARLSKPARGNAARQG

SEQ ID NO: 175112 - protein, 345 aa, unidentified
MKIVGCDLHTRYQQIAMLDLETGELVERRLEHENGEARAFYAGLEGRVRVGIEATGYTRWFERMLAELGHELWIGDAAQIRASMVRKQKTDARDAAHLLELLRSGRFPRLWRPTMAERDLRQLVWHRQKLVWMRNAIGNQLHALAMGEGVCRKKKLFTKKGRVELEALKLDFWASRRRQELLCLLDQMDASLKEFDQAVAEQAEQNPAAVLLMTHPGVGPVTSLAFVLTLGPVERFARSKQVVSYLGLNPREHSSGGRQRLGSISKQGNPMMRSLLVEAGHTAARLDPELRQDYQRLKLRRGGGVAKIAIARKLAVRMYWMLRDQVNYAQLVRTQGSPRATLVES

SEQ ID NO: 175113 - protein, 313 aa, unidentified
MSDNLPQTIGIDISKASLDCYAHPIGVERQFTNTAKGHKALIAWLRQWPVERIAYEATGTYHRALEAALADWPCVKLNPERARRFAQATGILAKTDRIDAMLLARMAATLQPPVRPARSAQQAQIAELINARDGLVRDRTALKNREKNLTIAFLKRQCRQRLEQIERHIEALDTEIANLIAADAALARRHEILTSIAGVGTLTANQLIATMPELGSLENKQAASLAGLAPVARQSGQWKGKSFIRGGRANVRQALYMPALVAARYNPDLKAKYQQLVTAGKPAKIAITAVMRKLVVTANAMLKADRCWTQSPA

SEQ ID NO: 175114 - protein, 383 aa, unidentified
MKSVCGLDVHKDSVYLCILSEFGELIEKVFGVLTYELEEMRDLMLHHHVVEVSMESTSVYWIPIWRVLFPHFKLNLANPYFIKQLPGRKSDVKDAQWIAECTMKELVRSSFVPPEIIQQLRQYDRRIFDLNEEIVRKLSKLDAVLQRCNIRLSNYVSNVDSKSYKAVVRAISQGITDPEELVKLIHGRIIKHHGMDVITASLKGVVSLAEIDMISQLRDELDMAEAHKEKCQARMLEICEREFPEELKRLQTIPGIKERAATSLIAEIGTDMNKFETANHLASWSGLKPRNDESNKKIKSRSITHGNVYLRKTIIECAWAASRTKDCFFSRFSYHQTQVRKKNKMKVLVAVARKMLIAVWHVLHDNTIYIDFTTDRKTSRIKG

SEQ ID NO: 175115 - protein, 342 aa, unidentified
MSIVGAFDVHRRQLTFDYLDTVSGEVQRGRVVPADRDHLRQWLARFGGQDEVHFALEGCTGWRYVVEELAAAGIIPHLAEPADTAALRGRKRHAKTDKTDSRHIRSHLAAGDLPECWIPPAHVLEARATVRLYKDLLDERGGWHQRIAATLFHQGVPAGPSMCTAQGRAAVAGMDLPAVAGRQAVETGLRQIDRLTGELDPLHRQLDMISRRQPGCRTLRVTQYGVGPVTAVAIWAELGDARRFASSNDVICHTGLDITVYSSDGRRSAGHLSRQGPQLLRWALYESAKCAARPSAPDHRYYTAARDRRTAGLATLSVARKLARRCYHTLRELGEEALAPAA

SEQ ID NO: 175116 - protein, 464 aa, unidentified
MAAVMIGVDPHKASHTAVAIGAAEEPLGELRVRACVAQAERLLAWAAAWPQRTWAVEGAGGLGHLLAQQLLAAGERVLDVPPKLGARVRLLAAGDVNKNDPNDARSVAVAALRSSGVREVRADDHAAVLKVRAERYRDLGRTRTQAACRLHAVLCGLIPGGVPKAITTARAGRVLKALRPASAVETARCELAADLLDDLRRIDARMRETRKKPAAAVAAAGTSLTGLFGVGAVIAAAVIGDVRDVSRFPGRDHFAACNGTAPIEVSSGPRKIYRLSRRGNRRLNHAIHMVAVTQIGHRHSEGRAYYDKKLAEGKTPKEALRALKRQVSNAIFACLQADARRAAARAEGPGGQPGNDSAACAAGSHPRHRLFGQATPGPGHHPTTAVGSPAAQGRTGHSPAAATPRPTPEVQAERPQPSEDERPGAPARRRPHSAASKARGQGSLRKPQRPKGTSQAAKNTGGDP

SEQ ID NO: 175117 - protein, 338 aa, unidentified
MAIVMGLDQHRAQITAEWIDTDTGEVSRSRISPAHRAGVRKFAERFRGQELEVGLEATTGWRFVAEELRRVGAVVHLAEPAETAARRGNKKRAKSDRADARHVRELLMIGRLPESWIAPDHLLDLRSRVRLRHTLSHQRGEWQQRIQAALYHHGCPQRRNLMTAEGLRWLKAQPLPAGAREQVTVALGMIDALDAQLAPLDTELRAYARRQLGCKALMKHFGVGELTAVTILAELGDVDRFSSSREAVRYAGLDITVHQSDQRRSPGHLSRQGPPALRWALFEAAQSAARQGSPDRDYFAQAAQRLGANRACLSVARKLLKRSYHALRELGEEALQPA

SEQ ID NO: 175118 - protein, 350 aa, unidentified
MERNGKKPAEVTTDLESKGQAFVGIDVSKDKHDVQTLSAAGKKRRKSIKNDAEGIDAFVAWLIENGLAGAHACMEATGRYGIPLALALHKAGFTVSVVNPARIKSFGATRGVRNKTDSADAALILEYCAAMAPAPWTPQRNEVSELQDLLLVRKSFVDDRTRWANRAGSGLSGKALAAARKQVSDVEAKIAEVNGLIAEHISQDDGDGGLDGKSRLLQTVPGVGPATAAVILAALPEKGLPDGKAAAAFAGLNPGRRESGTSVMGQSRISKMGNSTLRSALYLAALSAMRFNPGMKAFSERLEERGKTGKQRVCAVARKLIVLCNAMLRSGLPFDKDHVPDSSKKVGAGA

SEQ ID NO: 175119 - protein, 345 aa, unidentified
MELHTIGIDLGKTVFHLVGLNLCGEVVVRKKFSRTQVLRFTANVHVGLIGMEACGGAHFLGRALREQGHEVRLIPAQYVKPYVKTNKSDYIDAEAIAEAVARPTMRFVPIKSDDQLDLQSLHRVRERWVMRRTAVINQIRGLLLERGITLRKGRSYVGAALPGILEDADAKLSGALRMLLAQLKLELDHLDLRIDEADALIKKIARENEACQRLVAIPGIGPVTATALIAAIGNGGAFRKGREFAAWMGVVPREHSTGGKQKLLGISKRGNSYLRRLFVQGARAVLQQRTKQSSGLSVWLAQLISRTHRNVAAVALANKLARIAWAVLAKNEQYRPLVMADVAAA

SEQ ID NO: 175120 - protein, 340 aa, unidentified
MSYYAGIDVSLEESSVCAVDSSGKIVREGKVPSEPKALIAWFSSLGVEFARIGLEAGPTSQWLYAGMQQAGLAVELLETRHVRNAFKIMPVKTDRKDARGIAELIRLGWFRPVHCKSMEAQETRAMLTARKLVQKELLETESSLRGILRGFGLKVGKVSPLLFEGRIRELVAGHPSLEKIADALLSVRRTLWLEFNSFEKRLAAIARSDVRTRLLMTTPGVGIIVALTFASAIDDPSRFKSSKSVGPLFGMTPTRYQSGETDYSGRISKQGDGSVRTVLYEAAHTIICKPLKGCTALKSWAMRLAKRAGRKKATVALARKLAVIMHRMLADGTPFVNQPA

SEQ ID NO: 175121 - protein, 344 aa, unidentified
MNKLSRVGIDLAKNIFQLHGVDRHGKAVWRRRLTRDKWLKVLLGKVEPGCEIGMEACAGAHHWARQLQAKGFTVRLIAPQFVKPYVKSNKNDANDAEAVCEAMSRPSMRFVAIKTVGQQDIQAIHRVRSELIGQRTSKANQLRGLVAEYGLVAPQQLARLRAAVPVWLEDAENGLTSRFRELLNGLWNDLKTLDRRVAELDREIDLIAQSDPVAKRLQQLRGVGPMVATALVATVGNAEQFASGRQMAASLGLTPKQHSSGGKDRLLGISKRGDAHLRSILIHGARSVIRTAKLKDDRLSQWVTSLAERRHPNVAAVALANKTARIAWAMLRHGTNYEPDYIAA

SEQ ID NO: 175122 - protein, 352 aa, unidentified
MNPKRKDVIKSEELFVGIDIHKRTWHVTIRTDEIVLFSGSIPGIWEALRRLLNRYKAQRIYAVYEAGYFGFWLHDHLTEYGVDCLVTPPSLVPQEYGNRVKTDRRDSRKLARLLAKGLLKRIWVPSAEERFHRQVIRRRRQLVRDRVRIQNRIKAELRFYGIDLPSPKGKWTQIYFDNLQRIKFNNSWMQKSFTCLLEQYDFFCGQINKQTQLLKELSQLPRYRDRVEILRTIPGIGIINAMEILLELQDLSRFQRAEQLAAYVGLTPSQYSSADKVRMGRITGIGKNSVRSALVESCWMLISKDKEMQRRYKEIKARSGAKRAIVAVARRLLLRIRRMLLDAQPYNFQLIA

SEQ ID NO: 175123 - protein, 345 aa, unidentified
MKITTVGIDLAKNVFQVHGIDERGKAVLRKQLRRAQVAVFFGNLPPCIIGMEACASAHHWARTLQRFGHTVWLIAPQFVKPYVKTNKNDVADAEAICEAVGRPNMRFVPIKNIEQQAILSVHRVRQGFVKARTAQANQIRGLLGEFGLVIPQGIYNVAKRVPEILEDASNELPVPFRHLIDRLTKHLKELDRQVKEFEQEIIAWHRSSELSRKLEKIPGIGPLAASALVASIADAHSFKNGRQVSAWLGLVPRQSSSGGKPTLLGMSKRGDAYLRTLLIHGARSAILAAKNKVDNTQGWLTNLLKRRHPNIAAVALANKNVRTVWAILAHGREFKVDYVPIRMAA

SEQ ID NO: 175124 - protein, 406 aa, unidentified
MERLDVLGYECVLGLDVGKRAHHAWLMGMDGQRLWDKPVGQDERELRALYDRAMEHGRTLLVVDQTNTIGSLPLAVAGAMGMDTAYLPGLSMRRYAQMTSGHAKTDRIDSRLIAECALANPSTLTRVDMIDPNLETLELLSGYDDDLAADTTRLVNRLRAILHTLHPALERALGGEAITSMTACKLLEEYGGPHGLREAGRDQILQWVQANLRAGLTLPARILDALDTQTTVVSQDGPQTDWIIKDLARRIRENKQQRARIERRMHQLASQNEEYRLVRTIPGMGTRTSIALVTTTQGMNNFPNAGRLASYAGLCPARRQSGTSIHHDTGNRHGNHKLKRALYLSASIAIIKDPRSRAYYQRKRNEGKHHTQALLSLARRRCDLIHAILKHHTPYQTQHTPHLTTR

SEQ ID NO: 175125 - protein, 344 aa, unidentified
MKNTTIAIDLAKSVFEVGVSDRPGHVARNHRLTRAEVAAFLAAQPPATVIMEACSSSHYWGRKFQGFGHDVKLLPPFYVRPYVQRSKTDRTDVKGMLEAWRNSDIRPVPIKTESQQQLTSLHRVRSTWMAARTMRMNSARGLLREFGIVFPAGASTLPDRVLSLIEDAEAAVPMVLRDLLHELVLEIGELEFRIKTVEKHLGALASQTPVVERLRTIPGVGLLTATALVGFVGDVARFPSGRHFAAYLGLTPREHSSGGHRRLGRISKQGDVYLRMLLIHGARAVLQGAQPKSDPDRFRSWALEIQRRRGHNKAAVAVANKMARIVWAVWKFGIPFESRSRVAE

SEQ ID NO: 175126 - protein, 438 aa, unidentified
MSNKVIFNLDELFISVGIDVGADFSWMSIALPNQQFVGKPYKILHNSIDSLTTAVSKIKEAEELYSLESRIFLESTGIYHYPLFCYLRDKGFNCSVINPIITKNSTNINIRKVHNDRFDSKKAALVGLKPDLKVSLMPSDLALNCRNLCREYYDLMDNRSAYVNKLQGELRIAFPQYLGIFSKVTINTSLTLLETYTSPSAFLKADKQEIIDIIKSTARFGLTYAQNKYNAIIQAATDANQFGYIINSNIKRIRLYISFIRKYDEEINSILESLHELVDANEDSDFVKQIHLIETFKGAGFLSAVSIMGEIGDFSAFSKPKQLFAYFGLDPAVKQSGKFEGTKVQMSKRGSAIARRVIHTLTLQSISISRNREAKNPVLREYYLKKCDSKPKLVAMGAVSHKVCNMIFAILRDNKPFKIIAPQEHIKQYNSAKCDIAA

SEQ ID NO: 175127 - protein, 411 aa, unidentified
MDIVNARCAGLDVHKATVVAGVRVPGPRPGERRGETKTFATTTRGLRELTDWLIGHGVTDVAMESTGVYWRPVYAALEGLVQVVLVNARHVKMVPGRKTDVKDCEWLAQLLECGLLRGSFVPPRAVRDLRDLTRLRKALIRERGHHVNRIEKTLELAQIKIGCVVTDLMGKTGRAILEALSAGIDDPDQLAEYAQGLLRKKRAALREALVGRLTPHYAFLLQQHLSLIDALDAHLATLQARIETAMVPFADTAALVQTMPGVAARAAQAILAETGVDMSCFPTPAHFASWARLCPGNHESAGKRQNTTTGKGATWLRATLQETAWAAVRSKKSYYRTLYHRLKARRGAKKAIVAVQHAMIVALWHMLKHRVAHHDLGADYFERRNTARIRRHHIRRLERLGYDVVITKRAA

SEQ ID NO: 175128 - protein, 414 aa, unidentified
MSLEVMYERCAGIDVHQRFVVVCLTLMEGGKRRQEIRTFRNETADLLALRAWLLQERCTHVGMESTGVYWMPVYRRLEGFFELVVANAQHIKAVPGRKTDVQDAEWIASLLQHGLFTPSFVPSQEQQDLRDLTRLRVSLVRERTRLVNRVHKVLEEAGIKLATVLSDIMGLSGRAILQALCEGERDPQQLAKRVHPSVHASQQEIRAALTGEIREHHRFLLRELLSLIAVQDRSIAHLEEQIERHLHPFEEQITRCEKINGVSRHVLYVLMAEVGTDLERFPDAEHLSSWAGVCPGQKESAGKRLSGKCKKGNRYVREVLVQAAHGVRRSRTYLGERYRRLKKRRGSKRAALAIGHDILVIYCQMMKTGQEYQEKGEAFFQQRDRSKVEHQLVHRLERMGYQLTRQPPPAASGE

SEQ ID NO: 175129 - protein, 361 aa, unidentified
MRSLGLGHPMMGWLVPRGDEAMTVYAALDVSMEKTTICVINAEGKTVLEASTSSDAEAIAMCLDPYCAELDQVGLEAGPLAEWIARGLGYHGMRVVLMETRHVRAALSAMIAKTDRNDARGMAQLLRSGWFRPVHVKTVPAREQRALLAARSTLVRRHRDVENSVRGLLKGFGLRIARALRGRWDNAVREAIAGNSVLLSIIDPLLVARQAIRDQLAILDKRVRDVARADNVCRRLMTAPGVGAIVALSFRAAVDQPERFKSSKAIGACFGLTPRKYQSGESDRDGAISKAGDASVRLALFEAAHVILTRVSKWSKLKAWAVGVAKRRGAKRAKVALARKLGIVLHRMWIDATDFRWGQAA

SEQ ID NO: 175130 - protein, 338 aa, unidentified
MKISLVGLDIAKSVFHLFAVSNSGKLIRKKMLRRQQLLSYFARHELCVIAMEACGGANYWARAFQAQGHKVRLLAPQLVKPFVKGNKNDYNDAEAIAEAAQRPCMRFVPIKAVEQQDIQTVHRVRERLVKNRTALVNQVRGLLAEFGIVIKRGVASVRKDLPLILSDSGSDLTEMSRVSFAELLDDLRELDEKVRHYDRKIISINQSHEACQRLDEVVGIGPVTATAVYAAAGTGQDFVNGRHFSAWIGLVPRQHSSGGKPTLLGISKRGNTYLRTLFIHGARAVLRHSAGKSDRFSRWAQALLARRGHNRACVAVANKLARIAWVILAKGEHYRPAM

SEQ ID NO: 175131 - protein, 356 aa, unidentified
MTKVTASFENETVYVGLDVHKRSWNAAIYLGDQYIRNIHQPPTPQALYHYLQHSYPQAQYVCAYECGKFGYWIQREFKQLGIECLVVNPADIPSTHKDEVYKTDSRDARGIGHALSTGQLKSVYVPYEEQEADRHLVRQRKKIWRDLVRCKNRLKGFLDYKGIEVPAQYDNANWSRNFINWLSKLEFEHSSNRITLNYQLTEMELLRKELLSISNTIRKLMRSQKYNKLYYLLRSVTGIGPLTAASLLTEIGDMSRFKNFYHLNSFIGLMPMEHSSGERELKGRITVRKHRQLRSDLVECAWTAKRTDPALALYYSEQIKRGKNGKAAIVKVARKLLSRIRYVWLSGESYQPAVVK

SEQ ID NO: 175132 - protein, 455 aa, unidentified
MAKNKTRHGKLDRSLPELKVNAAGIDIGSREIFVAVPADRDKDSVQSFPTFTEDLHRLADWLKQCRIDTVAMESTGVYWIPLFQILEARGFEVCLVNAQHVHHVPGRKSDVLDCQWLQYLHSVGLLKASFRPEQDVCAVRSLLRHREGLVQMSCTHVQHMHKALDQMNIQIHHVISEITGVTGLAIVDAIVAGKRNPKELAKLRDHRIKATPEAITKSLVGDYRPEHIFTLKQSLTAYRYYQQLIADCEEEVQLRLHAFDNKEDDHKEQTGPSSTAASDGNAATPKPPFHLPDHLERIFGVDLTRIPGFQGLRIQTIFSEIGADLSKFSSDAHFVSWLNLCSKDGFSAGRRIRSRNPKTNNRATTAFRLAAQSLHNHKSYLGDYYRSQRARHGAPKAIKNVAHKLARIFYHLVTTRQAYDETVFARQEAHHQKRRLLKLQSLATQMGYSLTELHA

SEQ ID NO: 175133 - protein, 354 aa, unidentified
MKTYTLGIDLHKRSSVWVMIDDARTECWTASVASHPHDITKILKKIPVPAEAIRVAIEPVAGWRWVSELLTEAGMEVHIANPLKVALIAKSDQKHDVGDARILAELLASGYFPESYRVTDDIYELRTLLRERQYIIKLRTSAKNRLHGIATTQGLHTITGGNPLHVRGKQSIMERGSVVLRELHHLIEDLSGRIVPLDRLIEEYAATYPLASLLKTMPCVGNITALTVIAEVGDFARFSSGKKLAKFAGLVPRQRSSGERVRFGSLTNSGSRFLRTALVETAMRIRKGSAPELYAHIESLAPRIGQKKARVALARKLLTVMWTMVYRNTPYTQTAFLARVRNTHLSDLDTEAGT

SEQ ID NO: 175134 - protein, 427 aa, unidentified
MKLSTTKHSGSTTQSITVEATIACDVSKDDIHLVAQFGHNRIERHFGNQTTLIEKELRHLKTIALRCNCSKIRIVAEPTGNYHQTLFRTAERLGFQTAYVSPEAVSKMRVIETNDSGKTDIKDPNVIYSLAILGKTLRHRSLSEPYNLLRQWNKIYDAADKCTVKAKGAIHTLIKELFPDFGMKKDFIFSNSGRAVMAKYKYNPYRISRSGRRRFSASMKKAVPRIKTTTLDNIFNQARSSVKNKLSPRYAELIELQLAQRWDDLALGQDRKQQAKEAMEDLYHEARLNDDKLPQALKGVITTFHLARIVAETGPLSDFESWRKLMRFSGYNLRERQSGKYRGKTKISKKGRRLLRKVLNLCILPLIKKKGLYGPYYHRKKENMPGTKAMTVVSRHFLKMLYGWYRTGRAFNAQRVFTCESQIKLAA

SEQ ID NO: 175135 - protein, 362 aa, unidentified
MTKHIFIGIDLGDKNSVGRIALDREKSERFTFVNNRQGRGRLLREAQRRSQQAGGAKIIMAYEASSCGFVLSDEAEAAGVECWVLAPTKMEKSVEQRKHKNDDRDAEDVLDKLRGHILAGNRLPTVWVPDRQTRDDRELIRMRLELVDKQTQIKSQIQMLLKRHGLERPSGIGSGWTIGYRRWLEALSESESLGWGSRQALHSLLQQLQFIEQEIERLQKPLEQLANEPRLKPIIEELTQESGVGLITAMVYKTEIGYAGRFRRGRQVGKFAGLTPTSHESGQQHDRKGHISRQGPPRLRKVLCQASWAHLRHHDGQLRRSYQQLVSRNPKKKKIALVAVMRRLAVRLWHRMRKVEMQFAQD

SEQ ID NO: 175136 - protein, 418 aa, unidentified
MDNRPPFLYQATVGIDWADQKHDVFVRFANGDSYRRKIDSRPEAIQEWLLELRSACAEGKIAIALEQRRGALFYQLCTHLNWIDLYPINPHSLASFRLTFFSSRAKDDPIDSQLLEELVRTHPDRLRPYLPESTTERKLDQYCRRRRSLLDLATKTELKLISTLKQYFPLAVNLFATVGMKSDIALNFLSRWPTLNELHRAKTHTIRSFFYAHNSRSQSLIEKRLQQIAEAHNVTDDLALIEPLVLTSKCLVGQLRQSNQAIKEFDRKIKDLFKSHPDHFLFENLPGAGEQLAPRLLSLFGSNRLRWADATDIQKYSGVAPVIERSGKSIWVHRRLSRPIFICQTFHEFAQQSIQRSAWADQYYRRQRERGKSHHSAIRALAFKWIRIIFACWKANKPYDESFYLQALAKKNSSLSPT

SEQ ID NO: 175137 - protein, 320 aa, unidentified
MSATSVVVRIDVAKVSVDVAVLGGKLEARRFENEAEGHSALAAALQPQGVALVVMEATGGYEAALACALQAAGLPVAVVNPKQARDFAKAMGRLAKTDRIDAAMLAELAAVLVRRDDLARFIRPLTDAQQQALAAWVTRRRQLLTMLLSERQRLQLAIPILRPSIEAMIRAIRAQLDDVEAQMTGHVRTHFAELDTLLRSTRGIGPIASATLIAELPELRRLNRREIAALVGVAPIANDSGTTRGRRRVQGGRFEIRRVLYMAAVVAARHSPVIQTFYQRLIDAGKLPKVALVACMRKLLTTLNAMVRTNKPWDGSFHHA

SEQ ID NO: 175138 - protein, 315 aa, unidentified
MANLTKSKTVVNVGVDVGKQYLDIYLHEKQLHWQVSNTEEGIKQLLRRLAHYHVERIVMEATGRYEFELAQAAHGRGLPVCIVKPLRVRRYAGAIEQLAKTDKIDAALIAQFAAKVQPQITPQKSKNLIAIKDLIARRRQLMGLRTQELNRINIMGKALSVSIKRIIRVLDAEILRIEKRLAQHVEQQAIWTDKQTILKSAPGVGDTLVYTLLADLPELGELTNKEISALVGVAPVNRDSGRLRGKRRIQGGRASVRTVLYMATLSATQCNPVIKSFYRKLVAQGKHKKVALTACMRKFITILNAMMKNKTEWAI

SEQ ID NO: 175139 - protein, 465 aa, unidentified
MKNNCPNPKNKKTKIKIDSSLSVLHPDAAGIDIGHREHWCAVPADRCAHPVQKFGTFTEDLEGLSQWLKQCGIKTVALESTGVYWIPVFQMLERSGFQVWLVNARHVKNVSGRKTDVLDCQWIQRLHSFGLLQASFRPEDPMCVLRSYLRYRDELVCARSRQCQHMQKALQQMNVQLHQVLSDITGASGLRIIEAILAGERDANKLVALVDRRVKATPATLHKAMQGDDRAEHLFVLRSAFELHAIYEQKIQLCDEQVMAEMAKLPARVDPKEKPLPARKPGRKANQDLMAGKDLREELYRWTGVDLSAIEGVGVLSAQVVLSEIGTDMSCWRTEKHFSSWLGLCPDNRISGGKVLSRHTRRVINPVADALRIAATTLERSKTALGAFYRRMKARVGPAAALTATAHRLARIIYRLLKYGEAYVRQGAETYERKYHERLLHNLRKTAATLGFELTQKQQLAAGVS

SEQ ID NO: 175140 - protein, 312 aa, unidentified
MDMIYVGVDVSKDRLDVHILPQGEAFAVARDGKGLAELVERVQALGPERIAVEATGGFETVVAAALAGASLPVVVVNPAQVRHFAQALGRRAKTDPIDAQMIARFVEATKPEVRELPDEATRLLADLVARRRQIIEMIVAERNREKRVAVKRIKKSIVRLIAALEKELAEIDAEIDAGVRGSPAWREKEDLLASVPGVGPITARTLIAELPELGTLDGKRIASLAGLAPFTRQSGQWKGKAMIGGGRATVRSALFLAALTAARHNPVLKAFRERKAAQGKPKMVALIAVARKLLTILNAILRDKLPWRAEIA

SEQ ID NO: 175141 - protein, 349 aa, unidentified
MPCQAHHIGVDVSTAHLDTHGLPGRGVRRRLPNTPESHTELAAMLSALRQGGGDVLVVMEASGGCERGLHHALVEAGVPTAIVNPKRVRDFARSNGWLAKTDRVDAKVLKVFGETNRPRPTPVPEPIRAELMELLDYRTQVLAEVLARSQQLEHYRSEAMREHAGAALAALKAQVDSLAVDIEMTVHGDAELSRRAELLRSFKGVGPLISADLVAFLPELGTLTEKRIASLAGLAPFACDSGTLRGVRRIHGGRAKVRRALFHAARVGLRWNPALKALYDRLSARGKPGKVALVACMRKALVILNAILKTGEPWDPDFEAKRTEARKAAKAALRQTGPALADPACATAA

SEQ ID NO: 175142 - protein, 366 aa, unidentified
MKKTSTVRVNGNMIFKGHKLTIGLDLGDHWSCYCVLDEAGKIIVEQKVAMTPEAVKQTFAKIPQSLIALETGTHSPWVSRLLTELGYKVIVAHAQKVQLITKSNRKDDRHDARTLARLARIDPELLVPVRHRSAQAQIHLTVIRARAELVRARTALVNAARGLVKSYGQRLPKCGTQQVNRELAAGLHAELREVLEPLLKEVESLNERVKEYDVRMEKIAKESYPHVELLKQVKGVGTQIALTYVLTLDDPHRFPKSREVGCFLGLCPGRRDSGESQPQMNISKEGDRYLRTMLVQGAHYILGPFGADSDLRRWGLKLAARGGKSAKRRAVVAVARKLAVLLHRLWVSGEVYEPLRNSQKAMRAAA

SEQ ID NO: 175143 - protein, 419 aa, unidentified
MPGSQDTRIVSVVHPICCGLDVHKELNYACLITTGADGKEVIQKRVFSGFTDDLIRMRKWLKEHKCPVVAMESTGVYWRPVHNILEGHCEVLVVNPRHIKNVPGRKTDILDSEWLAGLLRHGLVRGSFIPPKKVRQWRDLSRTRRTFVESLADEKRRVHKIFETANIKIDSVVSDLFGRTGRNLMALLVKKKKPTIGDVEACLAGSLKKKGKELVRSVQGCFEDHHQFLLRRLLGIIQAIEREISAIDRRLKRLFKPHQELIERLTEIPGISIVSAKAILSETGATLKTFPSSGQLCSWCGVCPGNNESAGKRRSGRSPVRDNHLKTILIETAWAATRKKDSYYKAKYYSLKARRGPKRAIVAIAHRMIKAIYHIVKHGKSFQELGGEYLSHLKKSAKLSYLRREAKIFGYRLEPIPEA

SEQ ID NO: 175144 - protein, 482 aa, unidentified
MKKRNIYQHRSQELLSLFEQAGNSSKVMCIPIDFAKKDHMVMFCNGYGDILRKPFSVKNSQMGVAYLTDQVMHFCRHRRIKKEHVFFGGEDAHSYAENFFNTLRSKGFLVANVNAYEAKKQRENLQASTDRLDLMGIAVMLLNRRANCAPAQAGAYRNLRTLVRHRKKLVKMKTGVSNRVHTVIDRLFPGFLNEKKSGIQPFSKSSLYLMSDRFSAQQICRRRRSTLIKHLKRFRTKNAGNTAAKLQTYAKQMLTPLEEYTATLQLSLAYNIKHYRCLLENIEHLEKEIALLLSQTQGAFLTSIKGIGIVLSAGVSAEIGNPFVQKPVNNLVSYAGIIPRVKQTGGSEGQPYMGRVSKRNNHILKDYVVQSAFHIGQYGPKDLLLDYKRREAQGQHADFGMGRRFMRMAMCMMRTSQAYLPPGLRSASVEQKDMAEYYLSIWPLLKEKWKRLGALEAAFEKDRPLGGWRQIVQHLYGIELNI

SEQ ID NO: 175145 - protein, 479 aa, unidentified
MNAKAKNNKNQVNNNFSVINTLSAEERQTRMDDLLNTLQAKTWHDLETSGKFDKNAKLSFISDDMLIVGCDIGSETHYMRAIDRNGRELSRKPFSFHNNEEGFEAAKAWMVELAALNGKKQIVLGLEPTGHYWFCVATWLIDNGISVVQVNPYAVKQTKEIEDNSQLKDDRKDPKVIANLVMNGNYGMPYLPEGIYADLRSLSLLRSQLAENRIRSINRLHRLMKIYFPEYKDAFGKTDGSFAMEILKVAPFPEDIIRLGEDGIRDIWHKAKLRGRGYSRAAEIFKYASVSIGKKEGSEADRYSVKCHVEDIISLDERLATVEAAINEKCMEIPHAENILEITGLGQNIVSGIISSMGDIERFDDAKEIQKLSGLNLVANSSGKHNGETKISHRGRKELRTWLFQGAKSVVAHAPEFQYIHEYYTTRAKNPLKKMQSLIVIACKLLRIIFTILKKGITYDPQKMLDDIKRFEEAEIVAA

SEQ ID NO: 175146 - protein, 344 aa, unidentified
MKKVLIGIDFSKEKFDVAIIVKSTSTQEHALFDNKVSGYRKMIKWINSVVEDIPCSSWLFCGETTGGYSRMMSDWLYAQGYDVWIENALVIKRTFPLKRLKNDTVDAFMIAEYALRFEDRAQLYEPLSQALTELREIFLYRHHLVRHRCSFEVRRIEKRFTQQKSANKNVISQSARHIITEINKEIAKCDEKIKEYIESDDQLSSIFAIITSMPGVGTINAVSLMVYTNNFTKFAYNPRKIACYYGIAPFGRDSGTSVHTDPRVGFIANKMLKSLLTQAALASVRTCPQIAKYYQRLIERGKKPMVALNNVKNKMIAIITAMVRTGCMYQPENICLATQSVNVK

SEQ ID NO: 175147 - protein, 357 aa, unidentified
MTQVKKLDFTGTIIFTGVDVHKKNWRVNIQDSEFELEDFSQNADVVLLYKHLNCKYPGATFKVCYEAGFSGFSAQRWLASQGIDCQLVNAADVATTDKEKRQKTDKIDARKLCEHLQSKKMKGIYVPPLQWEHGRSLVRARARIVSNQTRCKNRIWQLFHFSGLALPKDYEAGQYWSRNFVKELQATDCGTEELKITLGLYIKDFLQTRALLLEATKAIGNLSKQSEYQKGIALLRSIPGVGEINAAVILFELRDVSRFKRFDNLCSYAGLVPNTSDSGETKKTKGITNRSNHYLRTALIESSWSVVRKDPALLMKYKMYCRTMEKNKAIIRIAKHLLSRINYVLKNKKEYVSGVVA

SEQ ID NO: 175148 - protein, 275 aa, unidentified
MHCKTFVGIDVSKSTFDAFIYGTDHHKQFPNLARGFESLCKWIGLLQSDTELKDVHVSFEHTGLYSLPLAIYLEDRQIPFSMINALQIKRSSGLVRGKNDKIDAKRIAEYAYLHREKMPLTKMPSRQMMQLQPLLALRDRLVRQRAGMEATRHEQARFLSKTHAMDMSDVYDHVIDTLKEQIQRVDAAMKLIIELDPQLKLTFDLITGIKGVGKTVAIYLIVYTHNFTRFATWRKFACYAGVAPFENQSGTTYLGRTKVSSLANKQIKKCFIWRH

SEQ ID NO: 175149 - protein, 323 aa, unidentified
MSAILCLIAVGVDIAKAHFDVARLANGKYRHKKFDNTPAGFALFAEWLAGFGGESAHICLEATGTYSLPLAEYLAEHGFLVSVVNPAKIAHFAKSELSRAKTDKADAKLIARFCLAARPAPWTPPPAEIHGLQILLRRAEQLQKMARMEQNRLDTAAPAVAGSIRAVLATLDKELQDAQDKIRRHIDGNPGLKGRADLLEAIPGVGEATAAWLLTLLSEHYAFGDAKQAVAQAGLAPVIRQSGNWAGKTHISKTGDPLLRKALYMPMMCAWQHNPAIRAFCERLKAKGKSGRAILCAAMRKVIHIAFAILRSGRPFDPNYALA

SEQ ID NO: 175150 - protein, 462 aa, unidentified
MDRMTLGIDVACRAAHQASLADERGKLTWSGRRFRTTVADLERLWALVPAGVALTVVMEPTRNAWVPLAAWFGRRGATVILVPPEQSADLRAYYSKHAKSDHLDSRMLARLPLLHPDGLRPAEGQGPADPLRRATKLRASLVKRRSAILARLDAYLELLGPAWHAALGGDLALNTPLRFLAAGYAHPHTLRRLGRARLARFIWRYSHGAWGDAHATGLLDAAAQTLALWEEDIDYTELADDIAVEARLALAITAEIRDLEQKIAALLHHRDPAGIMTSAPGVGTITAAQILARLGNPARFRSLAGARSFTGLVPSLTASGASGHHGPPTKSGDAPLREALFMAADHARRTDPTLAARYYRLMVHQGKHHNSALCHISTALLTRIIACWRAGTCYQLRDIDGTPITPAQGRQIIHQRYRVSDDLRAQRRTSHARTPRRAGEERSRHALRHQPAPTHATTRQPA

SEQ ID NO: 175151 - protein, 349 aa, unidentified
MKLRKVYLAIDAHARNCVLGSMNTKGEFLNSWRFETSEKELIKYVSNIGAVKKILAVEEGPLAYWIAQTLKPYTTEIVISDPRETPLISRNAMKRDKLDVKNLCRLLRLGELKKVYHPDEDHRAIFKAAVQQYIDIRKQEVSLKLKIKAKYRGWGMQDVEGKRVYNLEKREEHLKKIKSLTIRNQLERLYCMLETALEMQTKALSEARRLGRRYPEIKQFVNVPGVGIIGALVFDAYIQNPDRFASKSRLWRYAKLAVTDRSSDGKQLGFKRIDKAGNSELKAMSYRAFLGAMQTKFSNEVRQYYEKSLQRTKNQTHARLNTQRKILSVLHGVWRKKEVYRPELFLGLT

SEQ ID NO: 175152 - protein, 359 aa, unidentified
MSSVTTFVGLDYHQDSVQVCVLDSSGKQLTNRSVENDAAIIERVATRHGRPARVAIEACCGAANLAEELVTRRNLPVQLAHPGYVARMKQSPDKTDLADAHLLADLVRVNYLPRVWLAPQSIRALRRLVRHRAQLVRRRTDVKLRLRAVLRENRLRCEDTRAWSKAWLAWLTNVAELSDSDRWVMEDHLAELASLGERIQAVEKRITEATADDPVVAKLLSLPGVGLVTAVTLRAEAGRFDRFDTGKQLARFCGVTPRNASSGARQADAGLIKAGNPELRKVLVELGHRLIRMRDVHWAKLAAGMLLRGKPKNIVVAAVANRWVRWLHHELRRDESVVSTSAQARQKGSAPSAFTVAST

SEQ ID NO: 175153 - protein, 416 aa, unidentified
MNAVGIDVSSRKSTVAVLRPLGEVVCLPFDVSHDADGLASLAEKLKALDGETRVVMEHTGRYYEAVEKALHEAGFFVCAVNPLLIKEYGANSLRRVKTDKADAVKIARYALDNWADLRDFTPMDAIRYDLKTLNRQFQLASKQRTASANNLIALLEQSFPGIRKCFDSPVRSDGTQKWVDFAHSFWHVDCVRKQPFAAFCERYRKWCKRHAYLFKLSNAEEVYALAKRAVVLTPKSKVVKVLVQEAANQLISISRSVEVYRAEMDRLAAMLPEYPVVMAMYGVGKSYGPQLMAEIGDVRRFERKQALVAFAGIDPMPNQSGDKNVRSNKSSKRGSPYLRKTLFNVIRTYLQCAPQDEPVFQFLNRKRAEGKPFYVYMLAAANKFLRRYYAKLRDYFASLDTLQPVAPIPTILKATL

SEQ ID NO: 175154 - protein, 360 aa, unidentified
MDNRKYVALDVDSANIVAGVYDSKGAELMQCCLRNNGQVIREFFKTMTGTVQVTFEEGTQAVWLYELIRPLVADVIVCNPRQNKLLKAGNKSDRIDVAKLGKLLRLGELRPVYQGPSAAQGLKQLVHGYEALVDDTTRVKNRLKALYRGRGLRCKGETIYGREQRGQWLLQLETKELQCRATYLFEELDCALRLRAEAEKVMCRAARKHEAYKWISSAPGLGAIRTAQLLATAMTPHRFRSKRQFWPYCGLAVVTRSSSDYEWVNGSARRKRKPIQTRGLNQNYNRTMKAVFKGAAVSALQQYPEFKEYYQQLCAKGRRPEMAQLTVARKLAAIVLILWKKGEQYDSKRLNQAAPGADQQ

SEQ ID NO: 175155 - protein, 334 aa, unidentified
MKQVNQVGVDVDSEELVSMMRRGGQRLPLARFANSAGGHKKFIRWATKGARPVRVCLEATGIYSLEFALALHHAKNVEVMVVNPRAMKDFGRASMQRAKTDAVDAGVILDYLERMPFTEWQPPTPEILELQAINRRIDQLHTELTREKNRHHASEFGGASADAIAHDIEVNIHHLERRIARMQDSGLQLVRGVPALAAKLAHLVSAKGIGEASAMRILAELLVLPDELAAPQWVAHAGLDPRPYESGTSVHPPRRISKVGNSHLRAALYMPALVAIRHEPNVKAFYDKLIAAGKKPLQAVVAVMRKLLHAIWGMLKHDQDFDGNKFFKLTEKTA

SEQ ID NO: 175156 - protein, 431 aa, unidentified
MLKINPLSTLYVGIDVSSKSNYVCALDFYKNKYINSSFANNQPGAEELALKILECLNQHPDLTMVVAALESTSVYSIHIANYLSSCEELMRFKPYVFVLNPKCTANYKKSYIGLGKSDPIDAFVIADYARAGNIESEPWRGSQFLALKRLTRHRLHLVECMTREKTYLISNLYLKFSELQMLEGDDQPFCDIYGATSSSVLMEYLSPEEILASSEEDLIAFLAEKSRNRIKDISKTADLLKKAARDSYRLDKALYEPLNVSIASSFNCIETFKREIKVIDNAIEKEIKGLNPNAFIILQSIDGIGPVFAGGIIAEIGDITAFHSSDALAKYAGLTWKSNQSGDFDGEDTPMIKAGNRYLRYYLGEAANSMRKHNVEYGTYYRKKYNEVPKHQHKRALALTSRKFVRLVYGLLARNQLYSGVSLDTSIKDSN

SEQ ID NO: 175157 - protein, 347 aa, unidentified
MNFYHSTHRHYCGIDLHARSLYVCILDQQGQVLLHKEIKARPEPLLALLEPYRDDLVVGVECMHCWYWISDLCEEHDIHFILGHALYMKAIHGGKTKNDRIDSFKISMLMRGGNFPLAYTYPKEMRATRDLLRRRTRIVQHGAMLKAHVVNPPSQYNLPPNKVNLKNVGAREQVQAAFSGQDVQHNIDLDLAIIECYHRELSRLEEHLERQAKQHDPTSLRVLRTIPGVGRILALTILYEIGDIQRFDTVQKFASYARLIKCKAESAGKVYGTQGNKIGNAHLKWAFSEAAVLYLRGNDNARRYLQKLQKRMNKAKALSALAHKLGRAAYFMLKHQRVFDEQRFLKG

SEQ ID NO: 175158 - protein, 403 aa, unidentified
MNAVGIDVSKSKSVVAIMRPFGEIVSTPFEIKHTASDIHSLIELINSVEGESRIVMEHTGRYYEVLAHQLLEANLFVSAINPKLIKDFDNDSLRKVKSDKADAVKIARYALDKWQNLKQYNVMDELRNQLKTMNRQFGFYMKHKTAMKNNLIGILDQTYPGVNTYFDSPARSDGSQKWVDFASTYWHVDCVRKMSLNAFIDHYQNWCKRKKYNFSQSKAEEIYGKAKELVPVLPKDAITKLIIKQAVDQLNSASTTVESLRTLMNETASKLPEYPVVMAMKGVGTSLGPQLMAEIGNVSRFTHKSAITAFAGVDPGVNESGIYEQKSVPTSKRGSSELRKTLFQVMDALIKTKPQDDPVYRFLDKKRAQGKPYYVYMTAGANKFLRIYYGKVKECLWNLEQTE

SEQ ID NO: 175159 - protein, 430 aa, unidentified
MKSNTQNAKIEAITEKTLVLGIDIGSETHYARAFDHRGIEYSKKPFKFSNTEAGFVTFKEWILDLKEKHEKDKVVPGMEPTGHYWFNLGKFLQDNEMKPVLVNPHHVKKSKELDDNNPTKNDRKDPKVIAGLVREGRYMIPYLPDGVYADLRTASNIRFQLQAELTRIQNRISRWFNIYFPEYKTVYGKPDAKSGMLILKQAPLPEDILTLGIDGVNQIWRDAKMRAVGKARAKTLIEAAEHSVGSKEGAVSARMEIRMLLEDYESRNIRLQEVMTLIEELVNQIPMAEKLLGIKGVGIKTVSGFLAEVGDISRFNNPKELQKLAGLALVENSSGKHKGKTTISRRGRKRLRYLLFEVAMSLVAKNPEFRELHTYYTTRRLNPLKKMQSLMAVAAKLIRVFYAMLTKGVDYDPKKMVGDIRRPVVYLPAA

SEQ ID NO: 175160 - protein, 441 aa, unidentified
MAKPKNKISVVNNSTAGIDIGSRKIFIGIADKPVVSFGTFTDDFISAVTYLKENNISSVAMEATGVYWISLYDILDQSGFDVVLVKADQAKNIPGRKTDVADCQWIQQLHSYGLLRSSFIPPQHIRTLRTFVRQRRTNLQLASDHIRRAHKSLELMNIKLQNVITQINGKSGLAVLQAIINGNHNPEKLALLCEDSILKKKKEAVTKSLKGNFSQENIFLLKQAVDAYLFYMNQVDDCDKQIEQHLSVITKDIPAPEKLNKPKPIRHHKPNIDDLHFKLMKLTGGKDPAQITGLTDSTLLQVISEVGTDLSRFPTEKHFTSWLGLAPNSHQSGLTNKKKKFKRHTSAGQIFRLAAQAIAQSKHLALTSFYHRIKARKGSLGAIKATARKIAVIFYNVMTKGIEFVEQGIKLYEQKIKERQMKYLQKQAKRFGLILTPQLQE

SEQ ID NO: 175161 - protein, 386 aa, unidentified
MAIPTTPRMTQDSLSQSTLYLAFELGKNTWKLGFTIGMAQQPRERTIPAGALETLQKEITRAKQRFGLPEDACVVSCYEAGRDGFWLHRYLVAHGVTNHVIDSASIEVNRRQRRAKTDRLDVHKLLTMLLRHMAGERKVWSVVRVPSVEEEDRRQLHRELTTAKCDRTRLSNRIKGLLAGHGVQFVLQGDVDAQLDQLHQWDGSPLPPALLSRLKRAWQQVCFLTAHIQTLEAQRRAVLRRREDAVVDQVRQLFTLRGIGVNSAWLYVMEFFAWRDFQTPKQVGALAGLTPTPSQSGQSRRELGIAKAGNRHMRAMAIEIAWAWRRFQPTSALSQWYEQRFGHGSARLRKIGIVALARKLLIALWRFLKTGVLPEGAVLKAETLGQ

SEQ ID NO: 175162 - protein, 350 aa, unidentified
MTIVENRTITVTGGVDTHLEFHVALAVDINGGVLGVETFDTTTGGFRRLVAWLAGFGIISMVGVEGTGSYGAGLTRHLTDKGIRVVEVDRPNRQARHRAGKSDAIDAIAAARAALTGTATGIPKSRTGNIEAIRVLTVARRSAASEWIAVVSQIRHVVFCAPDQIRARFLGLSPITLVRTTAALRPRPSDPDIVRYTTLSTLRELGRRALFLREQKMRLNAEMRPLIREVAPSLLEIRGVGFDVAAKLLIAAGDNPHRIRSEAAWAHLCGVAPIPASSGKIQRHRLNRGGNRQANSALYRIVLTRMSNDERTKTYVAKSTAEGKTIGEIARILKRYVAREVYPHLPSTMT

SEQ ID NO: 175163 - protein, 342 aa, unidentified
MPKLKQYVGLDVSLKQTSIAVIDENDRLVWRGSVPSTPEAIAEALRKHAPRAERIGLEAGQLSSWLYHGLKAGGWPVICVDARHAKAALSLKVNKTDANDALGLAQIMRVGWYREVAVKGHGCQAVRALLVARAQIVSQVTTLKNCVRGILKTFGHVLPKKLRATYITSVGEIIEGDTTLEPILTPMLRTLAATMEQLQVYDRAIHRFARGSETARHLMTAPGVGTVVVLTYMTGIEAPARFPRSSAVGAYFGMTPRRYQSGEVDQAGRVSKCGDGMVRSLLYEAATVLLSRSAKPSDLQTWGHSLTKRIGKRKATMAVARKLAVILHRMWTTGEPFRWTAA

SEQ ID NO: 175164 - protein, 427 aa, unidentified
MAYRIAAVDVHKKMLAVVVADVALEGEYAFARRKFGATPDALHLMAEWLVGQEAEEIVMESTAQYWKPVWGALERYWKPARQKREGATKMSGTLHLCQAKSNRGPRGRKNDFADGERMVKRLVAQELTLSFVPDPEQRLWRAVTRRKAQLTRDTVRLKNQLESLLEQAHIKLSSLVSDVVGVSARRMLQAVAEGETDPAALAALADCRLRATPAQLADALGACGQLPGAYRRLLKMALEQLRLMEEQIEQLDREALDLLQQHQEAVLRVAEVPGFGVESALQMIAEVGPETAAFRSAKALASWVGVCPGNEETAGETKSTRSPKGNRTMRRLLNQSAHAAIKAKGSIFDVTFRRLLPRLGYKQAIWAIAHQLCRLLWLILHQGVRYQERGLEVSAKSRRTRTARMIRELRKFGYRVEGGPVPAANLA

SEQ ID NO: 175165 - protein, 407 aa, unidentified
MIYVGIDVAKDKHDCHIMRDDGEVLVDNYTFENSREGFIAFDEIVKRSKRRKEEVKVGLEYTGHYSHNLIENLKAKGYAVLALNPLKVNLYRKSKSLRNTKTDKSDARYIAEVTSETEIEKKRYVVNDVHVLRSLTRYRYRLLKTVQSTKNRYRRVLQVVFPEFEKHFNVNYRSAIELIGRYSSPREVLSADRDVLIRNLNKMSYGRYGKRADELIEAAETSIGVSNAGDAYELKHIAKHIAFLESEVEMVEDKLKSILTRLRSPILTIPGIGATTGATILAEIGNIKNFPTSAKLLAFVGCEPTIYQSGKYVLTRTPMVKKGSKYLRNAVFQATKSAYVIDPTMRAYVDRKRAEGKHFFVALSHGMKKMVRVIFAVLRSGKDYVAPETPEAEIKKEVPALNSAATP

SEQ ID NO: 175166 - protein, 342 aa, unidentified
MNYYAGIDVSLEASSVCVMDATGKVVREGRAASDPAALIAWFAALGMGLTRIGLEAGPLSQWLYAGLKAAGLAVELLETRHVRNAFKTMPVKTDRKDARGIADLVRLGWFRPVHCKSMAAQETRAVLTARKLMQAKLHDVEMSLRGILRGFGLKVGKVTPRQFEARVRELVGEHPTLAMVAEGLLEARAALLRAFNGFDKRVRSMARYDERARLLMSTPGVGAIVALTYGSAIDDPARFKSSKSVGAHFGMTPKKYQSGETDYSGRISKIGDSSVRTGLYESAHVIMTKPVKGCAALKSWAMRLARRAGMAKAKVALARKLAVIMHRMLVEGKPFNSAAAAN

SEQ ID NO: 175167 - protein, 346 aa, unidentified
MTIVEATRAVTGGIDTHGEVHVAAVLDEVGGLLGTQSFRADPDGYAQLLSWLGAFGEVSKVGVEGTGSYGAGVARFLARAGIHVVEVDRQNRQARRQAGKSDPLDAIEAARAALSGRAHGTAKSRDGSVDAIRVLVVAKRSARGARIKALTQMRQLTFSAPDQLQSRLKGLPIAQFVAAAQGLRPTRSPDAVTAATKASLSSLAHRVADLEAEIAELDAMITPLLREAAPELLAVYGVGIDTAAALLVAAGDNPERLRSEAAWAHLCGVSPLEASSGKVTRHRLNRGGDRQANRALWHIVITRLASDPRTQAYMERRVKDGRSKREAIRMLKRYVAREVYRSLPRA

SEQ ID NO: 175168 - protein, 354 aa, unidentified
MKKIFIGIDFSKEKFDATLIQAEGLKECAPSVHEVFDNKTSGYRRLVKWVKTHAESFTADAWLFCGENTGGYSIGLSNYLYASGYDMWLECAYKIKHSAGIQRVKNDKADSRAIAEYAMRNYDKMILHKPQSASLACLREVFLYRHSLVRQKVALQVRRDEKRLTQDKSEARAFMSFTSKHLITEVNKAIAKCDEKIKEIIASDDELREVFDIITSMPGIGIQNATCLMVYTDNFQKFDLDSRKIACYYGIAPFGRQSGTSVNSRPQVSPFANRMIKSLLSQAALAAIKFDINVHRYHKRLIERGKHPLLVHNNIKNKMLHILVAMVRDRVKYNPDNVYRTSNEVSLAPQVLNI

SEQ ID NO: 175169 - protein, 411 aa, unidentified
MEQIRERVAALDVHRDSVAACARVPGPRGGVRLDKARFATTTAGVAELAAWLAERGVTTVGMEATGVYWKCVYYALECLFEEVWLYNAHHVKNVPGRKTDMSDAEWLADVVAHGMVRPSFVPPPPIRELRELTRYRKTQVDVRAAEIQRLEKLLQDAGIKLTSVASKVLTQSGRAMVEALIAGERDPGRLAGLAKGKLRAKLPQLAEAMAGRFGPHHALVARRILDHIDFLDHAIDALTAQVVARTRVFAEQVELLAEVPGLDQTAIQVILAETGGDMARFPSPAHLASWAGVCPGNHESAGKRRNVATPPGNRWLRRVLIEAARAAARTRGSYFAAQYRQIARRRGPNKAAMAVAHSLVVVIWTVLATGEPFHDLGEDYFQRRRDPERESRRLVRQLEQLGYAVTLQPAA

SEQ ID NO: 175170 - protein, 344 aa, unidentified
MLHAGLDLSRKKLDVCLLDEEGNHLDQLVCPPDGEGLKTFARRLNELHDEPIAAVIESMTGARFVHDTLESEGWAVEIADAQKVKGLAPLACKTDRIDSMVLATLSQRDLVPSIWLPDPRVRQERELARFRLHLVKHKSMLKNRIHSSLISFGKPCPVTDLFGAEGRRLLEQMEIPEPWRGDITASTELIDHLERQIDQTNKRLKAGHANHPYIPLLMSAPGIGWVLAFTIAGEIGEIERFASPQKLTGYTGLCPRVNQSGDKDRRGPLTKHGPTYLRWALMEATMHALKHPAYAERYQRNKRRLGKQRGAKVAQIDIARRLSHAIWHMLSRNEEFAPRGAVFV

SEQ ID NO: 175171 - protein, 436 aa, unidentified
MRGCRCSMIMGFTKPIEHFNLQQKKVITTNTLYVGIDVSSKSNVIYLMLPNGDKHSNFSVANSREGSTQLVKRILSALTSHSLDTVLIGLEATSVYGDNLVYFLREDATLAPFNRKIHILNPKQVKKFHDAYNDLPKNDYVDSFVIADCLRFGRINKEVYMGDYRYKALQNLTRARFFAVQNLVKEKQRFMNVLFKKYSTMTQEKVFSDTFSTTALAVYDEFESAEALANMDLHELTDFIIEKGKNRFPDPDTVAKAIQKAARSSYRLPKTVNDSVNQVLSISITSMKALESQIKEFDKAIKAQMELLPNVLISIPGIGPVYSAGIMAEIGDINRFNSQAALAKYAGLAWKQHQSGGFEAEVTRLIPSGNRFLKYYLCEATFSLVRCDKEYSDFYHLKYKEVNRCQHKRALALTARKFVRLVFRLLKDNRLYCPAK

SEQ ID NO: 175172 - protein, 407 aa, unidentified
MQVVVQRAAALDLHKDVIAAKVHTPETEDLQKFGTTTREIERLAKWLLEHKVAHVAMESTGVYWKPVYNILEEHPFELTLVNARIHKNPNTDKTDFKDAIWLCDLLRHGLLRSSFVPDREQRERRELCTYRRSLVRERASEVTRVQKVLEGANIKLGSVATDVLGVSGRLMLTAMVEGVTDPEVLADMARGRLRAKKGALEEALYGKMGPHQRQMLELMLGHIDDLDARIERISKELDERLRPFAKQIELLDGVYGIAKDSAQVAIAVLGTDMSRFPSADHCASWVGLSPANNLSAGKRIKGKHKKNRGNDLLHQTLIECAQAIGKNRGSYLCAQYRRIAARSGKNVAAVAVAHSLVVIIYHILKTGEPYRDLGQDYFDKRDQTKTVHRLTKRLENLGYEVTLKAAA

SEQ ID NO: 175173 - protein, 346 aa, unidentified
MLHAGLDLSRKRLDICLLSDQGELVDVLAAPPDAGGLKALADRVGEYDEPVCAVIESMTGARFVHDTLESHGWSVEIADAQKVKGLAPLAVKTDRIDARVLAVLSQRDLVPAIWLPDPRIRRERELARFRLHLVKHRSQLKHRIHSALMSFGRPRPVTDLFGVEGRDLLGRLEIPEPWRGNIDASLHLIDCLEAQIAEINAELRSGGADHPYVPKLLTVPGIGWVLAFTIAAEIGDITRFEHPAKLTGYTGLCPRVVQSGESDRRGPLSKQGPRYLRWALLEATMHALRHPAYSERYQRNKRRLGKQRGAKVAQIDIARKLTVAIWHMLTRNESFAPKGAALRLAA

SEQ ID NO: 175174 - protein, 427 aa, unidentified
MPYRIAGIDVHKRMLAVVVSEVEIDGEYDFERRQFDSNPAQLQLLAAWLVEQQVEEVVMESTAQYWKPVWGALERYWKPICQKREGARPMSGTLHLAQAQSNRARRGRKNDFADAERLLKRLVSNELILSFVPDPEQRLWRTLMRSRYQLKCNQVQLHNRLEALLEEAHIKLSSLISDLLGLSGRRILKALAQGETDPASLAALGDRRLRATKEQLSDALGACQELNPVYRRLVKMALEEWNLLEKQIGQLDQQMADLLRPHQDQVKRLAEVPGLGVDSAQQIIAEVGATAATFPSAGELSSWVGACPGDHQSAGVSRSHRSPKGNRHMRRILNQAANAAVKYKGSIFEILYRRYVTRLGHNQTIGVLAHRLCRLIWMILHQGVRYEERGPALNNKSKQYRAARMIRELRSLGYRIEPSGSQTAVLA

SEQ ID NO: 175175 - protein, 390 aa, unidentified
MERPMQKLNDLSRSLTALEPNGTLIAVIEMSLSSWLVAGIVPGVERQPLKKLAVDESALLKLLHRWREEAEKAGRRIERIAVAFEAGRDGFWLARWLKARGIEAYVIHASSVAVSREHRRAKTDRLDTELLKRSFLGWLRGERDHCKMVEIPTMQDEDAKRPNREHDSLIGERSRIVNRMKAALVRLGIRGFNPKLKRATTRLDGLHTPEGEPIPPNALAELRRDMERRRLVNNQIRQIEEERLERIEQAPCDGAHVMVRLLARVMGVGIETADMLVHEVLSRNMRDRRAVARYAGLTGSPDESGRKRREKGLARSGNARVRRGMIQLAWRFLLHQKNSALTKWFRSRTESARGTRKPMIVALARKLLIALWRLMREGIVPDGVVLRPAQ

SEQ ID NO: 175176 - protein, 340 aa, unidentified
MNITEVGLDIAKQVFHLVGLNQAGRQVLKKKLRRVQVLPYFANLTPCVIGIEGCSSSHYWSRELTKLGHQVKLLPAQHVKAYVRGNKNDYNDALAIAEATRIPEMREVTPKTIEQQSLQALHRLRSSAVADRTALSNQVRGLLSEFGITFNQGLHVLKSQIPLILEDAENGLHYSFRDALALKYQQLCELEQLVKKMTGLIECETKQHTEIQLLQSIPGFGPIVSSSFYSVIGDGKAFAKGRDVSASLGVVPRQHSTGGKNVLLGISKRGDKYLRSLLVHGARSVVNHAHKKDDALNVWVTRLVNKHGRNKATVALANKLARIAWAVTVSGKPYQANYAV

SEQ ID NO: 175177 - protein, 457 aa, unidentified
MTLPPPAFAGLQTGNRGTRRRAPVSDRPGASLAAAGPSLPLPLQGAELSLALPEALFFTGIDWAEVTHAVCVTDAAGKITAEFTIEHSADGIAMLIRRLARHGDPADMPIGIERPNGRLVDLLLEAGHPVVPVSPNAIKTWREGEVLSGAKSDAGDAAVIAEYLRLRQHKLRVATPYSGETKALRTVVRTRDDLVAMRVAATNQLSALLGAYWPGAKAVFADVESPISLAFLTRYPAPALAARLGEKRMTAFLVKNGYSGRRTAAELLARLHAAPAGTADETLTEALRDAVLALVAVLTALNTGVKDLGRSAAAHLGEHPDGKIFTSLPRPGHADWMLAEWGDCRQAYDGPDAVAALAGVTPVTKESGKHRAVHFRWACNKRFRKAMTTFADNSRHASPWAATIYNDARASGKDHPHAIRILARAWIRVIWPCWLHGTPYDPARHGAAVALTKPIAA

SEQ ID NO: 175178 - protein, 347 aa, unidentified
MTIVEAPVGITGGVDTHLDTHVAAALDPLGRLISTESFDADAAGYKALLSWLETFGQVDKIGVEGTGSYGVGLARFLRRRGVEVIEVNRPNRQARRNHGKSDPLDAVEAARAVISGRALGTGKTKDGPVEAIRVLVVAKRSARQARVKAIVQMRHLVITAPDQLHSRLKGLTVTALVAESAKLRATRATDPVTAATKASLCSLAHRVQALEAELEELNEQIEALLLATAPELMARFGVGPDTAASLLVAAGDNPERLHSEAAWAHLCGVSPVPADSGKNAGHLRRHSGGDRQANSALWRIAMVRIAHDPETRMYFDRRVKEGRTKRDIIRILQRYIAREVYRYLPRG

SEQ ID NO: 175179 - protein, 504 aa, unidentified
MSSVTEAVSIGVGFDTARYGHHATFLRSDRQPATSPLDFLESREGYCRLEGTLDRLAQKYETVHFHIRVDAAGQYATNLLSFLHQLPYTKTISVGEPERNKNYRAVHYPKRKTDATDSHACARFAIVEQPDATNHDSAELLMLQEVAGRLEAQTKQSTRQVNQLHNLLSRAFPELATITNNLQAAWVLNLLDKYPTAERIARARSLHSIPNLPAAKAKRIKLAAAKSIGVHRGELAEELVRQVVRALKQSLLTEKKLERLLVKAFHELPDERSKQIVTIKGIGERTAAVLVAKIGCIERFATASRLVGYFGVFPEENQSGVDKRGNPIPSGSKRMSRKGNDLVRKYLWMATQSAIKHNPQVRALYARLRSSGRRGDVALGHCMKKLLHQVFGIWTSGKPYDPDCGLSATVEQESNDNESHQTEELVVGNDPSTSHSIETEGVTLADGQQPQYSTETSSALVGASDQSVSDSGGFVLHHPSGSPPGEANGPMDDEEPKPVNQRKT

SEQ ID NO: 175180 - protein, 360 aa, unidentified
MTVDKYVALDVDSANIVIGVYDRKGQQIMRGCIRTNGNDIRQFFKGLSGNVHVVMEEGTQAAWLYDLIRPLVAAVTVCDPRENKLLKSGNKSDDIDVDKLARLLRLGDLQAVYHGEETIQGLKHLVGAYENLVSDTIRAMNRLKAMFRGRGIRSRGTKVYSNEGRDEWLTKLTIEGLRARAGYLYKQIDCLMKLRMEARKAMCGEATRHSAYKLISGVPGIGPVRTAQIIATVGTPHRFRTKRQLWPYCGLAVVTRSSADYEWVGEQIRKRKRPPQTRGLNKNYNRRLKQVFKGAALNAIRTNEQFKQYYQRLIDKGIRPEMAQLTVARKLSAITLAVWKKGEKFDPEKLNQAAQSTGNQ

SEQ ID NO: 175181 - protein, 355 aa, unidentified
MESNNISEAEVIGIDLGDRTSHLVGLNANGEVVATGRLTTTAEAMTKEFGSIGSKVIAIETGTHSPWISRLLTQFGHRVVVANSRKLRLIYENRRKNDRVDAEYLARLVRMDPKLLEPITHRSERDQQHLSLLRSRDKLVRTRSGLITHVRGTVKSIGLRVPACSAEAFVKRARPVIPKEFKAAVAPVLGTIEHLNKQIAGYDRRVEQLARTEYPAAQLLMQVTGVGPVTSVAYVVTVGDPRRFARSRTAGAWVGLTPGQSASGQQDPQMRITKEGDSYLRRLLVSCAQYILAPNRPDSDLRRHGLALAARGGKNAKKRAVVAVARKLAVLLHMLWRTGVVYEPLYNANAIRAAA

SEQ ID NO: 175182 - protein, 340 aa, unidentified
MNKSLDFDPCGIEVSARTLVVERRRPGQPDAVREFANTAAGHQALLRWLESAGRAVRVCLEATGLYGLDLALTLEAAGVALMVANPRAVRHFAQALMRRSKTDRLDAAVLTEYAARLPFQPWRPPSPSALKLLAVARRLEALTDIMAAEKNRLHAASLSEALPAIIRRDIQRSIQTQQRAVQRLTRAAQEFIAADPSLAERYQLLLSIPGLGPTSALHVLAELLLLGPDLDVRQWVAYAGLDPRQYTSGSSVHKKARISKAGNKHLRRALYMPALVAVRHDPHLRAFYEHLVERGKTKLQALVAVMRKLLHAIYGIFKHHQPYDGAQLFALPSPQEVICP

SEQ ID NO: 175183 - protein, 367 aa, unidentified
MKKVSTVVAKRSRNISQPTLTIGLDLGDRNSWYCVLDEGGQIQLEQRVRTNARALREVFSAVPRSRIALETGTHSPWISRLLSELGHEVIVANARKVRLIGESRKKDDRLDAQALARLARIDPGLLCPVKHRSAQAQADLTVIRARAGLVRARTSLVNTARSLAKSYGERLRGCNVRNMNPEKAEALSPELQSALEPLLAEIESLSERIAEYNDRIEALAQDSYPQVALLKQIKGVGTLIALTFLLTLEDPHRFRKSRDVGCYLGLQPGRRNSGQREPQMHISKEGDPYLRTLLVQGAQHILGPFGIDCDLRRWGLKLAERGGKSGKKRAIVATARKLAVLLHHLWVSGEVYEPLHNSKPMTVTAAA

SEQ ID NO: 175184 - protein, 341 aa, unidentified
MNFIGLDIHKKTISYCVKDAAGEVLAEGTILSTRQSLDVWMRTLCEPWTVAMEATMFTGWIYDYLLPHAAAVKVAHPLMLRAIAAAKKKNDRIDACKIADCLRCNFLPECYMASTEIRERRRTLRYRKLLVRQNVQLRNKVSQMLMESGVVYNKQKLHKVGYFKELMTTNPDIGEGLRPLLTICRETIVRIGKTEGALVRSLARDPLLSDRVQRLMTIPAVGPITALTWVLEVDDVARFGSVKQAISYCGLCGAERSSADMVKRMPISKQRNKHLQSVLVEAAKLGPRLSPDLALVYETEKQKGHANRATIAVARKLVAYLLAVDRSGREFVVAGERREAA

SEQ ID NO: 175185 - protein, 404 aa, unidentified
MPDGIRWVGLDVHARESTLAVFDQATGEVSTKRVVGRPHELVSLLREVPRPARMVYEAGPTGYGLARRARAEGIEIGVCAPSKTERPPADRVKTDKRDAIRLARLLAAGELTLVTIPSVEREQRRDLVRCREDIRLDLMRARNRIGKFLLRREIYYEGPAAAWSRKHRSWLVSVRFADHASRATLADYLHAHDVLIARRDQVEADLAAVALSAPCAHTVARLRCLRGIDTLTALGLCAEIGEWERFDHPDQLASYLGIVPSEHTSGSQRRLGAITKAGSTHARRLLVEAAHHYRRGPAVGETLERRQRGQSPEIIHISWKAQRRLNARWRQLKDARHKPGGIVAVAIARELAGYCWEIATWAHPHPDPVPPTSLPAGDPLTQPAPNPRSRNNTPTTRRRLTNSR

SEQ ID NO: 175186 - protein, 348 aa, unidentified
MLIIGLDYHPGFQQIAYVDTETGELQERALQHREEAEKFYRELAAQGLKVRVGMEASGHARWFERLLAELNVELWIGDAAEIRTKRVRKQKTDRQDAQLILKLMLKDDFPQIWVPSWENRDLRQLLWHRHRMVQARTRLMNQLQAVALNEGLRCKKRLWREAGRQQLEGFRLAPWASRRRQDLLELLDRLNPTIAELTQAIEREVEKCPEARRLQTHPGVGPLTALAFVLIIGKADRFRCGKQIASYLGLVPLEDSSGSRRRLGHITKQGNSLLRFLLVEAAQVTVRSDPGWRSKYHHLMMRRGRKIAKVAMARRLAVRMYWMMRKGWNYEQLKSSVRTRDNSYQAMV

SEQ ID NO: 175187 - protein, 432 aa, unidentified
MKYALNQVLPDVPAGQVFAGIDWATADHVACVVGMAGRVIDRFGAAHDKAGIDALISRLRRGGVSEVAIERGDGVLVEALLAAGLTVVVVTSRQVKNLRSRYGAAGAKDDRFDAFVLADTLRTDRARLRPLIPDMPATLTLRAAVRARKNLVAHRVAACNQLRAHLAVAFPAAVGLFRDLDSPISLAFLTRFGSHDAAAPLDEQAIAAWLKTIPVRGRPAPVSVLCTRLRAAPGGATGQDGAAQAAITAALTATVTMLAAQVKILETGIGVQLAAHPDAHIFTSLPRAGTLRAARLLAEIGDCRSRFPGPQALAALAGVAPVTRQSGIHLSHAFRWAVSRQLRDAICDFANDSRHASAWAASIYDAARARGKDHPHAVRILARAWIYVIWRCWQTGTAYDPAKHNALQAILAARDQASEPAAAGTPAPGKDR

SEQ ID NO: 175188 - protein, 485 aa, unidentified
MRVAKQHKQRKRRRTEGQSEPAGWHLMNRQQRREMMRKIQAQDLSLEVVHPDAAGIDIGNESHYVAVPSTRDSAPVRCFGCTTAELRQMAGWLKQCGIGTVALQSTGVYWIAVYDILEEAGLEVYLVNARETKNLPGRKSDVQESQWLMKLHTYGLLRNSFRPSGEIRQMRTYWRQRNDLVQAAGRHIQRMQKALTQMNIQLANVLSDISGKSGQAIIHAILKGERDPYELAAMCDVRVKASEEEVARALEGNWQEDLLFMLQQELDGYEFCQKQIAKCDDRLYKYLQHRPDRSAGATLPKEHRKGRREKHKKNKPQFDLRKQLFCMTGTDLTRIDGIDVLTAMTVISEAGWDMSKWPTEDHFVGWLRLCPDNRVSGDRVIGKGRLPTNNRLNVALRMAANSLRETNTYLGAQYRRLRRRLEAPVAIKAMAAKLARLIYRMLRFGMQFVDQGAEVYEAAHHQREIHNLKRRAAHLGFQIVEAPVA

SEQ ID NO: 175189 - protein, 283 aa, unidentified
MEHHVGIDVSLELSSLCVLDMAGKVIRETKVASEPEALVAFLRGLGLTIVRVGLEAGPLSQWLYDGLHKAGFEAVLLETRHVKAALSAMAIKTDRRDARGIAQLLRMGWYRPVHRKSVPSQEVRALLAARKQMQIKAMDLEQTLRGLLRGFGLKVGEVSRGRLAARIRDLVSGHTMLERIAEPMLTAREALWREFAKLHREVLAIVKEDQVCRRLMTVPGVGALVSLTYRAGVDDPARFAKSKSVGAFFGLTPKRYQSGEIDVTGAITKVGDAGVRTALHDAA

SEQ ID NO: 175190 - protein, 446 aa, unidentified
MNDRSGLSRGDRNRNDRLVRLRELLPVTNAIVGVDLADRTQAAVVTDHDSRVLARRRVSCRAWELGELLDWAVRTARSAGFASVTVACEPTGHRWRVLDQLAAQRGLALVCVQPLLVWRAREAEDLTWDRSDPKDAVIIARLAAGLRCYVPERTTETWARLRQLGARRVRLTTEATAGVQQLRDLLECVWPAALSASGAPFRSMSWCAAMAVVLDRADGDLRRVRRLGRARFTTAVRRELPGWGASRPCLRIVNAVFDALADPVGVIAHRAGALERAQLVLQDWQHTRRGLNQVEARMVAVLDQLGLTTLVTSIHGLTAVSAATLLAETGDLSRFGSPRAVVKHAGLCPRDNASGAHQGKTSLSGRGRPELRLAAWRAVWAALPNNPVLAARFDHLTTREHNRLARQQARAACAAALLRWLHVVVTRGIAWNPAIAAGDKQVLAAA

SEQ ID NO: 175191 - protein, 320 aa, unidentified
MLSFGGIDVSKDRLDVMVLPEEQCSSVPNDAAGWADLVERLSGCSIAAIGIEASGGYERGVVRALLAAGMPVRQVNPFKLRQFARASGVLAKNDPLDARMIASFVTIMPTRPAQRHTPAAERLAEMLAIRRQLSAGKVAAENAARLLEDAMLQRLSRRRIVRLAADIDLLDKRMVEIVATDDALVHRYRLLTSMPGVGAVLACTLIALLPELGRMSRKQVAALVGVAPYAFESGTLKGRRCIWGGRAHIRQVLYMAAMSASNWNPVLKAFHDRLTAAGKLPKVVIVAVMRKMITMLNAMVRDDVVWADRLSGRHVLPTAR

SEQ ID NO: 175192 - protein, 397 aa, unidentified
MYIVGIDIAKRKHEAAVIDGEGTVIIKPFSFTNNCSGYNRLLAMLTKAKLPLDEVSFAMEATGHYWLALFTRLQKEGFRVQVINPVQTNSIRSFYIRQAKTDPRDALLIAEVIRFGHFSESTLHPENIYELRELCRGRHAIVSMQADVKRKVVALLDQVFPEYETAFTNMFSDTSMAILQTCPTPKELSEMPLEELCHLIEVSSHKRFRMAKAQELQELARNSFGFAMAGDVFSTMIRLYAKHLDFLKQQVREMDRKIAEIMDTLDTPITTITGIGPTLGAYILSEIGDISRFSSAAKLAAYAGIDPTMRQSGEYNGVRNRMSKRGSPYLRHAIWLAASSAVLHDPALKLYFQKKRDEGKPYMASVGHACRKMVSIIYAVMRDNKAYTPCIPNEISA

SEQ ID NO: 175193 - protein, 388 aa, unidentified
MQVIADRPEAPSAIRSDLGAIFVSMELSRSTWLITSLSPGGGEKMSKHSVPAGDVCTLLTRFSVLKQKALARTGKSFQIIVIQEAGLDGFWIHRVLQNEGIESHVVDPASIATSRRRRRAKTDRIGGEALLRTLLAYKRGEPRVCAMVKAPAPEEEDRRRLCRERKVLIAERVKHVNRIKGLLFSQGVSGYEPLRRDRRRRLDELRTGDGRPLPMHLKVQISRELDRLELLLEQIKAVEAERDALLAAQQVAAPGPVAMLLDIKGVGPEFAAILWLEGLFRHFDNRRQIASYAGLAPTPWQSGSVDREQGVSKTGNPRLRTTLIQLAWLWLRHQPQSALALWFEERVRRNGGRLKKTTIVALARKLLIALWKYVTAGVVIEGAVMKAA

SEQ ID NO: 175194 - protein, 430 aa, unidentified
MMEEVDDAEMVVERIAALDLGKAGLEACVRVPSPHRPGRRMQELRGYGTTTAQLLEMVAWLRHWGVQRAVMESTSTYWKGVYYLLEAEGFECWLVNAREVKNVPGRAKTDRADAIWLAKVAERGMCRPSLVHPAEIRRLRDLTRYRRALVQDRTREQQRIEKLLEDAQIKISSVLSELHGVTARAMMDALIAGQRDPRALAQLAKGRARKKTAQLEEALRGFFTDHHAAILRMMLDNTDRISAQIAALDARIEKEIGPFSGQAARLAEIPGVDAVAAAELIAEIGVDMTRFPSDAHLVSWAKFCPQTHESAGKSKSKGRGRGNPWLAGTLGRIAFANSRAETFLGARYRRLARRRGKQKAIVATGNSVLTVVYYLLSDPMATFCDLGPGYYESRINVHRRARDLVTQLQALTGQHIVIRDGKAVITDAAA

SEQ ID NO: 175195 - protein, 404 aa, unidentified
MIFVGVDWAEAHHDVCVLDEAGAVMAKRRIADGLEGVRQLHALLADHAEDPGQIVVGIETDRGLLVGALVAAGYQLYAINPLAASRYRERHVTSRAKSDPGDAKVLADLVRTDRHNHRPVAGDSDLSSALQVLARLQQNLIWSRQRLVNQLRSSLREFYPAALAAFGTELAHPIALSVLQEAPTPAIGRTLSLSKLAAILRRAGRERNVETTALEIQAQLRAPQLATTPLVDAAYGKSVAATVRILRELNAQLASVEAELAPTFEKHPDAEIYRSLPGLGVVLGARVLSEFGDDRTRYAHPKARKNYAGTSPITKASGTRHVVLARLARNRRLADACHQWAFCSLTGSAGARRYYRTLRLRGKTHHQALRALANRLVGILHGCLHHRQPYSEQVAWPSSATAAA

SEQ ID NO: 175196 - protein, 303 aa, unidentified
MDKITTVGLDLAKQVMAVHGVDATGRMVARKVLRRDQVLSWAAALPPCVIAMEACGGAHHWARELSRQGHTVRIIAAEFVQAFRKSGKNDANDAEAIYTAARQPNMRFVAMKTVAQQAALCVHRLRQGVVEERTALINRLRGLLTEFGVVAPLSPEKLRRELARCLDPDVGPTTAAAFVATVGAPQEFRNGRQFVAWLGLTPKQRSTGGKTRLGRITKRGDAYLRTLLILGAKSALQAALRKPPERRHRLQQWIVAVLARIGYHKTLVAIANKHARIIWALLVKGEDFDVQHVTPKVLAVAAA

SEQ ID NO: 175197 - protein, 391 aa, unidentified
MPTAADPAEAPTAIQTNLAAIFVSLELSRSVWLITSLSPSSGGKMSKHSVPAGDVAALLARFAELKQKTLARTGQSFPIVSIQEAGLDGFWLHRVLESEGIESHVVDPASIATSRRRRRAKTDRIDGEALLRALLAYKRGEPRVCVMVKAPTPEEEDRRRLSRERKVLVAERVEHVNRIKGLLFSQGVSGYEPLRRDRRKRLDELMTGDGRALPAHLKTQISRELDRLELLLDHIKAVEGERNALLAEQQATAPPTVAAGKMLLDFKGIGPEFAAILWLEAFFRHFDNRRQLAAYAGLAPTPWQSGSVDREQGVSKAGNPRLRETLIQLAWLWLRHQPKSALALWFKERVSRNGGRMKKVIIVALARKLLVALWKYVTAGVVIEGALFNAA

SEQ ID NO: 175198 - protein, 320 aa, unidentified
MQIPSVALNIGADVGKDEMAMACAEGSFATRKIHNQRAALLAFLKDLPAGSRIGMESTGIYHEPLAELAHQRGFVVNVLNPKDTRHYAKAMGLRGKTDRVDAELIARLIAHEHEKLHSWIPPTAEQRQIDRLIKRRAKVSRIRATLTQSFKDVKGFAAEIKALRQRLDQLLAGLDARIKTLIEASTERKQDYARLRKIGGVGAVVGSSVLNTLERVPFKSADAFVAFTGLDPRPDESGHHHGRRRLSKRGPSELRRLLYLAAMAAAKTKTWKPIYQHYRAGGLSSTAALVVLARRIARTAWSIYTHKTAFDPQRLTKALT

SEQ ID NO: 175199 - protein, 372 aa, unidentified
MNYNTVYVGMDVHKESFTLCSCKYEDEKASHYQRTPASYKNVLRYLAFLRTIYGEDTRFVCGYEAGCLGYSLYHQLENFNVECVILAPTTMLEQRSKRRIKTDKRDAEIIARSLAQHNYSPVHIPTETDNQTKEFIRMRDDHKAELKKIKQQILSFCLRQGYQYDGSGNWTAKHVKWLRSLKPAGLYKEILDEYLLTYTILTDKLNRLDQRIEELASKEEYKESVSKLTCFLGIKTHTALSVIVEVGDFQRFVSARKFAGYLGLVPGQHSSGDDRNGLGITKAGNTHVRRLLVESAQSYTRGKIGYKSRVLRSRQAGKSPQVINYADKANERLRRRYYKMVLKDGKKYNIAKTAIARELACFIWGMMTDNIY

SEQ ID NO: 175200 - protein, 388 aa, unidentified
MPFTTATRTEASTAIRTDLGAIFVSLELSRSKWLITSLSPGGGEKMSKHMVAADDVAGMPARFAELNRKAQGRTGRRYPIIVIQEAGLDGFWIHRVLHAKGIESHVVDPASIAISRRRRRAKTDRIDGEALVRALLSYKRGEPRVCAMLRVPTPEEEDRRRISRERKALTTERVRHVNRIKGLLFSQGVSGYEPLHCDRRKQLDALKTGDGRSLPTHMQAQIGRELDRLELLLEQIKAVESARDAMLAAMPVVSPAPAMLLELKGIGPEFAAVLWSEGLSRRFDNRRQVAAYAGLAPPPWQSGSVDHDQGVSKAGNSRLRTTMIQMAWLWLRHQPQSALALWFDDRVSRNGGRLKKATIVALARKLLVALWKYVNAGVVIEGAIMKTA

SEQ ID NO: 175201 - protein, 329 aa, unidentified
MSNHLPLSVIFGADVGSTEIVIACADPNQAVRTIANNQKAIEAWLKLLPKDAVIGMEATGRYHELLADGAARRGHRVYVINPKRLSEYAKGVGQRGKTDPLDARVIARYVARETDKLHPYTVPTATQRTLRDLLSQRANVVRHRGAIQQCLRAMASNGNAALRAAQQTAQQGLRALIAEIDAQLKAIVMANRALESKRVLLHTIPGIGPLNSVALTHRFDRTPFANSDAVVAAYGIDPRPKDSGKKNGKRCLTKQGNAEDRRLIYLAAQSAVKTKLFKPLYQALRAKGFASTEAILIVARKLLRIAFAVWTTNKPFNPEKLGLLACKKP

SEQ ID NO: 175202 - protein, 323 aa, unidentified
MNKDIKYFGIDISHLVLDVTDSDGNYYQFKNNVSGFKKFVRLLNSNCHCVMEATGYYHYQLAYHLLESGIKVSVENPLAVKRFIQMKLSKIKTDKSDSKLICAYAQQVELKLWHGNSKHQIECLQMTRLLSVYTKQSTMLKNKLHGEAVLGNPSKVVVASLKRSLKQVKKELETLESKLLVLVKQVHQDVLTRIKSIPGIGDKTAVMLVVLTDGFNRFTSSSELCSYAGLTPVIRQSGSSVKGRPRISKIGNQKLRNLLFMCSFNACKYNKACRDLYERIVAKGKSKKLALIAVCNKLLKQAFAIAKSGLVYDDTYRSTLVKN

SEQ ID NO: 175203 - protein, 343 aa, unidentified
MTNTGLDVSLKEISICVVDGEGKSIARDNCPADPEGVMGWFRNRSLEPQQIVRESGMLSIWLQRGMVRLGLPTTCIDARKAHKSPSARLNKSDAGDAEGLAQLARTGWFTPVHVRSEGADRLRVLVGARERLIRLRKDLEGHIRGVLKTFGIRMSGNSQGRQRQAFRDQLAAAGETDPLLRAIADCFIATHATLCQAAADLDAVVKKKARDHPVARRLMTIPGVGPVVSLNFIALVDEPARFGKTSDVGAYLGLTSKRHQSGGVDWSGRVSKCGDGVMRSPLFEAATTLITRVRKFWLGGPPCRPTGLREGGRGSCAKTCRAHVDNVEERNRVRLENGGRCLI

SEQ ID NO: 175204 - protein, 341 aa, unidentified
MGQAHTIGLDIAKRVFQAHGADASGRVVFRKRLVRAKVLAFFAAQPPCTVAMEACAGAHHWARELGKLGHIVRLIPPAYVKPYVKRQKNDRADAEAICEAAQRPSMRFVPVKTEEQQANGVVFRARDLLVRQRTQCINALRGHLSEYGYVFPQGITHAEAVIAHVEDPHSSVPESARAVLKVLIGTFQALEAQIQALDAEITQRAKADPVARRLMTIPGIGPIAATAITALVPAPEGFRAGRDFAAWLGLTPLQTSTGGKQKLGAISKMGERTIRRLLILGASAVVRWAGQRGTPAGSWLARMLARKPKMLVTVALANKTARIVWALLVKGGVYRAPAPAA

SEQ ID NO: 175205 - protein, 457 aa, unidentified
MPARGKQPRSGAGSPAHTIDPNAAGVDIGATEIYIAVPTDRDPHPVRKFSTFTEDLLAAADWLKQCGIKTVAMESTGVYWIPLFQILEAGGMKVCLVNARHVKNVPGRKSDVCDCQWLQHLHSAGLLRASFRPEQQICAVRSLVRYRDSLVQLSAMHLQHMQKALDQMNLQLHHVISDLGGKTGMAIVEAIVAGERDPHQLATLRDPRTRASKETIAKSLVGDYRREHLFTLRQSLTGFRQNGQLIADCDVEIESLLKEFSSGDGPGAEAVPEPQAELKRKPRRNEMNFDLRTQLHRIFAVDLTEIPGIDTLTAHTLFTEVGRDLSKFANVAAFTSWMGLCPDNRVSGGKILHAQTRRVNNRVAKALRMAAQALSRSHGWMGQYYRRMRAKLGGPKAITATAHKLARIIYHLLTTGQAYDETVFAQQEAQNNQRNEKRLRHQARKLGFELTLIPTEV

SEQ ID NO: 175206 - protein, 409 aa, unidentified
MQVVHSRCAGLDVHKETVVACVRVAKNKRIRQEVRTFSTMTSSLYELAEWLIAEQVTLVGMEATGVYWRPVWHILEAAGLEQILVNAAHVKAVPGRKSDVNDATWLASLVAHGLVRASFVPPTSVQELRDLTRARKQMTKQRTQHVQRIHKVLEDANIKMTSAITDVMGASGRAFLAAIIRGVTDPKALARLGNTRLKASRAKLVEALRGHVTEHHRFMLSFHLEQAEQTERALVGLDEQAAALLEPFREVVEHLCSIPGVGEIAATAILAEIGFDMARFPSASHLVSWACLCPRSDESAGKHRSTRTRRGAGWLKPMLVQVAWSAVRKKNSYERALFYRLKAARGPQKAIVAVAASLLRVIYAMIHDGVPYRSLGPDHFDSLDHERKKRRHLKQLEKLGYNVTLQDAA

SEQ ID NO: 175207 - protein, 353 aa, unidentified
MEKKDIWIGTDVGKKNCVAAVDFPTAGSSFSRRKVAELPAFEFENSLVGVKKMLRWIDRLTKEYCQENNIPANIVEHHFLMESTGCYSRQLEGFILETRPTLKPIIENAALIHSYRKSLNLKNETDFLDAKGIAYYGSDRQPEYRQKNPEIYRTLAEMCRLRELYVTQLGALQNFYESLQMPMLKRMNTATIKMLNSKIDDLTREIQKFVREHEELRQQAEIMVSMPGIAILSASIILAEIGPLRDFSNRNQIGAFCGLNPKQKISGTSIHRSKLSKAGSSLARKILYLDSTQAVKIDPYLAEFYHRLIVNGKSPKTAKCACMRKMLTILRAMVAANRRYTPELFTKKLQKTA

SEQ ID NO: 175208 - protein, 316 aa, unidentified
MAGELYIGIDVSKDSLEVAFGCDGEVRQVANADRAIMALAAELKALGPKLVVMEASGGYERIAAALLWEAELPVVIANPSQVRDFAKGMGQYAKTDRQDARIIARWAEVKNPPVRQLPDAQGRELSELLTRRRQLLEMLVAERQRLAQTVSKPIRKELNASIGSLQRRLERIEAEIEQRIRKSDLWNRTRELLESVPGVGKLTSFTLLAELPELGTSDRRHLASLVGVAPYPRDSGKWHRPRLTHGGRAAVRSALYMAALSASRFNPVLEPFYQRLLSRGAAKKKALVAVVRRLLGILNAIVRDRIPWRSSCVVPA

SEQ ID NO: 175209 - protein, 428 aa, unidentified
MKFKQINGQNQRIERISPTQLVVGIDMAKDMHVAQVTNFRGIVLAKRHLTFKNAIEGYEKLQRWMDELQRKHQLKTVIIGMEPTGHYWWNLANWLANKGLNVVLVNPATTKRNKENRDNSPSKSDPKDALVIADVVCRGYYYDYTRQASVFQRLRTVMSDREFWVTHSVRLQNRIIRWLDIRFPEYTSAFNDWTCPRSLATLKEFPSPLDLESLSVSEVITGWREHMKRAGGSTGMEKAAQLIAQAKKSVGDTTALSEAKQDLERLLKEYERIVEILEKMEQEVRALLGEIPLAQQLRTVKGLGPIFIAAILSGAGDLKQYAHGRQLLRKAGLNLAESTSGKRKGQIVLSKRGDAKLRKYMYLATISLVGTNPVFRKLHEHNVQVKKMKKQQSIFKLLGKLARILIGIVQSGEPFSPEKASSFFTEAA

SEQ ID NO: 175210 - protein, 328 aa, unidentified
MKKLFIGIDVSAEKLDICLKQEKKMETFIIKNKSSDIKKFFKPSKFENKNVVLGMENTGEYNNYLYEVLAHRKDLKVFVINPVHISKSLGLTRGKNDKIDAIRIAHFIEKNHTELEQWVAQTQEIKELKILFTERKHMVHMIAANKQKIKSLTKHKKATISTKIIRLYEQQIRELKRDLEEIEHLIKEIINNNEDLKRKDQLAQSVPGVGKVLSWQLLCKTEGFTKYTDPRKLACCAGVVPFSYSSGSSIRSKSRVSKMADLRLKSTLQMAAMRAIQMDNKLRDYYLRKVEEGKNKMAVLNAIRNKIIHIVIAIIKNNRFYQNNLVVS

SEQ ID NO: 175211 - protein, 469 aa, unidentified
MSKRAISKRAKSAQRKPRKVKTQGVAALPIFRPNTAGIDIGAMEILVAVSPDLDAEPVRSFGTFTRDLEAIAGWLEACGVTSVAMESTGVYWIPLYQVLVDRKIEVCLVNARHFHNVPGRKTDVLDCQWLQYLHSVGLLRGSFRPEQVICAVRTLLRHRQSLVQMAAEHTLHMQKAMEQMNVKLSHVISDITGVTGMRIIDAILAGERDPRELAKLRHGCIQADEETIIRSLEGDYRAEHLITLEQSVAGYRFYQKQMAELDQKIEGFMEAIPAKIDLQEHPLPADAKKHRRRQHNAPAYDLRSHCYRALGVDLTQVPGFDGPTVQVLLTEVGPDLSKFPGASSFANWLTLCPNNVITGGKILSAKTRKGKSRAATALRQAAQTVERSDNYLGQFFRRMRARLGRAEAITAVAHKLARIFFAMVRKGQAYDESLLAKADTRQRERQEAKLRRQAREIGFQLVAMETAKA

SEQ ID NO: 175212 - protein, 369 aa, unidentified
MKYVGIDLHTNCFTCCYLFDNSREKQTETFNLDSTGLFSFFKSIDKETYILVEATINTFQFVALFKDMIKEVIIANTYQLKSVGIPGKKTDKLDAFKLAEKLKAQIVSGVQQIVPVIIPPKEIRDLRALFATYRTLRKEIGRTKNRIHSLLKENLYPFTKEYIFGKKARKEIRTISDDLTLTFQINLLMDTLEHLEKAFDNLVNEINKAGAIFMPQIEILTSMTGISVITAIAVIADVFDITRFKNSKHFASYLRSAPRVESSNDKTVIKSTTKAGRKLSITLLSQSLNHFRDNNSKLNRFSERIGKYKKKGVVRMALCRKVITEIYQMLKKEEYHYFRNPLLHEKKMTDYRKLLEKQKNNFHKLQIVA

SEQ ID NO: 175213 - protein, 456 aa, unidentified
MNNYLGIDVSKGYADFALIDEQKKPIVNSFQLDDTPDGHNQLGDFIRELFKQHPDLTLLASAESTGGYENNWLDCLIKLQRCYAIKVARLNPKGVHHYHEAKLNRAITDAISARLIAEYSMSHQEIIRFDQPDETYSLRKQWTLIKLLSKQKTQLLNQLDNLVYQSNTELMIYCRSYWPAWLLQLLRIFPTAKDLAQANVDQLTKIPYLGTDKAQQILQQARQSVASATDLVSGEMIKTVIAEIIQREKVIAICKKSLTENCSLPDVELLASIIGIGKFSAVGLIIEIGTWLRFSSAAKMAAFFGLHPILKQSGDKTWVARMSKQGSSEVRALLFMCAMVAIRHNPIIKDLYAHSLAKGKSKMSAIGICMHKLLRIVYGVLKSGKTFDPAIDQANRTRKPDQRKPNKQETRRLQPVDENAPVSARQNKKRKEQNQSQGELVTICEIKAPALSHCST

SEQ ID NO: 175214 - protein, 435 aa, unidentified
MSLKESGRNANKRKEYVHQPDLLLVGVDVSKAKHNACMGTQTTMSCRKLEFTHTREGFQRFEQTLKTHMVKNGTQHILIAMEPSGIYWQALYERLKSCGYEVCLVHCQAVRNNRKTMQDGTSKTDEKDAASVFDLLRQGKFFLPVARDLELKAAYRLMQRHMALKKRGSQLRNPLRAALHLAFPERNPLVKDLTQPTALRFLQASPTPASVLRNGRTCFLAQWQSRQRCGQWRPETCHRIYDLAQASIGLQDSSRLDEFEITTLAGDLVDALTKAQLWLDKAIALLEPRADYQLLVQLPRIGKPTAAAILTAIGDIHEYHNGKQLVKLAGLDLRLFESGSSIRKLPKISHVGSAYLRYWLYHYAMRRIAHEPHFKAYYQRRKQQSPGKGSGQRALIAVCDKTIRMIYRILTDHAPYNPKKDKSIADYYAAQRQAA

SEQ ID NO: 175215 - protein, 419 aa, unidentified
MRRMLDRCAALDVHKKAVTVSARVSGTDGSREELMAEFATMAADLLALRDWLKQLGVTHVAMEATGVYWKPVYYALEDDFELLLVNAQHVKNVPGRKTDTLDAQWLCQLLECGLLRASFVPPKPIRALRDLTRYRKSLIQERQREANRLHKVLEDAGIKLSCVATDVLGVSGRQMLAALLAGTRDPELLAELAKGKLRAKLPMLRRALAGNFQANHALIVSQILAHLDYLEEMIAALTGEVEQRLAPFAPKAQLLCTIPGVGARNSQVIIAELGPDMDRFSTDRHAASWAGICPGNNESAGKRRSGRPRRGNPYLRVALTECANAAVRTKNTYLRAQYEQVKRRRGHKRAIIAVAHSILIASYHILKDQTPYHDIGGDYFARRADPDRIAKRLIAQLQRLGHTVALQPTTAQEAVATPA

SEQ ID NO: 175216 - protein, 477 aa, unidentified
MRTIGLDLAVQAAHKAVVLDERGHFCTPIITVHTQPSELSHLLIRAREGAPSDEVQIVMEPTGMAWFPIAVYYARQGVAIYLVNSQEVADLRRYYKRHAKSDRIDARVLARLPLVNPDKLHRLVLPAATTLACQRACKQLDHLATQITALKNRLQAIDRFAWPGLEELVFADPFAPAARFFREHWYDPRQVVLLGANAMRQQWEASALDASDGGAWVEPLLTLAQQVLTLYGPDGQFLDFGQLQAEVQRDQVWLTGLEQQHHTLRLRTVRPLYRSVHPSRNLETLKGVGQDSAAVYASFIGDPRRFSSTRLFRGWTGMVPNSEQSAENEAKGLHLSQAGPDLIKKYAYLDAEIARRYDPQIAAIYYDQMMRKGKHHKQAVCACATHLLDRVLAVLRADKPYQMRDSDGTAISDQQARAIIMERYTVPQEVRRRTGYPLGEAKSAPAGRSTGRTAGQAGGWATAAARGATELSATARR

SEQ ID NO: 175217 - protein, 401 aa, unidentified
MKSLSGGIDIGSESHHVIIMDDTGEVLYDRKVAHQFSEFHKVIGEFKGIEEREQGVIAFAIEGKNGYGAPFDRILIENGFKLYNVDNLKLRRFRDVFGSEWRNDRRDAKMLAKMLRLKDHMDAQEEKAFIAVEKPSAVHEKLRILSRHQQSLIDEKVRIQSRLRKRLLEVCPDILEHGDTNSKKLLQLLKKYPDFSRYKKITLGALLKIETIGKKTAVSILEGLRNIQYVEELTGIYKALISSYCHRILELKEEIKMLDRELEEAGQKSAEVMQLKSIKGVGTKLSSRLAGEIGDIRRFNRESQLAVYCGVACIDDDSGKSKRTKAVYKANRICKATMIEIAGCTIRHVQESKTYYEKKRAEGKKHNHALRCLARQLIKVIFKMLTENREYIYKEELKKAA

SEQ ID NO: 175218 - protein, 320 aa, unidentified
MAKQVEERILGVDVAKSWLDIYDAVSGESTRIDNNKAAVVAWLKARPDLYKVAVEATNRYHELFIEQAHARGHQVFIIDAFRLSRYREAVGHRAKTDRCDAELLARYLQQEQAHLRVWEPRDPCQTRLWQLMKRRAMLVKTRVSLRQSLEDIGSLDEAAKELIRHCDRLIRTVERELQMQAEQLDWQQDLDLARGIPGVGSTTSLALVAAFHRHTFRNADAFVAFLGLDVRVRDSGRHRGRRKLTKKGDPEVRRLLYNAAMSGCKQPHWKPYYRSLRDRGLSGTAALMALARKMVRVCFALLKMQVSFTPEARKTGCMAS

SEQ ID NO: 175219 - protein, 351 aa, unidentified
MSHKTAATVAHTIGIDTGKNTLHLIGLDDRGAIVLREKVARDRITVRLANVPPCLIGIEAGMATHYVARELSALGHDVKQVPPAYAKPFRQGHKNDFRDAHAVAEAVQRPSTRCVPVKTDDQLDLQALHRVRSRLVGQRTAVINQIRSFLLEHGITVRQGLRFLRQQLPDILAKRSDVLSPRMTRIIGDLSDDWRRLDERIQHITEEIEVLAHSNESCRQLMTVPGVGPIIASAMVAAIGNGTAFAKGRDFAAWLGLIPKQMSTGDRTILGRITKRGNRYLRTLFMQGARVILLRPANWMKHSFGPWLTAAANRLHHNVLATALANKLARIAWTVLMQARSYEARVEPRTA

SEQ ID NO: 175220 - protein, 365 aa, unidentified
MTSMTTIPGPVTGGVDTHGDTHHAAVIDQVGREIADAEFRATPAGYRQLLGWLRGHGSLQRVGVEGTGAYGAGLARHLRGQGVSLVEVDRPDRKTRRAKGKSDPIDAYAAARAALNGSATGTPKTRDGRVEAIRALRVARRGAVKARTQAMNQLKALVVTGPADLREALRDLPAGVLIDTCARLRPGAQGADLAALSDPAAATKTALRHLARRHQRLGQEITELDADILPLVRAAAPALLALRGVGPEVAGQLLATAGDNPDRLRCEAALAHLCGVAPIPASSGRTDRHRLNRGGDRAANNALHTIVMSRLRYDPRTQQYMARRTAQGLGKKEIIRCLKRYVLRDVYRALLTAPATPTKDLAPAT

SEQ ID NO: 175221 - protein, 359 aa, unidentified
MRALYAGFDLHGNSNYLGIIDGDGKRVFGKKLSNDLEWIREVLVPFEAEVVGVAVESTYNWYWLVDGLMEEGYKVHLANPSAIQQYVGLKHADDKHDAFWLAEMLRLGILPEGYIYPKEERPVRDLLRKRGHLVRLRTSLVISLQNILSRNLGRKVDVNDVKALREDRVTPLLEGSEDLVLAGRVSKEAIDFLTHQIRRIEGVVEKRIELREQYRYLLTLPGVGKILASTIMLETGPIGRFATVGDYVSYCRKVPSQWTSNGKRKGSGNKKNGNKYLAWAYAEASELARRFYSEPRAYYHRKMQKTNAPVAHSALAHKLARAGYYVMRDQVPFEPQKLFGRGRGWNGEPELGLVKSHEA

SEQ ID NO: 175222 - protein, 351 aa, unidentified
MLIIGLDYHPSFQQIAFIDNVTGEYGERQLLHKGGEAESFYRELKQQGVEVRIGMEATGHARWFERLVAELDFELCIGDPAQIRAKRVRKQKTDREDARLLLTLLMEGRFPRIWVPGPENRDLRQLLWHRHRLVQMRTRIMNQLQAVAMNEGVRRKKRLWSDAGRAQLESFSLAPWATQRRRDLLQLMDQLNLTIEELTTAVKKEAEKIPEVLRLMTHPGVGELTALAFVLIIGTPQRFQCGKQVASYLGLIPSEESSGGRQRLGHITKQGNSLVRFLLVEAAQAAARSDPEWRGRFLRLAMRRERRIAKVAMARKLAVRLFWMWRRQWDYQQLMKFGSYAGESEYVHGVQ

SEQ ID NO: 175223 - protein, 369 aa, unidentified
MIVIGADTHKRSHTLAAVSEATGRALGDVTVAATRRSFGQLLRWARGVGGERVWALEDCRHVSGSLERFLLARGERVVRVPPKLMAGARDSAREPGKSDRIDAVAVARAAIREGVEALPVAQLAGAELDIRLLVDHRERLVKQRTALINDLRWQLHDLWSEFEIPLRALTGPRWQQRLAGRLQRTEQSTRIRVARDELKRIRELTRAITTLEQELAALVASFAPRLAADPGCGTLTAAKLIGEIAGIGRFASDAKLARLSAAAPIPASSGRTDRHRLDPGGNRQLNCALYRLALNKARHDPETQAFLDRKQAEGKTRREALRALKRHLVRRIYRLLQSPASDTPGRPPIISPAGTTIACDTPYSHFNLT

SEQ ID NO: 175224 - protein, 388 aa, unidentified
MTQAPGALPTSTVLDYERTLILAIELSNTSWVLAAQIPGLPGVKAKRSIEPTPEALMAAIENYRTRAVKAGRNVERVVAIYEAGWSGFWLARWLAQYGIETHVIQPSSVPVDRRARRAKSDGIDAELLLRTLLAWLRGEPRVCSMVPIPAEADEDARRRVRERAELVAERVGLVNRIGAVLATLGVGEYNPLRRDRRQRLDELRTALGGSLPTHARAKIVRMLDRLELLLIQITELEKSRDAVLEDENPDKAASMIQQLAKLRGVGVQSATVLVREGFVREFPNGKALGSYAGLTSTPYSSGGTEREQGIGKAGNVRLRTLMVELAWLWQRYQPDSAQVSWFRERVSGTGRRMRKVMVVGLARKLLIALWRFATQGVVPEGAVMKPAT

SEQ ID NO: 175225 - protein, 405 aa, unidentified
MSEGRFAGVDWASEEHAVCVVDEHGRIVEGRRYRHDERGIRALCARLLGVGVSLVAIERPDGLLIERLLDAGLSVIAVHPNQVVASRPRFHAAGGKSDSFDSFVLAELARTDSHRFRVLAPDSDQTKALRALTRGREDLVRARQGLANQLRAQLECFWPGASKVFTEIDCPTALAFLERYPSPGDAHGLGEQRLAAFLRRHGYSGGRKPAELLERLRGAAQGRAGELEIQARRQVVLGLVAALKPLGEQIEQLRVEIRRALLEHPDGHTFRSLFIDDRTVLCPATILAEMGDNRDRYPTYRQLAADGGQAPVAVESGKSKHARFRWACDHRLRGAIDTLADASRHHNPWAKDIYTRARQRGCTHQHATRILGRAWCQIIWRIWHDHETYDPAQHTALQRLLAAST

SEQ ID NO: 175226 - protein, 411 aa, unidentified
MDVVHERAAGMDISKRDVKVCVRVPGKRPGTFEQKVTTWGATTSQVLELREHLLANRVTTVVMEATGDYWKPFYYLLESVLPVTLVNARDVRNFPGRKTDVSDAGWLAQLAAHGLVRASFVPPEPIRELRDLTRTRATIVQERSRHIQRIEKILEDAGIKLSSVVSQLNGVSARSILDALVAGERDPVKLAALAKGRLRAKIPELVEALTGRFRDHHAFMVNLHLTQLDHSATLIDEITARIEVVMEPFRVFRETLTTIPGVSVRVADVIIAETGGNMHIFPSPGHLASWAGVCPGSNESAGRVKSTRTRPGNAHLKAALGISALVITRQKNTHLAVKYRRIAARRGSIKAIVALEHSILVAVWKMGTTGEAFTELGPNYYSNRHPDRTKSNAINQLRTLGYQVTLTPTAA

SEQ ID NO: 175227 - protein, 319 aa, unidentified
MEVLGIDIGKTRFDACLMGQNLKQSISLANNEVGFAQLAAWLVKQRPNIAAPLHACMEATGNYGLDLAAFLFAEGVTVSIVNPRKIKAFGEAELARNKTDQLDCALIARFCIAPNPQPWTPPAQHIRNLRELVRRCAALKAQRTQELNRQKSGFACEAVRASLLRQLTHLNAEIDIMTAEIRALLAADSQLQRNFDLLNTIPGIGEVSATLLLAEIPNITDFTPKALAAFAGLSPAEHSSGARQRGTGISRIGNAAIRSMLYLGALSASRHNPHLTDFVARMKDAKKPKKVILVAVARKLLVLAQAVLRTQTGFHAHAA

SEQ ID NO: 175228 - protein, 315 aa, unidentified
MSARVVGIDVAKDELVIACRPSLEQWTTPNTPDGIAALVDRLRPMEVTTIVLEATGGYEQACATALAVAGLPVAVVNPRQVRDFAKAIGQRAKTDRIDAVVLALFAERVQPAMSALPDEAQADLAAHLLRRRQLSDMLVAEKNRLGLARKAVRGSLKKHVAYLERELRIADSDLRQAIEASSVWRVQDDLLQSVPGIGPVASQTLLAALPELGQLTRQAIAALVGVAPMAQDSGAMRGKRVIVGGRASVRAVLYMATLTATRCNPPIRAFYQRLVAAGKAKKVALVAAMRKLLISLNAILRDQRPWSPSMTPISS

SEQ ID NO: 175229 - protein, 381 aa, unidentified
MTEMIIGLDPHKASNTIAVLDRDETLHVECRFENTAEGMVAMLDAVAGFTDRVWAVEGANGIGRSVAQRLVAAGETVVDVPAKLATRVRVYSTGHGNKTDRADAVAIGRAALHSKHLRMVRPDDENVALKLLSDRRHELVSSRTQSVCRLHRLIRELIPGGTPRALTAERAEALVNGLNVSDAAGVMRIELACDHIDDLKRFDRRIDQITLKIHAAVKDSGTTLTRIYGVGPLTAGLILGEAGDVSRFPTRNHFASYTGTAPIAVSSGDNNRHRLSRSGNRQLNHAIHIAAIAQIRYDTPGRAYYQRKLGEAKSRREALRCLKRRISDAVYRQLQLDRELEQHQDQAWPRWPSSRQGHPTYRSPETLRRNGQPMKQRTVPV

SEQ ID NO: 175230 - protein, 394 aa, unidentified
MVVSVGIDVSKDKHDCFILSSEGEVLADAFTIPNTMDGFNCLLERIQDCTTPQDKMKVGIEATGHYSYNLLGFLLDNSLTTYVLNPLRTNLYRKSLSLRKTKTDQVDARTIASMLLSDVGLKPYTDAAYHNEELKSLTRYRFDKVKERAKLKSSIARLVCILFPELEKLVPSLHIASVYALLEEFPGAKQIAAAHLTRLKALLETASKGRYKRDMALEIRDAARNSIGSWMPAKSLELQHTIRLIRELDNEIAEIEAQIQFIMDEIHSPITTIPGIGFRMAAMIFAEVGDFTRFDSPDKLLAYAGMSPSTYQSGQLSLSGAYSHMEKRGSRYLRYALYNATKHVCHWDPTFAAYLAKKRAEGKHYNVALSHAAKKLVRLIFAMEKSQRPYCAAA

SEQ ID NO: 175231 - protein, 322 aa, unidentified
MNNDKYVAMDVHKASVVIGVRDAAGKMIGRSVVENKAQTIKDCVRGLSGTIHLTLEEGTQSAWLYDLLKPLVAECIVCDPRRNKLLESGNKSDDIDVAKLSELLYLGRLRAVYHGDHGTRVLKELVHNYEALVKDNTRVKNRLKAIFRGRGITYEGGEIYELKRQQEWLGKLPERGVRERATQLYEQLERLEGWVVAARQQMLRESRKQKAKKILQQIPTLGEISVAELIATVDTPFRFRSKRQFWTYCGLAVVRHTSADYRFEQGELRRRAKPGPTRGLNRNYNRRLKKIFKSAALTGSVKGPFKQYYERLLARGLNPELA

SEQ ID NO: 175232 - protein, 414 aa, unidentified
MEVVHPRCAGVDVSKRDAKVCVRVAKPGRAKAVSTVSTWGSVTNQVLALRDHLIAEAVTLVVMEATSDYWKPFYYLLEDGPFEVMLVNARHVKNLPGRKTDVSDAAWLAELGAHGLVRGSFVPPEPIRQLRDLTRTRTTVTRERAREIQRLEKLLEDAGIKLSSVASDICGVSGRLMLEALIGGQRDPVVLADLAKRAMRSKIPELTEALTGRFAAHHGFLARLHLDLIDSHTKAIDELTKRIEVVIEPFRVARDLIVAIPGISTLVADVVIAETGADMTRFPTAGHLASWAGTCPGNNESAGRVKSTHTRPGNPYLKGALGVAAMSAARSHGTYYSAKYRRIATRRGPVKAIVAVEHAMLIAIWNILTTGEHYNDPGDDFYTRLNPDKTKNRAIDQLRKIGYDVTLKPLASAG

SEQ ID NO: 175233 - protein, 429 aa, unidentified
MNFRPMAGIDVGKFFSEMAILSPSNEVIARMKIRHDSSSDVERAVKLLKKTEKDFDSRPFVVMESTGHYHKILFHSLCKAGFEVSIINPIQTDSIKNIGIRKVKNDKVDARKIALLYRFQELKTTNIPDEDIECLRSLCRQYYKLSDELTAYKNRLTGIVDQLMLNFKDVFPNIFSKAALAVLEKYPTPVHILKANRNKLIALIQKNSRRSLKWSTAKYELLVSKAREFAPLSINNSSNIAMLGVYISMIKTLEENLEKVLKAIRSLIAEDMAKDIPMLALTLELLQSIPGIGLISAVTILAEIGDFSAFSKPGKLVAYFGIDPSVMQSGEFTGTQNKMSKRGSRLLRRVLFTIALANIRTKRDKTACNPVLMEYYKNKCQNKPKKVALGAIMRKLVNYIFAVLRDRKPYQLRSPQEHAKNLAAKHTAA

SEQ ID NO: 175234 - protein, 336 aa, unidentified
MTIIRIGLDTSKHVFQIHGVDENEQPVLRRQVRRSGVAKFFAKLPATRIGIEACGASHHWARLLRGLGHEVMLIPPQYIKPYVKRGKNDAIDAEAICEAMSRPGMRFVAVKSAESQAALTILGVRDLLVKQRTMLINAIRGHAAEFGVTAPKGPQQICELLRRLVVEGSVPALAREMIGVLAGQLEALNTKLREIEARLMAWHRQDQTSQCLATIPGIGPIGGVSFALKVPDPKGFRSARHFAAWLGITPREHSTGGRQRLGKISRAGDEGLRRLLVLGAMAVIQQAKKGRAAPWLLGLLARKPKKLVAVALANKMARIVWAMMVSGETYRRQTAA

SEQ ID NO: 175235 - protein, 346 aa, unidentified
MKINRVGVDLAKNVFQLHGADHRGKAIWKRRLSRGKWLAVLCDTVEPGTEIGMEACAGAHHWARQLVERGYEVKIVPPQFVKPFIKSNKNDANDAQAICEAMGRPNMHPVKVKTVEQQDLQAMHRIREEIKSHRVAKANQIRGLVTEYGLVAPQQLPALRRAIPEWLEDADNGLTFLFRQLLQGLWRDLYALDQRMAELDKQIAEIAQEDPTARRLQQLRGVGPLIATALVATVGDARQYRKGRDMAAALGLTPRQHSSGGKERLLGISKRGDAYLRCLLVHGARSAVRTAKDKEDRLSRWIINLQSRRHANVVAIAMANKMARMAWAMMTKGVDYDPDFNPVSAS

SEQ ID NO: 175236 - protein, 337 aa, unidentified
MSEISILAIDLAKGSFQVCGVKADGAVVFNKSMSRPRLYQLLADHAHCAVAMEACATSHHWGRVAQSYGHEVRLIPAAYVKPFVKRQKNDRADAEAIAEAASRPSMRFVAVKSAEKQGRAVAFRTHQCFVRQRTQLINALRGHLAEFGLVAPKGPASLKLLERALAQPDVDLPSPVREMAALYLDQICRLTELIEQMADELDRASKTDEELRRLCTVPGIGPVTAGAIAAFAPDLSTFDSGRNFAAWLGLVPRQRSTEGKARLGAVSKMGQCDIRRLLIVGAMSVIRWVVRKGGSANRWLAELVLRKPRMVAAVALANKMARMIWAMTTKQENYRMA

SEQ ID NO: 175237 - protein, 466 aa, unidentified
MQPFYMGLDVSKGYADFMIIDHRKQPVIKGFQLDDTFSGHSCLYDVLSRFFADHPDATLFAAMESTGGYEDNWYNALRHFQGVLNIRTARLNPLGVVHNSKADLKKNTTDKISAQNVAEYLVAHPEKVTYQQDDQMAGLRKQWGFIQMLTKQCTQIRNQFNTLLYTAFPELLNYCQDGVPDWVLKLSVKYPAAVKLKNARVITVAKVPRITIQRAQKLIAQAKDSVASTTDPVTQQLIKDTARQILRLKQTIATQKLRMAKQCQLPEIKLLKSFIGISDWSAIGLLIEIQTIKRFASAKKLASFFGLHPVYKISGDGSGSIAMSKQGRAAPRKILYMVALSAINSNPLIKQLYEKHQQRGKHNLSAIGICMHKIVRIIYGMLKNNQPFDPNIDLAHQQRGIKAAAKGRVESKARRFQDYDDSAPVSRRQRKKRLERKQSHSVTDTKSGISAPVPLGNILADILPQL

SEQ ID NO: 175238 - protein, 437 aa, unidentified
MAMQTSVYERLMGGNRKQRKDLQRRLCSDDPGLGVVHANAAGIDIGNESHFVAVPAGRDAEPVREFGSWTADLERMAAWLQSCGIETVAMQSTGVYWFAVYDVLEKRGLQVFLVNASHTKNLPGRKSDVQESQWLMKLHTYGLLRNSFRPPEEIRPIRAVWRLRDRHVEEAARSIQHMQKSLTSMNVQLANAISDVGGVSGQAIIRSILAGERDARQLARLRDRRIKASEEEVARSLEGTWQEDQLFELQQAVDEYDFRQKQIAECDRKLQDYLAVLPSWPAPDGDACTVMPPPATPGKKKRRAKKIGGGNAPQSFDLGAELKRVTGVDAIRIEGVNLMTIQTVVAELGTELGNWWPTEQHFASWLGLSPKRDVSGGKVIRHTHGKNPNRVAGILRMAAISLLRSDSYLGARYRSLRTRLGAPKAIKAMARYLACVI

SEQ ID NO: 175239 - protein, 375 aa, unidentified
MQEKLRFLGLDVHAETVAVAIAEPDGEVRSLGTIPNRTESIRKMIRKLGPAEKLRACYEAGPTGYVVYWQLAELGVQCEVVAPTLVPVKAGDRVKTDRRDAEKLARCYRSGDLTAVWIPDEGSEALRDLVRAREAAKQDQMRARHRLSKFLLRSGQRPPTGVRPWTRPYLIWVAQLRFTQSAQESTRQDYLHEVEHMRARVGRLEQAIMEAVKLASPALQQVINDLQALRGIADISAVTIAAELGQVSRFGSARELMGYCGAVPSEDSSGKRIRRGGITKTGNAHLRRIVGEAAWSYRRPPCIWYGLRRRQESISEEAKEIAWKAQHRLHKRYMRLGAAGKPQGKIITAVARELLGFIWAIGIRAEAIAGQQAAA

SEQ ID NO: 175240 - protein, 372 aa, unidentified
MNYNTVYVGMDVHKESFTLCSCKYEDEKASHYQRTPASYKNVLRYLAFLRTIYGEYTRFVCGYEAGCLGYSLYHQLENFNVECVILAPTTMLEQRSKRRIKTDKRDAEIIAKSLAQHNYSPVHIPTETDNQTKEFIRMRDDHKAELKKIKQQILSFCLRQGYQYDGSGNWTAKHVKWLRSLKPAGLYKEILDEYLLTYTILTDKLNRLDQRIEELASKEEYKESVSKLTCFLGIKTHTALSVIVEVGDFQRFVSARKFAGYLGLVPGQHSSGDDRNGLGITKAGNTHVRRLLVESAQSYTRGKIGYKSRVLRSRQAGNSPQVINYADRANERLRRRYYQMVLKDGKKYNIAKIAVARELACFIWGMMTDNIY

SEQ ID NO: 175241 - protein, 348 aa, unidentified
MPKLKQYVGLDVSLEETSIAVIDETDNLVWRGSVASTPEAIAAALRKHAPRAERIGFEAGQLSSWLYHGLKAKGCPVICIDARHAKAVLSLKVNKTDPNDALGLAQIMRVGWYREVTVKGHDCQALRALLVARAQIVSQITTVKNCVRGILKTFGHVLPKKLRATYIASAREIIEGHATLEPILMPMLRTLAATMEQLQVYDRAINRFARHSETARHLMTAPGVGTVVALAYITGVEAPARFSRSSAVGAYFGMTPRRYQSGEVDHAGRVSKCGDGMVRTLLYEAAKVLLSRSAKPSDLQAWGHALARRSGKKKATMAVARKLAVILHRMWTTGEPFRWTAAPAPTMA

SEQ ID NO: 175242 - protein, 315 aa, unidentified
MQTGLDIGIDVAGKAVVVACAAGSFAPRTLKNERCALRKWLGELPEGSRIGMEATGAYHQLVADLAHAAGHCVYVLNARDVKRYAEGVGRRGKTDRVDAEIIARFIAREYDRLHAYAPLGEAQRHLEQLLKRRGKLVAARVALELGWSGVAGIKVELTALLKAHAQLLRQVDKMIAQAIATVPEVKERVERVRTIPGFGEVGSITVAQALSHLPFTSADAFIAHTGLDPRPQDSGSRRGRRRLSKRGPGELRRVLHICAMSAASTKVWRPYYLAQRAKGLSGTAALVVLSRKMARTAFGICKRQVDFDPARLSTA

SEQ ID NO: 175243 - protein, 457 aa, unidentified
MESYYMGIDVSKGYADFVILDAKKNVVEPNFQLDDTFRSHCQLFEILKRFFDHHCESVLYAAVESTGGYENNWLHSLNGFQGVINIRSARLNPLGVRANSKASLRRVITDKISARDVAEYLIAHPEKVTYQQEDSLAGLRRQWGFVRLLVKQKTQILNQFQSLLYTAHPELIAYCKSGVPAWLLKLLKQYPTAAKLAKAKASSVARIPYVTADRAKELIDQAKKSVASATDETTGKLIAVMAEQIMRMEETIRIQTQQMAQQCAIPEVALLKTFPGISDASAIGLMLEIQSVKRFPYVKKLAAFFGLHPAFKTSGDGTSSVRMSKQGRKEPRKILFMVALVSLTANPHIRKIYEEHTEKGMKKMAAIGLCMHKILRIIYGMLKNNQAYDSLVDQKNRESRTARKTTHTAKNTNRRYERFDQQAPISRRQSNKRKEWKQSQGDNITQCGISVPIPSAA

SEQ ID NO: 175244 - protein, 401 aa, unidentified
MKEFTAEAVRCETASALETIKPSPAGRQYPAYIGLDVHKETIAVAVARAGRSNPESRVEIANRPRAVAKLVERLNREFDGEVLLFCYEAGPCGYGLYRQLLELGHDCQVVAPSLIPRKPGDRIKTDRRDAGKLARSLRSGDLTAVWVPDEEQEAMRDLTRARDDLKGQERKARQQLNAYVLRHGHAWPSNKTRWTQTHYHWLESLKFPHDWQQVVLQEYIDAVRAASRRVADITAQMERVLPQWSLAPVVDSLVALRGIDKLAAMILLAELGDISRFDSPRQLMAFLGLVPSEHSSGGRRHQGAITKTGNRHARRMLVESAWSYRFPARQTMHLKRKAKKASAESRAIAWRAQKRLCGRYQTLLQAGKNTKQTTVAVARELAGFIWDIACHEMPKVRQTSR

SEQ ID NO: 175245 - protein, 331 aa, unidentified
MKIKETVGIDISKLTFDVRIHGNQTLKVFDNSIKGFRMMTQRVYKNSSFTKDEILFIFEHTGLYSHNLSVFLAEQNIDYALVPGLEIKRSLGISRGKDDKIDATKIALYGYRLRDEIVPYNLPSQDIMSLKSLLSLRDRLVKQRAGYKSSMKEQKRVYLKKDHKILFEAQERMIISFSKQIQKIENEMKTIVKNNGQLNHLYELITSIKGVGPQTALFLITYTDAFSKFKDARKFASFCGIAPFPNTSGTSIRGRSKVSHLANKKIKSLLDLCAKSAIQSNTEMKHYYHKRIEQGKNKMSTINIIRNKLVSRVFAVVKRQTPYVDTMSFAA

SEQ ID NO: 175246 - protein, 411 aa, unidentified
MQAIYPCVAGLDVHKKTVVACVRRLDGRGRISKQVKTFGTMTRDLLELGDWLTRHGVTHVAMESTGVYWKPVFYLLEGRFTELLLVNAQHIKNVPGRKTDVKDCEWIAQLLQCGLLRGSFIPPREIRQLRDLTRQRSQLVADRARVANRIQKVLEDANIKLASVATDVLGVSGRAMLKAMIQGEKDPELLADMAKARLRAKLPQLRQALLGRVTDHHQFLLRTLLEQVDSLERLIASYSERIEQEMAPLAQARDRLQTIPGVDQRTAECMIAELGSNMDQFPSEGHLASWAGLCSGMNESAGKKRSSKTRKGSRWLRQTMVQAAWAASHTQSTYLTAQYRRLASRRGRKRALIALAHTMLGIVYHLLKKGTEYADLGPDYFERRNATRLTRQLVERLERLGHKVILQPNVA

SEQ ID NO: 175247 - protein, 411 aa, unidentified
MNPVVGLDVAKGESQVQAFLDKKKPYKRSFKVAHTIEGLESLHQYLREIENITGIRPPVVLESTGHYHTPIVQYFEERGYLLIIVNPLISYRAKSSSLRKVKTDLIDARHLCELYYKEDLEPYKKRGIQLLNLRNLSRQHANITGIYVQTKLQFQAVLDQVFPEYRGVFGDLYSVVSLLTLLEFPTSEDILAVGEETVANRINELCPSRSRKWANTKAEKLMAASARNPFQRTLYQSHILSLEMYIKMLLEYQKHLSRFEDEIDALAKEIEEYKIIQSIPGIGEKIAATIISEIGEIDRFNHPKKLVAFAGIDPSIFESGKFKGTVNRITKRGSGRLRHALYMAVRCAIRDCRKNKTTDEIIPRNKRLREFYDKKREEGKPFKVAVIACANKLLQWIYALLQNNSTFQDLT

SEQ ID NO: 175248 - protein, 411 aa, unidentified
MNNTLFVGIDISKRSNVATFMNCEGKVVGRLTFSNNGSGADRLVAKILLYYEKEDFEAIRIGMENTSVYSKNLVWFLYEHEALNEHKLSIIPLNAIMVANYKKSFLDMDKDDITDSFAIADFIRIRPGLLPFKLDDRQEALKILTRSRYNYVQALSRMKSQFLTRLFLSFSEMEAGKPFYSIFSKTSLSLLEEEFTLDELAEKPIPELVEFLQEKGGGKFQNPEEIAKVLKKAASSSYRVPAMVRESLNRTMASDMEIMRILENEIHNCDKNIEKLMKSVPAILVSIPGIGPVLAAGIMSEIGDISRFQKQESLGKMAGFKWKRNQSGKKESEDKAAVLSGNKKLRYYLVEAANRVRIHDPVFEAYYRKKYEESKTHAHKRALILTARKLVRVIFYLLKENKLYKPDVGIS

SEQ ID NO: 175249 - protein, 367 aa, unidentified
MPHVTSIGLDVHARSVAAAAFNPFTGEVVHRDFGTDAAEIAEWALGFEEPRACYESGPTGFHMARELRALGLDCAVAAVSKMQRPAADARRKNDRRDAEFIARMLATHNIVEVPLPDAAVEAARDLDRALDDATVEYRRARQRLNMFLIRLGHVWDERNADGTRRGSWTRAHWRWISGIGLEGPQRDVLEYYVTAARCAESDRRQLEKKVLALARTDRWRPAVEALSCIKGIDTLTAFRLAAEAGSFTRFRTAPAFASWCGLVPSERSSGETERRGGITKTGNRLARTALVESAWHYLTCSARPKEPARGQAPDPGARRHAAKGVRRLVERRGTLLARGVHNNKANVATARELACWVWAVGLMAEEA

SEQ ID NO: 175250 - protein, 343 aa, unidentified
MQVITTIGLDIAKSVFQVHGIDADGQVVIRRQLKRRYVLAFFQKLSPCLVGIEACASSHHWSRELKALGHTVRLMPPAYVKPYVKRQKNDAADAEAICEAVTRANMRFVETKTPEQQSCLMLHRTRHLFIRQQTAVINAIRAHFAEFGIVAPVGRNGVEELLNVVADSNDTRVPDVARVCIAGLGAQLRALKAQILEFDRRIMAWHRSNETSKRLDDIPGVGPVLATALVASVADPKAFRSGRNFSAWIGLVPRQHSSGGKDRLGSISKQGDRYLRSLLMIGALAVIRYAKIHGTKHRPWLTALLARRPTKVAAIALANKIARMAWAMMAKGEHYKEPVALTR

SEQ ID NO: 175251 - protein, 338 aa, unidentified
MRKSSPASSEVLWAGVDLAKLTFQVAIWGHLSFPEMQCRSFDRTRKAMKGFLAWLRDQTPAGAKLGLVMEATGTFAEEMASWLMDLDSTLWLAIVNPGQTSAFIKSLGFRNKTDDLDAKGLAKYGQERRPVPWERPSPELAALKDLVRIRMDLINARMAMHLRLTDHKRAAKRASDAMRKVILSLKTQIQQLDIAVKDQVAAFPELAHQMERYTSICGVAQVTATTVMVELGDLRRFQRSRQLTAFAGLSPKRHQSGTSVNGKTRLCKQGSARVRAALYMAASCAVRFNPDMKATYDRLLAQGKERRSALGAVMRKLLVLMRAVLIADRAWQPMKVAA

SEQ ID NO: 175252 - protein, 449 aa, unidentified
MDVVNFNAAGIDVGSRSHYVAAGQELGDVKEFGVYAEDLTALCQWLMECDVTTVAMESTGDYWQNLYTELIGFGFEVVLANGKFTKNAKGKKTDVKDCRWIQKLHTLGLLTGSFLPDLETEQLRTYCRQRGNWIELASSATHKMQKFLKLLNFRLDVVVKDVCGLTGMKIIEDICKGNLDPFQLAEHRHYNCRKPKEEIARALHGNNRRDYLFGLQQELENYKFCQRKIKACDEQIDRTIKEHIKKHPERKKLKTIEKPHKRINKNAPDIRDMNQLAFRYFDGVDLFAIEGLSHASILSIMSEIGPEGFKNFPTSKHFTSWPRLAPNNKISGGKILSNRVPKGSNRLKIALRQAANAIGNLKDTHLSDFFKRVAFRKGRHSAVSATARKLAVIIWNMVTKKMPYDPPRPYLFLDQKRKMGLAKRIKKQIDKFDLKPEDLGFTKPLNFST

SEQ ID NO: 175253 - protein, 307 aa, unidentified
MFIGIDVSKDRLDVHVRPSGEFFAVARDGEGLERLADRLRALAPELVVLEATGGFEIAVAAAVAGAGLPLAVVNPAQVRAFARATGRLAKTDRLDAEIIARFAEQVRPEPRPVASEQARALAELVVRRRQIVEMIGMESNRRRQARGPKVLRGIERTLAALQAALTELDGEIGDQVRGSPAWRAAEDLLTSVPGVGPVTARTLIAELPELGRITRRRIAALVGVAPVNRDSGASRGSRAIAGGRTGVRNVLYMAALTAIRRNPAVRAAYERLRSRGTPAKAAIVAAMRKLLTILNAILREAQPWKTA

SEQ ID NO: 175254 - protein, 346 aa, unidentified
MSKVYIGIDLAAKVCVAAVRDQEGELVCVREFPTAEKSLVAFMQGVEGEATVLMEECDLAYWARRVILPYAEKVEVADPKRNAWIHKDPIKNDKIDAKKLAEIAQLGTYHPVYHTPDESIYALHLAVKAYDLLTRKAVAQKNQIKAKLRAQGIICEGSRVYGARGRAEALARVESAAVREIIAADYDHLDFLLAERMKAKRRFLAMASGIPIICVLQEVPGVGPVTAARFCAYIKCPQRFGDARKLWRYCRLGITQCVSGGKDLRRQRLDRTGCGELKCASMTAFLGAMHASEDNRFKRAYANTLENTGSATHARLTTQRKILATMWAMWRDGTHYDDENKPLRWA

SEQ ID NO: 175255 - protein, 460 aa, unidentified
MGQSGVGLSLSFGLVIERLTPLSDKQVANKLDVAGCMLRLRISHKAVTLIGKEENTRPNSREQGDGMFYLGIDIGKNTHVTSMLGEDGKPVFRAFSFSNTTEGGESLLAKLSGIALAELVIGLEATGHYWLAVYSYLHDRGYKLHVINPIQTDGWRKGVEIRRRKTDVIDSVLIAELVRYGDFMEARLPEEAVLSLKNLTRFRSYLIDSIADLKRKVICVLDQVFPEYQGVFSNVFGKTSKEILLQFSSPADLEDVSADTLAELLAALSRKKLGAGAAEKLSAAASKSFGVTFCRDSFTFQLRMLIEQIKYIESQVKDTETEIETVMVNLASPITTIPGIGKTTGAVILGEIGNIERFDNPAKLVAFAGIDATVLQSGEFEGTSNRMSKRGSPYLRRALYQASLIAATGRNPDPILRAFYLKKMSEGKHHNTSIGAVSRKLCYIIYSVLKENRPFEVRIP

SEQ ID NO: 175256 - protein, 334 aa, unidentified
MDYFAGLDVSVKETSVCIVDDTGKIVREVKVASEPEALLAVLRNPAYHFKRIGLEAGPLSQWLCSALAEAELPVVCVETRHMQAVLKAQINKTDRNDARGIAQMMRVGLYRPVHVKTLRSQKLRMLLTHRKLLQSKAIAIENDLRGTLRNFGLKVGMVGTVKFEGRIKELVENLPDLAILVEPLLIVRRALREQLVILHRRLLAIVRDDAVCRRLMTTPGVGPVVALTYRATVDVPARFRKSKSVGAVFGLTCAKYQSGQIDRSGRISRCGDEMMRVMLYEAAQSMLRSKKWSWLKAWAMQIARRRGVKKAIVALARRLAVIMHRIWVDGTEFR

SEQ ID NO: 175257 - protein, 343 aa, unidentified
MEAKRYIGIDLHRNCFTACVRLENGREYLKKWKLEDMAKFTGKLRPTDQVAVEVTGNTRLFHDAVAPHVERVVAVNPSQFKVITHSVKKTDPNDARNLALYLAKDLLPEVRMKDKTQAQIASLTQTRDTMVKLRTALKNKVNNLCSAHGVNLNKESLASEKGLKAVLEMHFDLLVNLELKIIVDQIRSLNRSIAELEETIGKEGQKLEGHKNLTSIKGIGGLSGGILLSIIGDIGDFADEGKLAAYFGIVPRVSNSNETEHSGRITKRGTKLGRTTLIQCALIAQRYSPYLKTYYERMKSRRGTGKAIVALARKFLGIIYRTLKNKWVFEDFPNFVLAEEAAA

SEQ ID NO: 175258 - protein, 315 aa, unidentified
MVDVPCFMGIEVAKAQLDIAVRPSGERWAVPNNTDGVATLVEQVQALHPTLIVLEATGGLERAATAALATAGLPVVVVNPRQARDFARATGQLAKTDALDARALAHFADVIRPTPRPLPDAQTQELRALLGRRQQLIVMRTAEQNRLAGTSGRLQTDIEAHITWLNERLATLDDDIETLLRASPLWRENDDLLQSAPGIGPVCARTLLLELPELGTLNRRQIAALVGVAPLNRDSGTLRGRRTIWGGRAHVRTVLYMGTLVATRYNPRIKAFYERLLAAGKVKKVALTACMHKFLTILNAMLKHRTPWQAQEVQG

SEQ ID NO: 175259 - protein, 367 aa, unidentified
MKKHTTMNKPVSATDVSVCTTVAVDLAKKVFQVAGEDAQGQLAYEQRIKSREAFQVFLQKLPEGVTVLMETGPGAQAWARLLQAQGNPVRILPAQRVAEHRSGAKNDRNDAHAILRAGRDSSIASVPVKSVAALAMQAWHRVRRGYVQRRTAMGNQIRGLLLEQGIALAQGDVGLKQGVTRVLEDASQPLPALLRELIDEMLKEWQRLGERIAALTGRLEACAAADPTAKRLMTVRGIGPITATALLAKQVEPERFANARQFAAYFGIVPDQHSSGQKVRLGKMTKRGDAYVRSLMVVGSHAVLKQLRPDSEHPDDRRLQRWLQRLGRKGAAVRLANRNLRIAWVLLCSEQTYQRKPNACREMEMSH

SEQ ID NO: 175260 - protein, 344 aa, unidentified
MDYYVGLDVSLRTVAVCVIDTGGKLVFERSVACEIEDIVHCLRDLPKPVMQIGFEAGAMSQHLFFGLRGAGFDVVCMEARQVNAALSAMRNKTDKTDARGIAQVLRSGWYSPVYIKSREAHALRALLSSRKAVQKKCIDLANEVRGLFRIFGLRLPSRVDQGSFDDRVRPLIEADPDLSHALLPLLDARAVLYRTYRELDRRVKQAASHDETCLRFMAIPGVGPIAALTFRAAVDDPSRFTSSRTVAAHFGLTPRRYQSGEMDNPGRISKAGDPDVRATLYSAASAMMMRSVASSEIKSWGLRLMRRKGRRRAVVAVARKLAVIMHRMWADGTEFRLEPLKGAT

SEQ ID NO: 175261 - protein, 335 aa, unidentified
MHYLYYVGLDVSKETFDASLVAFEDANEMAHRKFANSRKGICSCLHWVEKRHGILLDDVIFCAEDMGSYISEMAVCASDRTLTFNFSLISPLVIKYSMGIARGKTDRVDARRIAEYAITHYRKIALYLPAEKELCQLRTWLILRAHLAKQCVAKLVLLEKLDYKEKFADVSIQRSMLQEEIAYAETHMKTIEREMKELIAADSNICRNYKLLTSIKGVGPITAIVMLCSTLNFTKITDHRKFACYCGLAPFEHSSGTSVRGGCHTSSMANRDIKVQLNRSALIAIRCDPQLKAYYERKVAEGKHKFSVLNAVRAKIAARCFAVVRRGTPYVALQI

SEQ ID NO: 175262 - protein, 423 aa, unidentified
MRLTYPICCGIDVHKTFLVATIITSEAIVPHYHQKRFSTFFSGLVAFKGWLLEHNCKDVCMESTGKYWVPVWNVLEDSFHVVITNPKWVSAVKGNKDDKKDSRWIGDLFRMGLVPGSYVPDKDIRILREFTRYRSKLVSMCTSEKNRFQNAFTVCNLTLDAVVSDMFGKSATNIENYLLETDAVDPDYCVSLLQRSLKKKASDVVEAVSGFNMTPEQKERVRIVQGHFADIDHRIAQLDDIIGSLVSEHEGHISLLCTIPGIDRRTAITILSEIGTDMTQFGSSKRLCNWAGLAPASNQSAGKKKSVSISRAGVYLKPALDEAAHAAVKSTEKQPYYRIKYERLMRRRGKKRAVIAIARMILTAIYAMLSTGEVFNPSDLEKYDMPEGLKQKQTLSSAKETVKLLVSLGLIPEGAISLDALAS

SEQ ID NO: 175263 - protein, 377 aa, unidentified
MKRIKFVGLDVHAETIAVAVAEQDGEVRSLGVIPNREESIRKLVKKLGAEEELRFCYEAGPTGYVVYWQLTALGARCEVVAPTLVPVKSGDRVKTDRRDALKLARNYRAGELTPVWVPDAAHEALRDLVRAREAAKKDQLRAKHRLSKFLLRHGRRPPMGVKAWTLKYLAWIEREVHFLQPAQEATLLDYFQEVEHMAARMARLDLAIEEAVKLTPPKMRAVIEALQALRGIAQVSAVTIVAELGEVSRFTRARQLMGYGGIVASEHSSGEKTRRGAITKTGNAHLRRVVVEAAWAYRHRPGVGGVLRKRQEVVSADVREIAWKAQHRLHTRYQKLTARGKNKGKVVTAVGRELLGFIWAIGVKVEAAHKEPLRQAA

SEQ ID NO: 175264 - protein, 315 aa, unidentified
MNDMQIIGFDVSKKELVGVRINKRGDVQETYVVENAQEAIGNFLDRLECSVTIGCEATGEYHNVLAQACIAHHIPCIVLNPIVTKQFTRATVRKRKTDLTDAQVIAKCVLQGEGQEVSEASFSVSKRLLRTSSELTRLSVSVNHMRKGLAEHWSAESSAQDTLRELEEHIARAVRAVRSEGVRSTDRSLSDLLSSVPGIGETLAATIVSEIGDIHRFENAKAVIAYAGLDPRVRQSGMTLRRNTKLTKRGSPYLRRALFIAASIAQRHDAELHAYYLKKRSEGKRYKEATVANARHVLQRVYAVWKRGTPYVVHS

SEQ ID NO: 175265 - protein, 455 aa, unidentified
MPRKTTGDRPELNPVNVGAAAVDIGSKMHMVAVNPACTDTPVRAFGTFTQDLHDLADWFKACGVTSVAMESTGIYWIPAYEILEQRGFEVILVNARYAKNVPGRKTDVSDAAWLRQLHSYGLLRGSFRPDAEIATLRAYLRQRERLVEYAAAHIQHMQKALMEMNLQLHHVVSDITGATGMRIIRAIVAGERNPDVLATYRDVRCHSSIETIRAALVGNDRDEHIFALTQSLELYDTYQTKMLDCDRKLESLIAALADKAAKPIGQLPRPRVKTKQVNTPSFDVRTALYGVLGVDLTEIHGLGPSLALKLIGECGTDLRTWPSAKHFTSWLCLAPGNKISGGKVLSSRTRRSSSRAAALLRLAATTIGRSDTALGAFYRRLSSRAGKAKAVTATARKIAVLFYNTLRHGMTYRDPGADHYEEQYRSRVLANLKRRAKSLGFVLQAVPCGAEAAVS

SEQ ID NO: 175266 - protein, 466 aa, unidentified
MKPFYMGIDVSKGYADFMIINSKKQPVVQSFQLDDTFEGHRSFYNLLSRFLADYPESTLFAAVESTGGYENNWYNSLIEFQGSLNIQTARLNPLGVMHNSKADLKKNTTDKISAQNIAEYLVAHREKVVYQQHDQLAGLRKQWGFIKMLTKQCTQFLNQLNALIYSANPELLSYCQAEMSAWMLKLLVKYPSADRLKKAHVKTVTKIPYVSKQKAQQLIAGAKRSVASDTDVTTQQLIVATAEQILHLKKTIADQTNQMLRECSIPEVELLKTFPGIGDFSAVGLIIEIQTIKRFAEAKKLASFFGVHPVYKISGDGVGGFKMSKQGRTAPRQILYMAALSAIQCNPLIREIYEKHQKQGKHNMAAMGICMHKILRILYGMLKNNKPFNPHIDIANRLRSVRMKNDTPVKNTSRRFQDYDQKAPVSKRQRKKRLERERSHSVSDTKVGITAPVPLADIIANILPQL

SEQ ID NO: 175267 - protein, 417 aa, unidentified
MNNKAEKIKTINEKMLIVGLDIGKKVHYGYFRTPKNQDVKPFPFYNSGHSFKEFWKRLCRFKEKHMLDEVVIGFESTGPYAEPIANYLRKKPVHLVQVNPLHTKRIKELTGNSPNKTDKKDPRVIADVISLGHSLTVVVPEGAAAQLRRLVHGRERAMERRTAMHNQLQALAFIMFPELGDIIKPSTKTGMYLIKNYLDPQRIVSLGHKKFCKIVRSISRGKFGIDRIEALYHAAEESIGIKEGKESILLETNHLVSNIENENRYIKSLEEQMILFLEQIPYSHSILSIKGIGHVTAAGLIGEVGDFGRFKTISEVIKLAGLDLFEISSGKHKGKHRISKRGRALMRKLLFFAAINAVKSHGIMHTRYQKMLDNGTPKIKALIAVSRKLLRIIFALARDNVQYEQDYDNKHEIKLAA

SEQ ID NO: 175268 - protein, 407 aa, unidentified
MLEVKVERCAGIDVGKKFIDVCVLIGPVNRKPAEEVRRFGTHVGDLEALRAWLKEKTCTEVIMESTGSYWKPVFNILEGQFKLILANPEQVKALRGKKTDRKDCRWLAGLLRHGLVQPSFIPPRDIRELRDLTRRRRTLLQNGTQERNRIQKVLEDANVKIGNVLSDGFGMSGQAMLEALLENKLSPEQVADLARGSLRRKIPQIVEALEGHRMSEHHRLLIRQAFKHMQFIEEMIEELDKQIQEKLAPYQKQVELACTIPGIGSDAAASILAEIGMDMSDNGPFASCHHLASWAGVCPGNNSSAGKRKSGKIRKGNRWLKATMTQTAWAGAAKKNSAFQFRYQRLKARRGVKRATIAVAHAQLITLYWVLRNGAPYQQQRQDLERQQRESLIRHYLHRLAQLGHTS

SEQ ID NO: 175269 - protein, 333 aa, unidentified
MIVDCLYAGVDVSLASLELAIRIGGQCVATQSYANTDSGVTRLVKELTKQSRECRIVLEPTSRYHLRLLLALAATPGCQVMVINPWRARKFQESWGKRAKTDPLDAAGLAKLAEQLGDDFIAYTAPSPELRELQLLGRRLSNIVDQRAKAKCRAKSYAADDPANRTAIDSLEREIEFCQQEVKRIIGQMSGIVDADPAKRQVFDWLVQTHGIARQSALQLMAELLILPEGMGPSQWTAHAGVDPKPQQSGKHDPPARISKMGNRYLKRTLFLAAWSIVQHDEHVQEWYNRTCERKKAKMLVLVIAMRKLLHGIWWMLCRQEPLDVQKCFRIHC

SEQ ID NO: 175270 - protein, 338 aa, unidentified
MNYVGIDYHRQYSHLTVMDQQGQVLRSGRVANLRSEIEKFLGGLETMEAVIETGRSSYAMVDVLGEIGLAVKIAHPFEVKAIARAKIKTDKRDSEVLAHLLRMNMIPEVYQRSPENRKAQRVLRQRAFYVSAMTALKNRVYALLAQQKEEVRERLAQVTNIFSVKGREMILGLDLPLGDRSLLEALLKTYRNLETRIKESTELVEKLFEQIREAQLIRTIPGFGKYLSVLVAVEIADLTRFPDPAHLHAYAGVIPSTRSSGDRTHHGKIIKAGNRWLRWAAVEAVWPAIRSDFDLRRFYDRIARGKGANKAKVATARRLLTIVYKVWKEGRHFIAYPR

SEQ ID NO: 175271 - protein, 313 aa, unidentified
MPVALSNPIVGVDVAKNELVIYQADSDLLEAIPNTKTAIKQWLKALLGPVSIAIEATNIYHLEFADLAYAAGCTIYMVGGYELKHYREGVKIRAKTDALDAKLLARYLKNEAEELRPWTPPSPLYRQLLSLFRRRAALVQARVGLVQSWSNEPLLKTAFAEQIKSMQRLETMIEKTINDQLKQAGLLGQLKRCLKVEGIGFLTGARLLTAFQRGEFSNADAFIAFLGMDLRVSKSGQKDGRRSLTKRGDPEARRLLHNAAMSASRTKAWKGFYEAQRARGFSTTQALVMLARKLARVVFALLKGQSEYQTKVS

SEQ ID NO: 175272 - protein, 324 aa, unidentified
MNIPTLGIDISKAKFNVCLSNPHDKLKHKVFPNTASGFQQLAEWLTKQHVELIHVCLEATGTYGEALALFLPQAGHSVSVINPAAVKAYAGAQLSRTKTDRVDAELIARFCHTQRPPLWTPPSAEVRELQALVRRLEALVEMRTAESNRLEAAITASAVRASIEEHLAYLDVEIKRTEHLIREHINSDPKLKQQSELLDSIPGIAATTAATLLAEVADITQYRSARQLAAYAGLVPRARQSGSSVRGRTRLSKIGNARLRKALYFPAVTALRCSPFFQFWAKGLRERGKCKMSVIGAVMRKLVHLAYGVLKSGQPFDPEWAESA

SEQ ID NO: 175273 - protein, 339 aa, unidentified
MSVRTVGIDLAKQVFQVHGVDDAGRPVLKKRLRRTELRAFFAGLSPCLIGMEACASAHYWARELAAVGHEVRLMPPSYVKPYVKRQKNDAADAEAICEAVTRPTMRFVPVKSEDQQAVLMLHRTRDLLIRQRTALSNALRAHLAELGIVERQGVAGLDALMASVEGETEIPPLARKALALLIKELRSMKEQIKAVETEILVWHRGNEASRRLETIPGVGPIIASALAATIADPSVFKSDRQLAAWIGLVPRQNSSGGKERLGRITKQGEPYLRRLLVIGASAVIRFCKTDGSALGGWITALRARRPAMVATVGMANKMARIAWAVLSRGKEFEMRPAMA

SEQ ID NO: 175274 - protein, 332 aa, unidentified
MKKKQVFIGIDVSKATLDIFIHGFMYSFVVENGPQGFVSLLETACKVTNCNTEAFFFCFENTGKYSRMLSVFLHTHSLRFAMEPALKIKKSLGMTRGKNDRIDAKRIALYAYEKRERLFPTVLPGAKIDQIKSLLSLREKLIKHRTAYKNGLTDLYDCYVEGENNLIKETQQRLIISLNQEIDKIEKQINDIIKEDDSMLKNFKLILSVKGIGKILGFYLIAFTANFTLFANARAFACYAGIAPFGYSSGTVNGTPRVHPFGNKQLKSLLNLAAQSVIQIRGEYRQYYDRRINELGKSKMSTLNIIRNKIVFRVFAVVYREAPYVDLYKFAA

SEQ ID NO: 175275 - protein, 366 aa, unidentified
MSEIIRIGVDTSKSVFQLHGVDAAEQPVLRKKLRRRDLLVFFERLPATKVGMEACGGTYYWARELTALGHEVKLMPPQHVKPYVRRGKNDRNDADAICEAMSRPRMSFVAIKTADQQAAQMLMTTRERLVAYRTQLINTIRGHAAEFGLTAAKGPAHVEPLLARVAEDGRVPELAKELFAMHGQELSRLKIELREIEAKLKAWHRQNEMSRRLAEVDGIGPIGGCLLAIKAPDPQAFRCGRDFAAWMGLTPKDHSTAGKVRLGVITRAGDEALRRTLVVGATSVIKQVSKGNPSPWLRDLVARKPPKLAAVALANKVARIAWRLMVSGERYDAARAGIVSPIARIAPCSRRQGRCAPPAAVASGQP

SEQ ID NO: 175276 - protein, 461 aa, unidentified
MINEVRLGIDVACTAAHQASLADERGEFLWQGWRFRTTTSDLERLWAKIPDGTRVVVVMEPTRNAWVPLAGWLQARGAVVSVVPPEQSADLRDYLNKHTKTDRLDSKMLARMPMLHPDGLRTIDSLGPADPFKRAVRHRSSAQRRRVSVASRLDALLELMSPEWAEVLGTAAYGKGAVAVLERYANPHALKKLGRSRLTKLLLRATRGQWREPKADEILAAAEETLALWAAGGLDFDELADDISIEIRLIKALDAEIAALDDRIEALYEQADPAGIVVSAPGIGVVLAAGILARTGDFNRFESLAGVRAFTGLVPKINQSGIEDHHNGPTKRGDPGLRQALFLAADLARKVDPTLAARYQRLFEAGKHHNSALCTIAAVLATRIAACWRNGQLYELRDTNGALITPAEGRTICAERYKIDPVTRAARRTNSPGPKRAGRDRKESQSAPVTSPPHTNATHAA

SEQ ID NO: 175277 - protein, 355 aa, unidentified
MERYLGLDVHAASCTLAVISETGRKLRDFPVETNGQALVEAVRMIPGRKHLVFEEGLQSAWLYETLSPHVEEIVVAGITESRGPKSDKRDAYGLAEKLRVGNLDKSVFKAPRQFTRLRELSRIHMTLVGDVVRAQSRIKSLYRSRGILVSGMDVYGVRPREDWQKQLGSSAQTRAMRLYDHLDFLLEQKKQAESDLLREASKHAIVRILETAPGIGPIRAARLVPIVVTPHRFRTKRQFWSYCGLGIVTRSSADWIQRSEGSWVKARVAQTRGLSRQHNRFLKHLFKGAATTVVTQRNKDPIHARYQRLLDGGTKPTLAKLSLARMIAATVLRMWKDEEEYDPERAGLPSKTREG

SEQ ID NO: 175278 - protein, 348 aa, unidentified
MSQSKQYVGLDVSLKETSICVIDDADKIVWRGQVDSTPEAIASAVKQHAPHAVRIGLESGQLSNWLFHELKEAGLPVICVDARHAKAALSLKVNKTDANDALGLAQIMRVGWYREVTVKGLDCQAERALLVARAQIVSQITTLKNCVRGILKSFGRVLPKGLRSQFSARVRTAIDGHPVLGAIIEPTLQVLEAARAQLLVYDKAVIQRARSDDTARLLMSAPGVGVVVALAYVTGVEDPARFKRSSSVAAYFGMTPRRYQSGEVDYAGRISKCGDGMVRGLLFEAAKVLLSRSTRPSALKTWGEALSKRIGAKKATMAVARKLAVILHRMWTTGTTFQWNAEAASPAT

SEQ ID NO: 175279 - protein, 355 aa, unidentified
MNQEKYIGMDVHQATISVAVMDAQGKLIMECLLETKAATVVEFIRGLHGTLSLTFEEGTSAAWLHDLLKPHVSRLVVCDPRKNALLKDGNKSDRIDARKLAELLRGNQLHPVYHGEHGVRTLKELGRSYLTITQDVTRVMNRIKALYRSWAIPCAGTTVYAPRHRAEWLAKIAEPGVRLRAERLYQQLDLLQPVRLEARRELLTESHKHASVKLLRQIPSIGPIRSALLVALLQTPHRFRTKRQLWAYSGFAVETHDSGEYRSVRGKLQRNRERMTVRGLNDNHNRDLKNLFKSAAISASTHPGPLRDFYLARVEKGMRPTMARLTLARKIAAITLTMWKRGVSFDSKQLQRQTA

SEQ ID NO: 175280 - protein, 388 aa, unidentified
MEWSGGTARAMHHPTTCMITNSIDGVRESEKSTGPAKAATVLSEIFLGIDTSAAKHVVTRLIPGEGPKPAEAMSTEPLVAKVAKWVNAGVAVHCVYEAGPTGFALYRRLIKTGATCLVVRPKRLEQHQRRRKNDPQDSRLLAEQLAAHHFGYSRLLVPVRVPTEQEELNRLAVRERETINRARHQILNSAKGRALALGYPLPKQWWRPRVWPKIKDAFPPELARLLERTAQTAAAMKLQLTAAEAELKATAPAAPVGVGQVTAAVLEREVCSWDRFPSERKLSSFFGLCPCEDSSAERHHLGAIDKHGSPRLRFWCQEAAWRLFKHQPDYHVIIWARRKMAGANSHRMKQIAVAVARRFLVDWWKVRTGQTTFAALGLRCAESTATTR

SEQ ID NO: 175281 - protein, 515 aa, unidentified
MVAACPEVKDGPTPLERLCAFSPPGRTGLNSLLAGPMEARENQRSDEWSKCRHLQDLNAKQRRERARKLQAEEVALQKVHADASGIDIGNEAHYVAVPPDRDGRPVRRFGCTTAELKDMAAWLKQCRIRTVAMQSTGVYWIAVYDILEEAGFEVYLVNARDTKNLPGRKTDVQESQWLMQLHTYGLLRNSFRPPQEIRIMRTYWRQRNDLIKSAARHVQRIQKALTQMNLQLANVLSDVTGKTGQAILKAILAGERNPTLLAEFRDNRVKASKEQIARSLEGNWQEDLLFLVKQEQDAYEFCARQIAECDERLQQYLKRRADRSAGAPLPNEKRPERLRKKKENKPRFDLRAELFRMTGTDLTRIDGIDVRTAATVISEAGMDMSKWRTEDHFVSWLRLCPDNRISGDRIIGKGHLRTNSRLTTALKMAASCLRQSQTYLGAQFRRLRARLGAPVAIKAMAAKLARLIYRMLRYGLQFVDKGADYYRSRHREREINFLKRKAATLGFQITPGVAV

SEQ ID NO: 175282 - protein, 359 aa, unidentified
MLKYALGIDVSKKDIHVCLSMIDSKQQVKVKASSKFANTTQGFKELLVWVSRHKKESDIPLVNVIEATGVYYEACALFLFKAGLSVAIVLPNKAKKYLQALGLRTKNDKIDAIGLSRMGAEQCLELWQPMDEFFYTLRAMTRHHQSLQELKTNINNQLHADEHSIYSSKAVIKQLKKLITTIEKQLEETDQRIHDHLYNNDQVAEKLDHIIDIKGLGYMTVATILAETNGFALFKSTSQLVRYSGYDVIENQSGGHRGKTKISKKGNSHIRRAMFMPAFNVVRYEKGLFKIFFERILARHNQKMKAYVAVQKKLLVMIYTLWKKNEAFKPNHQIITSGNEETVPSFALTGGQPNEVAPA

SEQ ID NO: 175283 - protein, 416 aa, unidentified
MSDKKSVELRVSVDVGYRRHSVAIGLPSGEVLEEFEIAHRPEGFEQFFSRIEKHQKVRDCEVAVAMEGFNGCARPLDAMVRRRGYRLYNINNLKLARFKEIFPGAAKSDRIDARKGLELFQLSDHLPLAKEVLQEVKGTPRENEVLKRLTRRRRRLVDERVRVISNLQTDLQAVCPGLLEITKNAGNQWFLNFLVSAATLPQLARLRPSTLLKISAVGRKYAVLIEDWQKRAHFSEEVEWVSEMIQEDAQRCLELDENIKALRAKIKEVAKDSKMAKILLSIPGFGTICTAELAGEIGTIERFSKEGSLALYLGMSTLDNSSGKHQGSKQPKHVNTRAKAAMMVALDRHRKYVPESQRYYEKKRSEGKKHNQAIRALGRHLSRIIYKMLTEEREYEMRPERGNTKSKVSPRSLIKT

SEQ ID NO: 175284 - protein, 457 aa, unidentified
MATRHKKIPSKRQPRSLSTVQPNAAGIDLGSREHWVAGPPLPDGSSNVKRFGTTTPELVRLSEWLEQQQIATVAMESTGVYWIPLFEILDSRGFDVHLVNARQISHVPGRKTDMIDCQWLQLLHACGLLRGSFRPGDDICRLRALIRERNTVVDQRSDWIRRIQKSLDQMNVCVHHAVSDISGVTGMAIIRAIVGGERDPRTLARLRDRRCQKSEDQITEELTGNWRPEHLFNLGQALKVYDQLCAVIADYDTEILNSIDSVQPPESKGSSAPPPASKAKACKFVKRGQEPMRQALYRMSGFDLTTIDGIGVDTAAAVISELGPDLSAFADEGHFVSYLRLAPNISISAGKKVQGKFKAVTSTRVCNALRMAATTLRNSKTALGAYYRRISWRKGASVAVFATARKLAQIVYRLMRRGQAYVDTGSDVYEAHYTQRRLVSYARALKEMGYKSEPLAA

SEQ ID NO: 175285 - protein, 384 aa, unidentified
MKNKTRAFIGLDTHKEHIEVAYVQDCREDSPEHFGRIQTTKSAIIKLVKKLQLKFPGSELYFVYEAGPCGYWIYRLLTRLGHSCFIVAPSLIPKKPGQRIKTDKRDALQLTQLLKNNDLEPIYVPEPEDEAIRDLSRARETAMHDLNDAKYQLKALLLRNNIGYGGKADWSKKHVRWLTEIVLPFPTQQIVLQEMIQIISERVNRLQRLDNELDYQIKNWRYYPVVKAIQAMRGVRLLVATGIIVELGDLTRFDHPRKLMAYLGLVPSEHSSGPKQRLGSITKAGNTRARRLIIEGAHSYRYTANISTELQKRQEGLSKEIVDIAWKAQLRLCRRYQRLMKRGKPYNVVVTAIAREMIAYIWAITREVVLSPIDPKLRLSRVPA

SEQ ID NO: 175286 - protein, 355 aa, unidentified
MNKIKTNFEGQAIYVGMDVHKDSWNLGIHLNDIFLKNVHQKPHPQIMVDYLHKNFPGAIYKAAYEAGKFGFWIQRQLTSLGVECLVVNPADIPKSQKDSLQKTDPRDARNIALRLQSGFLRGIHIPDEQQEADRIFFRHRKKIWKDLSRCKNRIKGLLAFSGIDIPEPYDNASWSHNFINWLKALDCKQSPRRLALDFQIRQMEFMRKELLSISNGIRKMMREQRYKTNYYLLRTIPGIGPLTAASILVEIGDIKRFDTFCHLNSFIGLLPMEHSSGQSENKMSLTVRKHRQLRSDLVESAWTAKRTDPAMALYFDQQIKRKDSKVVIIKIARKLLNRVRYVLLNQQPYEYGIVK

SEQ ID NO: 175287 - protein, 320 aa, unidentified
MSEEIFIGIDVCKAWLDVAQVPARPTDKSGELATRVDNHESGRAVLVSQLKKLGPTLVVMEATGGFEAALASELCAAGIAVAVVNPKRVRDFARSMGVLAKTDRLDAQVLAKFAQATRPQVYALPDETQQEIIELVDRRAQLVTMRAQEQTRLSTVKHVARTSVRHHIEWLTKRIKEIDKDLDGRLKDSTIYQPKYELLESVPGVGKVTIMKLLGRLPELGSLDRKRVTALVGLAPMADDSGKRRGQRYIQGGRADVRTAMYMAALTAKRYDGPIKALFDRLRLAGKPFKVAMTACMRKLLIILNAILKTGQPWRGAEGA

SEQ ID NO: 175288 - protein, 337 aa, unidentified
MDRQYVGIDFHRRRSVIVWLSAAGEKLSSVRVANDPLAIVGAVAEAGPDPEVVVEATYGWYWVVDLLQANGARVHLANPQGLNWGQRRVKNDERDAIDLADMLRLGRLPEAWIAPPATRELRELVRYRAKLVALRSGLKAQVHAVMAKEGVLPTVADMFGGKGNAQLDGMAMADSYTTRVESLRGLIELYDREVTMLEGEIHRQLRHHRGYHAIQAIDGVGRTIAAVLVAEIGDVDRFRSAEALCSWAGLTPKHRESDTKTTRGPITKQGSRLVRWALIEAVSRYHGGPALAAGFRRIAERRGTNKARVAVARKVLTLVYYGLRDGEIRCLAQAQAA

SEQ ID NO: 175289 - protein, 411 aa, unidentified
MQVIYQRCCGLDVHKRIIIACVLEWVGSGWEKEIRQFGTMTSDLLALSDWLVHEGCTHVAMESTGVYWKPVYNILEGQFELLVVNAQHLKAVPGRKTDVRDAEWIAELLAHGLLRGGFVPPASVRELRELTRYRTSLVRDRARTINRLQKVLEAGNIKLANVVSDIDGVSARLMLEALVAGERDAQQLAGLAKGRLKDKRAQLVEALSGRLQPHQSFLIAEELAQIDYLDGAIERLNHQVEERLRPFEQEIGWLDTIPGVNRRTAEVLWAETGGDMSRFPSARHLASWAGMCPGNNESAGKRRSGRTRKGSPWLRHCLVEAAHGAAHTKNKYLSSQYHRIGARRGRKKAQVAVGHSILVIAYHLLTRKQPYSDLGANYFDERDRQAVTKRCVNRLQKLGFKVSLEKLPAAA

SEQ ID NO: 175290 - protein, 424 aa, unidentified
MSSDLEIAAFIGLDWADQQHVIRLRVAGSAPVEAQLLDQKPETLRAWIGQLRQRFGGRPVAIALEQSRGSLLYALMNVDFLLLYPVNPQNLAQFRKAFYPSGAKDDPQDALLLLEMLEKHRDRLRVWVPDDADTRCLRLLAENRRKLVNRRTALTNQLTSLLKESFPQALDWAGPLDSLRACDFLQHWPSLQLLQKTSTSQLRKFYRDHTRLDSEAIHQRLDQIRQAQPLTRDSAVLAAAELMIPALVRQLRCLIESIQQFDQQLKDRFQQHDDYTLFHSFPGAGPALGPRLLSAFGSNRNRFECAAEVQMLSGIAPVTERSGKSHWVHWRLACPKFLRQSFHEFAAQSILFSTWARAFYDQLRSRGTSHHAAVRTLAFKWIRILFRCWKNRTPYQEQIYLASLRRHGSPLCAALSPPTTGANL

SEQ ID NO: 175291 - protein, 350 aa, unidentified
MSEISIIGLDLAKQVFQVHGADKAGRCLLRKQLKRREVLRFFAELSPCLVAMEACGSAHYWAREIARLGHDARLLPPAYVKPYVKRGKTDRIDAEAICEAASRPTMRFVPVKTIEQQSLATLHRCRDLLVKNRTMLVNALRAHLAEFGFVAAKGIGKLPDLIEIVSEAPAEALPEMARAPLSGFIDAIALINRQLDGLEKRLRAWHKGNAQSKRLETVPGVGLIGATALCALVPDPKLFRNGRHFAAWIGLTPRLDGTGGKVRLGRISKAGDGTLRRLFVLGATALLRSLANKTTPLALWVQGLLARRSGRAVAVALANKLARIAWAIMASGKAYKPLSAAQLPMPAGRA

SEQ ID NO: 175292 - protein, 390 aa, unidentified
MSTASSTASAAASSSILYVGLDVHKERIMIAVLPAGAATATRVDQVANEPKVLKRYFARLAREGELRACYEASGAGYVLQRLLREWGYSCEVIAPSLIPQRAGHRRKHDRYDAKALARYYRSGELTPVRIPTEAEERARDLVRCRATFQRELLRARHYVLKFLTRRGLRYTERKCHWTRAHHRWLEGLPRTGMLVDQDQVVFAEYLALLRYAEQRRDALDDQIETLALAPALATAVAWLSCFRGINRQAATVLATEIVDWRRFAKPTQLMAYLGLVPSEDSSDETERRGPITKAGNSHCRHVLVQAAWAYRHAPRVGTALAHRQRGQPAVVITQAWKAQHRLHKLYQHLAYRKRPQVAVVAVARELVGFLWAALREGPLAEQGEAVPQVA

SEQ ID NO: 175293 - protein, 311 aa, unidentified
MQLTIGIDVSKDWLDAHRLSDRQHIQVTNDKAGHKALIGWIGKADLPLIVFEATGAYHRQLEAALAASGIPFAKVNPRQARRFAEATGRLAKTDRVDAAMLARMGAVLELEGRMPLDKNLHDLRELLAARRALIKDRTAARTRLATATLPLVKRQLNARIKQIETQLQTIDAAVANTVAQDEAMSHKLAILVSIPGIAETTAMSMLIEMPELGTLEGKQAASLAGLAPISRQSGKWQGRERIQGGRAVLRRAIYMPALVAARFNPDLKAKYDQLIRAGKPAKLAITAVMRKLVVMANALLRDDRKWSEIRP

SEQ ID NO: 175294 - protein, 404 aa, unidentified
MIFVGVDWAETHHDSCVLNEAGEVLARLRIPDTLAGARALHELLGGLIEEPEGVVVGIEKDRGLIVTAMLGASYRVYAINPMSAARYRERHVTSGSKSDPGDAKVLADIVRTDRHNHREAAGDSPNAEAIKILARAHQSAIWARQREANALRNALKDYYPGALVVFGTDLDDRDAVAILEIAPTPPLGRRLSKSKIIAALTRAGRERNLERRAVEIQGGLREEQLAQGPIVEAAYGRTTKAHVAMIRAYNAEITELEEGLTSGFEQHPDAGIVLSLPGLGTVLGARVLGEFGDDPNRYCNAKSRRNYAGTSPITRASGKSRAVLARHMRNRRLADALDQWAFCSITRSVGARAYYDELRGRGKTHRQAVRQLANRWVGILHACLAQHVDYDEAIAWKHRVDLAA

SEQ ID NO: 175295 - protein, 334 aa, unidentified
MEKITTAGIDLAKRVFALHGVDGAGRVGLRKTVRREQLMQTVAALPPCLIGMEACSGAHEWARRFQKLGHTVRLMAPVFVAPYRKSGKNDGNDAEAICEAVSRPNMRFVPVKSAEQQAVLALHRVRQGWIEERTATINRLRAVLTEFGVVLPNRAQHVRRGAHAAAEALPELARRAVEDLRAHLGVLDERIAIYDRELQAQARQSEAAQRLMQIRGIGPLTAVAMVATVGNARDFRSGRQFAAWLGLTPRQHSSGGKHRLGHISRRGDAYLRCLLVQGARSVLLTAMRHSDRMSRWAVSLQARCGYHKALVAIAAKNARIAWALLSKNQTLRAV

SEQ ID NO: 175296 - protein, 351 aa, unidentified
MSAIALIGLDLAKSIFQIHCVDNEGNQVLKKRLTRAQMAEFFAQLEPCVVAMEACGSAHFWARKLVEFGHSPRLIPPQYVKPFVKTNKNDAADAAAIVIAARQPDMPTVTVKSLEQQAVLSIHRARDGLVKSRTAVCNQIRGLLSEFGVVLPLGVYQLRAQIPTILEDDENKLPGLMRQVIQRLYDHLKHLEQEIEACEAMLTAWHHQNEVSQRLVAIPGVGILTATAIVATVGDAKQYRNGRQFAAALGLVPRQHSSGGKERLLGISKRGDGYLRRLLIHGTRTVWRFRMKNPDFEQTWFGKLAKRRPINVALVALANKRARTIWAMLYNNRAFDPLFKPTSPSLVLVGS

SEQ ID NO: 175297 - protein, 473 aa, unidentified
MIKSVGIDLGGIGEHKVRCLDERAQMCDGFSFETTRAGLAKLEERVFSEGSNPVIVFEPTGLAWLLVAVYLKSRRPDSRLVRVQAQKVVALRKYLNRSSKSDKIDSLTLAKMPFIDPEKLEEIYFPPAKIYAIQRLARQRKRLENDIAGRKKRIGSIVDGHFPGIRSAFSDPWSAHARAFLRSRLNPLAVVCSGEKALCAFLTKARRHCKVEASVESPGVYLACREVATLYKASSSVGTIDDDFFSALQDEISRELRLMEIEETESAAIAKRLEKLYLELHPSDNLRTIPGVGDHTAPIFLATVGDPARFHSQSSFANYCGIVPGANQSSGSEAKGLRMTKAGPPIMRWALFQAGQIGRSHDPQLACVYYREMVHNGKTHMQAMGAVMSHLSARVLAVLREDKPYEIRDNDGRSVSREEARKIILSKYKVPEEIRRERRHRKTPGSPVLQKKLREMLVPRAHEAAAAPQPVVT

SEQ ID NO: 175298 - protein, 352 aa, unidentified
MVWVGLDLHKRYITACAVEDDGHVVAEHRRLPADAPTLVAWLTALGGAVTVAMEATLYWAWLHDQLSAAGIAAVAAHPYQVKLIWQARCKTDPIDARKLADLLRVHLLPTVWVPDAEIRARRKLLRGRAYLVRLRTSVKNRIHGQLTAENCRTTVTDLYGRAGRAWLATVSLSPMGRLQVDLLLELVDALGERIGRLDDRVKRLAQADPHARLLQTWPGIGLFGAALLVAEIGTITRFPSSHALAAYAGLTPSTQSSGDKTRHGSVGRAGNPWLKWILIEIVQSLKLAPGPVGAHYQKLLRSKGKAKATVAAARKLCCYLYWCLHEEWSYDQWLRQHERLEVRPVQPLGSAA

SEQ ID NO: 175299 - protein, 395 aa, unidentified
MLPEKEVVTSVPSADTDPIFVAIEMSRSKWVVGTHLPGSDKVGIHVAPWGDVSALLTLIDRLRSRAADTLGTPDVPILCCYEAGYEGFWLYRRLTAEGHRVLVIDPASLLVNRRAKRAKTDRLDAKAMIRALMAYNRGEDQVLSAVHVPSVEQEDERRLTRERQRLVQERLAHANRIRGLLMTQGIVGFVPHGPDVERRLHELITGDGRALGARLREEIRREIVRLRLVTEQLEAVNAERDAVALAKQVESSSVDTEETRLDASMIASLTRIKGVGPNDASVLVREAFWRNFANRRQVAAWSGFAPTPWASGKVSRDQGIGKSGPAAFRSNMLQIAWRWLRWQPNSQLSQWFNERTSGATGRMRRIMIVALARKLLIALWRYATTGLVPTGAVVA

SEQ ID NO: 175300 - protein, 319 aa, unidentified
MPSNTLIGVDVSKLWLDACLSGQASVERVANTPRAIAAWLDRAKPDLVALEPTGGYERALCAALRAGCVRYVKLHPNALLAFRKSRGIRAKTDRIDARLIADFAADSLARGALLPAIAQDETLRALAARRRQLCDALHAERCRLDLAEDRGVRRSLQAVIKVLARSLDAIETAIAQHINASPETKALSARLQTIRGIGPVTATTLIADLPDPRIKSGDGKLGAKQIAALVGLAPQTRESGKTRYRARTGHGRALVRSVLFNAARAAIRHPSPMKDFYDRLVHQNQRPGKVALCAVMRKLVVIANAVARDARRQCRDQTA

SEQ ID NO: 175301 - protein, 312 aa, unidentified
MEIMRIGLDLAKNVFEVYGVDEQEQPALRKTLKRSQVMKFFAQLNPCIVGIESCGSAHHWARKLRSFGHEVRMMAPQFVAPYRKSDKNDHNDAEAICEAAGRPNMRFVPVKTEEQQAVLMVHRVRSLMVGERTSLVNQIRGLLSEFGIVLPQGRCHVRSQLPSILEDAENDLPEVAREVFANQYERLCELDSKIDEYDRKIEALAKADEDAKRLMALEGIGPITATAIIASVGDITTFKNGRQFAAWLGLVPRQWSTGGRARHGRITKRGDVYLRTLLIHGARAVMRYLMNKDDRKSEWVKAVRERRPCVST

SEQ ID NO: 175302 - protein, 419 aa, unidentified
MNYVGFDWASRAHDVTVLDEAGGVLDRWAFPHSETGWVTTLDRLARHGSAAEVPVIIERTSGLIVDRLLAGGHPVVPVHPTAFYAARPRWGASGAKSDPGDSYKLADYLRTDGHRLRRLTPTDPGLHELQALVRLRDDQVRARTAATNQLTAILDTYWPGPKQLFMSLASQIALAFLTDYPTPTSAAHLGEARMAAFCRRHAYRGGKSPAELLSRLRAAPVAPVGLPPDTLAAMVTAQVTVLKTLQTVISDVERLIAIRVVAHPRSNLFENLPGVGMINLAQLLAEVGPILDRVDSAEQAATECGAAPVTRSSGQTRGVYFRWAANTRARKAITSFAHNARMQDDWAAALYADARARGKRNPHATRIVARAWLRVIWACWTSGQPYNPDRHQTSRFLHRCHPAGAQARSRCSPPPEERS

SEQ ID NO: 175303 - protein, 404 aa, unidentified
MEVIYPRCCGLEVHQKRVVACVFTPQGKEIQTFATMTRNLLELADWLVERGVTHVAMESTGVFWEPIYNLLEGLALTLLVVNARHIKAVPGRKTDIKDAEWIADLLRHGLLRGSYIPDRPQRELREVVRYRRSLLQQRSQVVNRSQKVLEGANIKLGAVLSDIVGVSGRAMLQALIAGTEDPAALAALAKGRLRAKRPALEQAGQGLMGAHQRLLLSSLLRHLDFCDHEVTHLSAELALRMRPCEEARQRLDTIPGIGRRAAEEILAEIGPDMGHFPTAAHLASWARLCPGTKESAGKRKSGRTGQGNPWLRQSLVEAAWAATRTRGTYLSAQYHRLAGRRGRKRAILAVAHTLLTIIYHVLHTGGTYRELGGNYFDERNRQAALRRAIHRIERLGYQVTLQAA

SEQ ID NO: 175304 - protein, 351 aa, unidentified
MTSKAIAIIGGVDTHAATHQVAAIDDHGRLLGTAEFPATNHGYAELMCWLRRYGTLRSVGVEGTGAYGAGLARHLHANDIEVLEVPRPDRRLRRQHGKSDPIDAEAAARAVLAGTATAAPKFGTGPIEAVRALRVARSGAVKACTAAKNSLIALVVTAPEPLRSELSGLTTRQLVTTCSRLRPDPDRLDDPIQAVKAALRSIARRANELAAEADQLERQLAVLTQQVAPATTAIFALGPDTAAALLVSIGDNPDRLRSEAAFARLCGVAPIPASSGKTNRHRLHRGGDRSANRALHIAVIVRMRYCPKTHAYVTRRTADGLSKPEIIRCIKRYLAREVFTALRSDILAMAP

SEQ ID NO: 175305 - protein, 323 aa, unidentified
MSTKATKKRRSFIGIDVSKKLLEVGVHQSDYHFRCPNDPKNFPALITELISLRPARILLEATGGLERALLQALHAAGLPVVVVNPRQVRDFAKALGLLAKTDRLDARVLAHFAAATQPAIRPVKAQQETELDALMGRRTQLSDMLVQEKNRRGSAATKDARDDIEAHIEWLEERIQELDEKLKEQLKCSAVWQQKDKILQSVKGIGFVTSMSLLADCPELGQLNRHQIAKLVGVAPLNRDSGQQRGARHIWGGRAQVRGKLYMATLAAIRFNPVLKSFYQRLLAKNKLKKVAIVACMRKLLTIINVMVRENKLWNVKAQPVSA

SEQ ID NO: 175306 - protein, 371 aa, unidentified
MAESSKILYVGLDVHKDSIAVAYAPEDRGAEVVSLGAIGPRQCDIDKLIRTLQAKDATLVFVYEAGPCGYWLYRYLTRKGFACHVVAPSLIPRKAGDRVKTDRRDALTLARLMRSGDLSAIYVPQVEDEALRDLSRGREDAMEDLKRSKRRLKSFLLRQDICYEGRANWNAAHLRWLSEVVCPTPPQQIVFQEYVRAVTEQQERLQRLERELHEAVKGWRLYPVVEAIQALRGVELTGAVILMAELGDLTRFDTPRKLMSYLGLTPSEYSSGARRRQGGITKAGNSHARRVLVEGAWAYRYPAKVSRHLQLRLEKLPTEVQAIGWKAQVRLCKRYRQLTARGKHVNQVVVAIAREMAAFAWAIARLVPLAA

SEQ ID NO: 175307 - protein, 346 aa, unidentified
MDFDPKETDVKYCGIDLHSNNSVVIVSDEEDRIVFNKRLPNDLGQIRAALEAHQEGLAGVVIESTYNWYWLVDGLMDAGYQVHLAHPSAIKKYEGLKHSGDFADAAYLAQLLRLGLLAEGYIYPREERGARDLARKRMQLVRYRTAQILSIEGILMRQTGARMKGEAVKRLTAEQVDEFAFAPDVALAVEANRAVSQALGQQIESLERRLKERVSLRPEYRLLKTVPGIGQTLATTIMLETGSISRFAQVGNFSSYCRCVDSLRESNGKKKGEGNTKNGNKYLAWAFVEAANFAMRYCPQAKSFYDRKKSRTNRVLAIKALAHKLARACYHMLRDQKPFDVSRCFG

SEQ ID NO: 175308 - protein, 413 aa, unidentified
MEVMYPRCAGLDVHKETVVACVRLAAGSDTSHVVRTFATTTADLIELSELLEGNGCTHVAMEATGVYWKPVWQVLADSSCFELILANAAQVKNVPGRKTDVNDATWLAELLAHGLVRASFVPEPAIQELRGLLRTRKQLVREKASHVQRVQKTLEEANIKLESVLSDVMGRSGRAIIQALIDGETDPAKLAALAHWKVRASTETLSEALRGRIKRNHRFLLRLHLQQIQALDAGIAEIDREVDDGLACFRDAVDRLSTIPGISQLSAQVIVSEIGTDMSRFATDAHLRSWAGLCPRNDESAGKRRSTRLRKGAPWLKSMLVQCAWATIRSKGTYLHAQYVRLRGRRGPKKAICAVAASILTAAYHMLKDGTFYNDLGPTHFDRRRPETQARRLIKRLAELGFSVELKSMATAS

SEQ ID NO: 175309 - protein, 422 aa, unidentified
MLAIGIDWAEDFHLVALGRPHEGIFEVLRVEHRPDAIERLVARVSELEPDPEEVRVVVETRHGLLVETLLDAGYAVVPVNPDLIARRRGPARKKDDTEDARIACLLALDRFTPLNPLIPHGELANELRAIARDDLRASRDQRRLLNRLRMDLLSTFPAALTLAGEDLGAPTMLRLLERWPTLEQLASATRDEIVTFARAGRHGWPERFADEVAAALAASHFVARPSLARAKEDSIRLTVAQLLLIHTQRKAWERRMGELLLGAPRQGRAKQPNPEEAGERLPGGEIYLSFPGLGDRLAARVAGEIGDHPQQFSSPNSLQCYAGKAPVTRRSGKSEFVVAHRLACNRYLADAVQQWAFCSLRRSGWARDFYQAKTALGKTHHAALRALGNRWLEVLWHCLMKNVPYSETIHVANRNRALGRAA

SEQ ID NO: 175310 - protein, 344 aa, unidentified
MVTFGVDAHKRTHTIVAVNDRGTPLGQTTVGTTSQDHLVLLRWAARFGAERRWAVEDCRHLSRRLERDLLAAGESIMRVPPKLMAHVRDSARSYGKSDPIDALAVARAAQREPNLPLARLDGPDREVRLLVDHRESLISERTRLICRLRWHLHELDPAWEPKARSLDAQRTLDEVRGRLQDHVGVVARLAVELTERCAELTITIKALEKEITELTTQLAPALLELPGCGALTAAKIIGETAGVDRFKSRDAYARFNGTAPLPVWSSNKARHRLSRTGNRQLNAALHRIALTQARWHPPAKEMIERRKSGGNSGREALRVLKRRLSDAVFQALLHDQTAGLTLAA

SEQ ID NO: 175311 - protein, 411 aa, unidentified
MDKLFVGLDVSKNDYKCCILDAEGERVGKVFALKNNAEDSEKLVDRVVEAAAKKGAQKVFIGYESTSVYGWHLQYFLADSLKLQPLAPTIICFNPTLIENHKKSIGDLPKTDQIDAFVIADRLRIGRLPHSQSSDFRYLALQRLTRHRFHIVECIVREKNYYLAHLFLKCSGLCQCGVFSNNFGAAATSMVDGIDNFEEVADMPLEELAAWLVEKGREHFDNPDATAQKLQAAIKSSYRLHPSMDNSLNLVLRSCIENIKSLEKQKKAIEKSIKEQVAFFEREYTCLKSVKGIGDVIAAGLIAEIGGISRFEDDDALAKFAGIYWNARQSADFTAEDSNLRRRGNNYLRYYFGLAADQMRKYLPEYSEFYSRKFKESKIHHHKRALILTSRKAVRLVFALLHDSKLYSPVR

SEQ ID NO: 175312 - protein, 366 aa, unidentified
MSEITRAPVARVGVDLSKRVFQVHAVDCAGRLVLAKAFPVERFFAWCAELPQGCLVAMEACGGAHHVARRLRLLGLDARLVAGHFVTPYRMAGKSGKNDANDAAAICEAAGRPHMRFVPVKSCEQQGLLAVHRLREGYKEERTGCINRIRGLLAEFGLVFPQSPEALRRVLAEVIEDASNELPTIARMALQRAHLHWIDLELQLAWCDERIGAHVRSDARAQAAAQLHGIGPITASALVASVGDFAQFRNARQFGAWLGLVPSQNSTGGKASLGRITKRGDEYLRTLLIQGAKSAVMTAGKRSDRISQWLVQLKERAGWQKAVVALANKNARILWAVLTRGDTFDPEHVPLTPHERAARQAVPMAA

SEQ ID NO: 175313 - protein, 456 aa, unidentified
MPGSKTTRGKSAGRLLTINPDAAGIDIGATFHVVAVPPDRDERPVRTFRTFSSDLHQLADWLKEVGVKTVAMESTGVYWIPAFEVLEAHGFEVLLVNARHVKNVPGRKTDVTDAQWLQQLHQHGLLRGSFRPRDGVVRLRAYLRHRERLVDYAASHIQHMQKALMQMNVQLHHVVTDITGVTGMRIIRAIVSGNQRPEQLAEFRDVRCSASKETIREALTGNYRPEHVFALRHALELYDVHQAKIAECDVEIAAVLRTLNEERAAPEEPLPAVRHAKGRNEPKFDARPALYTLLGADLTQIHGFGPYTVLRLVAECGDDMRKWPTAKNFTSWLTLAPGNKISGGRLLSSKTRRSASRAAALLRIAAVNIGRTHTALGAFYRRLAARIGKAKAVTATARKLAILFYRALRFGMTYADPGASYYEERHRQRVIHNLHRRARELGFSLVANAAADSGVS

SEQ ID NO: 175314 - protein, 449 aa, unidentified
MSRPQVIDDQEHERVHDRVAAVDVAKDSGMVCTRTPHPSRPGSRRATVWTVQARMGAVRQLGRQLKRDGIEIVTLESTSDYWRIWFFVLEAAGLVVQLVSPAQARQLPGRPKTDKLDAMWLARLTEWGMLRASFVPPKAIRDLRDYTRARALLVRERTRCWQRLEKLLEGALVKVSSVASKLTTLSAQDMIKAMIAGERDPQVLAGLARARMRAKHDDLVQALDGMFDEHHGELAQLLLDQIAFLSERIAALGARAAELTAAMPGAWGVNADGTTGPGAGTAPDAPVLNAVARLAEIPGVSEDLARSIIAETGLDMTRFPTAGHLVSWAGLCPSARQSGPRTRAGKKGQGDTWLRASLGQAVTGAARTPTFLGERYGRIARRRGKAKAQVAVARSILIIIWHLLADPAARFTDLGPGYYQSRTDLDRKLRNHIRQIQALGFDITLTKTA

SEQ ID NO: 175315 - protein, 312 aa, unidentified
MTEIICGVDVSSDALDARIGQDGAETRMATTPEGVAALAAFCREHRVTLVVMEATGGYEKLVHALLWSHGIPAAIVNPRSVRRFAQSMGFLEKTDRIDAGVIAWYADTKHIVAQEPASQAQEHLKALVTRLRQLTELRTMQSNQRRLVADPDVNGSFSELMALIARQTRALEAKITALIGSDPLWQKLDQCFRSIKGVSDRTVARVMAEMPEIGTVSNKAASKLTGVAPLAKDSGKSQGKRSIHGGRANLRNILFVIAENVRRHNPVFAAFHKRLTDAGKPKKVIRVALAHKLLVQLNAKARDARKELAMSA

SEQ ID NO: 175316 - protein, 402 aa, unidentified
MDVVHPKCAGLDVHQQTVVACARVVSGASVHHEVRTFGTTTQDLLALSDWLTAHGCTHVAMESSGVYWKPVWHVLGGHFELVLANAMHIRNIPGRKSDVSDATWIADLLAHGLIRGSFVPPEPIQELRDLTRTRKQLVREIAQHTLRVQKTLEHANIKLTACLADILGVSGRAILQALVEGERDPERLADLASERVKASRAELVAALHGRVTPHHRFMLKLHLTQIEALEAAVREVEARLGDVLAPFRAAVDRLITMPGVSETVARVIVAEIGFPTAGHLVSWAGLCPRLHESAGKRLSNRTRSSNPWLKTTLVQAAWSAARKKDTYLRAQFLRIKSRRGPKKAVLAVAASMLTAAYHMLKHDVDYRDLGADHFDRRDKAKLAKRLIARLHDLGLTVEVRAA

SEQ ID NO: 175317 - protein, 321 aa, unidentified
MTRIICGVDVSSRSLDASIGGTGTPQRFANTSAGIDQLAEHCRAHHVELVAMEATGGYERQAFALLSGHGLPVAILNPRAVRQFAQSMGRLEKTDAIDAAMIACFAEVKKPAPSTLSPPSQQQLRALVTRLRQLTDLRTAQKNQQRLIADPLVQASFDELLALLKRQMRALAETIAALIADDPLWRELDLAFRTIKGVADRTVARIMAEMPEIGTLSNKAVSKLAGVAPLAQDSGNHRGKRAVRGGRACVRDLLFIVASVAGRHEPDFIAFRERLAGAGKPPKVVRIALAHKLLVRLNAKAREIRHRIQTAPNPVFQSLIS

SEQ ID NO: 175318 - protein, 473 aa, unidentified
MIKSVGIDLAGIGEHKVRCLDERAQLCDGFSFETTTAGLEKLEERIFSDGSNPIIIFEPTGLAWLPVAVYLKARHPDSRLVRVQAQKVVALRKYLNRSSKSDKIDSLTLAKMPFIDPEKLEEIYFPPGKIYAIQRLARQRKRLENEIAGRKRRIGSIVDGYFPGIRSAFSDPWSAHARAFLRSRLNPLSVVRAGEKALHTFLTKTRKHCKIDAFVESHGVYLTCREVATLYKASSSVGTIDADFFSALQDEVSRELRLMDMEEAESAAIAKRLEQLYLEVHPSDNLRTIPGVGDITAPIFLATVGDPARFRSQSAFANYCGVVPGANQSSDMEAKGLRMTKAGPAIMRWALFQAGGIGRAHDPQLACVYYREMVHNGKTHMQAMGAVMSHMSARILAVLREDKPYDLRDMDGRPVTREEARRIILSKYQVPEEIRRERRHRKTPGNYKLQKTLREMLVPRTYEAAEAPQPVVI

SEQ ID NO: 175319 - protein, 454 aa, unidentified
MSKPFKKGEDPMDLHVVHPNAAGVDIGNAAHYVAVPADRDEQPVRTFACFTQDVQKMADWLIQCGIDTVVMQSTGVYWLPVYEMLAQRGLQVFLVNARHTKNLPGRKSDVQECQWLMKLHTYGLLNNSFRPSEEICVLRTYWRQRDDHVKAASAAVQRIQKVLTEMNVQIANVISDISGATGMAILDAILAGERDPYQLAKLADARIQASQEEIAKSLEGNWRTELLFLLRQEREIYLEYRKRIGECDQELQKHLKTLEDRSEPGSQPLPPKRGKRAGSNAPPFDLRSELYRISGLDLTRIDGINVMIAQTIVAEVGLDMSRWATEAHFASWLGLCPDNKITGGRVYRRGTRHVENRAAAAFRMAATSLWRSKTYLGAKFKRLRTHLGAPKAITAMAHHLARLVYRMLKYGQEYVDKGMDFYQQRYQQQQIQWLQNKAKSLGLVISVAPATIAN

SEQ ID NO: 175320 - protein, 391 aa, unidentified
MIYIGIDVAKDKHDCFITNSEGEVLFNAFTIPNNADGFHDLFQKISSLTNDFSNVKVGLEATGHYNYNLLGFLIDKGLPTFVINPLHTNLFRKSLSLRQTKTDKVDAHTIALMMMSGVNLQSYSNTSYHNEELKSLTRYRFDKVQERAKLKTSISRLVNILFPELEKLVPSLHMVSIYALLAEFPSSAQIASCHLTRLTNLLANASKGHYNKEKAIEIRNAAKHSIGSNMPAKSLELKHTIRLIQELTSEIDEIECFIKSIMDEIRSPILSIPGINYRMGAMIIAEIGDFNRFSSPDKILAYAGLSPSTYQSGQLDGCYSHMGKRGFRYLRYALFNATKFVCIWDNQFSAYLAKKRSEGKHYNVAISHAAKKLVRVIYQLEKSGQLYHRAA

SEQ ID NO: 175321 - protein, 445 aa, unidentified
MKNLLCQNLGVDVSKDSLDVVLSTLDMERQVRVKASRKFANTPAGIRQLQRWMESKRTAEVELRILMEATGIYYEQLAWFLHQQGYQVSVILPTKAKRYLQALGHKSKNDSIDAKGLARMGLEQLLPLWQPLSENIYQLRLLTRQLEDFSNQRTVFLNQLHALHHSAFAVKQVDKSLKKMVRTLEKSIQELEEAIRELICQDPLLAERVEKLLAIKGVGLKTVAVLLAETNGFATFEKQGQLVSYSGYDVVENQSGKRSGKTRMSKKGNAHIRRAMHLPAFSVVRYKEPAFTALHERLLARGKTKMQAYVAVQRKLLILIWTLWRKNDVYDPLHGRRHQEQKRDIQLLEAGASLSGKGKIRKIQNNRLTFKTVPFFAAHPAAFVCPGSGPPPASSTDRSPPPTAAACAIPTLLNHHIFSSSCRRWPPIYPSCGTTQIQRLLSLTA

SEQ ID NO: 175322 - protein, 328 aa, unidentified
MSKQVLYVGIDVGCEELWVSVPRMKPRRFEHSKRGIRSLYNWAARKAGDDQLHFCMEATGVYSISVSSQMVNEYQARISIVNPARITAYGRVQMKRSKTDQLDAEVIRNYAETQSPPIWIPAARPLRQLTSLVTQADAIKDCLGQWRNRHHAQKFVPDLPDEVKKTQRSIERSLTTQLKKIETAIANLCAQESTLAQQVALLCTIPGVADQSAVKLLAYGQNWLTERSAKALTAHAGLAPHHYQSGTSVRGKSRIDKRGNPKLRKTLFMPALVAVNHNPVLIRFYKRLLKNGKPKKLALVAAMRKLLLISRAMLMAKKTFNPKYSALT

SEQ ID NO: 175323 - protein, 364 aa, unidentified
MVYVGVDLHRKSSYVAVLADDGELLASRRIASQPDEFLRVFGELEAEPTGVAFEATYGWGWFADLLSDIGIPAHMAHPLATKAISSARVKNDRVDAKTLAHLLRTNLLPEAWAAPPEVRDARKLARTRVSLARISSRLKCQTHALLADQAIEVPVTDLFGLAGRAFLEEVLLRPVPQARLQANLRLIDLLAPEVAQADRELRELFHGDPRIERLTPIPGIGFTTAALIVAEVWDVSRFPSPEHLCSWAGLTPTERSSADHTRRGHISKQGSRWLRWAMVESASRPYLKDPTLRRFRDGIARRRGAKIAKVALARRLLTLCYYALRDEGGCRAFPVPPTSTKRPNRGRARSPQVMASSGTAAPSD

SEQ ID NO: 175324 - protein, 348 aa, unidentified
MNKPDFFVGIDIASLTFTAAVGQLQEGSWRIVGKPKEFGNHYESFPDFLHWLQEQQLTPHTCVLCMEASGVYNELLAHVLVANHYRLAIQPPLEVKKAFKPVGHKTDPVDSGQISEYAYRFFDKLTFWQPRDEILEQIKVLLATREQFSGQITAHKNARQALLRKKVHTPLAEQAHLEAIQELQGHLKTLEQEIQRLIDQNPDFKRLVGLLLTVPGVGLLLAAHVLVLCESAPQLPTPKQLSAFIGICPYQKTSGTSVHAPPTSRHYGPPMIRKLLRLASLSLRTHNPTFRQYFERKVAEGKPKKVALNNIANKLLKFICAVLRSATPFDKNYRSVKPGCLNTALTKS

SEQ ID NO: 175325 - protein, 317 aa, unidentified
MTAIICGVDVASKKLDARIGREGPFETFANDADGVSALAAFCRKHGALLVVMEATGGYERQAFAQLWGLGLQAAIVNPRNVRDFAKAMGWLEKTDKIDAGAIAWYGEVRQVKPTPPASPTQQRLTALVVRLGQLTNLRTAQNQQRRGVTDASVLSTISAILAVAARQIRALEIEITQEIAADPLWKTLDATFRSLKGVADRTVARLMARLPEIGLISGKAITKLVGLAPIARDSGTFKGKRPIRGGREDVRAILFVVADIVRKFDPDFTRFRDRLLAAGKPKMVVRIALAHKLLVRLNAKAREARDQFARQTAALAA

SEQ ID NO: 175326 - protein, 413 aa, unidentified
MQVLIERCCGLDVHQDTVVACLLVGAPGFRPKKEVRTFRTMTRELEALRDWLKASGVTHVGMESTGVYWRPVYAVLEGHFELIVGNARHIRNVPGRKTDVKDAEWIADLVRHGLIAKSFVPPPPLRELRELLRYRRKLVESQAAERNRLLKLLETANIKLASVASDVFGVSGQAMLRALIEGTASPIEMAALAKGKLRRKRDDLILALEGRVEPHHRFLLTMQLHRLEVTEQDIDALDLRITERLEPYRIQLALLMQIPGVDWVVAAVLIAEIGVDMSVFVSAHRLAAWAGVCPGSHQSAGKQKSGRARKGNVHLRTILVGAAVCAGRTKGSYLKDKYHRLRARRGALRAALAIAHKILVAAYHMLSRGLPYRDLGEAYLDQLDQTRTAANLKRRLERLGYLVSLQPKEAATA

SEQ ID NO: 175327 - protein, 364 aa, unidentified
MDDSTSSTVSVGLDVHAASIRLAAVRGDELLEERTLAYDHEARELERWPGARVCYEAGPTGFGLHRHLSAAGIACDVVAPGLVPMRPGDRVKTDPRDARKLARLHAGGLLEPICVPSVELEAVRDLVRAREAARIDRMRDRHRLGKFLLRHQRPMPFQSWGAGRRKWLGEQSFDQPAQQLAFGTYLQTLDLVDRRVEALDRQLEEVAAAGPWAELVAQLRCVRGIDTLTALGLVAEVGAFDRFASAEAFMSFVGLVPSERSSGEKRRQGSITKAGNAHARRLLVEAAWHCRRRPKVSYELSRRQRDQDPAVLERAWAAQQRLHRRFHRMAGRGKPQQKIVVACARELAGFVWGIATDQPLRKGA

SEQ ID NO: 175328 - protein, 428 aa, unidentified
MPYKIAGIDVHKRMLAVVVSDVEVDGEYAFERRQFGSNPAQLRLLADWLLEQQVEEVVMESTAQYWKPVWAALERYWTPTCKKREGAGSMSGTPHLAQAQSNRARQGRKNDFADAERLVKRLVANELTLSFVPVPEQRLWRTVRRTKCQLTRNRVQLQNRLEALLEECHIKLSSLVSDLLGVSARRMVQALADGETDPAALAALANYHLRATQEQLRDALGACQELNPVYRRLLKLALEELQLIEKQISQLDQEIADLLRPYQDQVQRLAEVPGLGVDSAQQIIAEVGPTAATFPSAGNLSSWVGACPGDDESAGVSHSHRSPKGNRQMRRLLNQAANAAVKYKGGIFEILYRRYVPRLGHKQTIGVIAHRLCRLIWKILYQGVRYEERGPDVRKKSQRYRAARMIRELQSLGYRVEQANSQSADIPA

SEQ ID NO: 175329 - protein, 409 aa, unidentified
MVHARCAGLDISKRDAKVCVRVAGAGRRKTVETVTTWGSMTSQILALREHLIAERITCAVMEATSDYWKPFYYLLEDAGFDVLLVNARHVKNLPGRKTDVSDATWLAQLGAHGLVRASFVPPEPIRQLRDLTRARTAITRERSREVQRLEKLLEDAGIKLSAVASDILGVSGRAMLESLIAGNRDPAALADLAKRRLRSKIPALTEALTGRFTEHHAFLARVHLDLIDQHTAAIDGITTRIEATIAPFHGFRDLICSIPGISTLTADVIIAETGADMTRFPTAAQLASWAGTTPGNNESAGKVKSSRTRPGNPYLQGALGAAAMACAQNPRTYLGARYRRIASRRGPQKANVAIQHSMLIAIWHMGTNGCFYNDPGADYFNRLHPERAKKRAIYQLEAMGYHVTLTHAS

SEQ ID NO: 175330 - protein, 347 aa, unidentified
MRFYNNTHPYYCGIDLHARTLYVCIIDQAGKVLLHKEIGANPEKLQKILTPYIGNIVVGVECMHCWYWVSDFCQELGVEFILGHALYMKAIHGGKAKNDRIDSHKIAKLMRGGNFPLAYTYPKEMRATRDLLRRRIKIVRHGAHLKAHVANTTSQYNLPPHALNLKNVSSREQLRSMFPDPAVQKNIDLDVAILDAYAKELSKVEWFIEQQARQHNPVHLQLLRTIHGVGKILALTILYEIGDIHRFESVQQFASYSRLVKCKAESAGKSYGTQGNKIGNANLKWAFSEAAVLFLRGNDDAKKYLVKLQKRMSKAKALSALAHRIGRCVYYMLKNDTVFDEKRLLRS

SEQ ID NO: 175331 - protein, 385 aa, unidentified
MDQTSSSAISTNTLHCALELSRNSWLLAIQFPDREQPSLYPIEGGNTEKLMAKLTSARDCWAKVSGSLPAITLCYEVGYDAFWLARFLMGRGIECLVIDPGSLQVNRRGRRVKTDRVDVKMLLRTLIAWCRGERHVWSLVRIPSIDEEDLLRSHRERGRLVRERTAHINRIKGLLFGQGIRGINVKSQYKTLAVDNLVTGDGHRLPPRLACEIAREIQRLAMVQEQIAKIERERDTAPTPCEATERKRHLLLQLKSIGPAISALLSREVYYRQFANRRQVGSFLGLTPSPYNSGAEERCQGISRAGSGHVRAIMIETAWLWIRHQPKSALTRWFVERTAGQSTRVRKIIIVAVARKLAIALWRYVEHGMVPQGAILNPPTTGNAR

SEQ ID NO: 175332 - protein, 326 aa, unidentified
MTSLPNPTSDTRVTVGIDVAKATVEVAISGRQKTLALSNDEAGYAALLAELSSLNVGLVLLEATGGFELACATALQLAGLAVAVVNPRQARDFARAMGYLAKTDRIDAAVLADMARTLLARADLSKLVKPMPDAQQLELQALVTRRRQLMAMKLAEDHRMKMPGVRQRRSLNTIIKALDREIARVDKDLQAFVGANHAELASLLDSVKGVGKATISTLLAEVPELGKLSGREVSALVGVAPINRDSGTMRGKRSIFGGRPDVRRVLFMAALVASRHNPVIKAFYQRLLAAGKPKKVALVACMRKLLTILNAMVRSGKPWDQALHLG

SEQ ID NO: 175333 - protein, 409 aa, unidentified
MRYYVGVDWADQTHAVWVVDESGTQITARTVPHTAEGFVEWGRELDEWRVQGIERWAAIERPDGRVVDFLLDHGVVVYPVNPKALNRARDRFRQSGAKSDPFDARVLADFLRTDHLHLQALQPSSDAAQELKLLTEDCQRHIRQQTRLVNQLTTTLKAYYPRALEVAELTTALAREFLHAYPTPEALTVLTARQWQRWARGRRVSEARIGALWAVLQPPQLPVPAHVVRAKARLMQSLVEQLTPVVVAVAQYRKTIDDFFARMPAAQWARTLPIGKHGITAPTLWARLGDAPGRWESFRHLQAQAGAVPVTKRSGKQRVVHFRFACDKALRHVVDQVAFLSLLSSDWARAYYDQQRARGHGHRQALRALGAKWLKIIFVMWHRQVPYDEQYHLATMTRQQLRQRQTKIA

SEQ ID NO: 175334 - protein, 321 aa, unidentified
MKTQSIGIDVGKMELVACIRDSNGKLAMPALFPNSSVGLKNFVVYLKEKNISTDDPILLESTGPYHWKAARTLADQGYFVKVVNPLHTKQMARFSIRKRKTDKVDSTHLAFLASQDYGYRFVETEEMAKKKAMVRHYWKLRAFATRNILHERYLKEHRDFNDHSVSDFLIKKCEKVKKQITQEWNQGNDVKYLDSIPGISPFLAATILSELLPLERFQKIDQIIAFSGLDPSVRQTGGTKGTHGPLSKRGSPLLRYTLFLAAFGSFQREPMKSLYVRYKVRGLHHNTILCILARKILRIAVSLLKKRSDRYPKSWTQSFFV

SEQ ID NO: 175335 - protein, 415 aa, unidentified
MLKIVYPVCCGIDVHKQFVVATLASTNASSITTYQTKRFSTFTKDLRSLCEWLSRNACTEVCMESTGKYWIPVYNILEASCRITLAHPKYVKAIRGKKTDKKDSAWIADLHKHGLVAGSFIPSADIRQLRDLIRYRSKLTIFKSSEKNRVQNSLTVSNIMLASVVSDTFGKSASAILEHLLEQPDDRDFDFRRLLHRSMLSKADDIALAIDGTITPVQADKILLCKQHVDQLSTAITTIEDKARSLAAPYAAQCAIISSLPGIREFSAIAILSEIGADMSQFPSSKHLCSWAGLAPCNDQSAGKKKSVRISRAGVYLKPLLIQCALAAIKDKACQYFRNRYERIKHRRGHKRALIAIARMLLTIIYHCLKNGEFFDPSLCAEDVGLSSVSSRDTDVSRLFNEAKRLGYSLVFSGA

SEQ ID NO: 175336 - protein, 364 aa, unidentified
MSTITLGVDLAKSVFSVCEVNGSGHVLRRLDFKRDAFAVWLAQVPAGTVVAMEACSGAHHWARRCQDVSLQPRLMAAQLVKPYRLSQRSKNDRNDAEAIATAARQGNMRFVPVKDVDQQARLAWHRVREGYKAESLAIGNRLRGLLAEFGIVVATSDVALRRVLGDLDQAALPGEFKELLRGLEWHWTEVRKALDACDARIDAHAREDERCVRLRAIIGIGPITADAMVASLGSAKDFRNGRQLAAWLGLVPTQHSSGGHTRLGTISCRGDAYLRTLLIQGARSSLQRAKAVSVEKSTPEQIWIRQMACRMPFGKVLVAIANKHARQLWAMLAHEQIYDADAWLKHPMVQRSAGKHAITVAAMA

SEQ ID NO: 175337 - protein, 363 aa, unidentified
MGLDVHSTSITAAVAEGDEPPTSFGSIANEPAAVRKLITRLGGPDIQLRVAYEAGPTGYALHRQLSAMGIECVVIAPSLIPVQPGVKVKTDRRDALKLARLLRSGDLTPIWVPDEAHEALRNLVRARADAKADSLRAKHRLSKFLLRQGRHAPVGRRAWSQTYFQWLRGLQFEQLADRVVFADYLAVVTSADERLKRLEAALRQCSAVASQAALIDALQGLRGIGFLSAVTIVAESGDLRRFATAPQFMAYAGVVPSESSSGNRQHRGRITKTGNALLRHVLGEAAHHARHAPHVSGSLKQRQAQLPQPIVDLSWRAQLRLHHRYRQLGARIGPYRTVTSIARELAGFVWAVGQLQQATPPAA

SEQ ID NO: 175338 - protein, 356 aa, unidentified
MNYVGIDYHKKYSYVTAIDEEGRVIRSKRLENKAEAFQDFFKRLEGPIETVLEASRTWGVMYDLLEELEEVESVELAHSQKVRAIAEAKIKTDKIDSHVLAQLLRADLIPAAYIPGKQTRSYKEMIRQRVFLVRMRTRLKNRIHVLLDRLHVALPSVTDLFGKRGVDYLRKLNLPGVDGEILRENLQLLEVFNTLIKEAEREIELLLRENPLVKLLRTVPGLGPILAAVVVLEIDRIERFLSPSKLASYAGLVPSTYASGGRIFHGRLLPMSNKWLKWALVEAAWGSIRTSPYCRSYFENHKRHKGPHTAAIALARRLCEIIWHVLKENRVYEERPLQRQRRTSSMATSPAALTAT

SEQ ID NO: 175339 - protein, 343 aa, unidentified
MERELFIGVDVSKRWLDLAYYDGVNVDWKHGHIRVDNKESGFVQIGKWLKGLGIDKDSVLFCMEYTGLYCQDLRAWLEKEGFVYGMVNPRKMHRFEPDLAAGERALDRIKTDEMDSFRIAMYCEKHCRKIRSQPSRLPAPAYFKLKRLIAERRQYVVQSALYKQQLHDVCDYDTDGSVCRKKEELKSLMAHVRQTDAEILSVMEEDACIKKNYDLLRSVTGIGIVVATETIILTENFTSITNPRTYACYIGIAPAKKESGDSVRGGEHVSRKGFTQAKADLSMACLKAIQTDANIKSYWQRRKTDGKKGGVVLNAIKFKLVLRMFAVIKRQKPYVEIDGYRKN

SEQ ID NO: 175340 - protein, 408 aa, unidentified
MDLTPMHKRVIALDVHQAKITACAVVEHDDGRVEVTKRDFGAFKRDRRALAQWALEMAPEVVVMQSTGVYWKSPFAALEAVGLIAWVVNARHVKAVPGRKTDMADAQWLATLARAGLLRASFIPPVQMRQLRLVARQRQKLVGMCSAEKNRLHKVLVDAGMRINVVVSDIHGASARAMVKALIADKPMHEVLDCKGRLRASRDELFEALSTEQFSAVHRFVADEIVQHIEQIEQRIARLDAYLLEGLKAYGPQLNLLQTIPGIDLQGAAMLLVEIGADMSPFGSAERLASWVGICPGNNESAGKRKTGKIRKGNAWVRRLLCEFAQAAARTRCALRAKFEALAIRKGHKKSIVALAHKMLRTVYAMLSTGAHYQDKTVDYEALSVARNAPRWIKMLRKHGFIATPAAA

SEQ ID NO: 175341 - protein, 342 aa, unidentified
MDTHLDTHTAALCDARGRAVARLQVPATAAGYAQLLAWARSAAGGSRAVWAVEGTRHYGLGLARYLASQGQQVTEIDNTRHVGKRRAGKSDPIDAVRAARELLARPHAAQMRADGDREALRLLMVDRDNAVQSCKTARTVLAAVLVTAPAELRERLRQLPRTRRAQQCAALACPAQADRQTRVLHQTLIRLGQRITALASEAAELETQIAAIVEDMAPGLVAAEPGTGALSAAQILLSWSHAGRIRSEAAFAMLSGTAPVPVSSGRTDRHRLNRLGDRQLNRALHIVAVNRMRCHPPPRPTVRRRLAEGKTERDIRRCIKRYLARHLYRALNKQLNQAAQQT

SEQ ID NO: 175342 - protein, 341 aa, unidentified
MSTVTLIGIDLGKHSFHLHGQDAAGRMMFRKKCSRQDLFKLLGNTPRSTVVMEACAGAHWMARRIEELGHQAKLISPQFVRPFVQGNKNDFADAQAICEAASRPSMRFVSVRNQAQQTVSALHRVRESLVAQRTGVINQVHAFLLEFGISLPRGQAILRRLPAVLAEHALPPQLGALLERLRSHFQYLDEQVGQIERELCLQLREDERSQRLLQIPGIGPITASVLMTELGDARQFGSARQFAASVGLVPRQYSTGGKPTLLGISKRGDKNLRRLLVQGARAIMRHVERRTDRLGAWVRELQARRHSNVVACALANKLARIAWAILANGTNYRSEQTEAPA

SEQ ID NO: 175343 - protein, 380 aa, unidentified
MNTLYVGIDVSSKSNVVYLMLPNGDKHSNFSVANSHEGSTLLVKKIYSALTSHSLDTVLIGLEATSVYGDNLVYFLREDATLAPFNRKIHVLNPKQVKKFHDTYNDLPKNDYVDSFVIADCLRFGRINKEVYMGEYRYKALQNLTRARFFAVQNLVKEKQRFMNVLFKKYSTMTQEKVFSDAFSTTALAVYDEFESAEALANMDLHELTDFIIEKGKNRFPDPDAVAKAIQKAARSSYRLPKTVNDSVNQVLSISITSMKALESQIKEFDKAIIALMELLPNVLISIPGIGPVYSAGIMAEIGDINRFDNQASLAKYAGLAWKQHQSGGFEAEVTRLIPSGNRFLKYYLCEAAYTELLNVVISERSEPLTVYIPTSREFS

SEQ ID NO: 175344 - protein, 372 aa, unidentified
MDKYIGFDVSSKSITACVIDGRDDEQYETLPVDLPVLAEWLGRQRDRKDRVHLTFEVSGQSGWLYDGLIERVDTLTVSNPSELTWIFRTRKKTDRIDAYKQARLLKAGLIPAVHMPTADIRRWRKRIQHRRGLITSVVRTKNRIRALVKGQGYPRAPHRGSWWHQLNRAWLWEIAREGGVDWREDLEDLLEQLALYEDQLRRVTKRLDERLKHHEGAALLMSIPGVGPRTAEAVLAHTDEVERFRRGKEYCSYFGMTPKLDQSGTVCRQGHISKQGPSVVRWLLVECAWRAIRTSPSLRAFYERVLGGQKKRKKIAIVAVARKLLSVMRAMLLSGSVFEEHLVLQQEQIHRATEQRQQEAEEQSRRRKAFYQ

SEQ ID NO: 175345 - protein, 359 aa, unidentified
MQRNKISFKGQKIYIGIDVHAKTWEVCVLTESGYRERHPQQASAKTLFDFLKKHFPDGEYHAVYESGFSGFSTYYALKEYGINCVVTHAADVPTTQYEEVMKTDKVDAAKLARSLRAGDIRPIYIREKENIDDRSVIRIRKTIQKQLSGYKARVKHLLHCNGVEIPERFARPGTHWSRAFIKWLKEDVVLLSSSRLSLDLLVKQVETIRQTLLDATKSIRRLAQTDRYRNNYELLMSIPGIGVSVAMCILTEIYDVKRFRNENQFASYLGLIPTCHNSGEKTASGEKTFRGNKHLGPMIIEAAWIAIYRDYGLGMAYARYKQSMKPQEAIVKIARKMSNIIFSVLKNSRKYEPYRWDKE

SEQ ID NO: 175346 - protein, 353 aa, unidentified
MTEYVGIDWAYRRAAWCAMSAGGVISAEGFTPADEDGLAKLVLRLGSEVKACLEMMSGAVWVRDRLRSAGWQVEVADARRVKGVAPLACKTDRVDARVLAELCRRDLVPALWIPSLEERELRERLRRRMHLVRLRTSAMNRIFGLGTQWGLRLSAERLRRRGALELLAQRGVPAVWQRSIQEALAVIDLLEARIAPLEAELAPIARADRDVALLVTIPGVGEMLALTLAAEIADVSRFPSPGKLVGYAGMAPGVKQSGQSSRSGLPLSKAGSRTLRWAAVEAAQHAWRESNPWHQLYSDVAKRSGKNAAKSAVARKVLIASWHMLSRREPFKPSRPRGGARTVPASSISVLAA

SEQ ID NO: 175347 - protein, 419 aa, unidentified
MFKIFRKNCCGLDVHKTWIYACIGITDARGLTTYKQARFSSFSKGLRDLATWLAQYECKEVCMESAGKFWIPVFNILEKTCWVTLAHPKYTKPQKGNKTDRKDAKWICDLFMCDMIKPSFIPPLDIRELRDLLRYRTKLINCMTGEKNRAQNCLTVSNLKLDDVFADVFGKSASSITGYILDHPGEKFDVTPFVDRRCKTPVEEIQAAVDGSISREQAAKLRECLKHIEEIEAHIKRIEAEILRLAEKYTVALELIRTVPGFSSNPMTAIAVISEIGVDMSVFPTAKHLSSWAGCCPRNDQSGGKRKSTRISRAGAYTKPLLVQVANAVIKSDKHPEFKERYRRLKARRGHKKAIIAICRMFLTAIWNILSKLEPYDPKGFLSDPPPDKARTLSQSQALNLLRSRGYVIQDDLPSLVPM

SEQ ID NO: 175348 - protein, 340 aa, unidentified
MVHVAVDLHKRVSQLAVLTAEGELRQHRLANEVPRLERFFAQFPAATPVAIEASGTWWWLVDLLERLGHQPVLSHPKQTKAIAAARLKNDRVDAERLVLLLRGDLLPRVWIPPAALREARELLRHRVSLVWVRTGIKNRLLALLARRHLEPSRSKSWLTARGQRELHALPLAPIPSTIREDCLALLHLLDEQIRRLDQELVRRWGDDPRVQRLMTIPGIGPFVAILLVLELGDIHRFPSAKHVASYVGLTPRVRASADRLRLGHISKEGNRLLRWALVVAATQAARRPGPLRAWVRLVQRRKGKKVARVALARRLAEIVYHVWKEEIDYFTVLRRGGVRG

SEQ ID NO: 175349 - protein, 251 aa, unidentified
MYVGVDMHKATFSAAVIDEDGSIVREAKLPSDPEQLRNFSYSLPSGSEIVMESSSTWYWAYRILSERHKVVLSNPLKTKAIASAKVKTDRIDSLTLAELLRGGYIPECYIPDVYTQQIRELVRYRAKLVRLRTIVKNSIHAHLLMYNIKVEGYPFTESFKERLRGLGDPKITGYLKILSVLDNEIHEASETIKGIANDNKDAQLLISIPGISFYSALLISSEIGDINRFPDSEHLVSYAGLAPSTYSSTMT

SEQ ID NO: 175350 - protein, 346 aa, unidentified
MGKSITDLSSVTTVGLDLAKHVFQVHGVDASGRVVVAKAIRRNKLLGFFASLPPCLVGLEASGSAHHWARELVKLGHDARMMPPAYVKPYIRRQKNDAADAAAICEAVTRPSMRFVGLRSLENQAALMRHKAREMLVSQRTQLLNGLRSHLTEVGVIAPQGLRCARELAELIEACDERIPFEVCEALAPLVVQLWNLDEAIARLDRTIAKMAQKNETARRLMSIPGFGPITASAMAATIQDASSFAGPREFAAFLGLTPKQNSSGGKPKLGRISKMGNRNLRKLLVVGAHAVLFHRKPHTDPLRMWAKKLIEKKPFKLVAVALANKMARIAFAILRGKTVYREIPA

SEQ ID NO: 175351 - protein, 422 aa, unidentified
MIPAVIEKCVGIDVGKKFVVACLMTGPAKDPAQAETRKFGTVRAELEKLRQWLSSEGCTHAVMESTGCYWKPVLNILEEDPDFRLQVVLANPRQVKAITGHKTDPHDARWLAHLLRHGMIRPSFIPPRALRELRDFTRRRKQMIELAAEERNRVQKILEDANVKIGNVLTDIFGLSGQLMLEALVNGMADGEQPGAEQIAKLARGHAKKKIEQLTAALEGHQMRDTHRVLIRHAMRHMAFLGEEIEALDREIEQLIRASGLDSAHRLLQSLPGIQATAAATILAESGADMNQFPSAAHFSSWSGLEPGNNESAGKRKRAPSLKGNPHLKTAVVEAAWSASRTNGSEFPLRYQRLHPRLGHKRALVAAAHCLVMRIYQVLSDAAPYQPPPTAIPPRKVRRLIRHHTRRLRCLHCWLTQDQTPE

SEQ ID NO: 175352 - protein, 417 aa, unidentified
MALKIVYPICCGIDVHKSFVVACIAMTNDQGVTSYKRHRFSTFTGDLRHLANWLSENNCQDVCMESTGKYWIPIYNILEPTCKVVLAHPKYVKAIRGKKTDTRDATWIADLFKHDLVAGSFIPPPDIRQLRDLMRYRVKLTNFTVGEKNRAQNCLTVSNIKLDDVFADVFGKSASAITEQLLQHPDGRFDVAPLIDRRCKTSPAVIQSAIDGLMCTQQVEKFKIIRSHMNALELCKTDLESEILSLAEQFRPQFELVMTVPGIQLFSAIAILSEIGTDMSVFPTAKHLCSWAGLVPQNAESAGKKKTTRVSRAGAYIKPLLVQCALAVCLSDKHPEIQSRYLALKKRRGHKKAIIAICRMLLTAIYAILKKSEAYNPNLYRKVITLPSNREFTVEQAVAFVQRHGFLVMDSDGVLAS

SEQ ID NO: 175353 - protein, 384 aa, unidentified
MPRYIGLDLHRRYVHGCEWVPETQQERHFQFPNTSDGWSQFVTMLDSDCWVAMEVTGNAFQVYDRLSSHAAKVLLANPVELKRLGSGRHTDRADAARLAKMLALGTLPAVWVPPRDIREVRILLRYRERLKSTRVRFLNQIRAALHRNGVDLPPRANPKLHLTLEQLRALPEAERILILSAWRQADALNDEIASIDAEIANRLQGVPEAQLLLTMTGLGPIAAAAVWAYIGDPRRFKSPKQVARYAGLDPSVHQSGESAYHGRISKNGNGLLRTYMIEAALTLARFDNGHLGAFWRRKSRQVGHNRAIVALARKMLIVAWKMMLTGAPYRAANAKTIRNKRWYLNRIARQTTNWNQIAAHVFGMGTQEITCSRLTPITSVISKA

SEQ ID NO: 175354 - protein, 431 aa, unidentified
MDKIYDICCGIDVHKKLIVACLNHKRKKELREFGATTRELMELAEWLQKNECEIVAMESTGSYWKPLYNIMESYGLHAIVVNPAHMKAVPGRKTDVKDAEWIAELLQHGLLQPSYIPSKDQRELRELVQYRKSLVGERTRELNRLQKMLEGANIKLSGTVTNINGKSARKILEYILSGNEIDEKKYDEMYEEKLIAHNLKASKEQILDDLKGFMSPLQRRMLKELLQHLDELNVHIENLNDEIDNFMKPEEKQASQVIQDVTGIGNTSAQTIIAVIGTDMERFPSDRHISSWAGLCPGDNVSAKKRKSGKIRKGNALLKSTLVLCAHAAVRHKSSYFHAQFKRISTHRGKKRAYVAVAHSILIAIYHILKDGVKYQDLGAEYYNQFNAERKIHAYLKKLKALAHLSIFLPALCIVSLIMENDFLHLIEFIS

SEQ ID NO: 175355 - protein, 344 aa, unidentified
MYGGVDTHKDTHHAAVVDRNGGVLGDAQFPADSAGYQHLLGWLRGFGRVVKVGVEGTGSYGAGLDRHLHAAGVSVVEVNRPNRQARRRHGKSDAIDAIGAARAALSGEADATPKTGIGPVEAVRVLRIARDSAVKERTAAINQLKALIVTAPDQLRGLLRGLTPAKLLRACTSFDVDEDQLRDPVEATKAALRAIATRITALKTEVTQADKRLKPLIAAVAPRLSTLFGVGPHSAGQLLTTAGDNPDRLGSEAALAHLCGAAPIEASSGQTTRHRLNRGGDRQANKALYTIVLTRLGHDEATKAYAQRRTQQGRSKKEIIRCLKRYVAREVYTALKADFAALTP

SEQ ID NO: 175356 - protein, 370 aa, unidentified
MLNTTTFVGLDVHARSIKAVALDAMTGEVRSATFGYDAAEVAGWVSSVDPSAKCVYESGATGFDLQKRLSSMGIDCVVGAVSKMIKPPADRKRKNDRNDAEFLARMLSVGNVVEVWVPDDGCEAARDLSRALDDAREDLKRCKQRLSKFLLRHGYAFSETTPTGRRKGSWTAAHWAWIKSISFPEKADNDVLAYYVDAVRQAMEDKARLERLVEAEASKPRWKRRIDSIRCLKGIDVTSAADLVFEAGEFSRFKSARSFAAWLGLTPSERSSGESVRQGGITKAGNKHLRRVLVESAWRYLGCSPHSKDLAKGQVPDPAARRHAAKGVRRLVERRRAMLERGVHKNKANVATARELACWCWAVGRMVENG

SEQ ID NO: 175357 - protein, 457 aa, unidentified
MKQGKRAKESKSGRRIETRQGSVHQGLVHPHAGGIDVGATEIYVAAPPAGEEQAVRCYKTFTEDLHRLADWVQERGVDTVAMESTGVYWIPLFQILEARGIEVCLVNARHVKNVTGRKSDVPDCQWLQHLHSVGLLAASFRPEQEICALRTVLRHRAEVVQDASGHIQHMQKSLDQMNLQLHHVISELAGMTGLAILDAILAGERDRYKLAGLRDARIRASEETIVKSLVGDYRPEHLFTLRQALEAYRFCQKQLAACDDQIRRMLQEMDSFEGGDGGSPAPWANDAFDLKSELHRVLGVDLTQVPGLEVKTAQVLLSEVGVNLAKSFRSAEAFVSWLGLCPDNRVSGGKVLSARIRKVHNRVANALRGAARSLHHSDSPLGAYYRRMRAKLGAPKAIVATAHKLARIIYHMLTSRQAYDPSVFDEMERKRVQYIKAKLQAHARALGMRLVPAEAAC

SEQ ID NO: 175358 - protein, 522 aa, unidentified
MATTLRSRTRRSQRHLNVAKPSGSLHPRVQKVGPEHFGVVAVDCAKDRSKWMLSDFYGRILVPPTVLEHNGHGFAACIAQIRAAIQRNRLGDVIVAIERTGIYHLPIKRAFTSNNFETRIVHPLTTKQYRLPADPGTKTDDTDLCAIFRATTNGFGLIEAPLDEIHGPLRLLVRHRRDLVRKNASLRNQIQALLDVFLPGYTSRFDVFGNPAAHAIARGVKSAAEVCSLGTEGLAQLLKSLGVRHQRRTLEKILGWAQGAANSVEYADMYNTILLSLDDERCSRLEQITKLEQQMAGLLVRTPYVVLLSIPGIGIVTAGEFAGEMGPITHYANDTAITGRAGIYPSRYQSDQVDRCDGPLVRRGNRRLRGVIMMIADNLLICNRFFQTLKEPWKAAGMDQRAMCVRAAKRFCRIAYQMVAGGQLFRHPSCQQRDAILRKLCCFHVAHGSSMTAVMSDLQAALDHIPQSAHAPEAKSLFEAMQPSSRRQPCGLRRLGEILPAVLAKLEVTAVELRSKGENDLT

SEQ ID NO: 175359 - protein, 484 aa, unidentified
MAPVDKSAPEVIPDAEHELVIERVAAVDVAKAAGKVCVRLPAKTGRRFSRVWDVPARTGAITELGEQLVELGVEKITVESTSDYWRIWYYLLEAAGLSVQLVNARDVKNVPGRPKTDKLDAVWLAKLTEKGLLRPSFVPPAEIRRLRDYTRLREDLTHERTRYWQRLEKLLEDALIKVSVVASRLDTMSTRDMIEALIAGERDPRRLAELARGRMKAKRSELITALDGRFDDHHAELARMLLAQIDALSAQINTLTGRIEDLIAELPEAAAVDHGGGDDTDTAAPDAGDGPDAGPPPARGAAGLTGGTPGRVDPAIEAECARLSAIERLDEITGVGEHNAQVIIAETGLDMTRFPTPAHLVAWAKLCPRTIQSGPVTRSGRAGKGNPYLKGALGQAAAAAAKTDTFLGQRYRRIVKRRGKLKALVAVARSILVIVWHLLADPLARFHDLGPDYHARRIDIERRMRNHIAQLTALGYRVTLEPAA

SEQ ID NO: 175360 - protein, 389 aa, unidentified
MKIYVGIDIAKPNHFAAAISQGGEIILEPFKFTNDADGFQLQVSKLESFDKNSIIIGPPSTAHYGDNLVRYLVAEFYQVCVLNPIKTCQMRKNNVRKTKTDKVDTFVIAKTLMMQDDLRFITFFDLDMMDLKALGRFRQKTIKQRTRLKIQLTTYVDQVFPEIQYFFKSGLHQNAVYALLKEAPSPKEIASMHMTHLANLLKVNSHGHFTKEQAKELRILAQKSVGANYSAISIQITQTIQQIELLDSQLDKIEAEMTDTMKFNDSVIMTIPGIGYINGGMILGEIGDIHRFSNPNKLLAFAGLDPSVYQSGNFQAKTTRMSKRGSRVLRYALVNVAWNVVRNNATFKAYYDAKRAEGRSHYNALGHCAGKLVRVIWKMLTDEVEFNLE

SEQ ID NO: 175361 - protein, 436 aa, unidentified
MEEVEDEPLFADRVAGIDIGKKEIMVTIRVPSDTGSRRRQQETREFPATRKGLLELADWLRCWQVTKIGMEATGDYWKPVYFLLEREGFDCVLYHAAQVKALPGRPKTDKLDSVWLARITERGSLPGSFVPPEDIRRLRTHTRYRRHLVQARTAEKARCEKLLEDAHLKLSSVISNIHGVAGREMLTAIIAGQRDPKVLAQMARTRMRGKIRQLEEALDCSFFTEEHAFILAMMLANIDHLTAQIKELSTKIDALCEPYARQIAQLDAVPGFGIITAQDIIGEIGVDMRVFPTAGHLCSWARQAPQVASSAGKRKGKNATGRGNPYIGGALGEAAANAGRTQTFLGTKYRRLIRHMPKKKAQGAISRTQLVITHALLSDPEAEYTDLGTDYYEQRADIRRRTRNHVRGLERLGYQVTIEPITPDPETGDLPITKAS

SEQ ID NO: 175362 - protein, 421 aa, unidentified
MQVIYERCAAVDVGKDVIVIAVRRPGKGPDGRVTVKRQYKTFYGVLREAARWLVSEGVTHVAMEATGIYSMPVYHALIEHGDFEKVLVCNAGHVKNVPGRKTDMADAEWLCQLLECGLLAGSFIPPADVKAARDVIRYRAKIAQQRVSEIARLANVLQDAGIKLDSVAWSVSTKSGRQMIEALIDGERRGAVLADLAIGRMRRKIPELSMALEGRFEEHHAMLCRLHLDHLDHLDGMLAKLDAQIEAMMQPFRAARDLLTTIPGIGTLSAAAIISEIGTDVRGYFPDAAHLASWAGLCPGNHESAGKRHPGKRRKGNQHLQPVLVECAWAAVRHEGYLKSLYHRHVMKWGGYRSSIAKSKAIIVVAHAILVITWHVLATGKPYDELGSDYFTRRLDPERETRRLVARLEALGHAVTLEAAA

SEQ ID NO: 175363 - protein, 316 aa, unidentified
MVGIDVASAHVDVAAIGAALPAALSHIGNDADGHSALADGLARLKPELVLMEATGGYEAALACALQAAGLRVAVVNPRMARDFARAMQRLAKTDRIDAATLAEFAGVLARRPDCERFIRPLREPEQQDLAALVTRRRQLVSMQLSERQRLRLARPVARPSIEALLEAIARQLDDVEAEMARHVEQHYAQMTKLLQSVAGIGRVAAATLIAELPELGRLNRRQICALVGVPPYAKDSSASRGRRRIGGGRFEVRRALYMATLAATRYNAPIRAFYQRLVAAGKLKKVALIACMRKLITHLNAIARDHLKDQDRPTIA

SEQ ID NO: 175364 - protein, 324 aa, unidentified
MIDAILGIDVSKNTLDVSISSCTKVRTKSFANSSDGWHHLLDWLIAQKIERVHACLESTGRYSLGIACSLYEAGHVVSIINPAQIRDFVRTKLGRNKTDGIDASRIREYCELFKPSPWAPPSEAHRRLGELQTIRAGIIAGLTEWKNRKNSGIVDAEAQALADATISHFTSQLEAVDKAIALTIDNDSDLRSKRDLLLSISGVGDTLAGVVLAELPGPDVLRSSGEVIAYAGLNPRQHQSGTSVDRATRISKIGNAVLRAALYMPALSAMRYNPAIVALVTRLKSRGRLKPKQIVVAAMRKLLVLCFGVLKTGKPFDPAIAMGC

SEQ ID NO: 175365 - protein, 316 aa, unidentified
MTDQSTAFLGVDVAQDHLDLCGPNLSLHPTRITNAPRTILSLLRGLHRKHPGLHVVCEATGGCENALLQACWKLGVPISRLNPAWVRDFARSQGRLAKTDAIDASVLAAYGRAFHPKPTPEPSAAQQRLSQITARREDLKAMIVAETNRLDKLADPSLRRWLKNHLIVLQKQISQLDQLLEDTINADPLLRAKCDCLATTKGVGRLTAAVLLASLPELGTLSRHAAAALAGVAPFNRDSGNLRGKRSIRGGRPCARRALYMASLVASRYNPILRDFYQRLRANGKAPKVALTALMRKLVVHLNSCLKNIQPLPCQH

SEQ ID NO: 175366 - protein, 385 aa, unidentified
MGRKTFIPQEYDVFGGLDVDKKSIFVTFSNHQQGFIRSLQMPYSVEQLLKHVRKHFADQKVVFAYEAGPTGYGLYDGLSAQGYNCLVAAPSMIPRAPGQRVKTNRLDSRGLAENLRGGQLKSIHVPSPIYRELRHLTQLRDTLVSEVAGMKQRIKSLLLFEGISFPLAPAGSQWSLKVKAKLRKLECSKSVRFKLDQLLDSVEFSEKQVVKVTKEIRRFCQNDAELSQCIKYMMSVCGVGWIVASQLLARIGDWRQLENVRQLGGFLGLVPTENSTGDKTDRGSITHTGDGRLRSKLIQASWSAIRQDGELREFFRSVCRRHPRHVGPQVAIVAVARKLSARISAVLMGQRPYVVRQKVQSAPLTQEETFASGNDSMASQNGGKV

SEQ ID NO: 175367 - protein, 346 aa, unidentified
MLYVGLDLSRKRLDWQALDREGGVAAIGAVPPDRDGLAALARRLGDASPVLAVIESMTGARFVHDQLELAGWEVRIADAVKARGIAPLACKTDRIDCWVLAELARLELVPEIWLPDPSVRAERERARFRLHLVKHRSSLKNRIHAILFQHGIPNASSDLFGAGGRRLLERLALPEPWASTVRASLAPIDSLDEQIDACALELRELGADHRYIPLLLSCPGIGWALAYTIASEIGDIDRFQSPRKLVGYTGLCPRVEQSGERDRRGPLRKNGPNYLRWAYVEAAHTAARCHPPYTAIRERMQARHGKKRGTKIAAIEIARRLAEANWHMLTTNKPFTPAGAAASLAA

SEQ ID NO: 175368 - protein, 339 aa, unidentified
MKYIPVGVDIAKHLMQVHFVDEHTGEIIDKQVKREKFLEYFSNREPCLIGMEACGGSHHWARELQKLGHKVRLLKGRFVKAFVMGNKNDVMDARAIWLAVQQPVKSVAVKSEEQQATLGLHRMRQQLVKFRTAQINALHGLLLEFGETTHKGRAALAKEVPEALERLKERLPLYLINMLDEQYQRITELDEHLDHIEKQLQAVARQNETCQRLLNIPGVGPLIATAAVATMGDASAFKSGREFAAFIGLVPRQTGSGGKIRLLGISKRGDKYLRTLFIHGARAAALLTKEHGPWITELKKRRPASVAIVAMANKLARTVWAIAAHGRKYDKNHVSIRPD

SEQ ID NO: 175369 - protein, 344 aa, unidentified
MDHFAGLDVSVKETSVCILDDAGKIVKEVKVASEPQALLKVLGNPAYHFKRIGLEAGPLSQWLFSALAEAELPVICVETRHMQAVLKAQINKTDRNDARGIAQMMRVGVYRPVHVKTLRSQKLRMLLTHRKLLQSKAIAIENDLRGTLRNFGLKVGMVGKVRFEGRIQELVETIPDLAILVEPLLVVRRALREQIIILHRRLLAIVRDDEVCRRLMTTPGVGPVVALTYRATVDVPARFRKSKSVGAVFGLTSSRYQSGEIDWSGRISRCGDEMMRVMLYEAAQSMLHSKKWSWLKAWAMQIARRRGMKKAIVALARRLAVIMHRIWVDGTEFRWTREPAATAA

SEQ ID NO: 175370 - protein, 410 aa, unidentified
MEVLYRRCCGLDVHKETVVACLRVVSGDEVIREVRTFETTTASLMALSEWLAKNGCTHVAMEATGVYWKPVWHILDDGDFQLILANAAHVKNVPGRKTDVNDATWLADLLAHGLIRASFVPDTQTQELRTLLRTRKQLVREKSSHILRVQKMLEDANIKLDSVITDVMGMSGRAMIEALIAGESNPAKLARLANYRLRASQEKLREALRGRVTKHHRFLLRLHLNQIDALDASIVMIDEQVEAGIAPFRAAVGQVMTIPGIRDIGAQVIVSEIGTDMSRFPSEGHLISWAGLCPRNDESAGKRRSNRLRKGAPWLKTTLVQCAWAAVRKKGSYLQAQFLRLKARRGPKKAIMAVAASILTAIYHMLKDGTLYQDLGSNHFQNRSKGQQTKRLVKRLADLGYNVALTPLAS

SEQ ID NO: 175371 - protein, 355 aa, unidentified
MEKSTTFSKVTVGLDVGDRSSRLCVIDSVGEVVHEGRFQSDASGLRRTLLWWPRCRVVLEVGGHSPWMSRQLERDGYEVVVANSYQVGKLYQGQDKSDRRDAETLARLGRSDPKLLKPIRHRGEQAMADRALLRSREVLVRSRVQLINHARGLVKTVGARLPSCATDRFARRVREQLPASLCRALEPILDTIQELSARIRSYDREIERVSRKRYPETALFEPIRGVGALTGLAFVLSIEDPSRFEDSRDVGSYVGLRPKRRQSGDEDPQLSITRAGDPQLRRLLVQCAHYILGPFGEDCDLRRFGERLVARGGRAAKKRAVVAVARKLAVVMHHLWVTRERYDPQHLANPSSAST

SEQ ID NO: 175372 - protein, 346 aa, unidentified
MLYAGLDLSRKRLDVHVLDEEGTTVEVMAVRPDADALRTLAVHVFRYGQEVSGVIESMTGARFVHDQLELRGWDVAIGDAVKVKGLAPLAAKTDKIDAWVLAELARRDLVPEIWLPTPGVRAERERARFRLHLVRHRTALKNRIHATLLTFGHPVPVADLFGVAGRELLARMDVPEPWRSSLSTSLAMVDDLDERIDACAKDLRALGADHPMIPLLLTVPGIGHILAYTIASEIGDIRRFASPKKLTGYTGLCPKVYQSGDRDVRGPLAKNGPKYLRWALIEAATHAARDARYRERYERNKRRLGRQRGAKVARVDIARKLAEAIWHVLTKNEPFAPAGPTMPLVA

SEQ ID NO: 175373 - protein, 330 aa, unidentified
MNVHPQGRETVVAPRANAGIDVSKDWLDVALADRTERFANDATGMESLTVLLGQQEVDLIVLEATGGYEKAAAAALQAAGLAVAVVNPRQARDFAKAMGVLAKTDKVDARVLRSFADVLARHERRSQFLHEVPDEKRAELAALVTRRRQLVEMRTMESQRMAMTRSKKARKSLTNVILFLDQQLAEIDRDLDQFTKEHFQDLRKLLSSAKGIGPVATSTLLAALPEIGQLDRRAIGALVGVVPLARDSGKKHGKRRCWGGRSQVRHVLYMATVTAITHNPVIRAFHQRLIGKGKPPKVALIACLRKLLTILNAMVRDGTAWNPELHVKTA

SEQ ID NO: 175374 - protein, 310 aa, unidentified
MGEGFVGIDVSKDRLDVAFRPGGEHLQVGNDPRGMARLVRMLERLQPQLVVLEASGGYEAALFERLSAKQLPVALLNPRHVRQFARASGRLAKTDAIDAKVLAHFAEVMRPEPRRMADAETRKLRVLVGRRYQLIQMMTGELHRQSRSLAALREGFVATIRCFKKQIASIDKQLATLIQETPALREKAELLRTTPGIGVVASATLLARLPELGTLDRKKIAALVGVAAFDRDSGKLKGKRAIWGGRSDVRGVLYMSALVAVRRNPPLRDFYRRLRQAGKTPKMALTACMRKLIVILNALIKHRTPWALAA

SEQ ID NO: 175375 - protein, 401 aa, unidentified
MTTLQDNGKRIKRFRELKATLRTNRSRLLVGLDIAQAEHEAQVRHAHTRIVVPQCTIPNTTRGFTQLWARIQQAQRATGCREIVCGLEPTGTYHQAVAAFLEGQGATVVLISSSVAYWNRRTQDGTWDKHDRKDAANCAELLEQGKVLFYSQPDGPLAALRHLVKLLRRARAELASCKARWRTTLRPALGPMGEPLPNRLRAELPAVLQPWERAAPGRPAVAKGRLPLGLATACADLGAQVTAVQARIAAIEAALTPLAERLPAYALLRTIPGIGPTVGAILLAEIGDVAWFTQFSQLRKLAGLDIVRVQSGQFAGQARISKCGRGLLRWALYQAALGQARTTAGRARLAALKAKRQGDRFAGLKATVELAAKVLRVVWGVWRSGTPYDPRRMGGLQRQAR

SEQ ID NO: 175376 - protein, 355 aa, unidentified
MQRYVGLDVHSKNSVYVIQDAEGQVVGRGKVPTTADGFKDMRDRLELRSGTPVALESGAVAFVVADYLNDLGLRPIVVDAREVRVKASRPRQKSDFRDARELCEGVRRGMYRAIVSVPPREIRTLRETLSRRRHFVRVRTAQVNAAKWLLRSNGKGALARSLQLESGWNTLIAALSDAPALQAFVRQHQAVWRCAGEQVTLLDLEIRRLGRTWKKELTLLETAPGVGTIVGSTALAVLFDPHRFPSAKHAASYAGLVPTTDQSGDREHYGHITKRGSSELRAMLCEAAQHARRTNHPLHPYFAKVWVRRGYRMAVVAVAHRLCRILFAMLRDGTPFRPDNAGIERSVPTYRLRRA

SEQ ID NO: 175377 - protein, 486 aa, unidentified
MAARKNAKAKADSAGDGVQAHGGEAAEVSDEVTQVVEFAAGIDVAKGFGMVCTRVPGSRAGRRRQKVWRVNATFSEVTALMDHLVCEGIQRLVLESTSDYWRIWYYLAEAAGLEVWLVNARDVKHLPGRAKSDRADCVWLCKLNERGMLRRSFVPPRAVRDLRMLTRTRSRLAQDQARHQARVEKILEDALLKVSSVISDLFGVSGRLFLGALVAGERSPAALAALGDYRLKASKAMLEETLTGQFRDIHAEEIAVHLRLIDAINAEITGLDAKIEQLLPQVPRTAPACTACGLAGGGHAPDCTDLGVLVLGLADRLDEITGIGAVNARVLIAELGTDPSQFATPGHAAAWAKLTSRMMQSGESSWNGRAGKGNRYLRGALGQAVMSAAKTDTRLGAMYRRIARKRGKQKAIVAVGRVICEIAWILICDPGARYIELGPDYYQPRNARQRTRSSIRQIEKDNPGKKVILIDDPATAPPAGPAERAA

SEQ ID NO: 175378 - protein, 353 aa, unidentified
MKKVIMCSADVHEKNISVAIAVHREASVAKDYPYTMKGRQKLLSDLKTLAEKNQADRIVVVYEASSLGYGFYDDCRTAGVECHVLAPTRMAKSAQDRKRKSDRWDAKKMMELLRGHVLAGNELPSVWVPDHQLRDDRELVRTRIDIGEKKSAVKAQVQMLLKRTRAKRPPEFKNWTLAYRAWLKKIELPVGTRTALDSLLRQLCHLEEESDQMDAVIETLSQTPRYLKPVEALQKVKGVGVFAAIVYLTEMGDLSRFANRRKVGAYLGLAPACYESGEASDRKGHITRQGPSRLRKILCQAVWSRVRCDEQERVVYERIVSRNPKHKKIAVVACMRRLGILLWHKGLEAKAAA

SEQ ID NO: 175379 - protein, 451 aa, unidentified
MSSRKKVSAKTNTQMPTLHPHAAGIDIGAKAIQVAVPLDADKKPVRTFTTFTDDLLALRDWLKHCHVKTVAMESTSVYWIPLFQILEAAGLEVCLVNARHCKNLPGRKTDVSDCQWLQYLHSVGLLRASFRPPEHICAVRALLRHRAALVRYASDQVRHLHKALTQMNIQIHNVITDMTGVTGLLILEAILNGERDGQKLAALKDHRIKASRDTLARSLQGDWRAEHLFVLQQALATWKHYQQLMVRCDEQIEKDLATFEGKPTEHPLPPPATTHRRAQRNEPRFDARAELHRLCGVDLTQVPGVQVNTALVLFTELGPNFVTRFPTAKCFASWLGLCPDNRITGGKIISVKTRDVKSRSAEALRLAAQSLWRAKNYLGDCFRRWKGRLGTPKAITAMAHKLARILWHLLKYQEPYDPAVWAQAEEKLKKKKIQRLHQSAAALGFKLTTAS

SEQ ID NO: 175380 - protein, 355 aa, unidentified
MHYAGIDYHKRYSVVHVLDESGETVGKGRINHDRPANFRDFFDSIGGSFSVVFEASMNWHWLHDILEEIDSIESIVMAHPYKTRIIAEAQVKSDKIDARLLAQLLRGDLICKAYACGREARHRKELVRQRAFWVRIRTSLRNRVHRLLGGEHDLQLPEVSDLFGRKGIGVLNKLELHEPARMQLKQNLRMLSELNQHIKTVEKSLDDEIGSDENVIRLKSIPGIGPIIAAVIVSEIDHIERFNSSNKFCSYAGLIPSSSSSGGKTHNGKLVARCNRWLRWAFVEAAWVAVGCDGYFGSLYRQHKARGKKPNTAIMIVARRMCQITYRLLTEKREYSAAPLNDKTFPGGSEVRMAV

SEQ ID NO: 175381 - protein, 424 aa, unidentified
MRYFGVDVHLEFCEIAVAEDGEVSQVGQIASTPEAIREFAAGLGSEDQVVLDASGSVMAIARILRESNVGRVVVSDAAQTRAISHARVKSDRFDAAMLARLLSSGMLSEVWVPDEATLALRRRVARRAALIRARTRIKNQVHGVVMRCLLGRPPVSDLFGKKGRAWLLEQQLPEEEAETVHGCLRQIDFLNGEIAQLDRKIAEQALAWPGLGRLLTIPGVDIGTAAAVVAAVGDISRFQSPGQLVAYLGLDPKVRQSGSEPARYGHISKRGNAQARSMLVEAAWIAIRSPGPLRAFGERVRARRGAQVAAVAVARKLVVLCWHLLSKDEDYAFARPSLTRQKTRRLELTAGAPRRARRHDGMTVSPTQAQRAAERELQSQAEQAYRRLVADWRAAAPKGGAGATPGRASNKPSKGKAARQATSP

SEQ ID NO: 175382 - protein, 346 aa, unidentified
MKYIGLDVHSTHINCAVIDEQGNLIHHDCFNTSLKNLINLSEKLKHPLSLVYEEGELADWLFQGLRSSFEEITIADPIENRMIYGGDQKSDPIDPLKLATLLRGGFINPVHHTWDHHRSQFKQLVFAYHDMAKQVTRIKNKLKAYYRKQGIIIKTDSVYHPNNRAKFMKRCRHLEIIEKYYQFLDLFQHEKDRFEKSLKKESRCYPVIRRFLKIPGVGIVTATTFFTIIDDPHRFNHKQQLWSYAHLGKATHQSGNFEITKHQRKGNRLLKYVLKIAAGDAVRQKTNEFTRAYIRMVNIQQKESKMAYRIIARKLATIMWTMWKNNQPYIPRENDTPTKDMPHDVS

SEQ ID NO: 175383 - protein, 382 aa, unidentified
MAHNTTTQEELYRRNTLYMAFELSKKNWRVLSSAGGVKNYSAIMTPGNAKELTEIVIRARKKFGLTEDSRVLSCIEAGRDGFWPHRFLLQNGIESLVIDAASMKVSRHRRRAKTDRIDAQQLLADLVRFDQGDKDVWRVVHAPTAEDEDHRHFHRELEQLKKERTQHRNRLRCILATEGVKIPGSLMKALSNLDSLRNWNGDALSKTMLWRLERKVQRLIFVEKQIREIQQHQVQCVKNPATPKLEKITKLNTLRGIGVTSSWILVMESLGWKKFRNRKEVGGSVGLGGTPYNSGQMDREQGISKAGNARVRATLVELAWMWMRYQPNSDITKWFEKRYAGQSKRMRRIGLVAVARRLMIELWHFLEHDVDPPGAIINNKPA

SEQ ID NO: 175384 - protein, 411 aa, unidentified
MEPIVERAAGLDVHQKTVVVCVLVGTAGQRPKKEVKTFGTTLSDLMELRAWLVERGVTHVGMESTGVYWKPVYAVLEEAKLELIVGNAHHIKNVPGRKTDVKDAEWIAELVRHGLIAKSFVPPKPIRELRDLMRYHRKLVNVRSGERNRLLKLLETANIKLSSVATDVFGKSGRAMLEAIANGEDSGEALAGLARGVLKKKKAALGKALEGRVAEHHRFVLRMQLDRLKALDADLANLDAYVAQKMEPYQSQQRALEQIPGVGPYTARAVIAEIGVDMSVFANAHRLAAWAGVCPGNNESAGKRLSGRTRKGNVHLRTALVEASMSAIRKKDSYLRSKYYRLKARLGGKRATVAVAHKILVAAFHILADGTVYQDLGAGYLDTLSKTRTSKHLVRRLEALGFRVAIEPSAA

SEQ ID NO: 175385 - protein, 435 aa, unidentified
MQVTRGMRRQSMKLARHRAILPVDALIAGVDLAKKESVVIFTRAADRGRLAKLTIPTDRTGVERLVARAAELRERHGLGELVVAMEPTSHFWKIVARSLEVAGVRYVLLQSFVVAKSRELDNLTRDKTDARDASLIADLAAELRFTETQLPDGPWAELDLLAEARDRRIVERGAALQEQRALLELVWPRLLAECPDLAGTHLQALLRTGLTPGQIAVMPEGRFLALLRRRHQPRRFLRWMGRRLRAAARDNEPTPETTGAVLRCRLAAERVLAADAAIAELDARMAVLLEATGYAWLRGQIRGLGDVGLANLLALVGDPARFDDGRCLVKLAGSNPTERSSGERHAPGGIHRRGRPTLRLVAYQAAISLVRYNPDFRARYLALIAEDRPHRLTKKQALIAVANKLLRTLWAMAVTGLPYRSEIARGEVRPQSIAA

SEQ ID NO: 175386 - protein, 378 aa, unidentified
MMKEENNKVKRYYLGVDWAEEFHQVWVSDPEGKKVIEMMVLQQPQAMSEFGAWLHQRKAEEIELWAAIEKPHGRIVDFLLDHGVVVYPVNPKALDRARDRFRMSQSKSDSFDAYVLAEFLRTDHAHLRALEPNSAQAQELKMLSRDHQRLMRQKTRLLNQIGITLKEYYPRPLEVFGDLESKIARDFLKAYPTPQALSKLNRQSWDRFAQRDHHLSEARSTELWDKLGKAQLPIPEHVIRAKAKLLLALVVQLEALLPEVESYSEEVERFFASMPAAELVKTLPGGKRGTTVAKLWAELGDANNRWQSFRHLQAEAGEVPVTQSSGKSRMVLFRFACNKHLRHAIYWFSFNSLRRCEWANRPELVEWVQVHRFHPFGP

SEQ ID NO: 175387 - protein, 373 aa, unidentified
MPKYSTAFGMDVHLRSTTACALDADTGEAVTRRFPGNPWGEIAGWMDGFPGPSLAAYESGYLGFAPQRELAGLGVECAVAAVSKIPRSAADSASKNDRNDAARMAKAILAHDISPVWVPSPEVEGIRDLAGAYDGATARLATAKQRLLAFLAKRGFVYGGTTPAGNPRKYWTYDFLRWLDKVRPEDDGGVRTLAALRNEVEAAAEARADLLSEYRAAVDASPIAAEVAALQSIKGCAFALAAAFSAEVGDFTRFRSGRQVTAYFGLAPSQRSSGDSVRLGGISGAGNALVRKLAVEGSWCYAAARHQPKLMPRDTGVPLEIRMHGRKGSERLLRRREEMLARGMPAAKANAATAAELVRWLWALGMMCREGAE

SEQ ID NO: 175388 - protein, 273 aa, unidentified
MPHYVGLDVSQKTTAICLVDEQGRRLWRGACVTDPGAISARVLRHAGVVDVKVGVETGSMTPWLVHGLRSAGLDVECLDARRTKAALQMRLNKTDENDAEGLAQVLRTGWYRPVHVKSFDAHRARALLGARAQLVGMTTRLSNMIRGVLKTFGLLPGAGRGLRFDRRVEALLEGAPEIGLIVRPLLATWRQLREQIAIFDKAVQQRVRTDPICRLLMTVPGIGALSSLVYVSTVEDPGRFSRSRAVGAHLGLTPCRYQSGETDRSGHISRSLM

SEQ ID NO: 175389 - protein, 348 aa, unidentified
MFYLGIDVSKAKLDCLLLDMSSSKRKSKTVPNSTEGVRTLLAWLDKQQAGAAHVIMEPTGVYHEQAALALSDAGLKLSLVNPAQLRNFAQGLGMKNKTDAADSAVLARYGATQNPALWQPPPACVRELRALLARRDAVADDLQREKNRAEKAAATETPALVQQSIDQATAFLGQELDKLQQAIDQHIDRHPDLRDKRALLLSIPGVGGRVSDHLTALLASRDARHFASWFGLTPKEYSSGGSRYLGRISKRGDRYLRMLLTHGALGFARGQRRPGGRPAAGWPATLGAGGAGARQSQQGCLCTGQQARAHLLCNAARWRALYGNGDAHEEKNGAQRVCDAGLNHATCL

SEQ ID NO: 175390 - protein, 417 aa, unidentified
MREGCLYVGLDVSNAKIDVAFLDGDGRPVRSPSTYPNGPKGWTELRTAVVAAARLVGPKARVVCGMESTSNMHKRVEQALRAETRRKFEVHVLNPRAVKSFGKVLLKDAKTDRLDSRLIALFLLRMQPEVRAAMPAGFEELKEATRTRRRLVEERTDHKNRLHKLLRYHLPGYRHVLGIRTFPKRLLVVLAELGSPHALLGRSVDELAGIRYGRGHRVGEPFARKLHALAEQAPTRELSKVTRLLIETTARRILDLDALLAEVDRAIEEQLDEVFPDQVLTSIPGIGKVSAAAILAEIGDIGRFESKEQFVGYCGLYPIVWESGEAKRRYRMTYKGNRMLKMTLLVSSAAARQYNPVIAAFYERLRRRDKSTKAAGGAIARKMAELVFTLLVRNEPWSADKATRGMQKAEAMLKKAA

SEQ ID NO: 175391 - protein, 358 aa, unidentified
MNSIKYIGIDVHQATSVFAVMNQRGKIVGEAVLETKPATIIDFLKGQRGTVWVTFEEGTYANWLYDVIQPQVAKLVVCDPRKNKLDGNKSDKIDAKRLAELLRMNALNAVYHGQQSTQTLKELARSYVSLQQDSTRVMNRMKAMFRGRGIDCRGTSVYRPENRKEWLEKLDGNGPRHRAERLLKQLELLEELCLEAQNDLIREARKHKSFKILRGIPGLGPIRVALVLAFVITPHRFHNKRQFWTYTGFSVVRRGSAEYEITQGELKRTKKKPLPRGLNNNYNHVLKNVFKGAALTAAYRGPFRKAFDQRVANGTAPNIVLLTLARKIASITLALWKKGESFDIKRHRLSEQTTLKRP

SEQ ID NO: 175392 - protein, 386 aa, unidentified
MTQHSHIAASHQLDYERTLILAVEVSGRSWVVAAQVPGLRQKGVKQQLAPRADALMAAVEGYKRRAAAAGMVVERVIVAYESGGSGFWLARWLQQRGVEVYVMQPSSVPVDRRMRRAKSDRIDADMLLRTLLAWLRGEPRVCSMVPVPDEATEDARRPIREREELIRARVALVNRIEAVLTVLGAGEYNPLRRDCRERLGQLRTALDQPLPPHARAQIERLLDRLDLIRQQVADLEAQRDRAVEGETVGQAERMIQHLARVRGIGVQTATVLVHEAFVRRFRNARALGSYAGLTGTPYGSGGTHREQGISKDGNRRLRATLVELAWMWLRYQPGCALSRWFHDRLGGSRGRLRKVMIVALARKLLIALWRYLQDGAVPQGMELKPA

SEQ ID NO: 175393 - protein, 416 aa, unidentified
MNAVGIDVSSRKSTVAVLRPLGEVVCLPFDVSHDADGLASLAEKLKALDGETRVVMEHTGRYYEAVAKALHEAGLFVCAVNPLLIKEYGANSLRRVKTDKADAVKIARYALDNWADLRDFTPMDAIRYDLKTLNRQFQLASKQRTASANNLIALLEQSFPGIRKCFDSPVRSDGTQKWVDFAHSFWHVDCVRKQPFAAFCERYRKWCKRHAYFFKLSNAEEVYALAKRAVVLTPKSKVVKVLVQEAANQLSSISRSVEVYRAEMDRLAAMLPEYPVVMAMYGVGKSYGPQLMAEIGDVRRFERKQALVAFAGIDPMPNQSGDKNVRSNKSSKRGSPYLRKTLFNVIRTYLQCAPQDEPVFQFLNRKRAEGKPFYVYMLAAANKFLRRYYAKLRDYFASLDTLQSVDPIPATLKASL

SEQ ID NO: 175394 - protein, 414 aa, unidentified
MDQLYDRVAGLDVHRDNVVGCFRRRGPRGGVVREKERFTTTTAGLRVLEAWLAERQVELVAMEATGVYWKPVYYALESRFTVWLCNARAVKKVPGRKTDMSDSEWLADVAAHGMIRPSFVPPPPIRELRELTRYRKTQIDARAAEVQRLEKVLQDAGIKLTSVASKVLTQSGRAMVEALIAGERDGARLAELAKGKMRPKMLALAEALSGHFGSHHAVACERILGHLDFLDASIAALTAQIDQRTAAFAQVYASLLAVPGLDRLTIDVIIAETGADMTRFPTPRDLASWVGVCPGSHESAGKRRRVGTTGGNQWLRRALIESARAAARTKRSYFGAQYRQIARRRGPNKAAIAVAHSLIELVWHLLSTGEVYNDLGEDYFTNRQDPERRARRLVAQLEELGFTVTLQAAPATAA

SEQ ID NO: 175395 - protein, 422 aa, unidentified
MLSSAEDHQDIIERVAALDIGKAEVMCCVRVPDENHPGKRLQEITPYSTMTRSLMLLADRLVELGVSRVVMEATADYWKPVFYLLEAAGLEVWLVNARDVKHLPGRPKTDKLDAVWLAKVTERQMLRPSFVPPEPIRQLRDLTRYRVDLVRSRTAEKNRVEKLLEDACIKLSVVVSDLFGVSGRDMMNQLISGQRDAAVLARLARTGMRKKIPVLQEALTGRFTEHHAFLLSTMLRRIDGINADIAEVETQIEAVVVPFAAAVRQLDEVVGIGVTAAAILISEIGVDMSRFPTAGHLTSWAKFAPGVSESAGRRKGRGATGHGNRYLASVLGEIVVAIGRTDTFLGERYRRIARRRGTNRAIVAVGRSVLVVVWHLLSEPEARFQDLGSDFYQRSRGIERQKASHIRQLQALGYRVTLEPVA

SEQ ID NO: 175396 - protein, 457 aa, unidentified
MKIRLGIDVACRAAHQASCADETGVFAWSGHRFRTDPADLEVLWAKLPVGAEEVMVIIEPTRNAWVPLAAWFRRRGATVVVVPPEQSADLRDYLNKHAKSDRLDSKMLARLPMLHPEGLHVEKTIGPGDALKRAVKIRSGLVHRRTTGMQRVDCLLELMGPAWAGALGTDLSLTAFRFLARYADPNAVRRLGHRRLTEFLHRSSRGAWAAERATAILDAAATSIALWGDEFAFDELAADIAAEARLALGLCDEIHTLDKRISDLYATADPTGIVRSAPGVGIVGAPQILGRLGDANRFANLAAVRSFSGLVPGQNDSGVGAHAGGPTKAGDACLREALFNAADHARKIDPTLAARYHRLMTVEGKHHTSALCTISAVLLTRIAACLRSGRTYQLRDVDGTTITEPEGRAIVADRYAIPTATRSARRAVTIHRHLRRNERTQKGVAERSEAPPVPAPA

SEQ ID NO: 175397 - protein, 443 aa, unidentified
MSTLAVLDPRAAFVDVGSEKMHVSIAGGPPEVFGTVTSQLHALRDYLVAHQVRSVAMEATGVYWLPLYGVLEASGLEVVMVDGRRTRNVPGRKSDMKDCQWGATLHAHGLLRAGFVPPAHVRRLQDYLRLRGDHIAAAAGHVQHMQKALERMNIKLHDVISSLTGASGLAVIRAILAGERDPQVLLGLCHRQIRNIKAERVVESLRGNWAEEHLFALAQAVQSWDHYQGLIAACDRQIADILRQMPDATTPPPAASTKKASPRRQPGVNAPDIADLRDMLAQICGGKDLTILPAHTEYGVLQIIGEVGTDLTKWQTEKHFTSWMGLAPGSAQSGKRNARVKRRRNRVGRIFCVMARSLARSKYIALGGFYRRMAARRGGLVANKALARKLAALFWRAMVKGLDFVEMGVAQYEAKVLETKHRILHKLARQLGLQLMPKPIAVA

SEQ ID NO: 175398 - protein, 323 aa, unidentified
MSKHSMVCAGIDTSKRKLDVALDKHPEQLQVDNTADGHGALSAWLRRHRVKRVGIEASGGYEQAVVAQLRRDGFVVIVFQPAQVRAYAKFVLQRAKNDKIDAALIAACAAATKKIHAPPDPRLAPLAEHLTLIEQIDEDIARLKNRHETCRDPRIRGFWREEIARRNKILRIELAALVTAIRQHRDLAERLDLIASVDGVGLKTAVAILVRMPEIGRVTREEIAALAGLAPYDADSGEQSGARHIAGGRKRLRGSLYAAALPAAFRWNPQLIALYQRLRAAGKEHKAALVACARKLLIYVNTVVERGTPWVDTAPVRSPLRAK

SEQ ID NO: 175399 - protein, 423 aa, unidentified
MKLTYPICCGVDVHKTFLVATIITSEYVMPHYYQKRFSTFYNGLVAFKKWLLEYDCKDVCMESTGKYWVPVWNVLEDSCHVVIANPKWVSAVKGNKDDKKNSKWIGNLFRMGLVPSSYIPSKDIRILREFTRYRSKLVSMRSSEKNRFQNAFTVCNLTLDAVVSDMLGKSATDIENYLLDTDTVDPEHCVSLLHRSLKKKASDVVEAVSGFNMTPEQKERGRIVQEHFADIDHRIAQLDEIIGDLVAEYEGQISLLCTIPGIDRRTAITILSEIGTDMSQFGSSKRLCNWAGLAPASNQSAGKKKSVRISRAGVYLKPALVEAAHAAVKSTEKQPYYRIKFERLMKRRGKKRATIAIARMILTAIYAMLSTGEVFNPSDLKKFDMPEDLKRKQTLSSAKEAIKLLVSLGLVTAGSISLDALAG

SEQ ID NO: 175400 - protein, 315 aa, unidentified
MHRVTHFVGIDIAKHSLEVAFRPTGQQLKLAYDTAGLQQLLRTLPEPETCLVVVEATGGYQRRVVTELLTAGHLVAVANPRQVHDFARAHNILAKTDSIDARIIARFGEEVELRLVSKRSGKHEELAQLVARRRQLVDHRASEKNHRETISSKTVKKSVQHVIDVLTKEIARLDKQLLALVESDDDWNQTAEIVSSVPGVGPVVSATLVADLPELGDLNRQEISALVGLAPFNRDSGRSSGKRSIWGGRKNVRKALYMAARTACRCNPVIKAFAHRLRKRGKPYKVMITACMRKLLVILNRMVHTQTPWTPAGVH

SEQ ID NO: 175401 - protein, 313 aa, unidentified
MKKTICGVDVSKARLDVCIEPGHRLASFNYDTAGIAELAKFCREHAVDLVVMEASGGYERRAFIELWEQDISCALTNPRSVRRYAEAMGILEKTDRIDASVIARFADAKGLAPTPLPSQAQQRLKALVARLRQVTDDLTVQKQRRSSMLDNTEMQASVDEVIALLKRQSRSLEGEIASMIDDDPLWAKLADTWRELKGVAGRTVAWLHADLPEIGTLSNKAIAKLTGLAPIANDSGKRKGKRPTRGGRAGVRSILFLVAAIAARYDRSLAEFRDRLLKAGKEKMVVRIALARKLLVRLNAKAREARAQYAIAT

SEQ ID NO: 175402 - protein, 403 aa, unidentified
MNSVGIDISKGRSMIAVMRPFGEVVISPFEVRHTDSELSELARQLKSLDGETRVVMEATGNYHTPVAKLLHDAGLYVSVVNAKLVHGYGNNDLRRVKTDKKDSVKLANYGLDRWLTLPRYVPEEDTRLLLKNCYRQYRQYSKVQTVLKNNLISLLDTVFPNVNRLFSSPIRGDGSEKWVDFVAEFWHCRCVSEKSEKTFTNHYRRWCRKHGYNFSEEKAHTIHAETCGHIDVIPKSETTKLLVEQAVAQLRATSAALAALKHEMQSLASVLPEYPVVMDMFGVGPTLGPQLIAEIGDVRRFYSKKALVAYAGLDAPPNDSGDVTGRHKSMSKVGASSLRRTLFLVMSVYLQNAPLDEPVYQFMDKKRAEGKPYRVYMMASANKFLRIYYATVKAYLESLEHTA

SEQ ID NO: 175403 - protein, 341 aa, unidentified
MNEVTMIGVDLAKSVFQAHGATAAGEPMFRKKLSRGQFLKFLSGQPPCVVAMEACASSHYWGREIIKLGYDVRLIPPIYVKPFVKRQKNDANDAEAIAEAAVRPTMRFVPVKSAEQQSRSMVFKTRDLFVRQRNPIINALRGHLMEYGVIAPPGRNFVKKLAEQIESPECDLPSIVIELSRVHLDQLSILTDKVVEIERRLKEQSQTDPETIRLQTAPGIGPVSAMAIKAFSPPLEGFKRGRDFAAWLGLVPVQKSTGGRQVLGRTSKMGQRDIRRLLIIGAMTRIRWAIKNGPPKGSWLEQMLDRKPRMLVAIALANKTARTIWAMMTKHEDYRDPIAVA

SEQ ID NO: 175404 - protein, 439 aa, unidentified
MTNSSIRYVGLDVHKRVVEACIIDHAGKILQRERFALYRGALAIFAKNILRPTDHVALEATTNCWAVADALRPLVARVVVSNPMATKAIAQAKVKTDKVDAHALAQLLRCDFLPEVWQPDEATRRLRELTGRRSSLVGQRTAMRNRIHSALAMRLVDAPLRLFNAEGIEWLRTVELDEQARMLVESDLRQLEFLGKEIDVLDAELAKRGHASEPVKLLMTLPGVDVATAEAINAAWGDAKRFPDGDHAASYLGLVPSTKQSANNCYHGPITKRGNSQARWMLVEAAQHLGKHPGPLGHFFRRLAKKKNRNVAVVAGARKLAMIGWQMLTKNEPYRYAIPRSTETKLLRLRVKATGERRKGGSPKGRKCAAKLPGGSRTIKALPEVCRSEGLPAPRPLSAGERRTVQEADSEAFVVAIAARHLVPRPPKRRKVQEAAAHE

SEQ ID NO: 175405 - protein, 410 aa, unidentified
MQTLVERGCGMDVHQATVVACLLVVLKDGKVQKQIRTFGTTTRELLSLREWLLSEGCTHVAMESTGVYWKPIYAILEGAFEIVVANAQHVKKVPGRKTDVKDAEWIADLLCHGLLRSSFVPPQPIRELRELTRYRRKLVESRSAERNRLLKLLETANIKLASVATDVFGVSGRLMLQALVQATATSQQMADLAKGLLRKKIPELELALEGKVEEHHRFLLSVQLRRLQAVEEDLGLLEQRLQEKLKPYAIQLALLQEIPGVDWTLGAVIISELGVDMSVFGNVSQLASWAGICPGNNESAGKRRSSRIPKGNVYLKTALVEAANAAAKAKGTYLRDKFYRLKARRGYKRAAVAVAHKILVAIYHMFSHQVCYNELGDLYLDTLNKHHLTRNLVHRLERLGYAVTLEQKAA

SEQ ID NO: 175406 - protein, 364 aa, unidentified
MEQITRGERGRVVVRVGVDLAKRVIQVHAVDAAGQLVLGRALARDRFIAWCAQLPGGCVVAMEASSSAHHWARKLCSLGLDARIIAARLVKPYRKQGSSDKNDANDAAAICEAASRPSMHFVPIKSVEQQSMLCVHRLREGIKEERTACINRIRGLLAEFGLVFAQSPKVLRLALADTIEDASNEMGTLARLTLQRAHAQWRELDEHLAWCDERIAEHTRTNEQVKTATTLLGVGPLTASAVVATVGDFRQFRNAAQFGAWIGLTPKQHSSGGKTRLGKITKRGDTYLRTLLIQAAKSAVLTAHRRSDRISNWLCTLRERSGWQIAAVALANKNARILWALMTKGEAFDANHLSIKPGMSSQQT

SEQ ID NO: 175407 - protein, 316 aa, unidentified
MSEPQVFVGIDVSKAQLDVALRPTADQWHVSNDEVGIPGLVERLQAVQPTLIVLEATGGLEVPAAGALAEAGLPVVVVNPRHARDFAKATGRLAKTDPLDAQGLAHFAEAVRPTPRPLPDAQAQALSALLTRRRQLVQMLTAERRRLQTAPQLIRADIQAHIAWLERRLARTDADLAAGIRSSPLWRATDEILQSTPGVGPVLSRTLVAELPELGLLNRQKIAALIGVAPLNCDSGTVRGKRAVWGGRAHVRAVLYMSTLAAVRHNSALKAFYERLRAVGKAPKVALTACMRKLLTILNAMLKHQTPWHENYANHS

SEQ ID NO: 175408 - protein, 391 aa, unidentified
MTFFIGIDIAKYKHDCFILNHEGEVIRESFSFTNDRSGFAYLKEILSTLDSNQTMRIGFEATGHYAMNLKVFLEENGFTYMQFNPFLIKRFAQATTLRKTKTDKVDARVIATYLLSVDYKPYPPQSYHIKNLKSLTRDRDDLIKQRSRQLVKLTNLLDLIFPEFKPFFGHSLTSSTCLYLLDHYLTPSKMARMNLDSYHKMTSELRRTLSYARFCTLKQLARDTIGSEDPTLTYLLKKSLELYHTMDDQITEIQLLIEQTYSQLDSHIHTISGIGIQSAACILAEYESIERFSTPDQMLAFAGLEPSRKQSGESESKGKMVKHGSSLLRQTIMNVSATSIIHNPILYEFYLKKRNEGKLHRVALSHVAKRIVRIIFHLEKHHLDFDLAKMR

SEQ ID NO: 175409 - protein, 363 aa, unidentified
MQKISTMRTRRKNIFQGQLTVGLDLGDRSSAYCVLNEAGEIVLEHKLATTPEAMKQVFASMPRCRIAMETGTHSPWVSRLLTALGHEVIVGHAQKVRLITKSRRKDDRLDARTLARLARIDPELLSPVKHRSAQAQLHLTEIRARAVLVNARTALVNAARGLVKSYGERLRKCDTQQVRREASNGLSAELRKALEPLLEEIESLNERIKEYDRRIEKMAKETYPETALLKQVKGVGDLIATAYVLTLEDPHRFRKSRDAGCFVGLQPGRRNSGESEPQMHISKEGDEYLRKLLVQGAHYILGPFGEDSDLRRWGQKLAARGGKNGKKRAVVAVARKLAVLLHRLWVSGEVYEPLRNSQMSAVA

SEQ ID NO: 175410 - protein, 464 aa, unidentified
MKQPEAQEDAGGASVAEPDFAAYVGLDWADEKHVCCLAVAGTAEREREELRNTPEDLQVWAAGLYHRFGGRKVAVCLEQSRGGVVFQLAKFPHLELYPAHPTTLAKYRQAFCPSGSKNDPGDSGLLLELVMRHREHLRRLQPEDEQTRLLQMLVEHRRKLVDDRTALSNRLTAWLKTYYPQTLNWIDDVDSKLGCAWLERWPTLQEVQRCHAATLRQFFQQHHSRSPERIQQRIQAIQQATPAVTDQALLRAGAMITRTLVASLKVLGESIAQLDTEIAELAAQHPEARLFSGLPGAGPVLGPRLIVAFGTQRQRYHTAQDLQSYSGIAPVTMQSGNTRCVHFRYACPKFLRQTFHEFAAHSIHRSVWARAYYQMYISRHPHDKHKHHAAVRALAYKWMRVLFRCWQDRTPYDEAVYLRALEKHHSPLAQASQPGSTDSLAAVTVTGLEWRTVSGFQKLCRKNA

SEQ ID NO: 175411 - protein, 464 aa, unidentified
MVVLNIGVDLGVTSKHHAEVKNGEGIEVCSSVTFAGTKEGFDMVSEHALQHVNEEAKLRFICEPTSMSWFPLAVYAKREGHEMMRVKAQKSHDLRKYYARHSKSDKLDAKALAMMPIVDRESIEEVYLPDKVTNALDRRCRQREKISKEIASIKTRMKSLYHWVMPGLTDCFEDPYGERAKAFYKKYTNPFNVKQLGISRLRRVLEKAGRQQTSEGLAERVYEAAIKGCELYDHCGEYIDFDELQKEVECELQLLESHEKVQKKVDEAINRLYEGAHPTKNIETIPGIGETLGPVFLGIIANSDRFSSQSKARGYSGMIPRQKDSGESSKKGLNITKDGPSRYRRALYLASDTGRQWDPQFAKVYYDQMVYKGNCHTQAVCAVSTHLIGRIIRVLKDKRPYELRDLEGKSITKKEAKILIKRELTVPEEARKRTRSRRKTKGYKRNQIRGIAQKQSSRSAPYPS

SEQ ID NO: 175412 - protein, 336 aa, unidentified
MNGSTGRWVGIDVAKSKLDVALLDERGKVKSHVFANDAKGHAALIAWLNQRGGSPELVRVCMEATGCYSEAVAIALVDAGWSVSVVNPARIKGFAQGELMRNKTDQADAALLARFGLALQPEPWVAPPLELRQLRALVDRLQSLKEMHQQEANRLEAAMNQAGMRESIEGHMQWLQDSIRKLERQINDHIDGHPGLREDAKLITSIPGVGNATAAKVMAYLGDVRRFRNAKALAAFIGVTPRLKLSGSSVRGRSMISRSGHAAIRHSLYMPALVALKHNPIIKTFGARLKATGLAPKAVVAASMHKLVHLIYGILKSGTPFNPNFMAARLDIQDGI

SEQ ID NO: 175413 - protein, 319 aa, unidentified
MFVGIDVAKAELVVAVRPSGERWTVANDERGVRTLVDGLRTARPELIVAEATGGYELLCVGALASAGLPVVVVNPRQVRDFAKATGQLAKTDRIDADVLALFADRVRPEVRALPDAAAQELEAMLARRRQLLEMLQAERNRLGQVFGRGKQPVKKSLKGHIAFLERELRITDSDLGAMIRESPAWRERDDLLQSVPGVGPILSRTLLADLPELGRLSRRAIAKLVGVAPLSRDSGTMRGRRFVQGGRATVRAVLYMAALVATKRNAVIRTFYQRLLRGGKPKKLALVACMRKLLTILNTMVRTAQRWSTTTADCTLIPA

SEQ ID NO: 175414 - protein, 421 aa, unidentified
MNVFPVAGVDVSKRFSDMCILTPGNEVFDRVKIYHDTTSMDRALSLLQCAEQQFAAKPVIVMESTSHYHLILFQFFSDAGYEVIVVNPLQSNALKNINVRKIKTDKVDAYRLALLYRMNVLRRSQVPTEMLRSLRMLCRQHYELKGDITRYKNRLTALLDQIFPGFNKVFSDPAAAGALAVLEQCPTPGHILAVTPSELARIVQKASHKSSEYGNRKAALLLDIAEQAARIGIHAPGDPVLMRAVITILRQLIESVNLIDRKIKSLAAQDAYIQKNVTLLQTIPGVGPFSAAVLLSEIGDFSLFRKPKQLAAYFGLDPSERQSGTIQSTRNKISKRGSPYVRAVLYMVAHNTVHTNCFGSVGNPVLAEFYQKKCRSKPSNVAICAVMHKLSNIIYAVLRDQAPFELRSPETHAKMICGKAA

SEQ ID NO: 175415 - protein, 413 aa, unidentified
MTHPKMQYTYVGIDSHKDTHTAVFIDCFFEKLGQISFNNLPSEFDAFFDNAQQYLQHGTAFIFGLEDTSSYGRMLAVHLTNRGQRVKHVNALLVARERRNQNIVQKTDAVDAECTARVLLSKFSELPDADTQDIYWVLRSLVTRRDFLVKNKSAAKAQLHGFIMQHYPNYNQFFSNIDCKTSLSFFERYPSPGLLKHTTVEELTEFLQHTGGSYYTLDFACNMLATLQDTAVQHQEFRDSVIQSTIRQIRFNTAEIDQLDEAMSVFLKKFNCTLTSMNGIDTVTAARMRAYIGDIKKFSTPAKLARYAGIAPVTYASGKKDMQYANQRGNRLLNSLFYNLAVRVSYSYGKTNRVVNSFFFNYYQRKISDGKTKRQALKCVQRRLVSIIWTMLTNNEDYVNPPMYDLPEVVEVQ

SEQ ID NO: 175416 - protein, 464 aa, unidentified
MTAHKILWRNRKERKEWARRLQSEDPGLEVVHPHAAGIDVGNSAHYVAVRPDRDAEPVRRFECFTADLHRLADWLQSCGVKTVAMQSTGVYWIPLYEILEERGFEFYLVNAPHTKNLPGRKSDVQESQWLLKLHTYGLLSNSFHPPAEIRVLRTYWRQRGEHVAGGATCILRMQKALTQMNVQLANVISDISGLTGQTIIRTIVAGERDPLTLAALSDPRVHASQEEIAKSLEGNWRPELLFVLQQEVDMYDIYQKRITECDQRLQEHLASLTHSLPVQLPTQKAKTKKPAAKNAPRFDLSSELQRVTGVDLTRIDGIDVMIAQTLLSEVGLDMSRWKTESHFASWLGLCPDNRISGDKVLSRGTRRVVNRAATALRQAANTLLRSRSYLGAQYRRLRTKLGAPKAITAMAHRLARLVYRMLKYGQAYVDKGTEYYEERFRQQQIQLLRKRAAKLGLQVAEIHA

SEQ ID NO: 175417 - protein, 397 aa, unidentified
MYIVGIDIAKRKHEAAVIDGEGTVIIKPFSFTNNCSGYNRLLAMLAKAKLPLDEVSFAMEATGHYWLALFTRLQKEGFRVQVINPVQTNSIRSFYIRQAKTDPRDALLIAEVIRFGHFSESTLHPENIYELRELCRGRHAIVSMQADVKRKVVALLDQVFPEYETAFTNMFGDTSMAILQACPTPKELSEMPLEELCHLIEVSSHKRFRMAKAQELQALARNSFGFAMAGDVFSTMIRLYAKHLDFLKQQVREMDRKIAEIMDTLDTPITTITGIGPTLGAYILSEIGDINRFSSSAKLAAYAGIDPTMRQSGEYNGVRNRMSKRGSPYLRHAIWLATSSAVLHDPALKLYFQKKRDEGKPYMASVGHACRKMVSIIYAVMRDNKEYVPCIPGEISA

SEQ ID NO: 175418 - protein, 388 aa, unidentified
MSCVINHLGQNGAAAQANAARILVSLELSRHTWLVTVLAPGSEKMSKHSLTGGNGVALLELLARLRAKAEERLGAPVDGILVIQEAGHDGFWIHRLLEKNGIDSHIVEPASIAVSRRHRRAKTDRIDGETLIRTLAAWRRNEPRVCAMVQPPNPEEEDRRRLTRERSTLIKERVQHVNRIKGLLFGQGITDYEPLHRDRRARLETLATGDGRPLPPRLKAEIGRELARIELVCAQIDAVEQQRDALIASMSTDPVEPVSVLLGLKGIGPELAARLWLEALFRRFANRRQVAAYAGLAPSPWQSGATNREQGIAKSGNPHLRHAMVELAWLWLRYQPDSALSAWFRQRVGQGRGWIRRIAIVALARKLLIALWRYTSQGVLPEGAVLKA

SEQ ID NO: 175419 - protein, 395 aa, unidentified
MFIVGIDIAKRSHEAIIIAEDGQVVRKAFSFRNNCTGYNLLLEQVRRLTLVKSQIVFAMESTAHYWLALYARLLKDGYTVMVLNPIQSHSLRELYIRKAKTDARDSLIIADLVRFDRCKASNVPQDKILALRELCRSRAYLVDMAADLKRKLIALLDRIFPEYESLFDSVFSKASIAVLSKYSTPQKVKNANLGKLTDLLMESSNGHFGEWKAHQLKEAACSSFGIDDSGGVYSTLLGMFLEQILSLTAQADSLEKQISVFFQEFNNPLTSIPGVGTVLAATILSEIGDITRFSSADKLLAYAGLDPSVKQSGEFKNNQNRMSKRGSPYLRRAIWLASTVAVHRDPMFQTYYEKKISEGLHYMNVIGHVSRKMTAVIFAVLRDGQPYQPILQSAG

SEQ ID NO: 175420 - protein, 412 aa, unidentified
MDVLVDRCAGLDVHRDSVMATVRVPGKRRRQRERHTRAFGTTIAQLAALGDWLAGFDVTLVGMEATGIYWQPVFHVLEHRFECWLLNAQHLHNVPGRKSDVIDSAWICELVEHGLVRPSFVPPPEIRRLRELTRLRKAEIQERTRTIQRLEKLLQSVGIKLTSVASQAYSVSARAMLEALLAGTSDPSQLAELARGPLRAKIPQLREALANRFDISHHGVLVSQLLSHIDALDRAIAVFDERIAVATEPYAELIKLVSTIPGVKQRTAEVLLAECGADMSVFPTVGHFTSWARICPGNNKSAGKNRSGKTLRGSRWLREALTEAAKAAARTKGTYLASHYRQIRGRRGEPKAIGATRHDILVAYYHIVRDQIPYRELGADWLARRYSPEHRARRLVRQLEALGLKVTLEAAA

SEQ ID NO: 175421 - protein, 339 aa, unidentified
MKILSGTRLFVGLDYHQDFVQVCVLDETGKVVMNSRVENDWRKIAAAVPAGAMVQAAVEACCGAASLADELAERAGWSVSLAHPGFVARMKQNPDKTDYSDARLLADLTRVGYLPKVWLAPAELRELRRLVRYRQQKANERRDVKLRIRAILRDHRIKIDVARPWTRRWLAALTAVEQIGADTAWILQEHLTSLLRLAREIRDVERRLEERVAGDAVVKKLREQKGIGLVTAATMRAEIGRFDRFQTGKQLARFCGVTPRNCSSGNKQADAGVIHAGNPQLRAVIVEAVHRIIHYDERWMKLAQQMRARGKHVCLVVAAIANRYIRWLHHTMQPEVLAA

SEQ ID NO: 175422 - protein, 497 aa, unidentified
MPNKSTIYSRCNPQLLKLFERAGHPAKVLCVALDYAKAQHTALICNGLGDLLKSSFAVENTAPGAAQLLKEVRACAQSRKVRCEHVFFGGEDYPSYAENFVRQLRQEQFLVVRVNAWEAKQQRDNFQASSDSLDLLGIARCCLHRRGEPVRDLPQAYPNLRIATRDRDKLVRMRTAVSNRIHSYVDRLFPGFLSAGKSGVEPFSRASLDLMEDRFSPVQLSRRPRQRLAQWLGRHGVTQAAERADQLKQLAKHVLPPAPEQTVMLQQTLARLVALYRNLEQSIDRIDREVAYWLARTPGAWLTSIPGFGITLAAGWTAELGPPSQWHSLRQLCSYSGVVPRTKQTGGPDQEPVVGTVAQRCNKRLKNVVLQAAEKVIQYGPEEWRQSAQQLEARGAHTAFAVAKRLIRLGKYLATTGTVYRPKALMDPDTPKATLAAHYQGVWEKLLPKWKDKAQLPEVFAPEHPLGQWRKMVQELYALELRLPQQKTAQKSRALAP

SEQ ID NO: 175423 - protein, 360 aa, unidentified
MRIIGCDLHARQQTLAMLDSETGEVVNRTLLHEGNEVRKFYSELPPPVLVGIEAIGPMQWFLNLLEELRIECRVGDAAKIRAAEPRKQKHDRRDAELILRLLVENRFPAIWRPSQELLDLRALLLHRHHWVRLRTQVQNALQAIALANGLRRGASLWSYDGQAKIAFLPLPPHASYRRSMLQALYRKMDEEIEQLSAQVAEQAEHRSGARRLMTHPGVGPVTALATDVFLGDPRRFADGKALASYVGLIPREYSSGARQRLGGLTKQGSPLLRFLWNEAGAHAVRRDPELQHFYHRKLVQKGLGKARVAAARKLGIRLWIMLRDQIDYQEFCRRGQKQSGAACAGMLEVGNGANRHRPVD

SEQ ID NO: 175424 - protein, 389 aa, unidentified
MNTISTTASTATILAIDLGKYKSVACVHDADSGEIRFATFDTSRAEVQRLLAKEAPGVVIIEACLLAGWVHDLCGERGVRCLVANTASEAWKFKHLKRKTDKDDALRLAQLHMLGQLPTVTLPPTAVRQWRSLMATRQNLVGRRVAVQNRIRALFVAQGLPAPRGAKAWSQTGLAGIALQVKALADCGPDELWRGLLELALTEYRQVSELVARAEARLDALGKQSAAVQLLQTAPGLGPRTAEAVAAYLHDAPRFRTGKQVSAYSGLVPRQHQSGEMDRRGRITKRGPALLRKLLVECAWCMVRYNGWARNFYLRLTGGGQRRKKQAIVALARKILVRCWAMLRDNKPWRDPQTAPKQPLPPSKQRRQAEAQQRRQAKQQAALTPTAAS

SEQ ID NO: 175425 - protein, 344 aa, unidentified
MIYIGMDVHQVSTTFCLFDPAKEKAGRYRTVTRPTTVEAIGEVLAPFERQCQVVFEVGTQAQWIAQIVRPLAGEVQVANASRMPWLFRDGRKNDKLDARKLATLLYLKQVPTVHLPPADISAWRALINHRRTLVKRRTILKNQIRSIVRAFGYRCPHKSCWTRIGQVWLRSLTFDAAREWMIQSLLEEVRLAGARITDLEKQLDAIAETQSNVALLRTIPGIGPRTAEAVVAYADGVKRFPNRKHFTSYFGMTPTEDSSGLVKRYGHISKRGPSVVRWLVGEAAHQVIARCPALRRFFDRIHRGKKDRYKKAVVATGRKVLSICYGMMRDQSVFDAEKVLRQAA

SEQ ID NO: 175426 - protein, 310 aa, unidentified
MTTAVGIDVGKAALDLAVDGVSGVVRFANNAAGIRKLVARLGRLDDPRIVVEATGGYEETLLEACCDAGLWICRANPRQARDFARATGELAKTDAIDAALLALMARLLHERLRRHEAPHPWQRELRDWLRRRGQVVVTLQAQKQQTALTSPAVRQLMARTIAALKRELAAIDAAMQALLKTHASPALRSAKGMGPIFQATSLALLPELGRLSRQQIAKLVGVAPMNRDSGQTTGKRRIRGGRAPVRVALYMATLSAVRWDPVMRAHYQQLRARGKLGKVALVACMRKLLTIVNARRRDELRAQEGDVIAA

SEQ ID NO: 175427 - protein, 331 aa, unidentified
MKNKQIVGIDVSKSTLDAFVFKSNHLFQVANNPTGFVRLLQESIQISGMAKDSLLFCFENTGCYSRALSVFLQDAGIDFYAIDALDLKRSMGLSRGKSDKKDAKSIAMYAWRRRDELVCSKLPGPVIDQLSSLLSHREMLIKQRTALKNASKGHYNTYSDNEFKFLKESQMRMIKQLSEEIKNTEAEIVFIINHNEDIKSNYDLLLSIKGIGKILAFYMITLTHNFTRFTDPRKFACYAGIAPFEYSSGTSVRGRTKVHPCANKQIKSLLNMAAMSSIQLQGEYQLYYLRRTAEGKNKMSTLNIIRNKLIFRAFSVVKRGTPYVDLHKFAA

SEQ ID NO: 175428 - protein, 423 aa, unidentified
MGRVVIGTDPHKRSATIEVRDEREVLLARGRFPMDKAGYRQLLSYVRQWPARVWAVEGANGVGRPLAARLLADGETVWDVPAKLAARVRVFDTGHGRKTDATDAHSVAMVALRTRGLRQLTADEDLTVLRLLADRRDEVSRSRNRTLNRLHRLLAELIPAGAPRHLSASQAKALLAGVRPRDPAGRTRRALAAELLAELEVLDGKLKALKRRLGEAVIAAGSGLMDIYGVGPAGAARILADVADVARFVDRNRFASWTGTAPIDASSGEQIRHRLSRAGNRRLNHVLYIAAIVQIRHDTPGRRYYQRKLAEGKTSLEALRCLRRRLSDVVYRQLVADAAQANKAGQDGQDEAGPGGYSGATLTSSAADLTPVVGSSDKPLPGPASANLPASTASANPHRTRAAAGRRQRARGVNVEHPTAERR

SEQ ID NO: 175429 - protein, 672 aa, unidentified
MVTGMAAVTAGASPAAGPDRRSPVPARTTGAAAADRSPASARPGRTLRSWPLLVLAAPAAAEVWSGWVGVAQKTGFGLVSPLPGIWPALHLDTTVTLPVGVEAYAAYALRAWLSGEPWIGDRTRRFAKWSAIFSFALGMAGQVAYHLLAQAGAARAPWPVTMIVSCLPVLVLAMGTALAHMLRADTAPDAPDSDATGPATAWSPDQSAGDQSGQDQDQHADHGSGPPAVTTRPVQPETRAVVRTTAPEPRDARMQADQAHLIAGGLAATGKPISRRALRDAGVKDDMLRPACGWLSWQSAPALNRGGLPSTGAPCGVSANRLWSMRRSLMPIVGGMDIHRKQITFDYLDTATGEVMCGQIAPADRAHLRAWLQRFAGIPDVAFAFEACTGWRYVAEELAAAGVAAHLAEPADTAAARGRKKRAKTDRADARLQRTLLADGRLPECWIPPAQVLECRALLETYHALRREHTAWVQRAHAVLFHQGAPVFHALGEADGPQQLAGLARARLSPAGQQQIGLYLRMLEVTEAELGALRGQLTATARRLAGAKALQDKLYGVGPVTGLALTCWLGGKDRFSSARKAVRFTGLDITVYSSDGKRSPGHLSRQGPPVLRWCAYEAGKAHARGSAPDHRYYEQVKDRKDGKRAALSEARKIIRQACHLLAGLGDDAFTTV

SEQ ID NO: 175430 - protein, 369 aa, unidentified
MTQCIKTRFVGLDVHKDTIVVAVAELGREAARVVATVPHEWKALRKVLDKLGPRSEVACCYEAGPTGYGLARTLIAADWACDVIAPSLIPKKHGERIKTDQRDAVKLAQNHRSGELVAVFIPEEQTEAIRDLERAREDAKKAERVVRHQLSKFLLRNGRRYPGKTTWNDAHHAWIAQQTFAEPAQQYVLSDGLAAVEGATLRASQLTARLREVTVGWSQEPLVKALQAMRGVEFVTAVTLVAEVGDFRRFAKAQDFMGYVGLIPSEQTSGNHRRQGPITKTGNAHVRHVLVESAWHYRRQPRMSKALRERSAGISPQVCAIAWKAQKRLHGRLNRLIGRGKNKAEAVTAVARELAGFVWAISRECPCSA

SEQ ID NO: 175431 - protein, 482 aa, unidentified
MAKRKVSTFERLRSGKMNRKERKEWQQRLYAEDAGLEVIHPDAAGIDVGNASHFVAVPPDRDEQPVREFGSWTADLRRMAEWLKRCGIRTVAMQSTSVYWVAVQEILEREGFEVYLVNARGTKNLPGRKSDVQECQWLMKLHTYGLLRNSFHPPEEIRAVRTIWRQRDRLVKEAGREVQQMQKALTTMNVQLANAISDVSGVTGQAIIRAILQGERDPQQLAKLRDWRVAATEEEIAHSLEGNWREDVLFELQQVVDAYDFHQKQIAACDVQLQKYLSALPMRNGPGAGERNTADAPSERPKKQRRHKLQKNQPVFDLAAELQRTMGVDLTAIDGVDVMTTQVILSELGPDLSASFPSEGHFTSWLELAPRRDVSGGKVIRQKSRKSNNRVATALRMAAQSLWRSDSYLGARYRHLKARLGGQKAVKAMARYLACLIYRLLTKGQAYVDRGVAHFESKRTERELLALRRKAAELGMQLVAVS

SEQ ID NO: 175432 - protein, 338 aa, unidentified
MTWYSGIDLHSTNSVVVVSDEADRVVLQRRLANELGGILEALERYREQLVGVVVESTYNWYWLVDGLQEAGYRVHLANTAAIRQYDGLKHSGDVSDAAHLAQLLRLGILPTGYIIPKAERAARDLARKRLQLVRCRTAQVLAVENLFARNTGARPSGNVVKRFVPQDIERSGFDPDVTLAIQANVGVIRVLNQEIERLEHRLQERVALRSEFALLKSAPGIGETLATTIMLETGTVARFARVGNFSSYSRCVDSAKMSNGKKKGEGNVKNGNKYLAWAFVEAANFAVRFCPEAKRFYERKKARTNAIVALKATAHKLARACYHMLREGKPFDLQRCFG

SEQ ID NO: 175433 - protein, 460 aa, unidentified
MNPKRSKSRNGGKMPMVHPNAAAIDVGATMHMAAVRADRAPEPVRSFGTFTTDLHRLVDWFTECGVETVVMESTSVYWIPIFELLDARGFTVFLVNARDAKHVPGRKTDVSDAQWLQRLHSFGLLRASFRPKGQIAELRAYVRQRERLLEYAASHIQHMQKALTEMNLQLHHVVADITGATGLRIIRAILAGERDPEALACLRHYSCHSSAETIAKALTGSYRAEHLFALEQALALYDAYHEKASACDARIEAVLKELSIHRGHGHGSPPPASRRRNRTDQANALTFDVREALFALLGKDITTIDGFGPYLSLKLIAECGDDLSSWPSAKHFTSWLGLAPSNKVSGGKMLSSRTRRSGGRAAALLRLAAVTVGRTDTALGAFYRRLSARIGKAKAVTATARKIAVLFYNAVRYGMDYVDPGASSYETRYRTRVVNNLHRRAKAFGFVLQPLEPKVGAAVS

SEQ ID NO: 175434 - protein, 310 aa, unidentified
MDAPVVGIDVSMDRLDVHVLPSGEAFFVANDAIGVETLADRLAGLGATVVALEATGGFEMLAASALSAVGLPVAVVNPAQVRSFADALGKRAKTDTIDAAVIARFAVASGVKAKPLADEQTRLFAELITRRRQILAMIVAEEARLKRAANRQLKKSISRLLVALRRELESLDEDLDSQVRASPLWRIKENLLSSVPGIGKGIARTLIAELPELGCLSARQIASLAGLAPFTRQSGKWRGKSFISGGRASVRAALFMGALVASRHNPVLKAFRDKLVAKGKPKIVAIIATARKLLTILNAIIRDQKPWQNA

SEQ ID NO: 175435 - protein, 335 aa, unidentified
MYTHFIGVDISKDTLDIAVVSPQQVLLYEERIANKKSAIISFFKQLRRLVPDFAPASALVCMEHTGLYNRPLLNAVPALALPAWVEHAAQINAATGIRRGKTDAVDARRIAAYAARFVDRVRLYQAPRPVLVELDRLQARRQRLVGVLQVLQTPLSSSEGFFSAAEQQAEKRGCAASLQAVRADLKAVEAAMAALVADDAALTRQYERLTSVPGVGLVTAVEMLLTTNEFEENSDPKRYASYAGVVPFERSSGQFKGRPRVSPQANKRVKTLLHLAALAAVRFAPTLKAYYERKVAEGKNKMLVLNNVRNKLVHLLFACVQQDRNYDKNYTPALV

SEQ ID NO: 175436 - protein, 312 aa, unidentified
MEKLSYGGIDVSKDRLDVVVLPEGWFFSVSNDTAGWTELVARLRPLAVSAIGLEPSGGYERGIIRALLAARLSVRRINPNKLRQFARARGVLAKNDRLDARLMAEYVAIMPTRAVQRDDAVDRLAEVVTMRRQLCDEHVTVENQTAHLEDAMLRRLSKRRLVRLEADIRLLDKRLAEMVATNAAFARLYELLTSMPGVGPVLAFTLIALLPELGKMSRKQIAALVGLAPYDFDSGKLRGHRSIYGGRMPIRNVLYMAALSASRYNPALKTFSNRLAHANKKSKVIIVAVMRKMITTLNAMLRDNAVWQPQSN

SEQ ID NO: 175437 - protein, 448 aa, unidentified
MDHFAGLDVSVKDTSVCIVDDTGRIVREVKVASEPEALLPVLKNAVYHFKRIGLEAGPLSQWLYNALAEAGLPVICVETRHMRAVLKAQINKTDRNDARGIAQMMRVGLYRPVHVKTLRSQKLRMLLTHRKLLQSKAIAIDNDLRATLRNFGLKVGAVGTVKFETRIKELVENQPDLSILVDPLLIVRRVLREQIAVLHRRLLAVVRDDDVCRRLMTVPGVGPVVALTFRVTVDVPARFRNSKAVGAVFGLTPSRHQSGESDRPGGISRCGDEMMRAMLYEAAQTMLVVSTKWSWLKAWAMKIARHRGMKKAIVALARRLAVIMHRIWVDGTEFRWNREETRQHDSRAGSIAIGGNSSSTQRWNDVPRGTMDEVSSCVRLALPFNRRQGRPLDCSASSSNPMMEGPGADSGEKHEPASDIDAVMVDSLRALDPKRPIREADTMTRDSL

SEQ ID NO: 175438 - protein, 342 aa, unidentified
MVQPVTVGLDIAKNVFHAHGVDAHGQKVLSRKLRRGQVEAFFAKLEPCLVGIEACATAHHWARTIAKLGHQVRLMPPAYVKPYVKTQKNDAADAEAICEAVTRPNMRSAETKTVEQQSVLVLHRTRAMLIRHRTRMGNTIRAHLAEFGITESIGRMGLSRLVAIIASGDDDRIPVVMRRALMCLVDQYSLLQDQILELDRQVMAWHKSNEASRRLATIPGIGPLAASAMVASVGNASNFKNGRSFAAFIGLVPRQSSSGGKERLGKISKRGDHYLRWLLVVGGLAVIRYAQRHGTRRPWLLKLLQRRTPKIAAVAMANKMARIAWVLMTRGGAYREPVPATA

SEQ ID NO: 175439 - protein, 366 aa, unidentified
MSSVSHRGFTHLGLDVSKDSIAVAVLDPDRDRAPVRKIFHDEESVRRLIGRFEDRSKLWACYEAGPTGYELYRLLDRLGVRCDVIAPALIPKQPGNRVKTDRRDASKLAGLHRAGELTAIAVPSPQQEAVRDLCRLRDDMVEDQTQARNRLTHFLLRHSRVWRGGSNWTLKHHRWLAGVHFDDRALAATFAHYRATVALRDSSLEAVEGDLVQYLDREPFAVQVRRLGAYRGITNIGGLCLAAEIFDWRRFPAGRSLMCFTGLVPSEDSTGRREHRGNITHAGNRYVRARLVEAAWSYRHRPHIGVTIAARQHGLAPEIVARSWKAQVRLCKRFQQLNARKNVKSVVAAAIARELAGFLWAEMNAA

SEQ ID NO: 175440 - protein, 416 aa, unidentified
MNAVGIDVSSRKSTVAVLRPLGEVVCLPFDVTHDIAGLASLVEKLKALDGETRVVMEHTGRYYEAVEKALHEAGLFVCAVNPLLIKEYGANSLRRVKTDKADAVKIARYALDNWADLRDFTPMDAIRYDLKTLNRQFQLASKQRTASANNLIALLEQSFPGIRKCFDSPVRSDGTQKWVDFAHSFWHVDCVRKQPFAAFCERYRKWCKRHAYLFKLSNAEEVYALAKRAVVLTPKAKVVKVLVQEAANQLISISRSVEVYRAEMDRLAAMLPEYPVVMAMYGVGKSYGPQLMAEIGDVRRFERKQALVAFAGIDPMPNQSGDKNVRSNKSSKRGSPYLRKTLFNVIRTYLQCAPQDEPVFQFLNRKRAEGKPFYVYMLAAANKFLRRYYAKLRDYFASLDTLQPVAPIPTILKATL

SEQ ID NO: 175441 - protein, 344 aa, unidentified
MGVAVGVDSHKSSLAIAVLDDLGRPIGVREFVNDSRGHDAVVKWVAQHGTKLVVGIEGSGNYGAALARRLLEAGEDVREVPAFLSHRERKRSPSRGKSDAHDAVAIARVVARGEALSSPHRTDVFQDLKLLSDHRDQLVRARTQLINRTHKNLVISHPGYEGLVPKLKSNKNLRDTLKMLRGDHSVRAELIRDRIGEIRRLNDKIAAVEKQMATKVTESGTNLTQLHGIRFIVAAKILGEIGDPARLRSKSSFAMMSGTAPVEASSGRTKRHRLNRGGNRQLNYALHMMAIARCRGDQDTKIYVARLRSEGKSAKEAMRCLKRQLSNVVFRQLIADLKGSELAA

SEQ ID NO: 175442 - protein, 369 aa, unidentified
MDDIIFVGLDVHKATVCIAIAEGSRGGEVRQLGIFENRPEILSKVVSRLSKGGRRLSFCYEAGPCGYGLHRLLTGYGHECVVVAPSLIPMKAGDRVKTDRRDALMLAKLHRAGELTAIWIPDAAHEAMRDLVRARATAVRVLVKARQHLQGFLLRHERIYRGARAWTLAYRRWLTTVRFEHPAQQIVLQDYIHAVQEAETRRDRLTQQIEELLPNWSMAPVVAALQSMRGVALVVAVTVVAEVGDFRRFANPRQLMAYLGLVPSEHSSGSSVRRGGITKAGNALARRVLIEGAWTYRMSARVSRKLHDRLEGLPAAVRDIAWKAQLRLCARYRRMAATGKPKVVVTTAIAREMVGFIWAIARLAQPALV

SEQ ID NO: 175443 - protein, 339 aa, unidentified
MDKMEVCVEACGIEVSAAELVVAWGGEKKEVRVQGFANTAAGHKELLRALTRGGKRVRAVMEATGLYGLDLALMLSAQAGVELMVANPRAVRHFAQAMMQRSKNDRLDAAVLREFAARMPFQRWERPAANTLALWAIARRLEVLTRQRTAEKNRQHAAQVSQAAPAIVRKEIARSLRELERAMLRLRREALRCVAAEAQLQQRYELLCSVPGVGAVSAIQVLAELAMLSEDRDVRQWVAFAGLDPREYSSGTSVRQHTRISKVGNRHLRHALYMPALVASRHEPHLRGFYERLLARGKKKRQALVAVARKLLHAIYGMFRSGHRYDGSRVFALPTAKIA

SEQ ID NO: 175444 - protein, 385 aa, unidentified
MSQLNDLSRSLTSLEQDNAIIAVIEMSQSSWLVAGIVPGIERHPLKKLEPNEGELLRLLMRWRAEATKMGCTITRIAVAYEAGRDGFWLARWLRAHDIETYVIHPTSVAVSREHRRAKTDRLDTGLLKRVFIGWLRGEPDHCHMVTIPTLAEEDAKRPNREREGLVRERTRIVNRMKSCLARFGVRSFKPTLRKAPERLATLVTPEGVPLPANTLLELRRDMARLRFIMDQIKEVEEARAQRLEQAPQEKSQAMVRLLARVIGVGIETADMLVHEILSRSLRDRRAVARYAGLTGAPDESGSRRQEKGLAKAGNARVRRGMIQLAWRFLLFQKDSALAQWYRTRTESAGKKRKTMIVALARKLLIALWRLVTIGEVPAGFVLRAA

SEQ ID NO: 175445 - protein, 341 aa, unidentified
MHPYFVGLDVHKQIIAYCVKKVDGQLVTEGTIKATRTALAEWVKSLPQPWVGGMEATMFSHWIYVALQPHAAELYMGHAARMKAISAGKKKSDKLDSRTIADLLRCNVFPKCFVIAPELGRLRQQLRFRQLVVKQQVAFMNKTAGLLMETGIEYERRRLHGKRYFSELMATTHWVNQELKPLLKFSRQQIESLAGMDKRLIRMLEKHPQLRARVAALRTIEGVGPILALSWALETGTPERFPSIKDAQSYCGLTSAFWQSAGQQKRRPLSKQRNQHLQTVLIEVANLAPLYNEKLKALYQKEKAAGADSNQATLEVARKLVAYLLAVDRAFWRSAQLKRAA

SEQ ID NO: 175446 - protein, 334 aa, unidentified
MKSDIVHIGVDVSKENLDIYIPAKREGLRPTVMEFDNNTKGFRALRDIARKADATVCVEPTGGYELELIAFMHRFKVPVAYADALRVRQFARAEGSLSKNDTIDAALISRFADKIGVRLLEPADIDAVELKRKTKFRQTMIDSRKALICRLETEIDAEMRSMINEQIRHLDRLIAKLKQSCLETVSRNQTLDNIRSRFVEVGGVGDITAITILAGLPEIGTLSDSKLNRLVGLAPEEKQSGTKQWQRRIWGGRRDVRNALYMAAVASIMWNSVLGGYYHKKRAEGHPHKWAIVPTMRKLLSLLNRIARDPNFKPTPEPESTKRKAMSLRGVKAA

SEQ ID NO: 175447 - protein, 402 aa, unidentified
MNAVGIDVSKGKSMVAIMRPFGEIVSAPFEIKHTASDINSLVELINSVEGESRIVMEHTGRYYEVLAHQLSEANLFVSAINPKLIKDFDNDSLRKVKSDKADAVKIARYALDKWQNLKQYSVMDELRNQLKTMNRQFSFYMKHKTAMKNNLIGILDQTYPGVNTYFDSPARSDGSQKWVDFASTYWHVDCVRKMSLNAFIDHYQNWCKRKKYNFSQSKAEEIYGKAKELVPVLPKDAITKLIIKQAVDQLNSASTTVESLRTLMNETASKLPEYPVVMAMKGVGTSLGPQLMAEIGDVSRFTHKSAITAFAGVDPGVNESGTYEQKSVPTSKRGSADLRKTLFQVMDVLIKTHPQDDPVYQFLDKKRAQGKPYYVYMTAGANKFLRIYYGRVKEYLASLPES

SEQ ID NO: 175448 - protein, 343 aa, unidentified
MSEVTTIGLDIAKNVFHAHGADASGRALFSRKISRTKLLEFFAQQRQCTVALEACGGAHHWGRELTRLGHDVKLIPPAYVKPFVKRHKNDAVDAEAICEAAQRPNMRFVAIKSEEQQASGLVFRTRDLMVRQRTQLINAIRGHLTEYGWVAPKGPSHVAMLGDLLEDEIGSSLPEAARAMFRTMLDLLEELNDRIGDLDKEIARRAREDAIARRLMTIPGVGPITATAIAALAPPAETFAKGRDFAAWLGLAPRQLSTGGKQKLGPITKMGERTLRRLLIIGSSAVVLQASKRGAPAGSWLEQMLARKPRMLVTVALANKTARIIWAVLTKNEDYKAPVAAAA

SEQ ID NO: 175449 - protein, 343 aa, unidentified
MSEISRIGMDTSKSVFQLHGVTAAGEAVLRRQLRRSALVAFFAKLPATVIGIEAGSGAHHWSRVLTGLGHTVKILPPQLVRPFVRRGKNDAADAAAICEAMVRPKIHHVPVKTVDQQAGQMLISMRDRLVRERTRLTNTIRGHAAEFGHVAAKGIAHIPLLLNRIAADATLPSLVRELFAGHGEELEALQVRLSAIEKKMMSFHRANEVSRRLEHIPSVGTNGAVRFAVKVSDARAFRSGRDFAASLGLTPKDHSTGGKTRLGSITKAGDPMLRTTLVLGATAVVKQALLKPERAAPWLLELLKRKPRKVAAVALANKVARIIWKMLVSGEPFNPGRAFARAA

SEQ ID NO: 175450 - protein, 355 aa, unidentified
MDVHKYAHHAVALNCLGQELSQLSFTNDELAHCRTWLNGLGAKPAIVVGLEDVNGVGTRLSQFLLQEGFTCRYVPAILTERERKHSVQHDKSDYLDAKRVGKVILTKSEETLPVSTILTQENTYIKELDLLLQERQELVREQTAVKNQLHVLLHQYYGNTYRQEFKHIFSQKALTWYKKDLQIIQSDTKGSALLAAAILRRVERLQLILSQVAAIDKTLNGTSKTIREVEVLTKELVGCGNLTACKILVEVGTIHRFTGKDKLAKYAGIAPVRDQSSSKNRFYTNSGGNRKLNQAIHTVALSQIGAGGYEDAKKYFQKKVNEGKSKLWAIRCLKRQISNRIFLLLKNASNTKRTN

SEQ ID NO: 175451 - protein, 351 aa, unidentified
MYNAVGIDASKLKSTITIIQPAGVVIRKPFDVLHTSDELNTLVTYLKSLVGETRAVIECTGRYHEPVVKSLSEAGIFISAVNPKLIKGQKQNTLRKVKSDPADARKIAKYALDNWAELREYSSMDTTREQLKTLNSQFTFFMKQKVAAKTNLISLLDNTYPGVNKLFDSPTRDDGSEKWVDYAYSFWHVDCVRKIGLKAFTERYEAFCKKHHYNYQKNKPALLFEESKQLVAVFPKEKSYKLLIQQSIQQLRLASEHIEIIRKEMNELASTLPEYETVMSMYGVGETYGSQLIAEIGDVSRFTHREAITAFAGVDPGVNESGQFKQRSNRASKNGSTRLRKTLFQVMSTYL

SEQ ID NO: 175452 - protein, 366 aa, unidentified
MQKSSTMRRTASKIFKGRQLTIGMDLGDRWSFYCILDESGKVILEAKVATTPEAIKQTFAKIPLSRLAMETGTHSPWVSRLVTQLGHEVIVAHAQKVDLITKSTRKDDRHDAKTLARLARIDPELLSPVQHRSAQAQLHLTEIRARAGLVSARTALINAARGLAKSYGERLRKCGTFQVSREIGSELSTGLREALKPLLQEVESLNERIQEYDRRIEKMAKERYPEVELLKQVKGVGDVIATTYVLTIEDPHRFRKSRDAGCFVGLQPGRRNSGESEPQMHISKQGDEYLRTLLVQGAHYILGPFGEDSDLRRWGRKLAERGGKNAKKRAVVAVARKLAVLLHRLWVSGEVYEPLRNSHKAMSAAA

SEQ ID NO: 175453 - protein, 325 aa, unidentified
MTLLPPLGLDVAKSTFHACLIRESGKLRHSSFANSPAGFAQLSAWLAKLGAGSAHACLEATGTYYEALATYLHEEGHTVSVVNPAAVKAYAQSRLSRTKNDRVDAELIAGFCLERRPAPWHPPAPELRELQALVRRLDALTEMRTMEENRLASGVTVAAVRESVEEHLAYLAEQIKRTEALIRDQIDSHPGLKRQRELLDSIPGVGETTAAALLAEVPDILQYRSARRVAAFAGLVPRERQSGSSVRGRVRLSKIGNARLRKALYFPAVTALRCSPFFQAWAEGLRQRGKSKMAVIGAAMRKLVHLAYGVLKTGKPFDPEWAQRA

SEQ ID NO: 175454 - protein, 336 aa, unidentified
MKTYTYFIGNDIGKSTVAVCVLDAQEKLLLQLSIPNTKGGMETLAKRLEKLPHFKLENALFCLEHTGLYCQPMLSYFYPRSADIWLDSAVRIKHSLGIKRTKTDKADAYAIAKYCLRNQADKQLFTLTDNSLQRIRQLAQQRQRLMNMAKELTDLSQDYTAMGLTTELSLHRQSSDEVLKILGKKIKDIEHQIGLEIKESDALKTNLKLLMSIPGVGKQTALFMLIFTGNFTRFASAKKLASYAGVAPFAYESGTSIRGRTKVNHMANTKLKWLLHMASMGAVKVKGEMRSYYERKVASGKNKMSVLNAVRNKLVHRMMAVIERQTVYQPVWEKIV

SEQ ID NO: 175455 - protein, 354 aa, unidentified
MKRTTKYVALDVHQATTVASVREESGRVIARSVLPTDPGALTEFVRGMRGARHVTFEEGTQAQWLYDLLAPLVDRVIVCDRRGAARQGNKGDQVDADQLSELLRRGALRAVYHGSADRATLKELTRTYQNLVEDATRVMLRLKALFRARAIPTRGTNVYQARARGQWLAQLGDQGARFRAAALYAELDVLRTLRPRAKAAMVTEARRDPAWHVLGTIPFFGPVRVALLLATMQTPWRFRTKRNLWAYAGLAVVTRSSADYALVAGQAVRRRRPPMTRGLNRNHNRVLKDVFKGAATAATARPGPLQDFYHNVMARGTREELARVTLTRKLAALTLRLWKKGERYDPTKLTMSAR

SEQ ID NO: 175456 - protein, 311 aa, unidentified
MTKRVVGIDVGKAKLDVGQNEQKRVRVWDNDEVGRAELSEWVVAQGVDLVVVEASGGYEAAIVSELVERGQAVALVNPTRVRAFARAEGILAKIDKIDAGVIARFGATMQPEPQARRDRAQLELNQWVTRRRQLVLMVTAEKNRLQTAAPAMQAHITRHIEWLQAEIEQLEQQINQAIANNPVWREKARRIETAPGVGTITASTLVADLPELGYLNRQKIAALVGVAPFNHDSGKRRGQRRIFGGRASVRSVLYMATLSAIRHNPVIKSFYERLLAKGKLKKVALTACMRKLLVILNAMVRTGQDWSPAIS

SEQ ID NO: 175457 - protein, 401 aa, unidentified
MVSDFKKGRYNLMKIFVGIDIAKLNHFAAAISSDGEILLEPFKFTNDADGFQLLVSKLESFDKNSIIIGLESTAHYGDNLVRYLVAEFYQVCVLNPIKTCQMRKNNVRKTKTDKVDTFVIAKTLMMQDDLRFITFFDLDMMDLKALGRFRQKTIKQRTRLKIQLTTYVDQVFPEIQYFFKSGLHQHAVYALLKEAPSPKEIASMHMTHLANLLKVNSHGHFTKEQAKELRVLAQKSVGANDSSISIQITQTIQQIELLDSQLEKIEAEMTDIMRFNDSVIMTIPGIGYINGGMILGEIGDIHRFSNPNKLLAFAGLDPSVYQSGNFQAKTTRMSKRGSRVLRYALVNAAWNVVRNNATFKAYYDAKRAEGRSHYNALGHCAGKLVRVIWKMLTDKVEFNLE

SEQ ID NO: 175458 - protein, 336 aa, unidentified
MDEDGSILDTGSYPNTFLDASHYAKQIVETYEGDCKAVVESTGNMCIKTYDAFESNGLEVKLANPVKTRAIAEARVKTDKLDSKILAHLLRADLIAECYVPTRDVRLSRALLSHRVHITQEQTRIKNRIRSLLDKYDLECEYHDIFGAHGLRWLATLQLNGHDNEILQSLLRQLEFLQDEEERASSVIAKDASHNGYVPTIMSMTGFDYYSASVLAAYIADINRFPSASHLVSWVGLCPSVYQTGESLYMGRMKGGSRKVKWIMIQAANTATRTDPRMKAYYERKLRRHHHNVAVTHVANKMLRIIWHMLRENRLYNERKEQLYESKLKRMNHIAE

SEQ ID NO: 175459 - protein, 378 aa, unidentified
MGQKAFIPQEYDVFAGLDVDKKSISVTFSNHQQGFVRSLHMPYSVERLLKHVRKHFPAQKVAFVYEAGPTGYGLYDGLAAQGYNCLVAAPSMIPRAPGQRVKTNRLDSRALSESLRGGQLKSIHVPSSIYREIRHLTQLRDVLVSELAGMKQRIQSLLLFEGIAFPASPAGSRWSLKVKSQLRKLPCSRSVRFKLDQLLDNVEFSEKQVMKVTKEIRKLCQNDCELAQCIEYMMSVCGIGWIVASQLLARIGDWRELKNVRQLAGFLGVVPIESSTGERTDRGSITRTGDGRLRSKLIQAAWSAIRQDAELREFYSSVCRRHPRHVGPRVAIVAVARKLSARIAAVLMEQRPYLVRQKVHLAPLTQEETSPQGTTRRR

SEQ ID NO: 175460 - protein, 359 aa, unidentified
MASRVKRNTINFNGKRVNIGVDMHKQSWRMTALVEGEVVFTGTLAKPNYDSFRKLLARFEGNYVRIVYEAGPGGFGLYDMLTADGIECMVTPPSLIPTESGSRVKTDKKDSLKLAKLLESNMLKKVWVLSPEERAHRQLVRTRRQIVDHRSDVMRQIKSLLFFHSMDIPFSSRQQLTGPFAKWLHELDLEDKCLNQSLKTLLHLFDYLSAEKKRLTHEVIELAKDEKYAQRVKLLYTIPGIGTLSGMEILVELQEITRFKTVDELAAYLGLTPSQYSSGEHVRMGHITHAGNDRVRTTLVESSWILIGKDPSMRCQYENIKHRRRGKRAIVAIARILSARLRRMLLDQVPYKIDFCKAA

SEQ ID NO: 175461 - protein, 355 aa, unidentified
MTSTKYIGMDVHKESISIAVRNSVGKVVMESVIETKASVILQFLNGLSGDLHVTFEEGTAAAWLYDLLKPHVARLVVCNPRRNALLKVGNKSDRIDAQKLAELLRGNQLQPVYHGEHGLRTLKELVRSYLTVGKDLARVMTRVKALYRSWGIPCSGTQVYSRLYRVTWLSKITEPGVRLRAAFYFQQLDALRTLRQEVRQELLAESKKHKVWKRLCEIPSIGPIRAAIALGILQTPHRFRTKRQLWSISGFAIETRSSADHRQVNGRLQKVKKRVSIRGLNQNHNHDLKNLFKGAAVVASTKPGPFQEFYEALLAKGMRPEMARLTLARKIATIVLIVWKRGVNFDAQYLKPQTV

SEQ ID NO: 175462 - protein, 313 aa, unidentified
MSDAEWVVGIDVSKAILDVAILPTNETFQVGNDKAGWAALIKRLKARKVKVVGLEPSGGYERNVVKALRKADLPVRLVNPYRVRQFARAFGRLAKNDRIDAAMIARFAAELSPRAPRDNPVVEQMAELVMARRRLTQEKVRLGNQLEHMRDPGLRRMTSQRLRRLEAEILLISRRLAQTVRDDEGLAAKDRLIQSLPGAGPVLSHTLLALLPELDDADRRELAALVGVAPFDDDSGKRAGKRAIWGGRAEVRRVLYMAALTAARCNPTLMAFRERLIAKGKTPKMAIIAVGRKMLGILIALLRTGQEWSAEHA

SEQ ID NO: 175463 - protein, 339 aa, unidentified
MMDVSTIGLDLAKKVFQVHGINASGTVVIRRALRRDRILAFFAKLPRCLIGMEACATAHYWARELRKLGHEVKLIPPAYAKAYVRRNKNDPADAAAICEAVSRPSMRFVEVKTEQQQAATGIHKVRELLMKQRTMQMNHMRGLMAEFGIVVGEGPAHVAKLVAILADPDDHRIPAPLLDGLVIVAELLRSIERKLEAIEKQLVASGRDNATARHLITIPGYGPILSTAMAAFVTNPAVFHSGGDFAASIGLVPRQDGTGGKVKLGPISKRGNGYLRRLLVNGATSVLNSKRAHQDPWLVKLLASKPRKVVAVALANKMARIGWALMMRQEDFRVVPAAA

SEQ ID NO: 175464 - protein, 454 aa, unidentified
MIFVGIDWSEPHHDVCVLDDQGMVLAKGKVSDDVSEVGRLHAMAAEHAEDPSQVVVGIETDRGLLVGSLVQAGYRVYAINPLAASRYRDRHAVSRAKSDAGDAKVLANLVRTDRRNHREVAGDSELAEAVKVLARAHQNLIWSRQRQVNALRNTLREFYPGALRAFTTSQLATVEACSVLAMALTPTWARDKLTLQRLRRSLAASGRKRNLDRRAGQILQALQAPELSAPALVEQAYGDVVGSLVVVIDGLTHQIAKLEAELAERFEGHPDAEIITSLPGLSSVLGARVLAEFGDDPTRYQDARARRRYAGTAPITRASGTRLVVLARVARNRRLFDACYLWAFSSITTSAGARRYYDAHRARGKTHHQALRALANRWIGISCDERLLNTSPSRSQETLPEATSMNALRPWLRPDRSRRTTSPEYRVVEAMDGDSGSPSTLDPASKDPVTNHSP

SEQ ID NO: 175465 - protein, 346 aa, unidentified
MQHAAIDLGSRESQICIRQPDGAIVEERKHPTRKLPELFKTWPTSRVVMEASAEAFKIADAALAAGHQVRVVPGKLVRLLGVGDRGVKNDQQDARHLSKASWQTDVPSVHIPSAAARELKSICGARDVLVATQRNLSNNVRGWLRTQLWKPPGGTMVTLPERVRAHARAGGHELPEHIERQLTMLTQVTEQVQAANKQARRLAKEHPVCRRLMTVPGVGPLTSLRFVAAIDDPSRFATAHRVQSYVGLTPGEHSSGGGGGKGGGKRGITKAGPNELRRCLVQAAWSVMLARRPHPMLEWARQIAQRRNRPVAVIALARKLAGILFAIWRDGTTYEANHAAGRSALT

SEQ ID NO: 175466 - protein, 343 aa, unidentified
MDYFAGLDVSVKDTSVCIVDETGKIIREAKVASEPDALLQVLRTAAYHFKRIGLEAGPLSQWLLSALAETGLPVICVETRHMRAVLKAQINKTDRNDARGIAQMMRVGLYRPVHVKTLRSQKLRMLLTHRKLLQAKAIAIENDLRATLRNFGLKVGVVGTVKFEARIKELVENFPDLAVLVEPLLVVRRVLREQIGVLHRRLLAIVRDDEVCRRLMTVPGVGPVVALTYRATVDVPARFRKSKSVGAVFGLTPARDQSGERDRPGAISRCGDEMMRATLYEAAQILLVRSSGWSWLKAWAMKIARHRGVKKAIVALARRLAVIMHRIWTDGTEFRWTREATAA

SEQ ID NO: 175467 - protein, 393 aa, unidentified
MKQRKNAGSEPGNDTEIPSSMFISGLPACLNLDPDSRLTSIVKVIRLSSSPFFTENFRDKSMENFYFIGVDVSKKKLDFCVMFEGKVVHEEETANHQSAIMSLLHQLEEDYGIASDQILVCAEHTGQYTFPLACACKAVECKLWLENAAEIKYSSGVQRGKNDKVDAKRIAIYARRFQDKVQYYERPTEDIERLKQLESERTLYVADLAKYKGQVKDQKDYMPKALYERKMKRLQALMEDLEEAIQAITDEMDEVIVSCPVLYRQRELLMSIDGVGRVVATNMIITTEAFTRFDDPRKFNCYAGVAPFSYSSGSSLHSKARVSHRADKVMKRLLHLAAVAITHRIGGELKKYYERKVAEGKNKMSVINALRAKIVARMFAVIKRNEKYKPILS

SEQ ID NO: 175468 - protein, 377 aa, unidentified
MTIVSETPGHVENMEVTLGVDTHADCHVAAVIDPLGRHLAQASFETTIAGFKALVAWACGFGTIALAGVEGTGAYGAGLGRFLTAEGITVVEVDRPDRKTRRDQGKSDAIDAYAAARAAASGRASGTPKTRTGDVESLRVLRVARTGAVRARAKSLTQLKSLIVTAPDVLRAQLRGLDGTALVATCARLRPARDQAPTPSPHAKRGPRPGRLPDPTAATKRALASIAGRIQALDAEIADLDEDLEALLTPLAPNLLAINGVGLDGAGQLLVTAGDNPERITTEAAFAHLCGVAPIPASSGKTTGKHRLNRGGDRAANAALYRIVMCRLRHDPTTRAYVERRTKAGKSKKDIIRCLKRYIAREVYTAIQIDLSTKNTP

SEQ ID NO: 175469 - protein, 379 aa, unidentified
MKTATTRTQYSEVVPTLYVAFELSWSEWKLAFTVGLGQRPRLRTIAAGDLETLSKEILRAKARFGLAESARVVSCYEAGRDGFWLHRFLVAQGVESHVVDASSIEVPRRKRRAKTDRLDATKLVAMLVRYDHGERRVWSVVRVPTVEQEDQRHLHRELDTLKKERTRQSNRIKGLLAGLGLRLPVGKGFLERLEQVRLWDGSPVPEGLRFRLQGEFERLEFIEGQVEELEEERRRLMKESQEVGAEKARCLAQLKAIGENSAWMFSMELFAWRTFRNRKQVGALVGFAPTPFDSGESSREQGISKAGNPRLRSMAIQIAWGWLRFQPRSQLTLWYQERFAHGGSRLRKVGIVAVARRLLIALWRFVEFGIIPDGAELKA

SEQ ID NO: 175470 - protein, 320 aa, unidentified
MTYIGIDVSKDSFVAAYPAKSGYTTKTFKNTTSGVRQFITSLPEGCHCVMEATGNYSMLLLYLLQQANITVSMENPQKIKHFARAMLSTTKTDEIDAKLIAMYGEKMEPIPYKIPSESVILLKQKRTVLRQLKKQLLMMTNLQESMSVLPKQDPTSKASIEQTIKFLRKQISKMEEEITHLSNKEYKRQMDLLTSIKGISNTIASALIIATGGFTYFSSAKQISRFLGLCPTYQQSGTSVNVKGHINRNGDTYLRSQLYIAAVSSIACNSACRKTFRKMKERGKAGKVAIIAIANKLIRQAYAVVVNDQPYIDGYVSSLA

SEQ ID NO: 175471 - protein, 368 aa, unidentified
MTISAVTVIGGVDTHKHTHYAAVVDDHGRLLGHQEFPANDAGYRSLLGWMREHGQIQAIGVESTGSFGATLTRALTRAGQRVVEVNRPNRQARRMDGKSDRLDAEQIARAVLAQTSTAIPKAKSGTVEVIRTLRVTRASAVKARTQAFNTLWGVMIGAPSPLRDDLVNLTKRTLVNKCAGLRPESDDLLSLNNDPDRLLMAAVKTSLRDLARRWKILDEEIKALNRQIDVMVRATAPQLLDLHGVGVEIAGQFLVTAGDNTDRIRNEAAFAKLCGVAPQPASSGRTTGRHRLSRSGDRAANSALYIVTIVRMRHHQPTRDYVERRTAEGLSKREIIRCLKRYIAREVFNNLPRSTLIEPRLEIVHAAA

SEQ ID NO: 175472 - protein, 369 aa, unidentified
MEKDTTYVALDDSKRKIVAGILRPGDAQPELRELANDARQIRRLFERLTREGPVAACYEAGVSGYDLYRQITGLGVACRVIAPALTPRRPGQRIKTDRRDATKLVRLFRAGELTAIHVPAEAEEAVRDLVRCRDDLRRDVLRWRHRVLKLLTRHGRAYLLGPNWSQAHWRWIRAQQFALPPLQRAFEATLFALEQALARQAELDKELEALATTAPYREPVGWLRCFRGIDTLSAIILLAEIVDFQRFRRPRELMAYLGLVPSEYSSGDTHRRGALTKAGNRHARRVLVEAAWHYRHRPALGPALAGRSAGQPPAIVGQAWRAQQRLHRRYRHLVGHGKRSPVAVAAIARELVGFLWAAMTRHESRSVAA

SEQ ID NO: 175473 - protein, 392 aa, unidentified
MVVSVGIDVSKDKHDCFIVGSDGEVLADVFTISNTLDGFHGLLQRIQECSAPQDKIRVGLEATGHYSYNLLGFLLDNGLATYVLNPLRTNLYRKSLSLRKTKTDRVDARTIASMLLSDAGLKPYTDTAYHNEELKSLTRYRFDKVKERAKLKSSIARLVCILFPELEKLVPSLHIASVYALLEEFPGAKQVAAAHLARLKALLETASNGHYKRDMALEIRDTAKNSIGSQMPAKSLELQHTIRLIRELNREINEIEEQIQSIMDELHSPITTIPGLGFRMAAMILAEVGDFTRFDSPDKLLAYAGMSPSTYQSGQLKNCYPHMEKRGSRYLRYALYNATKYVCHWDSAFADYLAKKRAEGKHYNIAISHAAKKLIRLIFAMEKSRQPYCSAA

SEQ ID NO: 175474 - protein, 412 aa, unidentified
MDVVVARCAGLDVHRDTVVATVRWPGRRKNSRGQETRTYPTTQRGLAELSDWLLLEQVELVGMEATGIYWKPVFSALEERFTCWLLNAQHMHNVPGRKTDVADSVWIAQLLEHGLVRPSFVPPREMRDLRDLTRSRTAVAQERARMIQRLEKVLQDAGIKLTSVASQAYSKSARAILDALVEGERDPKVLASLVKGRLRSKRERLEEALGHRFRVEHHGVLARRLLANLDTLDAAITELDTEIARRLEPHQPMLDLLCTIPGVGPKTVQVLVAEIGLDMSIFPSSGHLASWAGICPGNNASGGKRRSGRTRPGSRWLKQALTEAAWGAARAKGTYLAAHHAQIRGRAGRYKAIGATRHDIIVAYWHIAHDRVPFRELGADWVSRRYSPEHRARRLIAQLEELGLSVTTKPAE

SEQ ID NO: 175475 - protein, 603 aa, unidentified
MSNSTVAETVKHFGVGIDTHRYGHCVTFLREDRQPATKPLIVKECREDYQQLESALRRLHAQDPQAHFHIRIDAAGQYALNLERFLRQLTLPMTLSVGEPKRNKDYQRAHFPKRKSDATESYAMARFAIVERPDATPATSEEMSLLADVASRLHVQAGDTTRAVNRLHKWMARAFPELATLVSDLSASSILTLLYRYPTAERIARAKLSSLTDIPYLGQNKAIQIHSAAQRSVATFRGELAEAVIRESVQQVQQAQNTKKTLENLMLDAYRALPAGNHVYVDTIQGIGQVTAAVLVSKIVSIDRFPSPAHLVGYFGIFPEENTSGVDRFGNPVPPGTMRMSAKGNDLVRAYLWNAAKSAIVHNPAVRALYRRLRAGGKRGDVALGHCMAKLLHLVFAVWTSGKPFDKDHYPWEPTKAPESGESRAAQENTAGHRDVLPKEKKVVTAANLSVETSTPKVKPSASQTSTKAAVDYAYLREQITIEQILRHLGVLDQLRARGSQRRGPCPIHGSEHPRSRSFSVNLAKNVFQCFHPDCAAQGNALDLWVAVRRLPLHDAALDLAETFHLQLNRNREEEPVILNRKTRKPRKSTEHEKTGVITPDAY

SEQ ID NO: 175476 - protein, 331 aa, unidentified
MNYSHFVGLDVGKNTFDASLMSAEEKELSHKSFDNTPEGIQSMLAWIDNYQLSLSEVLFCAENMGSYVTELSVSSVTMGFSLTLVCPLTIKKSIGLQRGKNGRIDAKRIANYAVLHYRKLKLYKLPDKDLVRLRGWIIIRDNLVKQKVSGTKLLETFSQMAKLADVTESISFLEEQLDSVKEKILKVEEAMEQLIAANNSLCTNYLLLRSIKGIGIINAIVLLCVTDNFQRFDNPRKLACYCGVAPFEHTSGISIRGKTQTSPLASKEIKVYLTRAAITAISWDPQMKAYYQRKIAEGKHKASVINAVRAKIIARAFAVIRRQPPFVTLVA

SEQ ID NO: 175477 - protein, 337 aa, unidentified
MKFSGIDLHSNNSVVLISDEADRIVYQKRLPNDLAQIVAALEPHRDELVGVVIESTYNWYWLVDGLMDAGYRVHLANPSGIRKYEGLKYSGDVADAAYLAHLLRLGLLAEGYIYPREERGARDLARKRLQLVRYRTAQILSIEGILMRQTGARMKSESVKGLTAAQVEEFGFAPDVALAVEANRAVSQTLGQQIEALEQRLRERVSLRGEFKLLKTTPGIGETLATTIMLETGTIARFAKVGNFSSYCRCVDSLHESNGKKKGEGNTKNGNKYLAWAFVEAANFAVRYCPQAKRFYEHKKRKTNGIVAIKALAHKLARACYHMLREQKPFDVNRCFA

SEQ ID NO: 175478 - protein, 322 aa, unidentified
MQYIGIDVSKATFVVAYSSDKGGEIRTFNNTTAGIKQFIGTLPKDGSIHCVMEATGNYSALLLYMLNVAGITVSMENPLKVKNFARAMLSTVKTDKIDARLIALYGEKMNPQPFKVQGEAILRLRQKRTVIRQLTKQITAMSNLRGSLACLPVPDKGATHTVDETIKFLEKRRDRLQSELTDLVEVEFSRQLALLTTIKGIGITLATALILTTGGFTYFQNAKQVSRYLGICPTYEQSGTSVNIRGHINRNGDAYTRGLLYIAAWPASRFNAQCKETYTRLRQNGKPEKLAMIAVANKLVRQAFAVVAHDKEYIDGFVSNRP

SEQ ID NO: 175479 - protein, 342 aa, unidentified
MYYIGLDVHKKTISYCVKDASGQVHQEGKVGATRWELDGWIKTLPQPRTMAMEATIFTGWIYDHLLPHAEQVKVAHPLMLRAIAAAKKKNDQIDASKIADCLRCDFLPECHMASTQIRDRRRTLRYRHLLVRQMVQMKNRISGLLMETGVSYNKQRLHKVGYFRELLSTNEDVHESIRPLLKLSRDTVVRLQKTEYALVSSLQRDPLLADRIKRLRTVPGVGPITALTWALEIGDISRFRSIRQAISYCGLCGEEKSSADKVMRTPLSKQRNKHIQRVLVEAAKLAPRQDHDLALVYETEKQKGNANRATLAVARKMVAYLLAVDRGERDFVPAEHYQRAAA

SEQ ID NO: 175480 - protein, 338 aa, unidentified
MAKITTIGLDLAKNVFHMVCCDRHGKIIKRKMLRRSGLLTWFANLPACLIGMESCASAHHWARALQAQGHRVKLIPAQHVKPFVRGNKNDYNDALAIAEAVTRPEMRFVSIKTPQQQDIQALHRLRERRLRDRTALCNQLRGLIGEYGIVFSRGVNLLRKRIPEILEDSENGLSDLFRSLLSQGYQHLTELDAHIDAYTEALDAHSKRDDACVRLQKIPGYGPIISSAFYSAVGNGEAYRRGRDVSASLGLVPRQHSSGDKQVLLGISKRGDRYLRSLLIHGARSVVIQAANKEDALSRWINKTRAARGFNKAVVALANKLARIGWAVLANNTVYQAR

SEQ ID NO: 175481 - protein, 446 aa, unidentified
MGLVVDAEKTLGDTTQRRVAVGIDPSRVALQMSLLSPDGEKPRSKRVALGPSAVKAIEKLLHGQQGVIAMEGSYSTGQLFLLELLERQYDVREIHPMVSKRFREALTEDHTDETDADGLAFMGLWKQDLPSVRFSEEQAVCKRLSRLRDRLGRDHTRYLNRLHACLSETYGASYKGLFRDLSAKKALRFFHQYPTINDAVAGDPDVLSQISKQAWERLKGAGCWREGSYLRCLRTEVRAMAAHILSLQERISETEREMAKLPPSEEQLLLQTIPQVGLITAMTVVGNTGDISRFGGNVHKYVAYCGLAPRRHQSGASESEGRARRRYNRYLKRAYVLLALNQMRLNPQAREYYTRKRHEGKRHWAALRCLARHLCRIAFRILTTKRTYHEVMARNTVDSSVKSLSSVTTLRRHTSSGSSENLSATTAAYQCSKKQTGVFLRRNHCL

SEQ ID NO: 175482 - protein, 315 aa, unidentified
MTKKRNDINVGIDVGKAQLDVCLLERDIKLQVANEECAIHALISKLARFKLARIVIEATGRLEQPFVRAALAKGLPVVVVSPLKVRRYAGAIGQLAKTDAIDARLIARFGAAIEPIAHAPCDPESQKIKDLIVRRRQLLTMRTMEKNRRQVMPKELQSSITRLIRTLDAEVKELDRILDQSVEKNSAWHHRREILTSMPGIGNTVAYTLLGDMPELGTLNRKQIAALAGVAPFNRDSGRMRGKRRIRGGRASTRTVLYLSAMTAIRFNPNIKLFYERLVKSGKHKKVALIACIRKIITALNAMLRDDVKWRPAMN

SEQ ID NO: 175483 - protein, 388 aa, unidentified
MNKIIYIGMDVHSSNFTLCSFEPGYGFEADKIFGQTQIKEDIFNSTVKYINKLKSMRPDVDVICGYEAGGLGYNLHRKLKAKEIESVILAPTTMAVARNSSKKKNDYRDAITIAKCLASSAYKAVYIPDEKDEDVRDFIRMRDDHKTALKQIKQQLNAFCLRHGHHYDKPKWTGLHLNWLRKLELSKVQRETVEEYLATYEALTSKIAALDVRIEDIASEERYSEKVNKLKCIKGIKTHIALSFVCEIGDFNRFKSADKFSGFIGLVPGECSSGNTERMLGITKAGNRHLRRLVVEISNTYRRGAVGRKSVALRERQKDMPKDVVAYADKATNRCQRKYQRMMFKGKNSNQAVAAVARELCCFIWGMMTGHYSRTAQAEASVYRSELD

SEQ ID NO: 175484 - protein, 366 aa, unidentified
MKKGSTAALLRIRKVRNGQLTIGLDVGDRSSFYCVLNNAGEVILEERVTTNPETMKKTFEKMPASRIALETGTHSPWVSRLLTELGHEAIVAHSRNVRLIGESRRKDDRLDAQALARLARIDPRLLSPIQHRSAQAQADLTVIRARYALVRARTALVCAARGLTKSFGERIRGRNPKGFGSATTETLGPQLQVALAPLLSALETITARIREYNVQIETLAEESYPETALLKQVKGVGTLIALTYVLTLEDPRRFRKSRDAACYVGLQPGRRNSGQSEPQLHITREGDSYLRMVLVQGAQHILGPFGEDSDLRRWGLKLAERGGKRGKRRAIIAVARKLAVLLHHLWISCEEYEPLHNTRKRRPAAA

SEQ ID NO: 175485 - protein, 310 aa, unidentified
MDKVVVGIDVSKDWLDVHVAPSGEHFRVGNDHACVEALIARLSSHGPALVALEATGGYEHVAVAALSAAGLAVVVVNPAQVRAYANALGKHAKTDPIDAAVIAAFVEAAKPDIRPLKNEAARAFGELVTRRRQIVQMMVAEENRERMAASPPARKSIRRVLTALRRELESLDADMDDRIRKSPLWRVRERLLTSVPGVGPAVARTLLAHMPELGSLDRRQIAALAGLAPWTRQSGKWKGRSFIGGGRSNVRSVLFMAALVASRHNAVLKAFRDHLVAAGKPKIVAIVATMRKLLTMLNAIIRDQGPWQNT

SEQ ID NO: 175486 - protein, 333 aa, unidentified
MTAVLTIVTAYVGIDVAKTKLDVVLRLGERAIHQVFANTAEGFTALDAWLSSFGLAPAQVRICLEATGSSSDALALDLFARGYTLSVLNPAVLVDYRRSQNIRRKTDKLDAHLLARYAQEKQPRAYTPLPDEIVTLRALLHHRDDVQHMLRQERNRLEAGRMTQAIQQRVRTHVEALQAEFKTTEGEIKAHLKAHAHLKAIWQRLQTIPGIGWLTAARLLAHLGEIERFEKVGSLVSLAGLAIKEHSSGSSVRGKAEIDRHGRKDLRQTLYMSALVAKRVSPHMQGWAKRLQAQGKPKKIILVAIMRKLLHIVYGVWKKEQDYQPALAFPVAA

SEQ ID NO: 175487 - protein, 410 aa, unidentified
MEVLHDRCCGLDVHKETVVACLRLVIDGKVVKEVRTFATTTASLIALSEWLTENKCTHVAMEATGVYWKPVWHILSDGDIELVLANAAHVKNVPGRKTDVKDADWVSDLLAHGLIRASFVPDTHTQEMRTLMRTRRQLVREKSSHILRIQKTLEDANIKLDSVVTDVMGLSGRKMIQALIAGEKDPAKLARLADPRVKASQETLRQALRGRVTKSHRFLLRLHLGQIDALDAAVAELDREVEASIEPFRTAVEQVSTIPGVKDLSARTILSEIGIDMGQFPSDANLISWACICPRNDESAGKRRSTRIRKGSPWLKTTLVQCAWSAVRTKGTYLQAQFHRIRARRGVKKAIVAVAASILTAIYHMLKDGTMYQDLGPNHFDRRSKEQQKNRLLKRLADLGYVVQLAPSPN

SEQ ID NO: 175488 - protein, 349 aa, unidentified
MDIVGGFDVHRKQITFDYIEMESGEVHRGEIRPADRESLRGWLDEFTERFSGKQIAIAVEATTGWRYVVEEMKRAGIEPHLAEPAETRSLQGRKKRAKTDRLDAGHLRDLLVIDRLPESWIPPDHIQEIRTLMRLRHSLIEERTTHKQRIHAQLFHNGYPQQSNLDSIESRAHLEDMDLPAAARKVVDLSLAMIEHINEELEPIEAELRAYARSQAGCKALMAHYGVGELTSVALLSELGDTRRFSSSKKAVRYAGMDITVHSSDDKRTAGKLSRQGPPVLRWAAFEVAKRAWRKNSPDHNYYLQNKERIGANRAALSIARKLIRRAHHTLRELGEEAISEPVPASSSA

SEQ ID NO: 175489 - protein, 385 aa, unidentified
MNQISCSATSSHTLHCALELSKKSWLLAIQFPDREQPSVYSIKGGDTEKLMAKLTAARDCWAKVSGSLPVITLCYEVGYDAFWLARFLKARGIECLVIDPGSLQVNRRGRRVKTDRVDVKMLLRTLIAWCRGERHVWSPVRIPSVEEEDLRRSHRERSRLVRERTAHINRIKGLLFGQGIRDVNVKSQYKTLAVDKLLTADGHRLPPRLASEIARELQRLAMVQKQIAEIERERDTAPTPCEATERKRQLLLQLKSIGPAISALLSREVYYRQFANRRQVGSFLGLTPSPYSSGEEERCQGISRAGSGQVRAIMIETAWLWIRHQPKSALTRWFVERTAGQSTRMRKIMIVAVARKLAIALWRYVEQGLVPQGAILNPPTTGRAR

SEQ ID NO: 175490 - protein, 450 aa, unidentified
MLGEGEVGMPQDRPTAQWSVVGTLQEVIPMKKRTYRSISVKQVDREKLVAAVSDRHVVVGVDVGKDELFAVVTVGPLESVVRFHWSSLSETREVVGLIRSCGPGVEVVLEPSGTYGDVLRWQLDAAGVAVYRASPKRVHDLAEVFDGVPSLHDQKAPGVVAKMHWDGLSERWSLPSKAERALRAMVDTRSLHREQIQRALGRLEARLARHWPEVGSILDLSSATLLELLSQVGGPEQVRRWGHEAAQFMRRTGRSRLAQEKIDAVMRSARSSLGVPLVEEELQALQAVTREIRHQQFELRKVERRICRLVDQDPEMSSLGATIGKVTAAEMVALGGRPTDYFNASSLLKGLGVNLKERSSGRHKGELKISKRGPSRVRQGLYMASLRLIQKDAIVRAWYERKVAREAGRYKKKAVVAVMRKLIKALWWVARGEAFDASKLFDTKRLGLAG

SEQ ID NO: 175491 - protein, 393 aa, unidentified
MFVNPQNDRLMRAVCGLDVHKDTVYLCILCSDGEIIERVFGVLTFQLRDMRRLMQSHGVTEVTMESTAMYWIPIWRVLEPHFRLKLVNPYFIRQLPGRKSDVKDAQWIAECTMKDLVRGSFVPPERIQQLRQYDRRIFDLDAEIVRKLSKLDGIMQRCNIRLSNYVSNTDTKSYKEVVDMLCEGITDAEELIKKVHRRIVNRHGRETILASLAGVVSDAEKDTMRQLREEITLAETHKRECLDKMLQTCRTYYPNELRRLMTIPGIKERAATSLIAEIGVDMTKFQTAAHLASWSGLKPRNDVSNGKFKSRRITHGNVYLRKTVIECAWAASRTKDCFFCRFSYHQTVVRKKNKMKVLVAVARKLLIAVWHVLHDATEYVDFNPDCNAPANNG

SEQ ID NO: 175492 - protein, 347 aa, unidentified
MKRIAVDLAKSVYQVAESVRSGKVVQRKRLNREAFRRYIQEQAEPVEWVMEACGTAHYWGRVAQSLGHQVRLLHPRYVRPYRRRNKTDRNDCDAMLEAARCKDIYPVPVKTHEQQLLQQLHGLRETWKKSRTQRINLLRGILREAGIEAPASGAAFIRAAHELVDRPELAPLSALLHIVLTEINLYEQCMAECEQHLKRWHADDDVVSKLDEISGIGVLTASALTAAVGKPERFANGRQLSAWLGMTPREFSSGDRRKLGHISRQGNVYVRTLFIHGSRAALLAAQRCQTRTPEKLTQLQRWAVETAARIGHNKAAVALANKLVRICWAVWCHERRFSGNWQSTKPA

SEQ ID NO: 175493 - protein, 431 aa, unidentified
MEVLYPKCAGLDVHKDVVVACARIAADGKATQEVRSFGTTTTALFELSAWLEEQQCTHVVMEATGVYWKPVWHVLEGTFELMLANAQHVRNVPGRKSDVNDAMWLSDLLAHGLVRGSFVPPTSIQEVRDLTRTRKQLGREVAQHTNRIQKVLEDTNIKIASVLSDVLGKSGRAILDALVAGETAPEKLVALCSGRLKASRKVLIEALRGRVTEHHRFLLKLHLGQVDLLQQGMRDLEARVGKALDPFRRHIDNLKGMPGINDVAANVIAGEVGLDMSRFASAGNLRSWARICPRLDESAGKHRSTRIPKGASWLKTTLVSAAWAAVKTKGSYFQAQFQRLRARRGPKKAIIAVAASMLTAAYYILRDGVPYKELGSEHFTRRNKEHAAKRLKKRLEDLGFTVEVRPATAEVSIYLASWTRNSASTPDCATG

SEQ ID NO: 175494 - protein, 394 aa, unidentified
MPELFVRVDVAKDSSSSQGIDSSGRGQFSLTFDMDSEGFMQLWKAIVEHSKDLSKVIVAVESTACYHINLYSFLTAKGVPTVVINPLLIANFAKLSLRKTKTDKKDAMTIAQFLLVHRDSISQLSLSQDLQDFRDIARERESVGNMLSAHKVEIKRLLQSTFPELEHIADLSTQVMLEFIAAFPSARLVKMAKPKAIQKILQRKGVGTRLTYTAEDLIQAAKRSIATISPAKELILQGKVRTLQHLRERHEELTKILTEYCKSSMLEDFKIITSIDGISKCTATTFLAEIGCIGNFASHKKLIAFAGIDPTVYQSGKLEGSSRISKRGNRHLRRVIWLMTTHVIEHNATFRAYYMKKRSEGQPFKKAVFATAHKLIRLIFAMLTQRTMFREVCA

SEQ ID NO: 175495 - protein, 347 aa, unidentified
MNFYNNIHPYYCGIDLHARLLYVCILDQEGETIVHKEISAKPELLRNILEPYIGNIVVGVECMHCWYWVADYCEELNVDFILGHALYMKAIHGGKAKNDRIDSYKIAKLIRGGNFPLAYVYPKEMRATRDLLRRRLKIVRHGAHLKAHVANTTSQYNLPPNKVNLKNICAREQIRTTFPDNVVQKNVDLDMAILDCYAGELSKIEWFIEQQAKKHQPVGYQILRSVPGIGRILGLTIIYEIGDITRFASVQKFASYSRLVKCKAESAGKSYGTQGNKIGNAHLKWAFSEAAVLYLRGNKKAQNYLLKLQKRMSKAKALSALAHKIGRCVYYMLVNEKVFDENKFLTS

SEQ ID NO: 175496 - protein, 378 aa, unidentified
MKKIMRYVGMDVHADSIAIAVVEDNGTERDVGTIANRPEAIRKCLKKLGRADELHCCYEAGPTGYVLYWQLVRMGIECTVVAPTLIPTKAGDRVKTDRRDARKLARYLRSGDLTAVWVPDEAHEALRDLVRARQAAKIDEKRARHRLQKFLLRHGQRPAPGVKAWSVAYRAWLQALKFDQPTLGVVCSEYLQELLHHEQRVERLDTAIDQAIDAAPETIRAVIAALQALRGVRRVTAAGVVAEIGQFSRFAHPRQLMGYSGAVPREFSTGGPGNHRRGAITKAGNAHLRRLLGEAAWCYRFRPAVRYPLKKRQQGLPAAVTDISWKAQVRLCNRYRRMVTRGKTKQKVVIAVARELLAFMWAIGVEVETHQAPARTAA

SEQ ID NO: 175497 - protein, 319 aa, unidentified
MAMNTQAIQIGIDVAKQELVIYRQDLDQLDSLPNTIPSIRRWLKTLPKQATLAVEATGTYHMPLTEQAHRAGHSVFVIDGYQLKHYRESVRARAKTDPCDARLLARYLAREGDDLRAWTPPPKAYRTLQSLLRRRSKLIQARVALQQSLGQEPSLKAPLKRLVAQINRIDQLIQKRMEQAVRQAGLTEQVARCEAVEGIGPLSACALVMAFLRGDFRNSDAFVAFLGLDVRVRDSGKQVQRRRLSKRGDPEIRRLLHNAAMAARRHPYWASVYQRYRDRGLQTTQVLVILARKLARIAFALMKNQTTYQAKARQACGTT

SEQ ID NO: 175498 - protein, 344 aa, unidentified
MITIGIDPHKSSLTAVAVEPTNQSHAPIRLVVDKNTPAALLAWAAQWPDRQWAVEGATGLGRGIAQALVTTGETVLDVPAKLAARARLLGSSNARKTDVADAISVAAVAQHNRRLNRVQLEDHTTILRLLTERRDDLVAEHTRGINRLHVLLRDLHPGGAEVRLDSTDATALLARIRPATAADRQRKQIARNVVRDLKRHEASIKELEKELRATVSASGTTLTQIQGIGFLTAAKILALTGDIRRFPNQEHYASYAGTAPIDVSSGDQETHRLSRRGNRQLNAAIHVAAVTQARDPGPGRDHYRRKLTEHKTPKEARRSLKRRLSNTIYRRILADHQRTQTAAA

SEQ ID NO: 175499 - protein, 400 aa, unidentified
MNSNRRVAGLDVHKDSIYLCIMGHDENIILQKTYGVLTPELRQMREDMLFHGVTECAMESTAVYWIPVWNELYGSMELKLVNPYFIKQLPGRKSDVKDAQWIAECVLKNLIRGSFVPEPIIQDMRKLNRRIMDLNEDMTYNCNKLDAALQRCGFRLSNYVSSTKSKSYQSVLRSIIEGRSSPDELVGLVHGRTLNKHGRSNIKASVTASFSRTDMTIFKQLKETIDLIERQIDECQKELTELCKEHFPKQYGRLQTIPGVKERAATAIIAETGVDMKMFATAACLVGWCGLKPRNDVSNGRFKSRKVTHGNRYLRQILIEIAWAASRSRNCFFSHFSYIQTTLKKKGKMKIQVAIARKILVAVWHMITKEEDFIDIYLKRLEELKSTKERIRQFESCMAK

SEQ ID NO: 175500 - protein, 371 aa, unidentified
MTEVVKYIGLDVHKETIAVGVADGERGGEVRYVGTVANEDDAVRKLIKRLTASDTTLSFCYEAGPRGYGLHRLLTKLGQNCIVIAPSMMPRRPGDHVKTDRRDAMTLARLLRAGELTAIWVPDEAHEAVRDLIRARRSAQDDAIGAKQTVRSFLLRHDRRFGGKAAWTKMYWRWLSEQRVDFPHQRLAFEEMQKRVLEALARVGRLEAALGEAVEAWRFAPLVRNLQALRGIRLVSAATLVAEVGDLTRFDNPKQLMAYVGLVPSEHSSGARTKRGRITRAGNAQARTMLVEAGWSYRLPAREERRYRERVGDLAEEIQAIGWKAQVRLCQRYRRLAAAGKPQPKVTTAIARELVGYAWDIARRVSPAMAG

SEQ ID NO: 175501 - protein, 338 aa, unidentified
MALYCGIDLHSRDSWLAILDEGLKVVQETKVGNDLEAILHVLKPYREDLEGVAVESTFNWYWLVDGLMDAGHCVHLTNTWAVKQYEGLKYTDDRHDARWLAHLLALGILPEGYIYPKEERSARDLLRRRAFLVRKRTSFILAMRGAFECRTGLRINSNDLKKWKAKDVEAHMEDPTEAFSITCLLEPMHALSAQIKKIEKGALARGRLRPEFAPLETVWGIGKILALTIMYEVGDVTRFRKVGNFTSYCRLVNTARLSAGKRKGSGNPRNGNPHLSWAFSEAAHHAVRHYPEAQKFYQRKRTKTNGIIAIRALAHKLARASYHVMRDHVDFDPEKTFA

SEQ ID NO: 175502 - protein, 309 aa, unidentified
MKQSVVYIGIDVAKAHLDVAWAGTFRRLPNERSGHAALVRWIRQSTTPVQLICEASGGYEQALLESLEKSEVKVTLVQAVPVRQYARAAGILAKTDRIDAKVLAAFGSAMQPQPTSPLSAEQKRLRQYEAQRRQLSRILVAEENRLAQLSCTELRTLSRSLISKIKTQIKTLDRGISDLIAQDQTLCVKAQKLTAISGVGVRTAALLLAQMPELGQLNRRQAAALAGLAPFNHDSGSVRGKRAIFGARPALRSGLYMAALSAARFNPILSSFYQPLRTKGKPHKLALTAVMRKLLLALNQTLKPLPCST

SEQ ID NO: 175503 - protein, 358 aa, unidentified
MRNLAAGCSTHPDCRFDRKLTSVCLHPSNLNLYLETYAMQMQPISLNIGVDVAKDEIVLACAEQSFAPRAIANRRVGLLAVLKSLPAGSRIGMEATGSYHELLATLAHKLGFLVYVLNPKDTHHYAKAVGQRGKTDRADAQLIARYIAHEHAKLHPWIVPSPEQHQLGRLLRRRAKLSNIQAALTQSLKGLAGFALDLKTLRARIDLTIARIDTKIRTLIKASAARQEAYARLQSIPSVGPVVGSGLLIHLERLPFRNADAFTAFTGLDPRPEDSGEHRGRRRLSKRGPSELRRLLYIAAMSARRTPAWKPIYEHHRAKGLSTTAALVILARRIARTAWSVYTYKTKFEPQRLTTGLT

SEQ ID NO: 175504 - protein, 342 aa, unidentified
MQIAVLGIDLGKNSCSVVGLDAAGRVVLRRRLRRDGVIKLAAGIAGCVMAMEACCGAHHLGRLLREHGHQVRLMSPEYVRPYVKAQKNDDRDAEAIAEAATRPTMRFVELKSEAQLDMQSLHRARDRLVGERTALINQLRAGLFERGIVVPKGRRKLEHYVDALLAEEEVRFSPRTRLLVADLRAEWRELDRRISAFDDEFAAQARTDETARLLTSIPGIGPVNATALTAAIGNAQTFTRGRDLAAWLGLVPKQVTTGGKPKLLRISKRGNGYLRKMLIHGARAALPVLSKAETPLGAWLRGLLARAHVNTVVVALAAKLARIAWAVIRSGKKFDMAAAMAS

SEQ ID NO: 175505 - protein, 371 aa, unidentified
MFHVGLDIHTKRISICALDEKGQVVHRSQVRSIQDLLRVLTDLPDRFQVCYEASCGYGHFHELLRPLATRVVVAHPGQLRLIFRSRNKNDRNDAERLAKLLYLGEAPAVHVPSADVRTWRELINCRSQVIAKRTRAKNAARALLRGAGVTPPKHPGLWTKEGLAWLRRLELPTASQQLRRDLLLEEMETLLRQVQRIERQLTQQAQRTPAVVRLRSIPGVGLRTAEAVAAFIDDPHRFPNAKAVGSYFGLVPCQDQSGDRNRLGHITRQGAPVVRQLVAEAAWQARRRSPTVRAYFERAQRDDPQRQKIALVATAHYLVRVMWALLKRGTDWQENPALAKAPGPASGGAPAAERGEGEREKERGERMSESA

SEQ ID NO: 175506 - protein, 343 aa, unidentified
MDHFAGLDVSVKETSVCIVDDTSTIVREVKVSSEPDALLAVLTNPAYQFKRIGLEAGPLSQWLFSALAEAGLPVICVETRHMRAALKAQINKTDRNDARGIAQMMRVGLYRPVHVKTLRSQKLRMLLTHRKLLQTKAIAIENDLRGTLRNFGLKVGVVGAVKFEARIKELVENLPDLAALIEPLLIVRRVLREQIGILHRRLLVVVRADDICRRLMTVPGVGPVVALTYRATVDVPARFRNSKALGAVFGLTPAKYQSGEINRTGAISKCGDEMMRVMLYEAAHIMLVRSTKWSWLKAWAMQIARRRGLKKAVVALARRLAVIMHRIWVDGTEFRWTREAATA

SEQ ID NO: 175507 - protein, 376 aa, unidentified
MNRNTGMNVGQIIGTMGGKQVIGLDIAKHVFQLHTVDMSTGEIVNVQIKRAKVLEHFANRQACLIAIEACGGAHHWARELRALGHTIRLLHAKIVRPFVSGNKTDATDARAIWLAVQQPGVKSVGIKTTEQQATLTLHRQRELMMKMRTMQTNALRGLLYEFGATFAKGRNALFKDVEAALDALSHSLPQMVADSLREQVLRIKAMSADMLAIEKRLGLQLKADKAMQRIAQIPGVGLLTATAAIATMGEASAFKSGREFCAWLGLVPKQTGTGGKVRLGGISKRGDTYLRTLLIHGARSVLSHAKEPGVWLEGLKARRPANEGNSGAGGQDGPNDLGRNGQRAGLPTRFQERQAASGVTVGRAHLSTNPNERIWF

SEQ ID NO: 175508 - protein, 368 aa, unidentified
MSFSVCCVQPEIFEEDKVFGHMKLKPEVRSVQRYIDKISDHLEKAGVSAHFIFGYEAGFSGYSLYHDMTAVGLECIILAPSTMKQRPKHAIKTDKRDAEHIAKCLAYGDYQPVYIPTADDEQVRDYLRMRNDHQQAWKKVKQQINAFCLRLGKHFTGGRNKWTELHLDWLHDLVLDPLHREILDEYLITYDLHVTRLAAFDERINELAALDCYRERVHQLSCFLGIKTYTGLSLLVETGDFTRFSRADCFASYLGLTPGEQSSGETIRRGGITKAGNKELRRLLVEAAQSIGRGRIGYKSKALKARQKGNDSKVIAYADRANERLRRKFYRMTKQGKKYNVAITAIARELACFIWGMMTNHLDVRQAG

SEQ ID NO: 175509 - protein, 338 aa, unidentified
MEYGAIDLHARKTLIRIVDAAGAVILDRTITTTRDGFVQVFQGRARMRVLLETGTESEWVAQAIEAEGHEVVVADPNYALMYGVTVRAVKTDRRDVAALAEACRLGIYRAAHRVSAPQRRIRRQLRVREQLIRMRTQAINLLRAQLRQEGYRLPTGSSRTTAARCRALPLTSPLRDDVAPVLDLLDGLAPLIHGCERAAAAQAGADPVVRRLMTAPGVGPVVGLTYRAVIDDVTRFRDASSSSAFLGLVPREDSSGTRRRKGGITKRGPTALRVLLIQAAWTIWRQRQGRGALHAWVERLVARRGRRIAVVALARRLARTLYAMWRDDCDYRPMPRPA

SEQ ID NO: 175510 - protein, 404 aa, unidentified
MDVTYDRCAGLDVHKKTVVACVMSPEGQETRTFNTMTQGLLEMADWLVQRQVTHVAMESSGVFWKPIYNLLEGLDLTLLVVNARHIKAVPGRKTDVKDAEWIADLLRHGLLRGSYIPDRSQRELREVVRYRRNLVGERARTINRIQQVLEGANIKLSSVATDIIGVSGRAMLEQLARGSEDAEAMAALAKGRMRHKRLELEQALRGLMGSHQRMLLQSQLRHLDFLGQEIAQLDDEVAARMGPFEEAIQQLDGVTGVGARTAQEVLAEIGLDMSRFPSAGHLSSWAHLCPGNHESAGKRKSGATGHGNRWLRSALVEAARSASRSKGTYLATQYHRLAARRGDKRAILAVAHTILVTIYHLLRDGTIFHDLGGNYFDQRDQQATLRRAVRRIERLGYKVALEAA

SEQ ID NO: 175511 - protein, 339 aa, unidentified
MFYVGLDVSMKRTAVCVVDAAGKVIRETSVSSTPEAVANAVRTCGVEVERVGLEAGVSSAWLARGLLAMGLPAIVIDATHAAAALKTGFRNKTDRNDARGIADLMRVNKFRAVWVKSPAAQRGRALLTVREQLRRQSLDARNTIWAILQGEGLSPPKLSSPAFGALVTQMLDDPEIGHLLQPLTTIVRQIDRQIAELDRAIAARAKASLACRRLMTVPGVGPLVALTYATGIDEPKRFHNARTVGAHFGLTPRRFQSGEMDWSGRISRAGDAAVRRALYQAANVLIHHSKGWCALKSWAVRLAKRRGLGKAKVALARKLAVVLHKMWTSDEDYRLKAAA

SEQ ID NO: 175512 - protein, 366 aa, unidentified
MGWMAPLRHRRAKLVFRRITRNREPSMSEITTIGLDLAKHVFQVHGIDAQGTTVLRKRLRRGQVLAFFSRLPRCVVGLEACATAHYWARELGALGHEVRLMPAQYVKAYIKRNKHDAADAEAICEAVGRPTMRFVPVKTAEQQATQLLHRGREQLVRQRTMLVNALRAHLAEFGMVAAQGLRNVGELIAIVRDDGDTRLPDVARQVLQVLSAQLEHIEAAIAALERQLLAWHKTNPVSQRLASIPGIGPIIATAIATTVADANVFRSGREFAAWLGLVPRQNSTGGKTRLGGITKRGNRYLRRLLINGASANLLRSKATKADPWVIGLRRRRPPLVVAVALANKTARIAWAVMLRQNEYQPRAVAA

SEQ ID NO: 175513 - protein, 327 aa, unidentified
MMSTKKMLTIISVDVAKDKLDIYIQATKAAQTIKNDVRTVGSWLKAVQKEFDIAKVVLEPTGGYEDKLLQQLDKNNINTFFIHPNKLFFFKKSKGEKAKTDYIDTVCMLDYALVHEDQLKPANKVHLAAKEIKELVRTRRQINKQMHSYRCYAEQKFYSKGAKQHNRKMIKMLKAELEKINIAIVEAIERDEEKKKNVELLKTITGIGDVTANTFVASVPELGNIDNNRLSSLIGVAPFNNDSGKNKGKRTIKGGRADVRAVLYMAALVAIKHSNRMKAVYDRIVAGGKAKKIAIVAVMRHLLRIMNAVVRDQTKYDPSNGLTAQKA

SEQ ID NO: 175514 - protein, 346 aa, unidentified
MLHAGLDLSRKRLDFHLLDAEGGTVEVGAAPPDADGLCGLTQRLDRYGSRICAAIESMNGARFVHDRLERAGWQVEIADAQKVKGLAPLACKTDRIDAWVLAELARRELVPAIWLPDPAVRAERERARWRLHLVRHRSSLKQRVHAVLLAHGRPCPVSDLFGVRGRRLLGRLRLPEPWQGTLEASLRLIDQLDREIGDCERELRRLGADHRYVTLLCTVPGIGWVLAYTIAAELGDIGRFPSPRKLAGYSGLCPRVYQSGESDRRGPLAKNGPRYLRWALVEAATHACTHPAYRERYQHTKARIGKQRGAKVAQIDLARRLTEAIWHMLTRNQPFAPKGATDPLAA

SEQ ID NO: 175515 - protein, 336 aa, unidentified
MLIIGCDYHPRFQKIAMLDTATGEIKVNRLEHENGEAKKFYASLPKGVLVGIEATGSTQWFERMVSECGHELWVGDPAEIRARRVRKQKTDERDALHLLDLLTTNRFPRVWVPSPADRDARQLLQHRQKLVGMRTSVKNQLHGLAMGQGLCRKQKLWSESGRKQLEALELGMWASRRRQELLTLLDELNPQIAELDQGVEAEAARRPEVARLRVQKGVGPVVGLAFVLTLGTVERFPRSRQLVSYLGLNPREESSGPHQYLGHISKQGNSMMRWLLVEAAQTAARLDPELGRVYKRLKYRRGANVAKVAVARRLAVKMYWILRQAPGAAPAGSHVR

SEQ ID NO: 175516 - protein, 367 aa, unidentified
MKKISTAAAKQSKNISQQKLTIGLDLGDRNSWYCVVDEAGQIRLEQRVRTTAKALQEVFGTMPCSRIALEIGTHSPWISRMLSDLGHEVIVANARKVRLIGESRKKDDRLDAQTLARLARIDSELLFPVKHRSAQAQADLTVIRARAGLVRARTGLVNSARGLAKSYGERLRGCNVRNMNPEKAESLSPELQSALEPLLNAIDSLSERIVEYNERIENLAQQDYPQVALLKQVKGVGTLIALTFLLTLEDPHRFGKSRDVGCYLGLQPGRRNSGRSEPQLHISKAGDPYLRTLLVQGAQHILGPFGIDCDLRRWGLRLAERGGKSGKKRAIVATARKLAVLLHHLWVSGEAYEPLHNSSRTAVAAAA

SEQ ID NO: 175517 - protein, 356 aa, unidentified
MSKGITTGGGVTVGLDLGDKYSDGCVLDASGEVVETFRVRTTEPALAKRLSAFEPCRVVMEVGTHSPWVSRLVTRLGHEGIVANPRRVRLIAENDSKSDGFDAELLARLGRVDPALLSPIVHRGEQAQRDLVLIRARDGLVRARSQLINQVRGFAKSLGTRLAASSAEAFPGRVRGVVPDALFPGLPTMLAMIEQLTAEVRVMDREVERLCRERYPETQVLRQVKGVGPITALCFVLTLEDPHRFRKSRSVGAYLGLRSRQRDSGEQRPQLRITKAGDALLRRLLVTAAHYILGPFGPDTELRRFGLQLAERGGKAGKKRAVVAVARRLAVLLHRLWVTGEAYQPLGYDASVPKAA

SEQ ID NO: 175518 - protein, 338 aa, unidentified
MYYTGIDLHKKTSFITTIDQNGKVIFRRNFPNVEELILDYFRNLDGPTKIVIESMCSWYWLYDLLSANNFTTVISNPLKTKAIASAKIKNDKVDSHMLAQLLRADMIATVHVCNIKTRKLKELIRHRRRLVQDSARMKNRIHMLLMKNNINIPVSDLFGKRGMKLLKEVSLPAYHQQQFNSYLALLRYLTEQIEPLTEQIRDLAKKDPMARLLMSIPGIGFLTAMTIIAEIEDIGRFPSYRNLASYAGLVPSLDASADKCRTGRITKQGSPYLRAALVEAAQAIPRTKQSRLNIFFRKRIVRAGYRKAIVATAHKILQYVYYVLKNQVFYSEEYLARA

SEQ ID NO: 175519 - protein, 447 aa, unidentified
MRIVYQRCCGMDVHKDSITACLLLIDEVGEFRTESRRFGTMTRHLKEMAAWLASEGVQAIAMEATGVYWKPIWNILEAEKKFELLLVNAQQVKQVPGRKTDQKDSEWIAELLQHGLLRASFVPPVEIRHLRDLTRMRARIRQTLASFANRIQKVLEDANIKLGSVASDVLGVSGRHMLKALMAGEQDPQRLANLAQGHLRKKIEPLQLALQGHFTDHHRLQLKLLLEFVEFGEQQLNHLDSEIQLLLNKVHAEPDLPGPAEGTVAEAEASPPQPTSPLQTAVELWDSIPGIDQLAATTLVAEIGANMDQFPSAHDLASWAGLCPGNNESAGKRRSGKTRKGSVWLRRALCQAAWSASRTKNTYLAAQYRHLIVRKGKKRTIVAVAHSMLIIAYYLLKRQCTYQDLGPDYFNLRNEDAITHRLVKKLTGLGYHVTLEPARAEAGSETA

SEQ ID NO: 175520 - protein, 331 aa, unidentified
MVYAGIDVHRKRSQVSLIDVDGRELLNRNVDNGSEAMLDILEDLEPGTPVAFEAAYGWGWLADLLEERELEAHLVHPSACKAIASARLKNDKVDARMLAHLLRTELLPEAWIAPKEVRDLRVLLRHRASLVRVRTSLKNRIHAVLADEGLKVEGEKLWSDEGQQWLAGVSVRDMHRLVIDDCCGMLDALAIPIGRLETDIRKQAKTDPRVEALCVLPGVGLITAMTLVSEIGDINRFPTARKLCAWAGLTPSVRNSDNKVRHGHITKAGPAAVRWVLTEAGYHARRFPPFNSTFEAMTKRRGKHIAGVALSRKLLARSFHILKSLEAAKTQ

SEQ ID NO: 175521 - protein, 317 aa, unidentified
MDAKTEADRFIGIDVSKARADVHVRPDGTAFYCTTDPDGLAELVGRLMPLRPRLVVLEASGGYEGVVAAALTEAGLPVAIVNPRQVRKFAGAIGRLAKTDAIDAAVIAHFAQAVHPAARPMPDDLALRLAELMARRRQLVIMINAEKQRLARARDQITQRSLRAVLKSLEAERARIDKAIDKLIEASPVWCAKQDLLKSVPGIGNVVARTLIAELPELGQVGRHQIAALAGVAPMNRDSGRYRGKRKIQAGRVEVRAPLYMACLVAIRHNPTLKRFYRRLRDAGKPARLALVAAMRKLLTILNAILRDRKPWASAQS

SEQ ID NO: 175522 - protein, 413 aa, unidentified
MAYWGSDRLPGKVRGLPPPSILELTINVTADQPEPPTAIRTDLGAIFVSLELSRSSWLITSLSPGGGEKMSKHTVRGGDVSGLLQRFAQLREKARVRTGKVFPLIVIQEAGLDGFWIDRVLQNEEVESPVVDPASIATSRRRRRAKTDKIDGETLIRSLLAYKRGEPRVCSMVKAPTPEEEDRRRLCRERKVLTAERVLHVNRIKGLLFCQGIFGYEPLRRDRRERLEELQTGDGRPLPPHLKAQVDRELDRLELLLKQIKTVEGERDALLAAGQTAMPAPAAMLLDIKGIGSEFAAVLWSEGLFRHFDNRRQLAAYAGLAPTPWQSGAVDREQGVSKAGNPRLRTTLIQLAWLWLRNQPQSALTIWFHERVRRNAGRLRKTTIVALARKLLVALWKYVTTGVVIEGATMKAA

SEQ ID NO: 175523 - protein, 353 aa, unidentified
MNSLTDLREVVDVVIGVDTHVHTHSAAVLDSATGGVLGEITVAATAEGYCELVEFANNHPMLRAWAIEGTGGHGAGLSRHLLEMSEIVIELDRPKRAARRNGAKSDPLDAIRAAREAMARPRLGTPRTGGERQALSVLLAARRSAINASTEAQQQVFSLVIAAPEPIRVRFRGQKLAAMLNTAANLRVHASWDTETTSTVVALRTLARRAHAMLKEARELQKAIVAIIRSWRPDLLEEFGVGPIVAATVLCAWSHPGRIHSEAAFAMLAGVAPIPANSGQVTTRYRLNRYGDRQLNNALHTVVQSRIQYQPATRDYVARRTAEGKTSREIKRCLARYVARDLYRLLENTATAA

SEQ ID NO: 175524 - protein, 334 aa, unidentified
MDVHKRSYHIALLRADGRSLTLVSPASPQNVIQLINRLAIRVAAAAYESGPTGFSLARELEAAGIPVIVAAPSRVPRAVTAGAKTDRLDCLKLASYAAKGLIHSIAIPMPEEEAHRSLLRRRHDVAASVRRCKQHIKSLLLFLGIEEPMAVENWSQDADEVLHALPMETSAKLTLESHLRELMFHRQELKEVDRQLHLFTKQQVHRKTIACLESVPGVGQVLATTFLCELFRPQRFARAEEVGSYLGLAPMVRHSGEKTPSGRLMPVGQTKLRSLLVEAAWMWRARDDYARNLYNQFLSRMGIAQKAITALARKLAIILWRLCIEQRPYRLAST

SEQ ID NO: 175525 - protein, 408 aa, unidentified
MNAVGIDVSKGKSMVAALRPMGEVALLPQEFLHTEVGLEQMAYAIIALGEDTRVIMEATGRYHEPVAAALHEYGIYVCVLNPLFIKQSGGGSIRKVKTDKADAMKIAKYGLDNWVDLREYTPMDTVRQQLKLCSRQYNLYMKTVVSLQNNLISLTDKTFPGVNELFSSPERADGHQKWVDFVITFWHCDCICYVSAKAFTERYQKWCKRKGYHFSAEKALDIHAGSCDHFTTLPKNDNTKLLISTAAQQLLAGKVTLAALRAEMTRLSKQLPEYDTVRAMYGVGETTAAQLVAEIGDVRRFPRRSSIIGFAGVDPGIDESGKHSAKSVPTTKRGSPHLRKTLYQIVCTYLRKAPTDEPVYQFLDKKRSEGKPYFVYMTAAQNKFLRIYYARVKECLEAFDTQQSSTQS

SEQ ID NO: 175526 - protein, 313 aa, unidentified
MSDSFVGIDISKDSLDVHVLPGDFRKTYPYEKQAVKALIKQLKQIAPQLIVMEATGGYETSIAVQLADAGLNAAIVNPRQIRDYARAIGKLAKTDTIDAYVIARFAQDVKPEVRIQITVKERELKDLVARRQQLIDMRTAEKNRLSRAHTPQVIKGIRKIILTLNAQIKAIDKELKNEIKNNPAWDTKLALITSVPGIGPTTAQVLLFCLPELGTLNRQQIAALVGVAPLNRDSGSMRGKRTIAGGRAQVRKALHMPILSAVTQWNPRLIAFYNRLIANGKKHKTALTACMRKLLVILNTMVKNNSAYRLDFC

SEQ ID NO: 175527 - protein, 446 aa, unidentified
MGKTAKGKSVKLPQHLQHINLHAAGIDIGSRSHFVAVPEGSSEQTVREFASFTDDLLAMADWLISCGVTTVAMESTGIYWIPVFEILESKGLEVKLVNARHVKNVPGRKSDVLDCQWLQRLHTYGLLEGAFRPPEQICTLRGYVRQRMNLVRYAASHIQHMQKALAQMNLQLANVVSTITGKTGMRIIKAILGGERDPQVLAGLRDQRCKNSEETIARSLHGHYRPEHLFSLKQAVDLYIFYQGQIAECDQEILSQLATFDAGSGSDNSPPASLDEALQQMTGVDLTAIDGIDTNSGLRIIAEIGLDMSRWKSARHFASWLGLCPGTKVSGGKILSGRSKRVANRAAATLRMAAFTLFRSKSALGAYLRRQRSRLGAPKAITATAHKMARLVYAMLKHGTAYVDAGQDYYEDRYRSRVVQNLRRKAQEFGYKLVDISRPQPKIAHT

SEQ ID NO: 175528 - protein, 330 aa, unidentified
MSQTFKTAIAVVGIDIGKNSFHVVGLDARGAIVLRQKWLRGQVEVRLANLPPCLVGMEACVGAHHLSRKLKELGHDARLMPARYVRPYSKGQKNDFRDAEAIAEAVQRPTMKFVATKTADQLDLQALHRVRERLVSQRTGIINQIRAFLLERGVAVRQGLRFLRAELPRILATPPDVLSPRMVRVIEGLAGDWRRLDERIEGLSSEIEAVARQDTACERLMSVPGIGPIISSAMVAAIGTGDVFSKGRDFAAWLGLVPRQISTGDRTILGKISKRGNRYLRVLFVQAAWVVLIKPKSWERHGLKPWIEAAKKRLHRNVLAIAILSQTSAG

SEQ ID NO: 175529 - protein, 349 aa, unidentified
MIVGIDVHKHTHAAALIDAQGRKLGALTLSNSPAGYRALIDWLVDHDASDAVIGVESPGSYGRCLVAALVAAGFDVLQVPAWRTHRERHRRGPGKTDPGDALSIAHVVLIARDELGPAEEPEVVRALAMLELQRRRFVRDRTQAIQRLRADWTQHDPVAEAGTLRCDRQRELRKLKRLTLGDSLAQRVAARCIRELAADIDDLNHRIHALDIEIADLLADYGNPLEDLHGAGTNLTATIIAQAGDVRRFRDASAFARFCGAAPIPAGSGQTSGRHRLHRGGNRQLNAALYRIAIVQQRHHPQAKTYLAKKIAEGKTPREARRSLKRHLANVLYRRLLAWSETTLPPQKT

SEQ ID NO: 175530 - protein, 301 aa, unidentified
MFFGIDVSKNSVDVASSCRILSMNRANPEQAAEKIASYESPHLVVVEATGGYERPIVEALRRKNIPVSIVNPRRIHHFAEALGQPAKTDSLDAVVIAKFAQVMTPSPTPEPDPTTQKLKDLMTRRAQINGLLTAERNRLKQAHDDDIINSVEQIIAVLMVQLKDLTKKAETLVGNRPVTKALKEIKGVGSICAAGILAFLPELGTYNRKQIAALAGVAPFTRQSGQWVGKSFCSGGRSQVRAFLYMAALVASRHNPDIKAFYTRLRTSGKPAKLALTACMRKLLTHLNSIARNFITTPKSS

SEQ ID NO: 175531 - protein, 413 aa, unidentified
MKRIRDRVAGLDVHRDTVMAATWVLDRASGEIVEDQAQFSTMTAGVVELGRWLLEHGVTTVGMEATGDYWKPVYYGLEGMFDDLSVYNAQHVKNVPGRKTDLSDAMWLADVIAHGMVRASFVPPEPIRELRDLSRYRKTQIDMRAKEIQRLDKVLQDACVKLTSVAATVWSKSSRRMIEALIAGERDPHVLAEMALGKMRPKIAELAKALACNWRPHHSLLARGIIAHIDHLDAAIDKLSAEIGQRCDPFGELIERMCEVPGISRAIAEVVIAETGADTAAFATPQQLCAWAGVAPGNRESAGKRRPVRSRKGQRWLRRALIEAAKSLARNHDSFLGARYRRVARRRGGNKAAVAVAHSILVILWHLMADPTQRYVDLGADYYQKRQDPEREAQRLVAKLATLGYTATLQPAA

SEQ ID NO: 175532 - protein, 347 aa, unidentified
MKRIAVDLAKSVYQVAESVHVGRVDRRRRLDSGAFARYVQEQTEPVEWVMEACGTAHHWGRLMQERGHRVVLLHPRYVRPYRRRNKTDRNDCDAILEAARCQEIRPVPVKSVQQQHVQQLHKLREGWKKSRVQRINLLRGILREAGVEAPSGIKSFMRQACELIERPEVRALRGALQVVLAEISLYEQSMRECEEQLARWHADDEIVHKLDEVSGIGLLTASAFKTAVGKPERFASGRHLSAWLGMTPNEYSSGERRRLGRISCKGNVYVRTLLIHGARAALLAAKRCKARTPERLTQLQSWALQNAERIGHNKAAVALANKLVRICWAVWCHERRFSGNWHSTKPA

SEQ ID NO: 175533 - protein, 410 aa, unidentified
MLFVGDDWAEAHHDIEIQDETGRRLVRRRLPEGVAGMAELHGLIADHLGDGDEPAVVVVGIETDRGPWVGALVAAGYQVYAINPLSAARYRERHVTSRAKSDAGDAKVLADLVRTDRANHRPVAGDSELAEAVKVLARTHQNLIWSRQRQANLLRSSLREFYPAALVAFGGELAGRDALAVLEIAPTPTKGRGLSTARIVSALRRAGRQRYLDTRAGEIRDALRSEQLQAAPLVADAYGHTVTALVAVLATLATQIEQVEGELGSCFDQHPDAKILLSQPGLGPVLAARVLAEFGDDPTRYTDAKARKNYAGTAPITRASGTRRIVLARVATNKRLRDALYLQAFTALNASPGARAYYDAHRARGATHHQALRTLANRLVGILHGCLRHHTPYDEATAWPSQTTDQKIAA

SEQ ID NO: 175534 - protein, 304 aa, unidentified
MNGIGIDVSKRQLDVGTTDGKTLQVSNSRSGFAELDLWLQGHPAVQIVLEATGGYEQPVLDFLHNAGHPVVRANALRARKLAQGLGHMAKTDRLDAYALAKMAALVKLRSYQPLEPWQREMRDFVRARRQAMHALTVARQQQEMVGNRELRRLLQANITCLQRTVERLGKRISEQVSKQPQLAVLKSMKGVGPGLQAVLASYLPELGKISGKAVASLVGVAPMSHDSGTMRGKRSIHGGRAEIRQVLYMASMSAMRHEPRLRDFYQSLRARGKEGKVAIVAVMRKMLVILNARMRDAQGGSIPA

SEQ ID NO: 175535 - protein, 342 aa, unidentified
MQISTIGFDLAKHVFQAHGVDIHEKVVVKKQLRRAQVIAFFEKLPPCLIGMEACASAHYWARELTKLGHKVKLMPAKDVKAYVKRSKNDAADAAAICEAVARPTVRTVPMKTPDQQARLMQHRTRDLLVRQRTQLSNAMRAHLAELGLIAAQGREGLKSLLAIVANENDDRLPADARASLGVLAAQILACNAQIATLEKRIHTQHRTCEASQRLETIPGIGVIGATAIAATVPDPSVFKTGRDFAAWIGLVPRQDSTGGKQKLGPVSKQGDRYLRRILVVGAHAVLKHARTHPEKHPWLMQLLARRPAKLVAVALANKMARIAWAVLARGETYRAPRIAATV

SEQ ID NO: 175536 - protein, 339 aa, unidentified
MNHTAVGVDIAKSVFQVYWVDPHTGEVVNKAVKRDRFLVSFANREPCLIGMEACGGAQHWARQLTKMGHQVKLMPPKFVKAFNIGNKNDPADARAIWMATQIPSKPVAVKTEAQQAVLALHRMRQQLVKFRTMQINSLRGLLAEYGEVMARSREALDKAIPEILAKLSDRLPAMLIDTLREQWNGLTGLDRQIAGIEQRLQAWMKDDVACQTIAAIPGVGLLSATAAVATMGDATAFRSGREFAAWLGLVPKQTGSGGKVQLLGISKRGDTYVRTLLIHGARSVLRHPDKAGAWVEQLGKRRPFNVVIVALANKIARTIWALLAHDRQYGREYMSSKPL

SEQ ID NO: 175537 - protein, 448 aa, unidentified
MSERTIACEAPCISMTPDGTAVRATKGKHMKPWTEITHYAGFDWARNHHDVVIVDRTGHRVADLRFDHSLAGWQQFREHIKNHPALAVALETSQGAAVDQLLQLDCTVYPVNPFSAKSYRERKVPSGNKTDQLDAWSLAEALRVDGQNWRPLHRLDPLTQQIQMLCRDEIALIEQRTALVNQLQQALCEYYPAALQAFDDWTQPFCWDFIVQFPTSAKLVAGGRRHWEKFLHTHKLWRPQTADTRLEIFQQADQFCGSAAVTAAKSWLALSLVRVLQALHRQLEGYRQQIEALFKQHPDHDLFGSLPGVAQTLAPRLLGEVGGDAQRCPDTAALQCLAGTAPVSFQSGQIHRVHVRHQCHKVLRHTVHLWAQCSLRVCPWAETYYRQKRVEGKSHACALRCLGQRLLKIPGRMLQTRKPYDADLHARNQKQHGSWVLTLMKPALKTGE

SEQ ID NO: 175538 - protein, 395 aa, unidentified
MDVMHPVCCGIDVHQKSIVCCILDGPLTSNEPKKYQTTFGTTTKELNAALDWLLEHQVTHVFFESTGQYWIPLFNIFSDSDLELVLANPQHIKNVPGRKTDVKDAEWIAQLGRCGLINQSYIPSQEVLQLRYLTRYRLSVKQRLTQIKNHIHVILQRANIKITSYLADIFCKTGQALLTLFINGEVINEDNVESCIHGRIKASTRQLIEAMEGKLSTVDRFLIKECMEEYKLQKKISDELNKEINEYILNHFPEEYQLLLTIPGISDNCCATILAEIGPNVDAFKTDKNLASWAGMCPGSNESAGVKKSSHTTQGNKYLKQALVMSVLSVQRAKEKTFSLFYQRISSRGSKMKAIIACGHKMLRIIYKILQSHQPYNSQKALGLRQQTNALSLTI

SEQ ID NO: 175539 - protein, 428 aa, unidentified
MTQSINSTEYEVLVAIDVAKARNDVLVQLPDGSKKKFKVANKLDDYQAFVSYLKSLKSPCLIGFEATGNYHRPLAYYLGKEGFALRLVSSIAAARTREALYNSWDKNDPKDAQVILHMLRTGVSQIYCDPTIHSINEIQELSKTYYQVSLRKVKVQHSMMTHYLPLYFPEAQKYFVSSRAEWFSSFMLRFPVPASVLKYTKEEFLSVAWDTTGRKVSKAAWITDFYEAASHSIGLPVEEGSEAVRMFRIILQDHIDLCKMRQQIEQQADQYMGNNEDYRRLQTIPGIGPITALSILAEAGDIRRFSHYKKFLKYCGLNLSTEQSGRFRGISKLSKRGNSRLRLAFWLAATVAIRMRENTFRQKYETYIRTDPANKDLKRKAYTAVAAKMARVVYSVIKSKTDYRCFHESAIPSGKIPSSRAVEAILTS

SEQ ID NO: 175540 - protein, 414 aa, unidentified
MPYTVAGIDIHKKVLMVVVAIAGDEVADPAGEALEFECRRTGAAEREHLVSWLRERHVTEVVMESTAQYWKPVWLDLEPHFAKLHLAQAHSNRAPRGRKNDFRDAKRLTRRLLADELILSFVPDAEQRSWRTVTRGRHQLICDRVRLQNQLEALLEEGRIKLSSVISNLLGLSGRRIIQAMADGETDPDRLAELGDDRLRCRKQELADALNGSLEPVHRQMLGLYMERLHLLDQQIDKLDWMTATALKQHQDAVIRVAEIPGFGVDSSQQLIAEMGVDAEAFPSPGQFVSWVGVCPGSDVSAEENHSSRSAKGNRFVRRILTQAAQAAVKKKGSHFQSLFRRFLPRLHYNGAIWAIAHRLGRLVWKILHDRVRYVEQGQQTNPSANKRRAQKMVHALRKLGYAVSLTPLAPPLG

SEQ ID NO: 175541 - protein, 349 aa, unidentified
MYAGVDTHKDTLAVAVIDHAGRVLRQLELPNQDSGYARLLALLTSHNVARVGVEGSGNFGWPAAIYLLERGVSVVEVPPLMTSRERLSRPGQGKTDPVDAIAIARITAREDALPPVRPMTGQAADLRVLTDYRDQLVNERTATANRVHTDLLWLRPGYQHQLPHLTNMAHLHAALKLLDGDDSIRAAVTRARLDRMLTLTEQLAELRIQIDALVKTNGSTLHEIYGVGPVVAATIIGHVVDVRRYPTRHHFATANGTAPIPASSGRTVRHRLNRGGNRQLNRAIYTIAITQIRAETEGRAYYQRKRAEGKTSREALRCLKRRLSDLIYRTLRADLANAAQQTPTLSIAA

SEQ ID NO: 175542 - protein, 466 aa, unidentified
MENNYILYVGMDASKGKADAAILKVSDRRSVKPKFLRKKLSFKFVKSEVSSFLETVRSYSDDNCTSICFALEVTGIYSTNVYNFIKANLNDNESIRFLNTDFVNQWRKAHNIAKSDPLDAQTISTIIGTDADVQYVNDNVFENKNGYQDLKALVHRHYQIKKIYSQEINRLIAQCDCLFPELQYVFEPKSAAFIAVLSSYPTTHDIINASKFEVFSVVYEATKHRCSMDKIDKLFDLCWDTLVPDDISSYGRNIILDLVENIKNIKGQLKTIQRYIEDVVSLNPAYKLLLTMTGCGPITAATVIAETGDISRFKNADCFVSYSGASPRNKRSGTSVETMGKISKKGSRYLRHAIYMIAEFARRHNPVLKHQFERIKNGNKKRHKLANIAIANKIARYIYSIMKNKSSFVILHEHIMRLPEETRDTFFNSISLDFPKNTRKQIYQYSDINGEVHKFVYIKSEDTMIV

SEQ ID NO: 175543 - protein, 346 aa, unidentified
MNQITTVAADLAKDLIVVCAADAAGRTLFFKQFGFRGFAEWAANLSPCTVAMEACSSAHFWARTLMALGHCPKLLAPDFVKPFRKSQAAKNDRNDAQAILIAALQPDMRFVSVKSVEQQSILAVHRMREGWKVERTALINRVRGLLAEFGIWLGRSPQNLTRSLPRLIQDEELPARMRGLLGHAQQHLQQLEALMEQGERDICEHARESEAAQRLCALKGIGPITASALVVSVGDARDFRNGRQMAAWMGLVPKQSSSGGKDRLGKITKRGDTYLRGLLTQGARSALNAALARAPDKRSRLEHWVVALRHRVGYHKSLVAIANKHARICWAMLARHESYDPAATAA

SEQ ID NO: 175544 - protein, 338 aa, unidentified
MQTYAGIDLHSSNCYLAVIDEQQRRLYSKRLPNSLDHILTALQPFKEGLSGVVVESTYNWYWLVDGLQEQGYRMHLANPSAIRQYEGLKHTDDKWDAFWLAQLLMLGILPQGYIYPKAERPTRDLLRRRLLFVRHRTAHILSLQSMLDRCGGRRLSANKIQQLSPSDAEALFLDTQLGFTARCQVEAIGFLTQQIRSIEKAILPKVKLRPEFVILLTIPGIGKILALTIMLEVGDIGRFAKAGNYASYCRCVKSQKISNAKKKGEGNRKNGNRYLSWAYVEAANYAVRYSPRANTFHQRKCAKTKKVVAIKALANKLARASFYILRDQSAFDEKRLYG

SEQ ID NO: 175545 - protein, 422 aa, unidentified
MNYLSDNSFTAYVGIDWADSKHDICVQAAGGQQREFDCISHQVDQIDQWAQSIHERFGGVIAVALELSKGPIVYALQKYDFFVIYPVNPSTLAKYREAFTPSRAKDDPTDAELALDLLIRHPERFTPLNPQSVEMRTLACLVEQRRNLVNDKTRITNRLRSALKQYYPQMLEWFEHLDTVLVCDFITRWPTLTQVKRARKNTLVKFFHEHNMRFSHVLDVRLKSIKAATPLTLDAAVVMPYSLQALVLTDLLRASLQAIRRYDDEIAALAPKHPDYGLFSALPGAGPSLAPRLLVAFGEQRERFASAAALQKYAGIAPVTERSGKKHWVHWRWQCPTFLRQTFVEWAAQTINKSYWAGAYYRQQRDKGCTYQAAVRALAFKWIRILYRCWQTKTPYNESVYLKALKRRGSPLLNPSTAVKMT

SEQ ID NO: 175546 - protein, 359 aa, unidentified
MNTRLSKKQMFFNKVKLTKDDDLYIGIDVHKESYGVALWLNDTPAIDFIMPADNEKLLKLLEKVRIALKRIVYEAGPTGYTLARTLQKANLPTTVVAPSKTPRQSARDSKTDQLDAKTLARYAAKGLLRPIAIPTMRQEADRQLTRTRDQLVSKQSEVKLQIKSFLLQHGIEQPPAVRAWSANAARALGALKLSKQLRFCLDLLVQELQFLQSQLTTMEEQLKQTFDNDRHARQVALLKTHPGVGPVIARQYTAEIFNPKRFKHTTEVAKYVGLAPTIIQSGQSLRDGPVSKTGRPRFRSNLIQGAWVWVTKDPKAHITFLRILHNTGSKNKAITAMARRLAVHLWKMLCDNKPFTNIA

SEQ ID NO: 175547 - protein, 322 aa, unidentified
MSMAVLGIDIAKQKFDVALLLEGKTKHKACKNSAEGFETLRLWLEKQGIQKVHACLEATGNYGEDLAIYLHEAGHIVSIVNPARIKGFGQSELIRTKTDKIDAALIARFCLAMTPGPWSPPSSEIRALRALVRRVDSLVDMRSQEKNRISTAHESVYLLIKEHIAYLDQEIKKIRQQIADLIGQNPDLKQKKDLLDSIPALGKVTIPAILAELDDLNKFNHVSELVAFIGLAPKETLSGSSIKGKPRLCKIGHARLRKALYMPALVSIQCNPVMIAFYNRLKDKGKNGKVIVCAIMRKLVHVIFGVLKSGKKYDPNFKPIAA

SEQ ID NO: 175548 - protein, 368 aa, unidentified
MLPPRTAQRMSGGLGCTRSTSPCHKTAATVAHTIGIDTGKNTLHLIGLDDKGAIVLREKIARGRITARLANVPGCLIGIEAGMATHYVARELSALGHNVKQVPPAYAKPFRQGHKNDFRDAHAIAEAVQRPSTRCVPVKTDDQLDLQALHRVRSRLVGQRTAVINQIRGFLLEHGIAVRQGLRFLRQQLPDILAKRSDVLSPRMIRIMEDLSGDWRRLDERIEHVTEEIEVLAHGSEGCRQLMTVPGIGPLIASAMVAAIGNGAAFAKGRDFAAWLGLVPKQMSTGDRTILGRISKRGNRYLRTMIMQGARVILLRPANWAKHSFGPWLTAAANRLHHNVLATALANKLARIAWTVLMQARSYEARVN

SEQ ID NO: 175549 - protein, 311 aa, unidentified
MNNTIGIDISKDTLDAHRLADGQHKQFLNGKTGHAQLVKWIGKQSDPLIIFEATGAYHRQLERVLCTHIIPFVKVNPKQARRFAQASGKLAKTDRVDCEMLAKMGAALQLVPKPFTTENLYDLKELLSARRALIKDRTAAKARKATVINALIKQQLEKRLRQIKNDIAKIDALMLDVAREDQYMSERLDILFSIPGIGVITALMILVDMPEIGALNNKQVASLAGLAPMSQSSGKWIGKARIQGGRPNLRNAIFMPALVAIRHNADLKTKYDRLVTAGKEKKVAITAVMRKLLVLANALLRDNRKWAEKAA

SEQ ID NO: 175550 - protein, 394 aa, unidentified
MKLVGIDVGKNSHHFCVMDKETGEFNVTPSSFSNNKEGFDFLINSLKPYSKKSILLGMEDTGHYHVALLKFLLSNGYTVALINPKTTDLTRKMEGSITKNDKLDTITICDVLDTPERKKQYRITKVDRFDLYEQRQLTRHHHNLKEELNVYCNRLQKSIDLVFPEFNTLFSSKYSIVYMNLLKTFGSAEAIASTDIRTIRKCFEIKGRGNRISLTPEKLKECAKNSIGISSEVETIQIKHLVSQITLIKEQIAEIDKKIEEFSITNNSPILSIPGISHFSGTSILAELGDIGNYSKPSQIIKFAGVAPYHYESSQYNAQHTGITKKGSKYLRKTLYQIILPVINNNPVFKKYYLLKISQGKGHRCAQGHCIRKLLRIIYHLLETGQSFDPALLR

SEQ ID NO: 175551 - protein, 418 aa, unidentified
MNREQNARVSEKRYVGLDVHKHYITVGGMNGQQEIVLRPRDVEMERFKTWAESNLRKTDEVVLEATTNTWDVYDTIAPLVKRVVVAHPAEVKQIANSRVKTDHQDVIRLIRLLIADIVPEVWVPPVEVRELRALISYRWRLVKMSTAIQNRMHSLLHRHNIQAPQGKIDTGENREWWQKLKLSELENLRLKQEIKTLRLIRENIVEVERELGRLSNSERWGDQAVYLMQIPGVGIIVTMTILSAIGDIRRFESPKKLVGYAGLGAGVHDSGQKHRGKGITKFGRKELRWALVEAAWQAIRSNPRWRAEYEALCKRKHQNQAIVVIAHKLLVTIWYLLNKQETYHHSNEEDLAYKMLTWAWHMDKSALNGMTNQQFAKYGLIRLGKGEELTRIVRGGLPRRIASKEEVLVLKPELCLKQ

SEQ ID NO: 175552 - protein, 461 aa, unidentified
MVRSRKGHAAQRSVAPGPLPQLTANAAGIDVGGTSHFVVVPPDRDGTPVREFRTFTGDLYRLAEWLTACGIETVAMESTGVYWIPLFQVLEARGFTVKLVDAHQLKQAPGRKSDVLDCQWLQQLHSFGLLAGAFRPDDQLCVLRSYLRQRAMLATYAGQHGQHMQKALVQMNLQLQVVLEDITGATGRKIIRAVLAGERDPHTRAALRDGRCKHSAATIAAALQGDWRAEHLFALEQAVELVEQYQAKIAACDARIQAHLQQFPDRGTGEPPAPGPQPRADRHDLRFDATAELYRVSGVDLTAVPGLQAHTVLKVLSEIGLDMTRWPSAKPVGSWLGLAPNNRISGGKILSRRTKPTANRAAAARRVAAQSLHRSKSALGAFLRRKAAHLGMPKAITATAYTLARSIYSLLSSGHAYVEPGQDAYELAHKHRAVRSLSKRARDLGFDLVKRDPVQPLAAPA

SEQ ID NO: 175553 - protein, 443 aa, unidentified
MNTSHPYDLVIGLDRSDRKADLHLIDTRTGQHRSATIDTAPEALWEWLLELRQQHPLARVALCLEQPAVHLIAFLEAYEWICLYPINPLSLQKFREAFVTSRAKDDAKDALYLAELLLTHHDKLKSWAPEDSQTRAVQQPVFHRRAVVDERTGLTNRLQALLKQYFPQALVLCGEDLWRPLATHFLLKWPSLQAVQKTKPATLKQFYYLNGSRSAKLLEQRLALVTKAVPVTDETGLIQSLVLRVQLICRQLQLVQQTLHQYEKQIAQSFTQHPDHPVFASFPGAGPVLGPRLLSSLGSQRERFEDATNLQRYTGVAPVTKQSGGKCHIHRRYLCPKFHRQSFHEYAKISVLWSRWAAAYYLQQRTKGSHHHTAVRALAFKWQRIIWRCWQDHRPYEEKIYEAALRKANSPLVGLLDKIQLGKSPFKAPAKKNEKNLAGSPQR

SEQ ID NO: 175554 - protein, 355 aa, unidentified
MPSLTDLREVVDVIIGVDTHVHTHSAAIVEAGTGGVLDEITVEATADGYARLVEFADEHAVLRAWAIEGTGGHGAGLARHLASREEIVVELDRPERAHRRNGAKSDPLDAVRAAREALSRARLGTPRGGGDRQALSVLLAARRSAVQASTDAQRQVFSLVIAAPEQIRDRFRGHKLPAMILIASRLRVQAGWDVETLSTVTALRSLARRAQALTQEAAEHEKAILAIVRSWRPDLLAQPGVGPIVAATVLCAWSHPGRIHSEAAFAMLAGVAPIPANSGQVTTRHRLNRYGDRQLNRALHTIVLSRIRHHDNTREYVTRRTTEGKTPREIKRCLKRYVARDIYRLLEHHPDQANA

SEQ ID NO: 175555 - protein, 318 aa, unidentified
MNIIGLDISKDTIDATLHKTNGSIHYIKFKNNDDGLKQFRLWIKGNRIRKAYIGMEATGIYYEKAADMLSSYYTVYVINPLKIKDYGKSRFNRTKTDKADSNLIADYIKRHQDTLIPYQIPKNKALQKLINLKNQLQQQQKQIKNRLHSTEEDFIRNIHQDLIDTIQDKMEQVKIAISEQIKKQTDYNHYRNLQTIPSIGKDTASVLYAQLTEKHFKTANQFVSYAGLSPAIIQSGTSVRGRGRLSRYGNRRLKSTLYMPALCAYRFNAFPKLINNLKKAGKPKMVIIVAIMRKLAKLAYYIVKTGQPYDAERHRLNQ

SEQ ID NO: 175556 - protein, 338 aa, unidentified
MEYFAGIDLHSSNSYIAIIDNDNKRVFKKKVNNDLQNIVHVLEPHRKQIKGIVVESTYNWYWLVDGLMEKSYKVHLANPSAIKQYEGLKHSDDVTDAFHLANLLRLGILPEGYIYPKEERPVRDLLRKRLQLVQQRTALILSFENLLARNLGRRLKVDEIKKLTEVDVEDIFQQEHLVQSGKASIATINFLGVRITQIEKTLHKSAKLKSEYKKLMTVPGIWKILALTIMYETGPIKRFVKVGNYTSYCRCVGSKRISNGKQKGKGNRKNGNKHLSRAYVEAANHARWNYEYVDRYYQRKMARTNNVVAIKAIAHKLARACYCIIRDQKAFDKGKLFA

SEQ ID NO: 175557 - protein, 408 aa, unidentified
MKTLHRRCAGLDVHKKEVVACLRLVIRGKATYEVRRFTTTTRGLIELADWLEQAGCTHVAMEATGVYWKPVWHILEGRFQQILANAAHIKGVPGRKSDMNDATWIADLLAHGLVRASFVPPQPIQELRDLTRTRKQLTREIVQHTQRIQAVLEEANIKLSSVITDILGVSGRRILQAIVAGETDPAKLSELGGPRLAATRAELADALHGRIRSHHRFLIGQHVKTIEQLEETIAAFDARIEAALEPFRDALERLKEVPGLSETSAQILIAEIGTDMRQFPTAGHLLSWAGLIPRLDESAGKRRSTRVRKGAPWLKPVLVQCAWAAARKKNSYFQAQFLRLKARCGPRKAAVAVAASILTTAYHMLADGTCYQDLGADHFARRNPARAAAKLANRIRNLGFDVEIRPAA

SEQ ID NO: 175558 - protein, 351 aa, unidentified
MASVMIGIDPHKASHTAVAISGSEERLGELRVRASGAQAERLLAWAAAWPERTWAVEGAGGLGRLLAQQLLSAGERVLDVQPKLGAVRLLASGNVNKNDPNEARSVAVAALRSPGVREARPDDHAAVLKVWSKRHRDLGSSRTQVVCRLHAVLCELVPGGAAKKIIAAHAARLLDSIKPQGAVDAARWELAAALIEDLRRTDARLRETKGKLATAVRASGTSLTGLFGVGPVIAAAVTGEVRDVSRFRNRDHFAAYNGTAPIEVSSGQRKVNRLSRRGNRRINHAIHMAAITQVRQPHSEGRAYYDKKLAEGKTHREALRSLKRQISDAVFNRLRADAQRAAGRVRDPGGQ

SEQ ID NO: 175559 - protein, 367 aa, unidentified
MGDVITYVGLDVHKKDIHVALLVGHAATPKVWQLANEPQAVRRLRRQLEREAPGAVECCYEAGPCGYALQRQLTAGRVRCVVIAPGLVPRKPGDRVKTDRRDARKLAEYLRAGTLTVVVPPTEAEEAVRDLCRARDDAREDRMRCRHRLGKMLLRRGLHYPRPAWTQTHRAWIAQLPWSEAAERTVVRDYLLAIDQVEARLAELDAALGAVATTDPYREPVGWLRCFRGIDTLSALTCVAELHDFRRFRTARALMAFVGVVPGEHSSGDHVRRGRITKTGNALVRRLVIEAAWHYRHRPGIGVALRRRRAGQPASVIAIADKAQQRLSRRFRRLTDRQVPAQKVVVAVARELVGFIWAVRQTPALGA

SEQ ID NO: 175560 - protein, 345 aa, unidentified
MADVSTIGLDIAKAVFHAHGADARGQMVFSRRLTRAKLLEFFAAQPRCVVALEACGGAHHWAREIASLGHEVKLIPPAYVKPFVKRNKNDAVDAEAICEAAQRPSMRYAAIKTEEQQAAGMVFRTRDLLVRQRTQLINAIRGHLTEFGWVAPKGPSHVSVLASLLEEGEEIGASLPEAARSMFLVMTGQLEQLNEQVALLDKEIARRAREDEAARRLMTIPGIGPITATALLALAPPVEGFARGRDFAAWLGLTPRQHSTGGKERLGAISKMGERTLRRLLIIGSSAVVLQASRRGAPRGSWFEQMLARKPRMLVTVALANKTARIIWAVLMKGEDYRAPVAAAA

SEQ ID NO: 175561 - protein, 365 aa, unidentified
MIYVGIDVAKDKHDCCILGPDTEELFPVFTIRNNSDGYGELFHKIESVSKDKSQIKIGLEATGHYSYNILGSLLDHGYHTFVINPLHTNLYRKGQSLRKTKTDKVDARSIAEMLVTDKTLKPYTGTSYHSEELKSLTRYRFELVKERAKLKTSVSRLVNILFPELESLVPTLHMNSVYRLLQELPGAYFIASSNLTHLKALLADASKGHYGREKAIEIRETAKSSIGSLMPAKSMELRQTIRRIDTLTSDIKEVEQSIQKIMDECGSPITTIPGIKYRMGAMILAEIGDFARFSNADQVLAYAGLSPSTYQSGQLISSYARMEKRGSKYLRYALFNAAIYASVWDERFRLYLSKSGQRASTTMSQ

SEQ ID NO: 175562 - protein, 379 aa, unidentified
MTTHFAVNDVCCVALELSKSTWVCAFAPPESGRASVHKMGAGDVNRLFSILETGRARAMRDASRSLEIVLCYEVGYDGFWLARLLTARGIRTVVFDPASFLKPRRGRLAKTDRLDAGEMTRILRTWLSGNHDVATAVRIPTVEEEDAKRIERERKNLVEERTRIVGRIKGLLALHGIWLSSKRINKRLQGCLDTMMTGDGRRLPPFLRRDIERMIRHYEFICSQLTEVEADRKLALTDETSSFPHRDKVRRLATLGSVGETTATVLVAEVFHRTFETRRHLASFIGLAPSPYASGEVSRDRGINKAGTKLARQTLVELAWFWLRYQPNSKLALWWHERFGGQGMRGRKVGIVALARKLVIALWRFVEQGVVPEGATLKA

SEQ ID NO: 175563 - protein, 326 aa, unidentified
MQGEDASEQVANGKCNVGIDVCEAWLDIHVLPCEEAFRVANTPQGHRSLKRRLKHHEIGVIVIEATGKWHRQIQRSLHASSYAVHVVNPLRARLFAEGINVLAKTDKLDARMLAMMGFMLGNEAKPPDPKIIEELKELVQARASAVAEQTSLRNQSGSAQVAFVRRQLEKRQDRLAKDIKALGSHIMKRIKSDEGLRRRHEILSSIPCFGEVVAMTLLAWLPELGSCNHKQIASLTGLAPWADDSGKREGERHIKGGRTVVRNALYLAALTAARFNPDMQTFYLQLKAKGKDGKLPIIAIARKLVVLANTLISADRIWMPKSPVLA

SEQ ID NO: 175564 - protein, 343 aa, unidentified
MQTITTIGFDIAKSVFQVHGVDAVGQVIVRRQLKRRQVIAFFQKLPPCLVGIEACAYLIIWSRELQALGHRVRLMSPAYVKPYVKRQKNDMADAEAICEAVTRASMRFVPTKTPEQQSGLVLHRTRHLFIRQQTSVINAIRAHLAEFGVIAPVGRKGVEELLRVVADPNDKRVPEVVRACVAALGSQLLSLKKQILDFDRMIMAWHRSNQTSKRLNCIPGVGPLLATALVASVADPKTFRSGRNFSAWIGLVPKQHSSGGRDRLGSISKQGDRYLRSLFVAGALAVIRYAKIHGTKHRPWLTALLARRPTKLAAIALANKLARMAWAMMATGARYNYPASLRV

SEQ ID NO: 175565 - protein, 410 aa, unidentified
MEVVHARCCGIDVHQASLAVCASIKEAGQSQKYQLRCGTTTAELLRLVDWLHGHGVTHVAMEATGVYWKPVWHMLEGEFELLLANPAQVKALRGRKTDLKDGERIADFLQHGLLQGSFVPPKPIQQLRDLTRNRTALKREQVRTGNRIRKVLEDANIKLSSVMADVMSVSGVRMLRAIIGGESDAAVLAELARGRLRGKIPLLEQAAQGNLDAHHRFLLELWMGMWDELAAHVTTLEARIEEQMRPFEPVVNTWASLPGISRVTAWTIVAEMGADMQPFPTAAHAASWAALCPGQQESAGKRQNGRTRQGNVWLRSALTQAAWGASVTRGSYFKALYHRLAARKGKKRAIMAVAHALLVTGYTLLWTGRKFRDLGEDYFERIDRERLTRRLVKRLERLGHKVDLQPATAA

SEQ ID NO: 175566 - protein, 348 aa, unidentified
MVHFAGLDVSVKATSVCVVDDAGKVILEQKVPTEPAEIIAVLTSLGVPLGRIGIEAGPLSQWLVNALVAADLPVICVETRHMKALLTAQQISKTDRNDARGIAQMMRVGLFKPVHVKTLVAQEQRMLLTSRKLLQRKLLDVESDLRGTLRNFGLKVGVVSGGRYDARVRELVEGFPRLAVIVEPLLSVRRVMRQQFAVLHKMLLDTVRDDPLCQRLMTAPGVGAVVALTYRATVDQPQRFVHSRAVGAHVGLTPKRYQSGETDYEGGVSKCGDALLRTMLYEAAHALLTRSGKWSWLKAWGVRVAQRRGMRRAIVAVARRLAVVLHRMWVDGSEFRWSKDSTAVPAVA

SEQ ID NO: 175567 - protein, 377 aa, unidentified
MKPLAHVEPNIYLAIELSASTWLVAARLPTSDKIGMHRMDAGDTAALLDLIRKLQARVGTKLDRNDVTVASCFEAGRDGFWLHRLLVAHGVTNYVLEPTSILVSRRARRMKTDRLDAQGLLRVLTAYHRGERHVCSVVRVPTPNEEDAKRQHREREHLVQERVRIENRIEALLATQGVRKRPSLRSWDRDLEGLRTGDGRPIPVHLRAELDRLRRRLVMTIEMIREVEAERAQDLNEEKDDPANKMIRALCRIRGIGENVAAVLTREVLYRPFSNRRQIASYVGLAPMPFQSGEIDRDRRISRAGNPRARTTIIQFAWLWLRYQPDSALSRWFRERVGALQGRTRRIAIVAMARKLLIAIWRYVTRGVVPAGVQIAA

SEQ ID NO: 175568 - protein, 346 aa, unidentified
MMIIGCDFHPSWQQVSWVDTETGETGVRKLVHASGDAKLFYERLARPARIGMEATGNSQWFIELVEDLGHEVWIGDAAQIRASYVRKQKTDKRDAAHILKLMMENRFPRLWTPDREQRDLRQLVLHRHNLVEMRSRVKNELQHLSLNKGMQRKHKLWSQAGQKLLRELPLKPWAACRREDLLGLLATMEEQIGRLDAAVQRAAEQHPQACLLMTQPGVGPNTALAYVLTIGDVSRFARSKQVASYLGLIPREESSGGRQKLGAITKQGNRMLRSLLVEAAQIAVRFDPGMRKQYLHRCHQKPKGVAKVAAARKLAVRLYWMLRTNVAYPEIVRIESGPRVPLVGAS

SEQ ID NO: 175569 - protein, 338 aa, unidentified
MKFKRIAIDTSKHVFTLHGVDADERPVLRRELRRGQVEAFFAKQEATEVVLEACGGSHHWGRLLTQLGHLVRLIPPQYVKPFVKRAKNDRNDAEAISEAASRPTMRSVVVKTADQQASGIILKHREMLVSQRTQAINALRGHAMEFGVVAAKGTAKVAALLVELAADDAVPATARAMFAQMGAHIEVLDQRVADVDGELAALHKVNPVSQLLAEIPGVGPLGAITMALTVEPGNFVSARHFAAWLGLTPKEHSTGGKQRLGKISKAGNERLRQLLFVGAMSVVRFAKPGSKSASAWLLQLLERKPRKLAAVALANKMARTIWAMMARGETYRRQPVAA

SEQ ID NO: 175570 - protein, 347 aa, unidentified
MKFYTGQHKHYCGIDLHARSMYVYVLDRAGVVLVHKNIAAAPEPLLALIGPYREDLVIAVECMFSWYWLADLCAREKIGFVLGHALYMKAIHGAKAKNDRIDAHKIAALLRGGLIPQAYVYPAKMRATRDLMRRRNYLMRKRAELLAHIQNTASQYNLPALGVRVARPNERKGVAAQFSDPSARKSIELDVAMIDHYDKVLPSLEHQIEQTAQGHDPFALSLLRSTPGIGQVLALSILYEIERISRFARVQEFLSYGRLVKPTQESAGKVLGHSGRRIGNAHLKWAYSEAAVCFLRANPRGQAMLKTLSDRHGKPKAMSILAAKLARATYFMLKRKVPFEAERFYRT

SEQ ID NO: 175571 - protein, 343 aa, unidentified
MSTYYYIGLDIHKRTISYCIKAINGSLIGQGKIEADRKSLDAWAKGLPGPWVGAMEATIFTGWVYDFLKPYAVDLKVAHPEMLKAITAAKKKNDRADAEKIADLLRVNLLPECHMLSEEIRELRRVLRYRNHIVRTAVKMQNKISGLLMEVGVSYSKRRIHGKKYFHEILERVEEIPPSVKELLKLSRSSYEMFRTFQKRLVETLHTNNLIHDRVQRLMTIPGVGELTALTWVLEIGDPERVASIRQAISYCGLCSAQRESAGKEQRGPISKKRNKHLQTMLIEAAKLAPRWNEQLAILHDRELKKGNRNRATLAVARKLIAYMMAVDKRQADFKPSAETQAA

SEQ ID NO: 175572 - protein, 361 aa, unidentified
MQRNKISFNGQKIFVGIDVHKRKWSVATITESGFQRTHSQNASAQELIDFLHRHYPDGEYMAVYEAGFTGFSTYYSLAEVGIDCMVIHAADVPTTQYENVMKTDKIDCVKLAKSLRAGLLNGIYIRPKDSIDDRGVIRMRRAVIKDLSRYKIRVKHLLMSNGVEIPEQFDKRKGNNWSGAFIQWLKGDVSLLSETRCTLDMLIAQVERMRQAQLEATRELRKLSRTERYAGNYDLLCSIPGIGGIVAMTLLTEIYDITRFRNECQFASYLGLVPTSHSSGDKTIHGEMTFRGNKELGPMMIEAAWVSIRNDTGLAASFSNYCRKMEPQQAIVRIARKLANIIISVLKNKKKYVPYSCNGQP

SEQ ID NO: 175573 - protein, 394 aa, unidentified
MKLVGIDVGKNSHHFCVMDKETGEFNVAPTSFSNNKEGFDFLINSLKPYSKKSILLGMEDTGHYHVALLKFLLSNGYTVALINPKTTDLTRKMEGGITKNDKLDTITICDVLDTPERKKQYRITKVDRFDLYEQRQLTRHHNNLKEELNVYCNRLQKSIDLVFPEFNTLFSSKYSIVYMNLLKTFGSAEAIASTDIRTIRKCFEIKGRGNRISLTPEKLKECAKNSIGISSEVETIQIKHLVSQITLIKEQIAEIDKKIEEFSITNNSPILSIPGISHFSGTSILAELGDIGNYSKPSQIIKFAGVAPYHYESSQYNAQHTGITKKGSKYLRKTLYQIILTVINNNPVFKKYYRLKISQGKGHRCAQGHCIRKLLRIIYHLLETGQSFDPALLR

SEQ ID NO: 175574 - protein, 315 aa, unidentified
MIQTNTTTAGIDTSKAKLDIAVHGRTERWQVANALPGWRALAANLAEAGVTRVGIEATGGYERGVVEHLRAAGFTVLMLQPLQVKAFGRVHLRRAKNDALDAVLIAACAAALDPPKIAPDPRLSELADYLTFLEQIEEDIRRFKTRLEHIDEPALRRLVNSDIARLKVRKAAQIRDIAKRLRSHDDLAKRLKLVLSIPGIGERTALAIVIRMPELGRVSREEAAALAGLAPFDADSGQYRGQRKIAGGRSRLRRSLFAAALPAAFRWNKALVALYTRLIAKGKVHNAALIACARKLLIYANTVVQRGTPWTEKAA

SEQ ID NO: 175575 - protein, 422 aa, unidentified
MKPFLAEILLTKLTAFWTFAKLNNFFPEGTAFANAYTSASLFFSIYVKAVVLYHLSHAVQMNGCQNHCKLMKTETTAFNPKLYIGIDVHKKSWTFHYQTDLFDGKTITQPASPSKLVEWVQKHYPTHEVTCAYEAGFSGYSAARLFQKQNWNVLVLNAADIPMPQKQSIVKTDKIDCRNICKQLKNEALKSITIPEEQRESFRSLFRERNNFVMGLRHIKLNIKSYLMYCGITIPEEFDNASWSKNFIEWIKNQSNEYETGALKISYLLKRYEFMYQESLSVSNQIRLYARKHYKKDYYLLMSIPGIGGITASAILAELGDLRKYNRFDDLASSVGFVPGIYSSGDKTIVKGITPRAKSLLRSYLIEASWQAVRFDPVLQEYYRSHYGKQPNKIIVKVARKLLSRIHAVIKTEIPYQIGVIK

SEQ ID NO: 175576 - protein, 355 aa, unidentified
MPILADCVDAVVGVDTHRDTHETELAHPSGAPIGTQAISNDTGGYAELVAWIVEHAPGPRVVVAIEGTRSYGAGLARALTEAGLTVIECEQPTRTARRGKGKSDAIDAHLAVLSALQLDADRLPTPRADGDREALRMLLTARDELTTTGTGQTNRLKALLLGGDDTDRRLGRGKFTDSDLATLARRRPPREASREQAVRHAELRRLAVALRDGRRELKTNRTQLERIVDDMAPGLTDRRGIGPVCAAQAIVSFSHPGRCRNDAAFAALGGLSPLQASSGRTVRHRLNRSGDRALNKAIHTIATTRMRCCPTTRAYVERRIAEGKTTKEVRRCLKRYIARQLHRFLTAAMTPIRAS

SEQ ID NO: 175577 - protein, 397 aa, unidentified
MYIVGIDIAKRKHEAAVIDGEGAVIIKPFSFTNNCSGYNRLLAMLTKAKLPLGEVSFAMEATGHYWLALFTRLQKEGFRVQVINPVQTNSIRSFYIRQAKTDPRDALLIAEVIRFGHFSESTLHPENIYELRELCRGRHAIVSMQADVKRKVVALLDQVFPEYETAFTNLFGDTSMAILQTCPTPKELSEMRLEELCHLIEVSSHKRFRMAKAQELQELARNSFGFAMAGDVFSTMIRLYAKHLDFLKQQVREMDRKIAEIMDTMDTPITTITGIGPTLGAYILSEIGDISRFSSAAKLAAYAGIDPTMRQSGEYNGVRNRMSKRGSPYLRHAIWLAASSAVLHDPALKLYFQKKRDEGKPYMASVGHACRKMVSIIYAVMRDNKAYTPYIPNEISA

SEQ ID NO: 175578 - protein, 332 aa, unidentified
MSVYVGIDVHRKRSQVAVINQDGEVLANRNVPNGVEPILRVIGGLPSGTPAAFEAAFGWGWLVELLEDYGFEPHLVHPLQCKAIASARLKNDKVDAAILAQLLRADLLPEAWIAPPQVRQLRALLRHRIQLVRLRTLLRNRIHAVLAGHGHDRPAGYWSGPGRDWLASLDLPAVSAEVIADALALIDALESVTGRLDAEIRGHARSDPRVTVLTALPGVGPFTALVLLAEIGDITRFGSARKLAAWAGLTPTVRGSDRTVRHGHISKQGSVWVRWILCEAAQTAKRSPEFAARYQAIARRRGKKIATTAIARKLLTRACHLLTDASSDGAPS

SEQ ID NO: 175579 - protein, 322 aa, unidentified
MRYIGIDVSKATFVVAYSSDKGGEIRTFNNTTTGIKQFIGALPKDSSIHCVMEATGNYSAMLLYLLNVAGIAVSMENPLKIKNFARAMLSTVKTDKIDARLIALYGEKMNPQPFKVQGEAILRLRQKRTVIRQLTKQITAMSNLRGSLACLPVPDKGATHTVDETIEFLEKRRDRLQSELTDLVEVEFSRQLALLTTIKGIGITLATALIITTGGFTYFQNAKQVSRYLGICPTYEQSGTSVNIRGHINRNGDAYTRGLLYVAAWTASRFNTKCGETYTRLRQNGKPGKLAMIAVANKLVRQAFAVVTHDKEYVDGFVSNRP

SEQ ID NO: 175580 - protein, 356 aa, unidentified
MTIVAHSRSFVIGVDTHAKTHTYAVIQTASGQLLGCQQFPTTPQGIARAIAWVGRLTGGVAETLWVIEGVATYGAKLARAAAESGYEVAEAPRMNAKARHGIGKSDPLDAHAIATAVLPLEEDRLRRPRADDGTRQALRVLVTARDQLAQEKTMNVNALTALLRTNDLGIDARKPLTAAQIGQASRWQHRTEPLALATARGEAVRLARRILELEEALTVNYARLNELITASPAAPLLEETGIGAYTAAVVITAWSHPGRVRNDAAFAALAGVNPIPASSGNTTRHRLNRGGDRRLNKALHYIAITRMSRHPGTKAYLEKRLAEGRSRREIRRCIKRYLARHLYRTLNTLYAAPETS

SEQ ID NO: 175581 - protein, 468 aa, unidentified
MDHNLRRKQSGKKARHSLSLLERIQPDAAGIDCGAKSHFVAVPPDRDPQPVREFRTFTTELKRLAEWLKQCGVTTVAMESTGVYWIPLYEILEEHGFEVLLVNAHDVHNVRGRKSDVSDCEWLRELHSVGLLRASFRPAAAMVPLRSYLRQREILVEESSTRINRMLKALGEMNLRLDAVLTDVAGSTGLKIVRAILAGERDPARLAAHRDHRCHASQAELVAALTGNYRAEHLFALKQNFAAYEFLLQQLAECDSAIEALLKSLAAQQPPPASALPPARRKTRPQHGQPRFEIRSPLQRLTGGADLSQIDSIGPHAALQLVAEIGTDMRRWNSDKHFTSWLALAPNNKVSGGRRLSSRTPPSANRAAVILRRCAMSLGKTPTALGAFYRRLAARAGKAKAITATARKLAVLVYRMLAGDFVYHDPGATAYHQLHRTRELKSLRKRAKLLGLELLDPATGELLVTPVS

SEQ ID NO: 175582 - protein, 397 aa, unidentified
MIAVGIDISKAKSTVAVIDSDGTVLASPFTMAHTQPEMEAFVTYLKGLGEPTTILMEYTGHYHYPVLKKLQDEGFPVCIVNPYQMKKYGDVEIHKAKTDKKDALRIAAYALEKSYKLVPYSSMEQKYEDLKFLSRQYNQRISYVAKLKVQLIALLDQTMPGITRILPLNSRNPEKCALLLFIKRFKSFDEIQRIGKARFLASYDVLAKKASERSASSKGLSIYELAVDSITTRGEDPYIWLSQNQCVDLLSTTQNAADEIISQMRNIAETIPEYTVLRAMHGVGDRLGPIILAEIGDVHRFHSGKALNSYAGNDAPPYQSGQFESRNRHISKRGSSTLRKACYEVMQALKLTKPQDDPVYLFMLKKEQEGKPFNVAKMAGVNKFLRIYYARAMELYK

SEQ ID NO: 175583 - protein, 484 aa, unidentified
MSRRNTKSPPRPADDLCRAARLAAQQRRHADDCANIAALPVQHPHAAGIDAGEQSHWVCVEATPDGSDTVREFAAHTAGLRQLVDWLRQCGVTTVALEATGAYGHVLLLTLLEAGLTAILTPPQFARQIKGRPKTDRRDCQWIQRLHKLGMLPSVFRPDAATHTLRDYVRQRGNLVRLSGQHIQRMQKALELMNLKLTGVLGDITGVTGLKVLRAILAGQRDPQQLAKLRDRRCKHTAAEIATALDGRYRPEHLLELRCSLALWDKYQEMITVVDDAIAEQLRSMRRQTELPPLAPRIRVRGRKPHDPRFDVRTALYYATGVDLTAIEGIDEVHALTLVSELGSDLSKWPTLKQFTCWLGLCPNWKKTGGKVQSSHTRRGKNRAARALRLAAWCLLRSKSYLGAYLRRQRSRLGAPKAITAAAHKLARIVYHLMRYGVAYMKQTEQAYAEQVRARLEKQLRRRAAELGFELRKMETAPASTVEE

SEQ ID NO: 175584 - protein, 355 aa, unidentified
MYDLKHQKEKRSMDHFAGLDVSVKETSVCIVDETGKIVREVKVESEPEALLSVLKNPAYRFKRIGLEAGPLSQWLFSALAEAELPVVCVETRHMQAVLKAQINKTDRNDARGIAQMMRVGLYRPVHVKTLRSQKLRMLLTHRKLLQSKAIAIENDLRGTLRNFGLKVGMVGTVKFEARIKELVENLPDLAVLVEPLLVVRRVLREQFVILHRRLLAIVRDDAVCRRLMTTPGVGPVVALTYRATVDVPARFRKSKAVGAVFGLTCSKYQSGEIDWSGRISRCGDEMMRVMLYEAAQSMLHSKKWSWLKAWAMQIARRRGKKKAIVALARRLAVIMHRIWVDGTEFRWTREQAVTA

SEQ ID NO: 175585 - protein, 338 aa, unidentified
MKLYGGIDLHSNNSLIALQDEEDKAVYIKRLPNDLGYILKELAPHQADIQGLAVESTYNWYWLVDGLIEAGYRMHLANTAAIVQYEGLKYTDDACDARWLAKLLRLGLLPEGYIYPKEERAVRDLLRKRSQLVHQRTGNLLSVQNLMARNRGYSLSGNEAKRLRSEEVEPLLGDECLALAMKSNLMVMRCLNEQIVEIEKATQARARLRLEFQGLLSVSGIGEILGLTIMLETGEIGRFEQVGNYASYCRCVGSEKLSNGKRKGRGNTKNGNRHLAWAYVEAAHFAVRYDPLIKRYYQRKCARSCTAVAIKTVAHKLARACYYILRDQVLFDVNKAFA

SEQ ID NO: 175586 - protein, 347 aa, unidentified
MEEITRIGMDTSKNVFQLHGVDAAERPVLRKKLTRREMVRFFEKLPPTVIAIEACGSSHHWARFLGSLGHQVKLIAPQLAKPYVKRGKNDAADAEALCEAVSRPTMRFVPAKTAEQQAALMLVGVRERLIQKRTQLVNAIRGYGAEFGIPAATGACRVIPLLERIAADETIPELARELFALQGKEHAQLEREIERIDEKLMTWHRSDECSQRLAQIPGVGPIGATLLMMKTPDPHLFKSGRDFAAWMGLTPKNHSTAGKTRHGVITRAGDELLRSTLVVGATAVVQHARNGRGRNLTPWLLGLIGRKPPKLVAVAVANKVARIAWKLMVSGERYRGVAPPALTAVAA

SEQ ID NO: 175587 - protein, 340 aa, unidentified
MKTYSRIGIDIAKNCFQVHAVDAEGRNALRRKFSRSGIEKFLSEAAPTEIGLEACGSAHHWARRFQAFGHTARMMPPSYVKPYVKRGKNDAADAEAICEAMSRPGMRFVAVKSEDQQATLMAHKTRDLLVKQRTMTINAVRGHLAEFGVVVAKGTDHVDELAEKAKAITMPTLVGDMMRTLFAQLQELEEKIAAIGRAIAAADKKNAVCSLVSGVPGVGPLAASAIVASVSDPHVFRSGRDFAAWLGLTPRQNSTGGKTKLGSLTKQGNRYIRRLLTLGAIAMLRWAPKRRGALRDWLMRLIDRKPAKVAAVALANKMARIVWAIMVTGELFREELFAKA

SEQ ID NO: 175588 - protein, 410 aa, unidentified
MNASDSKCLFVGVDLGDERFQVCVVEPTGASGEQRSFAHDAEGIGEAIAWLKSAAVERIAIAIESPCGAVVAGFLEAGFEIFSINPKQLDRFRDRFSVSGSKDDRLDARVLGDSLRTDPRAFRQLIAEPGWLVRMRQASRMEDELKQEQRRSANRLRAVLHEYHVELLALVPAADEPWFWDLVAIASTPALGARLRPKQVERLLAEHRIRRVTAQDVIERLRRRPVPARPGVVEAGSTHALILVPRLHLLTQQLTQCQAQIQKLLDELAAEGQPEQTSEHRDVRILRSLPGAGRYVVATMLAEAFWALQQKDYRLLRALCGVAPITEQSGRSRFVYMRHAGNRRLRNAAHHWAWNATLVDPHFARLYRDMRARGLTHARALRGVADRLLNVTVAALKNGTRYDPSLSAAA

SEQ ID NO: 175589 - protein, 346 aa, unidentified
MEQNEVILGVDTHLDTHAGAVISGAGRLLGTLSVTTDTAGYLDLLTWANSFGRLRRAGVEGTGTYGAGLARVLRDHEIEVLEVNRPDRAMRRSRGKSDPTDAENAARAVLAGRATAIPKDQSGAAEAMRAVSVARRSAVKAKTQAINQLRALLVSAPQEIRERLLKVKTAECVEGCARLRSLGKTPVLQTLTTTLRLLAKRWPMLAEELNALDTMLDSLTSQHARRVHERFGVGPQTAAVLVSVAGDNPERLKSEAALCGTSPLQASSGKTVRHRLNRGGDRSANNALWTIAMVRMRSDPRTRAYVERRTKEGMSNKEIHRCLKRYIVRELYPLILADLADSTAAA

SEQ ID NO: 175590 - protein, 425 aa, unidentified
MLEEKELEKPIRAWIGIDWADEKHDVSLYDVATGKQEAFVIAQSPEALQEWLGQLRSRYGDGYVAVVLEQGRGGLLNALMGCEFLVLYIINPKSLSSFREAFYGSGATSDPVDAELMRDMVRQNPSRFRAWRPDDVMTRSLRLLTEGRRHLVNQSTALTNQLTALLKGYYPQALAWVGTLDTAWACDFLEQWPTLQRLQASSRRQILRFYEKHPRASLDLSDQLKQIQDARALTRDEAVLESSALMVQALVSQLRPLLASIAEFDRKIAMIFRKHPDRPIFESFPGAGAALAPRLTAAFGTDRDRFQAATEMQELAGIAPVTEKSGKKIFVHWRYACPKFIRQTFQEFADHSRRWCKWAKAHYELLRRRGKSHNAAVRALAYKWIRILFRCWKDRQPYQDEVYTKALLKHGSPLSSLLAEPVENP

SEQ ID NO: 175591 - protein, 428 aa, unidentified
MSKQKLIRHKQYCQIVKEITRSDQYMVVGIDIGKDQHHAFMGTATGKSLFRKLIFENNLEGFSKLLKTSDLIKNRNNLSKVVYGLEPTGNYHKPLARHLIRCNSNVVLVSGEAVNKNRSLLDGRWDKHDTKCAANIADLVSRGRCLYYDSPSPGIIELRSLLSLRKRLKKEEHSLRMRIRNNLLAQYFPELDRFYSACESESLAIVKWCLEPDQIAGMDFEPFFQMVARTRRGTAQLLRLRKIYQQASESIGCPMGSAAAFEAQLLVDKLEQVRQQLKDTEAAIKDVALEFDEYRYLLTIPGFGLYISSSVIAAIANPFRFKNRKQLLRMAGYDLCAKRSGKTSDNAVPVISKKGNSNLRYALFQAAKIASGRTEVFRNYFAEMLRGRERERGIITKMRVKLAAKMLIIAWTLMKNKEPFDPAYLTIE

SEQ ID NO: 175592 - protein, 343 aa, unidentified
MQIHSVGIDLGKTTFHLVALSATGKVLLRKKFTQKQLITFTANMQSSLIGMEACAGAHFLSRTLREQGHDVKLIPAQFVRPFVKSNKNDFLDAEAIAEAVDRQNMRFVPIKTDDQLDLQAIHRVRDRLVARRTSVINQLRAFLLERGMTFAKTPAKLKVAMPEILENAEANLTPRMRNLVSLLWSEWKDLEQQIVGMNEEIEQIALSDPACQRLRQIPGIGPLVATAIVAAIGNGAAFHKGREFSSWLGLVPRQHSTGGKARLFGISKRGNIYLRKLLVHGARSAVLRVKRERSPFGPWLDALETRAPINVVITAAANKLARIAWAVLSSGQNYRAPMNSMAA

SEQ ID NO: 175593 - protein, 362 aa, unidentified
MSPATQSFMGVDLHQCTVTLAAVDPLGEKIAQLKISTKSVGKIEDWLSALPRPSHLAVEACPFVEWFIDRFGPCVDRIDIADATELANRRGKRRKTDRNDSLDIAQRLARGECPLGFIAPPELMQLRKLGRHWRCLSRLLSRTKHSMKSMLHAANIRGPKFDGASAQRWLLANRDLLGPVQQDAFADFIDILNLVERQRERLRRQMTFASRSGKFAPTIARLMTVPGIAEIWGTIIAAEIGPFDRFPNADTLEFWAGLTADMKESAGRTQSGHITKAGSATLRWALGKAAVTLCQSDARQEAIRQRLVARIGRPKANVAMARRLLRILYAMIRDGKAYQGGPQRDRTAAANRARLARKKQVA

SEQ ID NO: 175594 - protein, 428 aa, unidentified
MNVDESIRLEEFRQLKREIRGSEEYLIVGIDIAKDKHNAFFGTATGETLLRGLVFENNIEGFGRLRARTEAMKVQHCLDKVVFGLEPTANYHKPLAEYLIKCGRNVVLVSGMAVNKNRELLDGRWDKHDTKDSANVADLISQGKCLYYDYPSMPLRDLRSLLSLKRRLKKQEHGTRVRIRNHLLAQYFPELDRYFGKGCSESLPIVKWCLNPAMIAAMEYDEFVQLVAPRLKSIGQEKRLRSIWEMAIDSIGCEIGHDIDFEAKLMAEALQRLRDTIHAVDEHVENICSAFPEYSYLLTIPGFGPDVSSKVLGAIGNPFRFNNGKQVLKLTGYDLSASRSGKTSNTSVPVISKRGKAYLRYALYQAAFVASTSNPHFIMYYTNKLRGREREKGIKTKMRVKLAAKMLIIAWTLMKKKEPFNPEYLNID

SEQ ID NO: 175595 - protein, 373 aa, unidentified
MPSMIWVGLDVHKNSITAAILEDDARDGEVLRLSADLNQLRKLFRRLGARGPVRACYEASAMGFVVHRVLERDGFSCEVIAPSLIPTKPGERRKTDRRDALQLARLYRSGHLTPVQVPAEEQEAVRALVRTRFAFLLQTKKCKQRIHSQLLRQGLVFRDGKSYWTKKHRVWLAQMRRQAEGALATVLQAELELLEYLETQVRSLDSQIEHFAQQPPYRPVVAALECLRGVQTLTAMTLATEIGDIQRFSSPRALMSWVGLVPSEHSSGDRERRGPITKAGNAHLRRVLVEAGHNHRVKAGSALILERRRQGQPAEIVAIAVKAQHRLSKRYWHLVLKKHHNVAVVAVARELCGFIWAIMRAAAPDRALVSKAA

SEQ ID NO: 175596 - protein, 336 aa, unidentified
MKQYAGIDVSLEYSSVCVMDADGRIVREAKVLSEPDGVAMKRIGLEAGPLSQWLHAAMAKAGLAVELIETRHVRAAFKTMPVKTDKKDARGIAQLMRLGWFRPVHCRSLPAQEVRALLTGRKLIQGKLHDIEMSIRGILRGFGLKVGPTTRRTYAARIRELIEGHPTLEAIAASLLKVRDALADEFAGFERKLRALARQDDNARRLMTTPGVGVVVALTFASAVDAPERFRSSRAVGPHFGLTPKKYQSGETDYSGRISKIDDVGVRTALYEAANVILTRPVKGSDLKSWALAVARRAGPRKARVALARKLAVVLHHMLRDKTNFIPHKATSAMAA

SEQ ID NO: 175597 - protein, 337 aa, unidentified
MNSSGRTIAIDTAKRVFFLHGENEFGKVILRDKLTRERLLPYLANQPASTIAIEAGSGAHHWCRAFVRLGHEVRMIHAKFVRPFVKSNKNDWNDAAAICEAAQQPTMRFVAPKSLEQQDLLTMHRIRERIVSQRTGLCNQIRGLLAEYGIVLPQSVSRLRRALPDVLEDAENELTVRGRELIASLLEEFRAIDERIKPYDRAIEQASLDSWTCRRLRSIPGIGPVGATAVVATMGDPKAFKNGRHFAAFLGLTPQQHSTGGKSRLGSISRRGDVYVRRMLIQGAHSILKHIAHREGPRADWLSALVARRGRQVAAVALANKSARIAWRGERSIPGAA

SEQ ID NO: 175598 - protein, 339 aa, unidentified
MKLYAGLDLHSRNTYIGILDHEFNQVFKKRVPNHIEQILDTLNPFRNQLKGLVVESTFNWYWLVDGLMDAGYQDVHLANPSAIKQYEGLKYSDDQHDAFFLSQLLILGILPQGYIYPKNQRPVRDLARKRMFLVRHRTAHKLSLQSLIRRCCAYHVNANEMRTLTDQDLQHWFKDEHLLLTAQASLNSIQFFNQQIKQIEKAIKKQVKLKKSFQYLKTVPGIGDILALIIMLEVGDINRFAKVGNFASYCRCVSSKRLSDGKSKGKGNRKNGNKYLSWAFVEATQFTRRHNTRLKRYYDRKAAQRNPIVATKALSNKLARICYYIMRDQVPFHEQLLSG

SEQ ID NO: 175599 - protein, 328 aa, unidentified
MQSIPIAVGVDVAKATLSVCVKYQDGSKRALSINNIEPDIMEVAELLGNFSGKIVMESTGHYHWLAALLFSEAGHDVRVINPLLAKKYSRANIRKVKSDKVDAEMLAYIALHEEALPTTFNYDRKQLKLRKKLSLIASLGHELQALHAMLNSFQEARAILEQPASRAERQVVATLKTLAKQIKKLELEFMSDIETRSNLTTIPGVSPFLSAIAQHWFVLQPGQTKKSWIAYAGLDVSVRESGTWYGQCHVTKRGNSYLRRRLYSAAWGAYMSHPEFKRYYTYLRARGRSHVEALVIIARKITVIMFEMTRTGEAYDPTRPLFVPAVEK

SEQ ID NO: 175600 - protein, 439 aa, unidentified
MNTSNMPSTPLVAAPTPLVFAAYVGLDWGDEKHAVSLAAAGSEKIERSTLEQTPEALVAWASELRQRFPDGKIAVCLEQARGPLIYGLQCYEHLVLYPINPKSLARLREALHPSHAKDDPLDADLALELVRKHREHFRPWQPDTVPTRQLALLTEGRRSFVDQHTAGTNALQTHLKSIFPQALELIGQDLGSPLATDFLKKWPTLQHVQKVKAAVLRRFYYGHNSRSEELIQQRLELVQKAQPLTSDEALLAAHGLAIQSLAAQLAVLHQTITQYDRQIAAVFTSHPDAPIFQSLPGAGAALAPRLLAALGTDRSRYPTALAVNCASGIAPVTEKSGKTQYWVHLRWSCPKFQRQSWHEFAGCSIKLCAWARCCYAQLRKRMGHHEALRKLAYKWQRIVWRMWQERQSYDESRYVKSLQRYDLKTYAELVPQGPATNCE

SEQ ID NO: 175601 - protein, 404 aa, unidentified
MYLFGIDWSEKQHWVCIMTESGKVLSLFSIDHSVSGFNRIEEERQKLGVAAEECLVALETNHHLLVDFLWTRHYTIYVIPPRAASRYRDRYRQSGANSDASAAITLAHILRTDRDYHRPWQPDQLLTRQIQAKVALIEDLRQSIQRLGNQLRALLFRYHPQTLELFSDLTAPITLRFVLAYPTPQHCRDLTLEQFQTFCRAHRYPHPSRLPKLYACLQTPTPQPSPETVQAYQEEAQTLAALVLQTVQVREQALKRLKQLFAQHPDGFIFASLPGAGQLLAPALLAKFGDRRERFSSPNAVQALAGTCPVTVQSGKKRLIRFRQACDKDFRRIAQQFAVASVNQSAWAAAYYQQVRPHCDSDSHAYRCLANRWLAIIWKMWQSRQPYDEAYHLRQRAQRRQPRL

SEQ ID NO: 175602 - protein, 349 aa, unidentified
MSEISRIGLDTSKAVFTVHAINAAGEAILRVNLRRAQLIGFFRKRAATVVALEACGGSHHWARKLAALGHDVRLIPPQYVKPYLKRGKNDRNDAAAICEAAGRPDMRFVLAKTEDQQAEGLVLKVRTTLVGQRTQLINALRGHAAEFGVVAAHGTAKVATLLAAIEAEATIPAIGKTMLALLGTQIEHLDGEIAALDRTVNAMHKANAISQLLATAPGIGPIIALTFAVEVDPAAFKSGRHLAAWLGLTPKEHSTGGKQRMGGISRAGHERLRALLVNGAMAVIRAASRPGSTLATEWLRRLLARKPRKLAAVALANKMARMIWAMMTTGEAYRRPATAGAVSRPAAIA

SEQ ID NO: 175603 - protein, 354 aa, unidentified
MKKARKELQAGDRVFVGIDLHKKKWHVTVRTTEFELFSGSIPGCWKALQRILDRYKGHQIETVYEAGYFGFWLHDHLIEYGAECVVTPPSLIPQEYGNKVKTDRRDSRKLAHFLAKEMLKRVWVPTKKERYHRQVSRRRRQLVGDRIRTQSRIKAELKLYGIDLPEPEGKWTKIYLGNLGRIRFNNRFMQESFKCLLEQYHFLDGQIVKQTKLLRELSKTELYRERVELLMTIPGIGMIAAMELLLELQNVRRFQRADQLAAYVGLTPSQYTSADKVRMGRITRVGKNSLRATLVQASWALIRKDGVMQEKYDRLKVRSGGKRAIVAVARTLLIRMRRMLLDNEPYVIGLIAAN

SEQ ID NO: 175604 - protein, 405 aa, unidentified
MGIYVGIDWAEAHHDVCVLDEAGSVLGKRRIAEGLEGVGQLHALLADHAQEPDQVVVGIETDRGLLVGALLAAGYQVYAINPLAASRYRERHATSGAKSDPGDAKVLAELVRTDRHNHRPVAGDSELAASLQVLARAHQSLIWNRQRLINQLRSNLREYYPAALAAFGTELAHPVALGVLDAAPTPAIGRTLSRAKLVAILRRAGRERGLEEKAAAIQAQLRARQLAAPTLVSAAYGKSVASMVRIVRELNAQLASLEAELRPSFEKHPDAEIYRSLPGLGIVLGARVLSEFGDDRTRFAHPKARKNYAGSSPITRASGTRRVVLARLARNRRLADACHQWAFCALTSSVGARDYYHRLRQRGKTHHQALRALANRLVGILHGCLDHRQTYCEDLAWPSSLMVAA

SEQ ID NO: 175605 - protein, 355 aa, unidentified
MSQTTKSTFPRTIGMDLGNRSTSYCIVDSSGDHIREAELKTTTESMGEFLSSEPPSRVVIEASGPSRWVAELAAKHGHEVIVANPREFKLICASHRKTDRNDARILADFGQFRPQLLRPIKLRGLKCQLARGILISRSHAVGQRTVLINLIRAQVRNLGESLSDCSARVFHKTALARIPVALRPTVEPLFSVLNSITEAIATYDEEIKRMCEEDFKETATLLQVNGVGPNTALAFVATIEDPSRFPKSRDVGAYVGLVSKSRSSGSKDPQLRISKRGDKTLRRLLVTAATYICGPRSSDSDLKRFGKRLQDRGGQTARAKARIAVARKLSVLLHRLLITGEVYEPLRNSGQAEAA

SEQ ID NO: 175606 - protein, 381 aa, unidentified
MPSMQLRRDDVIVGVDTHKDNHVAVAIDGFGGRLGDIVVPTTIAGFEELLAFCLAFVGSAGRLIGFGVECTGSYGVGLARYLRNHGHDVHEIARPARAAERRLAGKNDTIDAEHAARQLLAGHGLSTPKTADGAVETIRLVKIAYDGAVQARTTAMITLKATLATGSEALRAELETLTDHKLILACAALEGPTPLPPVRRGAPAVVVPGDPDVAMRHVLSSMAKRWLALHEEAKAHAASLKALTAAAAPQLVEAVGVGYDTAAQMLITAGDNANRIKSEAAFAKMCGACPIPAGSGKTNSRHRLYRGGNRQANAALYRVVIVRMRWHQPTIDYVARRTAEGMSKREIIRCLKRYLARELFRLLPAPDAIAKPVNGELEIAA

SEQ ID NO: 175607 - protein, 351 aa, unidentified
MTTMTSPAALVTGGVDTHRDFHVAAALDQLGGVLGIAQFPTTMTGYRSLLAWLAAFGQVAAVGVEGTGSYGAALARYLSVSEVTVVEVGRPNRQVRRRHGKTDVVDAIAAARAVQSGEATATPKSHDGPVEALRALKMVQRSATKARTQALNQLHALVLTAPEDLRGRLHGLTTRALIATCAGFRVRADDDSLPAMIRLSMRELAQRIQLLQTQKKTVTARMRSITTALAPELVAKPGVGPDTATTLLITAGDNPERLGHEKSFAALVGASPIPVNSGQTQNRCRLNRGGDRQANSALWRIVIVRMSSDQTTRDYIARRESEGKTKSAAIRCLKRYIAREVYNALPKQATA

SEQ ID NO: 175608 - protein, 343 aa, unidentified
MTIVETTRPITGGVDTHLDVHVAAALDHNGGVLGVESFPTTPAGYRELRDWLAGFGDLTRVGVEGTGAYGAGLARFLQRAGVEVIEVDRPNRQERRRHGKSDQLDAVEAARAALGGRCRAVAKTGDGSMEAMRALLVAKRSGRQARVRSLNQIRHLSFTAPDDLRARLQPLPTGQLAATTARLRPSGDVVASATKLALRTLGRRVLDLDAELAIIDDALGELVAATAPGLLALHGVGVDTAAILLVAAGDNPDRIRSEAAWAHLCGVAPIPASSGKVTRHRLNAGGNRQANHALWRIVITRMSSDPRTRAYVQRRLEEGLTKRQIIRVLKRYVARETWRHLPS

SEQ ID NO: 175609 - protein, 375 aa, unidentified
MQTKDDGTHVILWDGLPLTLQDKFLGIHKRGKGRAMEAKVIGIDLGKNVCSLVALDAAGQVVLRRRMRPGSLVAFLQKLPACVIGMEACCGAHHLGRQMVALGHDVRLMPPEYVKAYVKSQKNDDRDAEGIAEAATRPTMRFVPLKTEEQLDIQSLHRSRARLVGARTALINQLRALLLERGVIIAKGRTKLEIWLRTELPNIVAVSARMQRFVGDLVAEMRELDARIVAFDREFKAMSRSDEATRRLQSIPGIGVLNGTAIVAAVGDASAFERGRDFAAWLGLVPRQVTTGGKPRLVGITKRGNRYLRVLLIHGARSALPGLAASSTPLGAWLRGLLARAKRNVVVVALANKLARIVWAVLARGRTFAADPLAV

SEQ ID NO: 175610 - protein, 394 aa, unidentified
MSKTVIESARFANTIDGYAQLAAFAGRWAQRRWAVEGCFGAGRSLAQRLVADGEMVLDVPVKLAARVRVYSGGHGRTTDKHDAVSVGLAALDGAGVLPVTSDDALVSLRLLCDRREELTAQRTQVVCRLHRLLAELTPGGMRRELSANKAQALLALIRPADDAGRVRVHIARDHLADIRALDAGTQIAALVAASGTGLFGVGPVIAGRLLAEVGDVARFATKYAFASYNGTAPIDVSSGDQIRHRLSRAGNRRINHALHMMAVTQIRYPGTPGRLYYKRKWCEGKTPKEALRCLKRRLSDLVYYQLLADRRGTIGACGSPTTPPLTRSTSTSPATRSHRAAPPSRPPHRPAPAGSSRSTGKTTAWSASKSSTPAPASTTTSSKKPKSTAKTAAS

SEQ ID NO: 175611 - protein, 415 aa, unidentified
MEDLGLRALYRRVAGIDVHRMLHVVTVLIEQADGAMQRQTREFGGFRRDCRALAAWLTKLGVELVVMESTGIYWKSVYAHLENAGIAAWVVNAHMIKHVPGRKTDMADSEWLAVLGRFGLVRASFIPPKDLRELRLVSRYRRKLSAMCASEINRLHKVLDDAGIKLGGVVSDINGVSARAMVSALIEGKSIEHMLGLARGKLQQRREDLGASLEGDLSERHLFVLGQIHAHVETLQREIAQIDTYLLAAMQPYAWAHRLLQTIPGIDQIAAAMILIEIGDDMGRFGCAQRLASWAALSPGNNESAGKRKSGRTRHGNAIIRFILCECANAARMTKSTLAAKYRSLMVRKTHKRAIVAVAHKMIRLIFLMLTRREPYLDQSIDYAAMSAKKNAPRWIKQLKSIGRWPSPKIAAASN

SEQ ID NO: 175612 - protein, 386 aa, unidentified
MYFVGIDISKYKHDCFICTETGEVIEENLSFTNTNEGFNQLLNLLKSLDNNQEIRIGFEATGHYGMNLKLFLEKNNYSFMEFNPALVKRFISTQTLRRTKTDKKDAMLITKYLISVDYKPHPRQFYHKYSLKSLSRMREKLVKQRSYYEVQITNTLDIIFPEFKPFFNNTFSKTSLYILSKYKTADKIKNMKDFDSIRKASRGKFTSANFIKLKELAKNSIGISNDIFETKLESLLNLHSQIEVEIKKLENKIETIIKDLNPPTLSIKGIGYISCAGIISEFGDLSRFKSADACVAFAGIEPSISQSGTESHTGHMVKHGSGHLRYFLMNAADYVFMHEPIFTEFYYKKRNEGKSHRVALTHVAKKLVRVIYKLESENIKFNSDIK

SEQ ID NO: 175613 - protein, 352 aa, unidentified
MIIIGVDYHPEFQQIAWVDTNTGEFQEKRLAHPEEAEQFYRGWAGQEVRVGMEASGHARWFERLLAEVRLELWIGDAAAIRSKRVRKQKTDRQDAQLILQLLLENRFPKIWVPSGENRDLRQLLWHRHRMVQARTRIMNQLQALALNEGLRCKKRLWREHGRQQLEAFRLAPWASRRRRDLLELMDRLNPTIAELTRAIEQAAENNSAAQCLRTHPGVGALTALAFVLILGDSERFHCGKQVASYLGLVPLEDSSGKRRRLGHITKQGSSILRFLLVEAAQVTVRSLPEWRSKYFHLTLRRGRKIAKVAMARRLAIALYWMWRKGWNYEQVKKFGSHAGQPGNRHGVQQNTE

SEQ ID NO: 175614 - protein, 321 aa, unidentified
MNNLTKVFIGVDVSKNFLDVYISHIEKSMRFQNSNEGCKKMIEDFLQYDVQMVAFESTGGYENKMARMLEKANLQIWLIDPSRIKAFIRSEGIKAKTDAIDAKMIAQFAAQKNRSYSALKLSKKHLELRALAKRKEALTGIIASEKKRLKHPMQTEECKAMIQDHIAFIEKQKKELEQKIKALISEDSEWQKKASIIQSIPGVGDGTTAVLISHMPELGTIENKQVAALIGVVPYTQQSGSHIGKASIYGGRFLPRGYLYMATLAGIRYNPILKAFYNRLRDIGKPAKVALVAAMNKLIGIINTMLRKNTYWENSINESRF

SEQ ID NO: 175615 - protein, 418 aa, unidentified
MKSMEITAVGIDVSKSKSTVAIRRPGGVIVARPFDISHSNHDLEKLVSILKTTGGDIRVVMEHTSNYWKPIALTLKEAGFYVSVVNAMLIHDFSDNSIRKLKTDRADSLKIANYALTFWNELPPFNDEDETRLVLREQSRMYERLSSTATALRNGLIALADQTFPSIDQAFGHAIKNADGHEKWVDFFSIYWHRDCVLRLSIEKFTESYRKWCLRRNYKFRTNTAHKLYALAQDAVPTLPKNNGTKALVLQACKSLNAVCEAKQSTQEEMNRLASLLPEYEVVMQMEGTGPITGPALMAEIGDVRRFKNKKALVAFAGIDAPPFQSGAFESKSRHVSKRGSPHLRRTVFLVANIILTLSHKDNSVFCFMDKKRAEGKHYYVYTIAGSAKFLRIYYARVSEYLRAQESPAAASCLNGNS

SEQ ID NO: 175616 - protein, 383 aa, unidentified
MRRNATVTHMGLDIHRNFTQASACDQQGQLLWRARLQHADRQAVRQELAQWPKVPVVLESSFGWGWLSDELLLAGQEPHLASSRKMAGWRKAQGIAKCNRTDADLLADLWTEKKKWWEVWRAPAEVRDRREWLRYRMGLVRIQTETKNRIHATLHRHGIVNPHSDLFGVAGRRWLSLLISEPASESLLRETGRQTLKGHLFLLDQLRKHIAQATRQLRRQIKDSPVARRLMSLPGISWILAYTIIAEVGRIERFRGGRNLCAYSLLVPLADESGDEIDAPPLGRRIGHAGRLTLKWAWIEAAHGAVRRPGRFKAIFDRRSDNGKRDRGRSYIAVAHDLCRIAWSLWKNDVDYSDCPPPRPGSRSDTSRPGTDQPQNPMVPALA

SEQ ID NO: 175617 - protein, 322 aa, unidentified
MKETAVVYIGIDVSKGTLDIDAGGLGATKVANAPAEIRRELKALAREAQGKALHACLESTGRYGDALVAECRRAGVACSVLNPSKVACFAKSVAHAKTDALDAALIRRYAETRRPEPTPAPSEAAAALGELALARDAAVKSAVALRSALDTLACASARKPMGRLVAAIEGKVAEYDRLIAEAVEADAETAGLVGALSSVKGVGTLTAAKVAAWMPEIGTLGRRKAAALAGLAPRTRESGLWKGRAFIGGGRKGVRDALFMPATVAIRFDPHMRLAHGRLMARGKPYKVALAAVMRQLVCRLDGVARDYRATLKESPGQITHS

SEQ ID NO: 175618 - protein, 364 aa, unidentified
MKQKEKHNTIGLDLGERRHRFCVLDEAGEVVEQGSLSNERVALGRLTQRYRGALVVMEAGTHSPWISRYLKELGSEVIVSNPRKVRAIYQHERKSDQRDAQMLARLGRMDRALLYPVRHSSEQAQQDLLRIKLRDSLVRARVGLINSVRFSLKSLGYTVRNPSSERFHKVVRETLPEVVRQMISPSVEALAELSARIKVLEREINLLAQSKYPQTLWLQQVPGVGALTALYFVLKIEDPQRFENVRDVGAYLGLCPRRDQSGGSDPQLRISKRGDAYLRRLLVSAAQYILGPFGPQSALRAYGLMLAADGGARAKKRAVVAVARKLAVLLLSLWKNRSDYEAFPHCQTIEDKRSGTIAIHRVEA

SEQ ID NO: 175619 - protein, 390 aa, unidentified
MTKRKTETVNDLSRCLDPLDMDATLIAVIEMSQSSWLVAGIVPGVERQPLKKIAIDEHALLKLLSRWREEAEKKGHKITRVTVAFEAGHDGFWLARWLGTRGIEVHVIHASSVAVTREHRRAKTDRLDTELLKRGFLGWLRGERGHCKMVVVPTLAEEDAKRPSRERETLVGEASRIITRLKAAFVRLGIRSFNPKLKAATERLGTLRTPEGEPIPPNTLAALKRDLERHHIIKRQIREIEQTRLDHLAQAPAKGPHPLVLLLARVVGIGVETADMLVQEVLSRNMRDRRAVARCAGLTGSPDESGAKRREKGLARSGNARVRRGMIQLAWRFLWLQKDSALAEWYRQRTQAAPATRKTLIVALARKLLIALWRLAHDGIVPEGVQMRPS

SEQ ID NO: 175620 - protein, 348 aa, unidentified
MRQETMLYVGLDVHKEFCQACVIDERGRVLSNDKFPSTHESLDVFLAGIKHAKFVLESTGIWEYIYEGIEDRGFEVVLAHPLKVRAIAEARVKTDKVDAETLAQLLRADLIPRSWVPSRDIRDLRQLVRQRTYLVRQSTSFKNRISAELLRRGVRRPPELKSSFTKKDIERMRSLDVPTINSNLDCLERIQAQIEAMNQQLLVEFKRRPDAQLMATIPGIGFYSALLIHAEIDDINRFPDPERLASYAGLVPTVSQSASTVHYGGISKEGSAYLRWILIEAVLIHRHTHPESRLSRFHSKLEKRRGKNRATTATARKLAHIIYWMLKTREPYHGQGFNPVPKPARTSA

SEQ ID NO: 175621 - protein, 346 aa, unidentified
MTIVEADRSVIGGVDTHLDVHVAAALDPIGGLLGVESFVATPGGYRAMLEWLGEFGTVDKVGVEGTGAYGAGLARFLRRAGVEVIEVDRPNRQVRRTKGKSDPADAVEAARAVLSGRASATPKSRDGNVEAIRALLVAKRSARDARLRALHQMRQLSYTGPDQLRSRFKDLSIAGLVAETAAMRPRAAGDPVLYATKVSLTALGRRVILLEDEIAGVDELLSELVTTCAPEMLELFGVGIDTAATLLVTAGDNPERLRSEAAWAHLCGVAPIEASSGKVTRHRLDRGGDRNANQALWRIVMTRLSSDQRTRAYMERRTKEGRSKREVMRILKRYVAREVFKHLPRS

SEQ ID NO: 175622 - protein, 323 aa, unidentified
MSPELEHRSGAMTHACAAGVDVGRDFFDVGLAPSGQVFRTANGPGGVLALVERLKRAGVSKVVLESIGGYAARLVRALAEAGFEVGVIDPKRIRALRIAEGKRAKTDRLDAKLIARFALIMQDAARPVPDAKAFEIRALSTRRRQLVEMAAMEKVRLKQTLDEAVADSCRQMIAILSEERARVEGRLQAELLATAERAGHAKLLQTIPGVGPAVSMTLLADLPELGRLDRKAIASLAGLAPHPNQSGTRTAQAHIAGGRPCVRAALYIAAVSAARTDKGFKAEYQAMRQAGKPAKVALVAIARKIVVAANSMLKSNQPWIKAS

SEQ ID NO: 175623 - protein, 408 aa, unidentified
MEVVFDRCCGLDVHGQTVFACVSVPGDGKKRRREIRKFGTTTVELFELADWLTSYACTHVAMESTGVYWKPVFNILDGQFEVILVNAHHMKTVPGRKTDVKDCEWIAQLLEHGLLRASFIPPEPIRALRELTRYRKTQIEERARAANRIQKVLQAANIKLADVATDVLGVSGRQILRKLADGERDPEVLAALARGALQKKHDALVAALTGRMTDAQQFLLAQILDHIEYLDKAIQKLDVRIEEQTRPFQVTVEQVDSITGIGRRSAENILAEIGTTMDTFVTPDKLASWACLCPGNNESAGKRLSGRTRKGNRWLRGTLVECAWSAIRRKATFLSSFYTRLKSRHGGKKAIVAVAHRILVIIHRLLTHGTFFEERGPKELDEATRARLAKHHLKKLKQLGYPGMPMPA

SEQ ID NO: 175624 - protein, 334 aa, unidentified
MRTIDAETAVILGVDTHLEFHVAVAVDNLGRRLGESSALTTAKGYEELLCWAEGFGPVMYAGVEGTSSYGAGLARHLRTRGIEVLEVERRERRRRSSRRNFEKSDSSDAEAAARAVLAGEASGVPKSADGTVEMIRTLRAARRSAVKARTQAANQLQGLRVTAPEQLRRRLRGLHTKELVSVAARFRLADSPRDVPTATKFALRSVARRYEVLSREIDELDAQLDWLVGQAAPELVSLPGIGTDSAATLLIVAGDNPKRLGSEASFANLCGVAPIEASSGKVVRHRLKAAVATGRLTARCTWPAWPGCAEISARRNTSRGAPRRERASERSSAV

SEQ ID NO: 175625 - protein, 459 aa, unidentified
MNKSSRKTKKAKQKISLDQTWPALHPHAAGIDLGAREHWVAIPPDRAAPTVRCFGTTTPDLEALAHWLKEHGVTHVAMEATGVYWIAVFQLLERRGFAVLLVNARQIKNVSGRKSDVADCQWIQRLHTYGLLGGSFRPADAYCVVRSYARYRDELIGARSVQIQHMQKALLEMNLQLTVVLADIVGESGRAILAAILEGERDPVKLASLADPRVKSSREQIAKALVGDYRTEHLFVLRTAWELYHSYESQIARCDEQLAVELARLPERVNLEERPLPAKAPGKKIDAALREALYRTLGVDLTAIESVGTTVALTVLTEVGPDLSAFRTEKHFCSWLGLCPDHRISGGKILSGHTRQVVHRLSERLRLAATALENSASALGAYYRRMKARLGAPAAITATAHKLARIIYRMLRYGEAYVREGLEDYEQKYQQRKLQGLKKMAATLGFELIERQTVAASVS

SEQ ID NO: 175626 - protein, 343 aa, unidentified
MRWTVAIGVDTHKHAHVAVACDTLGAQLDAQEIEASTAGYLALWQWAQELGLPAFAVEGAGSYGAGLVRFLEAAGAPVYECERPTRRERRRGKSDLIDAFLAARRLVAGTGLGRPRGGGRREDLRLLLLERRSAVAARTAALNQLQAALVTAPAPLRERLTALAGDQLVAAVARLRARAGEAETAVLTGVLKRLAGRIGTLGAELAKLEAELEAIVGALVPELLAECGVGPVCAAQLVVSSGDPARMRSEASFAALAGTSPIDASSGRQQRHRLNRGGDRQLNRALHVIALNRIRYHAETTAYHARLLAAGKTKREARRCIKRQLARYFYRRLCESPNLALTP

SEQ ID NO: 175627 - protein, 427 aa, unidentified
MTTREKVGEPEFVAFVGIDWADQKHVWCLQAANSAKREGGELEHKPEMVEAWVSELCRRFGHGPIAVAVEQVKGALVYMLGKYECLHLYPVPSTMSASMRQALYPSGAKDDPRDADLLLDLLLQNRDKLRRLTPDNEATRRVQNLVEERRKLVEEKTAQLNRLTGYLKVYFPQMLEWFAKLDTKLACEFLERWPSLEELQAAAPAEVRKFFRQHRGRHPELTEWRLQGIGQAMSAIRDRAVIEAKRMVVQVIARLLRTLLEGIAALDDKITEAAEAHPDFFIFQSLPGAGAALAPRLLAALGSQRDRYASAEEVQKYSGIAPVTERSGKKKWVHFRWACPKFLRQSFHEWAGHSIVQSVWARAYYQQQRQRGKDHHAAVRALAFKWIRIVFRCWQDGAAYDENRYLATLAKRGSLLIPVPAAAATSL

SEQ ID NO: 175628 - protein, 463 aa, unidentified
MQPIRTESLEWAALPHINPHAAGLDISATEIVACVRPDMSVTPIRTFSTYTPDLEALADWLQACHVTTVAMEATGVYWIPVYEILERCGFKVYLVNARHVKNVPGRRKTDRLDCQWLQKLHACGLLRASFRPTDRVCALRSLLRQRDTLIRMASRHIQHMQKALREMNVLLDQVTTDITGTTGMRIIDAILGGSRDYAQMARLRDPRLHASEEQIAEALRGDYRPEHLFVLKQALAAYRFVWEQIQQLDAEVEQTLNALVQHAGKSAVALPEAGLTGCEKRRGNAPDYDVQTYLYRLTGVDLTRIPGLAAAAIQSLISETGVDMSRWPTEKHFASWLGLAPDPKISGGQIIGQTRRHVQSRAARVLRVGAMTLRRSPTWLGAFYRRIKARAGGAMAITATAHKLAVIYYTMLRTNQDYRALSAIDYEQRFQERMLRNLKRRAKQCGFELVAAAPSGPVVNSAN

SEQ ID NO: 175629 - protein, 367 aa, unidentified
MKKISTVATQQSRKMSEQELTIGLDLGDRSSWCCVLDEAGAIVREQKLGTTPKAMKEVFGAVPRSRIALETGMHSPWVSRLLSQLGHEVIVAHARNVRLIGESRKKDDRIDAQTLARLARIDPPLLSPVKHRSAKAQADLTVIRARAGLVRARTALVNTARGLAKSYGERLRGCNVRNMNAEKAQGLSPELRTALEPLLAGIESLSERIRECNEGIERLARESYPEVAQLKQVKGVGTLIALTFLLTLEDAHRFRQSRDVGCYLGLQPGRRNSGQSEPQMHISKEGDPYLRTLLVQGAHHILGPFGADSDLRRWGLKLAERGGKSGKKRAIIAVARKLAVLLHHLWVSGEVYQPLRLSKLRAMPAAA

SEQ ID NO: 175630 - protein, 368 aa, unidentified
MKQVTTYVGVDAHKKDLFIAMLVGDRTAPVTWQVANEPQAVRRLVRKLEREAPGPVRVCYEAGPCGYALQRQMTTTRVACQVIAPALIPRKPGERIKTNQRDARKLVELLRAGLLTEVRPPTPEEEAVRDLCRARDDAREDLQRARHRLGKLLLRRGLHYSGRNWTRAHRQWVDSLQWTQSAERVVVDDYLLAIDHLQARLIELDARLTEIAERAPYREPVGWLRCFRGIDTLTAILILAELHDFRRFHSPRALMAYLGLVPGEDSTGEKHRRGRITRTGNALVRRLLVETAWHYQHRPGVGVALTRRRKGQPNRVIAIADKAQQRLCRRFRRLAERHKPAPKIAVAIARELAGFVWAALQPAAELAK

SEQ ID NO: 175631 - protein, 358 aa, unidentified
MKTKGNTIDFNGQNVYTGIDVHLKSWKITIMVNDREHKTFSQDPSAELLSKYLRKNFPGAVYHSAYEAGFSGFGAHRELEAFGIRNIVVNPADIPTTDKEKRQKEDKRDSRKIAKSLKNDELVGIYVPSKGMEELRGLVRYRKTLVKEITRHKCRIKSFIYFNGIKIPLEMDGPSKHWSGRFTQWLSEVELSTIHGKMVLEDTLDTAGLLRKKLLKVNRHLRQVAREGEHAEKLRLLRSIPGVGMITAITLLTEMEDILRFKNLDQLCSFVGLVPSTNSSGEKENVGRITRRSNRFLRNIIVEAAWIAARKDPSLIYSYGLLCKRMEPTEAIIRIAKKLLNRIRYVMKNETEYVYSVI

SEQ ID NO: 175632 - protein, 442 aa, unidentified
MSLINPDAAGIDIGHREHWCAVPADRDEKPVRCFGTFTEDLERMADWLKDCGIKTIAMESTGVYWIPAFQILERRGFEVRLVNARHVKNVSGRKSDVMDCQWIQRLHCFGLLNGSFRPADAMCVLRSYLRYRDELVCARSVQCQHMQKALQQMNVQLHQVLSDVTGVSGLRIIEAILAGERDPERLAGLAHRRVRANRATIAKAMKGDYRPEHLFVLKSAFELHQTYEQKIEQCDQQVIAEMAKLPSRTQQEPPPRKAGRTLARDIVAGIDLRAELHRWTGVDLSAIEGIGVLTAQVILSEIGTDMDRWPSEKHFTSWLGLCPDNRISGGKVLSSHTRHVVNPVSDALRIAAMTLQKSKTALGAFYRRMRARLGAASAITATAHKLARLIYRLLKHGEAYVQNGMEQYEQKYRQRLIRNLTKTATSLGLQLIPDQRLTQCVS

SEQ ID NO: 175633 - protein, 448 aa, unidentified
MRARKGPSDRKPKLPKHLQHINAHAAGIDVGCRSHFVAVPEGSCEQPVREFSSFTDDLHRMADWLLECGVSTVAMESTGIYWIPVFEILESRGLEVRLVNARHVKNVPGRKSDVLDCQWLQQLHSYGLLAGAFRPEEQVCALRAYVRQRMTLVRYASSHIQHMQKALLQMNLQLSNVVSDISGVTGMRIIRAIVGGEREPMALARLRDPRCRSSESTIARSLHGHFRAEHLFSLKQAVELYEFYQAQIDECDREILAQLAGFDAADAAGKGPPTSVEEALQRISGVDLTDIDGIDTTSALKIIAEVGTDMSRWRSAKHFASWLGLCPGTKISGGKRLSAKSKPVANRAAATLRMAAFTLLKSKSALGAYLRRQRARLGAPKAITATAHKMARLVYSMLKHGSAYVDVGQDHYEQRYRDRVVKNLKRKAQSFGYVLVKELETLPQPLVP

SEQ ID NO: 175634 - protein, 396 aa, unidentified
MRVMIERVAGLDVHQETVVACVLIGKPGERPTKEVRTFRTMTRDLEALREWLLSLGVTHVGMESTGIYWKPVYAVLEGSFELIVGNARHIRNVPGRKTDVKDAEWIADLVRHGLIAKSFVPPPPLRELRDLLRYRRKLVESQAAERNRLLKLLETANIKLASVLSDVFGVSGRAMLKALIEGTASAQAMADLAKGQLRRKRADLVLALEGRVEEHHRFLLGLQLRRLEAAEVEIAALDARIDKKLEPYRAPHALLMQIPGVDRLVAAVLIAEIGIDMSVFLSVYHLASWAGVCPGNHESAGKQKSGRARNGNVHLRTMLVGAAISASRAKGSYLKDKFYRLKARRGSMRAALAIAHKILVAAYHMLAKGVGYPRDRRGLSRPNQPDPNRRQPEAPS

SEQ ID NO: 175635 - protein, 415 aa, unidentified
MFKIIRSKCCGLDVHKTWIYACIGIADSSSRVDYKQARFSSFSKGLKQLSEWLAKYDCTEVCMESSGKYWIPVFNVLETTCDVTLAHPKYTKPQKGNKTDRKDAMWICDLFMCGMIKRSFIPPADIRELRELIRYRTKLTNMITGEKNRALNCLTVSNLKLDDVFTDVFGKSSSSIIRFMLDNPGVYFDVTPFIHGRCKTPVEEIQAAVDGAMSPAHAVKLRECMSHIDQLESHKRMVEQDILRLSAPYGDELALIRTVPGFDKNPMTAITILSEIGADMSVFPSAKHLVSWAGCCPRNDQSAKKIKSTRISRAGVYLKPLLVQVANALIKSKHHPEFKERYRKLKARRGHKKAIIAICRMLLTAIWNVLSKAEPYSPAGYLSDHQVTEVRTLTQKQALNLLKSRGYVITDEESA

SEQ ID NO: 175636 - protein, 424 aa, unidentified
MKVTYQTCCGVDVHKSFLVATIVKTTGGIEPSYQKKRFSTFNNSILEFKQWLINNNCHDVCMESTGKYWIPVFNLLEDQINVTIANPKWVKAVKGNKDDTKDSKWIGDLFRLGLVKGSYIPCKAIRILREYTRYRYKLVSCRSSEKNRYQNALTVCNVALDSVVSDIFGKSSTSIIDYLLEQSGTTINHEEIASKLLRRLKSKEDAVIESVEGYQMTDAQKYRMRLVRAHMDYITAEINDVDKMIENMISSNPDFENAIQFLCTIPGVKRDSAITIISEIGTDMSQFSSSKRLCCWAGLTPGSNESAGKKKSVLITRAGVYLKPALVQCAHAAVKSDKSPYYKKKYESLVKRRGKKRSIIAIARMILTAIYQMLSTGEQWNPGDLYKIDMPVALVEKQKAKAIKQAKKLLQREGLLPPDEPLAS

SEQ ID NO: 175637 - protein, 335 aa, unidentified
MQTAVMDQRGFIIDEFTFTNTHQGIEGLASKLTMDDRVVMESTGSVWTNLYNSLDDKHIPVVLANPLKTKAIASARIKSDKVDARILAHLLRGDLVAESYVPPKHLREVRALVRHRASIVKIRTMVKNKVHALIDKYGYTCGYSDLFGRGGVEWLNSLELASLDRLMLSNHLQHIENLNQQIERVDEEIRSKASQDEDVKLLLSMTGIDIYTALLIRSEIGSIDRFPDYKKLVSWAGLAPSLHQSGSIEYSGRITKQGSRMLRWIMVEAARVAVNHDERMRAFYERVKHRRGDQKAIIAVANKMLKIIWFMLKRREPYESTNRKRYERKLNSLAR

SEQ ID NO: 175638 - protein, 341 aa, unidentified
MEEISMYAVDTAKSVFQVHGEDAARTVRVQKRLRRGQFLGFFARLPGPVTIVLEACGSAHHWARELMALGHQVRLIPPQHVKPFVKRNKNDARDAEAIFEASLRPGLHFVPVKPVEQQCDRALHRGRDLLVRQRSQLGNAIRSMLSEMGIVAAQGVAGSAQLYARIEAGDEAIPARLLPILSSLLEQWRGLHAAIQGLEDQIRAAAQADERVRRLMKIDNVGPITAHAMVAAIGDGRQFRTARDFAAWVGLTPAHRASADKIKVGHISKAGDRGLRRLFVLGASSGLIHARAKPDRASPWLKGVLARRPVKVAVVAQAAKTARIAWAVLTSGQAFRSPAAA

SEQ ID NO: 175639 - protein, 318 aa, unidentified
MNTNTLQNINVGVDTGKSQLDIYIRPLDIYFTVPNTDKGISDAIKTIKKHKPQRVVIEAKGRLEMLFILACDKAKLPYAVANPLRIKRFAEAIGQRAKNDRLDAALIAHYAERVQPELTKLKSENMRLMSDLVTRRNQLLTMQTMERNRLQILPKNISSTITPILTALKNQLEKVEAKIAKLIESSPEYQAKSTILQSMPGVGKVLAASLISNVPELGFITNKQASSLIGVAPITRESGRFKGKRMIKGGRPQVRTVMYMTMMSAIQCNPVFKATYERLLAAGKPKKVAIVACMRKMVVILNSMIRDGVMWDKGSAKN

SEQ ID NO: 175640 - protein, 318 aa, unidentified
MEPNVFVGIDVSSKNLDVATRPTNKQRRVSNDAEGHLAIVEMLRGQAALVVLEPTGGYERPLVVALVEAKIPVAVVNARQIRDFAKSRGKLAKTDKIDAQMIAAFAEANRPEPREIPDEETRGLEALVSRRRQLVDMRATEMARRDLAPKIVRPSIEKVIKLLSDEIDDVDSDLGARIKKNSVWRAKDALLQSPKGVGPVMSRTLIALVPELGTLDRKQIAALVGIAPFNNDSGSKRGRRSCWGGRAPVRSVLYMATVVAAIHNPVIAATYKRLIGRGKLVKVALVACMRKLLTMLNAMVRDGRPWSPPLLAEGAKNA

SEQ ID NO: 175641 - protein, 339 aa, unidentified
MMIIGCDYHPSFQHVAFVDSESGECGERKLMHRAQAEDFYRGLQPRQVRIGMEATGHGRWFERLLAELRHELWIGDPAAIRAQQVRKQKTDRQDAALLLQLLVENRFPRIWVPSAENRDLRQLLWHRHRLVQMQTRVKNQLQALALNEGLRRGKGLWSKAGREQFQALALAPWSARRRQDLLELLDGLHARIQQLSLAVEQAAQQRPEVQRLMSHPGVGPITALAFVLILGVPDRFRCGKQVGSYLGLIPSEASSGGRQRLGHISKQGNPLLRFLLIESAHAMVRYEPQWRRRFLHLAMRRGRGIAKVAMARKLAVRLYWMWRQGWDYPQLAKFGSHVE

SEQ ID NO: 175642 - protein, 338 aa, unidentified
MGVYIGIDLHSNNCFVTVIEESGKVVYEKRLSNDLPLIVSELEPYRDHCEGVVVESTFNWYWLVDGLMEAGYGLHLANTAAIQQYYGMKYTDDKSDARWLAQMLRLKVLPEGYIYPKGERAVRDLLRKRSQLVQQKVSQMLSIQNLVSRNAGVHLNGNAVKTLTGWDVDRMLPDPLVARAAKSNLRVYRCLAKEIKGIEETVLARVKGNAGFENLLGISGIGKALGLTVLLESGDMARFPGAGHFASYCRCVGSQRLSNGKKKGKGNTKNGKKWLAWAFIEAANYAVRYYPEVKRFYQRKKARTNGVVAIKAVAHKLARATYHVLKDGVPFQVERAFA

SEQ ID NO: 175643 - protein, 359 aa, unidentified
MSTIAQQAREITGGVDTHKDTHTAAAIDSAGRPLGAEQFEATAAGYRKLLAWLCSFGTLVLVGVEGTGAYGAGLARYLHEQEVRVVEIDRPDRKARRWQGKSDPVDAEAAARAALARRRTGIPKQRDGRVEALRSLRVARRSAVRQRADAARQMKTLIITAPEELRTILRDLGDRQLIATCAASRPDARRAGEPLVAARLALRTLARRYQRLTDEIEELDEVIAPLVAQIAPSLLALNGVGADVAGQLLVTAGENPGRLRSEAAFAMLCGTAPLPASSGRTQRHRLNRGGDRGANSALYRIVLCRLRWDERTKQYMERRTKEGMSKKEIIRCLKRYIAREIYQVLTAPALTTEHLTTAA

SEQ ID NO: 175644 - protein, 284 aa, unidentified
MRYAQINAEYYCGIDLHSRTMYVCVMDKQGNILFHRNMKNNFSELKNYLAPFLPNVAVGVESSCYYYWLSDACKDGHIPFYLGHAYYMKAINGGKVKNDRVDSRKIADLLRANLFPLAYPYPEKMRATRDLLRRRHYYVRKRAGTYTHIQISCMQHGMYDVSSKIVKDEQDRRKLTALFDNPDLKLLLKTDIDFIESLQPIIEELEKQIRKQAKYHNQRDYNLLMTIHGVGEMLGLVILYETHQISRFPTVQQYSSYCGVVKCERRSAGKIIGAKNNKIRNPYL

SEQ ID NO: 175645 - protein, 426 aa, unidentified
MLNSQINKIQAITSDTLIVGVDIAKNIQWAQFINFRGIEVSKHICFENNYSGFNSIMEKIEEIKSKNNFLSVIVGMEPTGHYWKTFATFLHNNGIKVVQVNPYHTKKAKELDDNSQTKSDKKDALVIVKLIKDGRYSTIYFPEGEYANLRNLSNTRLEVSRLLNICKNRIHTCVDEYFPEFETVFKSFIKGKVALHILKRIPFPTDILGLTLKEIILIIREAAKKSVGKKKAEELIRAAKVSIGVKVGLEGARIRLNNLLEEYELYHNQLEKIEKEMAQELEKTGYKDILTSIPGIGIISVASFIGEIGDPKRFSNPQQIIRLAGYNLVEDSSGKHKSKTMISKRGRKILRTVLYKISLIVVCKNQEIKLLYKYLITRKENPLKKKQALIVISGKMVKIMYSLIKKEEVYDKEKVLGIYRKQQIVA

SEQ ID NO: 175646 - protein, 360 aa, unidentified
MSHLCSLAEMPDGDMPRYIGFDAHKSYAYVVELREDGKRLNYRVALPDGLPAFKQRLDADCQLVLEASTNTFRLADELAPHVGRLVVGDPAQTRGAISRPATTDRNAAEALARLLASDFVRPVWVPPQEIRSLRNLVELRVRLARLRVASVNRIRAMLRQELVPGKPALVEENVRALIGSDPTLQAYCGSLFAVRDMVAKECGQVDAILHAWCRGSEDARLLLSVPGIGPLVAACLVAQVGDVKRFSSARKLCSYAGLVPRVHASGQSYRSGSITRAGRRTLRWAMGIAAMSATRVDSSLSEFKASLCQRRPKGVAMVACARKLLTVVWRVWTTREPYATEDGRYATKLARLDRGSTGDQ

SEQ ID NO: 175647 - protein, 337 aa, unidentified
MKYSGIDLHSNNSVVTVTDEEDRVVAEKRLPNDLTRIIGFLLPWREEMVAVVVESTYNWYWLVDGLQEAGFVVKLANTAAIKKYDGLKHSGDEADARQLAHLLRLGILPTGTILPPEQRAVRDLARKRMQLVRSRTRHILAIENIVARQQGAKIGGTRIKRLTADAVDQIGLPVDVAFAIKSNLAVVITLNAQIDLLEKRLQEKVVKQMEYTLLISVPGIGQILATIILLEIGSIDRFAEVGNFASYARCVDSQHMSNNKKKGEGNTKNGNKYLAWAFIEAANYAHRFCAEAKRFYERKKAKTSTAVATKALAHKLARACYHILKEQKPFDVTRCFA

SEQ ID NO: 175648 - protein, 432 aa, unidentified
MKNDNRKYLSVGIDVGADFSLMAIALPSQELLGKSYRIFHNSKRSLDGAIDRIYSVMEQYDLPARIFMESTGIYHFPVYHKMREAGLDAYVLNPLVTHASKDINVRNIHNDKFDAQKIALLGLRPDLKTSIVPSDDVAAMKAILREYYAMKKETSMYICRLKDQLRQVFPQFIPVFSKVNGVAAMAVLYEYLTPDSILAAGADELERFMKTVISKGPLHIRKKAEALVEAARDAQNFGHGNTGVFYLIRHYIEMIRLLDAQTKQILTQVKVLLKEQKNSQMAKQVRLLQSIPGIGFLSAVTLVCEIGDFSAFKRPKQLFAYFGLDPAVRQSGNFSGADLKMSKRGSPYARRCIYVLAIQSVSLRVDGTAKNPVLRSFYEEKCKSKSKMTALGAVMHKVCNIIFAVLRDERPFVLVTPEEHRTAYFSASVKAA

SEQ ID NO: 175649 - protein, 330 aa, unidentified
MNKEVEFYIALDVHSRSTSYAVRTWQGNIILEGECSSIYGDLKAALQPYFHSCVVGMEACTSFYPLRNGFVEDDVPVKVANVLRMRQLVVKNDRLDALRLSDMLRLGTFPESYIPEKDIQILRNLVTSRHSFLEELNKAQCRIWALLQRDGIKIPSRSIFSKKGMMYLKDISEKECCPLDLRHLYSHLGYLELQLQKSTKEMIDYASKTFPKEWMALQSIDGIAEIISSYVIANVCPVSRFASKKKLRRYAGIVPCMRESGGKSYGNMLPKSSSRRLLRWALTQAAHCATRKKESKLRLYYESKKNKSKQKAKMAVARSISDLVYFKLNK

SEQ ID NO: 175650 - protein, 411 aa, unidentified
MTYKVAGIDIHKKVLMVVVTDAAAAEWEFESRRFGTTASEREHLVAWLQQREVQEIVMESTAQYWKPIWLDLEPHFQPLHLAQAQSNRAPRGRKHDFADAQRLTRRLVAGELILSFVPDAEQRGWRTITRAKVQLVGDRVRLQNQLEALLEETRIKLSSVVSELLGLSGRRILRALAEGQSDPAELAKLGDFRLKCSQEELADALRGQWQPLHRQMLQLFWQRLSLLDLQIQQLDRMAAETMRPYEDAVIRLAEVPGFGPDSAQQIIAEVGAQAKSFGSAAQFASWAGLCPGRQESAEHNYSSRSPKGNPFLRRVLTQAAQAAVKKKGSHFQIVFRRWRPRLGYQAALWAIAHKLGRLVWKILHDGVHYREQGEPPNPTVQRRRARRMVQALRRMGYKVEIAPLNPQPAQG

SEQ ID NO: 175651 - protein, 309 aa, unidentified
MDECFAGIDISKATLDVVKRPSNEHWTVSNNEEGFAEIIGHLKGVKLVVLEATGGLQVAVTAALLNAEIPVVAVNPRQIRDFAKSIGILAKTDHVDAKVIARFAETIRPQVRLLKDEEMLQLEAIVVRRRQLVSMLTEEKNRLHMAPKKIKKDIEEHIDWLQKRLHEIDKEMDGFIKNSPAWREKEKILRSVPGVGPILTATLLCELPELGTLDRKKIAALVGVAPFNRDSGKFKGTRCVWGGRAAVRAVLYMSTLSALRFNPAIKDFYQRLRSSGKKPKQAITACMRKLLTILNCIVKTGETWQFNFS

SEQ ID NO: 175652 - protein, 427 aa, unidentified
MNNTQNEKIAQVTNDTMVIGIDIGSQKHWARAFDNRGMELSKKAFAFSNTAAGFASFEVWYEGQRRSAGLKRIMVGLEPTGHYWFNLNQFLAENGVKVVLVAPQHVKHSKELDDNTQRKDDLKDPRVIAKLVTEGRYFLPYRPSGVYADLRDGFNRRCGIVESMTRAKNRLHRWFCINFPEYLEAYGSVAAKTGLMVLKKAPLPKDIVALGVDGIVKIWRDAKVRGAGIKRATTLVALAEQSIGEKSASEAARLELWQLLEDYEHYAHQYEVIEEMLERRVHEVPHADKLLQIPGIGYFTVIGFFAEVGSIDRFDDPKQIQKLAGLAVVENSSGKRKGLPGISKRGRDRLRCVLYQAAMSAVKNNSEFKEIHLYFTTRKDNPLKKMQSLMAVAAKIIRVFYGMVKNGTEYDPERFLRDIHRPENAAA

SEQ ID NO: 175653 - protein, 354 aa, unidentified
MSKRRTAAALVFLKPERLRAPPSSAHAQVWDAKTMSGNSVAVGIDVAKAHVDCAALGAKLATRHFTNDIDGHSALAAALQPLGVALVVMEATGGYESAVACALQAAGFAVVVVNPKQARDFAKGMGRLAKTDRIDAHALAELAATLVRRSDLARFIRPLPDAQQRDLAALVTRRRQLLTMLGSERLRLQLATAKVRPSIEALIEAIRAQLEDIEAQMQAHVHEYFAPLDDLLRSARGIGPIASATLIGTLPELGRLSRREISALVGVAPIANDSGTSHGRRRVRGGRFQVRRVLYMATLTATNHNPTIKAHYQRLLAAGKLPKVALVACMRKLLTMLNAMVRTQTRWRDTPHCA

SEQ ID NO: 175654 - protein, 344 aa, unidentified
MEHFAGLDVSVKETSVCIVDDTGRIVREAKVASEPEALLAVLNNPSYRFRRIGLEAGPLSQWLYSALGEANLPVICVETRHMRAVLKAQINKTDRNDARGIAQMMRAGLYRPVHVKTLRSQKLRMLLTHRKLLQSKAIAIENDLRGTLRNFGLKVGVVGAVKFETRIKQLVENLPDLALLVEPLLVVRRVLREQIAVLHRRLLDIVRDDEVCRRLMTIPGVGPVVALTFRATIDVPARFRNSRAVGAVLGLTPCRHQSGESDRTGAISKCGDEMMRVMLYEAAQILLVRSTRWSWLKVWAMQIARRCGLKKAIVALARRLAVIMHRIWVDGTEFRWARQAAAAA

SEQ ID NO: 175655 - protein, 376 aa, unidentified
MKKYSKFVGLDVHKADIVIGTANADRGEAGYYGTIENAPHTYLKLAKKLSKDGGEVLFCYEAGPCGYEVYRQLTKAGYDCTVIAPSLIPKKSGDRIKTDRRDAVSLARLLRAGELTPIWVPDKEQEAMRDLTRAREDMKTMERRSRQRLGGFLLRHGKVYPGRSKWTKTYFRWLESLRFETAVQQIVFQEYIDIVKDAQQRVAAMEEEMRKALTGWTLKPVVEGLLALRGVDLIAAMTIIAELGDITRFESPRQLMAHLGLVPSEYSSGERQKRGGITKTGNGHARRILLESSWSYRLPARKTAHLRKKAEKASKAVQEIAWKAQKRLCSRYWYLIHKGKLSVESSTAVARELVGFIWAIACEVMGRNRSITVVRG

SEQ ID NO: 175656 - protein, 435 aa, unidentified
MEEVTDEPLYRDRVCGIDIGKAGLVATIRVPSDRDPARRMQETRSFGTTKREVLALADWLRCWQVPAVVMEATGDYWKGPFYRLEAEGFECVLADAKQVKNLPGRPRRDPADSRWLAACFERGAITSCFVATPEFRIIRLHTRYRRDLTEERTRDKQRAEKLLESAAIKVSSVLTDLHGVTGRDIMDHLIAGERNPKVLAQLARAAARRKISQLEEAVEGAEFFTAEHAALLKIMLARIDRLTADIDQLTAVIEQLLAPYEEQLQQAESMPGWGRRAAQDAVAETGVDMSRFRTGGHLVSWAGRAPQDHQSGKRAGRAKAKKGNRYLGAITGETAVAAGRTQTREGARHRRLARRRGTAKACVATGNTQLKVYHKLLSNPGMRYEDLGPDYYDRQRDVRRQVAHHVGKLGSLGFEVTLCRIPEPDPDGTGPAQAA

SEQ ID NO: 175657 - protein, 442 aa, unidentified
MPKCVAAQSLPLSNDEGRVVMKLTYPICCGVDVHKTFLVATIIKTDGLVLKYHKKRFSTFSRDLLAFKQWLLDNNCKDVCMESTGKYWIPVWNILEDVVHVVVANPKWVSAVKGNKDDTKDSRWIGDLFRMGLVPGSFVPNKKIRVLREFTRYRYKLISMRSSERNRFQNAFTVCNSTLDAVLSDMFGKSATAIQNYLLDTDVVNPAYCASLLQRTAKKKSADVMAAVEGFKMSAEQKERVRIIQEHFSDINARVARLDAEINKMVSECESQISLLCTIPGVDRNLAITIISEIGTDMSEFGSSKRLCRWAGLTPGNNESAGKKKSVRITRAGVYLKPALVQAAHAAVKSTKSVYFKSKYERISKRRGKKRAIIAIARMILTAVFAMLKTGEVFNPCDLQKYDMPEQLKRKQIVSSAKDAVKFLVSLGVLQEDTVSLAALTG

SEQ ID NO: 175658 - protein, 432 aa, unidentified
MEKIRKDCAGIDIGSKKVFVAIEGQEVKTFYTFTEDFEKLRDYLFENDIKTAAMEATGVYWGILYEMLEEVGIDVWLVDGRQTKQVPGRKTDVKDCQWIQQLHSYGLLNRCFVAESDIKELRSYQRLREDHIRSASMHINHIQKALTEMNIRLTEVLDQIHGVSGLAMIEAILKGERDKEKLLKLCHTKIIKNKKDEVLKALNGRYTKQGLFALRQAFESYCFYQNQIEQCDQMIDEVLQKISRGKPDQKTDVRRKPIRHNKPDIDNLGSMMLKIFDGRDATTVSGITDYSWMQLLSETGGDLSRWPTEKHYTSWLGLAPGQHNSGRMEKNRRKSGRPKAGQIFRQIAQSLLTSKRIALGAFGRRLSVRKGSPVAIKSIARKLAVLYWRVMVKGMAFVEEGTKKYEEQLLVQKQRSLNRLAKELKVQVIYNV

SEQ ID NO: 175659 - protein, 320 aa, unidentified
MYYIGIDVSKKDLSVFDGKKDLKFINKEGLRSFKKYLKKKVNFSDLVIIFEPTGVYSLYLKEFCAENSIKAYIVNPKKSHNFTRALGKRSKTDKIDARILYQFHKLIEAKDIKIPRIDQQAKALASYLTSYEFALKQRVALSNHLESLRDKELIALIKKDLKRAKKLEDKIFNDILEYVSKNQNLKEDYQRLSTISGVGDKTAIALLTLFKTYQGTNRAQITALAGLDPVRRESGTSVKGKVKISKNGKGIYRKIFYLPTVCATVHNQKIRVFYQRLLAHHKIKKLAVIASMRKILLIAHAIYIETRQNMLLSRFFKIFK

SEQ ID NO: 175660 - protein, 494 aa, unidentified
MSSQSINPEQRLRHLEGHYADRVTAFRQRLARVGLDRVLITLLDIGKNVHWATAWTASGVELVRPHRLPATQTGLTQFIHMTDGLIAEHDPLLVLLGHEPSGVYHEPWARALMNYYGPHINGQSQPAFDYRFFNPYQVKLARLQTHLRHRKTDPRDLAAMLDLMLRGLGQPAFLPTGTELLIRQEIGFIRAQSRLLGHLDRQLRQQLDRLWPGAIVNLKQFSRAHPGLPKPTPIIQTRPLQRDRIRVLLTHCPNPHDLIAMSDQHILDLYREHVGRAGPALLNTLRTWADNAVLLPSDVSASLAEQLQRLFLQYVAAETLIEEGRGRLVPLIPDTPARHLPAIPGLGDMDAAAYLAGVGSIHRFHRAAEVWAFAGFDPIADGSGDKPDRVGRISKHGDPGFRDALYQMGYRTAQNYAPLSITFLDAFDRGQCEVEATIHAAHRVNRICFHLMKNDEPFESQSTPKLEAEKARRWKAFKAEKKKRGSRRKRGKRR

SEQ ID NO: 175661 - protein, 411 aa, unidentified
MSYKVAGIDIHKKVLMVVVADVAAEEWEFESRRFGTAAREREHLVAWLQQRGVQEIVMESTAQYWKPIWLDLEPHFRPLHLAQAHSNRAPKGRKQDFADAQRLTRRLVAGELILSFVPDAPQRGWRTITRAKVQLVRDRVRLQNQLEALLEETRVKLSSIVSELLGLSGRRILRALADGENDPVALAQLGDFRLQCSQEELADALRGHWQPMHRQMLQLFLERLGLLDRQIHQLDRMAAEAMQPYEDAVVRLAQVPGFGPDSAQQILAEVGAQARAFGSAAQFASWAGLCPGREESAEHNQSSRCPKGNPFLRRVLTQAAQAAVKKKGSHFQSVFRRWLHRLGYQAALWAIAHKLGRLVWKILHDGVHYQERGEPSNPVVQRRRARRMIQALRTMGYQVEISSLNPQLAQG

SEQ ID NO: 175662 - protein, 380 aa, unidentified
MCLIDEAGTTLWSSRVANDEGAILEAIGVVLARAQQVRWAVDVTGTMSALLLALLAAHGQRVTYVPGRTVNRMTVAYQGEAKTDARDAYVIAETVRHRGDLHEVDVPTALVSELRLLVAHRSDLVADRVRIINRLRDVLTGYFPALERAFDFAHSRGAVVLLTGYQTPAAIRARGQSRLQAWLARRKVRSAAQIAADALAAAQTQHTSVPAEAVAASIVADLATQLLAIDARISDLTERVTTTFRSHPQAEIIESLPGMGPILGAELIAAAGDLNGYPDAGRLASAAGLVPVPRDSGRRTGNLHRPTRYSRKLRRVFYLSAAASMMREGPNRDFYLKKRAQGLKHVQALIALARRRVDVLWALLRDNRVFQSTAPAARTA

SEQ ID NO: 175663 - protein, 450 aa, unidentified
MRVVYKKCAGLDVHKKTVVVCVRTNEKQETRTFRTVTSELRSMAAWLMSFGVEAIVMESTGVYWKPVWNVLEEIEAEWELLLVNAKHVKQVPGRKTDVKDAEWLAELLRHGLLNRSRIPERAQRELRDMTRYRRSLVRNRTQEVQRLQKILEGANIKLDSVLSDVTGVSSMAMIKALISGETDPIKLASLAHKNVKATPEELAQALEGVVGTGHRLVLNVLLEHIEHLDSQIRRMDSEIARQMDSLGPFPPAGGNGRHGNPEETCAFDPETGEVLSESVESNAVSWSRAVELLDSIPGINTRAAQDLLAEIGLDMSPFPTSGHLTSWAKVSPGNNESAGKRRSGRTGQGNKWLRTALIEAGWGAVRKKDSYLKALYGRLSGRRGSKRAIMAVARSILEAIYFMLKRNEHYRDLGAQHYDELRRDRVTRQAVRRLERLGYDVQLQDLAAAS

SEQ ID NO: 175664 - protein, 338 aa, unidentified
MGTYAGIDLHSSNNYIGIMDQDHKRLFGKRLPNSLDRILMVLEPFKADLEGVIVESTYNWYWLVDGLQENGHRVHLANPSAIKQYEGIKHTDDKWDSFWLAQMKHLNILPEGYIYPKEQRAVRDLLRRRLFFVRHRTANILSLQSTITRNLGIKMSGNDIKKLDMDNACDLFDSTNLVFMAQNNISSIKHLGEIIKGIEREVKSQVKLRKEFVMLTTIPGIGLILGLTIMLEVGDIGRFFKVGNYSSYCRSVGSKRLSNGKKKGENNKKNGNKYLSWAYVEAAHFAKRYIPKAQRFYQQKLAKANGAVATKALSNKLSRASFFIMRDQVPFDEDMLFR

SEQ ID NO: 175665 - protein, 343 aa, unidentified
MELNAIGIDLGKTLFHLVGLDASGNVVVRKKCSRAQLLKYTANLRVQRIGMEACSGSHFLGRALREQGHDARLMPAQYVKPYVKTNKSDYIDAEAIAEAVQRPTMRFVPIKTEEQLDLQAVHRLRERWVMRRTAVVNQIRGLLLERGVTLPKGRSHVDEALPEILQDADLKLSGSFRLLLSELQLELEQLAEHIQQMDSAIQHTVKENEACQRLTTIPGVGPVTATALIAAIGNGSGFRKGRDLAAWVGMVPREYSTGGKQKLLGISKRGNNYLRTLFVQGARAVMRYRAKQAPGLNHWLTQLLARTHQNVVIVALANKLIRMAWAVLCKNEVYRAPALVASD

SEQ ID NO: 175666 - protein, 466 aa, unidentified
MELILGIDVACRAAHQASLARPDGTFVWTGRRFFTRPDELEKLWSACGLKKRDTVRIIMEPTRNAWAPLASWFRHRGARVSMVPTTQSADLRAYYSKHAKNDHLDSKMLARLPLLHPEGLRDHTGGGPAEPLRRIVKIRSSIVKRRTAVFQRLDAQLELLGPAWYDALSARFGKTALELLARYADPNTVIRLGHARLTRFLIRHSRGAWRETYATAILAAARESLQLWGSGDDARIDFAELAADIAVEAEQALALTEQIDDLDERAANLYAEADPNGIIASAPGVGPIIGAVIAGRLGDPHRFHSLAAIRAYSGLIPKLNQSGQTHQQNGLTKAGDPLLREALFAAADHARKTDPQLAAKYKRLMQTERHHDSALCHIATILLTRIATCLRTGQPYEMRDIDGRPIHADEGRKLVTAHHRVDQKIRVKAADTRRTQRLKGRTGRGQQESPSAPIHRPVNHSLEAAS

SEQ ID NO: 175667 - protein, 343 aa, unidentified
MQAITTIGLDIAKSVFQVHGVDAKGNVVLRRQIKRRYVLAFFQKLPPCLVGIEACASAHHWSRQLQALSHTVRLMPPAYVTPYVKRHKNDAIDAEAICEAVTRPNMRFVATKTREQQSCLTLHRTRHLLIRQQTSVINAIRAHLAEFGIVAPVGRNGVDQLLGIVADASDKRLPELARACVAALGTQLGTLKAQILQFDRLIMAWHRSSEASRRLDEIPGVGPALATALVATVADPQAFRSGRNFSAWIGLVPKQHSSGGKDRLGSISKRGDRYLRFLFVAGALAVIRYAKIHGTKHRPWLTALLARRHTKVAAIALANKIARMAWAIMAKGEHYKEPVALAA

SEQ ID NO: 175668 - protein, 338 aa, unidentified
MEREQQYVGIDLHRRRSVIVRMNDAGEVLKVSKIDNDPVALAMTLAEAGPDPEVALEACYGWYWAADVLEAEGARVHLVHPLGLHWDTRRVKNDVKDATELAHRLRRNDLPEAWIAPSEVRDLRELVRYRAKLTALRTSAKAQVHAVMAKLGILPTLDDMFGPGGQRLLDEMDFPGNHGLRVKSLRDLLEAYNRELVMVEREIAGQLKDHAGYRAIQALHGVGPVTAAILVAEIGDISRLPSARHLCSWAGMTPKLHESDTKSRSGGITKQGSTIVRWAAVESVSRYHGGAPIAPAYMRIAERRGKKIARVAAARRLLTLVFYGLRDGVIRCLETEAA

SEQ ID NO: 175669 - protein, 388 aa, unidentified
MPAAETPVAYLGIDVGKSSHSACALDAGGGVAFRAELANRPDDIDRLLERAGSGALVVVDQKRNIGALVLARAHAHGNPCAYLPGYAEKQARGMFPGIAKTDAIDAEVIARTALGVPRALRPAPEEPEGTASLRILSSQREFASSARTRAKNRLRATLLEADPALEGAVDPSSRWQVSMLAEFGGAAGCSAAGWRRFSNAARRAGAPAAGARRLWEALLASSRSGRRLPAGEGVAVRILAREIASLDADIEELDSLVADSLAGDEVYECLLTVPGIGPKTAAALVTSIDISAFRGHDELASYCGVAPSDRRSGSSIRSTSPQHGGNRRLKNLLIFSCNSLIGTDNRFGRYYGECRARGMRHSKALKAVARKRLKVIYAIMRDAVPYAA

SEQ ID NO: 175670 - protein, 319 aa, unidentified
MPKTMLTHVAGVDVHKEVLVITVLVGDLDKEPKKEQFTCSTFSEDLLKAGKKLLLMGVKHVVMESTGVYWKPVYNVWHPLGIIVTVGNASHVKNVPGRKTDMNDSEWLADLHRCGMVRPSFIPDTEYQQLRLLNRHRTNLADDISRVKNRVDKVLEDGNIKLSAVVSNLFCPAGMAVLDSISQGVVDTDSLMKRVYEVGIDRLKRKEEMRKALTNCLREDHCFLVKQLMQQYTDLNLRLAESDRELDRRLERYSDLIERLDEMPGVDKITARGIIAEASTQMEAFKDDRHFAAWAGVAPGNHESAKKKKEQKPGMGILP

SEQ ID NO: 175671 - protein, 361 aa, unidentified
MDVSKQQPKITAGLDLGDKYSYLCLIDQADGEVIEEGKLRTTPDALRRRFASEQQLRIAIEAGTHSPWVSRVLEECGHEVLVANARKLRFIYANKRKTDEVDAENLARLARVDPKLLHPLRHRGEGSQAHLAIIRSREALVSTRTQLVNHVRGAVKSFGARLPKCPARSFHNRAPEHIPEALLPALGPILEQIGSLTERIREYERQLETISKEHYPETDLLRQVEGIGPLTALAFVLTLEDPYRFERSRSVGAYLGLVPATDRSGDRDPQKRISKEGDEMLRRLLVGSAHYILGPFGSDSDLRRHGEKIASRGGKNAKKRAVVATARKLAVLLHSLWVTGAVYDPLHNAHRHARRRQEEIA

SEQ ID NO: 175672 - protein, 405 aa, unidentified
MEIIIERGCGLDVHKETVVACIMGTGIKKEIRTYTSMTHDLLRLKGWLQEAGITHVAMESTGVYWKPVFNILEDRFEVILVNARHVKNVPGRKTDVQDSEWLCRLLRSGLLKGSFIPPRGIRDLRDLTRYKRKLIQTIVAEKQRVEKVLEDANIKLSSIASDTFGVSGKRIIEELIQGKLGAEEMAELSKGRLRPKREHLKEALVGEVREHHKFMIRASLKHIRAMEKILLGIERKIREKIERDYKEEDELLQTIPGVKENASTVIAEIGVDMDVFPDEMHLSSWAGMSPGNNESAGKKKPGSTTYGNKCLKAILIEFGWVASRMKGTYLRSKYHSLVGRRGKKKTLVALGHKILIMCYHILKYRRPYKELGEDYLDKRRKDRITRSYIKRLNHLGYEVILQEVA

SEQ ID NO: 175673 - protein, 323 aa, unidentified
MNTLDFLGIDIAKRTFNVALLRNDKLRHKKFENSPEGFKQLDSWLVKQGVIEIHACLEATGSYSEGLALHLHQAGHKVSLVNPARIKAFGQSELRRNKTDRADATLIARFCSMHRPAAWVPPPAEIRELQALVRHLDDLIGTRTQLGNRFTDGPKVKSVLESLKTLIEAVDVEIKLTRKKIREHIDQHPGLKEDCELLETIPGIGEKTATTLLAEIEHLRNYKHARQAAAYAGLSPRLRESGTSGKRSRLSKTGNSKVRKALFMPAISAKQHNPVLRQFSERLARRGKPKMAIIGAVMRKLLHLAFGVLKTRKPFDPNHPVAA

SEQ ID NO: 175674 - protein, 394 aa, unidentified
MKLVGIDVGKNSHHFCVMDKETGEFNVTPTSFSNNKEGFDFLINSLKPYSKKSILLGMEDTGHYHVALLKFLLSNGYTVALINPKTTDLTRKMEGGITKNDKLDTITICDVLDTPERKKQYRITKVDRFDLYEQRQLTRHHHNLKEELNVYCNRLQKSIDLVFPEFNTLFSSKYSIVYMNLLKTFGSAEAIASTDIRTIRKCFEIKGRGNRISLTPEKLKECAKNSIGISSEVETIQIKHLVSQITLIKEQIAEIDKKIEEFSIKNNSPILSIPGISHFSGTSILAELGDIGNYSKPSQIIKFAGVAPYHYESSQYNAQHTGITKKGSKYLRKTLYQIILTVINNNPVFKKYYRLKISQGKGHRCAQGHCIRKLLRIIYHLLETGQSFDPALLR

SEQ ID NO: 175675 - protein, 273 aa, unidentified
MIIIGVDFHPEFQQIAWVDTESGEFQEQRLAHREDAEKFYRGLAAAGQKVRVGMEASGHARWFERLVAELQIELWIGDAAEVRTKRVRKQKTDRQDAQLILRLLLEDRFPQIWVPSWENRDLRQLLWHRHRMVQARTRIMNQLQAVALNEGLRCKKRLWRERGRKQLEAFRLAPWASRRRHDLLELMDRLNPTITELTQAIEQEVEKCSEAQRLMTHPGVGALTALAFVLIIGKAERFHCGKQVASYLGLVPLEESSGNRRDAWGISPNRGVR

SEQ ID NO: 175676 - protein, 388 aa, unidentified
MNITTDQPEAPTAIRTDLGAIFVSLELSRSSWLITSLSPGGGEKMSKHAVRGGDVSRLLERFSQLREKARARTGKVFPLIVIQEAGLDGFWIDRVLQNEGIESHVVDPASIATSRRRRRAKTDKIDGETLVRSLLAYKRGEPRVCSMVKAPTPEEEDQRRLCRERKVLTAERVLHVNRIKGLLFCQGICGYEPLRRDRRDRLEELQTGDGRPLPPHLKAQVERELDRLELLLKQIKTVEGERDALLAVAITSMPAPAAMLLDIKGIGPEFAAVLWSEGLFRHFDNRRQVAAYAGLAPTPWQSGAIDREQGVSKAGNPRLRTTLIQLAWLWLRNQPQSALTIWFHERVLRNGGRLRKTTIVALARKLLVALWKYVTTGVVIEGATMKAP

SEQ ID NO: 175677 - protein, 372 aa, unidentified
MRADRKRGKVKGCRMNCLVAGIDLGDRESLATVLSPIGDVADRFSFPMNEEGYAYFASRVPKDARVAFESTIMAYPISRALRMHGYMDVTVAHPKTLTWIVRSKKKNDRVDSLKIAKLHMAGMLPESHLLDRDEQIVRDLLVQRVKLGVEIGRLKSSLIGYLKREDVYNSLPKSEDNFSVRRRRAIRSLRFEDKRDLILGTMMDRLEFLERQCIPLEDSVRGNARASDDVRLLMSITGVDYYLASLISSFIGSVDRFPSDDHLASFLGIVPTSRDSADVKRRGKMTKDGSSIARWALSVMVDTVMRHNDPIREYYLGVKKRAGSGKLAHVSTMRKLTRMLYHMLKTKQHWKWENPQLTERKMTRLEIGGDVP

SEQ ID NO: 175678 - protein, 321 aa, unidentified
MINRIYVGVDISKNWFDVCTSVEENAPVERYSNNPDGHAKFIKAVTTLARKIQVCMEHTGGYETPLALACIAANLTVSLLDGAKLADYRKSHGRAKAKTDRQDARLIARFSKERKPALWLPVPDEYLKLRELVRHRESLKKAKTAWSCRAAHTVQSELVTAQRKALCTILALQIKEVDKAIAAHIQSCSELKEARELLISVPGIAHISAASILAESGPISNYKSAKDYALAAGLNPIVNHSGKKTPPGKLPVYGNAELRSALYHPAMTCKSHNIGVAKFMDRIQNNGNKMKMTVITAGMRKLAHIIYGVLTSKTKYDKNKP

SEQ ID NO: 175679 - protein, 405 aa, unidentified
MLSAGIDWADTKHDGLVLDEAGRKLGSIRVAHTAEGLAKLDEWLAHLLGQQRKGQMACSIETNHGLLIAFLLEHGWPVYPVNPRTVDRKRSASGAKTDAIDAYLLAKTGRADFADLHRLTPDSEKVAELKTLTRDQDSLIQMQTRLVNQLTACLKDYYPVALKLFSGAFQQKSTLLFLQTSPTLEAAQTASVEHLRQVLQSAGHTTASKVAPTIFEQLHQPSLRANVVTTRTKARLTMALIAQLLPLVEQIAAYDKEIEQLFLSHEDHEVFRSLPGAGKRLAPRLLAEIGDDPSRYEAAASLQALGGTSPVVFASGNYSKPHRRVGCIKPLRNALHQFAWQSTLQEKWALAYYERKRAEGKSHSVAVRALSNIWARVLFAMLTSHKPYDPTTFEQAQRLHAPTAA

SEQ ID NO: 175680 - protein, 318 aa, unidentified
MSKSITVAAGIDTSKDKLDVAIHGCAEQLQVGNDAAGHRSLLAWLRRKRVTRVGIEASGGYERAVVAELRRAGFVVIVFQPIQVRAYAMFRLQRAKNDKIDAALIAACTAAGEDKIRPVPDARFAAFAEHLTLIEQIEEDAARYKTRRDTFLDKTNLQLIESEIVRLQAWRRRELKRLREAIYAHADLKQRFRLIHSVVGIGGRTALALLVRLPEIGLLTRGQAAALVGLAPYDDDSGRMTGQRHIAGGRKRLRKSLYAAAMPAAFHWNPALIALYGRLTADGKTHKQALVACARKLVIYANTVVARGTPWSNRTAIA

SEQ ID NO: 175681 - protein, 338 aa, unidentified
MNKKSNKQFHVGVDVSKDTLDVAARTDSGVEQRTAQLANTSAGHRHLIKWLTKGGRSARVVLEATGVYSLDLALALDAAKRIEVMVINPRAARKFAEACLQRSSTDATMATALREYAARMEFVPWTPPAPQVRALRALARRIAALTVEKSRELNRHHAASATTDTPAVVLNDVAVNVRHLQRRLDELERHALALITADPELKPVYQHVLSVCGIADTTAIQLLGELLVLPADMSAREWVAHSGLDVRHVNSGTSVHKLPRISKQGDANIRRILYMPALVASQREPHVRAFYEQLLAAGKKPLQALVAIMRKLLHAIWGMLKTNTDWDGAKFRKLPEAA

SEQ ID NO: 175682 - protein, 469 aa, unidentified
MKDHRLKDHRRPSTKPRMSPAALERLHPHAAGIDCGSAAHFVAVPPDRDTMPVRSFATFTGDLHRLAAWLTACRITHVAMEATGVYWIPIFEILESRGFHVILVNARHVKNVPGRKSDVSDCEWLRDLHILGLLRGSFRPDDAIVALRAYLRHRATLIESAGALIQRMQKALVQMNVQLPLVVSDITGVTGLRILRDIVAGQRDPQQLARHRDYRCRASTAEIVAALTGNYRAEHLFVLQQNLELFDAYQRQLAACDTAIEAHLTQLAAAMPAPTTPLPAARPRQKPRQNDPRFEIRAALHQLTGADLSQLDGIGPYNALRLLSEIGTDMSHWPTEQHFTSWLTLAPHNKVSGGRLLSSRTQPSANRAAAILRLAAMTLARSQTALGAFYRRVAWRIGKAKAVTATARKLAILVYRTLKDHLVYVDPGADVYDAQHRTHVLRRLRQRANNLGFGLINLSTGELVEATVS

SEQ ID NO: 175683 - protein, 433 aa, unidentified
MSKFFYSPTVGIDVSADFSYVAILTPNGETYKKSFKINHDVSGFNHLLKEIKKVEEEFNMKTAIFMEATGVYHLSLFHFLNKTLDNVFVINPLVTKCNKNVDIRKVKNDKKDALSIAKIGKFQNIKLSQGVNLDIFLLRSLVREYYKLTDTCSTFKKKLSADLRVIFPGYSTVFSNVTSLSSITLLSRYSSPKAVLDAPKDEIIDILISKSRKGLLWAEKIYSKLHNVASDAAIIGLPLPGLSIKITSNLALLNALELEVQNLLSEINTLIKSKDFPKQVSTNIELLKSIPGIGELTAITVVAEVGDINSFIKPKHLVAFFGIDSSVNESGKFKGNQNKISKRGTRMGRRALYAVALASIRKTRNGVPINKVLLDYYKTNLDGKRAKVALVAIMHKILNYIFAVLRNQEPFELRDPRIHKQMFLENKAKAIAA

SEQ ID NO: 175684 - protein, 354 aa, unidentified
MKEYSMVVGLDLSDKTSRYCTLDANGEVQGEGSIRNTEQGVRGHFERLEPCLVAIETGTHSWWMGKLIAELGHEVVVANTRKVRAISHNDKKSDRADAQMLARLARSDRELLCPVTPRRERAQTDLAMLKARDALVGTRTKLVNTVRGLLKSFGEAPPACSTESFAKKVRPCVPEEHKEALLGLLDTIEVITQSIRDYDQRLETLVKERYPQAEVFQDIAGVGPLTSLGFVLVVDDPSRFARSRDVGAYLGLTPKRDQSGQRDPQLRITKAGDGLLRRLLVNAAQYIMAHESADSQLRRWAWKLAGGEESKDKRRKKRAVVALARKLAVVMLSLWKTGSCYESFPGASAKEGAS

SEQ ID NO: 175685 - protein, 376 aa, unidentified
MTSPTHHAECSAAALYMGIELGLREWLLTLSPGPGGNRMRVRVCPGDRAAVVEALARATARFGLAASAPVRSCYEAGRDGFWPHRFLATLGVDNLVVDSSSIEVPRRQRRAKTDRIDGEKLLQLLLRHWGGERRMWQVVQVPSRDGEDARHASRSLTTLQRERTRCRNRIHSLLALHGVRLRVDAQLPTRLAGARDWAGAPLPPGVQARVLETWRVWQAVEIERRARRTAEQQQMRTAATPALAMAQRLARLQGIAARSATVLAEELFSRDLRNRRQVGALSGLVSAPYHSGTRQHDQGLTGSGLPAVRRIAVEIAWAWVRFQPQSALTQWYQARFGGGGAVTRRIGIVALARRVIVALWRYATTDVLPAGAVLKA

SEQ ID NO: 175686 - protein, 304 aa, unidentified
MFGIGIDVSKATLDVAVHGEQFRQFSNDKRGFVRLIRWLKTWPIKQVVLEASGGYERAALDVLHAAGLPMVRINPARARRFAQGTGRAAKTDRLDATVLAQMAHLLPLTRYVPPAPWQQRLAAFAQCRRQLVQMRVSEMQRLRRLVDPDLIAMKQRHIAQLSDDLKQLDKAIAEQLEGQPGWKNIGALKGVGPILISTLACELPELGSLGSKAIASLVGLAPMNRESGTWQGQRRISGGRAVVREALYMAALTAIRYEPRLRAFYAGLKAKGKASKVALVAVMRKMLVILNARKRDAEVALGCP

SEQ ID NO: 175687 - protein, 362 aa, unidentified
MEKLRQCIGIDVSKDSLECCLGSIDLEQNEEFSKTKSFLNAPEGFQQMLRWVNESRSAQSVVFVMEATGVYYENLAYWLDERGEQLSVLLPSKTKHFTQSLNVKTKTDSVDAKVLCKIGLERKLPLWKMPSKMMRKIKFLCRELREVKAKLVIIKNQLHAKNHSYDCPKTVSNRLTKQINLLEAQLLEIEAELRVTAMSDSAFYDKISRLQTIPGISFITIICILAETNAFALVVNAKQLVSYAGLDVQFNQSGNKTGKTKISKKGNSFIRNALYMPALCASRHNPLMKEFYSKLTERKPAKKIAVTAVTRKLLILIYTLWKNETEFNVQYKKEGRPSDLPTQDEIQFDNSNDFLLPVEQIS

SEQ ID NO: 175688 - protein, 339 aa, unidentified
MESSVWLGVDIGKKTFHAAVTVQRLFGQEWRKLPCASFEHSAAGLRALLSWLEKNSVAPESLNGVCVESTGRLAQQFVNLAQGRLGGVSIINPARSKSFMKSLGFKHKNDSVDARLLAYFGQQMRPRAQAPKDGCYEELRELSRAYEDLKAHCQADQQRLADGPTSRAVRTVLKRMIRTYTREMEALQAKIKALTEATPALKEDMARIVSVPGLGMRTAQMLLAEFADLREYNRDELVALAGLYPCQHESGTSVYKAPRIAKAGKSNVRAVLYMAAMSALRCNPIIKQFGKRLKENGKKPMQIIVAAMRKLLLVAHALVVTNTFYDPQHNNPSNAAKST

SEQ ID NO: 175689 - protein, 323 aa, unidentified
MKTILGIDRAKDKFDCCLLLGEHKLSSQFLNGPRGFKELMRWLLKAEAPRPEIHACMEATGLYGEKLLGWLFEKGVAVSKVNPARIKYYAKSRLARNKTDRLDAWIIAEFCRTESPRLWQPIAPEQQRLRGLNRLLLARKEQRGRERRRAAMLPAEVRAYTRPLLRAFEREIQKLQSEIDALIGAAAEFQRKEKLLRSIPCVGPVTAQTILAELPPEIQNARAAAAYAGLTPERDDSGVKTGRGRMSKTGNAFLRHALYMPAVSGRRSNGRLKACATRLEERAKAKKVIIGACMHLLMRLCFGVLKSGQPYQENWQRPQPPQR

SEQ ID NO: 175690 - protein, 405 aa, unidentified
METERFAGIDWASEEHALCVVDEDGASIAGEFHAHDEAGIKALIVRMRALGVCRVAIERPDGLLVDRLLEAGFTVLPIHPNKLKATRPRYEAAGGKSDGFDAFVLAELARTDSHRHRALQPNSDETKALRALTRTREDLVGARVRLANELRAQLDVFWPGASRIFADVDSPIGLAFLERYPAPADARGLGEKRLAGFLARNGYCGRRSAAELLERLRTAPGGRAGEMEAEARRGAVLGLVAALRPIVDQIRELTSQIAGAVRAHPDGKVFLPLFKDPKSVVTAARLVAEIGDDRSRYPTREALAADAGMAPVARESGKRKVAGFRWACDKRLRDAVACLANSTRHTHPWARKVYLDARARGLEHPHAIRVLGRAWLRVLWRCWQDEVPYDPAKHGNLRRLQPAGG

SEQ ID NO: 175691 - protein, 351 aa, unidentified
MNVTKYIGMDVHRAMTVSAVLSATGKVVAEAIIETKGSVILDFIQSQRGTLWVTFEEGTQAAWLYDLIQPHVAKVVVCDPRKISTQGNKADRPDAKRLAELLRTNALTAVYHGERSTRALKELARSYSAIVGDSTRIKNRLKAVFRARGIDNSGGGIYTTEERECWTSKLEAGAVRLRVQRLWRELDTLDVLRAEAEKDMVVEARKHPSTRILQTVPGIGPVRAALILAFALTPHRFRSKRQFWGYSGLAVVTRITAEYELVKGRIRRTKKRPALRGLNPNCNRVLKDVFKGAAGTAANGPWRAYFESKVASGNKPELVLLTIARKIAAITLALWKKGERYDETKLTMHAV

SEQ ID NO: 175692 - protein, 433 aa, unidentified
MLKLNYMSTLFVGIDVSSKTNAVYAMDFEENKYISSSFGNNQPGADKLVNMIAECMHKHKNLNTILIVLESTSVYSVHISNFLSTSEVLMPYKPYVFCVNPKATSNYRKSYIGMEKTDPTDAYLIADFGRVGRTKKLEPWRGGQFISLKRLTRHRMHLSECITREKTYMVSNLYLKFSELQLLEGDDKPFGSLYGATSSAVLTEFLSPQEIIDMPEEELLTFLAGKSRNRISDLSKTSELLRKAARDSYRLDKCMYEPLSISLASSFNCIQAYQKEIRLIEQAIEKCINGMNPNALLILQSIPGIGPIWASGILSEIGDITVFHSSDALAKYAGLYWPKGDSGDFTSEDNKMSKAGNPYLRCYLGEAANSVRKHIPEYADFYARKYAEVTKHQHKRALALTSRKLVRLVFGLLVKNQLYTGEKLDTEYNIESN

SEQ ID NO: 175693 - protein, 402 aa, unidentified
MDHPVLSIDVAKRKSVAAAFLSYHECMYKPFPFPHSNEGLHHLLAILKQMKTVSGQDPKVVLEATGNYSKPIASFFSSHGYSVIVLNPLLTHQLKQKAVRKIKTDPIDAIRIAHVFYLQSPPPQLELSDPVQQLRVICRQYQHWTGLYGETQLHFRAVLGLLFPGYDKAFHKVCNRTSLELLSRYPTPKELLDADHEEVITLLLSNRRGRAWNESKLEQLLAIANNSLPDLHAIQAQKIVLMHYIQLLKTYQDCMKDLLETMQSMAESIGTYHLLRTIPGVGPLTAAMLIAEIGDIKRFPSVKQLTAFAGLDSAVHESGSFKSKKNRISKRGSSYLRTALYQATVCAISTQIHGPRNSILFQFYQQKRAEGKPAKVAIVATSHKLLRIIFGMWKSDQAFKCG

SEQ ID NO: 175694 - protein, 382 aa, unidentified
MAQTASRRKHSVGSERLYVAFELGWTTWKLGFCTRLDEKAWVATIDARDIGGMKKTIAKARARFGVNATCSIASCYEAGRDGFWLDRLLKQMGVTNVVVDSGSIKVDRRARRAKTDRLDAEDLLKMLVRHVSGERKVWHVVHVPTPEEEDARHLQREIRTLKKEETRIVNRVRGLLASQGVAVKMGRRGLVGPLESLRIWDESPLPPGLKLRVEQELSRRTVVHEQLLALEAERNRGIRDGASSTAAIGRRLMELKAIGPATAETLTREVFYRDFRNRRQIGSYSGLTPSPYQSGEMSHETGISRAGNRHARGILVDLAWDWLRYQPRSALSRWYQRRFGSGGPRMRKIGIVALARKLLIALWRYAENGILPEGARRKALTI

SEQ ID NO: 175695 - protein, 379 aa, unidentified
MTKIIRIGVDTSKSVFQLHGVDAAEKPVLRKTLRRKQFLALFAKMEPTKIGLEACGAAHYWARELRALGHEVLLLPPQYVKAYVKRGKHDAADAEAICEAMSRPSMRFVPVKTAEQQAALMLAGTRDQLVRRRTQLTNAIRGYAAEFGLVAAKGIDKIEPLLARIAADATVPAVAKELFAVHGREHARLKRQLQEIEAKLMAWHKDNELSRRLVKIPGIGPIGASLLAMKVPDPQAFRSGRDFSAWMGLTPKNHSTAGKSRLGVITRAGDEALRRALVVGATSVLKQARQSKGHCSPWLAELLRRKPPKLAAVALANKTGRIVWKLMVSGEHYNPARGGAIAAPVAREGRVAALHRGFAPRPSLRSCSKPREAAVATKG

SEQ ID NO: 175696 - protein, 349 aa, unidentified
MKIVGCDFHPSFQQVAILDLSTGEVRELKLMHADGEADRFYRELEGPALIGMESTGNTLWFERLMEQLGHELWIGDAAQIRASYVRRQKTDKRDARHILQLLMDRRFPRIWVPSSLERDQRQLLLHRHRLVRMRTAVKTELQHLALNQGLQQKRGLWSVRGRADLEKLPLECWTGRRRADLLKVLDMLEAQVADLDEAVDKVAFSNAQARLLMTQPGVGPITALAFVVTMGDVTRFKRGKQVASYLGLIPRERSSGAKRRLGAISKQGNVFLRTMLVEAAQSAVRYDEEFKKEYAHRCHQKPKGVAKVAAARKLAVRLYWMLRTQTLYAKAVASKAVHNEGSPSHSLVG

SEQ ID NO: 175697 - protein, 328 aa, unidentified
MQKNKEYVGVDVSKESLDMAVYSTGEIRSFGNDDAGIAKATTWLKQVNPAIIVMEATGGMEVSLYVALQEANLPLAVINPRQIRDFARSMGILAKTDKVDAKVLARYAATIQPEARPLPDEEARQLNTLVRRRCQLVEMIIAESNRATITRDKAMKQRINAHIDWLKQELAGIDKDISQMMKENPVWHAKDKLLQSVPGVGPVLSATFIAELSELGILNRKKIAALVGVAPFNRDSGKHRGERSIWGGRCRVRQPLYMAALSAVRFNPTIRIFYERLLANGKEKKVALTACMHKLLIMLNVMLKHNSYWSCNYAIFNNTCIPDAKTVA

SEQ ID NO: 175698 - protein, 359 aa, unidentified
MMVLGVDPHKNSHTVVALEAATGEVRGELTVVADQRGHERLLAWARSLGSERRFALEDCRHVSGRLERFLIAAGEGCVRVPPKLMAQVRRSARTRGKSDAIDAAAIARAALREPGLPEARLDGPERELRLLADHRDDLVAERTRIQSRLRWHLHDLALDLAVPPKALDRACWLTRLEEALALLEGVQAGIARELTLRCRALSAEIAALGREIARRATELAPELLALPGCGALTAARLLGETAGALRFASAARFAMHAGVAPLPVSSGRSNRHRLNRRGNRRLNAALHRIAITQMRCHEPAKLYMSRKRAEGKSTREGLRCLKRHLARTVWQAMRSAEARRQTAPTDACPATQPALALAS

SEQ ID NO: 175699 - protein, 332 aa, unidentified
MSAVVCGLDVHKETSYATVLDRDGQVLVQRKMMNEDIPAFLEMTHPDKLAMEASTYIIPLYRKLTESGYDVTVSHPRKTRLIAEARIKSDRVDSRALAELLRLDSLPTSYIPPRDIAAIREKVRRRAFMVRQVTKLKVKIRDVLAAEGVKPPTGHGLFTAKGVEWLRSLNLEPVDCYLRLIEPLKEEVKLVSRDLKRSAGKDAEVQLLMTIPGVGYYVALLVKSEIGDVRRFSSGDHLASYAGLVPSTRSSGGVERHGGITREGSRWLRWAMVEAAMVHVRFDTPVTRFYHGVAERRGRRPALVAAARKLTGVCFSVLVHRRPYFNPLDAQA

SEQ ID NO: 175700 - protein, 390 aa, unidentified
MVYVGIDVAKDKHDCFIVNSEGEVLADVFSIPNNRDGFDLLFNRILECSGKSEKIKVGLEATGHYSYNILGFLIDNGLATYVINPLHTNLYRKSLSLRKTKTDRVDARTIATMLMSDVDLKSYTDTSYHNEELKSLTRYRFDKVCERAKLKTSVSRLVNILFPELEKLVPTLHMKSVYALLNEYPSASCVASSNLTHLKKVLYDASKGRYNRDKAIELREAARNSVGSVMPAKSLELQHTIRLIQELNNEIKEIEAEIDKIMHEIQSPITTIPGLGNCMAAMIIAEIGDFSNFSSPDKILAYAGLSPTTYQSGQLTNCYAHMEKRGSSYLRYAIFNATKFVCKWDPNFGAYLEKKRAEGKHYNVAISHASKKLVRTIYAMEMSGQSYIRK

SEQ ID NO: 175701 - protein, 318 aa, unidentified
MPEELFVGIDVSKATLDVAVLPSKESWSCPNSEQGIIDLVGRLRELPAPKLVLMEATGGLERQALATIAAAGFPAIAVNPRNVRDFAKSVGILAKTDAIDAHVLALFADRIRPEWRPLPDEETQALEALLVRRRQIVDMITAEKNRLGTTPSRRVHKEIREHIKWMERQLRITDFDLDQAIKNSPVWKEKVDLLKSVPGVGRVMIATCLSQLPELGTLDRKQIAALVGVAPFNRDSGTLRGRRSVWGGRASVRGVLYMSTLTATRFNPTIRSFYERLRAAGKLPKVALVACMRKLLTILNAMLSRRTPWNHFTPEVSA

SEQ ID NO: 175702 - protein, 349 aa, unidentified
MVILGIDAHKQTHTVVVVERGRKLGERTVKTTTKDHLDLLVWAARFGAERRWAVEDCRHLSRRLERDLLGAGQQVVRVPPKLMANARTAARTYGKSDPIDALAVARAALREPELPVARLDGPARELRLLVDHRDDLVAERTRVINRLRWHLHELDPSWHPPARSLSRAPATHLAATEAFLSRLDGMVARLAGQLLARVQELNAQIDQLEADLGPRVRRLAPSLLALRGCGVLTAAKLVGETADIRRFHSKDAYARHNGTAPLPVWSANKQRHRLSRTGNRQLNLALHRIAITQARHHPDAQRYLARRRANGNTPTEAIRALKRRLSDVVYRALLADTGLTDQASQAAAA

SEQ ID NO: 175703 - protein, 294 aa, unidentified
MEMTYVGVDVSKDRLDVHVLPEGAAFAVVRDGKGLAELVERMGTLGPERIAVEATGGFETVVAAALAGASLPVVVVNPAQVRHFAQALGQRAKTDPIDAQIIARFVEATKPDLRPLADEATQLLADLVARRRQIIEMIVAERNRERRVAVKRIKKSIARLIAALEKELAEIDAEIDASVRGSPAWRDKEDLLASVPGVGPITARTLIAELPELGALNGKQIASLAGLAPFTPQSGQWKGKAMIAGGRKSVRSALFLASLAACRHNPVLKASRQRLIDAGKPKMLALASLLSDEG

SEQ ID NO: 175704 - protein, 339 aa, unidentified
MKKLSKMPKQVGETIGIDLGDKVSRYCIIDANGDVVEEGSFRNQVSSIEIHFGGEPRRIALEAGAQSAWICRELKRLGHEVIVANPRELKWITSSDNKNDPVDARKLALLARADMRLLAPVEHRTAEQQAELAVIRARDALLRARTLLINSARSVAKGFGLRLPKSITGTFGKRSVDMLPEFLRMALTGLLEQIDTISQAIAGYDQQIGALAEKHPELARLESIPGVGRLTAMTFVLTLGRVERFPHSRDVAGFLGLRPKQRQSGARDPQLGISKSGDPYMRKLLVQCAHHILGHYGKDSALRQWGLAKGEGGKKATLRAIVAVARKLSVLLHRLGNAR

SEQ ID NO: 175705 - protein, 338 aa, unidentified
MNIVFLGIDLAKNVFQLCGLNQAGKPVYTKRTGRKELLQTLANIPACLIGIEASTGAFYWQREFEKLGHKVKVISPQYVTPFVRAQKNDGNDAQAIAVALMQPTMQFVPPKSPEQQDIQALHRARQRIVNHRTATVCQIRGLLLDRGIPIGSAVSRARRAIPLIPEDAENGLSSRMRRTIAELYDLFNDPGRRIHFFDKEIETVFRQSEACQRIAKVKGIGPETATAVVAAIGKGTEFKNGRHFAAWPGLVPRQHSSGDRQVLMNMTKKGDRHLRTLFIHGARAVVRVATNNNDGHMNQWVNQLKERRGFNKTTVAVANKNARIIWSMLRNETGYQVV

SEQ ID NO: 175706 - protein, 427 aa, unidentified
MKSNTQNKKIEAITEKTLVIGIDVGSETHYARAFDYRGIEFSKKPFKFSNSEASFEMFKAWILDIKEKHEKDKVVPGMEPTGHYWFNLGKFLQDNEMKPVLVNPHHVKKSKELDDNNPTKNDRKDPKVIAGLVKEGRYMIPYLPDGIYADLRTASNMRFQIQSELTRVQNRISRWFNIYFPEYKTVYGKPDAISGMMILKKAPLPEDILTLGVEGVNQIWRDAKIRAVGKKRAQTLVEAARHSVGTKEGATAARIEIRMLLEDYESRNNRLQEVMFLIEELVKQIPMAEKLMEIKGVGIKTVSGFLAEVGDITRFSSPKELQKLAGLALVENSSGKHKGQTTISRRGRKRLRYLLFEVAMSLVGKNPEFGTLHHYYTTRKVNPLKKMQSLMAVAAKLIRVFYAMLTKGVEYDSAKMLGDIKRPAEYM

SEQ ID NO: 175707 - protein, 389 aa, unidentified
MSHSTPESDRIMIGIDPHKASWTAAAVGPGLQPLATVRVPVGPHGYRDLRRFVARWPDAIWAIEGAGGLGAPLAARLSADGIAAVDVPAKLAARVRVLSTGHGRKNDDADAISVAVAALSAAGLRTVTVDEEVTALRALVEHRDDVVKTRTQTVNRLHVLLTQLIPAGAPRQLTADTAAQLLRTVRPRSLGPRTLRRLAADLITEIRRLDRRITVANTEIADAVQASRSTLSELRGIGNLTTGKILARVGDVHRFRSAAAFASYTGTAPIEVSSGDVVRHRLSRAGDRQLNCCLHTMAITQLQRDSPGRVYYLRKRADGKSHKEALRCLERRLSDVVYRCLIRDADPQNGAGPRGHQGATTNSSATGSTPTAGSSDKSLPGPATTDSTT

SEQ ID NO: 175708 - protein, 344 aa, unidentified
MDHFAGLDVSVKETSVCIVDDTGKIVREVKVVSEPEALLAVLENPAYRFKRIGLEAGPLSQWLCSALAEAELPVVCVETRHMQALLKAQINKTDRNDARGIAQMMRVGLYRPVHVKTLRSQKLRMLLTHRKLLQSKAIAIENDLRGTLRNFGLKVGMVGKGKFEARIKELVENLPDLAILVEPLLIVRQALREQVVILHRRLLAIVRDDAVCRRLMTTPGVGPVVALTYRATVDVPARFRKSKSVGAVFGLTCAKYQSGQIDRSGRISRCGDEMMRVMLYEAAQSMLRSKKWSWLKAWAMQIARRRGMKKAIVALARRLAVIMHRIWVDGTEFRWTREQAAAAA

SEQ ID NO: 175709 - protein, 336 aa, unidentified
MRIIRIGLDTSKHVFQLHGVDESERPVVRRRLGRKEVERFFAKLPPTCIGLEACGASHHWARVLRGLGHAVVLLPPQYIKPYVKRGKNDAIDAAAICEAMSRPGMRFVPIKSAEQQAGLMLLRVRDLLIKQRTMAINAIRGHAAEFGLVAAKGPVKVAELLQQAHAEAGVPALAREMLGLLSSQLDALDIKLRLLEAKLMAWHKQDPVSQCLATQPGIGLIGAVSFSLKVTDPKGFRSGRHFAAWIGLTPREHSTGARQRPGKISRQGDETLRRLLVLGATARIRFAKAGRASPWLINLLARRPKKLVAVALANKMARVLWAMMVSGQTYRHPQEA

SEQ ID NO: 175710 - protein, 419 aa, unidentified
MSFKITRKNCCGLDVHKTWIYACIGIADANDRVEYKQARFSSFTKGLNELCAWLAKYNCHDVCMESTGKYWIPVFNILEKNNIWITLSHPKYTKPLKGNKTDRKDAKWICDLYMCDMVKPSFIPPADIRELRDLVRYRFKLTNMITGEKNRAHNCLTVSNLKLDDVFSDILGKSSLSITAYILEHPGETFDVTPFVDRRCKTPIEEIQAAVDGAISHEQAVKLKQCLDHIDELENHKNEIEQEIFRLSEKYETVLNLIRTVPGFDKNPMTAIQVLSEIGGDMSVFPSSKHLVSWAGCCPRNDQSNQRIKSTRISRAGSYFKPVLVQVANALVKSKKHHEFRERYRRIKARRGHKKAIIAICRMLLTAIWHILSDLVPYTPDGFIEHRPVNESKSLTVSQALNLLKLRGYTITDEIVPAS

SEQ ID NO: 175711 - protein, 387 aa, unidentified
MAAVMIGVDPAKRSHAMAVLDEREHQLAALQVGNDSAGYRDMVRLARRWPERTWAVEGAAGVGVQLAQRLVADGETVLDVPPKLSTRARIFDVGHGRKNDPGDARTVAVVAIRTSGLRRVVPDDEMVALRLLSERRRDLVRSRTQTVNHLHQLLMELIPAGAQRNLTAKKTKGLLATVRPRDVAGRTRRQLAVDLVEDLAGLDRRLKELDKRLKAAVAATSTTLTEIRGVGTATAAMILGEVGDVRRFPTRHHFASYTGVAPIEVSSGEIERHRLSRAGNRQLNHALHIIALSNKRCDPQGGTYYAKKIAAGKGKKGALRCLKRRLSDSVYRHLIEDQQQRTQRSPGGHLGATLQSSAAGSHPNTDTSEQPHTGLHKNPTPVLPASA

SEQ ID NO: 175712 - protein, 348 aa, unidentified
MYVREDIILAVDYHDENLVIRQFNCHTSQERLLKYRTTSRNIRKIVSESVNEAATVGGRVFWIMESTTGWARVKKAIGPLATMLVANVLQMPLPPKAYRRKTDKIDTGRILREYLNGSLPMAFQPSIELRQIRRLVATRESLVSRRTALRNWINRYLAHETWRSRAGLWSAKGMRNLKRFAASVEGPDKVVLSVKLKELEHLLELQTTVEAEMLAIYKQWPQAQWIDEIPGIAEISAVSILARIGPIERFDSPEELISFAGLAPGIQQSDGSKREGRIGGGGTDKHLRHYLIEATFWARRVPRYFKTYERMLDKRGAKIARVVVARMMLRSIHKMLRAQVRFNRLRVA

SEQ ID NO: 175713 - protein, 341 aa, unidentified
MIQSALIGIDLGKHNFHLHSQDKSGREVFRKKLSRAQMMQLFGNMPSCVVVMEACAGAHFVARQLAAMGHTAKLISPQFVKPFVKGNKNDFVDAEAICEAASRPSMRFVTPKTESQQTLSVLHRMRESLVHDRTKTANQMHGFLLEFGVSLPRGLTIMKRLTNVLAEHELPVRLTVLLQRLHDHFVYLDEQIKVLDKELASQLADDDLGSRLLSMPCVGPITASLLAVEMGDAKQYRCSRDFAASVGLVPRQYSTGGKANLLGISKRGDKHLRQLLVQCSRVYMQRLEHQKGALADWVRALLSRRHSNVVACALANKLARIAWAIATHHTQYEAGPDALNA

SEQ ID NO: 175714 - protein, 351 aa, unidentified
MKIVASNCDVAMGIDVSVASLSITILSGAGEPRHATIQHNRAAIESFLSRLPGCRIRAAYEAGCTGFWLYDTLKELGVEAIVTPPSKMLRSPGDRVKTNRRDSETLAIQLRGGLLKAVDVPSKERRAARQLVRTYRQLMSSRVQSMLQIRSFLEFHHLKSPPGVSANWSGPFLHWLETLDFSAIPAGQYLRQSLDALLKLYRQLTEQVAELRKQIHQLSCSRPYQQASQLLQSQPGIGLLTATTILTEIGRVERFENSQQFSSYIGLTPSEHSTGDEAHRGHITRAGNRHIRGLLVECAWMWIGKDKAAYATYRRLARRREPKRAIVAMGRRLATRLYWQLRNLKAVELPA

SEQ ID NO: 175715 - protein, 413 aa, unidentified
MELERLIERCAGLDVHKASVTACVRIPGDADARVAHTQTFATTTRGLIGLHDWLASFNITVVGMESTSVFWKPVYYMLEDDFECWLLNARHLHNVPGRKTDVADAAWICQMVEHGLVRPSFVPPPPIRDLRNLTRYRKAQIQERTREGQRLEKVLQDAGVKLSSVASKVLGVSGRAMLEALVSGTHDPEVLADLARGVLRRKIPALKEALEGRFRAHHALMVSQMLAHIDYLDEAVETLSAEIERLIAPFSEKVQLLCTIPGVDRRSAEMILAEIGPDMQRFRTHRHLASWAAICPGNNESAGKHQSGRTRNGSKWLRSGLVQCAKAAARSKGTYLASQYARLKGRRGHGKATVAVAHSILVACYYILLRNQPYTDLGPDYLLTRDSTDAHKARLVRQLERMGHKVTLEPVAA

SEQ ID NO: 175716 - protein, 343 aa, unidentified
MENFAGADLHKKVTQLGLLRKGKPPSQFRFSNDPHTVEKVLSRLPSGTKIAVEATGTWWWFVEKVRELGHEVFLSHPKQTKAIASARLKSDKVDALMLARLLKADLLPMVWIPGEKERYVRELLSHRGRLVRSRTAVINELHAVYAKRNVEVVGKAWLKAYPVPYRVKDLSGYGPRIVKENVELLRFVNEQIDGLDKELRKLAKEDPQANRLMTLIGVGPATAVAVSCWVGDINRFANAKKLTSYFGIAPRVRQSADKERHGHISKEGSRMVRWLLIQAALSHTRVAKGPSRKHYLGVLNRQGKKIARVAAARKLLGVMYHIMKDEIDYEEFVRRGSSAQRAR

SEQ ID NO: 175717 - protein, 439 aa, unidentified
MKTQFQVVHPHAAGIDIGSEKVFVAVEQQPVKQFSTYTESYQNLVQYLIENKVTTVAMEATGVYWIPLYEILEQAGIDPWLVNPSDVKRVPGRKSDVQDCQWILQLHTFGLLNRCYIPDDKIRILRSYVRLRDDHISMRASHILHMHKALDLMNIKLHNVISQIDGVSGRRIVDAILSGERDPEKMVQLCDKQILKRKRNQVLLSLEGNYRSEHIFALGQAVDCYDFYQQKIEECDFQIAQLLDEITRSMPKPKNISKPKPTRHNQPDIDNLHTLLLTMASGNDASSISGLSDLSFLKLISETGTDLEKHWKSPKHFVSWLGLAPIKNSSGKSNRRSRKKFTTHAGQIFRLSAQSVGKSKNYALGAFYRRISAKKGAPVATKATARKIAVMYYNAMTKGLQYVEQGIEQYNKQYQETQLRILMKKAKQFHFQLVPEPTA

SEQ ID NO: 175718 - protein, 332 aa, unidentified
MKKIIHFIGIDVSKETLDIALIKNNDKSNIYSSKVTNNKTGFKKMKQWLKLEKVSWQEAVFCIEHTGMYSKPVGQFILSLQGNLWMEMSLKIIRSMGVQRGKNDKIDAMRIALYAQRCQDEMKLYEPPRPIVEKLRTLLQLRKRLISSRNSLQVPCNELTTIDEQAGKEATRLIRSSVTALEKNIDVINEKIDELIASDEQLAHEFEIGISVPGIARITLAYMICFTNEFKNYAGGKQLACYCGVVPFEYTSGKSVKGKPHVHNMANKFLKKLLHMGAIAAVTYYDEFKCYYKRKLKEGKPKMLVLNNVRNKMVLRLAAVIKNNKPYQKIAA

SEQ ID NO: 175719 - protein, 360 aa, unidentified
MRKRLSKKESWFKENNFTAEDEIYVGVDVHKVHYHVAIWHNGRIGCVYSMSSDNNKLLRDLKRIRGSLKNIVYEAGPTGYSLVRLLRSAKLPAEVVAATKTPRKVDSAGKTDRLDCQQLAEYAAKGLLTYIAIPTVQQESDRQVVRLRDQLMSKRKRVMQQIKSFLLQYGIAWPGCGWSKVVLCKLRKMDIGSELRFALDQYLDEYEFFSRQIAQTKSKLRQIFSSERHSAAMKIFKSHPGVGNIVAWEFRAEMLDVTRFSQPKQVSKYLGLCPRISQSGNTCRHGPITKTGRRQLRTVLIQGAWAWYRRDPNARQIYNRLLHNTGNGKKAIVGLAKRLAIHLWRMLCDGCLYDLNTVRA

SEQ ID NO: 175720 - protein, 356 aa, unidentified
MGEGSWVGLDVHARSVVAGVLEGASGELRSSRVPASSEETVAWLRQLPAPVRVAYEAGPTGYGLARACAAAGIACTVAAPSKIPRAPGDRVKTDRRDAERLARLLRLGELVSVRVPEPHEEAARDLVRAREDARGDLMRARHRLSKLLLRNGLVYDASAWTLAHDGWLRRQRFERRPLALAFDESYGAVLQAKTRRDALDRAIVELASEPPFVDVVGRLVCLRGVSTLTALALTVELGDWNRFRPQSLGPFLGLTPSEDSTGERRRLGAITKTSNTHARRLLVEAAWHQRRALRASAALERRRQGQPAAVRSQADHSAHRLHQRWHALESRGKRRTIVAVAVARELAGHCWALATM

SEQ ID NO: 175721 - protein, 359 aa, unidentified
MPLLADLVDAVVGVDTHRDSHEVEIALPTGTPIATCSISNDSSGYAELLAWILDQAPGPRLVVSIEGTRSYGLGLTRAVTAAGLPVVECEQPNRKARRGRGKSDPIDAHLAVLAALRLDTDRLPTPRADGDREALRILLGTRQELTTTGTAQTNRLRALLLGGDDTDRRLARGVLTEATLTGLARRRLPGDASREQAVRHAEIRRLAVALRDGGRALKANRAQLQAVVNEIAPGLTDRRGIGPVTAAQAIVSFSHPGRCRSDAAFATLAGTSPLPASSGQTVRHRLNRGGDRALNSAIHTIALTRMRSCPRTQTYIARRTAEGKTTREIRRCLKRYISRELYRTLTACMQPAVATAQSH

SEQ ID NO: 175722 - protein, 343 aa, unidentified
MQAVTTIGLDIAKSVFQVHGVDAAGQVLIRRQLKRRVVLGFFQKLPVCLVGIEACASSHYWSRELQALGHSVRLMPPAYVKPYVKRQKNDMADAEAICEAVARANMRFVPTKTPAQQSCLMLHRTRHLFIRQQTAVINSIRAHLAEFGIVAPVGRKGVTELLHIVADPSDKRVPEVARACLATLGNQLLSLKEQIVEFDRMIMVWHRSNETSKRLHYIPGVGPMLATALVASVAHPRTFRSGRNFSAWIGLVPKQHSSGGKDRLGSISKQGDRYLRSLFVAGALAVIRYAKIHGTKHRPWLTALLARRPTKVAAIALANKLARMAWAMMAKGERYKEPIALAA

SEQ ID NO: 175723 - protein, 401 aa, unidentified
MRSIGMDVHRSFAQIAVVEDGVCRDEGKIGVKPEDLREWAETLEPDDEIALEATTNSDAIATMLRPIVARVVVSNPRKTRAIAEAKVKTDKVDARILARLLAADFLPETWVADDQTRMRRRLVARRTHLVRQRTRLKNQVHGILSRNLVPTCPHADLFSGVGRRWLAGQSLPADERRSVDALLGQLAFHSDELADVERDIAVDAIDDPVIARLMTVPGINVTVAMSIIAAVGDFSRFEDPNRLVSYLGLNPRVRQSGGGPAMHGRITKAGRSQARGMLVEAAFSASRAPGPLRAFYRRIKERRGFQIATVATARKMTVLCRHLITKGEDYVFARPSLVAHKRRSLELAAGAESRRGPVAGPSRDYHIAQLRDAEKAIVEQQERAYEVLVAHWQPTKPASKG

SEQ ID NO: 175724 - protein, 419 aa, unidentified
MNKIETKKLRIVNAKTLIVAIDIGKVTDTGYCRCPSGKDSKPFEFLNNAEGFKKLWDRIGWMQMSHHLEEVVVGFESTGAYGEPLVHYLRQKPVKLVQVNPMHTKRMKELQGNSPGKTDRKDPKVIADIIGLGHALSVVIPEGAAAELRRLTLARERSIERRTALYNQLQDLVFIVFPEFLQVMKDVKTQSAQYLLRHYPTPQDIVACGSEELTRILRQVSRGKLGQIRAQALYDAAVQSVGLQEGRRGILLEMEEILSGLEACNRFIEKMEEEMLPYLEQIPYSDSLLSVKGIGEITVAGLIGEVGDFRQFHTLREVMKLAGLDLFEISSGKHKGNRHISKRGRSLLRKLLYFAAINTVRKGGVMHASYQRHLAKGMPKTKALIAIARKLLRTLFALVRDHSQYVQNYSRKEAIKLAA

SEQ ID NO: 175725 - protein, 328 aa, unidentified
MNANEEVNVLGIDISKAKFDVALLKGKNKIKTKVFSNHPEGFAELQVWLNSQGVTNLQACMEATSIYGNALARFLFAAGYKVSIVNPSRPKAFGRSELSRTKTDRADAKVIARFCAALCPEPWTPPALEIEQLQALVHRLDSLMAMKQQEQNRLETVDSILVEAITAHIDFLKEQIATTKKLIGDHFDKHPQLKSQRDLLVSIPGIAEATATVILAEIRDVSTFDSADQLAAFAGLTPQEFSSGSSVRGKPRLSKIGNARLRQALFMPAIVARRYNPFIQALCARLLAKGKSKMSIVGAAMHKLLRQVFGVLKSQKPFDPNFLLTLSK

SEQ ID NO: 175726 - protein, 393 aa, unidentified
MICVGIDVAKDKHDCFIISSEGEILADVFTIPNNAEGFDTLLQAIRRSTRPEDKIKVGLEATGHYSYNILGFLLNEGLDTYVINPLHTNLYRKSLSLRKTKTDRVDARTIAAMLMSDVDLKSYTDTVYHNEELKSLTRYRFDKVRERAKLKQSVSRLVTILFPELEKLVSSLHSASVYALLSEFPGAKQISSTHMTHLKAVLKNASQGRYGQEMAETIRNAARSSVGSVMPAKSLELQHTIRLIRELDAEIEDIETAIQAIVDEMQSPITTIPGMGVRMGAVILAEIGDFSRFDSPDKILAYAGMSPSTYQSGQLSLSGAYSHMEKRGSRYLRYALYNATKHVCHWDPTFAAYLAKKRAEGKHYNVALSHAAKKLVRLIFAMEKSQRPYCAAA

SEQ ID NO: 175727 - protein, 364 aa, unidentified
MNKCHSNTELSSHEETRCQFNGGKADIKLGIDVHQDFYVVVVQEGGANPKPPQRFQKQAFLRWAAKLKSEGAEVHAVYEACGFGFALQRNLSALGIHCRVVCPQKLDEQNRRVKTDGLDAKALCLKLDRFVQGNRSALALVRVPTEEEEQRRAIHRQREQLVKARKQLEAQGRSLMVNHGIEPVKNWWKPRTFAALQVPQWMKELLQNSQPILLGLQEKIAALTIQLQSAAAANQPRGLGLMTSVIIDREIGDWNRFNNRRQIASYTGLCAGEYSSGNTRLQSCVTKHGNPRLRAALVELAWRLVRFQPNYKPILKWKRLLGKGALATGAARKKAIVAVARQLAVDLWRIKTGRLRAEELGLIN

SEQ ID NO: 175728 - protein, 446 aa, unidentified
MDALIHLFERLCFVLSQFLNDFVVGIDVSSEFSIVAMLAPSGELIRKPFRIDHNPASFRKLLEILKKEEERLKRKPIYFVESTGIFHLPLFFFLRSNDLKGFVLNPLCVHSTKNFDLRKVKNDKKDAEAIARLAKYQDVKVSMMPEPQILALRMMTREYYALSDMLTEIKNRFCTDLYLLFPGFLDVFSGTLGKTALAVLKSYPSPKAVQDADPEALTLLISKTSRKSPEWASKKVKQLQECAQLASSMPNEFALLVSKIKVHIDGIENMQLSLNHIEAQIRSMIESNQFPESARRNIELLDGIPGIGFLSAVTLVAEIGDFNLFKSPKAFAAFFGIDPSVSQSGKFNGDRNKISKRGTRIGRRILFTIAMASIRTTRKGEEINPVLRDYYTQKCVNKKKKVALVAVMHKILHYIFAVLRDQKPFEIRKPEDHQTWRTAKLQQAAA

SEQ ID NO: 175729 - protein, 414 aa, unidentified
MSDEVIWFVGVDWASAHHRACLLNGEGSRVDERDFTHDGTGLSELCDWLLAKTAAPASSVAVAIETPRGPVVEALLERGFAVFSINPKQLDRFRDRFTVAGAKDDSRDAHVLASSLRTDRAAFRRLKVDDPLVIELREWSRIHAELSQERNRLANRMRDQLWRYYPQARELSDDLVADWFLDLWQQVPTPAQAARTSEKTIGRILKQHRIRRIDAGTVLRTLRAPALSVAPGTTEAATAHIRTLAARARLINIQIKEAQRRLDELCGAIEAAPGQICEQRDVAILRSLPGVGRITLATLLAEACEPVRLRDYHILRTLTGAAPVTRRSGKSCFVVRRHACNKRLAQAVYHWARVAKQHDPTSAKRYEELRRRGHSHGRALRSLADRLLYVLCTLLKRQVLFDPNFRASQVAQAA

SEQ ID NO: 175730 - protein, 410 aa, unidentified
MEVLHQLCAGLDVHKKTVVACVRLASENKVVTEVKTFATTTRSLLALSDWLSENGCTHIAMEATGVYWKPIWHVLSDGEFELVLANAAHVKNVPGRKTDVSDAAWLAELLAHGLIRASFVPDGQTQEMRALLRTRKQLVRDRSRHVQRIQKTLEDANIKLDAELSDLLGKSGRTILNALVAGETDPVRLAALAHANVKATQAKLQEALSGRVTSHHRFLLQLHLGQIDSLDAAIETIDREVDDNLAPFRAAVDLVRTIPGVSTLSAEVIVSEIGLDMSRFPTVGHLLSWAGLCPRNDESAGKRRSNRLRKGAKWLKTTAIQCAWAAKNKKQSYLQAQFLRLSSRRGPQKAICAVAASILTAVYHMLKDGTTYQDLGPDHFNRRSKTSQTQRLVRRLQNMGYDVEIKPIAA

SEQ ID NO: 175731 - protein, 374 aa, unidentified
MADYSEVFVGIDTSKLRNAVAIAEGGRNGEVRYLGEIDNTEAATSKLVKKLAAQHRRLTFCYEAGPTGYGLHRLIQALGHDCVVVAPSLIPKKPGDRVKTNRRDALNLAKLLRAGELTAVWVPDARHEAMRDLVRAREAAVDDLKSKRQQVLSLLLRLGRHFTGKRTWTRAHMNWLVSQKLAHREQRIAFEEMLLAVRQADERVIRLERAIAAAVPDWSLAAVVTALMAVRGLDLISATIFLAEIGDLSRFASPRQLMAYLGLVPGEESTGDRVWRGGITKAGNHRARRILVECSWSYRHPPRVGKKKLAKVEAAPPAVQEIAWKAQARLTARYRALARRGKRPTLVVTAIARELSGFIWAVSRAVGAPAKPAM

SEQ ID NO: 175732 - protein, 331 aa, unidentified
MLLRRWQGQATKSGSPISRIVVAFEAGRDGFWLARWLQARGIEAYVIHPTSIPVSREHRRAKTDRLDAGLLMRAVLGWLRGEPKHCSMVAIPTIAQEDARRPNREHQTLVQEQTRVVNRMKATLIRFGIRNFNIKLRKARDHVATLRGPEDELLPPNTIAALLREIALLQLIREQIKAIEKARLEQLKQTPRKGTHPMVLMLAQIIGIGVETADMLVHELLSRKLRDQRAVARYAGLTGAPDESGTRRREKGLARAGNARVRRGMIQLAWRWLMQQKNTELAQWYLTRTTDAKPGLRKTMIVALARKLLIALWRYVTTGVMPTGVALRPAT

SEQ ID NO: 175733 - protein, 335 aa, unidentified
MEHYIGIDVSKATLDLALINASGQLLAMVQTENSTKGLVRSWRRWSKEFDLVKDKCLICLEPTAHYSDQPLIALVELEIPTWLANASDMVRSLGMRRGKNDQLDAQRIADYARRFHDKARRFTRDHLRLRTLKKLLSRRRLLVDRRKAHQVLLKDYNPLMPAELRRTMDRLDKAMLRAYDKAIVEVEAMILVEIQRDPELQRQYELVLSVESVGPILAAHLLALTDGFARFGSARQLACHAGVAPYEFRSGSSIRGKTRVSSFAHRQLKTLLHMSAVSSISRSGELRAFYDRKVAEGKGAMSVLNAIRNKIIHRVYAVLARGTPYTKKTLANAIE

SEQ ID NO: 175734 - protein, 357 aa, unidentified
MNQRNINKISYIGKDVFVGLDVHKKTYAVVARVEGEVVKKWTTIASPEKLVEQLLKYFNGGSIYTAYEAGFSGFSLHRELEKNGIHNLVVHAAGVEVAVNDRVKTDKRDAAKLSSLLESKRLEGIRVPLEAEENHRQLTRTRQQLVEDRTAVKNKIRMKFHQLGVIKAGENQQMSHLWVKELLSRVSSKEFKIAIEAYWHIWEKLDEEISKLEKELKQQAQEDKNETTYRSAPGVGPLSARILSNELGDMSQFKNERQLFSYTGLTPSEHSSGENIRKGHITRQGNSRVRAILIEVAWRAIKNDLVLAAFFERLYPHTGKKRAIVAVARKLIGRIRAAFQHGQTYCLGYQAPTVLSA

SEQ ID NO: 175735 - protein, 347 aa, unidentified
MKKIFVGIDISKEKLNVCLMRDMDIIHEDEFENTVKGVRKWLRQMVKTTGCCMNEVMLCAEFTGRYIYPLTVACHDEDAFLWMEDPTRIKNSLGLTRGKSDPIDARRIAEYAARYKDKAMAYELPEKELASLRILMTDREQVLSDRKKYAAQLNDQKRFMSDEDYALQCKIWKSIIKELQKQLDNIDKKVDELVAENKRASHQMELLKSVDGVGKRVAIAMIVCTDAFIRFDNARQFNCYAGMAPFTYTSGKSIQSKAKVSQRANKHIKSLLHMAALSVATRMKTGEYAEYYKRRCSEGKHPLCVLNIIRAKIVSRMFAVIKRDKEYVRNYERVSIEKKLSTPLQIS

SEQ ID NO: 175736 - protein, 452 aa, unidentified
MRLLNNKQGLRRSQFAKELKGADLEKVLLVPIDVSKTLQKSMILNYFGEVIESPFSFIVNRTGMKLLIGKIENARNRLQADRVFVGIETTGHYHEDIVRILIDAGYSVHIINPASTHEERKQHLTYTKTDDIDLYLIAEALIGYKATNAKLSTDVYKQLQNLTRARRSEINKRSRIKVEIRTIHDQIWREYQGFSILENNKVKTRKIFSDFWGKASLYLLNHFPHASQILELGELGLHQLSKEHNLKIRKSTIDKLLYAASESVSKPIEQLSSELFLLKQKLKDYEWHTQTIKSYELEIERIFVKTDGLLLLTLQGIGLTTAAEIYCEMGDLSQFTSASQLIKKAGTNPVIKQSGPEKGYYGRISKQGNANLRRAIYTAGRTLSVHNEALKPFYTRLKEKGKKAGQIYIAMGNKFIKIAFAMLKNRKPFECNDPSFNYKQEVSKKLTLPLSA

SEQ ID NO: 175737 - protein, 365 aa, unidentified
MATIVESEPRRVVGGVDTHKDVHVAVVIDVIGRVLASESFPATRHGYRCLLSWLRSHGELEAVGVEGTGSWGAGLARYLTTRGVAVVEVNRPNRQNRRRRGKSDAVDAEAAARAVLNGQATVTPKSGTGPVEAIRQLRIARSGAMKARTAAANQLHSLCDTAPDPVRAQLVPLSLRKKVAVAERWRPGSASTVETAAKRALTTVARRWRALDDEARELDRHIKAILDQIAAALLAVHGVGYETAGQLLVTAGDNPDRLGHEKSFAALCGSSPVQASSGRTNRHRLNRGGDRQANSALWTIVLTRMVSHAPTKAYVQRRTTEGLSKTEIMRCLKRYVARELYPLLQAVTIATTLEQRHANPRESHA

SEQ ID NO: 175738 - protein, 323 aa, unidentified
MQTNSTVAGWAGIDVSKEWVDVAVWRGERRIDVGRFARDKKGLGKMAKQLVQYAPEAVALEATGGYEVAVMAALTEACIAVVRLNPRRVRDFARAQGLLAKTDKIDAYVLALFGVRMRPAIRALPEPERVQLANWETRRQQVVEMRATERTRLQQVKHPELRKSLERTIAFLGKELARLDAQIDKCLQESQQLVEQAALLDTAPGVGPRTACVLTARVPELGAANRREIAALAGLAPIAQDSGKYQGKRRIQGGRAPVRAALYIAAWSATRVAGKLRDYYHHLIAQGKPRQLALIAVARKLLIALNEMMRKRQPWTENAVFSA

SEQ ID NO: 175739 - protein, 357 aa, unidentified
MRSYKKKPSGGNDLFVGIDVHRHNWHVTLLTEDVEVFSGVISGNWDALKRLLERYRDCWLDKSFIKAVYEAGYFGFGLYDNLTEWGAHCIVTPPSKILREQGNRVKTDRLDSRKLAYLLSKGLLKEVWVPSPEARCHRQVIRRRRQLITDRVRTQNRIKAELQFYGLGLPEDDSRWSKKFVDNLRCIKFGNCWLQESFTRLLEEYDFLTGQIILQTRLLKQLSEIEPYRGNMRILKGIYRFGLITSMEILLEIGDFSRFPTGEQLASYIGLTPSQYSSGDKVWMGRITRIGKNSVRGVLIQASWRLIAQDEELKVKYTAIKARAGGKRAIVAVARNLLLRCRKMILNGQSHDKALVA

SEQ ID NO: 175740 - protein, 410 aa, unidentified
MELQHERCAGIDISKRDAKVCVRTPGKRFGTFDKTVTVWGSTSREVSRLHQFLLNEHVSVVVMEATGAYWKPYYYPMESDLNLMLVNARYARNLPGRKTDVADAQWLAELGAHGLVRPSFVPPEPIRELRELTRTRTVFTRERSREVQRLEKLLEDSGIKLSSVATQITGVSGRAILAALIDGQHDPAQLAELAKGRLRNKIERLTEALEGNFRARHAFLAREHLDRFDSLTAAIDRLSKRIETTIAPSTDSVTLLATMPGVSNTIAQIIIAETGGDMSQFPSAAHLASWAGVCPGHNESAGKVKSSHTRPGNHYLKGALGIAAMAAARTNGTYLQARYKRLAGRRGPTRALVATEHSMLVSVWHMLTAHQPYEELGPDYFSRVNPGLTRRRALAQLANLGFEVTLTPTA

SEQ ID NO: 175741 - protein, 346 aa, unidentified
MTIVEAARGVTGGVDTHLDVHVAAALDPLGALLGTERFATDPAGYKALLAWLEDFGALTKVGVEGTGSYGAGLARFLRRADVEVIEVDRPNRAERRRSGKSDPLDAVEAARAALGGRAKSISKSKDGAVEAIRVLVVAKRSARAARVKALTQMRHLVITAPDQLRCRLRGMTVAALTAEAARLRPSRSGDPVMAAHKASLCSLARRIQGLEDEIAELDERVEALLEVTAPELLARFGVGPDTAAALLVTAGDNPERLRSEAAWAHLCGVAPIPASSGKSNRHRLDRGGDRHANSALWRIVMVRIAHDPETTAYFERKVKEGRSKRDVIRLLKRYVARELYRYLPRG

SEQ ID NO: 175742 - protein, 334 aa, unidentified
MENIALIGIDLGKNSFHIHCQDRRGKAVYRKKFTRPKLIEFLATCPATTIAMEACGGSHFMARKLEELGHSPKLISPQFVRPFVKSNKNDFVDAEAICEAASRPSMRFVQPRTESQQAMRALHRVRESLVQDKVKTTNQMHAFLLEFGISVPRGAAVISRLSTLLEDNSLPLYLSQLLLKLQQHYHYLVEQIKDLESQLKRKLDEDEVGQRLLSIPCVGTLTASTISTEIGDGKQYASSRDFAAATGLVPRQYSTGGRTTLLGISKRGNKKIRTLLVQCARVFIQKLEHQSGKLADWVRDLLCRKSNFVVTCALANKLARIAWALTARQQTYEA

SEQ ID NO: 175743 - protein, 338 aa, unidentified
MRTYAGIDLHSSNCYLAVIDEQQRRLFSKRLPNSLDHILSALQPFKDELAGVVVESTYNWYWLVDGLQEKGYRMHLANPSAIRQYEGLKHTDDKWDAFWLAQLLRLGILPEGYIYPKAERPARDLLRRRLLFVGHRTAHILSLQSMVQRCCGHGISANEIKKLTPQEASALFSDPQLGLTARFQVETIGFLSQQIRSIEKAVLPQVKLRPEFEILLTIDGIGKILGLTIMLEVGDIRRFAKAGNYASYCRCVKSQKISDTKKKGEGNRKNGNRYLSWAYVEAANFAIRHSPRAKSFYQRKCAKTKKVVAIKALANKLARASFYILRDQCAFDEKRLYG

SEQ ID NO: 175744 - protein, 428 aa, unidentified
MEYVDGIRLREFRQIKNEIRGSDRYLVVGIDVAKEKHNAFFGTATGKTLHKGVIFDNTVEGFRKLLAMTESLKVQHDLAKVIFGLEPTANYHKPLGEHLIRCGCLVVLVSAAAVRNNRSLLDGRWDKHDTKDSANVADLICQGKFLYYEYPTPKMQDLRNLIALKRRLKKEEHGLRVRIRNQLLAQYFPEMDRHFGSAISLAVVGHCLDPSVIAGMEFDEFRRSVAPGRMNMAQQKLLQAIWKLAPESIGCYVGDAAPFEAKVMVSKLHQLIETIKTVEAKIEDLSIQFPEYQFLLSIPGFGPDVSSKVLAAIGNPFRFTSGKQVLKLSGFDLCAARSGKTSNIVTPVISKHGKTDLRYALYQAAFIASYKGFLTYYTNKLKGRQREKGISTKMRVKLAAKLLVIAWTLMKKKEPFDPKYLNKEDTKV

SEQ ID NO: 175745 - protein, 376 aa, unidentified
MESRLVALQQHSVAREGRLYVSLELSDKSWRVAASDGARVSEYTVSAGDGARLLEVLERARHRFGLAAAAPVVSCYEAGRDGFWLHRFLAVHGVRNLIVDAASIEVNRRARRAKTDRLDVRALLALLIRYESGEQRVWSVLRVPSEQAEDERRVYRERERLMKERGAHRARMQSLLLLHNLRRVTVRGAGLGERLATLGVGPHLRAELEREAERLALVERQLAAITAEQSNDAAPSAAATKRRALTRLCAVGPIGAQVLVREVFGWRTFANRRELAASVGIVPTPYNSGECSHEQGISKAGNRRVRTLMVELAWSWLRYQPQSALARWYARRFGHGASRLRRIGIVALARRLLIALWHYLEHGLVPEGARFKAVSH

SEQ ID NO: 175746 - protein, 358 aa, unidentified
MQNKVKTISFQGQNIYVGIDVHLKSWKVTIMLDHSFYKTFSQDPEPSILSDYLHRNFPGGNYCSAYEAGFCGFSVHRELEKYGIKNIVVNPADVPTTDKERKQKEDKRDSHKIARSLRNRELEAIYIPDREMEELRSLVRYRKTLVKDIGMNKSRAKAFLHYYGIRIPPELDSASQHWSARFTSWLKTVETTTACGGFVLSEIINTTEQLRLRLLKVERQLREISKSGSLAKKIKFLRSIPGIGLIVSMMLLTELGDITRFPNLDHLCSFVGLVPTTKSTSDKEKTGNITPRSNKILRNSIIESAWVSIRHDPSLALRYNELCKRMKPNEAIVRIAKKLLNRIKYVLKNEKEYVYSVI

SEQ ID NO: 175747 - protein, 467 aa, unidentified
MAAVMIGVDPHKASHTAVAISAAEEPLGEVRVRACVVQAERLLAWAAAWPQRTWAVEGAGGTGHLLAQQLVSAGERVLDVQPKLGARVRLLAAGDVNKNDPNDARSVAVAALRSAGVREVRADDHAAVLKIWSKRYRDLGRTRTQVACRLHAVLGELIPGGVPKAITTARAARVLKALRPEGAVEGARCELAADLLEDLRRVDTRIRETRKKLAVAVAAAGTSLTGLFGVGPVIAAAVIGDVRDVSRFPGRAHFAAYNGTAPIEVSSGQRKVYRLSRRGNRRLNHAIHMAAITQIHHRHSQGRAYYDKKLAEGKTPREALRALKRQISNAIFACLQADARAAARAKGPGGQAGNGSVASVAGSHPRHRLFGTATPGPGVHTTTAAGNPPPGPARGRGTAGHSSIAATPPPAKPQVQVERPQRSEDERPGGAARRRPHSAARKGQGPLIKPQRPKGTSHPGRKADRTP

SEQ ID NO: 175748 - protein, 399 aa, unidentified
MRFAGIDIGSRSHVVALVNEAGVVLLRPAPFAATWAGHESLFTMLGSPLDLLVAMEATGHYSRNLFGALAERSYTVALINPLRTRRFAQEDLMRAKTDSVDALAIARFAAQKRPTPTQVDMALDQLRELVCFYNRILKDYNARLRPLYRLVNLCFPEFLGPVRTLDSQRAATLLREYPTSRAFAEASVDTLACLRMDSRRRVGAKLAHELIEAARLSVGRHDGPAYRSEVQLTCTDLAAVRERAKAVGEEIEAFVGAHPVGALLKTIDGISAITVGRILAAVGDPARLRSAGALASYVGVVPGTSKSGLRRPNHSRLSPLGNAQLRHALYMATFAAVQRNPWLGSYYQRLKATGKPPKVALIATIRKLLCAVYSVAKNRRPFVCPGPPATPPAGREAQP

SEQ ID NO: 175749 - protein, 367 aa, unidentified
MAKYLIVGADVHEEYVMIKWAVNQGNSHKLSFRMSFQGQQKMIESLKLEAQKAGAPQIVFAYEACCMGFGLYDNLTEASIKCHVLAPTKITRSNKQKRSKCDEKDAEHILEILKAHLLAGNSLPDVWIPDHQTRQDRLVVRRRLELSDKLTAVKTQIGTILKKAQLRRPKEIGTKWTKAYMGWLHEICDAQAGVLQYGSILSLESRLRELEMLEKEIEIQDENIKALSKGERYREAATELCKLRGVGLLTAMTFLTEMGDMSRFSNRKQIGAYFGLSPSSYETGENSDKKGHITKQGSGRLRKVLSQASWCRTSVDPAYDRIVSKNPNKKKKALVALMRRLGIIMWHIAKDVQERTGCFKNSQPALT

SEQ ID NO: 175750 - protein, 320 aa, unidentified
MASRESLFIGIDVSKQTLDVAFGADPHAPLETIPSTDEGVQLLVTRLQRLQPTLIVLEATGGLERMVFAQLLQAGVPTARVQPRRVRALAHAEGRQAKTDRLDARLLARFAERVRPPHHQATDEQRASLRDLLVRREQVIQMRTAEINRLTAAAPNLRPGIQQHIDWLDQEIRALEQERDNEAERTDEVRRKRELRESVPGIGAITALNLLLRLPELGTINRKEAAAFVGVAPYANQSGAQHKPRHISGGRRDVRSVLYMATLAATRRRLVRRAFDQRLCQAGKPRKVAIVAAMRKLLTILGAILRQQKPWDPAVHTSAP

SEQ ID NO: 175751 - protein, 450 aa, unidentified
MSNGNGVSRGDRNRNARLDRLRALVPVTNAIVGIDLADKKQMVVVCDHDSKVLARRTYRCRTWDLGTALDWAHERAAAKGFAGMTVSCEPTGHRWRVLAQLAADRSMPFVCVQPAVSSWSRRAEDLTHDKTDEKDAVLIARLTAQLRCYEPEPVDETWGRLRHLGARREQLITESSGQVQQMRDLLECVWPAALECAQQPFRSRTWIAALTVIVDRDGGQFDRTRRLGLARFEQAVLREISKRGGQKPCRRIARSVFAALADPAGVIAHRAGALERVQLLLEDWRTAHHRLADTEQRMTGVLDELGLTGLVTSITGISAVGAAAILAQTGDPRRFATARALVKHAGLAPREKLSGTFTGRTKLTGQGRPGLRLAAWRAVWGAQRANPVYGARYRHLTTREHNRLKPTQAQTVIAAAILRHLHAVISTGQAWDPSIATHGTRSAIRTTAAA

SEQ ID NO: 175752 - protein, 461 aa, unidentified
MAKKAKKVKTAKGAELRIVNPDAAGIDIADGIMQVCVPADRSKDNNRAFGAYTSDLHAISAWLRECGIKTVAMESTGVYWIPLFCRLQEDGMDVVLTNARDVKNITERKTDESDAEWLMLLHQYGLLKASFQPHNDAKRMRTLTRHRDTLSREASSIVLRMQKAMQQMNIKLTLVLSDITGKSGIRIIEAILAGERYPKKLADLADIQCKTPKEEIAKALEGNWEEDLLFVLRQNYDTFKHFCAQLDRCDTELEKLMENYRTEVAGTGRPSYSPTKKRRDYHKRKRNVGFDVERKAYDMWGVNVFEIPGISHQTALGLMSELGHDFTRKFPSSKQFCCWCNIAPNTKISGGKRISSHVPHRRNNVGLIFRSIASSLANAKNQLGNFYRRIRSRAGGKAAVIATAHKVAEIFFAMVANQTTYNPEKVGIDEKVLLEKRIARYKRELERITGMHIEIGNACVP

SEQ ID NO: 175753 - protein, 352 aa, unidentified
MRRTTTLHTVSTLGIDMGKYTLHMIGLDTRGAIVLREKVSRGRINSRLANLPRCLIGIEAGMATHYVARELTALGHDVKQVPVSYAKPFRQGHKNDFRDAHAVAEAVQRPTTRFIPIKTNDQLDLQVLHRVRSRLISSRTEVINQIRAFLLERSIIIRQGVSSLRQSLPDILSQRTDVLSPRTVRVIIDLTSDWHQLDNRIETVTDEIEALAKDDETCRRAMTIPGIGPIISSALVAAIGNGVAFGNGRDFSAWLGLVPKQRSTGDRTILGRITKRGNGYLRMLFIQAARVILRRPKNWPKHGFGLWLTHAAQRLHTNVLATAFANKLARIAWTVLAQGRSYEARTTEITTA

SEQ ID NO: 175754 - protein, 402 aa, unidentified
MGLFCGIDWATEHHDVAVIDDDGHVVARGRVSNDAPGFAALLTLLAQAGDSAADPIPVGIETDRGLWVAALRETGRTIYPINPLAASRYRARHGVSGAKSDATDAVLLANIVRTDPGAHRPLPADTELAQAIRVLARAQQDAVWARQQIGNQIRDLLKDFYPAALTAFADLPEGRLARRDARTVLAAAPTPAQAAKLTPARLRRLLIKAGRKRYLDRDIARLCEVFTDTYLHQPPVVENAIGIHLAALLGQFEAACTAADALAEAAVAHFEQHPDAEIITSFPGLGMLVGARVLAEIGDDRSRFADARGLKAFAGSAPITRASGKKTVVLHRYIKNRRLAAVGPIWALGSLRASPGARRHYDARRAAGGWHQQAQRHLFNKFLGQLHHCLHTGLRYEGSNRP

SEQ ID NO: 175755 - protein, 337 aa, unidentified
MNITLIGIDLAKNVFQVCGVNQACKPLFNRQIRRANLLDFLAQHPGVTIVMEACGGSNYWGRTLQTQGYTVKLLPPQHVKPFVKGNKNDRNDAFAICEAANRPDITTVMPRTLEQTDMNLVHRIRERRVEERTRLICQLRGLLNEYGIVQPCGKEALQAAMPDILEDADNELTAQARVYFHDLWEEWRAINESVKQLDADIRRQCRANEACSRLTEIKGVGDITATAIVAFAGNGRHYRSGRHFAANLGLVPKEHSSGGKQVLGSITKRGNGYLRKLLVQGAWSIIRYLDKSHDRLSLWAKALVLRRGKQRAAIAIANKLARIIWAMLSKETHYQPA

SEQ ID NO: 175756 - protein, 395 aa, unidentified
MFYGLDVHKDFFQVCALAEDGQTRRDFRIGGDAEAIEAFGRRLERTDQVVLEATFHSWAIVQILRRHVDRVVVADPAQLKAIASARVKTDKVDAHILAQLLRMDFLPEVELPAAETWAVRQLMAHRSQLRRQSVATKNTIHAVLNRSLLRYPGSFLFTEKGFRWLAELALSPAERMVLDHQTALLREVQARLAAVDQALVEHARLHGDAKLLVTIPGVDVVVAMGFLAAIGSIDRFSSPQKLAAYFGLVPKVRQSGSTCYYGHITKAGSRNARWLAIEAAHTIARSSSPLAATYLRIRRRKGHQIAVTALARKLVVVVWHLLTTQQPYRYAAPTRTRDKLRRLQKNERPPAARAPRTLDEVYAEAGLPLTPPAAGEKRAAKRSRAALTRMRSEIN

SEQ ID NO: 175757 - protein, 386 aa, unidentified
MQKAITYVGLDVHKDSIVVSLAEAGLRGRLREVREYGKILNTPAALKAMATKLAASGNELRFCYEAGPCGYGVQRQLSAMGHHCAVVAPSLVPRKPGERIKTDRRDAVKLAKLHRAGELTPVWVPDPAHEAMRDLVRARLAAVRNIREARQQLSGFLLRNGYHYHRHPWTLLHRRWMADLKFDQPLHYIVLQDCIAAVEASEQRRDRLEARITAALPEWSLAPLVETLQALRGIALVSAATLVAELGDIARFSNPRQLMAYLGLVPSEHSSGRSRWQGGITKAGNAAARRMLIEAAWSYRFPARISRYQLLQQERLPKLIRDIAWKAQERLCRRHRKLMRAGKPKTVVCAAIARELTGFVWAIATETSPAIGKKGTGKPATMVAVS

SEQ ID NO: 175758 - protein, 355 aa, unidentified
MTAGESEPLVVVGLDLGDRYSHYCMLSNRGEWMEEGRIQSTAAALQKHFSSEGRMRIALETGTHSPWVSRLLKSYGHQVIVANPRKIPTLTGSESKNDRNDAEQLARMAAFDPKLLHPIEHRSLERQQDLNLIHTRSVLVRARTMLVNSVRGLVKSAGGRLPSCSSEAFPEKVSVAVPGELKAACEPLLEQIAQMNRTLGAMDKQIDKLAKKYPEIALLRTAPGVGPVVAACYVLTLDRPEAMETNRQAGAYLGLRPRQQQSGDSNPQCGITKTGNTYLRSLLVQSAQYILGRFGPNSELRCWGLKLAASGGKRGKKRAIVAVARKLAVLLLSMWRKGKTFEPFPQSATQLATAV

SEQ ID NO: 175759 - protein, 339 aa, unidentified
MTILKQTVGIDVSYKTFDARFGTTNTQQQITLSPSKSFKNSLAGFKLFLRWLKKYILSDDIPLVFVMEATGVYYEHLAHFLFQHNYQLAVILPNKIRNYAKSLESKSKTDPLDSAVITRFGLERQLNLWTPPSDTIKALRDLCREYHCLKANCTQIKNQLHALKSSFKPHRESFKRKTQLLKFLQRQIALIQKELRALVKSEPQLAQHLKNIKTAKGLGDITILTVLAETRCFQLVTNLKQLTSYAGLDVVFNDSGLKKGKTSISKKGNTFIRKALFMPALSACRANPQLKAFYQRLVAKGKNKKLAIIAVARKLLLLIYTLWKTNSPYVPDYNPVNKC

SEQ ID NO: 175760 - protein, 337 aa, unidentified
MKRYLGVDLHRTQFVVCTRWENGEQEIRQWRIGELPKFVEQLRNEDQIAVEAMGTTARFYDAVAGRVERVVVVNPHQFKVISESVKKTDRKDAAALALYLEKDLLPEVRMKPKQNRELMHLAETRDLLVKQRSALKGKINNLLAMQGIELKREALSSKIALERVLALPVSGMVQLELRVLVGQIRTLSESIGELDERLEEEGQQLPGYENLTSIKGIGWLSATVLLTVIGKISDFADENKLAAYLGLVPRIANSNESERSGRITKQGNKLARTALVQCGLVAKRYSPYLSRFYDRIKQRRGGGKAKIALARKLVKIVYDTLKNQWVFEDFPSFTLAA

SEQ ID NO: 175761 - protein, 399 aa, unidentified
MNSVGIDISKGRSMVAVMRPFGEVVVSPFEVRHTDSELSELAKLLKSLDGETRVVMEATGNYHTPVAWLLHGAGLYVSVVNAKLVHGYGNNDLRRVKTDRKDAVKLANYGLDRWLTLPRYIPEEDTRLLLKNCYRQYQQYSTMLKNNLISLLDTTFPGMNRLFNTPARADGSEKWVDFAADFWHCGCVCECSEKVFMNKYQRWCRKHGYNFSERKALDIYTEASGHIGVMPMSDTTKLLVAQAVSQLRATSAALAVLKQEMQTLASQLPEYPIVMEMFGVGPALGPQLMAEIGDVRRFHSKKALVAYAGIDAPPNDSGDVTGRHKGMSKVGAPSLRRTLFLVMSVYLQNAPLDEPVYQFMDRKRAEGKPYRVYMMASANKFLRIYYASVKAYLETLERF

SEQ ID NO: 175762 - protein, 422 aa, unidentified
MLAESHDEEQIIARVAALDIGKAELVCCVRVPAPAGGRRRLQEVSTHSTMTKSLADLANRLVGMGVERVVMEATSSYWKPVFYLLEAHGLDPWLVNARDVKHLPGRPKTDVLDAVWLCKVAERQMLRPSFVPPWPIRRLRDLTRYRTDLVAARTAEKNRVEKLLEDACIKLSVVASDIFGVSGRAMLAALVAGERDPKVLAQLARARMRGKIDRLEQAFDGHFADHHRFLLSRMLSRIEALDADIAAVDAQIEAQLAPFAKAAAHLDEIPGIGPVAAAAIIAEIGVDMSRFPTAGHLCSWAKFAPGINSSAGKTKRSASSGHGSPYLARVLGEAAVGTSKTNTFLAARYRRIARRRGQPRAVVAIGRSILVIIWHLLHDPDTRYHDLGADHYTRHVDPTAKKRSHIRQLEALGYTVTLTPAA

SEQ ID NO: 175763 - protein, 381 aa, unidentified
MTTKATRNAQDTTSEGTLFVAFELSEKTWKLGFTTGHGQKPRERSVTARDQKRVLDEIAQTKRRFDLPETAPVVSCYEAGREGFWLHRFLEAHGITNHVVDSSAIAVSRRQRRAKSDGLDVRKLLNMLIRYEQGERQVWQVVHVPSVEAEDQRHLHRDLETLKRERASTTARLKGLLSSQGIQVTSLTKLPEQLDAMRLWDGSPMPPGLRQRVLRVYAHHQFLSAQIAEVEAERCALLHDSTDASIDKIRQVMLLKGIGINGSWLLVMEFFGWRECKNRREVGGLAGFTPTPYQSGESAREQGISKSGNRHVRWMTTELAWSWLRFQPESALSVWFRERFGSGGKRLRRMGIVAVARKLLIALWRFLETGVLPEGAVLKEG

SEQ ID NO: 175764 - protein, 373 aa, unidentified
MEEFIKYIGMDVHGKTIAVAVADSRSSEVRFIGQIVNTPEAITKLVDQLKARDARLSFCYEAGPCGYGIHRQLLLLKHDCQVVAPSLIPKKAGDRVKTDRRDALMLARLHRAGELTAVWVPDGEHEALRDLTRARGDIKDLERRARQRLLAFLLRHGRRHEGKSHWTQAHFRWLETVKFEHPVQQIVMQEYIDTVVSCGKRVLALDKQIEQAAAKSVVWPVIEALMALRGVQLLTATITVAEIGDLKRFAKAAQLMAYLGLVPSEHSSGERQRRGGITKTGNSHVRRVLVEAAWTYRFPARKTRTLQKRAERCDEKVQAIAWDAQKRLCHRYRHLTEGGKLKVQATTAVARELAGFIWAIGQAVPTPVAKTGH

SEQ ID NO: 175765 - protein, 330 aa, unidentified
MNYSHFVGLDVGKKSFDASLVSLDQELSHHTFPNTPEGIEELLHRVKQHGVEVETALFCAENMGSYVIDLCLSSYQFHFPLALECPLTIKKSIGLQRGKNDRIDARRIAQYASLHYRKLRLYELPDKDLVRLRNWLVIRDNLVKQKVSSLKLLELPRETSRLADLMVPMTFLENQICQIKEKISYVEEEMEKIITEHITLSTNYRLLTSIKGIGPVNAIVLLCVTDNFQRFSDPRKFACYSGVAPFEYSSGTSIRGKTKTSHLANREVKVYLTRAAITAIAWDPQIKAYYKRKIAEGKHKASVINAVRAKIIARCFAVIKRKTPFVTLSA

SEQ ID NO: 175766 - protein, 347 aa, unidentified
MVSWEQNPQARLGELHCQTGLVFYTAMSKTYIGIDIAKNTFDACFIVDDIWQHHTFTNTHKGFIELMRWVQSCYYNTSLHLIIEATGIYWEKLAHWAVSHQHKVSVVNPLYIHAYAKSLGIRTKTDKQDAILLARYGTKENPPSWQPKSNNEIKLTALLKQRDHHKRQLIKERTRQESQSIYVKSYTDDNIRHWRESMIQIDDQIWLLIDKTPELKHRASLLATIPGIGKKTLPYLLATIGDGSSFQSAKHLASYAGLSPRHHQSGISIHKQSAIGFSGQKELRSALFMPAVVVSFGRYPTFEKFVKRMEKKGKTKKQIIIAIMRKLLTISHAVIRQNRPFDKHIHE

SEQ ID NO: 175767 - protein, 343 aa, unidentified
MSGAYEGRQIVGMDLHRRRSVLVRMSETGEHLETVRISNDPEYLREVMTRAGEAPEVELEAAYGWYWAADALAELGATVHLAHPLGVKMFGLRRVKNDERDAADLADLLRMGRLPEAWIAPPATRELRGWVRHRAKLVALRSGLRCQIHAVLASAGMQVPMSDLFGVSGRELLTTATLTVESRSRVESLLRIIGALDFEIDLYTKLVASRLRTDPGYHAIQAIPGVGPVLAAAFVAEIGDITRFHRPAELASWAGLTPRHHESDTTVHRGRITKQGSRLVRWAAVEAVQRVPARTRLGQRRDRVAERRGHNIGVVAAARDLITLVFYGLRDHHVRCLPTKAAP

SEQ ID NO: 175768 - protein, 325 aa, unidentified
MNEITTVGIDLAKNVFSLHGVDGKGLVLLRRTVRRDQLEEAVAKLQPCLIGMEACSGAHEWARRFVGYGHTVKLMAPKFVIPYRKSGKNDGNDAEAICEAVTRPNMRFVSVKSVEQQALLSLHRVRRGFIVERTATINRLRGLLSEFGVVLPLRSKTVRRQASAVAESLPALARRAIDDLLEHLRLLDGRIEAYDQEIEGQAKLCEPAKRLMKIRGIGPTTALAIVATAGNAREFDNGRQFAAWIGLVPSQYSTGGRARLGHISKQGDSYLRGLLFQGARSVLHSAAGHQDRMSALGAHIAGTARLQPHPGSDRQQERPDRLGTA

SEQ ID NO: 175769 - protein, 394 aa, unidentified
MKLVGIDVGKNSHHFCVMDKETGELNVTPSSFSNNKEGFDFLINSLKPYSKKSILLGMEDTGHYHVALLKFLLSNGYTVALINPKTTDLTRKMEGVITKNDKLDTITICDVLDTPERKKQYRITKVDRFDLYEQRQLTRHHHNLKEELNVYCNRLQKSIDLVFPEFNTLFSSKYGVVYMNLLKTFGSAEAIASTDIRTIRKCFEIKGKGNRISLTPEKLKECAKNSIGISSEVETIQIKHLVSQIMLIKEQIAEIDKKIEEFSITNNSPILSIPGISHFSGTSILAELGDIGNYSKPSQIIKFAGVAPYHYESSQYNAQHTGITKKGSKYLRKTLYQIILPVINNNPVFKKYYRLKISQGKGHRCAQGHCIRKLLRIIYHLLETGQSFDPALLR

SEQ ID NO: 175770 - protein, 320 aa, unidentified
MNQALVFVGVDVSKASVDVALRPSNERWRLARDDEGTRDLVARLLALRPTLIVAEASGGLELPLVAALAAEALPVVVVNPRQVRDFARATGKLAKTDALDAAVLAHFADAVRPALRPLRDAETQALTDLMARRHQLIAMLVSEKNRRGVASAAVLPRLEAHISWLEDELRALDVELRQTLQRSPHWRERDELLRSVPGVGEQLSLTLLAHLPELGNLDRRQIAALVGVAPFNRDSGALRGRRTIWGGRARVRGALYMGTLVATRFNPVIRDFYQRLLAAGKPKKLALTACMRKLLVILNAIVKHQSPWRDLSGQVATPSS

SEQ ID NO: 175771 - protein, 460 aa, unidentified
MNQYFLGIDASKGYSDFVMLNAKKQPVIENFQLDDTFDGHARLYELLASFNQAHQQATIYAAVESTGGYENNWFRSLLNFQASLPIKTAHLNPVGVNHNRKADLKRNVTDKISAQNVAEYMIAHPEKVSYQHQDSLASLRKQWGFITMLTKQNTQMLNQLESLVYNANPEILAYCKDGTPQWVLKLLTRYPTALRLSKANAKSVARIPYVSKDRAQQLVATAKKSVASADDEVTEQLIIATVKQILDVNNTIKAQTKILTDRCSVPEVELLKTFNGIGDYSAIGLMLEIQSVNRFLSSKKIASFFGIHPAYKKSGDGTWKYRMSKKGRKEPRRILFMVAMSAIKSNPLIRSIYQQAVQRGMKKKAAVGLCMHKILRIIYGMLKHNKAFDPEIDRKNRQKKPLRQRRVRQDKDRRYQNFDSKAPISRRQKMKRKERKQSQNVSNVEYGINEASVPANQLTN

SEQ ID NO: 175772 - protein, 408 aa, unidentified
MADKMAGIDVHKKVLMAVVIDARTPESKPERRRFATMPSELRRLSRWLEEQGVEEAVMESTAQYWRSVWLELEPHMCLHLAQAFSNRAPRGRKHDFKDAERLVRRLIAKELILSFVPDGEQRIWRNLTRMKLQLTRDRVRIQSPIECLLEEMRIKLSIVVSDLLGSSGLRILHALANGETDAKSLALLGDDRLKCTEEQLVEALTGRPHPMHGQMLALQLERLRLLDEQIAKLNSLIAQVMKPHQDAVIRLAEVPGLGIDSAQQVIAEVGVTASTFSSAAEFTSWVGTCPGKEESAEENSSSRSAKGNKYMRRVLNQAAHAAARSKGTHFQAVFRRLLPRLGYQSAVWAIAHRLCRLVWKILHQGIRYIEQGIESEPKLLIYRAKYLAKQLRKFGYNVQITPANGAPA

SEQ ID NO: 175773 - protein, 338 aa, unidentified
MTPFKYFVGIDMASATFTACVGTMPWAIVVKPETFEKHEDGFASFLGRLKEQNLPPDHTVVCMEATGVYAEGLAYFLYASNYIVAVEPPLNIQRKFPVNGSKNDLQDSQNIAEYACRYTDKLSLWKPRDEILEQVKLLLTTRQQFSAQLTAHKNAFHAANRKKISSELAKKVHTDMIQQITKHIKAIDIEIRRLIDTNPTFKSALLLLLSIPGIGLQLAAHLIIMMQYSLDPRVLSAFVGICPYQHESGSSIYRNPTSRHYGPPAIRKLLYLAACSVSTHPKEFRQYFARKKAEGKPGKLVLNNIQNKLLKIACAVIRTQKPFIPNYVSVNPLVLNNA

SEQ ID NO: 175774 - protein, 387 aa, unidentified
MGIRKETRTFDTFTSCLTEMKEWLLANGITHVVMESTDVYWKPVMRVLEADIPNVWIVNARHIKNVPSHKTDKMDSEWICKLLIAGLLKPSYIPPKEQRQLRELTRYRNKLIQAIATEKNRMMRVLEDCNIKLSSVVANTSGVTATALIDMLCEGRKLTLEDIESVYHKKLSASPQELLEACTGFVEEHHIYMLQMIRKSIAQTQRLVDELSKRIKEILIKYENVLELLKEIPGFNTKVVEDLVSEIGLDMSAFPSEKHLVSWAGICPDYNESASKKSGRITHGNKQVKAVLTEAAWAATRTKNTFFSERYHRISARRRKKRALIAVAHSQLTAAYLILSTGARYHELGAQFMQAKIEKKRKLYLTAELKKLGYKVSLEKKKEATKS

SEQ ID NO: 175775 - protein, 346 aa, unidentified
MKYMGIDHHKQYFIATVKDEEGTTLRKDRVSTDRAAIRHYFRKVNKDKDLKVVMEAGYGWEYLYDEIQGKVQEVKLAHPLKTRAIAEARIKTDSLDSDVLTHLLRTNLIAEAYALPYEVRDKRHILRYRISLLRIRTMLKNMIHAVLNRNHIEEPNFRDLSDKFGKKGKAFIKSFKLKGNDTKIVKGYLSLLEDIDKKVEAMERKIKETFEEDDVCKLLKTIPGIGELSSVLVRYEIGNIERFASARKLCSYAGLVPSTYSSGGKTYHGKITKQGNKWLRWIMTEIARRAVVKDAWVRSQHNKIKERGGAKKARTATARRLLEIIYKVWKERRPYYEKPVAVALEN

SEQ ID NO: 175776 - protein, 426 aa, unidentified
MKSNTQNAKIEAITEKTMIIGIDVGSETHYARAFNWRGYEFSKKPLKFSNTEEGFKTFRIWISDLKKKHGMNKVIPGMEPTGHYWFNLGKFLQDNGMRPVHVNPHHVKKSKEMDDNNPSKNDRKDPKVIAGLVNEGRYFYPYIPVGIYAEIRALSGLEVAARDEITRLKNRIARWFCIYFPNYKDVYGDIGAVSGVMILKAAPLPEDIVRLGVDGVNQIWRDAKLRGVGIKRAKALVKAAEHSIGSREAKEAARMELNILLSDYERQAAREAKLMEMLREKIAEVPYVDKLLEIRGVGIKTVVGFVAEVGDIRRFDDPRQLQKLAGYAIVKNESGKHKGESHISYRGRKRLRYVLYEAAISVVGHNQEFRSIHEYYTTREKNPLKKMQSLIAVACKLIRVFYVILKTGAKYDPAKMIKDIRRPEAA

SEQ ID NO: 175777 - protein, 419 aa, unidentified
MSFKILKFNCCGLDVHKTWIYACIGITDSNNRTEYKQARFSSFTKGLNELCDWLAKYNCKDVCMESTGKYWIPVFNILEQHNLWVTLSHPKYTKPMKGNKTDRKDAKWICDLYMCGMVKPSFIPPADIRELRDLVRYRFKLTCMITGEKNRAQNCLTVSNLKLDDVFSDVFGKSSRSITEQILKHPGETFDVTPFVDGRCKTPIEEIQAAVDGAISKEQAVKLRQCLDHIDELNKHISEIEQEILRLSDKYEIALNLIRTVPGFNKNPLTAIQVLSEIGGDMSVFPTAKHLVSWAGCCPRNDQSNQKIKSTRISRAGSYFKPVLVQVANALIKSKKHLEFTNRYKRIKARRGHKKAIIAICRMILTAIWHILSDLKPYTPEGFLESRPVKEEKVLSISQALNLLKQRGYIIKDEPLSVS

SEQ ID NO: 175778 - protein, 407 aa, unidentified
MNENGKRYIGLDVHKHYLIALGVDANLEVVMPARRVELSHLENWMKKNLTRQDEVVLEMTTNTWQLYDELVEYAGSVMVVHPPHVALITRSQVMNDKIAASILARLLAKGLLVGIWVPPQEVRELRGLVAQRRKMTRLATQAKNRLHAVIQRHHLKPPAGNPFAKTNNGWWQALPLGKLEKMNLQSDLETLQFAEQQAARIQKEMTGIAAEDEEIGRLLHISGFGVITAVTVYAAIGDIGRFVEPKKLVGYAGLGARVHDSGMTTRTGKITKAGRRDLRVALVEAAHVVAHSHPHWKAELARLQPRLGYNKAIVAIARKLLVTVWHVLARKVADRFAEPKKVSQKMLRFAYAVGKENRAGKSAAQFARARLDILNLGEELTSIPWGAKKPIPLPPSKLKERSAVPNK

SEQ ID NO: 175779 - protein, 457 aa, unidentified
MARKRKHGTKSPPEPLMIHPDAAGIDIGATEIFVAVPTARDETPVRSFPTFTQDLNALADWLGRCGIKTVAMESTGVYWIPLFQILETRGVEVCLVNAHHAKNVPGRRTDVSDCQWLQYLHSVGLLRASFRPAQEICAVRTLLRHREGLVQMASGHIQHMQKALDQMNLQIHHVLSDITGVTGLAIIEAILGGERDPQVLAKLRDWRVRASEEVVAKSLVGDYRREHLFTLRQSVVAYRQCQQLIAECDQEIHRGLETLPSKTDLFQAPLPPAKPATKKRKVGEPDYDLRAQHYRILGVDLTQVPGISSLIVHTVLTEVGPDFSKFRSASAFASWLGLCPDNDISGGKVLWVGTRKVNNRAAKAFRLAAYTLHHSHSALGDHYRRMRAKLGSPQAITATAHKLARITHHLITTGQAYDESAFARDEKRYKKRAEVRLKAQAKALGFQLVPAENGSVP

SEQ ID NO: 175780 - protein, 403 aa, unidentified
MNSVGIDISKGRSTVAVMRPFGEVVISPFEVRHTDSELSELARQLKSLDGETRVVMEATGNYHAPVAKLLHDAGLYVSVVNAKLVHGYGNNDLRRVKTDKKDAVKLANYGLDRWLTLPRYVPEEDTRLLLKNCYRQYRQYSKVQTVLKNNLISLLDTVFPNVNRLFSSPIRGDGSEKWVDFVAEFWHCRCVSEKSEKAFTNKYQRWCKTHGYNFSEAKAHTIHAEASGHIGIMPKSETTKLLVEQAVVQLRATSAALIALKREMLTLAAQLPEYPVVMGMFGVGPTLGPQLIAEIGDVRRFYSKKALVAYAGLDAPPNDSGDVTGRHKSMSKIGASSLRRTLFLVMGIYLQNAPLDEPIFRFMDKKRAEGKPYRVYMMASANKFLRIYYATVKAYLESLEHTA

SEQ ID NO: 175781 - protein, 347 aa, unidentified
MEQIIRIGMDTSKHFFQLHGVNGAEQPMLRKKLRRKEMVTFFEKLPPTVVGIEACGGSHHWARLLGSLGHEVKLLPPQYVKPYVKRGKNDAADAEAVCEAMSRPTMRFVPVKGAESQAALMLFGMRDRLIRNRTQLANAIRGYAAEFGLTAAKGMYKVASLLERIAADENLPELARALFALHAKEYAQLQAELETIEAKLMAWHRENECSRRLAQIPAVGPIVASLLTMKTPAPELFRSGRDFAAWIGLTPRDHSTAGKTRLGVITRAGDEALRSAMVVGATSLLRQVRAGRGKNALPWLVNLLKRKPPKLAAVALANKIARIAWKMMVTGENYRKPAVQPDLACAA

SEQ ID NO: 175782 - protein, 478 aa, unidentified
MARARKQVVRRAAEAEPGKQVRPAAQGDLLITHRHAAGIDVHAAEHFVAVAPEDVPAGFVSPDRKLPAGVRKFGTNTADLEAIADWLKACGVTTVAMESTGVYWIPLYDLLASRGFEVLLVDPRQTKHAPGRPKTDVVDCQWIRRLHSYGLLTGSFRPGDEVVRWRGFQRQRETLIRYAAQHVQHMQKMLEEMNVKLTEVVSDIVGVTGMKIIKDIVRGERDPLQLAKNRHESCKRTEAEIAAALYGNWREELLFGLEQALELYEFYQQQLRACEAKIEKCLRSMKDQSDGRSLPPSLRQRKPEKNEVRFGARALLFRMSGVDLTQIEGISETTALVILSELGIDLSAFPHEKNFVSWLGLCPQHRGSGGKIFKRGTRRGANRVARALRMAAQGCHRAQNALGAFYRRIQGRSGGAKAVVATARKIAERVYRMLKFGQEYVRQSQEAYEQAYQLRLMKSLAKRAAHLGYKLVPETIGT

SEQ ID NO: 175783 - protein, 344 aa, unidentified
MYKADRTRRRVVVHGVFMSMSTMAYLGIDVAKRKVDVALLRPDGKVRSKAVLNTTAGAAELLAWVARYHEGPVHACLEATGTYGLALAEALADAGYVVSLVNPARIAAYARSRLTRSKTDAVDARLIAEFCAKETPPRWVPPSPEIRALQAWVRRLDALDQMRTQELNRLAAEPADAAVRASIQHVVDLLEDEMQTLRARIHDHFDAHPGLRAQRDLLTSIPGIGQATAAVLLAEFGGLTQFRHAAACAAYAGLVPQHRESGTSVRHKPVLSKLGVPLLRKALFYPAMVALRFNPIIVAFGERLRQKGKHKMVVIGAAMHKLVHLAYGVLKTGKAFDPKYRLVP

SEQ ID NO: 175784 - protein, 414 aa, unidentified
MNKRTYRTKNVNKINWPQVKEQLSGAAVVFALDVAKTKQYALLTNADASVSEGLWWNHPEETFELLKALEDLECPLDVIMESTSTYGDALRYQFRRSGFGVYQVNAKRVYDAQEIYDGVPSMHDAKSAMVITRLHREQLTQPWIELTDEERQLDALRREYDLHQSQYQRNQNRLEAYLSRHWPEINELLALHSVTLESLLIEYGSPAQIAADAAIAAKNMRIWGRSMLSGEKITKVIHSASQTLGQPCLESERRFFQALAEEMRHSRRQLKQAKLALETIIKSDSELEEIGALIGLVTTSVLLSCHLDPRRYASARSYQKAMGLNLKEKSSGRHVGQLRITKRGSAMARKYLYLATLRLIKSHPIVKAWYENKVNPKARNKTVIAVMRKLAKALWYVGRGERFDARKLFPAAQV

SEQ ID NO: 175785 - protein, 360 aa, unidentified
MGNGTFVGLDVHARSVVAGLIDEQSGEVRVKRVAHRTEELVSWLGDLDGPVRVAYEAGPTGFGLARACEAAGIACLVAAPSLIARSPAGRSRKSDASDAEHLARLLRAGELTPVRVPDPADEAARDLVRAREDARADLMRTRHRLSKLLLRHGLVYESGRAWTGAHDAWLRRQRLEHPGTRAAFDDYYAAVLGAGLRRERLDEQIAQMATDPRFAPVVGRLSCLRGVGTLTAFALAVEIGDFHRLSGATIGAYLGLTPSESQSGSRRVRGPITKAGNSHARRLLVEAAWHHRPPVRPSAVIERRRASQRPEVAARAEQAGLRLHHRWHQLERRRGLRSTVVATAVARELAGWCWSLAVMD

SEQ ID NO: 175786 - protein, 360 aa, unidentified
MSFNGTSVGLDVHALSVVAHAVDEETGRVERARLCPDHGEVVGWLRQLRGPVRVAYEAGPTGFGLARALAAAEIECTVAAPSKLIRPSGDRVKTDARDAAHLTRLLRLGEITAVVVPEREVEATRDLVRAREDARADLMRVRHRLSKLLLRQGRVYSGGQAWTGAHEAWLRRQRFDDAHTVAAFDHHFDAVLSATAARDRLDEQIIAVAASPRWADIVDRLGCLRGISALTGLGLAVEIGDWTRFTGASIGAYVGLVPTEYSSGSSRVQGSITKAGNAHVRRLLIEAAWHHRAAYRNPGPTMRARWAKVDPALKARGHAGNRRLHQQWCRFNERKKPHVVANVAIARELSGWCWSLATLT

SEQ ID NO: 175787 - protein, 314 aa, unidentified
METSAQPVFVGIDVSKNKLDVALWPSGEGFAVERNANGLNSLCAKLAALNPVTIALEATGGFETVVAAALAAASLPVAVVNPAQVRAFAQALGKRAKTDPIDGAVIARFAEAARPAIRPLADAETQLLADLIARRRQIVDMIVAEKQRLGRAPAKRLKKSIERLLKALEKELSNLNGDIDTAVRASPLWRANEELLTSVPGVGPTTARTLIAELPELGSLTRKEIAALAGLCPFTRQSGQWRGKSFIAGGRASVRAALFMAAMVAARFNPILKTFYDRLAAAGKPKKAALIAVARKLLTILNAILRDQKPWQIA

SEQ ID NO: 175788 - protein, 354 aa, unidentified
MKRTAKYVGLDVHQATTVISVRDTSGRVIAREVVATDEASLTGFLGRMRGSVSVTLEEGTQAQWLHDILQPVADRVVVCDRRGESKRGNKGDQVDADELSRQLRDGSLRAVYHGSTHGASLRELARSYQSVVLDTTRVMQRIKALFRARGIKTPGTRVYRPAHRAQWLAKLPAGGARFRAEMLFAQLDLLQELRPKAKARMVGEARHHDAWQVLNTVPQLGPIRVAQLLAILRTPWRFRSKRSLWAYCGLAVTTSTSSEFLIERGQPVRRSRPPLTRGLNRNHHPVLKQIFKSAANGAVAHPGPLQDFYLARTERGMRPELARLTLARKLAAVALRTWKTGEPYDPTYLTVNQR

SEQ ID NO: 175789 - protein, 350 aa, unidentified
MNVNHYIGFDVHKKTVSYCVKIADGRIVEEGKLRATHDTLCQWAGRRQEPWHGAMEATLFSGWIYDALKPFAAELQMGHPALMKAIGASKKKNDKLDARKIADLVRCDLLPACYVAPPETRELRRMLRYRNLVVAQAVRMKNKMSGLLMEVGAEYNKQQLHGKEYFTELLSTIEGVPESVKDLLWLSRGALEMFQTTQQQLVARLQKEPLLAKRVTLLKSIRGVGEVTALTWALEVCDPRRFPSIADAVSYCGLTSALDSSADKQQRGPISKQRNAHLQTVLIEAAKLAPRWNPQLAAIHEREVQRGHRNRATLAVARKLVAYLLAVDKTGKPFQIRTPATVDQEVKTAA

SEQ ID NO: 175790 - protein, 456 aa, unidentified
MSGKNAKPMPTGLPIIHERAAGIDIGSRFHVAAVSPDLSDEPVRTFQAFTSDLHRMADWLIDVGIKTVAMESTGVYWVAAYEVLESRGLDVILANAHDAQAVPGRKSDVNDAQWLQRLHACGLLRASFRPGRDIAALRVYVRSRERHLDYAAAHIQHMQKALTFMNLQLHHVISDLTGATGMKIIRAIVAGERDPDILAAMRDTRCKASVETVRAALVGNYQPEHVFTLTQALALYDFYQRCVEECDRQIEQAVAALNAARPKPAAPLPKPRHRTKQPNEVNFDVRTALYQLAGTDLTQIHGIGPFLALRLVAECGTDLSRWRTAKHFTSWLTLSPGCNISGGKVLSAYTRKTRNRVTAALRLAAVTVGRTPTALGAFYRRLAARIGNAKAVTATARKIAVLFYNAMRFGMEYKDPGADHYEQHYRDRVLKQLHRRAAQFGFILQPQRVSVEERVS

SEQ ID NO: 175791 - protein, 346 aa, unidentified
MVLIGCDFHPSWQQVSWLDAATGEGGDQQLVHAPGETEKFYRQFAAPARIGLEATSNCQWFVDLLTRLGHEVRMGDAAKIRASDARQQKHDKRDARLLLRLLAEDRFPQIWVPSRAQRDLRQLLIHRHKLVRLRAQVKNGLQHLAMNQGLQQKRHLWSAAGQKLLCALPLQPWASRRREDLLQLLAELDGKITVLDAAVAEVAGQNDGARLLMTQPGVGPITALAFVLTLGDVSRFPRGKQVASYLGLIPREYSSGGQQRLGSISKQGNAFLRMLLVEAAQVVVRCDPQFRNAYLHRCHRMAKGVGKVAAARKLAIRLYWMLRSNTGYPEVVRVESRPRVPLVSAS

SEQ ID NO: 175792 - protein, 347 aa, unidentified
MRFYTNQHPVYCGIDWHARSMYVCILSQAGEILLHRNMQAAPEPFLKAIAPYREGLVVAVECIFTWYWLADLCADQGIPFVLGHALYMKAIHGGKAKNDKIDSQKIAALWRGGMLPQAYVYPAAMRATRDLLRRRTHLMRKRAELLAHVQNTNSQYNLPDIGKKIAYKANREGVANRFTDLAVQKNIEVDLALITYYDTLLSDLELYILKTAKQHDAHTLYLLQTVPGIGKILSLVLLYEIHDIARFPRVQDFASYCRLVKCAKESAGKRLGTSGKKIGNAHLKWAFSEAATLFLRNNEPGQKYLARLEKKHDKGKALTILAHKLARAVYYMLKRKTVFDMDIFLHT

SEQ ID NO: 175793 - protein, 354 aa, unidentified
MESTADTYVGLDVHRKIVVATALDGTGHELAQEKFGPEPSELTDFLSRLPGRKHVALEACSMWAPYYDTAASTGAEVTLTNPYKTRLIAEASLKSDKVDSEALARLLRVDSLPTSFAPSPEVRALRTLVQDRVFYRRYWTAVANHTYHFLIARGIPYEDRLLKFRRKREVLRKLHLPEIDRGLATLLALEERCKELEREIHSAWVESEDGQLLTTIPGIGELTAMALVAYLCPIERFPTSRHAASYVGLVPRSYQSADRQYHGKLKRDSNGFVRWLLVEASWTHRHRERKGDVARTARRITRHRGSGKGTVAGAHKLLRIVFAILKERRPYLPHAPEPTAPTQALRRLRTTASQ

SEQ ID NO: 175794 - protein, 385 aa, unidentified
MKKNISTTTVTNTAASVDVNAAQPQVGQDGGTAPVTARYQAVVGLDVGDRQSHYCVLDLDGGVVAEGALKTTDASLRVLFEGKGRMRIALEAGTHSPWISRLLIALGHEVLVANPRKLRLIAESDAKHDRADAHLLARLAHVGPALLSPIHTRSAQTQIDLTVIRAREVAVQTRTKIVNAVRGMVKSTGHRLPASPTLTFARKATEACPAALQPALLPLIRLVQTLTDDIAAYDRLVVGKARAYPETQAIQTIPGVGALTAVAFVLVLNNDRSRFKRSRDVGCYLGLKPKQRDSGMRSPQLGITNAGDPLIRRLATQSAQYILGPFGRDSALRRWGLSLASRGGKNAKKRAVVAVARKLVVLMHRIWITQEAYDPMRGVRVQSAA

SEQ ID NO: 175795 - protein, 421 aa, unidentified
MPNIPTEFAATVGIDWADRKHDFIVQVPGVAKRERGVLEHRPGAIDAWAKKLRERFAGAPIAIAVELARGPIVSALLEHDIFVIFPVNPSMLAKYRLAFKPSRAKDDPTDAEIALELLLRHPERVPPLERDSADMRALQRVVEDRRSLVEDRVRLTNRLTNALKAYFPQAVEWFRDKETAIFADFLERWPTLEEAQRARDKTLVDFFHAHNVRHASAIERRVTAIRGEQALTTDPAVIGPARLLVEVLVPQLRAVCKAVARFDEEIERLCGQLADYKLFRALPGAGPVFAARLLAGFGERRERFPTAEALQRYAGVAPVTERSGNKSWVHWRWSCPKFLRQTFVEWVAETIPRSFWAKAFYTQHRAKGASHNATIRALAFKWIRIVFRCWVDRRPYDESRYLSVLQKRRSPVLTFGVAGSP

SEQ ID NO: 175796 - protein, 342 aa, unidentified
MQTITTIGLDIAKSVFQVHGIDAGGQVIVRRQLKRRNVLTFFQKLSPCLVGIEACASSHHWSRELQALGHTVRLIPPAYVKPYVKRQKNDAADAEAICEAVTRANMRFVPTKTLEQQSGLVLHRARHLFIRQQTAVINAIRAHLAEFGIVATVGRHGVEELLNVVADPNDKRIPEIARACLSALGAQLRGIKEQILEFDRLIRAWHRSNEISMRLDEAPGGPVLATAVVAAVADPKSFRSGRNFSAWIGIVPRQHSSGGKNRLGNISKQGDRYLRGLFVAGALSVIRYAKIHGTKHRPWLTALLARRPTKVAAIALANKIARMVWAMMARGERYKEPVAIAR

SEQ ID NO: 175797 - protein, 313 aa, unidentified
MSEIKVVVGIDVAKASVEVVTLGGTGPAGEFGNDPEGHTELVAQVPAGALVVMEATGGYEAPLACALQAAGLAVAVVNPKRARDFAKGVGSGAKTDRIDARMLAEFGQMLRHKPDFQRYLKPPVDEQVQDLAAWVTRRRQLLSMLLSERQRMEFSRPKVRPSIEAMIESIKRQLDQIDRQMQTHVAHHHEELDRLLRSTRGIGPVASATLIAGLPELGRLSGAEISALVGVAPMARDSGQKKGRRWIQAGRFEVRRVLYMATLTAIRSNPVIRAFYLRLVAAGKVKKVAIVACMHKLLRILNAMVRDHQPFQA

SEQ ID NO: 175798 - protein, 442 aa, unidentified
MPHATSSAPLEPDWAAFVGLDWGDEKHYWKLRDAHSQQSQEGVLQNTPEALDAWAAELNVRFGGRPIAVCLEQSRGAVVYQLSKYPHLILYPVHPTTSARFREAFYPSGAKSDPQDGDVLLDLVEHHRDRLRRLDPDTPETRLLQMLVEQRRAWVDEKTRHSNRLTGWLKIYFPQVLDWIDDIDSPLGCDLLDRWPTLEELQKSHPGTLHTFFVQHNCRSEKRMQERIQAIYQATPAIRDTAMLEAGPAIVKQIVAVIRALRANIDELDKRIASLVSTHPERALFEALPGVGPALLPRLIVAFGTKRERYTCADQLEAYSGIAPVTQQSGKSKWVHFRWACPKFLRQTLHEFAAHSIAKSVWARAFYDMQIAKGKGHHAAVRSLAFKWIRVLFACWKNHTPYDEQIYLRALQNNGSRLSQILATQLTWKTVGGFQKLCSENA

SEQ ID NO: 175799 - protein, 351 aa, unidentified
MLIIGCDLHTRYQEIAMLDPATGEVVKRRLAHETGEARGFYAKLGERARVGIEATGCTLWFERLLAELGHELWVGDPAEIRARAVRRQKTDSRDAEHLLGLLLTSRFPRIWIPSPEERDFRQLLKHRQKLVGMRTSVKNQLHYLAMSQGVCRQRKLWSARGRRELEGLQLGPWASRRRQELLALLDQLEPRIEELDAAVKAEAERRAEAVRLMQQKGVGPVTALAFVLTLGPVERFANSRKVVSYLGLNPSEHSSGGRQRLGHISKQGNALLRWLLVEAGQSAAQYDPELRRKYQRLKFRHGAKVAKVALARQLAVRLYWTLRQAREKAPPVRMPGSPAQTLVDAASPSFL

SEQ ID NO: 175800 - protein, 336 aa, unidentified
MTDTNCSVPSSGACPPRFAGVDVAKEKLDLAVNDGTSHSATEAFANDAAGIAKLVERLKGVGVKCVVVESTGGIERPLLDALIDADLPAALVHPGRVRNLAKGLGVRVKTDRVDANVLAHFGRLAEPRLAEKRSENRVELEALVTCRRQLVATRAQQSNRLESTASKAATQVLKKVIESLDHQIAKLEKKIRALIDSDEQFKDLDRRLREVPGVGPALSSTLVAELRELGEVERREIGALVGVVPYNVDSGRFEGKRAVAGGRVDVRNTLYMATLSTLRCNPVIRSFVRRLQLAGKSFKVRMVAAMRKLLNLLNAMARDGLRWSELSVVKNLATNT

SEQ ID NO: 175801 - protein, 359 aa, unidentified
MPGVTRRPRRRLDPRDVAGLLKQLEHWKAEATKAGRTIERVVLTYEAGRDGFWIARYLIAQGIEVHIMHPASIPVDRKKRRVKTDRLDLDMLLRTLLAWLRGEPRACTMAAIPSETEEDQRRPGRERERLVSERIGVENRMQNLLCLHGVSGFKPRLKKAAEWLETLRTFAGERLPEQLMAELRRLMARHQLLSAQLKEIETAREKVLMTEKPDRAAQQIQALVALYGLGLGTATELAYEVFCRSFRDRQALASFVGLTGTPFNSGGSEREQGISKSGNPRVRRLLMQLVWRWLRLQPQSALSQWFMARTGGAKGRIRKVMAVALARKLLVALWRYVETGELPAGAATVRPSASAVAAA

SEQ ID NO: 175802 - protein, 314 aa, unidentified
MAMTVKSQFIGVDVSKDHLDICIDQETTSTRIANQPRDINRWLKSLPAGPACLALEATSTYHLELAVRAYKAGLTVYLIDGYRLNRYRDSIGQRAKTDAADAQLILRYLQREQDSLKPWTPPAKAYLRLQSLLRRRALLVKSKTAIRQSFRLLPELQRSGKALVKKIENLDRQIVRQILKTLTEAGWQPDFQRCRAIEGFGEVISAAMTMAFHRGPFKSSDAFVAFLGLDVRVRDSGTRRGKRKLTKKGDPELRRLLYLAAMNAIKYGQWKVLYQRYLDRGFKKTQALIIIARKLARLAFALMKNQDEYRPVSA

SEQ ID NO: 175803 - protein, 389 aa, unidentified
MFKVGGKSRVRVRGQGRLLKLILAPRRPVSKQIVSNRKAAVSADMLTDPQQANVFCGIDVSAETLAVAVLEQDQPLRQREFANSASGHKALLAWLSKMQSRVRVSLEATGIYSTDLALALDAAEGIEVAVLNPKRIHDFAHSMCRSKTDAADAAVLAEFSMRMEFKAWQRPSRGALALRAIGRHIEALGLEHTRTNNRLHAALGSIGTPRCVVEDLKRSLAGLERRMLKLRREARTQIDGEDRLREQFRLLTGAPGIGEISALQILSELALLAPDLKARQWVARSGLDPVHRDSGTSVHKPARISRAGSRHLRRALYMPALAAVRWDPHLRAFYETLLGRHKSKLQALMAVARKLLHAIHGMFKSRTPYDGSKLFPALNIAGAVESTSE

SEQ ID NO: 175804 - protein, 335 aa, unidentified
MKTKYFIGLDVHKEKTTYVVRDRIGNILIEGEAATLYDELYAHLRQYLGPSVIGLEASTSYYALYQQFLEHGYCVKVANTLQIRQLIAKNDRLDARRLSDMLRLGTFPTSYIPGKEIQHLRGLVNIRHSLMEEKVRCNLRIQALLDRNGAVMPSCKAFSKKWKYALMQYMGSGDISAELRYEYDHYIFLEKKNEQVDQEMIGYTKKYWKNEFMLIQSITGFGQVLSCYIIANIYPIERFPSSKKLRRYAGVVPTFHESGNYTSRGRIPKNSSRKLLRWALIEAANAIAKTNTKLGKYYRKKKKQKKNAGIAKVAVASSLVDIIYKVLTTKKPYMG

SEQ ID NO: 175805 - protein, 378 aa, unidentified
MKGTSPSRVIRAVAEYGIKVPRWEAQALINALVLWKGKSMSAIVTIGIDLAKNVFAVHGVNEAGKSALVRPSVPRAKLLELIAALPPCLIGVEACSGAHHWAREFEKFGHTVRLMAPKFVIPYRLSGRRGKNDAADAAAICEAVTRPNMRFVPIKSIEQQGQLMVHRARQGFVEQRTATFNRIRGLLSELGIVLPLKAAVVRREAMARLEDLPGWANTVIGDLLSEISHLDERIAQYDHHIELMARHSTEAKRLMQLSGVGPTTATALLSTIGNGHDFKCGRQLCAWLGLVPGQYSSGGKQRLGRITKAGDPYLRSLLVLGARAVLAAAKNKSDPISRWAVSLEQRRGYWKAIVAIAAKNARMCWAVLSRGEAFRLPT

SEQ ID NO: 175806 - protein, 329 aa, unidentified
MIDGTGRQLAEKTIAATDAGHLELRRWAAQWSERTWGLEDCRHLSRRLDAELVRAGESVVRVSPKLMAGARRSGREPGKSDPIDALAVARAVLREPNLPVASLDGPDRKVRLLVDHREDLVGERTRHEQRLRWFLVELAIAEPAPRSLGRAVVQGALSEALAGRTEPVARFARDLLARIVELSSTISALEHEIEGLVRSSAPTLLALPGCGALTAAKIIGEAAGISRFRSKEAFARHNGSAPVPVWSGNVVRHRLNRGGNRQLNVALHRIAITQIRLAGPGKAYLEHRRAAGDSRTEAIRALRRRLSDEVFRRLRADEAASSTGLALAA

SEQ ID NO: 175807 - protein, 343 aa, unidentified
MEIRTIGIDLGKTVFHLVGVNARGEVVIRRKCSRLQLLRFTSNLRECLIGMEACGGSHFLGRALREQGHDVRLMPAQYVKPYVKTNKNDYIDAEAIAEAVTRPSMRFVPIKTDDQLDLQSLHRVRERWVVRRTAVINQIRGMLLERGITVAKGRRRIEAALPGILEDPDNKLSGALRVLLTQLRLEMQYLHGQIEESDKLILRIAVELEPCRRLVAIPGIGPVIATATIAAIGNGAAFKKGRGFAAWLGVVPGEHSTGGKQKLTDTSRRGNKYLRKLFVQGAHTVLQRRTKQVTALNAWLAQLTTRKRIQVAAVAMANKMARMVWAVLSKGEAYRPPLLPQTA

SEQ ID NO: 175808 - protein, 412 aa, unidentified
MTQLQSEYLYRVGIDWASQHHQVCIVDREGHRTEDIVPHTSAGLAALAEKLAALSPGAPERVAVAIEVPRGPVVETLLERGVHVFALNPKQLDRFRDRHSVAGAKDDRRDAWVLADSLRTDQPSFRRVHVDDPLIIELRELSRLDDDLREELSRLSNRLREQLQRFGPDLLALCPAADEPWFWALLDLTLARRPQPVAIKAVSAVLKAHRIRRLTAETVHAALQVPPLRVAPGTLAAVGAHIAVLLPRLRLVHDQRHRTVGTRIDRVLAELANEEVPGEHRDVTILRSLPGVGRLVAATVLAEAARPLAERDYQTLRTQAGAAPITRQSGKKAAVMMRWACNGRLRNAIYHWARVSVQVDARCRAHYDRLRQRGHEHARALRGVVDRSLAVLMAMLTSRTLYDPERRSAKTA

SEQ ID NO: 175809 - protein, 381 aa, unidentified
MRDDIRFVGLDVHAETITVAVADAVGGEVRELGTIPNREESVRKLVKKLEPRKGLHCCYEAGPTGYVLYWQLTRMDVECAVVAPTLVPVRPGDRVKTDRRDAKKLARLYRSGDLTPVWVPDEAHEALRDVVRAREAAKRDETRARHRLSKFLLRHGRRPGKKMTAWTVKYLEWVRSVRFEHAALEATLLDYLAEVDHMAERIVRLERAIDAAIEQMPAAMKAVVAGLQALRGVKKISAVSVVAELGPLSRFDRPRQLMGYSGAVSRESSSGEHVWRGSITKTGNAHLRRIVGEAAWSYQHRPCLGPALRKRQAGLSDEVKAIAWKAQHRLHGRYYRLLGRGKHKNKAATAVARELLGFIWAIGVQVEKEQAEKASGKPLAA

SEQ ID NO: 175810 - protein, 367 aa, unidentified
MDETITYVGLDVHKETISVALADGGKRGDVRAFGQIVNTPTALARMLAKLSQSGRTLKFCYEAGPCGYGIQRQLSAAGHHCVVVAPSLIPRKPGDRIKTDRRDAHNLARLHRAGELSAVWIPDPAHEAMRDLVRARLAAVRSLRQARQQLSGFLLRHGCHYGRPAWTQMHRRWLAGLRFAQPAHHIVLEDHIATIEAATDRRDRLTKQIEIMLSDWSLAPVVQALQSLRGMALVTAATMIAELGDISRFTNPRQLMAYLGLVPSEHSSGATRRQGGITKAGNGTARRMLIEAAWSYRFPARVSGEQLLRQEQLPKAIRDTAWKAQERLCSRYRKLTKAGKPATTVTTAIARELSGFVWAIACQVSPR

SEQ ID NO: 175811 - protein, 323 aa, unidentified
MPRTLVGCDLARGWIDLHRLPSGVSERIANSPDAVDATVAAPPPDALVVFEATSGCDGLLIAALAARGLAFSRVNPRQAREFARALGVLAKTDRVDARVLAEMGARLPLPRTAPSSPVRAKLACLLRRRRQLVEMRKAERMRRHDAGRAEIGRMIRILGRRIDALDALEAEIAAAIEGDPHTAARARLLRAVPGVGPTVLAVLLGELPELGRLCRRRIASPAGLAPHARESGTWRGTRRIRGGRRRVREGLYIAALSASRSVPAPKPLRDRMRAAGKAPKTALIAVARQLLVMLNAITRTGQPIRLRTQLPPSVAPALEGRAQ

SEQ ID NO: 175812 - protein, 468 aa, unidentified
MSKKITKSRKPQLEKKAMNPLNYVNPFACGIDVGANSVFVCAPVKNGLEIREYSTFTADLKEMVEWLKSCKIKSCAMESTGVYWIPVFDIIEEGGIEAILVNAHHVKTVPGRKTDVKDCQWLQQLHSYGLLRGSFRPKKEILPLRAYVRQRSRLFEKAAREVLLMQKALTQMNVRLKMVISDITGLTGMKMIKAMIDGERNPKILVSLRNHHCQKNEEEIAKGLDGTYQEEHIFALRQSYEAYQFFHMQILECEKNIKKELEKLHQIIGEIYPTHVKNQESLKESKKKRRNKTIANRSAYYFDASEKVEKCTGVNLLQIPGMESSTLVKILSEIGTDMSRWPTSSHFISWLGLCPGNKISGGKVLSSRTKPSSNRVAQALRVAAHTLYRSKTALGSFFRRMRSKLGAPKAITAAAHKMAKIIYHMLKFKTSFRELGADYYERQYQKRVLTSLKRRAKEFGFDVVPMAN

SEQ ID NO: 175813 - protein, 346 aa, unidentified
MMIVGCDFHPSWQQVAIFEAATGEIVERKLVNGNGEAEEFYRHLPAGSLVGMESCGNSQWFVELMEQLGHEVWIGDAAQIRASYVRRQKTDHRDAGHILKRLLEGRFPRLWRPDGEERDLRQLLIHRHRLVQIRTRVKNGLQHLALNRGMQKKSKLWSAAGQRAFLQLPLPGWAGCRRQDRLALLGQLDERIKPLDAAVEKAALAHPQARLLMTQPGVGPVTALAFVVTIGDAHRFRRGKQLASYLGLIPREHSSGGKQRLGAISKQGNGFVRLLLVEAAPSVTRLDAGFRKQYQHRCHRKPKGVAKVAAARKLAVRLYWMLRSNIGYPEIVHNESSSRCPVAGAS

SEQ ID NO: 175814 - protein, 366 aa, unidentified
MKKYTVSHSVTAAPAAARLKINKSGSMLKLGLDIHRERFVVAAQYDHATPRPPRGFAPVEFVPWVEARLREGFEVHVVYESCGFGFGLYRALLQAGAHCYVIAPQKLDERNTRVKTDGRDSRALCLRLDGYLAGNKDSLAVIRVPSAEEERARHWSRQREQLVHHRQKIEAQGRGLLISHGLPAPAHWWKPQSWNRLGKLLPAWIRPHLELYLPALLAFDQQVRALTIELEKAAPAALPTGMGALSSVVISREICNWQRFKNRRQVSSYTGLCPGEYSSGTKRVPGSVTKHGNRRLRAVLVELAWRMVRFQPRYHPVQNRLAVLAKGARATGAQRKKAIVAVARQLAVDLWRLHTGRCTPTILGFK

SEQ ID NO: 175815 - protein, 355 aa, unidentified
MGYEVSVELLHNGEWTMPQTYAGLDVSDKSTHVCVVGDDGKVLWRGVCATDPMALATTLNKHCRGVVRVVLETGSLSSFLYHGLIERGVPAICICARHAKGVLSARVNKSDAHDAEGLAQLARTGWYKAVNIKDGATHMDRAQLKVREQLIKTHRAMANQLRGLLKLFGLRMGKVTTPGKRSERLEILFDQKPELRSIFTPLIDGLAALEKQIRVSSRAIMARAAADPVCPRLMSAPGVGPITALTFKCSIEDPARFARGADVGAYAGLVPRRTQSGERDVKGRISKAGDPMLRSALYEAANNLLSRVKRASPLQTWGKALVATKGAKRARVAVARKMAVLLHKLWRTDTDFEWA

SEQ ID NO: 175816 - protein, 412 aa, unidentified
MQDILTCAMGLDVHRDVIVACLARGELGTEPEIEIRSFSTLIPEMRKLRDWVLEVECRHVAMESTGIYWQPIYEMLEPCFDGQINILVVNARHMKNVPGRKTDMRDAQWIATLLRAGLLNGSFIPDKTFRELRHLTRYRKSIVHDITAQKNRIDKFLQSSGFRFTAFLSDAFGASGRNIIRHLMEYGDISREALDKCLKTQTRKRIDEILVALNGSLSEHQRSFLRMIFEHLESLERHRHTVEDAISEEIVKHEAALSLLCSIPGIDVTAAASIIAEIGTDMSAFPDSQHICSWAGLSPGNNESAGKRKSVHINKGNPYLKSMLCEVAWIMASHRKLYLSGWYWKVKQRKGAKRATIALARKILSIIYTMLKTGTPYNEECFEQRRLRCERKRANRLVNELQKLGYVVVAPD

SEQ ID NO: 175817 - protein, 372 aa, unidentified
MRVYTNQHRFYCGGDLHARTIHLCILDQAGNVVFDKNIAARPETFLKAIAPFRADIVIGVECMFAWYWLADLCAVEKLPFALGHALYMKLIYGAKAKNDKIDAGKIARLLRGGNFPLAYVYPKGMRETRDLLRRRTYLVRQRAALLTHLQILNAQYNLAPFPKKLAYAANRTQMNVAVRFADASVQRSAAVDLALVDRLDELIGDLELYLVRTAKVDDLQTFYRLRSIPGVGKVLALILLYELHDVARFASAGQFLSYARLVRCAHESAGKKSGSGGKKIGNAHLRWAFAEAACLFLRSSERAKKWKQSQAAKRGEGKALAILAARLGRAVYHMLRKREAFDEERFWGGAARSNATGSSSLSGRPEVPHAGD

SEQ ID NO: 175818 - protein, 362 aa, unidentified
MRMKTHPQYFISKPRRSSHAGMTIGIDLGDIWSHYCTLNEDGEVVDQGRFRSNPSGVDKRFRDLGPARVAMEAGTHSIWVSEQIRELGHEVIVANVRELRAISHSDRKSDKVDAEKIARYARLDPEILRPIAHRTVAQQETLTLIRARDVLVRLRTAAVNSVRGLAKPCGYRLPASSTLTFPKRCQAVLPPGLATALGPLLHQIADMTVKIKEYDRAIKQLTETEYPETQALIKVYGVGQLTALTYVLTLGSKERFQRSRDVGCYLGLRPRRSQSGDSDPQLGITKAGNGYLRQLLVECANHVIGPHGKDSTLRRWGLSLGARGGSHARRRAVVAVARKLAVLLHRIWITQEVYVPFYEKAA

SEQ ID NO: 175819 - protein, 347 aa, unidentified
MDQQCHYVGLDVSLETTSICVIDDAGAVIWRGKCRSDPDTITAIVRQHAPGAVRVGLETGQLSNWLTLSLRRRGVPVVCMDARHAKAALSLQINKTDANDAFGLAQVVRTGWYREVAVKSMDAHTLRMLLVARSRLVSQRQATANTIRGLLKTFGLVVARGSKGLFPVRVREQIAGNPALIAIIEPLLAVWHAIRDQVAMLDRQMLARARNDQVARRLMTIPGVGVVIALAYTAVIDDPARFRRSVSVGAYLGLTPRRYQSGEVDTTGHISKCGDSLLRGYLYEAAAVLLCRDARASILKSWGLGLAKRIGMRRAKVAVARKLAVIMHRIWSDHGEYRWTAIPPIAA

SEQ ID NO: 175820 - protein, 408 aa, unidentified
METIHPICCGLDVHQASVSACLRRVNAQGTVSVESRTFGTTVKDLVALADWLVAEGCPIAAMESTGVYWKPVWNILSPLLDIWVLNARDVKQRRGRKSDRADAKWIAELVAHDLVQPSFVPPPRIGVLRDLVRMRTVLVQGRTQVKNRVLAVLEDTNVKLASVVSDPFGASGRKMLEALVNGERDCKVLSEMAMGVLRRKIPQLEVALQGSFTEHHAFLIRLGLESLDQGNRQIAELDAQIERLMEFLQEEASRLTSIPGVGHNAARVVVSEIGTDMSRFGSADRLASWAGLCPGNHESAGKRYSGKTRKGNRYLRRVMAECAWAASKTDTFLGRTFRRLQIRIGGKKAAVAVGHKILVIIFHLLNEGQLYEDGRYDRINQREQIRQKNRALTTLQRLGYQVALTPAS

SEQ ID NO: 175821 - protein, 433 aa, unidentified
MEEAGDEPLFCERAAGIDIGKQAVMVTVRVPSEARRGGRAQETREFGTTRRQLLELADWLRSWGVERAGMESTSDYWKPVFFLLEQQGFDCVLYQAARVKAQPGRPKTDKLDSVWLAKVTERGSVAGSFVPPEDIRRLRTHTRYRRRLTQARSAEKQRVEKLLEDAHLKLSSVISDIHGVSGRDMLRAIAAGERSPRVLAEMARGVMRRKLAALREALDCSFFTEEHAFVLSMMLDNIDHYSAQVAALDEKIAVMCEPYERQLAQLDQIPGFGARNAQDLIGEIGVDMSAFPTAGHLCSWARVAPRPKESGGRRKGGSGTGKGNPYVGAALGEAAAAVGRTQTFLGAKLRRLVRHMPKKKAQVAVMRTQLVAAHALLSDPAADYLELGVGYYDERAGTRRQARGHVRSLERLGYKVTLEPVDPDTGELAAKAS

SEQ ID NO: 175822 - protein, 380 aa, unidentified
MPDISFVVAPIRDHAYGMARPSPLAHDCVVDEDCTEEKPMNEIKVLGIDLGKDVCSIVGMDEAGKVLLRRRMRRDSVLKLTARMPACVMAMEACCGAHHLGHMLRKQGHEVRLMSPEYVQPYVKAQKNDDRDAEAIAEAATRPTMRFVDLKSDEQLDIQSLHRARDRLVGKRTTLINQLRAFLLERGIVIAKGRRKLELRLEQLLAGEMTISRRIRALIEDMQAEWRALDARIDAFDAEFAELARTDASMKLLSTIPGIGPLNATAFVASIGKAETFGRGRDLAAWLGLVPRQMTTGGKPRLLGITKRGNGYLRRMLIHGARAALPALAKGKTPLGEWLRDLLSRAHTNKVVVALAAKMARIIWAVLSSGRPFEMSPSAG

SEQ ID NO: 175823 - protein, 345 aa, unidentified
MKKVIAGMDLHSNNVVIGVMDMDGQRLASRKLPCELKEVVKFLTPFKKRLERVAVESTYNWYWLVDGLQALRYPVVLANPAGMEQYSGIKHADDTNDAFFLAELLRLAILPTGHIYDAELRPVRDLLRRRLMLVHQRTALMLSFKSLYTRTTGQELTLSKLKQLEIKAAQDLYEHPANQMIAGMQIKHIEQLTESIEKLEKAVLGSARELPYYAKLATLPGVGRILGMTITMEVGDIKRFAEPGHFASYCRTVEAKRMSNHKKKGENNSKCGNKYLAWAFVEAANFARRYDEPCRKWFDRKVGRTSNIIATKALACKLAKAAWYLMAEGTDYDPKRMFGQPPATK

SEQ ID NO: 175824 - protein, 347 aa, unidentified
MNITHVGIDLAKLVFQVHGVDARGKCTLRKQLKRQQVMAFFSQLPPCLIGMEACGGAHFWARKLTGLGHTVKLISPQFVKPYVKTNKNDAADAEAICEAVGRPNMRFVPVKNTEQQALLGLHRARHGFVIERTAQANQIRGLLTEFGLVIPVGIRSIGHKLPEMLEDAENGLSGRSRALFARLFEHFRALDRQVKELELEINAWHREDTASQRLQAIPGIGPLTASALVASVGDATVFRNGRQFAAWLGLVPRQNSSGGKTTLLGISKRGDTYLRTLLIHGARSALLHLKHHPDQAEGWLARVAARRNANIAVVALANKNARTVWALLAHGRDYQPGYRATSIQMAA

SEQ ID NO: 175825 - protein, 354 aa, unidentified
MYYVGADLHKEQTWFYVMDKNGTKLDSKSIANSPDSLKSYFAAIPTPFTLAVEATYNWYFFIDLAEQFAEKVFLANSYELKAFAKRHKKTDKFDARIIADLLRKGFLPAVFIPDQSIRQLKELLHYRINIVRDRSRYVLRLKNTLDKLGADSEGDFTTQKRLRMIPADSLPEHSRYIAAGYIEQIIQLSQRINSMKTHLKNELLEDKEIRNLITIDGLDYFSAALIKSEIIDINRFASFNRLCAYAGLAPRVSQSGDKAAHHGALMTNRRKNLQWILLETVFHFIKASAERQTHYEELKGRKGTNTAKVIMARQMLKVIYHVLKEQRPYYRDNSERPKISYQIQPVAAAALYGV

SEQ ID NO: 175826 - protein, 409 aa, unidentified
MRIIGLDIHRAFAEAVVWDEGELKRTGRVDMRRHLLEAFAKKLAKDDVVVVEATGNASSVAAVIAPHVKKVVIANPKQVRIIAHAKIKTDTIDAKVLAQLYASGFLPEVWIPDEPTQALRRQVTRRNQIVRQRSRLKNIIQSILHSHLIPSCPHADLCGASGRAWLFHQVLPEDERLAVERHLREFDRLGEDLKVIERDLARSALGDESVRRLTTIPGVDMVVALAIVAAIGDVGRFGQSQKLVSYLGLNPSVRQSGPGPAYHGRITKQGRGHARGMLVEAAWAAARAPGPLRAFFLRVRARRGQHVAAVATARKLAVIIWHLLRKGESYAWARPALHARKLRDLELKAGYKAERGQRGAAFAYNIKSHRDQERRWVEQAETAYARFVAGWNPRGPKQVRTGAAKEGRQ

SEQ ID NO: 175827 - protein, 391 aa, unidentified
MDKAWAGVDVGKEFHWAYVANASGKELLSRRVENDETELLKLIDEALALAEEVIWAVDQPGGSAALLLALLWERDQRVLYVPGLSVDRARDAYRGESKTDARDAHLIADHARMRSDLGELRAGEQELSELQLLLARRRDLITDQSRTIARLREALLSLFPALERALDLNSKGPLTFLTHYQTPTQLRRAGHKRIATYLRNRGVKGSNKVANKALAAAKAQSVTLPAQGVAASIVAELARDVLGLKERLKSIDEEIGQRFFARPEARILTSLPGMGPILGAEFLVAVGEITAFESADRLAAYAGLVPAARDSGKRVGNNKRMRGGNKVLKRVFYQSAFASLRSAPESRTFYERKRAEGKRHTQALIALARRRVNVVWAMLRDGTTFESRSAA

SEQ ID NO: 175828 - protein, 399 aa, unidentified
MRTIIGLDVSKASAKLSVAVDGKTTYDGDITLDAIGFQSLNSIIQSYGGAEVVFEATGVYSRRLEKYLIDNSILYHILNTLVAKKRLDDGSRMRKNDVRDARGLAITEFTKEPVPYVPRFSDPLYRELSDMSRYYDQQTEDIKREKNRVHKLIQLSFPNFTDEIDVDNISSLEVLRLFPHPDTIKGHTVTEIADIILELGLRGIGQGRARTLAERLWRAHSVSYPAIESSSFVVKQLRQQVTNIIEMTVEREVVISNMINLAKKLPEFDILLSIPSIAENTAVRLIGELGDVRRFEKRSQLNSFIGLDLTEIQSGDYIAQRHITKHGNPHARKLLYWTVVNMVNSTAQPNHIRDRYEKKRATATRKKPLLVSSMDRLIKTIHYLINTNQFYSYELARSL

SEQ ID NO: 175829 - protein, 323 aa, unidentified
MATNKNVEFEPIATRCCGLDVHKVEIVATVEGEGMKRETRTFKSTTRSLTELKEWLLSLGVTHVAMESTGVYWKPVFNILECEGLTLLVVNARHIKYVPGHKTDKKDSAWICKLLRAGLLKGSFVPPKGQRELRDLTRYRRKLVQNVAAEHNRMIRVFEDANLKLSSVFSDVTGKTCTEVIDNVLAGNTDPKFLASLCTHWRLKSSQEEIALAVEGNFTEHHKFMLRAIRRSIENLESQINEIDEEINRYMQPVEEEVSLLCEIPGIKRTSAIDILAEIGVDMEVFPTDAHIASWAGLSPGNNESAGKKKARTRTTATKRRKR

SEQ ID NO: 175830 - protein, 456 aa, unidentified
MVAAGPSAKRTSPREGSCIRSCPSRRSGALQTARLMNTNNNWTKYTHFAALDWASDHHDVVIVDRTGAIVAEFRFAHTAAGWAEFTEKMELYAGAPLALETSSGPAVDQLLQRGWTLYPVNPKAAERYRERKVPSGTKTDRHDGWSLADALRTDGHGWRPLLAQDEATATLRALCRDEIALIEQRTALVNQLLAALREYYPVALELFDDWTQPFAWALIQQFPTPLALQSAGKRQWEKFLHTHRLWRTDTAPARLERFARANALPASAAVRNAKSLLATSLVKVLQTLETQLQEYRRRITATFAQHPDHDVFGSLPGAAAKIAPRLLGELGAVRAVYPDADALCCQAGVSPVSFQSGKLDKARIRWACDAVLRHTVHLWADCSRKKSAWAQAYYQGKREHGHDHASALRCLGKRWLKVLWRLWQDGQKYDATRHEQSLKAHGSWAQAHLDAIPATL

SEQ ID NO: 175831 - protein, 411 aa, unidentified
MDVLYARCCGVDVHKESISVCVLIREPGPSQQKHKAHFSTVTAELLRCADWLTSLGVTQVGMESTGVYWKPIWNLWEGQFQLMLANAAHLKRVPGRKTDATDCEWIAQLVQHGLLPTSFVPGTELRDLRELTRYRAQLVGDHGRVVNRIQKVLEDANIKLASVASDVVGKSGRLMLQALMAGQTDAAQLADLARGQLRNKKADLQLALEGRLRPAHQYLLQQYWTQLQFLEQQLASVERQIDSENPGFREAAAILDTIPGIDGVAAWGIIGEIGADMRQFPTAQHLASWAGMCPGNHQSAGKRLSGKTRKGSRWLRQKLCQAAWAASRTKNSYLSVLYHRLAARRGRRRAIVALGHTLLVISYHLLQRRCTYQDLGADYFLRANAENLRKYHVKRLKQLGYDVQLTHTAAA

SEQ ID NO: 175832 - protein, 346 aa, unidentified
MNNKKEVNRMRYMGLDVHKDNIAACVMNAGGKTVKHLEVRASERGLQMLHDHMKTAEYCVMMESSTYSYKTYRFFESLGVEAHVVHARGLKTITDSDKKTDKRDAEAIGRYLRLWKKGEIELSMSFIPTPEQCALKDICRYKEELSSKIGDDTRRIRSHMARNLEDLPEQYDRMSVKASREYIRNTWPDDMTLMERMDQYEVLLEESEKVKKEVESRLPGDKNVKFLETIPGIARQTGVQVMSMIIDIRRFESPEKLCAYFGMVPRVRDSGGKEKHGHMTKTGDEMMRKIMERVTLSHILHCDSSVKEFYDRKAKEMGEKKALISASRKMLALIWSVLTNERPFRA

SEQ ID NO: 175833 - protein, 401 aa, unidentified
MQQRLWAGIDAGKTAHHCMVVDADGQRVLSRRIDNDESALLELIRAVTSLAEGGHLTWAIDLNAGGAALLITLLLAHDQELLYIPGRTVHHAAGSYRGDGKTDAKDATIIADQARMRRDLHPLRRGDELAAELRILTSRRNDLSADRTRTINRLRERLGEYFPALERAFDYSNNQAALILLTGYQTPAALRRIGTARLETWLQNRHARKVSSVAASAVAAAHTQYTVVPGEQLAADLVARLTQEVIDLDAALKEIDVMIEDRFRRHRYAEIIVSLPGFGPRLGAEFLAALGGDIALYDSADRLAGVAGLAPVPRDSGRVSGNLHRPRRFNRRLLRASYLAAQLSIRHDPASKHYYDRKRAEGKRHTQAVLALARRRNNVLWAMLRDRTHYQQPTGDPATAA

SEQ ID NO: 175834 - protein, 398 aa, unidentified
MTESSDYESVQVFIGVDVGKDTHHAVAINRSGKRLFDKALPNDENKLRSLISDLKQHGQILLVVDQPATIGALPVAVARSEGVLVGYLPGLAMRRIADLHAGEAKTDARDAAIIAEAARTLPHALRTLKLADEQIAELSMLCGFDDDLAAQTTQASNRIRGLLTQIHPALERVLGPRLEHPAVLDLLQRYPSPEKLASLGEKKLAAQLCKLAPRLGKRLAADIAQALAEQTVVVPGTNAAAVVLPRLALQLITLRKQRDEVALEVEQRVLAHPLYPVLTSMPGVGVRTAARLLTEVACRAFASAAHLAAYAGLAPVTRRSGSSIRGEHPSRRGNKALKRALFLSAFAALRDPLSRAYYTRKMSQGKRHNQALIALARRRCDVLFAMMRDGTFYTPQRS

SEQ ID NO: 175835 - protein, 348 aa, unidentified
MRFYTGQHQHYCGIDLHARTLYLCILNAEGNVLLHKNLPCDRTRFLEAIEPFREDLVVASECIFNWYWLADLCAEHSIPFVLGHALYMRAIHGGKAKNDRIDALKTASLLRGGLLPMAYVYPAGMRATRDLLRRRTHFVRKRAQLMAHIQNTFHQYNLPRPPGRLVYKYQRAPIPDAFEDPMLKKSVETDLALCDTYDELIRDLEKTVVRQARVHDPQTLLRLNTVPGIGEILSLTLLYEIHDIGRFASVQRFASYARLVKCEKSSAGKRIGTSGHKIGSVHLKWAFSEAAVSVIRHLPQSTRLHDRLKRKYGKGKALSIFAHKLGRTVYFMLKRNQAFDADRFLANT

SEQ ID NO: 175836 - protein, 387 aa, unidentified
MSKQNDLSRCLVALEQDATLIAVVEMGQASWLVAGIVPGLDRYPLKKLGSDRDALLRLLHRWRSEAEKGGYAIDRIAVAYEAGRDGFWLARWLRSQSIEAHVIHPSSVPVSREHRRAKTDRLDTELLKRAFLGWLRGEPKHCSMAAIPTLEDEDARRPGRERQGLVEERTRIINRLKANLARLGIRGFRPNLARAPSQLEALRTPEGVAIPMNTLAEMRRDLDRLRFVKQQIKEIEKTRAERLAKAPDERRHVAARALTRVVGVGVETADMLVQEVFSREIRDRRALARYAGLTGAPDESGQRRRERGLAKSGNARVRRGMIELAWGHLTHQKSSPLSAWYRMRTADARGGTRKTMIVALARKLLIVLWRLATTGEAPEGLQLRPAA

SEQ ID NO: 175837 - protein, 444 aa, unidentified
MLPILYRRVAGLDVHKKSVVATRMQVTEEDRAVRETETFGTTTPDLLRLHDWLLEWDTDHVAMESTGDYWRPVYNVLEDTFQLLVVNAKHVKHVPGRKTDVKDAEWLAELMMHGLLKASFIPPRPQRALRDLTRYRTTLVQERTRLVNRVQKLLEGANIKLSSVATDIMGVSARAMLVEIAAGQTDPVLMAELARGQLRAKIPELEKALTGIVLAHHRFLLVKQLAHIDFLDEQVEEISVEIGRQLEAMSRPSGGSEPDTAQGTEDGSITGEGKPPLTWLEAVALLDTIPGVNQRTAEMMLAEMGLDMSRFPTAGHLATWAGLAPGNNESGGKRYSGRTPKGNRALTTTMVVAAWTAARSKDTFLKARYHRLAARRGKKRAIVAVAHSMLVSAWHMLTYQQPYRELGGNYFDERQKETKVSYLIRRLEKLTGGSVSIAIQPAAA

SEQ ID NO: 175838 - protein, 316 aa, unidentified
MTEEKWYVGIDVSKDRLDIAVYGKDKVSSFRNDEEGIEQTVKRLKALSPVLVVLEATGGIELPAVASLGAAGVPVAVVNPRQARDFGKATGKLAKTDVLDAKVLAHFAAAVHPKAQELPDASAQGFAAILARRRQLVEMLTAEKNRSRTAVKPVRERIRKHIAWLKEELDDTDRDLDRAVRESPLWREKDDLLKSVPGVGPVLSNTLLGQLPELGTLNRKQIAALVGVAPLNCDSGKFRGKRAVWGGRASVRTALYMAALVGIRHNPVIKTFYKRLCAAGKPKKVALTACMRKLLTILNAMVRNHTPWSPVCPANS

SEQ ID NO: 175839 - protein, 425 aa, unidentified
MSNQTLSAVAPAIAAYLGWDWSDRKHDLCLRLAGQPKGTHLQLPAEPAAIHQYLQQLHQRWPHQKLVVCLEASRSALLPIFSAYLDWLLVYAINPKTLARYRETFRPSGGKDDPSDCSLLADLPITHPDQLEPWQPLDSQTQELALLTEYRRGEVDRRTGLANQLKALLKTYFPQALEWLNDNTTTPLASAWVRRWSTLPALQATSPRDIRRFYRAQGCHLTARLQELIAHRTQAQPVSTQPQWIAPQAFQAQRLAAQLAALHPTIAAYDQLIADKYSLHPARPLIQTLPGAGAALEPRLAALLSADPTRYQNHLELATLTGIAPMRRQSGKTQIVRRRRARPRFAHQTLVEFAKSSIGQCPWAAQFCHHKQQQGWKYYRIIRALAYKWIRIIHALQRTGQPYDEAKYQTALKKNHSPHALQQDN

SEQ ID NO: 175840 - protein, 422 aa, unidentified
MLTETQDREEIIARVAALDIGKAELVCCARVPGQGSSGRRMQEVQSYATMTRSLLGMADRLAGLRVTRVVMEATSDYWKPVFYLLEAQGFDTWLVNAKDVKHLPGRPKTDRLDAVWLCKVAERQMIRPSFVPPPQMRKLRDLTRYRADLVAARTAEKQRVEKLLEDAQIKLSAVVSDIFGLSGRDMMAALVAGERNPTALAQLARRSMRAKIALLEEAFTGYFTDHHAFLLHRMLARVDAINTDIAAIEAKIDIEMMPLVAAVAKLDEIPGINSAAAHVILAEIGLDMHRFPTAGHLVSWARFAPTIKESAGKKKGKNATGHGNTYLARVLGNAAAAAGKTDTFLGERYRRIARRRGSKRAVVAVGRSLLVIIWHLLSSDDARFHDLGADFYITRIDPERRKRGHVRQLEALGYKVTLQPAA

SEQ ID NO: 175841 - protein, 405 aa, unidentified
MAKLFVGLDWSETHHDVFIEDDDGRRVDSGRVPEGVEGVARFHAMVADRVDNPAEVIVATETDRGLFVGSLIAAGYTVMAVNPMSTSRYRERHSTSGAKSDPGDAKVLADLARTDYHNHRPVAGDTDLVNSIKVLTRAHQSLIWTRQRQTNQLRSTLREFYPGALNAFSDLTHGDALEVLRVAPTPELGRRLSISKIGSALRRGGRQRRLDDRAAEIQQALRADQLAAPDLITESMGSVVTALVGVISELNTQITGLEADLADRFDQHPDTKIIRSLPGLGMTLGARVLAEFGDDPNRYADAKSRKNYAGTSPITRASGKHRVVLARYARNKHLADACYLWAFASITVSPGARAFYDNRRERGDTHNRALRALGNRLVGILHGCLRHHTPYDEHTAWAHRHDLAA

SEQ ID NO: 175842 - protein, 403 aa, unidentified
MNSVGIDISKGRSTIAVMRPFGEVVISPFEVRHTGSELSKLAKQLKSLDGETRVVMEATGNYHASVAKLLHNAGLYVSVINAKLVHGYGNNELRRVKTDRKDAVKLANYGLDRWLTLPRYIPEEDTRLLLKNCYRQYRQYSKVQTVLKNNLISLLDTVFPNANRLFSSPIRGDGSEKWVDFVAEFWHCRCVSEKSERAFTSKYLRWCRKHGYNFREAKAHTIYAEASGHIGVMPKSETTKLLVEQAVAQLRATSTALAALKHEMQSLASQLPEYPVVMDLFGVGPTLGPQLIAEIGDVRRFYSKKALVAYAGLDAPPNDSGDVTGRHKSMSKIGASSLRRTLFLVMSVYLQTAPLDEPVYQFMDRKRAGGKPYRVYMMAFANKFLRIYYATVKAYLESLEHTA

SEQ ID NO: 175843 - protein, 389 aa, unidentified
MFYIGIDVAKDKHDCCILGSDGEILFSPFTISNTLYGFDELYEKIGSLTDDFSQIKVGLEATGHYHLNLLRSLLDNGLPSFVINPLHTNLYRKGQSLRKTKTDKVDAASIAMMLLTDKTLKPYSETSYHNEELKSLTRYRFDKVQERSQLKVSVSRLVSVLFPELEKMVPTLHMNSIYTLLSEFPGASYIADAHLTRLKHLLYEASKGHYGRDMAISIRDVATASIGTAMPSKSMELRHTIHLIEVISQEIDEIESAINTIMESIGSPITTIPGIKNRMGAMIIAEIGDFSRFDSADQILAYAGLSPSTYQSGQMTSSYSRMEKRGSRYLRYALFNATQYVCIWDPSFKAYLAKKRNEGKHYYVAISHACKKLVRLIYRMQITGESYRG

SEQ ID NO: 175844 - protein, 443 aa, unidentified
MAVRKRELAVLFPNAAGIDIGSAKHYVAVPPERCQHAVREFDSFTEDLASMAEWLASCAVDTVVMESTGVYWIPVYELLESRGFTVYLVNARHVKNVSGKKSDVLDCQWLQQLMSFGLLAGAFRPDGEVCALRAVVRQRETLIAGQAKQIQRMQKALTQMNVQLVHVISDIAGQSGQDIVRAIVAGERDARKLAQLRNYRVHASEEQIAKSLLGNWREEHLFCLAQALKLFDTHQQLIEEADAKIEAMLAPMQRHAPGALKPDKNKGRAKHAPRFDVRSALVRWAGVDLTRIGGIDVSTALKVLAELGADLSKFKSAKHFASWLGLCPGTRITGGKRISGVTKRIANRVAQALKLAAHGLHRSQCALGAYYRRMAARLGAGKAITATAHKLARLVYAILTKGEQFIQRTQDHYEDQVRTRTIRYLQKKAASLGFNLQPNAVCV

SEQ ID NO: 175845 - protein, 403 aa, unidentified
MKHVIAFDISMGKNYMVIYNAQKRCVFESEIKHAKPEFKKLQEKIHELTDKTGELPEIVFEATGIYSRQLERFMQDNQYTYCLLNPLEAKLQCDSLRIHKTDRSDAHRLALTHFTATRRVFTGTDNLFYQLKSLSRLYSELDSELSIIRGRMHKVIQLTFPELERMFTSKSDLFLNFVQLFPHPDCILGLSKTIIKNRIRANTNKKISNITAEKKAIQILEIAKTSYPAVSQNDVLCDQLKLYARRYQELLHQKECCINKMVYIAEQRAEYDIILSLPGIGSNTAVRLMAEIGDITRFNNNKQLNAFAGIDIRRFQSGKTFFKDKINKRGNKHLRKLLFLIIQNMIKQRCYGQNHIVEYYDKLKTQPYNKCHKVASIACVNKFLELLFHLITHDIHYDYRLTA

SEQ ID NO: 175846 - protein, 358 aa, unidentified
MGRRGDFRSELEQLRGLKARIRKDEPARDVLPPDKGGAVSQSQDLFVGIDVSKATLDVALLPSRESWSVPNSELGIVDLIARIQKAGTPTLVLMEATGGLERQALARLAAAGLPAMAINPRNVRDFAKSMGMLAKTDAIDASVLALFADRIRPAWRPLPDEHTQALEALIVRRRQVVDMITAEKNRLFATHSRRVKKEIASHIKWLERQLHITDYDIDQAVKNSPAWKEKADLLLSVPGVGRVTAITLLTQLPELGTLGRKQIAALVGVAPFNRDSGTMRGRRSIYGGRASVRSVLYMCALAAARFNPTIRAFYTRLRTAGKRPKVALVACMRKLLTALNAILSRGVPWAASLSEISP

SEQ ID NO: 175847 - protein, 369 aa, unidentified
MMGWTPCTASMCQSGVFEQHLREASVSGVITVGLDIAKHVFHAHGVDDQGRALFSKRISRGKLLDFFAAQPSCTVALEACGGAHHWARQLTQLGHEVRLIPPAYVKPFVKRQKNDAIDAEAICEAAQRPNMRFVAMKSEQQQAAGLVFRTRDLLVRQRTQLINAVRGHLTEYGWIAPKGPSHVAELAHLIEEKRMAGSLPEAARAMFRLMLDQLASLNGRIAVLDKEIARRAREDEVSRRLMTIPGIGPISATAIAALAPPVETFAKGRDFAAWLGLTPVQRSTGGKQKLGATSKMGERTLRRLLIIGSSAVVQQASKRGAAKGSWLEQMLARKPRMLVTVALANKMARIVWALLVKREVYRAPVAANA

SEQ ID NO: 175848 - protein, 347 aa, unidentified
MLHAGLDLGRRKLHVCLLSDQGEHLDQLAVPSDVDSLRTLARRIDEVYGEPVCAVVESMTGARLVHDTLEQEGWSVEIADAQKVKGLAPLTCKTDKIDSLVLATLSQRDLVPAIWLPDPHIREERELARFRLHLVKHRSMLKHRIHSTLINFGRPCPVTDLFGVEGRRLLERLEVPEPWRGNVTASVALIDDLERQIAEINRRLRAGHADHPYIPLLVSAPGIGWVLAFTIASEIGEIERFSSPEKLTGYTGLCPRVNQSGDADRRGPLTKHGPRYLRWALIEATMHALKHPAYSERYQRNKRRLGKQRGAKIAQIDLARRLAHAIWHMLTRNEKFAPRGAAVRLAA

SEQ ID NO: 175849 - protein, 412 aa, unidentified
MLFIGDDWAEDHHDVEIVDGRGHRLAQRRLPEGLEGIARLHALIARCMPEQWAQLDPVEAASRVKIGIETERGPWVRALVAAGYEVFAINPFSTARYRQRHSSSGAKSDAGDAHVLAEIVRLDRAHHRPVAADSDDGEAIKLLARTHQTMVWERTRHLLRLRSALREYFPAALQAFDDLDAPEAVELLAAAPDPDRAARLSKAKITAALKRANRRAVQDKAAQIQSILRASALHQPAPVQGAFAVIATSEIRIIATLNLEIERLSEVVAKHFGRHPDAEIYASQPGLGVILGARVLGEFGDDPHRFANAKARKNYAGTSPITRASGTKRIVAARYARNDRLGDAVQQWAFSALRGSPGARAYYNTMRARKIGHQAALRQLANRLVGILHGCLKTRTLYDETTAWAHPSSAAA

SEQ ID NO: 175850 - protein, 521 aa, unidentified
MLWKNTTAVKALSSLVRMPLRQRGSGRRLNIGEALVALPQARIRVSANLGGGVQKGGYHMSEQRGEEGGSERARAIEGLPVVRAQVGGIDLGSQRHWVCAPGLEGRGREIADFGATTPELQRLLEWLKVRKVESVAMESTGVYWIAPQEVLEAGGLEVLLVDTRQLARVPGRNKKTDPTDCEWIQRLHSCGLLRGAFRPPEQVSMLRTLVRDKANLVAEAGDGVRRMQKSLDQMNVRVHRAVSDLDGVTGLAIVRAIVAGERDARKLAQLRDRRCRQSEAEIAEQLSGHWREDHLFSLRQSLKMYEATQERITAYEQEIVRKRAEMTPAERAGQTAPAVKNPHKANAIRKRGEEPRRQAWYRMSGVDLAQIDAIGVGTIDVVLSEYGPDLSRFPTEKQFISHATLAPHVPRSGGKALKKKKRYSASTRVAAALRMAALALRHSPTALGAYYRSLARRIGGDVAVFATARKLATLIYRLLRWGQPYVDEGAQTFEERHRQQRIRSLTARAKELGYHLLPTTT

SEQ ID NO: 175851 - protein, 314 aa, unidentified
MIKRAIGVDVAKHELVIYLDQNHYSIKNDKKELNNWFKSNKDQIKSCDVIAYEPTGGYERTLTSFLKGKSLPGFRAHANHVRYYAKAMSLNAKTDNIDAKIIAEFAISKCNAPDNIANHDEDLTALISRRQQLIDMKKQENSRLDTINNKIMIKDIKSSIKTLEAKIKKFNTHIQNHIKSNPKSKEDVELMESIAGVGFITASSILGYLPEIFVANNKSLAALSGLAPMNKDSGNYSGKRRIFGGRSQVRNILYMATITAKTYNPVIKDFFDRLIKKGKPFKTAMTAAMRKLLTIIRSVVTRRTPWVNEAPINI

SEQ ID NO: 175852 - protein, 335 aa, unidentified
MGSYVGIDLHRHRSVVVVLNEEGDRVWWSRIDNTPANLACEITAAGPDAEVAMEATWGWYWAADVIAECGVRLHLAHPLGIAGYANRRVKNDVADATLLADLLRMGRLPEAWVAPPAVRELREEVRYRAKLCRLRSGLKAQVHQVLGKEGVIPETKGIWWSGGQRWLDELQLTDVYTNRIESLRDLIELYDREIVQSDTRIHRRLKGDPGYEAIQQIAGVGRVLAAVFVAEIGDVHRFPDARRLCSWAGLTPRLRESDAHTRRGHITKQGSRPVALGGDRSGVGCRPRSPGQRRQSPCRSAARSQHRSCRRGSSSPHARLLRAARRPHPLSRCHC

SEQ ID NO: 175853 - protein, 349 aa, unidentified
MCCMFNLIEKGKSVNNITTVGIDLAKNVFSLHGVDDRGREVLRRTVRRGQLLAVVAQLPACLIGLEACSGAHEWARQFSALGHTVRLMAPKFVAPYRRGGKNDGNDAEAICEAVSRPSMRFVPVKSAEQQSVLALHRVRQGFVEERTATLNRIRGLLAEFGHVLPQRAVEVRRRLPALLDQLPPLAARALGDLQAHVRVLDERVVEYERELARLARGDERAQQVQALCGVGPLTASAIIASVGSAHEFDNGRQFAAWLGLVPRQYSTGGKTRLGHITRRGDPYLRTLLVLGARAVLQAASRREDRLSRWALSVRERRGYHRACVAIAAKNARIVWALLAKDEPLRTVMA

SEQ ID NO: 175854 - protein, 366 aa, unidentified
MQKVRFIGLDVHKDSITVAVADGTSPAEVVATIPNEMGAVLKRLRKLAEGRKAHLCYEAGPTGFGLCRALRQAGLDCRVVAPSLVPQQASDRIKTDRRDAVKLARFLRSGDLTEVQVPDAATEAMRDLERARDDAKNAERAARHQLTKFLLRHDRKYPGKTSWTGMHLDWVRKQQFEHEAQNRVLVDYLQTVELATQRVDRLTKDIAELVEQWSLKPLVKALMGLRGVQLISAVVLAAEVGDFQRFATARALMAYLGLVPSEHSSGESRRRGGITKSGNGHARRILVESAWSYRFRPTMSREIRQRNEGLSPGAQAVAWKAQQRLNARYKKLTGRGKNKQQVVTALARELAGFVWCIARQPELQAA

SEQ ID NO: 175855 - protein, 429 aa, unidentified
MKSNISKEQNKKIAAITEKTLIIGIDVGSEKHYARAFTWRNYELSTKPLEFNNDEKGFATFLTWIQSTKEKFGMDKVMVGMEPTGHYWFNLGKFLQDNGIRPLHVNPCHVKKSKELDDNSPSKNDRKDPKVIAGLVNAGRYFYPYIPEGIYAEIRSLSNLRVMAQHEVTALKNRIARWFSIYFPNYKDVYRDPGAVSGIMILKVAPLPADIVKLGADGIEKIWRDAKLRGAGRKRAETLVEAARHSVGSHEAPEAARLEIQILLEDYEKQSGREADLMDRIEGKIMQIPYVDKLLEIKGVGLKTVTGFVAEIGDISRFTDAKQLQKLAGFEIVSDDSGKHNGESHISYRGRKRLRYVLYEAAVSLVHSNPEFKEVHQYYITRDKNPLKKMQSLIAVACKAIRVFYVILKTGVSYDADRLVTDIRRPDAA

SEQ ID NO: 175856 - protein, 316 aa, unidentified
MENNSLQRVVGIDVAQSFLDVFDSSSRRNRRVAYDTAGLRELVSSLQGEPPDLVVCEATGGLERRVAAELVAVGIAVAVVNPRQVRDFAKAIGRLAKTDRIDAQVIAEFGLAVKPAAQAPKAELTQQLDDQLRRRAQLLEMLIAEKNRLTRASRAVAKNIRLHIDWLQRQIADVDHDIDTTLKGSPAWQAKVDLLKDFKGIGRMTRASLFAWLPELGTLSRKQIAALAGVAPFACDSGTLRGQRHIWGGRHHVRGAIYMATLVAVRHNPTLRAHYQQLRNRGKAAKVALVACMRKLLVILNSVFRSGVPYTERALA

SEQ ID NO: 175857 - protein, 386 aa, unidentified
MPQLNDLSRSLVILEQDATLIAVIEMGQSNWLVAGIVPGVERSPLKKLAVDESALLKLLNRWREEAEKAGHRIERIAIAFEAGRDGFWLARWLRARGIEAHVIHASSVAVSREHRRAKTDRLDTELLKRAFLGWLRGERDHCKMVAIPTLAQEDAKRPNRERESLVGEQSRIVNRMKAALARLGIRGFNPKLKKAVERLDGLRTPEGEPIPPNTLAELKHDMERRRLVRSQIRDIEGTRLERLKQAPGDGPHVMVRLLARVIGVGVETADMLVQEVLIRNLRDRRAVARYGGLTGSPDESGKKRREKGLARSGNARVRRGMIQLAWRFLMFQKGSALAHWFYARTKNAPQTRKTMIVALARKLLIALWRLAREGAIPEGIVLRPAL

SEQ ID NO: 175858 - protein, 337 aa, unidentified
MSYLGVDLHTNSFTVCYRTKQGKERIGTYAIDRMDVFRKTLRRADQVAVEATGNTAWFIGQIRSRVRKVIAVDPNQFKVIRKSVKKTDKQDAKMLALFLSKGMLPEARMKQKENAQLHSLATTRDKLVKQRTALVNKIHNVLNSYGLKWKKETLTTEKGLKSIMAFDWDTIVKVELEVLADQIRSLTKNIKRLDNDIIEHGQKLKGHKNISSIKGIGDKSASVLLSVIGDIKDFKSEDKLAAYMGIVPRVKDSNETVRHGRITKHGSTLARTTLVQCTLVAKRYSPYLRNYYERIKRTRGSGKAIIATARKLLGIIYKTLINGWVFKDFPNFVIAKT

SEQ ID NO: 175859 - protein, 345 aa, unidentified
MNITTVGLDLAKNVFQVHAIDEAGEVVVGKALRRRQMMPFFSKLDPCLVGMEACATSHHWARQLTALGHQVKLMPPIYVKPYVKRGKTDAGDAEAISEAVTRPTMRFVAVKSLDQQSMLALHRTRDLLIRQRTQLVNMIRGQLAEFGIVLAKGIQHVFKFTGQLLDGEAPDIPPLAASVIVTLAENLRDLHARIGGLDKDIRTWSKDNEVVQRLLTIPGIGIITASALAATVTDPHQFTSGRQFAAWLGLTPKANSSGGKERMGRISKMGDQYLRRLLVNGMTSQSQSVRRNPDAHPWATSLMRRKPDKLVAVAMANKTARIVWAVMTRGEVYRAPQPSGVKEAA

SEQ ID NO: 175860 - protein, 351 aa, unidentified
MPHKTAATVAHTIGIDAGKNTLHLIGLDDKGAIVLREKVARDRITVRLANVPQCLIGIEAGMATHYVARELSALGHDVKQVPPAYAKPFRQGHKNDFRDAYAIAEAVQRPSTRCVPVKTDDQLDLQALHRVRSRLVGQRTAVINQIRSFLLEHGIAIRQGLRFLRQQLPDILAKRSDVLSPRMIRIIEDLRHDWRRLDERIEHITAEIEVLAQGSESCRQLMTVPGVGPIIASAMVAAIGNGTAFAKGRDFAAWLGLIPKQMSTGDRTILGRITKRGNRYLRTLFMQGARVILLRPANWMKHSFGPWLTAAANRLHHNVLATALANKLARIAWTVLMQARSYEARVEPRTA

SEQ ID NO: 175861 - protein, 413 aa, unidentified
MQTLVERGCGLDVHQATVVACLLIVRKDGKVQKQMRTFGTITRELLSLREWLLSEGCTHVAMESTGVYWKPVYALLEGGEGGLEIVVANAQHVKKVPGRKTDVKDAEWIADLLCHGLLRSSFVPPKPIRELRDLTRYRRKLVESQSAERNRLLKLLETANIKLASVATDVFGVSGRLMLEALVEGKATPQEMAELAKGRLRQKIDELGPALEGKLEEHHRFLLRLQLDRLEAAEKDLAILEHRLQEKLKPYEAQLTLLDEIPGVDWTLAAVIIAEMGVDMSVFGSVSQLASWAGVCPGNNESAGKRKSSRIPKGNVYLKTALVEAANAAAKAKGTYLRDKFYRLKARRGYKRAAVAVAHKILVAIYHMFSHQVCYNELGDAYLDKRNKHHLTRNLVHRLERLGYTVTLEQKAA

SEQ ID NO: 175862 - protein, 366 aa, unidentified
MQKISTMRAGGSEIFNGRQLTIGLDLGDRWSFYCVVDEAGGVILEQKLPTTSEAMRRAFEKMPRSRIALESGTHSPWVSRLLTALGHEVIVAHARNVRLIGESRRKDDRIDARTLARLARIDPQLLSPVQHRSAKAQIHLTAIRARAGLVSARTALVNTARGLAKSYGQRLRKCGAQQVRRDLAMGLSAELREALEPLLREVESLNERIKEYDRRIEQIAKKNYPEVELLQQVKGVGDLIALTYVLTIEDPHRFLKSRDVGCFLGLRPGRRNSGQSEPQMHISKEGDRYLRTLLVQGAHYILGPFGEDSDLRRWGRKLAERGGKNAKKRAIVAVARKLAVLLHRLGGGGEAYGSWHNSQKGVGGVS

SEQ ID NO: 175863 - protein, 412 aa, unidentified
MQILYRCCCGLDVHKKMIVACLLRIDQDGEFFQQVRTFGTTTEELLQLSDCLVEAGCQTAAMESTGVYWKPIYNVLEGQMELLVVNAQHIKALPGRKTDVQDAEWIAELLQHGLVRGSFIPPQPQRDLRDLTRYRTSLVRERARIVNRLQKVLEDANLKLAGVATDVMGVSGRAILEALVSGQTDTEQLAELAKGRLRKKIPQLKQALTGRFRQHHRFMLTEQLSHIDYLDEAIARLNGEIAERLHPFEQELQLLDTIPGINRRIAENLAAEVGLDMSRFPSGAHLASWAAMCPGHHESAGKRHSGKTRKGDGWLKLTLIEAAHGAARTKDTYLSSQYHRVAGRRGKKRALVAVGHSLLVIAYYVLKRQQAYFDLGSNYFEQLHRQRLERNLVRRLEKLGYQVTLKALQPAA

SEQ ID NO: 175864 - protein, 402 aa, unidentified
MNCVGIDVSKGKSMIAVMRPFGEVVVSPFEVRHTANELSELAGLLKSLDGETRVVMESTGNYHAPVAWLLHDAGLYVSVVNAMLVHDYGNNSLRRAKTDKKDAVKLANYGLDHWLTLPRYVPEEDTRLMLKSCYRQYQQYSKVRTMLKNNLISLLDTAFPDANRLFTSPPRADGSEKWVDFVATFWHCECVCGRSEKAFTTQYQKWCRKHGYNFSEDKALDIYASACGHFGVMPKTDTAKLLVEQAIFQLRATSATLAALKQEMQSLAASLPEYPVVMGMFGVGPVLGPQLMAEIGDVRRFHSKKALVAFAGIDAPPYQSGQMAIRSRSISKRGSASLRRTLFLVMSVILQRAPMNEPVYQFMNKKRSEGKPYRVYMMASANKFLRIYYASVKAYLASLDHD

SEQ ID NO: 175865 - protein, 410 aa, unidentified
MTMLEVALDPATVIVAVDPGKVSNRAWVSDGSGLLVDPVSLPVAREGISRLERLLVEHASVDPVIAVEATGSLHRSWVVELERRHPGSVRLFAPSETKAARIQLGSGRFKTDDRDCAALTYLARQGAGRLHADVSAVDALRAAVRHRRGLVADRRVAQQRMHDQLNALCPGLSAPAGHGRSLPLDSPTGLAVLACAAAFAGRPPRLQSLIRRAPGRLTTSTAQYWVQRWRGCLPPPADADQRARRLGRDLDRYRRLQSDIAAVDEEIVGLLAATDGQVLTTLAGVGTIRAAAFAAHSLPIERFPDAEHLYSATGLAPALYQSATLHRRGRISRQGLAEHRDALMGIAWGLSQCSPSFIARDTELRARGMAPVQARVAVARHACRLVYRLLRTQQPFDEQRYRRGRLGRER

SEQ ID NO: 175866 - protein, 424 aa, unidentified
MKFTFQTCCGVDVHKSFLVATIIKTTGGIEPSYQKRRFSTFNNSILEFKKWLLENECLYVCMESTGKYWIPVFNLLEDEINVTIANPKWVKAVKGNKDDTKDSKWIGDLFRLGLVMGSYIPCKKIRILREFTRYRYKLVSCRSSEKNRYQNALTVCNVALDSVVSDVFGKSSTSIIDYLLEQSGTSIDHEVIASKLLKRLKAKEDAVIESIEGYQMTDSQKYRMHLVRAHMDYITAAINDVDSEIESLIASDPDYENAVELLCTIPGVKYDSAITIISEIGIDMSQFCSSKRLCCWAGLTPGSNESAGKKKSVRITRAGVYLKPALVQCAHAAVKSDKSPYYKKKYESLVERRGKKRAIIAIARMILTAIFQMLTTGETWNPCDLYKIDMPEALLEKQKQKAIKQAQKLLIREGLLPPTEPIAS

SEQ ID NO: 175867 - protein, 348 aa, unidentified
MRITGVIATYGVDLGKSNFHVVGLDEKGHSSVRRTFRRNTLLEFFANAPAALVGMEACPGAHWLARKLTQFGHTVRIIPAQFVKPFVKSNKNDTVDAEAIAEAVTRPSMRFVAVKRCDQFDLQALHRVRDRLVSSRTRLISQMRGFLLEYGIALRNGAGLFRHELPAVVADEGNELTPAMRALLAELWSEFKELDVRVNALSHPIEALAARDDAARRLMSIPGIGALSATAILAAVGDGRQFRRGRDLAAWLGLVPKQYSTGGKATLLGISKRGNPYVRRLLIHGARACVLHLDRQRDRLGAWLDNLGGRMHPNKVVVALANKLARIAWAVLTRPGMSYERMDPRFAN

SEQ ID NO: 175868 - protein, 356 aa, unidentified
MQTQVTKKIDFSGKDLFIGLDVHKKSWSVTIVVDGMEHRTFTQPPDPEALQKYLQRSFPGGNYQSAYEAGYCGYGIHRRLNDLGIKNMVINAADIPTTQKDKLHKRDPVDSRKIARGLEKNSLQGIHVFDRELEELRSLNRTRFYLMRDLRRSKNRIKSFLLYYDIPLPPEFDNNQWPLKFIAWLKQVKMRTSGGQDAFFHLITSYEHHRQQLLILSRMVRLRISQHDKELYDLLKTTSGIGPLTSSALITEIGDINRFSHLDDLGSYVGLVPRVRESGETTHTGGITFRCNNFLRVLLVEASWQAIRKDPALMQYYQRHLVNSKGHKVIIKVARKLLNRIRYVMKNRKPYMTGVA

SEQ ID NO: 175869 - protein, 389 aa, unidentified
MKIFVGIDIAKLNHFAAAISSDGEILLEPFKFTNDADGFQLLVSKLESFDKNSIIIGLESTAHYGDNLVRYLVAEFYQVCVLNPIKTCQMRKNNVRKTKTDKVDTFVIAKTLMMQDDLRFITFFDLDMMDLKALGRFRQKTIKQRTRLKIQLTTYVDQVFPEIQYFFKSGLHQHAVYALLKEAPSPKEIASMHMTHLANLLKVNSHGHFTKELAKELRVLAQKSVGANDSAISIQITQTIQQIELLDSQLDKIEAEMTDIMKFNDSVIMTIPGIGYINGGMILGEIGDIHRFSNPNKLLAFAGLDPSVYQSGNFQAKTTRMSKRGSRVLRYALVNAAWNVVRNNATFKAYYDAKRAEGRSHYNALGHCAGKLVRVIWKMLTDEVEFNLE

SEQ ID NO: 175870 - protein, 384 aa, unidentified
MQASSVATPTVEHCGTVFVAIELSQKSWLVTLHSPGRDRISRHKLEGGDHAGLLALIDRERDRASRTAGGVPVVASCYEAGYDGFWLHRLLLAAGITNYVFDPSSIAVDQRARRVKTDRIDGERMLRTLMAYLRGEPRVVRIVRVPTPEQEDARRASRERGRLTKEQTAHTTRIKALLRLLGMAVGNPRRRDWLTWLVKQRDWQGQAVPPQIMAEIKREHARLMLVREQLDALAQAPADLTPAAAQMAQRSELLLRLKSLGPAFATTLTNEVFYKDFRNRREVASYFGLAPSPWQSGGIDRDQGISKAGNPRARCAAIEMAWLWLRHQPDSNLTQEYRRRTLNASKRIKRVAIVALARKLIVALWRYLTTGLVPEGAMLKTAEV

SEQ ID NO: 175871 - protein, 355 aa, unidentified
MTITKYIGMDVHKESISIAVMNSAGKFVMECVIETKGSMLLQFIDGLRGDVRITFEEGTWAAWLYDLLKPHVSEVVVCNPRKNALLKDGSKSDQIDARKLAELLRGNHLKPVYHGEQGLRTLKELARSYLNISKDVTRVMNRLKALYRSWGIACAGTQVYAPRHRSGWLGRISEAGVRRRAEHCYQQLDALRLLHQQVRRDLLLESKKHQAWRLLGLIPGIGPIRAALLIALIQTPHRFRTKRQLWTYSGLGLETHDSAQYRVVEGQLQRSKKPVTLRGLNQDHNHDLKDIFKGAATRASSSRGPFHDFYEHLLAQGRKPTMARLTLARKIAAITLIVWKKEVRFDASYLKSQAA

SEQ ID NO: 175872 - protein, 364 aa, unidentified
MRDAKPDAPRPSLSTLEPAGTWVGIDVAAQTLAVVIARADQAPTPAESVANTAEGWQTLRRSLQAQGIQPASSQVVLEATGAYWVGVATALTAAGWTVSVVSPASARAYAQARLRRAKTDALDAAVLAAYGRDLHPAPWRPPPPEIQALQLLLRQRDDLVAMRTQTRNRQHALAQLPPAAVPPEVQASWEALLATLETQIADVTALIEQRVATTPIAEEVARLDAIKGVGWLTATLLLVETAPLGLALGASRIAGAGEVTPKQVVAYAGLDPAPRQSGTSVRGAGHLSQTGHPRLRQALYMAALAAVRSNPRLRAFYHRLLARGKLKRVALVAVARKLLVLMVTLLTHQRTWDPDWPARPARHP

SEQ ID NO: 175873 - protein, 410 aa, unidentified
MRYYLGVDWADQTHAVWVVNESGTKTAARTVPHTAEGLSEWGRELDEWRAQGIELWAAIERREGRVVDVLLDHGVVVYPVNPKALDRARDRFRQSGAKSDPFDARVLADFLRTDHAHLRALQPSSEAAQELKLLTEDCQRHIRQQTRLVNQLTATLKAYYPRALEIAALPTPLAREFLQAYPTPEAAAALTERQWQRWARAHRLSETRTQALWDVLQQPQLPVPVHVLRAKARLMRSLVAQLTLVVAVVEEYREAIEDFFARMPAAQWARTLPIGKHGITAPTLWARLGDAPGRWESFRHLQAHAGAVPVTKRSGKQQRVIQFRFACDKALRYVIDHVAFLSLHSSVWARAYYDQQRARGHAHRQALRALAAKWLKIIFVMWQHQVPYDEQYHLATMTRQQLRHGQKHIA

SEQ ID NO: 175874 - protein, 425 aa, unidentified
MPYRIAGIDVHKKMLAVVVADVEIDGDFHFDRQKVGTTPADLRGLADWLVEQDVEEVVMESTAQYWRPVWEALEQHWRPRRRARDGAPRLAGTLHLAQAQSNRGPGGRKKDVPDAERLVKRLVAQELTLSFVPDTEQRLWRTVMRRKYQITRNRVQLHNRLEALLEEAHIKVSSIVSDLLGVSARRMLQALAEGETDPAALAALAASRLRATPEQLCDAFQACPTLHPVYRRLLKLTLEELRVIEDHLGQLDQQMADLLAAHHDAVQRLAEIPGLGVDSAQQIIAEVGATAATFPSPKHLASWMGACPGNEESAGVNYSHRCPKGNRQMRRVLNQAANAAVKAKGTIFSVVYRRIVPRLGHAQAIGAITHRLCRLIWKILHERVRYEERGPAVSVEAKKVRARKMIRELRGLGYRVELISPAPSA

SEQ ID NO: 175875 - protein, 354 aa, unidentified
MKEDLNKNECILGVDTHLDIHVGAIINNTGKVAGTKTVSSNNSGFNELFDWASSFGTVMEAGIEGTGTYGASLCDYLQDKNIHVFEVNRPDRSKRRLEGKSDPIDAISAARSVWSGTATAIPKSHNGICEALRIISIARKSAVKSKTQTINQLRALLVSAPQKIREKLWQVKPHECVSACLKYRNVVTNSTVLSTLLSILKSLAKRWLLLKQEVDLLDKEMDKLTKEHTPRLRSRLGVGPQTAATLLSVAGDNPERLKSEASLAALCGVNPLPASSGKTIRHRLNRGGNRTANNAIWTVAMVRMRSEPRTKSYVERRTAEGLSQKEICRCLKRYIVRELYPVILDDLSKIKLIT

SEQ ID NO: 175876 - protein, 436 aa, unidentified
MFVGHRFRTDPDELDALWARLPKDAEQIEVVMEPTRNAWVALAAWFRRHGATVVMVPPEQSADLRDYYNKHTKTDRLDSKVLARLPLLHPEGLHREDSLGPGDELKRAVKIRSGLVHRRTACMARLDALLEILGPAWIAALGSDMTLTALRFLARYANPVQVKRLGKARLAAFFRRSSRQAWADERADAVIEAAATTLRLWGADGGELDFDALAADIAAEARLALTLTDEINGFDKRIGALYDKADPAGIVRSVPGAGRVCAPQILGRLGDPTRFANLAAVRSFAGLVPAADSSGQADGHRGPTKAGDSCLREALFIAADHARKVDPTLAVRYQRLMLAGKHHDSAVCTLAAVLLTRIAACLRAGTHYLLRDTDGRVITEAQGRAIVAERYTVPPEVRAARRKVTPHRHPRRNERNERAKTGVATRSKASPVPQPA

SEQ ID NO: 175877 - protein, 427 aa, unidentified
MYRMAGIDVHKKKLAVVVSDVEVHGEYQFERCWFGANPEQLRLLSPWLAEHQVEEVVMESTALYWQPVWGALERYWQPICQKREGAGATSGILHLAQAQSNRAPRGRKKDFRDAERLVKRLVADELKLSFVPDREQRLWRTLTRRRYQLTRARVQLQNQLEAMLEEAQLKLSSLVSDLLGVSARRMLQAIADGESNPEALAGLADRRLRATPAQLSDALGACTELHPVYRRLLNMMLGEWKVIEEHTAELNQELATLLRPHQDAVERLAEVPGLGVDSAQQILAEVGANAAVFASDKNLCSWVGICPGDQESAGESSSHRSPQGNRQMRRLLNQAANAAVKTKGSIFEIVYRRLVPRLGHNQTIGAVAHRLCRLIWLILRKGVPYEERGPAVSQRSKQNRTSKMIRELRTLGYRVEFLNPVPSNPMP

SEQ ID NO: 175878 - protein, 368 aa, unidentified
MDRKSSKLFVGMDVHKESIDLATGEAQGEVRHYGAIGGDLGSLARVVRKLESQGRELVFVYEAGPCGFGIYRWLRSRGHECWVVAPSMTPRQASDRIKTDRRDCLKLCRLARAGELSPVYVPDAADEAMRDLVRTREDAVVMQRQARQRLAALLLRNDVRYNGKTAWTPAHRRWIAELKLPHAAQHIAFEEYVQAVDEAGQRVERLTQAIEAQSCDWRWAPVAQALQAFRGIRAIHGTRILAELGDLRRFARPRALMGYLGMVPSENSSGERRRQGSITKAGNSSARRALIEAAWAYRYSARVSVGIARRQSDLPKPITDLAWKAQLRLCARFRRLCARGLHRNKVVVAVARELAGFVWALGQQVAPR

SEQ ID NO: 175879 - protein, 342 aa, unidentified
MKIMTGIDLHSNNAVCGLMDQSGRRVLHKKLPCDLSVILQVLEPYKARIAQVAVESTYNWYWLVDGLEDHGYPVVLANPARMKQYDGLKHTDDVSDAYFLCDLMRLGILPTSHLYNRQSRPVRDLLRRRMLLVQLRTSLILSFKSLNERTLGERVPLARVKAMSIEQAQARFTAPADQLLSGEQVGLMGQLQESIAKIEKHILATAGEWKTFQRVQDVPGIGKILGLTIALETGEPQRFASAGNFASYCRCVKSLRQSNSKKKGENNRKCGNRYLAWAFVEAAHFACRHDERCRRFYERKKQQTNPVVATKALACKLAKASWHVMHGGVPYDPQRVFGGGTA

SEQ ID NO: 175880 - protein, 339 aa, unidentified
MEITTLGIDIAKSVFQLHGVDAAGQVVLRKRLRRNQVLEFMAQLPRCLVGIEACGTSHHWAREITVLGHEVRLIPPAYVKPYVKRQKNDMADAEAICEAVTRPNMHFVPIKTPEQQGVLILHRTRKMLSRQRTMILNAFRSHLAEFGIIAPKGPFHVMQLAKALREDEHDLPEVARRALIGFADQLVALTEEIWSLERQLRAWHKDNPVSQRLQTIPGVGVLTATALAASIPDASVFRSGRHFAAFLGLVPRQNSTGGKDRLGRITKMGDPYLRTLLVNGATAVIRRIGQAEGPTAIWIRRLLDKKPARVATVAIANKTARIVWAVMLREEEYRRPAMA

SEQ ID NO: 175881 - protein, 455 aa, unidentified
MTKQKSQPRMKAPVNALEQINPHAAGIDVGSEEVYVAVPPDRDVESVRSFPTFTADLRHLAEWLKACRVETVAMEATGVYWIPLYELLEEHGFEVCLVNARHLKNVSGRKTDVLDCQWIQQLHTYGLLRASFRPPEEIVAIRSLVRHREMLVQYRSAHIQHMQKALTLMNLRLTNVLSDITGVTGLTIIRAILAGERNPQRLAAMRQAGCKKSEAEIAKSLEGHYKREHLFALKQALELYDFYDRQLKACDAELEAMYSEFDPPEDPGTPPPAPRTRKRRKNQAHFDLAPALYRLTGVDLTQIDGVDELTAQKVLSEIGTDMSKWPTVKHFTSWLRLCPNNKITGGKIIQTGVQPTKNRASAALRIAAASLKNNDSALGAYYRRMRARLGTPAAITATAHKLARIIYFMLKEGKPYHDFGADHYEQQYRARILRNLTRRAAKFGFRLEPAALEVS

SEQ ID NO: 175882 - protein, 341 aa, unidentified
MNITVVGLDIAKNVFVLCGLNQAGKPMLQRKLSRAKVLGFFANLPVCLIGIEACPGAHYWARELLRFGHQVKLVPAQYVQPFVRGDKTDARDARAIAEAITRPDMTFVQINTDAQQDLQMVHRVRQRLVKERTALLLQIRGLLNEYGIVFPQGSQRVAAVLRELLADTQSFSGLALVIWHDLLVQLQTKEQQVADYDARVQQLCRDTPQAARLQQAPGIGPLTATAFVAAFGNASHFASGRKLAACLGLVPREHSSGGKQQLLGITKRGNAYLRTLLIHGARTLLRHADKKTDRLSCWACSLKARKGFNVAAVALANKLARIAWAMLSRDADYDANLLQQA

SEQ ID NO: 175883 - protein, 312 aa, unidentified
MEKLSYGGIDVSKDRLDVVVLPEERFFSVSNDAAGWAELVARIRPLAVSAIGIEPSGGYERGIIRALLAAGLSVRRINPNKLRQFARARGVLAKNDRLDARLIAEYVAIMPTRVVQRDEAVEKLAEVVTMRRQLRDEHVTVENQAAHVEDAMLRRLNKRRLARLEADTRLLDKRLAEMVATNAALAQRYELLTSMPGVGPVLAFTLIALLPELGQMSRKQIAALVGLAPYDFDSGKLRGHRSIYGGRMAVRNVLYMAALSGCRYNPALKAFHKRLAAADKKSKVVIVAVMRKMITTLNAMLRDNVEWQPKSA

SEQ ID NO: 175884 - protein, 539 aa, unidentified
MPKQRNKAVSLPVIEPNAAGVDVGATEIFVAVPADRDPEPIRCFPTFTVDLERLADWLQQCQIRTVAMESTGVYWIPLFQILEKRKIDVRLVNAHHVKNVPGRKTDVSDCQWIQHLHAVGLLRGSFRPDDEICAIRSLWRHRDNLIQLSTLHLQHMQKALDQMNLQIHHVISDLDGTTGLAIMDAILAGERDPHKLAQLRHPRIRASEETIIKSLVGDYREEHLFTLRQSLKTYRYYQELIQEVDAQVKQRMQRLPSKVAEGEQPPQGSKRRARKVPWRNEPPQLREDLYRAFGVDLTEIPGINSLTAQMLLTEIGPNLARFPTAAAFCSWLRLCPDPKISGGQVLSSRTRPTKNRAALALRLATQALHRSDTFLGDYFRRMKARMGTPKAMTATAHKLARIIYHLVTTRQPYDATIFQKQEDRRRHQKSARLHAQARELGSSSCPSILFLERAGGLPYLLMSNRGGHYPPQTSGPARGVVCLEAPQKPSDTNINASSRKNTLKELQEKHRYGNTLRISYLCRASLEAVINFVPLFSFG

SEQ ID NO: 175885 - protein, 360 aa, unidentified
MHATTVAVDLAKSVFQLVVADEHWRIVDTQRLTRTQFERWFVNRSVGLVVMESCGSAHHWARWLNALGIEVRLLPAQYTRAYVRRNKTDATDAAALLEAARAADIRPVRVKSLEQQALQGLHRIRSLWMGTRTSRINALRGFCREFGIAIPVGARTGVEAISRVLADPNTAVPDLIRGSAKLLVEEIRLLEARIAQVERELAQAARLSPACTTLLSIPGIGLLTATALVAATSGDVSHFQDARHFASWFGLTPREFSSGNSRYLGRISKKGDRYLRMLLTHGARSVLRAAKVAEGAGKEVCGVRRWALQVQGRTNHNKAACALANKLARICYATLRDKTAFDENTRLSRKMNRQAFAMPA

SEQ ID NO: 175886 - protein, 346 aa, unidentified
MIIIGCDFHPSWQQVCWLDIETGELVQQTVLHVPGEVEKFYRQFAAPALIGMESTGNCQWFVELLERLGHVVWIGDAAKIRASDVRQQKHDRRDAELLWRLLHEDRFPRIWTPSSEQRDARQLLIHRHKLVRVRAQVKNELQHLAMNRGVQKKRRLWSAAGQQALRELPLATWASRRREDLLKLLSMLDGQIASLDLAVKAAAERDEKARLLMTQPGVGPVTSLAFVLTMGDISRFPRGKQVASYLGLIPREYSSGGHQRFGPISKQGNRFMRMLLVEAAQVAVRCDPQMRSEYLHRCHRKPKGVAKVAAARKLAIRLYWMLRTNRGYPEIVRIESGPRVPVVSAS

SEQ ID NO: 175887 - protein, 386 aa, unidentified
MDILYESCAGIDVHQANIVVCILHGPLTSTRPKREMATFDTTTKGLRACHDFLSQFHVEAVGMESTGVYWRPVWHALCDDFELILAQPAHMKAIPGQKTDKKDSHWIAKLTRIGLLPRSFVPDETIQELRELTRQRKHYVESRHRETNRIHNILQSGGIKLTTYIEDIMGLSGRNLLQLLVDGARIVHQSVYTSLKKKVPQLLEALDGYFSDHHRFMLTQSLEFYDFYQKQIEILENRINSYLMPYEDQVEILDSIPGIDVITASVIISEVGVDMSQFPTAGHLASWAGLCPGNNESAGKKRSTKIRHGNSYLKKCLCQAAFAVKRQKGSPLAERYYQIQSRRGSQKATIALAHQLLKIAYILLKEQMTYPEFLAQKKTTRGELVA

SEQ ID NO: 175888 - protein, 347 aa, unidentified
MEKYQIGIDVSKKKLNAALLLVPASLKKKTKVVANNPEGFKSLIEWIERQVKDQKAFRFIMEATGSYHQALALFLSDHGFEVCVVNPALIKRHGESMAARTKTDEKDCVIIAHYGATMNPRPWAPPSAQYRALEQLLRRLDQLDKMIRQEKNRLESLGSGPADQDVLDSIEKTLSYFDKEYKDLFKKIHDHLERHPDLKDDVKLLTSIPGIGELTALRMSSVLEGGSRFISARQFAAYLGLTPRQNQSGIIKGKSRLSKMGPSALRKALYMPSVTASRCNPDVHALYERLLRAGKTKMSALGAAMRKMAHLVFGVLKSRKTYTAFFTPILEPEVGNEANPIAVGLLS

SEQ ID NO: 175889 - protein, 481 aa, unidentified
MSKEYKEPAKSGDGKTETSKSKRGRRRKGMCLEDRPVLEPNAAGIDIGAREIFVAVPPDRDENPVRMFFTFTENLHEMGKWLVNCGVTTAAMESTGVYWIPLYDVLEQHGIKPCLVDAHGMKNVPGRRTDWHECQWLQFLHSVGLLRAAFRPDGEVCAVRSLMRHRSDLVQMASQHIQHMHKALTQMNVQIQHVISDITGLTGLAIVDAIVGGQRDAQELTKLRDPHIKASAETVRKSLEGNWRPEHLFTLKQSRKSYQHYQEQITACDEQIEKMLVAFQPRVDPAERPLPPDRKKKQRGRKKKNMNPKAGFDLRTESFKLFGVDLTQIPGLMMMVLTLFSEVGRDMSRWPTAAHFVSWLALCPDNDISGGRVLWRGRRRVHNRAGQLFRLAAYSLHHDETPLGDYLRRMKSKLGPAAATTATAHKIAIIFYTMVKNQVEYDATLWAQRDAQREKRFEEKLKRQAQQLGYKLVPIEEKPAA

SEQ ID NO: 175890 - protein, 414 aa, unidentified
MFAVGVDVSNGRSTVAVLGTRRSVVVRPHEVPHTADGFAELTAKLHALDGEVRIVMEHTGRYYESFAMSMYRAGFFVSAVNPLAIKDYQAGISVRKVKTDKADALKIAQFAIDKWEILPHYTPMDTIRYDLKTLHRQFQLSSKTKTALNNNLIALLEQSYPGANRYFDSPVRPDGSQKWVDFADTFWHVDCVAKVSRKAFTERYRKWCKRHGYNFSEAKAVEIHEDARQKFPLVPKSDTCKLLVKEAVSQLNAVSRTVETYRAEMDRLASQLPEYETVMAMTGVGKSMGPQLMAEIGDLRRFVHQKSLVGFAGTDPIKDDSGDKVSDSKPSSKRGSPYLRKTLFVIMTILLQLQPPDDPVYQFLDKKRSEGKQYYVYMTAGMTKFLRIYYGRVRDCLKEKGLWEQPSVDEVNPG

SEQ ID NO: 175891 - protein, 359 aa, unidentified
MNPSTLSSAEVAVTLGVDTHKDVHVAVALDELGGYLGTLSVPATKDGARRLMSWATGLGTFERAGVEGTGCYGAGLARFLRAEGIRVFEVVRPKRRDLRRAGKSDPIDAEAAARAVLAGTVVGEPKGTDGEVEMIRVLRMARRSALKARTQAANQLKALLVTAPEELREELRGLSTIKLVCRASRFRTGESLTGVMVATKFALRSVARRYRHLCEEISELDEQLGRLVAEAAPALVAVEGISTDTAASLLIAAGDNPERLTSESAFAHLCGVAPIPASSGKIVRYRLNRQGNRDANRALYVVALGRMSRDERTRTYVARRTAEGKSKKEIIRCLKRYIAREVYRILVSPLHTSTPISVP

SEQ ID NO: 175892 - protein, 352 aa, unidentified
MDYFAGLDISLEMTSICIVNADGDVVKEAKVASEPDDLVAFFAQCGMAMKRIGLEAGAPSQWLYGGLANAGLPVVCIETRHAKAALSAMPNKTDRNDARGIANIMRTGWFRAVHVKTQAAQELRFLLVARQTLVRKLMDIELAIRGMLRSFGLKMGVVSKRNFEARVLELAGDRAMLMRALNPMLTARRALALEYANLQKVAMDFARDDDVCRRLMTVPGVGPIVALTYRATIDVPSRFRRSKSVGAHLGLTPRAYQSGEVDWNGRVSKSGDAMARAALYEAAHILLIRVKRWSSLKAWGMRLVKNRGHKRAVTALARRMAVLMHRIWVEGTTFLWKTGDGQTIPPKPVPGV

SEQ ID NO: 175893 - protein, 347 aa, unidentified
MDVHKEAIVIAVLNGSGKLVMETILETKASSILQFIHGLRGELHVTWEEGTWAAWLYDLLQPQVHEILVCNPRRNALLKEGSKSDKVDARKLAELLRTGMLRPVYHGENGLRTLRELARSYQTISKDLTRVMNRLKALYRGWGIPCAGTQVYAPRYREEWLSKIPQTGVRRRAELLYQQLDGLQALRRNLRPEFLAESRKHKAAKLLRQIPCIGPIRAAHLIALMQTPHRFRSKRQLWTYSGLGIETHDSAQFRFVRGQLQRSKKPQQLRGLNQNHNHEMKDIFKSTATRASCGRGPFHNFYAALLAKGMKPEMARLTLARKIAAITLTLWKGGKRFDAEQLKTQAA

SEQ ID NO: 175894 - protein, 339 aa, unidentified
MGNASTLHVGLDVHKDSIAVAYATEEGAVAPVPFGTIGTRQCDIDALVRKLQSKSGRLVFVYEAGPCGYWLYRYLTKKALTCVVVAPSLIPRKPGDRVKTDKRDALTLARLARSGDLTPVYVPAVPDEAVRDLARAREDALKDLHAARFRLKALLLRNDIRDTGRANWSPEHCRWLARLVLPTAAQQIVFQEYVRTVTERTDLLRRLEAELLEQAKTWRLSPVVEALQALRGVQFTVAITTIAELGDLTRFDTPRQLMSYLGLTPSEYSSGERRRLGGMTKAGNGHARRVLIEAAKAYRHRAKVSEQIQARQQRLPAAIVNGRPSRATRGRPYGASVAA

SEQ ID NO: 175895 - protein, 430 aa, unidentified
MEEVDEQELHVERVAALDLGKAALEACVRVPHESKPGRRLQEVRGYATTTGALLELADWLHSWGVTRVVMESTSDYWKGAYWLLEAEGFECWLVNARDVKHVPGRPKTDKADAVWLAKVAERGMCRPSLVHPRPIRQLRDLTRYRRSLIHDRTREMQRVEKLLEDAQIKLSSVATDIFGVSGRAILEALVAGQRDPKVLAQMAKARLRVKLAPLEEALRGFFTDHHAAILRMMLDNIDRHSQQIAVLDTKIEEAVAPFAGQVAQLDEITEVGVTAAQELLAEVGVDMGRFASAAHLVSWARFCPQVHESAGKAKPKGRGKGNPWLAGTLGNIVATAARTDSFLGARYRRIAKRRGKQKAMVATGNSVLVIVYHLLADPAARFYDLGSDHYQSRINHERRARNLASQLQAVTGQRIMIRNGKAVIVEPDAA

SEQ ID NO: 175896 - protein, 355 aa, unidentified
MSSEKYIGLDVHQATISVAVMDSQGKVIMESILETKASTLLEFFAGLRGSLFVTFEEGTWAAWLYDLLKPHVTEVLVCNARRNALLKHGNKSDKIDARKLAERLRLHDLKPVYHDETGVRMLRELVRSYLTVVKDCSRVMNRLKALYRSWAIPCAGRDVYYTRHRSQWLEKIPEAGTRRRAEQLYQQLDLLQHLRQQARREVLAESRKHSITAKLRKIPSLGPIRSALAVALIQTPHRFRSKRQLWTYSGLGLATRDSGEYHYVRGQVQRRKKQATIRGLNKDYNHDLKGLFKGAATRASVQPGPFQEFYQRSLAKGIQPTMVRLTLARKIAAITLTLWKKGEDFDIEKLKSQAT

SEQ ID NO: 175897 - protein, 346 aa, unidentified
MSLSTRTSPYQLYVGVDIAAKTLTAAWMAPGATPGRPLTVDQTPQGFATLQERLLATGHPAATILVVMEATGSYWVGLATTLAQAGFVVSVVNAAQAHHFAKALLKRAKTDAIDAQTITQLAARLEPAPWTPPPAIYTELQQRLAQRDTLMTLRQQVRNQRHALQHLPVVITSVLERMEALIATFDAQIAAVEQEIEQVLSQDAAWATTATLLLSITGIGLLTAAWLLVTTLNFTVCATAEEATAYAGLAPHPYESGTSVRGRAAIGHGGNGRLRTALYLATLSAAQHNPHIKPFYARLRAAGKPKKVARCAAARKLLHLAWAVATKGVAFDPTYQTQHACSGSSA

SEQ ID NO: 175898 - protein, 339 aa, unidentified
MPLYTGIDLHSSNNYITIIDHQSKKVLKKRLKNDTRVILDVLKPYKEDIAGIAVESTYNWYWLVDELMADGYRVHLANPLAMKRYSGLKYSDDNSDALWLADLLRLNILPEGYIYPKETRPLRDLLRKRGHLVKIRTALLLSLQNIISRNRGIKVVSNELKKKTGNCSGQLLFDNEELSLAVTVSKESIDFMAKQIIRVEKAVEKKAKLEKEYQLLLTLPGVGRILGLTIELETGPINRFAKIGDYTSYCRKVTSQWMSNDKIKGKGNKKNGNKYLAWAFSEAAEYARRYNEACRRFYNRKLNQKNRMVAHNALAHKLARAAYYIIRDKVPFDEKKLFV

SEQ ID NO: 175899 - protein, 475 aa, unidentified
MSRKTSSQTDLVALPMLSHETLYIGVDVGKKAHVAGFLSSTLLTRHQRFEQCPALTFDNSREGFRSLIDRIRTYVPFTQVQAVLEVTGHYHRALLQYLQEVDIPVYVMHVQKRQEGLLKTDKRDALGLANMLYNQLEKGIQVGDPLQAIRRLIPATPAATELRGMVRHRYELIAESTQRKNKLTAICDELFPEFTHLLRDPNLPTALALRKRFSTPAELAIASFGELREARGRTCSVSDAKLRELQRLAAQSIGTKEPARVRGLVIEQKQLIGELDLIAEHITELDTEIIHVVEDSREGKILTSIPGIGPLAAATLIALIGNIANFERAAQLKSYVGWVPKVAQSGTTLDWTRLSPRGVRQMKQTMYLIVWRAIQWDAEWKEMYERLISRKCRSDERTRRLVGREKVIGRLAGQMTSVIYALLKKDHEILFHLAPGAKPPEPQLYDPETHRRHRLEHYQSPTREKVPQIIQLPSP

SEQ ID NO: 175900 - protein, 335 aa, unidentified
MAIVMGLDQHRAQITAEWIDTSTGEVSRARLAPAHRAHVRRFLGRFSNEELEVALEATTGWRFVVEELRQVGARVHLAEPAETAARRGTKKRAKSDRADARHLRELLMVGRLPESWIPPAHMRARVRLRHTLSEQRGEWQQRIQAVLYHHGCPQRGDLINSAGLAWLASQPLSGCAREQVAVALAMIEALHVQIGSLDTELRAFARRQAGCKALIAHYGIGALTAVTIIAELGDASRFSSSRQAVRFAGLDITVHQSDQRRAPGRLSRQGPPALRWALFEAAQCARRRGSPDHLYYLEAAERLGGNRACLSVARKLLKRSYHTLRELGDQAMQPA

SEQ ID NO: 175901 - protein, 433 aa, unidentified
MKIIHPICCGVDVHKKFLVATIAVTAKSGVTRYITETFSTLNPDLFRFRTWLTDNNCLHVCMESTGKYWIPVFNILEAAGIHVLLTHPMYVRAIKGKKTDKKDSKWIADLFKHDLVRSSFIPPPQIRALRELARYRYKLVCMRSSERNRFQDCMTVSNIGLASVLSDPFGKTATDIMNHVLSSDVFDEQLCQKLIYKSAKKKTDLILQSIRDCKIESDQRFKMTEVNVHMEYLDHSILRTEAELYTRIQPFMSIVDHLSTQLPGISKLSAAMIIAEIGADMSVFESANHLVSWAGLAPTNNQSAGKKKSVRISKAGQFLKPLLVQCALAAAKSKKQPYFAIKYQRIKKRRGHKKAIIAIARMMMICIHRLISTGEDFCPSDYQAVVLPSQPRKQVLNDKTVFAYLAAQGYDVSSLVKLNPDAPLSVSEQPVPA

SEQ ID NO: 175902 - protein, 395 aa, unidentified
MKKVCGLDVHKDSIFMCIIDENDQVLLEEFSTLTPDIEKMRDLILTHQVSEVAMESTGIYWIPVWRILEGYFILKLVNPYFIKQLPGKKTDVKDAQWIATVLQKKLVKGSYIPDANIQELRQYERRHVRLSENITRIEQEIDRHLHRCNIQITNFASRIGCKSVMNVVKAIVEGETKAEELEKYVHGRITNKYKEKIRMSLTGVISNADKFILKQNVKEWELLNELQQECFIEMDTLCDQLYKKELRLLCTIPGVQKLSAMTIIAELGIDMKTFITAAMLVGWAGLRPRNDESAGKIKSRKITNGNKYLRRVLVQCAWGASRMKTGWLSTKHKALCKRMSSKKALIAIARKLLVIIWNILSKEEVYREFIPKIDEKQKQKQIDRLEKKLAELKVA

SEQ ID NO: 175903 - protein, 351 aa, unidentified
MSHKTAATGAHTIGIDTGKNTLHLIGLDDKGAIVLREKIARGRIAARFANVPRCLIGIEAGMATHYVARELIALGHDVRQVPPAYAKPFRQGHKNDFRDAHAIAEAVQRPSTRCVPVKTDDQLDLQALHRVRSRLVGQRTAVINQIRGFLLEHGIAVRQGLRFLRQQLPDILAKRGDVLSPRMTRIIEDLSGDWRRLDERIKHITEEIEVLAHGSESCRQLMTAPGIGPLIASAMVAAIGNGTAFAKGRDFAAWLGLVPKQMSTGDRTILGRISKRGNRYLRTLIMQGARVILLRPANWAKHSFGLWLTAAAQRLHHNVLATALANKLARIAWTVLAQGRSYEARVVPKVA

SEQ ID NO: 175904 - protein, 373 aa, unidentified
MLLPLQQMKLARGAKDREHAMSQKLDTAIAVIGIDIGKNSFHIVGLDLRGTIVLRQKWSRGQVETRFANMPPCLIGMEACVGAHHLSRKLKMLGHDARLMPAKYVRPYSKGQKNDFRDAEAIAEAVQRPTMRFVATKTADQLDLQALHRVRERLVSQRTGIINQIRAFLLERGVAVRQGLRFLRSELPGILATRADVLSPRMVHVIEGLAGDWRRLDERIEDLSIEIEALAHQDTACKRLMTVPGIGPIISSAMIAAIGNGAVFSKGRDFGAWLGLVPKQISTGDRTILGKISRRGNRYLRVLFVQAAWVVLIRPKSWERYGLKPWIEAAKKRLHHNVLAIALANKLARIAWAVLNKERDFECIRTKIASRPA

SEQ ID NO: 175905 - protein, 417 aa, unidentified
MNESAQWQQHRAFGAVDWGSEKHYVVVVDQAGKVIEDFEVEHRALGWKKFREKLQAYGSIPFAIETSQGAVVEQLLEAAMIVYPLNPKSAQAYRQRKAPSGVKDDQLDAWSFADALRVDGHGWKPLRPEEPLIKELRLLCRDEVTLIEQRTAFVQQLRHALAEYYPAALEAFEDWTSVSAWMFLQRFPTPGALAQAGKRQWQKFLHSRRLWGSDQGPRRMEIFAHASELAGTQPTINAKSLLALSLVQMLFSVDKQLAVYRQRIEELFARHPDHDLFGSLPGAGAKIAPRLLSEIGDERQRFDGDAQALQCLGGTAPVTKRSGKYRHVHQRWACDKHLRHAIYLFAEQSLSRCVWAELYYQHHRQKDRSHANAIRRLGHRWLKIIHKMWIDRTPYNAELHHRNQLQHGSWIFQLRPT

SEQ ID NO: 175906 - protein, 415 aa, unidentified
MIPAVVERCAGIDVGKKTLAVCVMTGAANEEPQAELRKFGTVRAELIRLREWLKSAGCTHVVMESTGCYWKPILNVLEDDPEFQLHIIVANPQQVKAITGHKTDPHDARWLAHLLRHGMIRPSFIPSRAVRDLRDLTRRRKQIIETCAEERNRIQRVLEDANVKIGDVLSDVFGLSGQLMLEALLEGKATHVEIAQLAKSGARKKISELEAALEGHQMRNTHRVLIRNAIRHMAFLEREIDQLDSEIATLIREAGLEPQWKLLQTIPGIRETAAATMLAESGGDMKQFPAPSNFSSWSGVAPGNNESAGVKRRAPTLRGNPHMKAALVESGWSASRTKNSEFQCHYERLKQRIGHRRAIVAAAHSLALVVYQVLATAQPYQPRQPGFRPRELNRLRRHHSRRLRNLDKWLTADVV

SEQ ID NO: 175907 - protein, 355 aa, unidentified
MNQEKYIGMDVHQATISVAVMDAGGKLIMECLLETKASTIVEFIQGLQGTLSLTFEEGTSAAWLHDLLKPHVSRLVVCDPRKVALLKEGNKSDRIDARKLAELLRTNQLKPVYHEEHGIRALRELGRSYLTITKDVTRVMNRIKALYRSWGIPCSGTNVYAPRHRAKWLAKIVEPGVRVRGEHLYQQLDSLQPLRLQARRELLRESYQHPAVKLLGQIPSIGPIRAALLVALLQTPHRFRTKRQLWAYSGFAVETHDSGEYRYVRGKLQRNRERITVRGLNDNHNKDVKNLFKSAAISASTRPGPLHDCYVARVEKGMRPTMARLTLARKIATITLTIWKKGVSFDPKHLHRQAA

SEQ ID NO: 175908 - protein, 422 aa, unidentified
MQGNETELDLAAFVGLDWADQRHAVCLRAAEGKLSQHFSLEQTPETLHGWVSQLRVQFGGRKVAIAIEQSRGQVISALMTYDFLVLYPINPKALARYRQTFATSGSKDDPSDAELLLSLLLLHREKFRPWLPDDPQTRTLQMLVEHRRRVVQDRVRLTNRIKSLLKVYFPQALEWAGSLATLQACEFLERWPSLEKVKKAKASQFRNFYVKHGCRQIKIIEERIEQMRTAQALTQDPAVLTASMMMLQATVAPLRTVIQAVEQFDDQIALLFQQHPDHELYQSLPGAGAALEPRLLAAMGMDRARYGSAADIQQLSGTAPVTDRSGKKHFVYRRRACAKFMKQSFHEFAAHSVASSAWAGAYYRERRDRGVSHHACVRALSFKWIRIIFRCWKDRKPYDERIYLESLRRRGSAYALALAPRE

SEQ ID NO: 175909 - protein, 343 aa, unidentified
MELYAGIDLHARNSYFAVIDAEGAKVFSKRISNASDQVLKTLEPYKEWLRGVVVESTFNWYWLVDGLMDAGFKVHLANPSAIQKYKGLKHSDDKSDAIWLANMLRLRVLPEGYIYPREYRSVRDLLRKRMHLVKLRVSLINSLQNILVRNGSARLGAAKIKQLTKDHVTPLLDWNEDLVLSGRVSKEAIDYLTGQITAIERVVAKKAQLKPEYEFLMTIPGVGVILSLTIMLETGPINRFAKVGNYASYCRKSPVSWTSNGKKKGDANKKNGNKYLAWAFSEAAELTRRFDNTARAFYDRKARKTNFMIAHSALAHKLARAAYYIMRDQVPFEKEKLFALSLA

SEQ ID NO: 175910 - protein, 355 aa, unidentified
MLRYPRRSDRILGRVRAKPVFIRVIEKGWLTAMRMTVEILGLDVGKRELHAVLMHDDRSACKSVPNSPTGIAQLQKWLKNRKVSRVHVCLEATGGWSEDVAMALNEAGHIVSLVNPSRIKAFAQSEMLRTKTDRVDAASIARFCRMHVPEQWTPPAPEIRTLQGLVRRYHSLVEMRTEEQNRLGAPIVAPPVKASIMATLEHLALELERVDREIAQLFDEYPPLRRQRDLLVSIPGIGETTAARILGEMPNITEFRGVKAVSAFAGLSPQHYESGSIRRPSRLAKAGNAGLRQSLYWPAISAMRYNPILRSFADRLRERGKANMTIIAAVMRKLLTLAYGVLKSGRAFDPTYAAP

SEQ ID NO: 175911 - protein, 387 aa, unidentified
MAQVNDLSRNLTAFDPISTLVVVVEMSKASWLVSGAVPGVERQPLKKLEPDATALLRLIERWRNEAVRAGRPISRIALAYEAGRDGFWLARWLIARGIETHVIHSASVAVSRERKRAKTDRLDAAMLMRVFLGWLRGERGHCGMVAIPTMEEEDARRPSRERESLVNERSRITNRMKSALARLGVRGFKPHLRKAPERLADLRTAEGTGLPANIIEEFRRDMARLALVREQISSIEKTRAERLERAPDTGPHAMVRLLARVIGIGIETADMLVREILSRRLRDRRAVARYAGLTGSPDESGLKRREKGLAKAGNARVRRGLIQLAWRFLVFQKDSALARWYRMRTEGPSGGRKTTMIVALARKLLIALWRLVTTGEVPDGVELRPAA

SEQ ID NO: 175912 - protein, 366 aa, unidentified
MKKPSTAASRRRGRLQNEQLTIGLDLGDRSSFYCVLNRTGEVILEERVTTNPEAMKKTFEKMPSSRIALETGTHSPWVSRLLTELGHEAIVAHSRNVRLIGESRRKDDRLDAQALARLARIDPQLLSPIQHRSAQAQADLSVIRARYALVRARTALVCSARGLTKAFGERIRGRNPKGFGSATAEALSPQLQVALAPLLSALETITARIREYNVQIEKLAEESYPEVALLKQVKGVGTLIALTYVLTLEDPRRFRKSRDAACYVGLQPGRRNSGQSEPQLHITREGNSYLRMVLVQGAQHILGPFGEDSDLRRWGMKLAERGGKRGKRRAIIAVARKLAVLLHHLWISCEEYEPLHNTRKRRLAVA

SEQ ID NO: 175913 - protein, 387 aa, unidentified
MPEQFDSHNATTAFDHDSTLVAALELSGKSWEIGAVVPGVARRPRRRLDPRDMAGLLRTLERWKSEAGAVGRAIDRVVVTYEAGRDGFWIARSLQAQGIEVHVMHPASVPVPRRRRRAKTDRIDLDMLLRSFLAWLRGEPRVCSMVRVPSAAEEELRRPCRERERLVAERLELENRIESLLCLHSVAGFKPRLKKAMAHLEALRDFVGAPLPEQTMAELRRLMARHRLASEHLREIEAVRDRVLTVARPDREERMIRLLVQIVGLGVETATVLVREMFCRPFRDRRAVASYAGLTGTPFRSGGMEREQGLDRSGNARVRRILVQLAWRWLRFQSESALSCWFAERTSGAKGRIRKIMIVALARKLLVALWRYVETGTVPAGVRFAAG

SEQ ID NO: 175914 - protein, 387 aa, unidentified
MPACGPRPGRVAIQVSLAAIFVSLELSRSTWLITSLVPGGGDKMSKHSVRSGDIAELMTHLAKLREKAHGRAGASFPIIAIQEAGLDGFWVHRVLERAGIESHVVDAASILTSRRRRRAKTDRLDGEALLRTLLAYKRGEPRVCTMVRAPSPEEEDRRRLCRERKTLVAERVAHVNRIKGLLFAQGIADYEPLRGDRRQRLEALRTGDGRPLPLYLKAQIGRELDRLELLLEQLKAVEAARNALLEPASDTAPVTVQALAGLRGIGPEFTAILWSECLFRPFSNRRQIAAYAGLAPTPWQSGSVQHEQGVSKSGNPRLRSTMIQLAWLWLRHQPTSELSLWFRERVKRNAGRGKKTAIVALARKLLVALWKLSSSGVVIEGAIMKAA

SEQ ID NO: 175915 - protein, 386 aa, unidentified
MTKKTTRNSEYSENQQVLFMAFELGASKWLLGFSIGLGQKPRRRTIDAGDLKKLQEEIKAAKEKFKLSEDAVVKSCYESGRDGFWLHRYLTEVQIANCVIDSSSVEVNRKLRRAKTDRLDVESLLKLLIRHHLGDQKVFSVVRVPSEEEEDRRHLHRGFKTLKKEKTRTTNRIRGLLATQGVRPTRLDLSDRQLESIRIWNGKGLGEGLKGRLRLEWERVVQLREQIRKLKAERQGQLKDNERTEIAQVKQLNTLRAVGPESSWPIIHELMWRDFRNRRQIGALVGLTPTPYDSGDSKREQGISKAGNRHVRAIAIELAWSWVRHQPKSKLTQWFNKRFGGAGKRARKVGIVAVARRLIIDLWRFLKTGVIPEGALLKAEAVRVTQ

SEQ ID NO: 175916 - protein, 344 aa, unidentified
MTEISTIGLDLAKNVFQVHGIDAFGTVVLRRQLRRAAVEKFFAQLPPCLVGMEACGSAHHWARVIGGYGHKVRLMPPAYVKPYIKRNKNDGRDAEGICEAVTRPTMRFVPVKSMEQQATLAVHGTRALLVRQRTMAANALRAALSELGIVAAQGYDGLRELMTRLEEPSEEIPETMREALLLLVQHWQALDADERKLERQIAKSARGDADARRLMEVPGVGPIIASTVMAKVPDAKVFRCGRDFAAWIGLTGKDHGTGGKHRPGRISKQGDRMLRALLITGASAHLRQQKARGVSDPWLRDLLARRPYKVVMVALAAKTARILWAMLVKGEVYRNRASAPAAAC

SEQ ID NO: 175917 - protein, 418 aa, unidentified
MASIEGREVLQEQVAGIDVHRKSLRVCVRHIGADRRVRQEVRTFGTMTRDLLELRDWLEAEGVTHVARESTGVLWKPVYNLREGRVEVLRVNARHVKCVEGRKTDGKDGPWLAQLLSCGLRKASFLPPKPQRELRDLTRTRSQLVGERTRVVNRIPKVLEDAHLQWGAVASDLLGVSGREMIEALIPGEQDPEKMAQRARRPLRGKIPQLRLALDGTVSDPPRFLLKRYWKQYDEIESWMGQFTERMEEACVPFAAAIEKITEVPGYHERAAQDLVAEIGTDMSRFASDDPLCSWATICPGNHPSAGKQTSGKTVQGNRWLKAVLCQSAWAAARTKGSYWGAQYHRLAGRRGKKRAVIAVAHSQLKVIYPLLGSDPSYQDLGADYFLKLNADRAARYHCKVLESMGYTVIPPDAKQVA

SEQ ID NO: 175918 - protein, 347 aa, unidentified
MRFYNRQHQYYCGIDLHVKTMYVCILDSAGQVLVHRNVPCTPAAFLEVVAPYRPGVVVAVECMFTWYWLADLCAAESIAFVLGHALAMKAIHGGKAKNDKIDSHKIAILLRGGMLPQAYVYPAAMRSTRDLLRRRLHLVRKRGQLLAHIQNTRAQYNLPAFEKRLAYPGNREGVVDQFPDPSVRKSIEVDVALIDQYDTLITDLELTIVREAKRHDADAFHRLRSVPGIGKILALTILYEIHDVTRFDRVQQFASYARLVKCRHESAGKVVGGGGAKIGNVHLKWAFSEAAITFLRHNRQGQQLRARLEKRHGKGKALSILAHKIGRAVYHMLARGTVFSMEKFLAA

SEQ ID NO: 175919 - protein, 349 aa, unidentified
MSPKLNAGIAVIGIDIGKNSFHVVGLDRRGAIVLRQKWSRGQVGTRLANLSPCLIGMEACVGAHHLSRKLTSLGHDARLMPAKYVRPYSRGQKNDFRDAEAIAEAVQRPTMKFVATKTAEQLDLQALHRVRERLVSQRTGIINQIRAFLLERGIAVRQGLRFLRIELPRILATPSEVLSPRMVRVIENLAGDWRRLDERIEGLSSEIETLARRDAGCERLMSVPGIGPIISSAMVAAIGTGDAFTKGRDFAAWLGLVPKQISTGDRTILGKISKRGNRYLRVLFVQAAWVVLIKPKSWDRHGLKPWLEAAKKRLHHNILAIALANKLARIAWSVLARGRAFEASRIQVA

SEQ ID NO: 175920 - protein, 353 aa, unidentified
MSKQIVSIGKPAVSAPKLSRPQQASVFCGIDVSAETLAVAVIEPDQAVHQREFANTPSGHKALITWLGKRKVLVRVSLEATGVYSMDLALALDAAEEIEVAVLNPKQVHDFARSLCRSKTDSADAQVLAEFGMRMKFVAWQRPSRSALALRAISRHIEALGLEHTRAFNRLHAAQESMATPRCVVDDLKRSLTALERRMKKLRREARAQIDSQDRLREQFRLLTSVPGIAEISALQILGELVLLAPDLKARQWVARSGLDPVHQDSGTSVHKPARISRAGSRHLRRALYMPALAAVRWDPHLKAFYESLLARHKRKMQALVAVARKLLHAIYGIFKSRTPYDGSKLFPQLLTA

SEQ ID NO: 175921 - protein, 358 aa, unidentified
MKIIGCDLHARQQTIAMVDTETGEFTEKTLSHEGIALREFYAGLEPPVVVGIEATGAMQWFLELLEELGIECQVGHPAKIRAAETRKQKHDRRDARLLLDLLVMKDRFPKIWMPSIEQRDLRTLLRDRHQWVKIRARLQHTLQAIALNHALRRGPALWSAAGQNALQALPLPPYSSQRRTELLRLYVQLQKRIQALDKEVDVQARQRPHARRLLTHPGVGAVTALATEVFLGDPNRFATGNQVASYIGMIPCEHSSGKRQRLGKLSKEGNSLLRYLWTEATLHAVGKDPELKRFYRRKLIQKGMGKARIAAARKLGIRLWIMMRDQIDYEEFCRRGTLRQKGKAHAGMPDFNSGPALQ

SEQ ID NO: 175922 - protein, 358 aa, unidentified
MGRVEISEPDQVVVTVGVDTHLDIHVAVALDQFGRKLDTIGVPTNGNGHRRLLEWTRSLGVPGQFGIEGTGSYGVGLTRYLRRHGIDVVEVIRPARQKRRLSGKSDALDAEAAARAVQAGTVLGQAKSQDGAVEMIRALRVARKSAMHARTNAANQLHAIVVTAPEQLRDRLRGLPITKLVETATRFRPGTIGTLEAASKLALKSLAGRYRNLSEEITSLDAEIEHLAHQAAPNLFQVKGIGADTGAALLIAAGDNPDRLRSEAAFAHMCGAAPIPASSGKTTRHRLNPGGNREANRALHMLAINRLSYDPRARSYAARRTAEGKSKKEIIRCLKRYLAREIFRALTSGNISIAPPIH

SEQ ID NO: 175923 - protein, 498 aa, unidentified
MATNWLRLAGSTPLESFIKPIRNRAESVELHFMEADEMAKQLGKRKKDGAKADATEGLPPLNLHAAGIDVGSAEHYVAVPPDRDAEPVRKFGSFTADLHRMARWLKDCRIKTVVMQSTGVYWMALYDVLESHGLEVNVANARHTKTLPGRKTDVQECQWLQKLHTFGLLNNSFRPPDEIRVLRGYLRQRENLVAAAATCIQHMQKALTEMNIQLANVISDISGTTGLAILYDIVRGERDPYKLAMHKHSRIRASRQEIARSLQGTWRQELLFVLEPSLDLYQTYQQKIQTCDERIDGQLRSMEPRIDPLSEPIPEPRRGKDARGHQSGFDLRGQLYRIAGVDLTRIAGIEVQTAQTIISEVGVDMSRWKTEKHFASWLGLCPDNRISGGKVLKRGTRHVVNRASTALRLAASALLRSQSALGAKFRRLRSKLGAPKAITAMAHMLARLLYRMLKFGHDYVDRGIAFYENKSREQQLKRIAKQAAALRMQLVPLAEVVS

SEQ ID NO: 175924 - protein, 322 aa, unidentified
MKHSIEKPKVFFGADVASRHIDIACHGSQQVRRIANDAEPLAAWLKTLPEGAVLAMEATGRYHLRLARLAHERGLRVYVLNPRDVKHYARGVGQRGKTDRLDARLLARYVEREHAELHAWQPPSAPAQRLGELLHRRAALVRHKTALRQSFAEDASLAELLGQMLAPLQQVLKALEAQIARAAAELPDGAAALERITSVPGLGLLSAAALLKLFQRLSGAGADAAVAFTGLDPRPMDSGDKHGVRRLSKRGDPELRRLLFNAAMAASRTAAWRAEYERHRAKGLARTAALVALARKLVRVALALFKTQTLFDPRRQQQALAA

SEQ ID NO: 175925 - protein, 341 aa, unidentified
MMIIGCDFHPRTQQIAFLDKDTGECGERRLSHPEEAAEFYRSLCGRQVRIGMEATGNFRWFRRLMGELGHEVLLGDPSAIHASIPRRQQTDKRDARHILTLLAEDRFPVVWQPSVENEDTRQLLLHRCRLVRFRARIKNQLDAMAKNEGLLSKRVWCAMRRQQIEALPLSGWDVERRKDLVALLDELSRRIEPLDEALKKTAEGNAEARLLMTHPGVGPVVSLAYVLTIDDWRRFPRGKQVASYLGLIPEESSSSDKRRLGHISKQGNTLVRWLLVEAAAKAQRYDAGWHRQYLRLSMNKHHGVAKVAIAHKLAVRLYWMLRSGQDYEQVRERGSHAGQSA

SEQ ID NO: 175926 - protein, 356 aa, unidentified
MASTLATDHERGQVMKVLIGVDPHKGSHTAVAIATDETQLGQLRVRASVRQCELLLAWAEEFPQRRWAIESAAGLGYLLAQQLVAAGEDVADVPPTLSARVRVLGSGKAQKNDPNDAFSTAIAALRGRRLRPVRADDHAAILRMLGDRHHDLTALRTQAVCRLHAQLAALVPGGVAGEMTAERARVVLRTIPAPDGVIAERRRQTADLISDVARLDIEVKAIKARTRLAVNASKTSLVELHGVGPIVAALVLGHSGDVTRFASRHHYASYNGTAPIEASSGPRTRHRLNTRGNRQLNHAMHMIAITQIRNDTPGRDYYHRKIDEGKSKKESLRALKRRVSDAVYRQLLVDAHRTRP

SEQ ID NO: 175927 - protein, 338 aa, unidentified
MNKFSGIDLHSNNSVVVVSDEADRIVYQRRLPNDPVQIRAALAPHREDLVGVVIEATFNWYWLVDDLMKDGYCVHLANPAAIRQYDGLKYSGDFADAAYLAQLLRLGLLPEGYIYPAQGRQVRDLSRKRMQLVQCRTAQILAIENLFSRQTGGQMQGERVKRLDEAQVSGFGFAPDVLLAMQANLAVMQTLQEQIGTVEKRLMERVKQHPDYALLNSVPGIGPVLATTIMLETGTISRFAKVGNFSSYCRCVDSRRESNSRKKGEGNTKNGNKYLAWAFVEAANFAIRSCPEAKRFYERKKRARNGIVAIKALAHKLARACYYMLREHKRFEVTRCFG

SEQ ID NO: 175928 - protein, 349 aa, unidentified
MSIIWIGCDFHPSFQCIAMLDTETGEYVQRKLDHRSGEAVRFYEGLKGRRVVIGMEACGNSGWFEQMAAEMGHELWLGNAGKIRSLVVRKQKTDRRDAEHLLELLQQDRFPRIWVPSAKMRDSRQLLLHRHKLIRMRTQVKNELQHLALNQGLQQKRKLWTQAGRKQLESLPLTGWTGQRRQDLLQMLDELEGKIGKLDEAVKEEAAQYEDTALLQTQPGVGPITALAFVLTLGPVERFGRSKQVASYLGLIPAEHSSGGRQKLLGISKQGNPFLRTMLVEAGQSAARWDPELKRCYQRLAHRKHRALAKVMVARKLAVRLYWMLRTHKPYAPVRMQGSPSHSVVAGND

SEQ ID NO: 175929 - protein, 340 aa, unidentified
MQEQLSRQYVGIDLHRRRSVIVRLDQAGNVLGSVRVDNDPVEFALAVAEAGEGPEVALEATYGYYWAADLLKDNGANVHLVHPLGLHWDSRRVKNDIKDATELAKRLWREDLPEAWVAPPEVRELRELVRCRAKLVALRTSAKAQVHAVMAKCGILPGLDDMFGPGGQVLLDKMDLPQPYRYRVDSLRRLIEVFDDEIDIAESQAHKRLARHQGYRAVQALNGVGRVTAAIFVAEIGDVSRFADARHLCSWAGLTPSHRESDDKAHRGHITKQGSSLVRWAAVEAVARYHGGAPIAPAFMRIQARRGNMVARVAAARKLLTLVFYGLRDGEIRCLKKKAA

SEQ ID NO: 175930 - protein, 415 aa, unidentified
MKVVYPICCGVDVHKSFLIGTIITTTGGVEPHYQKKRFSTYNNDLHRFCNWLLSNNCKNVCMESTGKYWVPVFNILEERGIATTIANPKWVKAVKGNKDDTKDSKWIGDLFRLGLVPGSFIPSKEIRILREFTRYRYKLVSMKSSEKNRFQNAFTVCNIALDSVVSDMFGKSAAAITNYLISEDSFDPEYCKSLLQRSLKKKADSVIESIEGYSITNEQKLRMKIIRSHLDYIQSAIADVDSSIDAMVAKHENLIALLQTVPGIDRNSAITIISEIGTDMEQFGSSKRLCCWAGLTPGNNESAGKKKSVRITRAGVYLKPALVQVAHAAVKATDNSYYRLKYEQISKRRGKKRAIIAVARMILTAVFQMLSTGEAWNPSDLFKVDMPQPLKEKQLEKAVKQAMKFLEKQGIFVPA

SEQ ID NO: 175931 - protein, 350 aa, unidentified
MDRYIGLDAHASSCTVAVEGPSGRRLNSQVVETNAGALIRVLRGIPGTRHLCLEEGTHASWLYEVLSPHVEEIVVAGVSESRGPKSDKLDAFGLAEQLRIGAVKRKVYKKRGEFGALGHRAKAYTLLVSDSVRVQNRIKGLFRSRGVAVAGKSVFSVAEREAWLKKLPATARSLAELLMQEQDGLLDLRKKAEKAMLAEARRHRAWRLVKSCPGLGEIRTAQLLPIVVTPYRFKNKRSFWAYCGLGIVMRSSSDWVRTQSGEWVKVPVQQTRGLNRNSNRTLKGIFKGAATTVIGQAKDEPLYRHYLHLLDGGTKPNLAKLTLARQVASILLAVWRNEEVYDPARVGQAV

SEQ ID NO: 175932 - protein, 339 aa, unidentified
MAKARTLVGLDVHATKIVAAVLDADTGELKSFAMKGDALAAAGFCAGLPRPVRVAYEAGPTGYGLARELAKRRVDCVVAAPSKIPRASGDKVKTDARDAELIARLLLAGKLHQVRVPGPEEEALRDLVRARETLRLDLMRARHRLSKLLLRHGVQFDDGRAWTERHRAWLKTVELEWPAAQATLLDAQGSIEALVHRREHLEREIVAILPSSPWRREVGRLRCLRGVDTLTAVGLCAEIGDFERFARAEQLMSYVGLVPSESTTGNNRRLGSITKTGSAHARRLLVEAALHYRKTPALRKTLAERQKPNRPKRSRSRGPRNNDCTAPGPGSRHARSAAP

SEQ ID NO: 175933 - protein, 465 aa, unidentified
MRTDNKLWRNRKAKKELARRLQSENPGLEVVHPHAAGIDVGNSAHYAAVRPDRDSQPVRRFECFTADLYRLADWLQNCGVKTVALQSTGVYGIPLYDILEERGFEVYLVNARHTKNLPGRKSDVQESQWLLKLPTYGLLNNSFQPTVKIRMLRTYWRQRLQHVTGAATCVQRMQKALTQMNIQLANVISDLSGVTGQLIVRAIVGGERDPWKLAELSHPRIQASRAEIAKSLEGHWRQELIFVLQQEMEMYDTYQRRVAECDQELHKHLRAFADTVSPPGKEELPPKKKKKQNKNNPHFHLAEELQRITGVDLTRIDGVDVMVAQTVISEVGLDMSPWKTEAHFASWLGLCPDNRISGDKVLARGTRHVLNRVATALRLGASTLLKSQTYLGAQYRRLRTKLGAPKAITAMAHRLARLVYRMLKYGQHYIDKGAEYYEQRNRQQQIDFVRKKAALLGLQVTPAHG

SEQ ID NO: 175934 - protein, 345 aa, unidentified
MEMKQIGSIEYFIGIDVSKLTFNYCLRYGGGKVINGKASNNIESIKEFVFSLKDIPGFKLTQAVFGMEVTGVYGLTLMNTLTKMKGKVVVEPATKIKNSLGIVRGKNDKLDAARIARYLIKNLQELKLWTPRRLIIDELDSLSTLRDRIVRVNSILNVPLDEDDGFINHEISDSNRKLCAPTISGCQQLILDIETRIKTKWKNDERCNRLMEIMLSVKGIGNVTALEMLIRTNEFKSITTSRAFASYCGVAPFECTSGTSGKKISRVSPLANKHIKSLLHNCARTCIGYDQEIKAYYRRRVEVDKKNKMSVINAIKFKIICRVFACVRGERMFQQGYVSKAPAVE

SEQ ID NO: 175935 - protein, 332 aa, unidentified
MDNFYFIGVDVSKKKLDFCVLFEGKVLREEQVSNHQQAVARLIGELKNDLEMDNEQFLICAEHTGQYTFPLVCACKSVECKLWLENPSQIKYSSGMQRGKNDKVDAKRIAIYASRFGDKVKYYDRPTEEIERLKQLERERALYVTDLAKYKGQMYDQKDFMPAALYRKKTKRMKGLIQELQAAIDAITAEMEKIIGSTEVLARQMELLMSIDGVGKVVALNVIIETEAFSRFDNPRKFCCHAGVAPFSYTSGSSQHSKNKVSHRANKNIKTLLHMAAVSVTHRKEGELKAYYMRKVEEGKNKMSVINALRAKIVARMFAVIKRNEFYTPIYS

SEQ ID NO: 175936 - protein, 422 aa, unidentified
MIKKRIRQAAETLTERTAAETYSAPPPPSKGKIVGLDCHPDTFTAAVFVGQTPHDARKIDTQNDLSFAGLLKWAAAELTPEDIILLEAGSNSFEVCKRLADLGLRTCVLESCHVGRHAKIYADNDKMAAARIALVYLAGNAPCVWVPDEKSRERRELLHCYRKSVRDHTAATNSLKSYLNGHGVRLGKRSLEQESTTRWIHQELQGSGLQTQLLNEHLANIVESKERRRRLYRLIATEMAADPIMMRCMKVLGVGIVSAFGLVAVIGEIWRFHSPEKLVAYIGLNPGQRQSGKGKNIQMGVGGRGRGDLRNLLIQGAQAVLRMGRHTVLGKWGWKLFARKGNRNVAVAAVARKLVVQVWHLLQGNPPLALESDKSFCLKLSKLASFLGSAVRREVGLAASLAESLKILLQRCNPCPDSIPQT

SEQ ID NO: 175937 - protein, 586 aa, unidentified
MSTTTGLDRIGVGIDTARYGHRVSFLRPDRQPAAKPLTVLENCAGYQALKERLVQLHENYPHAHFHVRIDAAGQYAVNLEQFLRGLDLPMTLSIGEPKRNKDYQKAHFPKRTTDDTESQAMARFAVVEQPDATPAPSAAMILLREVAGRLEAQVKQTTQATNRLHNLLARVFPELATLTDDIASGWVLHLLDKYPTADRIAQAHLASLEKIPHLSGDQARALHQAAGQSVASLRGSVAESLVSALVAQVRHCQNAEKAMRKLLTKAFADLPASPHVQVLTIPGIGEATAAALVAKIVDIKRFATPDRLVGYFGVFPEENTSGVDRHGNPLPPGTLSMSRKGNDLVRGYLWNAARAAIRHNPAIRVLSRRLRAKGTRGDVAMGHCMGKLLHLVFAVWKTDRPFDAKHFAWEEPGANPVPTTTAGDRDARATPAAHKDAVGHKRDVPAEKVVTTAGSHGEPAPAPVKLATPPNSVARPRVDFAFLRQQVTMKQVLEHLGLLGQLRGPGDQRRGPCPVHSHPADRDRTFSVHLGKNAFQCFQADCGVKGNVLDLWAAIHRLPLYDAALHLAETFQVPRNREEEPGKGTR

SEQ ID NO: 175938 - protein, 335 aa, unidentified
MKKIYVGIDISKEKCNLCFRSGLEIVREEECSNDVKALKNAFKAALKTLGVSLKDVLVCAEYTGRYIYPLTVACQELDIFLWMDDPTRIKNSMGLTRGKNDAIDAARIAEYAYRYSDKAVRYCIPDAALVSMKSLLTDREFLIIDRKRYQSQLTDQKKYMAPGDFKHKNSRWKKVIRSIDEQIAAIDAEIESLIAADPVLTRQKELLKSIDGIGDRIAINMIAITGGFTRFQNARQFCSFAGLTPYKYDSGTSVRSKAKISKRANQTMKALLHLAAVCAATHMKDGEYKDYFERKTGDGKHVMCVLNVIRAKLVHRMFSVIKRDSEYTKEYKPAC

SEQ ID NO: 175939 - protein, 412 aa, unidentified
MFKIFRNNCCGLDVHKTWIYACIGITDANGRTEYKQARFSSFSKGLRELAAWLAKYSCIEVCMESTGKYWIPVFNILEKSCFVTLAHPKYTKPQKGNKTDRKDAKWICNLFMCDMIKPSFIPSPEIRQLRDLVRYRVKLTNMLTGEKNRAQNCLTISNLKLDDVFSDVFGKSARSITNYILEHPGETFDVSPFVDPRCKTPVSEIQAAVDGAISPEQAVKLRQCLAHIDELEAHRKEIESEILQIAEPFSAVLDLLYTLPGLDKNPMTAIAILSEIGPDMSVFPSSKHLVSWAGCCPRNDQSNQKVKSRRISRAGSYLKPLLVQVANALIKSKKHPEFKERYHRIKSRRGHKKAIIAVCKMLLTAIWNMLSKLEPYNPDGFLEHRPVKQEKILTVSQALELLRLRGYTITNQ

SEQ ID NO: 175940 - protein, 429 aa, unidentified
MNSTRNKKIGQVKETTMIVGIDIGSEKHYFRAFNWRGIELTRKSVAFSNSMEGFNSFYNTIVELMQKSELEEALVGIEPTGHYWFDLGQFMGEKDIKFVMANPHHVHKTKESDDSSPSKNDRKDPHVIAGLVRDGRYFYSYMPTGAYAELRNASNRRFVLVEEQTRAKNRLQKWIAVYFPEYKGIYTHIDAKGGMLVLKKAPTPEEIVRLGVEGIIKIWKDAKLRGNGHKKAMLILAAAMRSIGLKAGLTEARMEIQALIEDYELQTKRLERVNDLIKGLCQQVRYADKLLEIKGIGITTVAGFIAEVGDITRFDSTKELQKLAGLELVADSSGKHNGKTKISKRGRKRLRYLLFEAAISVVGKNEEFKEIHRYYTTREKNPLKKMQSLIVVACKLIRVFHAILTKGIRYDASKMLKDIRHPGEQLKDA

SEQ ID NO: 175941 - protein, 430 aa, unidentified
MKSTQNKKIEQVKETSMIVGIDVGSEKHYFRAFNWRGIEITRKPIPFSNSMAGFDMFHSAVVELMETNHLEEALVGFEPTGHYWFNLGQFLSGKNIKFVMVNPHHVHKTKELDDNSPSKNDRKDPRIIANLVKDGRYFYTYMPTGVYAELRNASNRRFVLVEEHTRAKNRLHKWVAVYFPEYKGVYTQIDAKGGLMVLKKAATPDEIIKLGVDGIQQIWKDAKLRGSGRKKAMQIVTAATNSIGLKEGLEEAKMELLDLIEDYELQTKRIERVNDLIKNLCSQIKYVDKLLEIKGIGITTVAGFFAEVGDITRFDNAKELQKLAGLELVSADSGKHNGRTKISKRGRKRLRYLLVQAAVSVIGKNDGFKEIHRYYTTRDNNSLKKMQSLIAVACKLIRVFHVILTKGVDYDASKMLGDIRRPGVADRKAA

SEQ ID NO: 175942 - protein, 419 aa, unidentified
MSKSMFCGCDVSLENNTVWLMLGDGSQPTKLFNADNNQLGAEALVERIYNIAKEHCVSDILIGTEATSMYDWHLLEYLAESKLALEFSLKLYRFNAKWIKNFKKSLAPRGKTDPIDSFAIAERLRMGRLPKEYIPDTKYQPLRKLTRFRFHLMQQIAREKNFFLANLFLKASAYSRVSPFGSTFSATSLAVINDFFSVDELAAMPVEELTEFILEKGKSHFSKPSEIVDNLKRVARESYRLKPELTPTVNLILASTFNNIRCYKDQVKLVDQAIAENLKAFKHTLESILGIGPVYAAGILAEIGDVHRFQNDSSLAQFTGLTWPKYQSGKFQAEETRMSHAGNQYLRYYLVEAANSVKRCDATYKAFYEKKYKEATKHHHKRALVLTARKLVRLVWTLLTRQTLYQPGYCSFEDLSKIS

SEQ ID NO: 175943 - protein, 317 aa, unidentified
MKITTIGLDIAKSVFHLYAVNRMGRYVQKKQLKRRQLLPYLARLEPCVIAMEACGGAHHWARELKVFGHEVKLIAPQYVKPYVKGNKNDYNDAEAIAEAVQRPGMRFVPIKSVDQQDIQNLHRQRERIKKARTALVNQVRGLLTEYGIVINQGVTAVRSGLPDILEDADNGLTLRSRELFADLLEELRLLDERFKHSERQIVASNRGNEVCQRLDEILGVGPITASAAYAAAGDGKDFVNGRHFSAWIGLVPGQHSTGGKPTLLGISKRGNAYLRTLFTHGARAVLRHSATKTDRFSVWPQALLERRGHNKVCCGGQ

SEQ ID NO: 175944 - protein, 444 aa, unidentified
MAARKREVFELAHPNAAGIDIGSASHYVAVPPDRDDEPVREFKSFTEDLERLADWLLLCGVDTVAMESTGVYWIPLFELLESRGLMVYLVNARHVKNVSGRKSDVLDCQWLQQLMSYGLLSGAFRPNDEICALRSVSRQRDMLLSYQARHVQHMQKALAQMNVQLANVISDIVGETGQKIVRAIIDGERDGAKLAKMKNVRIRASEADIAKSLRGNWREEHLFALKQAMALYDAYGERLAECDRQLEAMLIALQPDVVGDPGKNRRRSRTRNAPRFDVRLYLFGMCGVDLTRINGIDTTTVLKVISEVGSDLSRFKSAKHFASWLGLCPGTKISGGKILSGASKRTANRAAQALRMAAASLRSSQSALGAYYRRLCARLDRPKAITATAHKLARLIYTMLTKGAEYTDQGQDYYEERYRQRVMHHLAKRAEKLGFQLIPIPDAA

SEQ ID NO: 175945 - protein, 344 aa, unidentified
MIYVGLDVHKRFSRMGTFDPTTGELQDLGEVSNERQALAAKLEMISSPKTVVLEAGRTSYHMAGVLEPIAEEVWIVDPGEVRRLQRGIAKTDRRDAAGMAWWAAKGALTPLWRPDAETLDLRELTRGKTTLARLSTQVRTMIRTLLARHGYECPQRDLLSDRAQRWLDQVQLEGHAGKMLAALRGILTLIHTQAEIFEREVDQASARHAAAQRLRSIPGIGSFLSLSLVAEIGDIRRFPSPTHLRGYSGLTPAVRQSGDRDARGPLTKTGNRWLRYAAVLAAQRMSQMRAPDPRLKRTFLSVAFRHGCNPGKVAAARRLLDLIYHLLTREEDYRPAAAATVTKT

SEQ ID NO: 175946 - protein, 407 aa, unidentified
MIKHVVAFDVSMGKSTMVIYNRHRQCEFEGEILHNRPSFEQLHATLQQLKTKDEQAPEIVFEATGVYSKGLEKFLQDHQYTYCCLNPIQANEETKTMRRQKTDKADAHGLARTHFRNERAHTYVEEDYYGQMRAWSRYYNELDTEINHLHNRMHAILQLSFPELETVFSTRSALFLNIVQLYPHPDEVLDHSRTIIRNRLKQNTKKNLSLQRAEAKGQCLMEAARLSYPAISRNDIRCEQVRDYARRIRDLKEKKEQLIKQMVTLSEEKVEYQVLMSYPGIGETTAVRIIGELGDIRRFKTHKQVNAYVGIDLRVYQSGKHQMKDIINRRGNRHLRKILFFMVKTMITLRRKTKNHLVEYYDKLKTQPQGKPHKVACVACMNKFLKLAFHLITHGKTYDYEIATNYS

SEQ ID NO: 175947 - protein, 430 aa, unidentified
MTMLIEEEEAPALPIVRERCAGLDVHRSTIVACATFPLAGGRLKKMWKEFATTAAGLAKLAAWLKELEVTHVGMEATGVYWMPVYAALEAAGGFDLTVVNPHHAKALRKRKTDVKDAEWLAYLVRHDLVNKSFVPAKPFRDLRDLTRYRRSLVEAQSSERRRLIKLLEAADIKLAGVMSDVFGVSGRAILRALISGGHSPAEMAKLARGKLRKKRSQLIEALSVDLDGHRRRLLAMQLARVEATEADIAVLDKQIATLLAPYKDYVELLTTVPGIDWLTAAIIIAEVGVDLSAFPTVRHFAAWIGVAPGNNESAGRNKPIGARKGNPYLTTALCNAATSAAHRHGSFFKATYHRLKSRRGGGRATLAVAHKIAIAVYHMLTTGTPFRDLGEGHHDTKNVRRTANRYVQRLQRLGFAVTLQPVDLEIAAVA

SEQ ID NO: 175948 - protein, 400 aa, unidentified
MQELLITEDANLQNVFFFHNDLEGFNFFNLWVETLKTENKKTAVLIGCEPTGHYWFAFAKYVNDHQKRLVMVNPFSVKKIKELDDNSPKKTDSKDPKTIAKLVVDGRYSIPYMPEGIYAEIRDLVYSRDRIMKQHNISANRIQRWLAIHFPEYLGLYTRFDAISGLAVLEKAPLPKDVIALGVNGIRKIWHDKKMRGRGVTEDRAKTLVEAAHNSVGLDGGIGTKSELYMLLEEHRLWTSQLESVNKVLEEMILKVPHVEKLLAIKGVGSITIAGFIAEVGDIRRFDSPKQIQKYAGLELVENSSGKHKGRTRISKRGRRKLRKILYQVRVPLLARNKEFREIYDYYVTRVKNPLKRRQAMVAVSCKLIRVFYAVLTKGVEYDRFKMMSDIHRKSDIIAA

SEQ ID NO: 175949 - protein, 340 aa, unidentified
MAKDVKFYLGMDVSKGWVDICLTSVVDHKKQAILTERFNNDAAGIKTMDKWLKKQRVLFNDNSLMVIENTGVYHRRVWEYCSASKLPLYIGNAAHIKWSFGLVRGKNDKIDSQRLCNYALKNADDLKASPVLDPVFLQLRDLMTARTRLLNQINSIKVYLGELKLSNNKAIQEALEAAHQAAIKGLKESLKIVEKQIRQVIGENAAIKNNYDLLISIPAIGHLTAVYLICCTCNFTNKVSGKQLASYGGVVPFGNRSGSSIKGRDKVSNMANKDLKKLLSMCAITAIRVYPEFRNYYDRKLNEGKHEQSVLNAIKSKLALRAVAVINKQKKYVDNYQKAA

SEQ ID NO: 175950 - protein, 484 aa, unidentified
MAAKKKDARTGPDRTSAGAAAEHGGEGAEVAEDLVQVVEYAAAIDVAKGSGMVCTRVPGSRPDRRRQTVWRVEATYAAVTALMDHLRCEGIQRLVLESTSDYWRIYFYLAEAAGLEVWLVNARDVKHLPGRGKSDRLDCVWHCKLNERGMLRRSFVPGEPVRDLRALTRTRARLAQDQARHQNRVEKILEDAQLKISVVISDLFGASGRRFLDALVAGERSPKALAALGDPRLRATRQQLEDALTGRFRDIHAFEISTHLRIIDAINDEIGRLDEKIEEQLALVPRTAPCCTACGLAGGGHAPGCADEQVPLLGLAGRLDEITGIGAVSARAVIAELGTDPSVFPTPGHAAGWARLTPRTRQSGETARPGRTGKGNRYIRGALGQAAMTAAKTDTRLGALYRRIARKRGKQKAIVAVSRVICEIAWILICDPAARYHELGPDYYSPRSPARQTRDKIREIERLNPGKKVILADAPGAGPGAAAA

SEQ ID NO: 175951 - protein, 408 aa, unidentified
MELQPLFQRVIGLDIHQAQVTACAMLTEPDGSVTIERRQFGAFQRDRRKLAQWCASHRPDTVVMESTGIYWKSPYAALEKVGIQAQVVNARHVKHVPGRKTDVGDAEWLATLARAGLLRGSFVPPAQLRELRLIARQRQKLVGMLSSEKNRLHKVLTDGGIRLGVVVSDIHGQSARAMIHALIQGDSPESVLRLASRRLKASQEELLDALQGELTASHRFVLEEMLRHIEHLEAQIARFDAHLLEGLEPQKKALELLQTLPGIDVVGAALLLVEIGDDMSVFGSANRLASWTGLCPGNNESAGKRKSGRIRKGNPYVRRILCECAHAASRTQCALRAKFQSLVVRRGHKRSIIALAHKMLRIIYFMLSHGTYYRDADTDYEALSVQRNASRWIKKLIEFGYLSQEQLA

SEQ ID NO: 175952 - protein, 285 aa, unidentified
MLHAGIDMHKKFSVATVVDDDGEEIVRGRRLENSEEEIRRFFDGFDEELTVVLEAGPSWQWMCDLLDELGLDNKLCHPLKTKAIASARIKTDKIDSKILAHLCRMDFIPEAHKADRETRHLRELLRFRASMVRMRASVKNRVHSLLAKLNVKHSYSDLFGKEGTRFLRELTLPSVYREALDGYMKIIGALSAEVKKAEKRVSGEYKGSPEAQLLSTIPGVGPLLALTIASEIDDIDRFHSAKRLSSFAGLVPSTSQSGGNTHHGKITRQGSAWLRWALAEVISDN

SEQ ID NO: 175953 - protein, 414 aa, unidentified
MDVIIERVCGVDIGKAVVAATIRAPAPGSGPKRREVTRKFPTFAGDLDRLVAWLAGEGVTAVAMEATSDYWRPVWWVLEQAGFELVLVNARDVHQLPGRKTDVADSAWLAQLLECGLLRSSFIPPPEIRELRDLTRYRKRLVQDRTREAQRVEKVLEDTGIKLSSVASSVLTKSARAMIDALIAGERDPEVLADLAQRRMRAKIDELTLALRGRFRDHHAVLLRVHLDHIDQIDAHIATIDARIEDTTAPFERHLGHLQTMPGIAEVAARVVIAEIGVDMTVFPTAGHLASWAGLCPGNNESAGKHRSGRTTPGNPWLAETLIQAAWAATRQNDSWLRARYYRLAKRVGRKRAIIAIAHSMLIAIWWMLTHDCDYHDLGGDFYDRFTNPEAETRRLLRRLEHLGHHVTLHTTAA

SEQ ID NO: 175954 - protein, 342 aa, unidentified
MDATTYGLDVAKRVFQMYWVEAETGEIVNQRFDRDELIRFLARRPPGRIALEACGSAHWWARKIKALGHEVVLLHAKFIRPFVQTNKTDAADARAIWTAVQQPGMRTVAVKTEDQQAMLSLHRMRALLVKFRTMQVNQLRGLLYEFGATFRAGRAAGLAEIRARTAELEDALPGTMMCCLQDQLRRIEELQRDIDLLEKRIGVWQKQDAACHAITAIPGIGRLTATALVATMGDAKSFRSGREFAAFLGLVPRQSGTGGKVRLGPMSKRGDPYVRTLLIHGARSVMYNAKVPTPWQRDIQARRPANVAAVALASKFARTAWAILARGQEYQRDYMSVRPANR

SEQ ID NO: 175955 - protein, 404 aa, unidentified
MNAIGIDVSKGKSTVAVLRPYGEVVVSPFDVAHTGSDLRALADLIKKLPGETKVVMEATGNYFESIARYLHEQNIFVSVVNPVLISDFGGNTLRKPKTDKKDSIKIASYALTYWLDLKEYTPQEDLRKSLKLLNRQYQQSIKLKTMMNNNLISLLDLTFPGINKLFTSPSRESDGHEKWVDFVLEFSHCDMISKLTIKAFAKKYKKWSDKNSYHFTESSCEKIYDFAKDCVSSVSSDKAIVFSVVQAAKMLISATENCHAIQSEMNRVASKLPEYDTVMNMYGVGKAVGPQLMAEIGDPRRFHSRKAITAYFGYDSENNDSGQKTTRSNPMTKKGSGALRRTLFIIMQVLLQTKPQDNPVYDFLIKKKSEGKHYYSYINAAANKFLRIYYARVKEVLNVSEQIT

SEQ ID NO: 175956 - protein, 371 aa, unidentified
MKKALSYYAAIDLHGNNLVIAIVDAQGRRIKDARLFCELYEVEKFLQPYRSRIATVAVESTFNWYWLVDGLQDLGYEVVLANPAALVQYDGLKNTNDKSDAFFLAEVLRLGIMPQGYIGERKLRAVRDLLRRRASLVAKRTALTLSLRNLQMRTRGDCPICSGHIQKGHAQELVDLFDDPAEKMTAEIQKAHIDAFGRSIARIEKHVLASARELPRFAQLIRVPGIGKILAMTIVLEVGDIGRFPSPENFASYCRMVKAARSSNGKKKGENNAKCGNRYLAWAFIEAATFIRRYDVRAQRWHDRKAAKTNPVIAKKALGCKVAKVVWHILKHGSEYDGERLFGPEKNRGTAQANHENFGRASTSQKKGLKT

SEQ ID NO: 175957 - protein, 330 aa, unidentified
MKVPHIIGADLSKKTIDFASHPFNSHLQINNHSEGFQELMTWLSNQKINASEILIVMEHTGLYSCALEEFLHLNGIAFSKVSGLAIKRSMGLVRGKNDKIDARRIAQYGFEKQHNLPIEQPPNEKFTKLKLLHSTRAKLVKQRAGLITTVQEYQQVLQLKKSELALQVHLRLIRALDLEIKKLEAAIEAIIKTDERINTNYRLLQTIKGVGKVVALAMIIKTGNFTRFINSRKFASFCGTAPFEYRSGTSIRGKTKVSHLADKAMKTLLDLSAKSAIQCDNELSEYYLKRIAAGKAKKSTINIVRNKILHRVFAVINRQTPYQQIFNPTL

SEQ ID NO: 175958 - protein, 311 aa, unidentified
MTSAGIFVGIDVAKAQLDIAIRPSGEYFTAPHDDPGVSGVVQRLCALQPTLVVLEATGGFELDVASALGAAGVPTAVVNPRQVRDFARSTGLLAKTDRLDAQVLAHFGEVLRPAARSLPDAQAQELSAVLLRRRQLVEMLVAEKNRLPMATRRIRPPLQRHIEWLQQQVADLDRDLGALIRSSPLWRAKDDLLRSVPGVGPVLATTLLASLPELGTLNRQQIAALVGVAPLNRDSGTWRGRRTVWGGRAHVRAVLYMSTLVAVRHNPRLRSFYVRLRDAGKVPKVALIACMRKLLTILNAILKHQTPWALP

SEQ ID NO: 175959 - protein, 340 aa, unidentified
MKIIGCDFHPSFQQIAMVDTETGEQTERRIAREEAGEFYRGLSGSVRVGMEASGNTLWLERLLAELGHELWLGDAGRIRAMEVRKQKTDRRDAELLLRLMIQDRFPRLWIPSQEQRDLRQLLVHRHKLVGMRRQVKNQLQHLALNQGVQQKHKLWTRAGRKLLEELPLEGWTWRRREESLQLLDDLEGRIVPLDQAVKQAAEKDRVAELLQTHPGVGPITALAYAVTLGEIERFQHSRQVVSYLGLNPSEHSSGGRQRLGGISKQGNTMVRSLLVEAGQSAARLDTELKRAYQRLKHRKHSAVAKVMVARKLAVRLYWMWKREQPYAATRMQGSPSHPVA

SEQ ID NO: 175960 - protein, 322 aa, unidentified
MQGKVPPERSATRVYVGIDVCKARLDVYIHPVGQRLTFSNESDGIKKLKRSLKAHEGALVVMEATGKLHRAAHRSLHAGGFAVAVVNPLRSRLFAQALGALAKTDAVDARMLAILGESLAPAPTEPASDRVETLQELVAGRDAAVAARTALRNQLGASRSRVMAQEIQRQLHAVATAIANLDVEIGRLIADDPVLARRLAVLSSIPGVGAVTASALIAGLAEIGSLSAKQAAMIVGLAPIACDTGEHVGARHIRGGRGHVRRALYMAAVSAARCNPDLKAFYDRLRAAGKQAKLALTAVMRKLAALANTLIRENRHWTPKHA

SEQ ID NO: 175961 - protein, 343 aa, unidentified
MDYFAGLDVSVKETSVCIVDDAGKIVREARVASEPEALLQVLTNTIYRFKRVGLEAGPLSQWLYSALAEAGLPVICVETRHLRAVLKAQINKTDRNDARGMAQMMRAGLYRPVHVKTLRSQKLRVLLTHRKLLQSKAIAIENDLRASLRNFGLKVGMIGTMKFEARIRELVERLPDLAVLVEPLLIVRRVVREQLGILHRRLLAIVGDDDVCRRLMTIPGVGPVVALTFRVTVDVPARFRKSKAVAAVFGLTPAKYQSGEKDRTGAISRCGDEMMRIMLYEAAQSMLVRTAKWSWLKAWAMKIARHRGMKKAIVALARRLAVIMHRVWVDGTAFRWTRELAAV

SEQ ID NO: 175962 - protein, 389 aa, unidentified
MLIQPIAPVAKNEFAPVFVALELSRSKWLVGVGTAQKWTVRRHQVQGGDLDGLLELLGRISAGEEKRSGLPVQVHVCFEAGRDGHWLYRALKAAGYDVYEIEPASVSVDRRARRAKSDGVDVDKLVRTLARLLRGEFDACRVVEVPSEAEEDAKRPHREYERLVKEQTSHRNRVKALLFAQGIREFDPMASGRLERLAALPIMPRLKAELSRECRRLARIIDDIAEIEAEMKAEIVPSKKARPASAASSTPDPAQTKVAQLYRLKSIGVHFSTVLVREVYYRTFQNRRGVGQYIGLAPSPFQSGDMARDQGIAKAGNKRARKAMIELSWLWLHHQPDSALSKWFRRRVGDQKGRVRRIAIVAMARKLAVALWRYLETGLIPEGAVLKRA

SEQ ID NO: 175963 - protein, 349 aa, unidentified
MQHYAGIDVSLELLSVCIVDAKGKIVKEAKVGSDPDTLVAFLRGLDLAIERIGLEAGPLSQWLHAGLTSAGLEAVLLETRHVKAALSAMTVKTDRKDARGIAQLIRMGWFRAVHCKSAGSQEVRALLVARKLLLSKLLDVEFSIRGILRGFGLKMGMVTRKRFEARVRELYADHAMLEQICSAMLTARSALQTEYAKLHKALLVIVREDEVCRRLMTTPGVGPLVAITFKTGVDDPSRIHKSKAVGALFGLTPKKYQSGETDVTGGITRAGDEMVRTALYEAASVLLSRVTRFSALKRWGMDVAKRRGTKRAKVALARKIGVILHRMWVDMTSFRWTKGAPTTMRLARV

SEQ ID NO: 175964 - protein, 291 aa, unidentified
MLIIGCDFHPRFQQIAFVNTEGGECGQRRLEHRGEAEQFYRSLAGQAVRVGMETGGSSRWFERLLGELGQELWIGDAAKIRAAETRKQKTDARDAEHLRQLLCSGQFEKMRIWIPPAENRDLRQLLWHRHRLVQMRTRVKNQLRSLATSEGMERKPGLWSQAGQKQFQALELAPWAQRRRQDNLELLSELLHRTDPLDQEAAQQAAQHPEAVRLMTHPGVGSVTALAMVLTLGPAERFESAKKVGSYFGLIPSEESSGGNSGWARSANRAVRFCAFCWWRRDRRRRGSIRN

SEQ ID NO: 175965 - protein, 323 aa, unidentified
MEANLGIDVAKKKFDVALLRNGKYKHKSFENKPSGFDSLVTWLKQHDVVLVHACLEATGSYGDALAKFLFHAGHIMSVVNPSRIKAFGESELLRTKTDKTDAKLIARFCERMNPAAWQPDPPEIEHLRALGRRRDALICMRTQELNRIGATDSSVNDSIQKVLCFLEKEIDEISKLIKDHINNNPDLKKKRDLLITIPGVGAVTIEAILSEANAFEKFDTIEKVVAYMGLSPKERTSGSSIKGKPSICKMGSARLRKILYMPALSAIQHNPSVNALYKRLKAKSKNGMIIACACMKKLVHIIYGVIKNGIAFNPEHNLKNACI

SEQ ID NO: 175966 - protein, 349 aa, unidentified
MRRPKDKLMAGIDLHGNNLMIGLVNQDGKRVKHQQLECDLNAVVEFLAPLKSQIQAMTVESTFNWYWLVDGLSQRGYPITLANPAKIQQYNGLKRSDDLDDAYHLAELERLNILPTAHVYDRQLRPVRDLLRRRVGLVQQRTALVLSFRSLHARTKGQPLALADVKKMEPEQAPQLYEHPANQLIAQVQVEHIQGLGRSIQRIEKAVLACAREIPLYERLLTLPGVGKILGMTITMEVGDIQRFASDGQFASYCRLVDAKRLSNSKIKAENNQKCGNKYLAWAFVEAANFARRYDENCRRWYDRKAAKTSKVIATKALGCKLAKASWFIMARGCVYDERRMFAQPAPGK

SEQ ID NO: 175967 - protein, 470 aa, unidentified
MAFTPTTEETAMPRSQRRTTRAVTTPVLHPHAAGVDVGATELYVCVSLDRDPQPIRRFGTFTEDLLAVATWLQQCGVTTVAMESTGVFWIPLYQILETRGLEVCLVNARHVKNVPGRKTDVQDCQWLQYLHSVGLLRGSFRPPETVCAVRSLLRHRDSLVQLAATHTQHIQKALTQMNLQLHHAISDITGVTGLAILDAILAGERDPQVLAQHRNPRITASRETIAKALVGDYRPEHLFTLRQSLVSYRHYQQLIGACDAEVQALLGTFASQVDPAVHPLPPSTKKARRTPRGLPAAPGFDLRTELYRILGTDLTQVPGLQTPTVYTLFAELGADLSPFPSGAHFASWLGLCPDNRISGGKVLSVQTRRVKHRVAQVLRLAAQSLFRSQSVLGGFFRRMRAKLGAPKAITTTAHKLARIIYHLVTMRQPYDESRLAAAEAAHRRRTESRLRSQARALGFQLVSAPVQSVS

SEQ ID NO: 175968 - protein, 407 aa, unidentified
MTIYMGIDWSQKKHDVCALNEKGEVIARLTFPHTQNGFHQLDKFRQKLAASVAECQIGIETAHTILIDFLWSRGYENLFVLAPSAVKSARKRYGQSRAKNDRRDAYIIGDMVRTDQQRLQPWRPHSPLIQQIKAQVRLIQYQTKTMVAASNRLRATLFRYYPVATKIFSNPMPPIAWHFVLEYPTPEAATALSWDAFRLFARRCRHRQSDATLRRCYARLQTAEVIAQPQVVLAYQAEAVLLAGQLLQFDQSKKAQLKSLTTLFSQHPDAPLFRSLPGAGPFLAPTLLSKFGDDRGRFPTPASLQTLAGTCPVTNQSGQKRRGFFRTACDRPFRQIVMQWAQSSLASSTWANMYFEQRHSPHRSYNHALRCLANRWLAIAWKVWQSGNPYDEAFHLQQRKNRLLSHR

SEQ ID NO: 175969 - protein, 344 aa, unidentified
MKSETSTSQLYCGMNLHSNNVYCALIDETGACRAKKRLPLDIMRILDYLEPYRDKLEDIAVESTYNWYWLVDGLQESGLPVRLANPAVMTKYSGIKYTDDKSDALWLAEMLRLGILPEGYIFPKQIRPVRDMLRRRMLLVRQRTQTLMSLQSMITRNKAKTISCSTLKRWTLKDVNGCFEDMYLRQTACSLLEVARRQDRVISKLGAQAESMVKLCGSYQRLLTEPGVGLVLGTPIMVETRPIERFKSGGNYDSYCRGVGSRRESNQKKKGENNRKNGNKYLAWAFVEAANYAKRYYPPVCSWFNRKKAKTNRIVATKALACKLSKAAYYILRDNVEFDMEKMF

SEQ ID NO: 175970 - protein, 344 aa, unidentified
MKITTVGIDLAKNVFQVHGIDEHGKAVLKKQLRRDQMAAFFVNLSPCLIGMEACGSAHHWGRKLQSMGHTVRLMAPQFVKPYVKTNKNDAADAEAICEAVGRPNMRFVPVKNVEQQAVLALHRVRQGFVRARTAQANQIRGLLGEFGLIVPQGIGHIAKRVPELIEDGANELPGAFRLLIQRLLDHLKELDRQVEELEDKIHAWHRSSDLSRKLAMVPGIGPITASALIASIGDAKNFDGGRQVAAWLGLVPRQHSSGGKSNLLGMSKRGDTYLRTLLIHGARSVIYRVSQRADACSWISSVVNRRNKNVAAVALANKNARIVWALLAHVRQFDAGYVRSTAVA

SEQ ID NO: 175971 - protein, 446 aa, unidentified
MPAKKKRSPTPPPKVVHPNAAGIDVGSDAHVVAVPADRDPEPVRTFGVFTADLRVLADWLKHCGVTSIVIESTGVYWMSLCDFLEEQGFEVLVVDPRSLARNLKKKTDVHDAAWLQELHAFGLLKSCFRPDQEIRALRTLWRHRDHLVTEAAKLLQMMQKVLVQMNVYLHLAVADIAGVTGMRILRAIAQGQHDPQTLAAMRDPNCKKSKAEIAKALEGTWDAAHLFELKQLLKAWDFYQGQLHGCDREYDKAAGKMPDKTQGRPLPEPQKRPNKHRNSPSTIASDALIFKMTGVRLTEVDGLGASTVLTVLSETGPDLAAKFATEKHFAAWTTLAPRKHQSGKRTKFPAQTASRVAKAFRLAARVLLNCKSVLGNFLRRLRARLGIGTAIRATACKLAKLFYRLITKGEAYRRESTEAEEARQRERQLQALQRKAQALGMQVLPV

SEQ ID NO: 175972 - protein, 436 aa, unidentified
MPLSAMYCVRRCPVKPAIEPSFTALVGIDWSDRKHDFCLQAASSSQREFGVLVHSPEAIALWAKALYRRFGGPIAVCLEIAKGPLVHALQRHEFIVLFPVNPATLAKYREAFVPSRAKDDPTDAQLALELLLRHRDKLQPLQPQGPDMRTLATLVEQRRLLVGDKTRITNRLGGTLKEYFPQALDWFEDRDTVLFCDFLQRWPSLKHAKRARQATLRSFFSAHNLRRASLIEERIHGIRSATALTDDPAVLGPHQLLVQALVAQLRVTLQAIDHFDAEITAVAKRLPDYALFAALPGAGSILAPRLLVAFGEQRERYASAAQLQQYAGVAPVLERSGNKCWVHWRLACPTFLRQTFVEWAGSTIPRSFWASVYYHRQRAKGSSHQAAVRALAYKWIRILYRCWQTRTPYDESVYLLALKHRGSPLIAAMATTPQNT

SEQ ID NO: 175973 - protein, 429 aa, unidentified
MNIKPIAGIDVGKFFSEMVIISPSNELFARMRIHHDSNADMRRAIELLKKAEKDFASRPFIVMESTGHYHKILFHFLQKSGFEVSTINPIQTNCIKNFGIRKVKNDKVDARKIALLYRFHELKPTSISNEDIDCLRSLCRQYYKLSDELTAYKNRFISIVDQLMLNFKEVFPNVYSKTAIAVLEECPTPTAIIEADRDKLISIIQNNSRKSLEWATKKYELLVSKAREFEPLSINNAANVTMLGIHIAMIKTLQENLDKVLKAIHQLIADDLSKDLPAMALTIQLLQSIPGVGFLSAATIVAEIGDFNAFSKPKKLVSYFGIDPSVRQSGEFTGTHNKMSKRGSRLLRRVLYTIALANIRTKRNNEPCNPVLMEFYKKKSQNKPKKVAIGAIMHKLVFIIFAVLRDRKPFELRSPEQHAKILAKNRTVA

SEQ ID NO: 175974 - protein, 386 aa, unidentified
MKTVAGLDVHKGSVYLCILRENGEKIERVYGVLTPQLDSMRDFMAENKVSEVAMESTSVYWIPIWRVLVDSFELKLVNPYFIRQLPGRKSDVKDAQWIAECVMKELIRGSFIPSPLVQRLRLYDRRIFEINAELVRKYSKIDAILQRCNIRLSNYVSNTDCKSYKAVVKQISEGVTSPQELLRHVHKRIINKHGEDTILAALTGVVSDAEIDMLAQYVAESAILEDNKNKCIEKMREICNTEFKEQMKNLQEIPGVSERSALTVLAEIGPDVNAFPSAKHLVSWCGFNPRNDESNKKIKSNKITHGNRFIRIASVQCAWAASRTKDCYFSKFYAFHTQVRKKFKLKVVVAVARKVLVCIWHILKFNVPYKDFEPQKSVTKDCTQFA

SEQ ID NO: 175975 - protein, 345 aa, unidentified
MDERRSCHVMSAFVGLDVHSEHTFATVIGPDGRVVDQRKMLNELVPTFLKLFRVERVGLEASTHVAPLYRILVKEGYVVQVSHPKKTRYIAEARIKSDRVDSRAIAELVRLDALPLSYMPPSDIAELREKVRRRAFLVRERAKLMTKIRGVLAYEGAKPLGGYGLFTRKGVEWLHSMGLEPIECYLRIMAPLSDEIRHLSLQLRHMAGEDGDVRLLMTIPGIGYYTALLVKAEIGDVNRFGSGEQLCSYAGIIPSTYSSGGVTRHGHITREGSRWLRWAMVEAAMTHLKHDTSITRAYHRIAEKKGKQVAQVAAARRLLLCCYSVLKHGRPYRPFFMVRRSINSS

SEQ ID NO: 175976 - protein, 434 aa, unidentified
MRKNRTYRAKSVKNIEWKEVVKGREHQAIHVGVDVGKRAVLAVVRWNGDEFERPWLVKNPDEIRQFVGLLVEMKRGWELTVAMEPTGTYGDVLRQALSDGGLRTERVSPKVAHDYAEVFDGVPSQFDGKDAAVVAELAALGKSQEWKYEVPSVADQEMAYWVDWMDAQRRQLAMWLGRLEALLARHWPEATQWLRLSSPTLLRILKHYGGPKGLADDPQAVPRVTHWGGRYMAAEKTRGLVASARETVGVRQGRIDMRRMQVYAATALAAHQELVQGRRRLAELARGNAVIQAQARAVGVVTACVLWTHLGDPRKYFCAAAYRKAMGMNLTEYSSGEYHGRLHISKRGSATVRRWMYFAALRWIRNGPGRRWYLRKRARDQEGAKRALIGVMRKLAKGLHYIGTTGEPFQPARLFSGRSSRSRKARKASLARRS

SEQ ID NO: 175977 - protein, 325 aa, unidentified
MNALPVLGIDIAKAKFDVELQFKDKPYRRTFCNQAADFAKLNAWLHQLGAPQVHACLEATGVYGDELALFLHAGGHVVSIVNPAQIKAFGQSELSRTKTDKADAALIARFCHQKRPAAWTPPTPEIRELRARVRRLEDLQQMLNQEQNRLSSGLLSESIASSLQASIAFLKAQIKQLLKQIHAHIQQHPDLARQQALISSIDGLAELTAAKLIAEFQDILGYGGGRPLAAQAGLTPRQHESGSSVRGKPRLSKIGHARIRKALYMPAVVAMRHNPIIREFAEHLRQRGKHTMLIIGAVMRKLLHLVYGVLKSGKPFDPHYLKTGA

SEQ ID NO: 175978 - protein, 371 aa, unidentified
MKQFSKFVGLDVHKATIAVSVADAGRGEVRYIGEIANTPEAIEKLVRQLRKGDAHLSFCYEAGPCGYGIHRQLSDLGWDCQVVAPSLIPRKAGERVKTDRRDSLMLARLHRAGELTAVWVPDDAQEGLRDLTRAREDMKHLQRQAKQRLCAFLLRYGKCYSGKSNWTQAHYRWLEEQQFGQSVQQIVFQEYVDTVKALSKRVDGLDTQLESAASESVFWPVIEGLMALRGVNLLTATTVVAEIGDLKRFASAPQLMAYLGLVPSEHSSGATKSRGAITKTGNAHVRRVLVEASWTYRHPARKTAHLQRRAERTSEAVQDIAWKAQKRLCARYRLMEGRGKLKVQACTAVARELTGFIWAIGQELPQPAPNR

SEQ ID NO: 175979 - protein, 419 aa, unidentified
MRIIKTKKHEIVNGRTLLVAVDLGKSKHMGYYRYPDGTDIKPFEFSNNRLGHQKFYDRICQAKAAHHLQEVVVGFESTGVYGEPLIHFLNDKGIKLVQVNPMHTKRMKELEGNSPGKTDRKDPKVIADIMELGHFLTVVIPEGVSAELRRLTQARERSVERRTAFYNQLQDLVFIIFPEFLEVMKDIKTRSAQYLLRHYPTPQAILQLGVDELSLVLRRASCGKLGRQRAEALYEATARSVGIKEGQRSIVLEIEEILLGIERCESFIAKLEREMRCLLEQIPYSRSILSVKGIKAVTAAGLIGEVGDFRKFRTISELLKLAGLDLYEISSGNQRGNCHITKRGRSLLRKLLFFASLNMIRKGGVMHEPYQRYIGRGMPTHKALVAISRKLLRILFALVRDHTEYVVNYSERENLKLAA

SEQ ID NO: 175980 - protein, 321 aa, unidentified
MAMLSFCGIDVAKDSLDVVVLPEQQCLLVRNDAAGWAELVKQLRGLSIAAVGLEASGGFERGVMRALLAANMAVHRINPFKLRQFAKASGILAKSDRLDARVIASFIAIMPTRRAQRHSLAIERLTEMLTVRRQLSDEKIAAQNAAAMLEDAMLLRLSRRRIGRLAADIDMLDTNLIEIVRTDAALVHRYRLLTSMPGVGPVLACTLIALLPELGSMSRKQVAALVGVAPYTFESGKLKGKRCIWGGRAPVRDVLYMAAMSASNWNPVLKAFHNRLKAAGKLHKVVIVAVMRKMITMLNAMVRDDVVWADHLHGRHIVPTA

SEQ ID NO: 175981 - protein, 403 aa, unidentified
MDVMVQRCAGLDVHRDDVVATVRVPGTGRRRWDQQTRTFSATLAGLAALGAWLSEFGVTLVGMEATGVYWKTVFQALEERFECWLLNAHHLRNVPGRKTDVKDAEWICQLVQHGLVRPSFVPPPEIRRLRDLTRLRKAQINERGRSIQRLEKVLQDAGIKLSSVASTTYSKSARAMLEALLAGVTDPEQLAELSKARMRLKIPQLREALASRFQLEHHGVMVAQLLAHIDTLDAAIQNLSERIASVLTPHQQVVELLCTIPGVHTHAAQVLIAECGLDMTLFPTVGHFASWAGACPGHHESAGRRRSGRTRPGPRWLTDTLTECARAAVRTRGTYLAAHYAQLRGRRGEPKAIGAIRHDLLVAYYHVVRDQVPFRELGPDWQRKRYSPEHRAHRLQRQLEVLG

SEQ ID NO: 175982 - protein, 325 aa, unidentified
MKDLLEISCGLDIHKEKIVACILTGPLGKPTHSEIREFTTLIPDMLALRDWIISENCHHIAMESTGIYWIPIYEILEDAFSGDITLLVVNARHMKNVPGKKTDIRDSEWISTLLRAGLLNASFIPEKRIREFRDLNRYRKSIIRDITSQKNRVEKFLQSSGFRLSSFISDIFGASGRNIILHLMEHGQIDKMSLDSYLKTKTRKRIDEILMSVNGTLSEHQKSFLKILMCHYDSMKEHLIEIETHLQEDMLPFALQIEQLNTIYGISTTASCAIIAEIGTDMKPFKTAEHICSWAGLCPGNNESAGKRKSTSITKGNPYIKKYAL

SEQ ID NO: 175983 - protein, 366 aa, unidentified
MGKSSTAFVGMDVHKDSIDVGIADATEARHYGRVGGDAASVDRVVRKLRSAHRHLVFVYEAGPCGFWLYRRLKARGLQCMVVSPSKTPRNAADRVKTDRRDSLKLARLARAGELEPIYVPDAKDEAVRDLVRAREDAVCMQRQARQRLAALLLRNEIRYSGKTAWTQAHRRWIAHLKLPSPAQQIAFEEYVQAVHEAGERLERLTKAIGAELEHWRWRPVVEALQALRGVSAIHAVRIVAELGDLSRFESPRGLMGYLGLIPSEDSSGPRRRQGSITKAGNSSARRALVEAAHAYAHPARVSWVIARRHTGLPKRVCDIAWKAQLRLCTRFRRLRARGVLKNKVVVAVARELSGFVWAIAREVKPD

SEQ ID NO: 175984 - protein, 409 aa, unidentified
MEVVHRSCAGIDIGKRSLTVCVISSDPSGEPVKETRTFRTLTRDLLALADWLDEHGVTAVAMEATGSYWKPIWNLLEDRFELLLANAAHLKAVPGRKTDVRDAEWIAELFRHGLLRASFIPPRPERELRELVRYRTSLIRERASEINRLAKVLEGANIKLGSVSTNLGGVSGRAILTALTEGTDDPEALAGLAKGRLRNKHEVLVEALAGSVGPHQRFLLAAQLRHLADLDALIESLDAEIKERLQPAAELIKLVSTIPGVGGRTAEVILVEIGQDMTRFGSARQLASWAGMCPGNRESAGVQRSGRTRRGSPWLRTALIGAARSASRTKTYLGAQYRRLAARRGAKRAFVAVGHTILGIVHAVLISGRPFDDLGVTYFDRRDADHVRRRLTKRLEAMGYVVTVAPRAA

SEQ ID NO: 175985 - protein, 397 aa, unidentified
MYIVGIDIAKRKHEAAVIDGEGAVIIKPFSFTNNCSGYNRLLAMLAKAKLPLDEVSFAMEATGHYWLALFTRLQKEGFRVQVINPVQTNSIRSFYIRQAKTDPRDALLIAEVIRFGHFSESTLHPENIYELRELCRGRHAIVSMQADVKRKVVALLDQVFPEYETAFTNLFGDTSMAILQTCPTPKELSEMPLEELCHLIEVSSRKRFRMVKAQELQELARNSFGFAMAGDVFSTMIRLYAKHLVFLKQQVQEMDRKIAEIMDTLDTPITTITGIGPTLGAYILSEIGDINRFSSAAKLAAYAGIDPTMRQSGEYNGVRNRMSKRGSPYLRHAIWLAASSAVLHDPALKLYFQKKRDEGKPYMASVGHACRKMVSIIYAVMRDNKAYTPCIPNEISV

SEQ ID NO: 175986 - protein, 456 aa, unidentified
MKTMNMNFKHNQLTLCFVADVHSQKHHFLISIKETRTILKEFIVENSTAGFIQFITLVKLFSAKFRTQNVIFAFEPTSVYWMNFAYAFYQDISTSFLNKQILFVSPEIVAYQRKVDDPAGNKDDHKDPLTISKLVWDNKTSKAILLPEKIFNLRELTRQRNSLVKIRSSLKTQLRNKIIIIFPELLNIFSDILTASARYVISNFTTPENITKLPIQTFTQILLKISKKKLSTHKIELLYSYAQSSLGIKGNKNGLISNIKYILEQIELYDKLISQIENEIEYYLKSIPQTLTQIKGISTILAASIIAEIFPISRFSNSSQLVKYAGIDPTHSTSGISLKKLSYIAKKGDVYLRLLIIQTAFSCINHNQYIKRYYTNLINYGHKPKRVAIVAVANKLLRIIFNLLKYNIKFDPSKIGMGPKKIVEVVPFKFKQNNFHSLEKAKTKFLLKEKAREKLF

SEQ ID NO: 175987 - protein, 340 aa, unidentified
MSLYAGMDLHGNSNYVAIMDSKGKRIAQKKLPNDRRLILETLQPHRGKISGIAVESTYNWYWVVDTLREAGYRVHLANPSAIQRYSGLKYTDDQHDAFWLAEMLRLGILPEGYIYPKEERPIRDLLRKRGHLVKLRTSLIISLQNIISRNCGLKLNVNKVKELKKNQVSPLLEANDDLALAGEVSKETIDFLTRKIRKIEGVIVEKVEVKDSYRYLLTLPGVGKILALTIMLETGPISRFAKVGNYVSYCRKVSSQWISNEKAKGKGNKKNGNKYLAWAFSEAAELGRRYHSGARAYYTRKMQRTNFMVAHSALAHKLARAAYYIMRDQVPFSSEKLFAS

SEQ ID NO: 175988 - protein, 347 aa, unidentified
MKFYTTQHPYYCGIDLHARSLYVCILNADGDTIIHREIKALPEPLLDLLAPYIGNIVVGVECMHCWYWVSDFCAEQGIDFILGHALYMKAIHGGKAKNDRIDSYKIAHLIRGGNFPMAYVYPPEMRAARDLLRRRTRIVRHGADLKAHVKNTTSQYNLPPNALNLRYPNAREAMRDRFDDQFVQRNIDLDLNIIAFYNHELSSIECFIEKHAKHHNGSDYHILTSFPGIGRILALTILYEVGDIARFSTVQDFASYSRLIKCKAESAGKSYGTQGNKIGNAHLKWAFGEIAVLYLRGNDKAKAYLLKLQKRMSKAKALSALAHKVGRCVYYMLKNQKVFDEKRFLAG

SEQ ID NO: 175989 - protein, 417 aa, unidentified
MEQFAAFVAIDWSDAKHDICLLDVATGKKAAGILKHPPEELEAWATALRTRCAGQPMAVGLEQSRGPLIYALLQYDFLVLYPINPATLAQYREAFSPSRAKDDPRDADSILALLLHHRNRLRAWRPDHAKTRTLQYLVEHRRRLVNDRTRISNRMTALLKAYFPQALQWFDDIRTLLVCDVLLRWPTVEALKKVRPPTLEKFFHEHNSVRKETIAHRIAAIKEAIPLVTDQAVIHASVLMIKALAAQMKTTIEAIREFDQEIEKLCSTHEDYPLFASLPGAGPVYAARLTAAMGTVRDRWTTVEELLCDSGVAPVMECRGKSMWIRWRYFCPKFLRQSFHEYAGESINHSFWARAYYMSQRARGKSHQAAVRALAFKWIRIIYSCWQTRTPYSEVRYLESLRKKRSPLLAFAANNPS

SEQ ID NO: 175990 - protein, 411 aa, unidentified
MASLFCGIDWGESRHDVAIIDTAGTVIGRAKITTDASGFAQLLDVLAEAGDTEDEQIPVALETDRGLLVAALRATGRAIYPLNPLAASRYRARHQVSGAKADATDAVLLANILRTDMVAHRPLAADTELAQAIRVLARAQQDAVWARQRLGNQIRSLLKDFYPGALEAFAGLPMGGLARPEARTILAAAPTPAKAAELTRARLRALLIKAGRKRGIDNEAGRLLSVFRGKYLHQPTVVEDAMGIQLGALIAQFDAACHASDTLEAAARDHFEQHPDATVLTSFPGMGTLIGARVLAEIGDDRTRFDNGRSLKAFAGSAPITRASGKKTVITYRHIKNNRLAAAGSIWALASLHTSPGAKRHFQNRRERGDWNRQAQRHLFNKFLGQLHHCLKTSTSYNETHAFPPPLGLTA

SEQ ID NO: 175991 - protein, 354 aa, unidentified
MKNSINLSEIKEVFIGMDLHKDSWVVSVFGEAGFIVNSVHLTGEYWELSHLLERFAHIPNHKIHIVYEAGCFGFWLCHKLNKEGYDCKITPPTLIPTESGNRIKTDKRDSRKLAQYLAKGILKSIYIPEEEVLLDRELMRTRKQLIEQKGTIERQIKSKLLSYGYGSYQHHGKWSSTWIEMLRTNVAGTGLEYPISTLLNIHENIEEQIKAIELKIKEAAKKEKYEKTVSLLTSAPGIGKIFSIWFLLELGNDFKRFNNSEQYCAYLGLTPSEHSSGNFIHKGRITRASNKYLRMILIEASWVAIKQDHSLLKYFNGLKVKKGGKKAIVAVARRLACRIRQVCLTGQEYQLKAA

SEQ ID NO: 175992 - protein, 352 aa, unidentified
MTMTTLARQITGGVDTHLDVHVAAALDERGGLLGVESFETTPKGYANLLNWLQDYGIVELLGVEGTGSYGAGLTRHLHSQGVRVVEVDRPNRQRRRRHGKSDPQDAISAARAAQGGDATGEAKTRDGNVEAMRVLRVARASARKGRAQALNQMRSLISTGPDCVRAELRGLNVYRMLERASSYRPGTKRDLVSINKFTLRMLARRAMELADEVKEIDAILKVMVAETAPELSALSGVGTDIASALLVAAGDNPERLRNEASFAHLCGTSPIDASSGKNQRHRLNRSGDRQANSALWHIVITRMVSDPRTRHYIERRMKEGQTKKEAIRCLKRYIAREVYNNLPIEHLALDSP

SEQ ID NO: 175993 - protein, 433 aa, unidentified
MQEAEDEPLFAERAAGIDIAKTGIEVTIRVPSDTRRGGRQQETRSFRTVRKDLLALADWLRCWQVAKVGMESTGDYWKPVYFLLEREGLDCVLYHAAQVKALPGRPKTDKADSVWLAKITERGSLPGSFVPPEEIRRLRTHTRYRRHLTQARTAEKQRVEKLLEDAHLKLSSVISDIHGVSGRAMLEAIAAGERNPKPLAQLARGTMRGKIGRLEEALDCAFVTEEHAAVLSMMLAAIDYYTARIEELTAKIEVLCQPYLHQIAQLDAVPGTGVVTAQDVIAEIGADMTVFPTAAHLVSWAKWCPQVAQSGGKRKGANASGRGNRYLGAALGEAAVSAGRTQSFPGVKYRRLVKRMPKKKALVATGNSLLTIYHALLSDPQAAYTDLGTDYYEQRANIRRQVRNHVRAIQRHGYKVTIEPIDPATGELEAAAS

SEQ ID NO: 175994 - protein, 347 aa, unidentified
MKVTTVGIDLAKNVFQLHGVNEAGKPVIKKQIRRDQVAEFFVNLPACLIGMEACGSAHYWARKLEGFGHTVKLMAPQFVKPYVKTNKNDAADAEAICEAVARPNMRFVPIKNIEQQSVLSLHRVRQGFVKARTAQGNQIRGLLSEFGLIIPQGIGHIANRVPELIEDASNELPGSFRLLVQRLLDHLKELGTQVDELESQIVKWHRQSAASNKLAQVPGIGPITASALVASLGDAKNFDSGRQVAAWLGLVPKQHSSGGKQNLLGMSKRGDSYLRTLLIHGARSVIYHAGEKTDPNQTCKWINAVVIRRNKNVAAVALANKNVRIVWALLTNDREFRPDYTRETVGV

SEQ ID NO: 175995 - protein, 335 aa, unidentified
MTCFVGLDVSMEETAFCVRNAEGRILGQGKTATDPDAIAGALARFGRPARVVLETGRMANWLHRQLVARDLPVVCVDARQAHAVLSQMPNKTDANDAAMLAELARTGFYRAVRVKSEAAQGMRALLKARALVLRQRMDLDNTIRGLLTSMGVRLPKGPRRWADRVELALEANEALALALRPLLRLREDLARSLAELTRRLLAEARGSEPCRRLMGVPGVGAVTAYAFVATIDDPTRFARSRSVGAYVGLTSRRHQSGEVDYAGRITRRGDGMLRTLLFEAASSLITRAGGGGALREWGLRLRARVGHKKASVALARKLGVILHAMWVDGTEFRAA

SEQ ID NO: 175996 - protein, 325 aa, unidentified
MNQNLTKSKAKNTQDTTYVGVDLSSRNLDVYINGKYIRYNNSETGRAHMLNKLNSTCNNMLIAYESTGWVSRNFSMYLDEKRVPHCCLIPCRVRSYAKSQGVKAKNDRLDSRVIAEYAGNIKASPDKPLNRKIQELRQLNNLRTLITKKLKDFKVTTAAYTEDSSLSVIAEIRKHLQEQIREIGNKMQGIINENPLLSELYAFYLGQSGIGPVIAYNLICELPELGHLSAKKIASLVGVAPFDYESGGKKGARSIRFGRKRIRNLLYMGMLQGIRKDEAMKTKYDRLREKGKPFKIAIVAVIRQQLTILNARTRDWLAEHGDPLY

SEQ ID NO: 175997 - protein, 419 aa, unidentified
MSFKIFKFNCCGLDVHKTWIYACIGITDSNNRTEYKQARFSSFTKGLNELCDWLAKYNCKDVCMESTGKYWIPVFNILEQHKIRVTLSHPKYTKPMKGNKTDRKDAKWICDLYMCGMVKPSFIPPADIRELRDLVRYRFKLTCMITGEKNRAQNCLTVSNLKLDDVFSDVFGKSSRSITEQILQHPGEKFDVSPFVDSRCKTPIEEIQAAVDGNISKEQDVKLRQCLDHIDELQKHISEVEQEILRLSDKYEAALNLIRTVPGFDKNPMTAIQVLSEIGGDMSVFLTAKHLVSWAGCCPRNDKSDRKIKSTRISCAGSYFKPVLVQIANALIKSKKHFEFTTRYKRIKTRRGHKKAIIARCRMILTAIWHILTDLKPYTSDGFLESRPVKKEKVLTTSQALNLLRQRGYLIKDEPSPVS

SEQ ID NO: 175998 - protein, 354 aa, unidentified
MPRKTTSVEAVATIGIDIGKNTFHLIGLDKKGAIVLRQKLSRGQVDNRLANMPLCLIGMEACVGAHHLSRQLKALGHDARLMPARYVRPYSKGQKNDFRDAEAIAEAVLRPTMKFVAIKTVEQLDLQGLHRVRERLVCQRTSVINQIRAFLLERGIAVRQGLRALRTEIPIVLAMTDKLSPRMIHMIEDLCTDWRYLDGRIATVSNEIEMLSEQDDGAKRLMTVPGIGPIISTATVAAIGSGDVFSKGRDFGAWLGLVPRQMSTGGRTILGPISKRGNRYLRMLFVQAARAVLLRPQSWEKHGLKSWIEAAARRLNRFKLAIALANKLARIAWGVLHGGRNFEVRPLRPAPQAS

SEQ ID NO: 175999 - protein, 415 aa, unidentified
MNNTISDIDIDLTAVCEAEDDAAQAEAQPAQNESDDTYAQKMQEQLALARSSANCRYIGIDLHSNNIWLSVIVNEQRPSGSVGKVIFSRSIGTQRVDGTLPEDLIKPVIERFCKDQPHIACVEATYNWYWLTDLFERNGWNLVLADPSTVSEAKTKAADDRKDAEYLADRLRYNALRYAVIMPKQLREIRDLVRTRGTAVKQRAREKIIVINKLTNLIGRKITGKELRKLIKEHAEFGTEAPMLLNWGLTEEVRTILDYHLTMATNIDQGIQKLEEHINAVGRNLRYTRELQKMPGCGPVISSILASEIGSIRRFATAANFVSYCRLASTSKLSNGKSKGLGNAKNGNAYLSWAFTELATLMVRYSEAAKRHFEKLMRKYGQLRVKAIRVLAAKLARSVYQCLSKNEPFDVLRCF

SEQ ID NO: 176000 - protein, 357 aa, unidentified
MNTLSSKLLNFSKSPIYVGLDVHKKSWSVTLYSDEFELKTFTQPPEPDVLVNYLNHHYPGAQFQVVYEAGFSGFWVQRELSKHGICCEVIHPADVPTSDKEKRQKTDKMDSRKLSRLCKSKEVRGIYIPTEEQQEERNLLRVRQKIIKDTTRVKNRIKFYLMYQGIDTSLFEGRKWTKKYLRFLKEIKFTTASGTFALQTYIEELENLDKQASKLDLKVKELSRTERYRENAEFLNSVPSIGITSAMTLLTEIGDITRFKTFDDLCSFFGLIPNTHSSGENERVGHMTRRGNQFLKSIIIECAWTAVRKDPALFQCYKELTIRMNGNKAIIRIARRLLSRIRHVLIKKEMYQLGMLN

SEQ ID NO: 176001 - protein, 410 aa, unidentified
MELLHRRCCGLDVHKETVVACLRLVADGKVPTEVRTFQTTTADLLRLSEWLAANECTHVAMEATGVYWKPVWHILDDGDFVLVLANAAHVKNVPGRKTDVNDAMWLAELLAHGLIRASFVPDTQTQEMRNLLRTRKQLVREQSSHVLRVQKTLEDANIKLDSVLSDVMSKSGRAMLEALIAGETNPTKLASLASRRVKASPEELREALRGRVTKHHRFLLRLHLNQIDALAAAMVTIDAQVEESLEPFRTAVELITSIPGIRSLSAHVIVSEIGIDMSRFPSATHLISWACLCPRNDESAGKRRSNRSRKGATWLKTTLVQCAWAAVKKKDSYLQAQFYRIKARRGPKKAIMAVAASMLTAIYHMLKDGTMYQDLGRNYFDRRSTEQQKKKLIKRLADLGYAAALTPLAA

SEQ ID NO: 176002 - protein, 409 aa, unidentified
MMKTMHKRCAGLDVHKKEVVACLRTVVQGKVAYDVRRFPTTTKGLIELADWLAEAQCTHVAMEATGVYWKPVWHILEGRFTLILANAAHIKGVPGRKSDVNDATWIADLLAHGLIRASFVPPQPIQELRDLTRTRKQLGREIVQHTQRIQAVLEEANIKLSSVITDILGASGRRMLKAIIGGESDPDKLAGLGGPRLAASRCELSDALFGRVREHHRFLIHHHLTTIEQLEVTIAAFDARIEAALSPFRDTVERLKEAPGLSETAVQIIIAEIGLDMSPFATAGHLLSWAGMVPRLDESAGKRRSTRIRKGAPWLKPVLVQCGWAAARKKNSYYQAQFLRLKARSGPKKAAIAVAASILETVYHMLKDGTFYQDLGADYFARRNPKREAEKLAKRIRSLGFDVDIRAAA

SEQ ID NO: 176003 - protein, 376 aa, unidentified
MSDVTSLAPADVRLWVSLDVHKLSIVAATLLPTGGKPDVSRIETTERAIRRFIDRLGGPEGLAVCYEAGPGGYALWRLLTSMGVACDVVAPSLVPVRAGDRVKTDRRDAKKLVALHRAGLLRFVHPPTAETEGLRDLLRCRDDLRCARTAARHRVLKQLLRHGRVFRDGKTAWTLSHRRWINAQRLPDALAQLALEQMLIHLDGIERQIDALDARLEQIAASERWGELVQTLTRFRGIATLTALGLIAEIGDFARFASPRELASWLGITPSEYSSGDQQHRGHITRAGNHHARRLLIEAAWHYRHAPRRPASGQQPDERAWQAQVRLHHRYRHLIDHGKRPTVVNVAIARELAGFLWAAMTDQSLTTRDQHQEAAA

SEQ ID NO: 176004 - protein, 437 aa, unidentified
MSTDAMQIINQNCAGIDIGNDKIFVATDDGVVKNFSTFTLEYEACITYLQSKAVSSVVMEATGIYRITFFEMLEEKGFTVYVVNGAHAKNLPGRKSDVMDCEWLRQLHSYGLLRSSFIPDKEIRVLRQYVRLREDHIRMGAQHIQHMQKALIQMNVRLTSVITHITGVSGLRIIRAILAGERNPEKLVNLCDNSILKLKRQDVINSLQGNYREEHVFALRQAVECWEMYQKQIDACDKQIDAIIQTFGKNPPDNLPNTPKKKTRKSNPYHIEGMSAKVMQMIGGKDLISVVGLNEASVLEIISEVGTDLSKWPTAKHFVTWMGLSPRKHQSGKGSKRVRAKFTNRAGEIFRLCARGIGRSKNTALRGFYHRIKAKKGAPVANKATARKLAVLFYDIMTKGVDYVEMGLQEYQEMYKAHQLKYLAKKARELGLELVIP

SEQ ID NO: 176005 - protein, 373 aa, unidentified
MPKYSTAFGMDVHLRSTTVCALDADTGEAVTRRFPGNPWGEIAGWMDGFPGPSLAAYESGYLGFAPQRELAGLGVECVVAAVSKIPRSAADSASKNDRNDAARMAKAILAHDISPVWVPSPEVEGIRDLAGAYDGATARLATAKQRLLAFLAKRGFVYGGATPAGNPRKYWTYDFLRWLDKVRPEDDGGVRTLAALRNEVEAAAEARADLLSEYRAAVDASPIAAEVAALQSIKGCAFALAAAFSAEVGDFTRFRSGRQVTAYFGLAPSQRSSGDSVRPGGISGAGNALVRKLAVEGSWCYAAARHQPKLMPRDTGVPLEIRMHGRKGSERLLRRREEMLARGMPAAKANAATAAELVRWLWALGMMCREGAE

SEQ ID NO: 176006 - protein, 353 aa, unidentified
MAIAGTGRSGEVRFFGDIDSTPTMVERMVKKLAERHHKPSFCYEAGPTGYELHRQITALGHECIVVAPSLIPQRPGERVKTNRRDAVSLAKLHRAGELTAVWVPDPAHEAVRELVRARETAMEELRRARQHLQSFLLRHGRIFTGRTAWSKAHTRWLCEQTFDHPAQNIVLTEYRQAIEDAEARLERLTQQVTEIVATWSMAPVIAAYRAVRGVAFITAVTFAAEIGDVCRFDNPRQLMAYLGLVPSESSTGERVRRGNITKSGNRRARRVLIEGAWGYRFPARISSTLQQRLNGLPKSVREIAWKAQVRLCGRYRKLMANGKRRTVVVAAIAREMSAFLWAIGQQVKPLSAS

SEQ ID NO: 176007 - protein, 378 aa, unidentified
MQQEPHAEFAAFVGLDWADATHDGCLQATGSATREHFVLEHTPEAIEAWVCALRQRFAGKPIAVCLELNKGPMVFALRTYDFLVLFPVNPLTLARYRAAFPPSRAQDDPTAADLQLALLCTHRDQLQPLTPQSPTMRALAQLVAHRRRVVGDTVQITNRLTSTLKTSFPQALQWFQDKDTLLLCDVLSRWPTRKAVQRARRSTLETFFREPHVRSADVIPQRIDAIKAATPWTTDAGISAPHALLVQTLVHQLRVTLHAIQDCDHASAQRAQSHPDFPLFQTLPGAGPVFAPRRLVACGEQRERSASAAARQQCAGIAPVTERSGKQSWVHWRFQCPTFLRHTFVEWAAESIRHAFWARVYSQQQRDKGKGIVSQDEI

SEQ ID NO: 176008 - protein, 346 aa, unidentified
MKKIFIGIDFSKEKFDATVIKAVGVEECAERMHEVFDNKVSGFRRLLRWVKSVADERDTGLWLFCGENTGGYSKALCNYLYGNGYDMWLENALSIKRSSALQRNKSDKADSNIIAEYAMRNYDQMRLYKPLGKNLERLREVFLYRHNLVKLKASMTVRKGEKSLTQNKSDISRFMAMSSKHLICEFNKKIAECDMRIEKIISEDEELRRNFEIITSVPGVGMQNAVCLMVYTDNFNRFDYNSRKIACYYGVAPFGRQSGTSLNTPPHVSPFANKLIKTLLSQAALASIRFCPHLAMYYHRLVETGKKPPVALNNLKNKMLHIITAMVRKGEKYDPDHDYYAAIKAA

SEQ ID NO: 176009 - protein, 440 aa, unidentified
MKKYYLGCDVSKGYADFVVLDSDKNIIENNFQLDDTFNGHNQLYSILTDFYKEHPNSSILSAVESTGGYENNWFNTLSKLNEVLNINVVRLNPLGVSHSQKAKMNRAITDEISAYNIAEYLINHQNKIDPNTSSYYSSLRKQWVFVKLLVKQKVQLLNQLESIVYTANTEVLSYCKHSTPNWLLQLLKQYPTAKRLVRVKVSSLVKMPYVTRLKAENLIAKAKLSIASSDDKTTESVIKATVEQILHLDKTIYYHEKQMSDSCNLPEVKILESFKGIATYSAVGLILEIGAIERFSSSKNLASFFGLHPTLKSSGDGFAAVRMSKKGRSEPRLILFNVARTAINSNPIIKEIYEKHVNRGMPKMAAIGCVMHKILRIIYGMLKNKQNFDPEIDKRNQSRSLPKKKTVKISKVRRYQSYDKLAPISRRQNNKRKEEKMSQV

SEQ ID NO: 176010 - protein, 323 aa, unidentified
MEPTIVGIDIAKKKFDVALLLGEKTKSGAFHNTPAGFATFARWLTTRHGVERIHACIEATGTYGEELALYLYRAGHVVSVVNPAKIKGFAQSELSRTKTDKSDAALIARFCRAMRPEAWQPPAPEVKKLQALVRRLEELNGMLTQERNRLATADEVVRPSIEEVILVLQERINHLRGLISDHIDQNPKLRANRDLLQSIPGIGPTTSAIILAEFGDVERFGDARHMASFCGLTPRHRQSGSSVRGKSRLSKTGSSRIRKALYMPALVAMKHNPVVAALRERLKGYGKCNMVIVGAAMRKLVHIIFGVLKSARPFDATIAMSQS

SEQ ID NO: 176011 - protein, 334 aa, unidentified
MGDALYIGIDYHQYSLQVCGLDAKGGVAFNRRCDNNIADILATVGPRVAEAAIEASCGASDLAEQLAQAGWSISLAHPGYVARIRQSPDKTDFSDARLLADLTRVGYLPRVWLAPTAVRELRLLIRERQSLAEERRRIKQRIRATLREQRQRVQLRAWTRAWLAWLREHAELSTEARWVIERRLMHLERIATEIAVVEARLRERTADDRIVAALLAQPGIGEVTAWTLRAEIGRFDRFRTGKQLARFCGLSPRNASSGERTADAGMIKAGRPELRAIIVEAAHRLSIHHPRWRAFRARLAARGKPGAVIAAAIANRWVRGLVHLMREEIKPMAA

SEQ ID NO: 176012 - protein, 397 aa, unidentified
MKCPQGLHYRGSVAHSAVRRVRERHIQHKGGTNMISVHYVGMDVDKEKIVLARLAAGRTAEVQEHVIANTPSAVKKYFTALLAGAEVHASYEAGCFGFGLYRQLSAMGVTVVVAAPGLIPRKPSDHIKTDRRDARTLAMTLRAGQLTGIYVPTAQDESVRDYLRMYEDLRGDLRICKQRVLHFLLRRGIRYDQGGPWTVKHKNWLSSLEFSDPRDRKTLDMYLSTMQEIEGKCSEAAEEVEQIASQEPYRQQTKKLTAFKGIKTLIALSFVAEIGDFRRFPNARQFMAYLGLVPSERSSGNKRRQGGITKAGNSHLRRLLVEAAWHYRSYHPSSRVLTERRKGVDPQILTYANRAGRRLSRKYMHLLLRGKRSQVAVTAVSRELAGFLWGAMTGQVA

SEQ ID NO: 176013 - protein, 401 aa, unidentified
MKRLSGGIDVGSESHHILILDEEDNVLYNQKVAHKLNEFAESIKLFKQIERKEGGKISFALEGKNGYSAPLDRILLDKGFTLYNVDNFKLKRFREAFAGEWRDDQRDSLMLSKMLKLKDHLNSEREKVFIKIEKPSLVTESLKLLSRHQQTLIDEKIRLINRLGKKLLEVCPQILELGKLKNKKIIAVLAKYPDFSKYKRITLCSLLKIKGIGKKGAFSLLKRLNHIEYMPGLSDIYQTIILSYAKPILELQKEIEDLDKKLDEIGEKSKEVKHLKTIPGVATKLASRLIGEIGAINRFPSEKQLAIYCGIACVDNDSGKVTKAKAVYKANKIGKQTLITVAGGSIRFSFQCRDYYLKKRAEGKSHNHTLRCLARQLIKVIYKMLTEDRDYMVRKELKKVA

SEQ ID NO: 176014 - protein, 414 aa, unidentified
MVEETIAWFAGVDWGSAKHQACLLGAQGGIVGEREFPHSGKGLSELADWILSMTDIASAVAVAVEVPHGPVVDVLLDRGFIVHAINPKQLDRLRDRFSIAGAKDDRRDAYVSADGLRTDRHLFRRLQIADPRLIELRAWSRLAEELQEERVRLSNRLHQQLWRYYPQMLKLTDDLTATWLLELWLKAPTPAKAARLRVPAVERLLKQHRIRRVNAEVILRTLRQPAIKVPDGVAAAAGIHIHSLIVRLQVVSRELNDAKRKLDELCTAIGETGAASEERAEHRDVAILRSLPGIGRINLATLLSEASGPLSRRDYQALRTLSGVAPVTKRSGKSHVVVMRYASHVRLRNTVYHWARVATQHDHESRARYAALRRRGHSHGRAIRGVADRLLAVACVLLQRQTLFDPHFRQATAS

SEQ ID NO: 176015 - protein, 307 aa, unidentified
MKILACDVSKDFLTPYAGALESNVPNNKEGIRKMLLAHPEHIVACEATSSYHMELVDAAYKMGREVFVVNPKEARNYKDSMSFRAKTDPLDARYLYEFVSRNHDLLRPYTPICQELLELKSLISQRALVQESRLAMAASFGKNTSPEQETALSGLSALVGSYEKKIKEIASKYESYKRVLKIPGVGPIIACALVFVLESRAFDSAEAVIAFLGLDVRIRQSGRYKGQPKLTKRGDSILRYLLCIAGRCLVNSNVGKAKKTQLLAQGRHLPERMVIGARKVLRTAWHLHTAKVDFDPEKWTWGLTARG

SEQ ID NO: 176016 - protein, 357 aa, unidentified
MTIESAVQQVVEPAVVVVAGVDTHQRTHHVVVLDERGSRVGDRQVDNSSDGYRQLLDFVAGRGLIVRVGVESTGSYGAGLTRFLREAGVEVVEVNRPARQSRAIAGKSDPIDAESAARQVLSGVATAVPKDTTGQVEAIRVLKVARDAAVKAKTAALGQIRDLILTAPAELRASVDAPTARARVKACLGLRPDPTRAGDPAQAAKIALRSLARRVRDLETEIAELDAALTPLVARVAPTLVGLRQVGTHTAAQLLVTAGQNPDRLRSEAAFARLTGTAPLPASSGKTRRMRLSRGGDRQANRALHIIAVGRLRTDERSRQYAARRTAEGLSKKDIIRCLKRYAAREIFTAIRTDLAP

SEQ ID NO: 176017 - protein, 342 aa, unidentified
MDHFAGLDVSVKETSICIVDETGRIVREVKVASEPQALLKVLGNQAYRFKRIGLEAGPLSQWLFSALAEAGLPTVCVETRHMQAVLKAQINKTDRNDARGIAQMIRAGLYRPVHVKTLRSQKLRMLLTHRKLLQSKAIAIENDLRGTLRNFGLKVGMVGKARFEARIQELVEHFPDLGVLVEPLLIVRRALREQIVLLHRRLLAIVREDEVCRRLMTTPGVGPVVALTYRATVDVPARFRKSKSVGAVFGLTCSKYQSGEIDWSGRISRCGDEMMRVMLYEAAQSMLRSKKWSWLKAWAMQIARRRGMKKAIVALARRLAVILHRIWIDGTEFHWTRETAAA

SEQ ID NO: 176018 - protein, 315 aa, unidentified
MEHAAKEASFVGIDVSKDRLDIHVRPSGRAFAVARDGTGLDQLVDDLRHLAPALIVLEATGGFELTVAAALAGAALPLAVVNPRQIRDFARATGRLAKTDALDAQVIALFAERIRPEPRPIASADRQVLAELIARRRQVVEMIGMETNRLHQARNPRVQRMLRATLKTLKAQLAELDRDIDDTIKRSPVWQAADDLLTSVPGVGDVTSHTLIADLPELGQLDRRRIAALVGVAPINRDSGQMRGRRTIAGGRIDVRNVLFMATLTAIRWNPVISRHYQALVDRGRPKKVALVACMRRLLGILNAIIRTKTSWQCA

SEQ ID NO: 176019 - protein, 373 aa, unidentified
MNTIYIGVDFHARQQTICYLTTETGELVTTALKHEPKTAVRTFYEQFSGEVIVGLEASGYSPWFERLLEELGHQVWLGDATEIRRRARWRQKNDRRDAELILDLMLHDEFPRLHRPSLQSREVMRMLRYRQKLIKMRTMSKNSLQSLALQSGIARRGRLFTREGKAELDAAEMSAAMEWQRAHWWQLLEALNQQALEAMTWLKAASQNDVSIARLRTHPGIGLLTSLCLVHTLQPVARFRNPRKVAAYAGFDPMERSSAERKHFLGISKAGSRVLRYLLVEAANTAVRKDEELKRFYQRLAQRRGRPKAKVAAARKLLIRAYIMMRDEIDYAEFRRRAVAARLARLRQGPPIPAALIGQPASTARQEPPAREK

SEQ ID NO: 176020 - protein, 284 aa, unidentified
MTDATLIGIDLGKHCFFVHAQDARGTQIWRKKMTRKQLYTCLATCPVAVLAMEACAGAHWLARKAQSYGHQVRLIAPQFVRPFVKGNKTDFADAEAICEAASRPSMRFVAVKTAEQQTLLALHRVRESLVGERTATSNQIHAFLLEFGIDLPIGALAITRLPVLLDDLRHALPPTMVALLLRLHQRYAQLSQEILELETQIKQQTLEDEAGQRLLTIPGIGPITASSLLAMAGDARAFKCGRDFAASLGLVPRQHSTGGRATLLGISKRGNKHCAVCSCKVRVR

SEQ ID NO: 176021 - protein, 424 aa, unidentified
MAGVVIGIDPHKGSHTAVALDVHEKQLGRLRVRASSRQVDGLLEWASGWPRRRWAIEGARGLGQLLAQQLIASGERVLDVPPKLAARVRLLDSGQINKNDPNDARSVAVAALRAHELPELAAEDHAMVMRVWARRYHDLARLRTQVVCRLHAVVCELVPGGVRKYLRASQATDVLDRIVADSPVAQAKLELARELVADLERIDAQRREAKGRTARAVAATRTSINDVYGVGPIVAGTVLGYVRDIRRFPTRDRFASYNGTAPIEVSSGDRKIYRLSRRGNRQLNHAIHMAAISQIRHHDSEGRGYYEKKIAEGMTGTTALRALKRKISDALYARMIDDARPLAAKDPGGHTGNDSASSAAGSHPETPALRKSHSRATANSKTGTGQRPLTLRPAPDRRRTSRRAAGVQVEPRLGPHRGRRQDRP

SEQ ID NO: 176022 - protein, 446 aa, unidentified
MPANKRRSPGPPPKVVHPNAAGIDVGSEAHVVAVPADRDPEPVRSFGVFTADLRALVAWLKQCAVTTVVLESTGVYWMSLCDFLEGQGFEVLVIDPRSLARNLKKKTDVSDAAWLQELHAFGLLKSCFRPDPEVRALRTLWRHRDHLVTEAATLLQMMQKVLVQMNVYLHLAVADIAGVTGMRILRAIAQGQHDPQTLAALRDPNCKRTRAEIAKALEGTWDAAHLFELKQLLKAWDFYQNQLHACDREYEKAAGKMPDKTQGRPLPEPEKRPQKHRNSPTAFDSHALIFKLVGVRLTEVDGLGASTVLTILSETGPDLAAKFASDKHFAAWTTLAPRKHQSGKRTKFPAQTASRVAKAFRLAARALLHCKSVLGNFLRRLRARLGIGTAIRATACKLAKLFYRLITKGEAYRRDSTEAEEAKQRERQLQALERKARELGMQVITV

SEQ ID NO: 176023 - protein, 467 aa, unidentified
MAQRFLLTNEYSDAAVVNGSTISSSPSKSQPVPSRKMTITHIAREEHTMEQHEQFAALIGLDWSDQKHDLCLVDTMTGNQELSIIRQTPESLNEWARCLRTRFGGAPVAVCLEQSRGPLIYALLKYDFLTLYPVNPQTLSKFREAFSPSRAKDDPRDAEYLVELLIHHRARLKAWKPDDERTRELQLLVEHRRRLVGDRTRISNRLTALLKGYFPQVLQWFPDIRTPLVCDFLLRWPSLESLKGVRRSTLDKFFHEHNSHRKETLPKRLAAIKTAVPLTTDLAVINSSVVMAKALVAQMKTTLTAVHEFDTRIDELCRTHADFELFASLPGAGRIYASRLLAAMGSNRERWSNADELLCFSGVAPVVERSGKSSWTRWRYFCPKFVRQAFIEFAGESARHSEWAKAFYLSQKAKGKSHQAAVRSLAYKWIRIIFRCWQTHQKYDERKYMECLRKRGSTLVADSGTTP

SEQ ID NO: 176024 - protein, 342 aa, unidentified
MATAAIGVDTHKATLAACLVDGLGMAREEREFANDPPGHAAFAAWVSGQGEPVRVGVEGSSSYGAPLARHLVAAGLDVVEVPPQLSRRERGRTRRPGKSDPGDAYAIARVTATELDLPPVRLADRSRDLQLLAEARETAVEAQTRARNRLHAHLVVLVPGYGATVAHLVTGAELAAARRLLRGRHGVAAELARAEIDEVVRLGRRAGVLERELRALVGPEDPLLAIPGLGAISAAVIRGEAGDVRRFRSPDAFAMFAGIAPLPASSGRISRVRHNRRGNRRVNRAFWTIATWQAKFDPRGRAYLARKRSEGKTWREALRCLKRHLVRSVFAALVAGQLQSAI

SEQ ID NO: 176025 - protein, 359 aa, unidentified
MRIIGCDLHARQQTLAMLDTETGEVVNRTLQHEGKEVREFYSQLPHPVLVGIEAIGPMQWFLDLLQELGIECQVGDATKIRAAEPRKQKHDRRDAELILKLLVEKRFPAIWMPSKELLDLRALLLHRHQWVRLRTQIQNALQAIALANGLRRGPGLWSYDGQAKIAFLPLPPHTSYRRSALQAEYRDMEEEIENLTAQVAEQAEHRSGAQLLLTHPGVGPVTALATDVFLGDPQRFADGKALASYVGLIPQERSSGRRRRLGRITKQGNPLLRFLWNEAGAHAARRDPELKCFYHRKLVQKGLGKARVAVARKLGIRLWIMLRDQIDYEEFCRRGQKQSGAACAGMLGTRLVHHHRPVD

SEQ ID NO: 176026 - protein, 357 aa, unidentified
MNYTQNEKIEQVTDSTMVVGIDIGSQIHYARAFDNRGRELTKRIFSFHNDLEGFNSFNLWAETLKTENKKTAVLIGCEPTGHYWFAFAKYVNNHQKRLVMVNPFSVKKIKELDDNSPKKTDSKDPKTIAKLVVDGRYSIPYMPEGIYAEIRDLVYSRDRIMKQHNISANRIQRWLAIHFPEYLGLYTRFDAISGLEVLEKAPLPKDVIALGVNGIRKIWHDKKMRGRGVTEDRAKTLVEAAHNSVGLDGGIGTKSELYMLLEEHRLWTSQLEAVNKVLEEMILKVPHVEKLLAIKGVGSITIAGFIAEVGDIRRFDSPKQIQKYAGLELVENSSGKHKGGRGSANAGEGNSERSCIR

SEQ ID NO: 176027 - protein, 327 aa, unidentified
MKNIFIGIDVSNKTLDICIKENNNNTFYTIENSISSCKKFFNKFKKSSCLTYVAMENTGRYNYNLYEALEKFSFLVYVINPIHMKKSLGLVRGKNDQVDAERIVYFIEKNHMDLPQWQPNTLAIKKLKVLQTERKHRIKIKSGLLKQQCDYKLMKSMKMDKELLKLNQSLISNIDKQLKIIEHKIELIIQEDQILQDQSNRLRTIPGVGKVLTWMMITKTQGFCRINNPRKMACYAGVVPFDHQSGTSLRFKPKVSVFADKELKKVLHLAAMSAIRLDNELRVYYLRKVEEGKNKMSILNAIRNKIIHRIFALINNETIYQKDFVIS

SEQ ID NO: 176028 - protein, 343 aa, unidentified
MKQYVGLDVSLEQTAVCIVDEQGKALWRGKCASTPEAIAAVVEVRAPHVERIGLESGPLSTWHWHELKKRGLPVICLDARHAKAALSLQVNKTDPNDALGLAQIVRAGWYREVTVKSLDSQVIRSFLSSRARLVEVRVDLINQIRGVLKPFGLVAGKGGRQPFIDRVRELVADGPLKDAVEALLTALQEVSRQIGILSRRLMGLARQDQTARRLMTAPGVGSLVALAYISVIDTPDRFSRSSSVGAYLGLTPRRYQSGEIDRSGRISKCGDPLLRTYLFEAAGIVLNRVSRWSALKAWGTRLAKKVGGKKATVAVARKLAVILHRMWRNNTDFRWSRQEGQPA

SEQ ID NO: 176029 - protein, 436 aa, unidentified
MTSHCQFYNDKSSGGYFVSFKILKNNCCGLDVHKTWIFACIGITDSHSRTEYKQARFSSFSKGLQELCDWLAKYRCTDVCMESSGKYWIPVFNILEKNNLWVTLSHPKYTKPLKGNKTDRKDAKWICDLYMCGMVKPSFIPPASIRHLRDLVRYRFKLTCMITGEKNRAQNCLTVSNLKLDDVFSDVFGKSSRSITEQILAHPGKTFDVTPFVHGHCKTPIEEIQAAVDGAISPEQAVKLRQCLDHIDELEKHIETVEQEILRLSDPYESALNLIRTVPGFHKNPMTAIQVLSEIGADMSVFPTAKHLVSWAGCCPRNDQSNKKIKSTRISRAGSYFKPILVQVANALIKSKKHPEFTNRYRRIKARRGHKKAIIAICRMILTAIWHILSDLNPYTPDGFLESRPVNESKTLTTSQALNLLKQRGYIIKDEPVTAS

SEQ ID NO: 176030 - protein, 412 aa, unidentified
MYIVGIDIAKKTHIGGITDDKGKHIGKSFKIDNSIEGFENLLKKLAEINADISQFVFGMEATGHYWLNLYTWLSDRNFTVHVINPIQSDALRKLEIRQTKTDSIDSYLIADCIRLGKYCNTNLADDDMLALRDLTRQRFYLVDMTSDIKKKVIAMMDRIFPEYESLFSDMFGKTSCDLLKECTTPEEILALDTTHLAEILRKSSKGRFKQEKAEELQKTARNSFAVLLSSQTNSLLVKQMIEQIELLESQISEIEKIIEQLYSKFDCKLTKIPGMGITLAAVILSEIGDISRFPDPKQLTAFAGLDPVLKQSGMNKGLGYHMSKRGSPYLRRALWLAANSIKKWDPSFAYAYQKKLDSGKNKSQALGFISHKLLNVVFTVLKNNIDYVPVFPPDVDISKLAEKALKNASSND

SEQ ID NO: 176031 - protein, 408 aa, unidentified
MLKIVHPVCCGIDVHNKFVVACIASTDERGITAYKVSRFSTFTSGLVKLSEWLLSNCCRNVCMESTGKYWIPVYNILEDVCRVTLAHPKYLKAIRGKKTDKKDARWIADLFKHDLVAASFMPPADIRQLRDLARYRAKLTAFAASEKNRLQNCLTVSNIQIANVVSDTFGVSSMRIIQNLLDSSGNADIEGLIHGSMVKKADDLRLAVSGIVTDEQKSKMNVILGHYNAVKECKASLESVILTLCKPYERELSLVLTVPGISNPFSAIAILSEIGADMSVFATAKHLCSWAGLVPQNDESAGKKHSVRISRAGIYIKPLLVQCANAVVRSDKHPEIKGRYLSIKKRRGHKRAIIAIARMLLTAVYHILLKDEPYNPELYIKADTLPRTRNITVDQAISFVRRFGYSVN

SEQ ID NO: 176032 - protein, 326 aa, unidentified
MSNDLPQTIGIDISKANLDCHAYPAGTERQFANTAKGHKALIAWLQQWQVERIAFEATATYHRALEVTLADWPCVKLNPERARRFAQATGTLAKTDRIDAMLLARMAATLQPPVRPAQSAEQAQLAELINARDGLVRDRTALKNREKNLTIAILKRQCKQRLEQIERHIDALDAEIASLIAADAKLARRHKILTSIAGVGTLTANQLIATMPELGSLDNKQAASLAGLAPVARQSGQWKGKSFIRGGEPTCGKHSTCQHSSQRASTLTSRPSTSNSSVPENPQKSPSLPSCENSSSPPTLCSKLTDAGSNLSLDHHGYSKWPPRIW

SEQ ID NO: 176033 - protein, 380 aa, unidentified
MEKVCGLDVHKSSVFCCILDENGKKIFEQRFETLTPDLLSLREVLIAHDCKHVAMESTSIYWMPIYHILDDDFEVSVANPYFIRQLPGRKTDKKDAAWIAECLQKNLFIPSFVANDIVQQMRQYSRQHARLTKNRVRFEQQMDNQLQRCNIRFSNYVSNQGKNVSMRKIINALIDGERDPAQLCRLVHGRTRNKHGEQVITDSLTGKVQNADIEILIQCMEQINLITKQQATCLNHLEELANTYFAKEISLLMTIPGVKKLSALCVLAEIGGDMSEFRKATSLVAWAGLRPRNDETSEKIRSKKILHGNKYLRKILVQISWAAVKSKKTFLGKKFYILSKRMKSQKALIAITRKILVVIYNVLKTKQPFDTNKNLQGIIS

SEQ ID NO: 176034 - protein, 341 aa, unidentified
MSEVSTIGLDLAKRVFQAHGADACGRVVFRKRLRREQVLTFFAGQPACVVAMEACSSAHYWARAIGELGHVVRLIPPAYVKPFVKRQKNDTTDAEAICEAAQRPTMRFVSVKSETAQANAVVFRARDLLVRQRTQAINALRGHLGEYGVVVAKGPSHVAKLIAHVEDPAAGLPEAARTVLRVLIASLQFLSERIDLLDREVARRAREDKEVRRLTTIPGVGPVIATAVAALAPPAGAFRRGRDFAAWVGLTPSQHSSGGKQKLGATSKMGERTLRRLLIIGASSVVRKAIKHGTRSGSWLGQMLARKPRMLVIVALANKMARTVWALLATGGIYRAPLAAA

SEQ ID NO: 176035 - protein, 406 aa, unidentified
MRSIGLDIHRDFCEVAIAEGGEVRSPGRIEMTPEALELFAGSLASSDQVALEVSGNAWEVARIICPHVAKLVVVSPADTGIRAARAKTDRLDARALAKLLAAGSLQSVWVPDDHTRAMRRRLQRRRKLLVVRTKAKNEIHAALMRRLVRKPAVSDLFGKQGRRWLESLELPDEEQETVEGCLRQLDFCESEIAAIEKRIATEALRSPEIRRLMTVPGVNVICAATFMAAVGDIHRFGDRRKLVGYLGLDPKVRQSGLSAAARGRISKQGSSSGRHALVEASWSVVKAPGPMHSYYQRIRARRGGQVAIVATSRKLACLFWCLLTREEDYAYAQPSLTAKKLRRLELAAGAPKGAGGAGIWSTNKAMREAEQALARQAEATYKRTVADWQKQQRRREGADATTGRAI

SEQ ID NO: 176036 - protein, 324 aa, unidentified
MKKDTPYFGIDISKDFFDVMSQKGVHYQFKNTPKGFSDFLKILTKNSHCVMEATGYYHYQLAYFLVGNNILVSVENPLSVKRFIQMKLSKIKTDKRDAKMICEYAQCVALKLWKGESEAQQECLQIIRMLSVYGKQRTALKNKIHGEDTLGNTRTLVVKSIKRSLKSIKKETDLLEKQLLEIVKKSHQDLLTRLESIPGLGRKTSLMLIVLTDGFDRFETASALCCYSGLTPTIRQSGSSIKGRPRISKMGNPKLRNLLFMCSFTACKYNKNCKALYDRIVAKEKSKKLALIAVCNKLLKQAFAVAKSGLPYDENYRSTLAKNN

SEQ ID NO: 176037 - protein, 423 aa, unidentified
MMKLKYSICCGLDVHKNVIVATIVTTNKDGISEYLQKSFSTINSDIQRFHNWLIENNCYHVCMESTGKYWIPIFNYLENDIDVCLTHPKYVKAIKGKKTDKKDSKWIADLYKFDLVRCSFIPPKDFRQLRELSRYRFKLVCMKSSEKNRIQNCMTISNVGIASVLSDPFGKTATEIISYLLEHTADSMDEKAVRKLIKKGAKSKSDEIIEAIKGYTIETDQAKKLELARGHLEYLDDMITQTVVELYVRIKPYYEFVEFVSTMPGMTELSSTIVLAETGVDMDIFDDAKHLCSWCGLSPANNESAGKKKSVRIAKAGDYLKPMMVQCALAAIKSKKQPYFAIKYGRIKKRRGHKKAIIAIARMMMVCIYHMVSEKKPFTPTDYEELMDPQNHVESVVLNENNVFAYLESLGYDSSKLVKRNDN

SEQ ID NO: 176038 - protein, 400 aa, unidentified
MLSIGIDVSKGKSTVCGMKPGGEIVYAPFEVQHTRKGMSELVSLLHNSGEEVRVVLESTGSYHCPVVAALLENGIFVSVVNSLRMKRFCSQSIRKVKTDRIDAMQIALYGLAYWQELQPTRLPEDTYRELQLLARQYYQMTSLLIKAKVDFNALCDQVLPGMQELMSDHAGRHKLSDFVLRYRHTTHILEMGETRFRKDYCKWAEKKGYRNCERMAVLIFATAQNGIPVLPNAPSTQIVITEAIRVLHTVEASRDAILTQMQALAKTLLEYSLVREMPCIGDTLAPRLIAEIGDVRRFHSKRALIAYAGINAPPYQSGKFCANNRHISKRGNRYLRKTGYEVMQSYVMHKPANDPIFTFIEKKRSEGKCGKLAMVAGLNKFLRVYYGKVTELYRSSSAIE

SEQ ID NO: 176039 - protein, 366 aa, unidentified
MSNPTTETVTVALDVHKSSVRLAAVRADELLEERTLPYDHGAVERAVSRWPGVRVCYEAGPTGFGLYRHLTERGIGCEVVAPGLVPARPGERVKTDPRDARRLARLHAGGLLEPIFVPSRELEAARDLVRAREDARLDRMRARHRLSKFLLRHERTMPTKCWGVTRRAWLAKQTFDFPAQQHAFDDYLGALDLVDRRIEALEREVRQTAERGPWAQLVARLRCLRGIDTLTALGIVCEIGDFSRFGTAEEFMGFTGLVPSEHSSGERRKQGSITKSGNAHLRRLLVEAAWNARRRPQVGYQLARRQRGQHPAVIERAWRCQQRLHKRWRRMAARGKPHQKIVVACARELAGFVWAIATNQPLRQGG

SEQ ID NO: 176040 - protein, 392 aa, unidentified
MDSPPPRHHSATVVFEEANGSEGETMKKHSSKHDSLSSTDVELCTTICVDLAKQVFQLAGEDATGRVIYEDRIKSRQAFHDFLLRLPTTVAVLMECGPGAQAWARLLQAKGNPVRILPAQRVAEHRSGAKNDRNDCYAILRAGRDTSIASIPIKSTTALAIQALHRIRRGNIKRHTALGNQIRGLLLEHGVSMPQGDAAVNKHVPQALEDASLPLPDLLRELLDELLMDWLSLGERIAALSRRLEATAQEDKVAQRLITIRGVGPIIATAIVAKQTDPSRFASGRMYSAFFGIVPDQHSSGNKIRLGKMSKRGDGYIRSLMIQGAHAVLSQLRPDSDQPDDRRLLRWLSRLGRKEAAIRLANRNLRIIWALLQSDQVYQRKPNEKPEAAMSL

SEQ ID NO: 176041 - protein, 350 aa, unidentified
MHATTVAVDLAKDVFELAFADAEHRIVQRRRLSRRAFAQALGNTEPLRVVMEACSSAHYWARRFTAQGHVVRLLPARDVRPYVRRNKTDRTDAAGLLEADRCAQIDTVPIKSVEQQGVQALHRIREQLKAQRTATINLVRGVLREFGFVIPLGAAKVRPAVLAVLEDGDCDLPMPLRHTLAELLEQLARLAQSMIGIEQRLQRIAQCDPACLRYQQVPGIGLLTATALRASTGPLDRFRSGRHFAAWIGLAPREHSSGSQRRLGRISKRGDGYLRLLLIHGARAALRAAQLRRQHAQPLTRLQAWAIELQQRIGHNKAAVALANKMARRLWAMEHHRTNFDPDHVSLRTA

SEQ ID NO: 176042 - protein, 429 aa, unidentified
MTRISVGVDVPKNRSTVCIMDQDGKFIMRPFLVWHSTEELDFLADTLKRLNGEVRVIMESTSVYQYPIALQLKERGLFISIVNAYKVKKFANTDFRGGKTDKKDSRTIASYGISYWDKLVEWQIPKDTYFNLDLLNRTYMNAKKHRQIILQELQHYIDCAMPGMDKELHSLNLSTKKDFMLDFVEKFWHRDEIVNMTEAEFTEVFTAWAKKKGYRPVEGKAAKIYAIAKSCIPYYPANPTVKTILQCIVDKLSGVNRTLVTIVTQMIEEAKKLPEYQIVREMPGVGDPLAARFFGSAGDIRRFKNSKALVAYAGIDSPPDESGDFSSTHRHITKKGSKVFRDTGYEIMMALRAQKRTWEKVRKNPEVYDYMLRKEAEGKPRKVAKIAALNKFLRIVYARIKELYDNMALAERAKAKTKSKTRAKTKATA

SEQ ID NO: 176043 - protein, 347 aa, unidentified
MLHAGLDLSRKKLDVCLLSHRGEHIDQLAVPPDVDSLKTLARRIDEVHREPVGAVVESMTGARLVHDTLEAEGWDVEIADAQKVKGLAPLACKTDKIDSLVLAVLSHRDLVPAIWLPDPRVREERELARFRMHLVKHKSALKCRIHSTLINFGRPCPVTDLFGVEGRQLLARLDVPEPWRGNVTASIELIDDLERQIDQINRRLREGQADHPYVPLLLTVPGIGRVLAFTIAAEIGEIERFPSPQKFAGYTGLCPRVNQSGDKDRRGPLTKHGPTYLRWALLEATMHALRHPAYRERYQRTKKRLGKQRGAKVAQVDVARRLCHAIWHMLTRNQEFAPRGAAFRLAA

SEQ ID NO: 176044 - protein, 355 aa, unidentified
MVMLAEHYDFVIGGDPDRDTIDLAVLDAVTGAVLGQISDQADGAGYQRLLSWAARAADGRRVWALEGTGSFAAGLVAVLAEAGEDVVEIQNKKRSRGAKSDRIDATNAARTALAQTHQATPRERGLREAIRQVLAARQGVLVSRTKAINELKSLIVVAPEHLRADLRGLGLARQLDRIDRLSSASAATIEYRVTLRTLRSIAARVRFLTNQATELDIELLALVPQHPAGPMLLGEAGVGPVVAAQLLVSWSHRGRVRNEAAFASLAGAAPLEASSGQRTRHRLSRMGDRNLNRALHTVAITRLRCHEQSRNYEKKRTSEGKTHRDVRRNLKRILARRFYRLMQAATATEELARAA

SEQ ID NO: 176045 - protein, 318 aa, unidentified
MMAQNDLVVVGIDVAKDKVDACIRSLSLRQTSPGTVQGQRKLIAWLCKHRVSKAVMEASGGYERGWAKALRGAGIEVRIVDPKRVRSFAKSAGRLAKNDAIDAEMIAWFAETFCEAPGQTYDAAREELQKLVNARQGLLEIQTKIQNRDEHVAPAPVQKMHARLLKRVTTELARIEAAIAATIKATPHFAERAEIIESVPGLAGTTAANLIVGMPELGQVSNKIAPALLGAAPYDDDSGRRRGERHIKGGRRKVRNAFFMPCLGAATQHNAVLKSFYQRLLAKGKEKKVALIACMRKLIVILNTMLARGEKWDATRYA

SEQ ID NO: 176046 - protein, 331 aa, unidentified
MGCDISQESFNYCLCNESGILLEGKVENASKPIRSWLHQLKKEHSFKVDRILFCLEHTGVYGSILLRELSARTLTVCLESALNIKLSLGMQRGKSDKVDARRIAEYAMRFTDKLKQWQPRREVIIKLQLLIRLRDRLVKAKTDLSKFNETARRFLTKEESQLVVQGTKRSIETLKKEISNADMKIERLISCDDHLKRLTELVTSVDGIGMVTCSAILVKTNEFKDFKAAKKFACTSGIVPFEYSSGKSVRGKPRVSHHAHKDIKKLLHMCAVSAISRKGELQEYYQRKVAEGKNKMLVINAVRNKLVSRVFAVVRDNVKYDKTYQYHLAES

SEQ ID NO: 176047 - protein, 440 aa, unidentified
MAMRKRDDEVFPNAAGIDVGASSHWVAVPPHVAEASVREFGAMTDDLNAMADWLLACGVDTIALESTGVYWIPVFEVLEQRGLKVWLVDARQMKYVPGRKSDVQDCQWLQKLMSLGFLRAAWRPDGEVCVVRAVARQREVLLTEQASWVQRMQKALVQMNIQLTEVLTDVMGMTGQAIIRAIVAGERDPKALARHRNGRVKASAEEITKALTGNWRDEHLFVLSQSLAMYDDIARHLAECDAKLQALLTDLGQSKVDLGKVPRAGSKLRMEFDARQILANWAGVDLTRIDGLGLAAVMKILSEIGPDLSKFETVKHFCSWLGLCPGTKISGGKVLSAKTKRSANRVRQALKMAAMSLSHSDSALGAFYRRLCSRMDKPRANTAVAHKLARMVYFMLTRGEAFVDKGQQHYEEQQRQRSIVALRRRAAALGFAINPTSAPA

SEQ ID NO: 176048 - protein, 345 aa, unidentified
MNKRDDCGVEVSAKQLLVGLAREGAPCARRTFPNTPEGHEALVRWLGGPGRTVRVVMEATGLYGLDLALRLDAEASVELMVANPRAVRHFAHALMKRSKNDPIDTDVLVEFAQRMPFQRWVRPAAALALHALARRLESLTEMHAAEKNRLHAAQLSPALPAAVVRDLQRSLRGLERALARLTRQAVEVISQDPDLNLHYQLLLSACGIGPTSAVQILAQLAVLSADLDVRQWVAQAGLDPRQYSSGSSVHKKTRISKTGNRHLRRALYMPALVAIRHEPHLRAFYRQLLTRGKAKMQALVAVMRKLLHAIYGMFRHAQPFDGTKLYRLPGEATLPQPTFSTAEAA

SEQ ID NO: 176049 - protein, 315 aa, unidentified
MNKEQVVVGVDVSKATLDVALLPSAEAMQFPNDGSGIEELGKKLKSVAADLVVLEATGGYETAVATALVGDGFRVAVVNPRQIRDFAKATGRLAKNDRIDAQVIAEFGQAIEPEIVRLPDEEARELQTLLVRRRQLVAMRVQEVNRLGLMQGAMRKRIKSHIDWLEKEIDKLEIDLTAGLRNSPAWRAKDELLRSFKGIGPITSSTMLLTLPELGQLDRRAITALVGLAPFNRDSGVMRGRRSIYGGRSQVRTLLYMAATTAIRSNPVIRNFYQRLKSRGKPHKVAMVACMRKILTILNAMVRQSTPWTPETKPS

SEQ ID NO: 176050 - protein, 316 aa, unidentified
METPQLFVGIDVSSQHLDVDSLPASHHFSEPNTEDGIAALVLRLRKLNPQTVLLEATGGYEVPVAYALYEAGLPVVIMNPKALRHFAKAIGKLAKTDKLDAQVLALYAQSIRPPVRPLKDQEQLELANLMTRRRQLQGMIVMEENRRRTCTPRVRGNIELSLAHLRQLLKDLDREIHDSIRRTPLWHENSEILQSFTGIGPKVSAALIAVIPELGTLPGTKASALAGLAPMNRDSGQYRGKRKIQGGRPAVRQALYMAALVAAHHNPVIMEFYQRLRLAGKPAKVALTACMRKILVILNAMLKNRTYWNPQLPLAA

SEQ ID NO: 176051 - protein, 412 aa, unidentified
MSIALPNQTFVGKPFKILHSDLNSLSIAVSKIKEAEEVYSLESRIFLESTGIYHYPLFCYLRDKEFIVSIINPIITKNSTNINIRKVHNDKFDSKKAALIGLKPDLKVSIIPSDLILDLRNLSREYYDLMDNRSAYVNKLQAELRMVFPQYLKIFSKITTNTALTLLEKFTSPDAFLNASKDDIITSIRSTARFGITYAEKKHNAIIQAANDAKTFGHSVNSNFKRILLYIRFIRQYDEETSSILSDMHELVDANEDTDFVKQIHLIESIKGAGFLSATTLMCEIGDFSAFRSPKQLFAYFGLDPAVKQSGKFNGTKVNISKRGSRLARRVIHTIALVSISVNRSGSSNNPVLREYYLKKCQSKPKMVALGAVMHKVCNIAFAVLRDEKEFKIITPEEHQQNYLKAKCDIAA

SEQ ID NO: 176052 - protein, 321 aa, unidentified
MDKAIEFPQVVDRCCGLDVHKKVIVATVDGTGIKRETREFSSTTRSLTELKEWLLELGVTHVAMESTGVYWKPVINILEDGGFTLLVVNAQHIKYVPGHKTDKKDSAWICKLLRAGLLKGSFIPDKAQRDLRDLTRYRRKKVESVTAEKNRMLKVLEDANLKLSSVFSNVSGVTCTKVIDAILDGHTDPDYLTSLCTHGKLQSTKEQIHDAVEGRFTEHHKFMLKSIRRSIASLEEEIAELEAEIDRRCEPVREEIERLCTIPGIDQTGAKELIAEIGVNMEVFPTAASLASWAGVSPGNNESAGKKKARIATTGTRLPKR

SEQ ID NO: 176053 - protein, 326 aa, unidentified
MIFFGIDISKLTFDVNVVSESKPRHKKFKNTPVGLEEFLKFIKSYISQSYFCMEATGVYGMCLAQFLVKNKLKTIVANPYKIKNYSRMKMNRNKTDKADSLCIANYCKSLYLDKTIEDNIYKPKSKYYQRLQSLVTRLEQVKLLQNQEANHLESTLDIITNKFIKTTINQLNKQIKSIEKAIKNCVSKDENLSNEVKLLISINGISYMTAWAILAYLGDVSLFENSGQVTSYAGLNPRIEDSGTSVNKTKLSKMGNKRLRKALYMPAVSAMQHNPLLKDLYNRLLAKGKPKKVALCAVMRKLLVLSYGVIKSGVEFDPGYKKQKAN

SEQ ID NO: 176054 - protein, 394 aa, unidentified
MKLVGIDVGKNSHHFCVMDKETGEFNVTPTSFSNNKEGFDFLINSLKPYSKKSILIGMEDTGHYHVALLKFLLSNGYTVALINPKTTDLTRKMEGGITKNDKLDTITICDVLDTPERKKQYRITKVDRFDLYEQRQLTRHHHNLKEELNVYCNRLQKSIDLVFPEFNTLFSSKYSIVYMNLLKTFGSAEAIASTDIRTIRKCFEIKGRGNRISLTPEKLKECAKNSIGISSEVETIQIKHLVSQITLIKEQIAEIDKKIEEFSITNNSPILSIPGISHFSGTSILAELGDIGNYSKPSQIIKFAGVAPYHYESSQYNAQHTGITKKGSKYLRKTLYQIILTVINNNPVFKKYYLLKISQGKGHRCAQGHCIRKLLRIIYHLLETGQSFDSALLR

SEQ ID NO: 176055 - protein, 303 aa, unidentified
MQKITTIGLDLAKNVFHVICCNEYGKVVRKKMLRRREVIPFFTQTSPCLVGMEACSGAHFWAHQLTALEHQVKLIPAQYVKPFVQGNKNDYNDALAIAEAVVRPNMRFVTPKTQVQQDVQALHRLRERRLQERTALCNQVRGLLAEYGLIMPKGVNVIRRRIPELLEDAENDLSGLFRRLLAQCYQQLQEIDKHIELYTQLLKEQNKQDEACQRLQTIPGFGPIVASVFHAVIGDGSAFRRGRDVSASLGLVPRQHSSGGANTLLGISKRGDSYLSAYSTEACHPDHVKVAIQTTAKLPPIGA

SEQ ID NO: 176056 - protein, 387 aa, unidentified
MQKPHDDSKACDAAFVQDSTLVVVIEMGLSSWLVAGMIPGVSREPLKKIDPKAEELLQLLYRWRDEAIAAGKEITRIAVAYETGRDSFWLARWLRKRGIDAHVIHATSVAISREHRRAKTDRIDTAMLRRGFLGWLRGEPGHCSMAIVPTVAEEDAKRPHRERDSLVHERTSTINRMKSILIQFGVRNFNPVLRKAREKLNAVRTPEGIPLPPNTVAALRRHMERFCVINEQIKAIEQTRLQHLERDPADRFNAMVFLLVRIIGLGVETAEQLVREILSRQLRDRKAVARYSGLTGSPDESGSKRREKGLSRSGNGRVRKALIQLSWRMLQFQPKSALVLWFKKRTENVQGSRKPMIVALARKLIIALWRYVNTGVVPEGFELRPAA

SEQ ID NO: 176057 - protein, 427 aa, unidentified
MNENEVTRYEKFCQFKGEIRSSKDYLIVGIDVAKDRHHAFFGTASGRTLLRRLLFDNNQAGFQQLITRASQVRIAHGLKRVVYGLEPTGNYHKPLSNWLLERDQMLVLVSSKTIADNRQTLDGRWDKNDTKDSANVADLIAQGKCQFFERPDTRLIELRNLLSLRRRLKKDEHALRMQIRNGLVCKYFPELDRHWGSCLTENLAIVRWCLDPRKITAIGFETFVRQVTRRDRGLRQQKRLMRIYEAAGISIGCPMDESAHFEARLLVEQHEKLRNKIGQTEAKIQELCKSFPGYRRLLSIPGFGPYVSSIILAKLGDPNRFMSRKQVIRLGALDLNANRSGKRSHTAVPVISKRGSSELRYALYQAALIATYHNDRFRALFTRYLKGREQERGIKTKMRVKLAAKLLVIAWTLMRTDQDFDPLMIQC

SEQ ID NO: 176058 - protein, 465 aa, unidentified
MTIYSVGIDFHQGQHRARCLDDRAQPCDSFGFQTTPEGLATLEEHIFKDGSNPIIVFEPAGIPWLTVAAYLRSRYPDCRLVKAKMQKVAALRRYLRGPVKSDRIDALTLAKMPFIDPEQLEEVYLPSAEIHALQRLTRQRKRLESDIAGRKVRIEMIIDGYLPGVRKAFASPWSTQVRAFLRARLNPFAVVLDGEKALSTFLSKAASRDKGSRAESHQIFQACQAVADICKVAEPATTINEEFFVELQDEIARELRLMETEEAESESLEGRISEIYHKLHPSNNLCTIPGVGEHTAPIFLAAIGDPARFRNQSAFANWTGVVPRSRQSSNMEAKGLRMTKAGPSIMRMALFQSGNIGRRWDPQMAAIYYRQMVSHGKNHKQALGAVMSHLGARVLKVLLEDRPYELRDIDGKSVTRDYAKRLILTKYHVSEDIRRERRRRNSKIGKIGETATNRINEATKAPQPV

SEQ ID NO: 176059 - protein, 412 aa, unidentified
MPDDQSLPNLSNLSWEVYVAFKIFRKNCCGLDVHKTWIYACMGITDTNGRTEYKQARFSSFTKGLQKLADWLAKYDCNDVCMESTGKFWIPVFNILEKTCWVTLAYPKYTKPQKGNKTDHKDAKWICDLYMCDMVNPSFIPPPDIRQLRDLMRYRSKLTNIMTSEKNRALNCLTVSYLKLDDVFSDVFGKSSRSIIRYILEHPGETFQVAPFIDRRCKHPVEEIQAVIDGTISHQQAVKLRECLQHLDELEVHKTNVEKEILCLVQQYPYQLELLQTVPGFSGNIMTAIALISEIGADMSVFPSAKHLVSWAGCCPRNDQSSKKVKSTRISRAGVYLKPLLVQVAIQPFTANADKLSAAGALEIRCQICDGRFLSMWAALFIFLGCPLPPCPKNLHVHNGRIVILASVAWIF

SEQ ID NO: 176060 - protein, 350 aa, unidentified
MHYIGVDYHKRYSYIVVKDEQGRREQKGIVNNTREEFGRFLEPYRPGKAVLEATRNWGLIYDWLEEILGDVALAHPLKVRAIAEARIKTDKISADILCDLLRSNLLPQAYVPNKETREAKNILRQRMFFVRVQTMVKNRIYTILDRHPEILSQAPEVSDFFGASGMEWLKEVVLPGQDNRLLTSELELLEVLKRKISESNGIVKEQAKGDRKVKLLRSIPGLGPFFSVLVAKEIDDISRFRDEKKLCAYAGLVPSTYASGGKVFHGRITKMGNKWLRWAFIEAVQPAISSDADLFAYYQRLRIRKDANAARVATARRLLTIVYRVLSQERFYQRNRQARRSRVPAALVTS

SEQ ID NO: 176061 - protein, 361 aa, unidentified
MRKVALDLGVRKTAYCEVKNGVVVQRATVTSVETLSSLLGPKEQPAVVAIEACREAWHVHDLLRSWDNEVVLVDTTRSRRLGIGQHGRKTDRIDAEVLALALERGGIPVAHVLSPHRRELRRWLGVRRALVESRANLITTCRGLAREQGVVLPKCTVGIFARKARRAAGNALAVLEPLLKQLDAINPELTAAEAKLAELCETEPVVQLLMTAPGVGPTIAACFVSVIDDAKRFRSPHQVESYVGLVPSEDSSGGKRRLGAITKKGNPYLRSLLIEGAWGVLRHRDPKEPLRVWAEAVAERRSRKIAVTALARRLVGVLWAMWRDSKPYDPKLLAAASSRGTRRLAHSLQVQARTLEVHVQP

SEQ ID NO: 176062 - protein, 402 aa, unidentified
MNAVGIDVSKGKSMVAIMRPFGEIVSAPFEIKHTASDIHSLIELINSVEGESRIVMEHTGRYYEVLAHQLLEANLFVSAINPKLIKDFDNDSLRKVKSDKADAVKIARYALDKWQNLKQYNVMDELRNQLKTMNRQFGFYMKHKTAMKNNLIGILDQTYPGVNTYFDSPARSDGSQKWVDFASTYWHVDCVRKMSLNAFIDHYQNWCKRKKYNFSQSKAEEIYGKAKELVPVLPKDAITKLIIKQAVDQLNSASTTVESLRTLMNETASKLPEYPVVMAMKGVGTSLGPQLMAEIGNVSRFTHKSAITAFAGVDPGVNESGTYEQKSVPTSKRGSADLRKTLFQVMDVLIKTHPQDDPVYQFLDKKRAQGKPYYVYMTAGANKFLRIYYGRVKEYLASLPES

SEQ ID NO: 176063 - protein, 391 aa, unidentified
MVYVGIDVAKDKHDCIILDGNGVILADSFVFTNNLDGFNLLMEKINSVSDSLENVKIGLEATGHYSYNILGFLTEKGLTTYVLNPLHTNLYRKGLSLRKTKTDKVDASTIAIMIMHEHFLKSYSNISYHNENLKSLTRYRFDLVAQRAKLKNSIARLVNILFPELESLVSGLHLKAVYVLLSEYPSANQIANTHLTKLTNLLVANSKGHFTRDFAIKLREIAQNSIGSNIPAKSFELKHTISRIQELGVLVKETDKEIKLVLKEVDSTILSIPGISHTLGAMIVAEIGDMDRFDTPDKVLAYAGMSPSTYQSGKLESSYAKMEKRGSKYLRYALFNAAKLICNYDPTFGAYLAKKRAEGKHYTVAISHVAKKLVRLIFALHKSGQNYIPKA

SEQ ID NO: 176064 - protein, 420 aa, unidentified
MKAYNVNDFAALIGIDWADKKHDICEHPKNTKQYHYTVIKHKPEALHKWAMDLKLRYPDQKIAIVCELKKGPLIYALAKYDHLVLFTVNPSAVANYRKASTPSGAKNDPTDAFIQVEMIKLHIDKLSVIVPESTSMRALAQLVEYRRSLVQDSVDLSNKITATLKNYYPQALEWFKEKDTFIFCDFISKWPSLTTVKKARKQTLLNFFNHHNSHYETVNNARLLSIKEAVPLTKDEGVIAPNQLLVEVLIAQFKVLLMGIEQLDKAIKQLYKKQQDKAIFDSLPGAGPQLAPRLLVAFGYNRERYTDASQMQKYAGIAPVIESSGKKTWTHWRYSCTTFLRQTFVEWAGFSIRYSFWAKAYYEQQKSKGKPHNSIIRSLAFKWIRIIFRCWKTSTPYDESKYLEALKRRGSPLLKFAITS

SEQ ID NO: 176065 - protein, 319 aa, unidentified
MNATQQGGVRVGIDVSKRTLDVCLLPEGESFVVPNDQQGVDELLSRLEDSPPELVVLEATGRYERLAATSIAAAAIPVAVLNPRQARDFAKAIGRLAKTDRIDAFVLARFARAVDPSPSVIPDEEASALQAILARRRQILSMLVAENNRLQIAPKALKKRIRAHIEWLRKELSRTDGDLEEAIEASTTFKENEALLKSVPGVGPILARTLLAELPELGEITHKRLCALVGVAPFNRDSGQSRGKREVWGGRAPVRAALYMGALVATRHNPILKEFYERLLAAGKPKKVALVACMRKLLSILNAMMRDRVPWHLAHLRTP

SEQ ID NO: 176066 - protein, 335 aa, unidentified
MSKLEAGKRCYVGIDVSARELMVAIRDGGEPTMERVRNDAAGHQRLQARLRALAAPVVICLEASGTYSLDVALALARPAAGWQLSLVNPRVARRFAESLGQRSKTDPVDARVLAQYAARMQPQPWQPPSAAALRLRTITRTIAALVRQCVQHKNRQHALSASAALPALLVRELEVQVAFVDKRIRSLRRQALRVIQQQPELLRCWRHLQTIPGVGEASGLAILGELAVLPATLDERQWVAHSGLDPKQHRSGSSVEQKTRISKAGNRYLRAALYMPALVAVQHDPWLRGFYQRLVARGKAKLQALVAVMRKLLHAAWGMLHHDQPYDGAKLCPQA

SEQ ID NO: 176067 - protein, 392 aa, unidentified
MYIIGIDIGKNHHEASIVSPKGKQIGHSLCFATTHKGADSLMNFIFKNIGDSPCVFGMEATGHYWYPIYSFLKAKGYTIYVINPIQSDSLRKMYIRQTKNDSIDSFLIAEVIRFGQFSTTSMADENILAMRQLCRYRDSVISSRTEIKLRISTIMEQIFPEYEKQFSSLWLSTSMGILEKYLTPENIQNAPLDELYGIIKDKSHNRLTMDKALSIKEAAADTFGIKIAQEAFSFQLKQLIGLMHFLDQQIEAPDCQILGYYEKFDCYLHTIPGIGMIGAATILAEIGDTKRFKSSSALVAFAGIDPTVRQSGEFNSIHNHMSKRGSPYLRHAIFLAATTCSFHNSPLNAYYKKKRDQGKHHLTATGAVARKLTTVIYAVLRDGKPYEPKSFC

SEQ ID NO: 176068 - protein, 461 aa, unidentified
MKTNQQERKGKKPRFPSFPIINPNAAGIDIGSAEHWVAVPEDRDEQPVRKFACFTQDLHAMAAWLKQCKVQTVAMESTGVYWIPVFQVLETHGFEVKLINAKQAKNVPGRKTDVLDCQWLQRLHTYGLLSGSFRPENAICVLRSYWRHRHTLISYISSHIQHMQKALTQMNVQLHKVISDITGVTGMRIIRAILNGERDPVRLAQMKDYRIENSTQTIAKALEGDYRQEHLFALRQAVELYDFYQQQIQACDREIERYLCQLDGIDIASKPMAPSRRRIQKHKGNQPDFDLRTQLYRISGVDFTQIDGLDVLNVQTILSEVGLNPEAFPTVKNFTSWLAICPNNRITGGRIKSRSTRKASNRAAEAFRMAAYTLSHSSSALGAFCRRMRARLGAPKAITATAHKIARIFYQMWKHRTPYRDLGADYYEQRYKERLLSNMKKTARQIGYLIELTPMPQTAVS

SEQ ID NO: 176069 - protein, 400 aa, unidentified
MTDESGIGVYLGLDVGKGEHHAAAVNRAGKKVFDKPLPNSEPRLRELFDKLRARHGTVLMVVDQPASIGALPLAVARDAGCQVAYLPGLTMRRIADLYPGEAKTDARDAFVIADAARAMPHTLRAVDPADETVAELAMIAGFDDDLAGESTRIANRLRGLLTQIHPSLERVLGPRIQHPAVLRLLERFGSPAQIRKAGRRRLVTLIRPKAPRMAERLVEDIFTALDEQSVVVPGTDAAALIVPSLASSLTSVLDQRKLLAARIEELLEAHPLSPVLISMPGIGIRTAARILIDVGDGSGFATAGHLAAYAGLAPVTRSSGSSIRGEHPPRRGNKQLKRAFYLAAFASLSQPESRAYYDRKRREGKHHVAALVALARRRIDVLFAMLRDGTFYQSPTPATA

SEQ ID NO: 176070 - protein, 411 aa, unidentified
MRRVIGMDIHRTFAEVVFWEDGKLRPAGRVSMTRAGLEAFGRSLGKEDEVVIEATGNAMAVVRVLSPFVGRVIVANPLQVKAIAHAHVKTDKIDAGVLASLRAADFLPEIWLPDADTERRRRLVARRNQVVRHRTRIKNEVHAILHAHLVPPCPHAELFGRLGRIWLSRQIIPDDEAAAIHRHLCELDRLGEDLAGLDRKIAQTAVADPAVKQLLTITGVNLIVAAGLVAAIGDIRRFADPQKLVSYVGLNPRVRQSGLGLAQHGRISKRGRSHARAMLVEAAWAAAKAPGPLRAFFLRIRARRGHQIAAVAVARKLAVLCWHLLTKSADYQWARPALVANKLRSMELQAGQPARKGNKRGAAYAYNIKELRDREIELARHAEQAYERFVSRWQRHGNSTRRTGAASEERR

SEQ ID NO: 176071 - protein, 412 aa, unidentified
MQDILSCAMGLDVHRDTIVACLAKGEIGKDPEIEIRSFSTLIPEMQKLRDWVLETDCHHVAMESTGIYWQPIYEMLETCFGGEINILVVNARHMKNVPGRKTDMRDAQWIATLLRAGLLKGSFIPDKAIRELRHLTRYRKSVVHDITAQKNRIDKFLQSSGFRFTAFLSDAFGASGRNIIRHLIQNGSIDREALDKCLKTQTRNRIDEILVALNGSLSVHQCSFLSMAFHHLEQLEAHRSEVEDAIAEEIVKHSEALNLLCSIPGIDVTAAASIIAEIGTDMSAFPDSQHICSWAGLSPGNNESAGKRKSAHINKGNPYLKSMLCEVGWIISGKRTLYLSGWYWRVKQRKGAKRATVALARKLLTLIYTMLKTGEPYNEDCFEQRRRRSEGRRANRIVNELQKLCYLVVAPE

SEQ ID NO: 176072 - protein, 316 aa, unidentified
MKTVTSQNINVGVDTGKQSLDIFIRPLDIYFTVTNDEKGVKEAISLIKKHCPQRIVIEATGRLELLFVMACAKANLPFVVANPVHVRRFAGAIGLNAKTDKLDAQLIAHYGEAIQPKLSTLKPESMRLMADLVARRNQILNMQTMEKNRLQIMPKGLHSTINPILTAYKNQLAKIEKQLVKLIESCPDYQEKNDIVQSMPGIGKVSAAALIGYFPELGYVSNKQAAALVGVAPMNRESGRYQGKRTIKGGRPQVRTVLYMAMMSAMQCNSVFKRTYQALLAAGKPKKVAIIACVRKMVVILNSMVRDGKKWEENMV

SEQ ID NO: 176073 - protein, 271 aa, unidentified
MTHTIVGVDIAKNVMQVHWVDQETGEIVNRPVKRAAFLEYFANRNACLIGMESCSGSQHWARRLIEMGHQVKLMPAKFVKTFNIRNKNDAADARAIWMATQMTSKAVAVKTEAQQAVLALHRMRQQLVKFRTMQINSLRGLLSEYGEVMGVGRTALDKAVARVLERLAGRLPAILIDTLREQWKGLDDLDRQIGQIERRLREWMKDDQAAKAIAVIPGVGLLTATAAVATMGHAKAFKSGREFAAWLGLVPGQTGSGGKVELLGISVVTRT

SEQ ID NO: 176074 - protein, 353 aa, unidentified
MEYIAFDAHKHYTLASVARPDGQLVREQRLPHERGALQQFLARCEPGSPVAVETIGNWYWIVDEIEAAGCVPKLVHARKAKLMMGEINKTDKLDVRGLNQLQRNGTLPTVWIPPGELRDQRDLPRTRMVLVRQRTQLKNRIHATLAKYALHNLDVSDLFGVRGRALLRQRLDLLPPYTAYATQQLLEQVENLDRQVRGFEHQMQTVFKPTPTIQLLLTLPGIGLLLAVVIALEVGSIARFATAEKLAAYAGTTPRVHASGGKTRFGPSRPDVNRYLKWAFVEAANAICLNRGRAPRRHVSRLYERVARRKGHQKAIGAVARHLAEATYWILTKQEIYREPKAAAVSSTGDKRG

SEQ ID NO: 176075 - protein, 356 aa, unidentified
MSQKLNSEIATLGIDIGKNSFHIVGQDRRGALVLRQKWSRGQVEARLANLPPCLIGMEACVGAHHLSRKLQALGHDARLMPAKYVRPYSKGEKNDYRDAEAIAEAVQRPTMKFVATKTAVQLDLQALHRVRERLVSQRTGIINQIRAFLLERGIAVRQGLHFLRAELPGILAKRTDVLSPRMLRVIEDLCGDWRRLDERIEGLSDEIAALARQDKGCERLMTVPGIGPIISSAIVAAIGSGDAFSKGRDFGAWLGLVPKQMSTGDRTILGSISRRGNRYLRTLFVQAAWVVLVKITPEGWERYGLKSWIEAAKHRLHRNVLAIALANKLARIAWAVLHKGRAFECVKTNATSARAA

SEQ ID NO: 176076 - protein, 423 aa, unidentified
MKLAAEQAFTALVGIDWSDKKHDFCLQGAGSQQHEFGVVAHRPEAIDHWARELHERFGGPIAVCLEIAKGPLVHALQRYPFMVLFPVNPAMIAKYREAFVPSRAKDDPTDAEIALELLLRHREKLQPLKPQSAAMRALTTLVEQRRNLVGDKTRITNRLCHTLKEYFPQALDWFEDRDTVLFCDFLQRWPSLKQVKRARQATLRSFFWAHNMRRAELIEERIHGIRSASALTDDVAVIGPHQLLVQVLVSQLRVILQAIDEFDAEITQLAERLPDYALFAALPGAGAILTPRLLVAFGEHRERYASAAQLQQYAGVAPVLERSGNKCWVHWRMACPTFLRQTFVEWAGSTIPRSFWASAYYQRQRDKGCSHQAALRALAYKWIRIVYRCWQTRTAYDESTYLLALKRRGSPLIASVSIAPQSS

SEQ ID NO: 176077 - protein, 341 aa, unidentified
MGIVVTGFDVHRAQITFDALDTETGEIATGRIRAAPEAVEQWVGRFAGREVHVALEACTGWYFVTRSLERAGAVAHLAEVAETRALRGRKRRAKTDRADARWLRKLLSEGRLPEAWIPPDHLCWLRIRTRLRKTLGDEAVAWRQRAQATLFHLGLPALPTGYEGQRARQWLSELKLPAAARERIEVCLAMIEAIEAQMAPVESELRAYSRRQRGCQALERLFGIGGVTAPAILAELGDVTRLHRSRQAVRMAGIDIGVNRSDRRSRVGKLSKQGAPALRWALYEAAQSACRPTSPDHAHYLALKERGLSHPRTSLTIARKLARRCYHTLRELGPAALEEPA

SEQ ID NO: 176078 - protein, 387 aa, unidentified
MYYVGIDISKYKHDCFICTETGEVIEENLSFANTNEGFNQLLNLLKSLDNSKQIRIGFEATGHYGMNLKLFLEKNNYSFMEFNPALVKKFIAGQTLRRTKTDKKDAMLITKYLISVDYKPHPTQFYHKYSLKSLTRLREKLVKQRSYYEVQITNILDIIFPELKPAFDNKFSRTLFFILNKYKTAEKIANMRDYNSIKNVSHGRFSYAKFLQIKELAKITVGECNSIFETELTSLLTLHSSIQNEIKDLEGEIEKIIKELDSPILSIKGIGIISCAGIVAEFGDISRFKNANAMIAFAGLEPSISQSGTESHTGKMVKHGSGHLRYHLMNVAEYVFLHEPIFTEYYYKKRSEGKCHRVVLSHIAKKLIRIIYKLETENIKFDSSKCN

SEQ ID NO: 176079 - protein, 428 aa, unidentified
MNCTQNEKLNQVTPHTLIVGVDIAKFKHVARAQDDRGKILGKALTFTNTKEGFDAFFAWLEEMQHKHEKADVLVGMEPTGHYWLNLAYTLKERLVSFGVVNPLHVKRSKELDDNSPTKNDIKDARVIAQLIKDGRFSYPRLPMDQDAEVKAGITIRNQIVGDLQALQGRIHNWLDKYFPEFLTVFKDWSGKMALATLEHIPLPVQLNQTTPERVAEIWSTYGGVQRPSHKRIQRLQEAAGRSVGLTVGLQMAQREIATNIKRYKMLKEELHALEKQLEDLVLTLPGIAEMLTVPGVGMVTVIELYSELGDIKNFENPRQILKYAGLNLRESSSGKHKGQTRITKRGRAKLRALLFRTVMPLVRHNRAFKALHQYYTTRQENPLRKKQSLIVLCGKLVRVLHTVGQKQCPFDEERMIRDIPHLSLALGA

SEQ ID NO: 176080 - protein, 325 aa, unidentified
MMAQNDLVVAGIDVAKDKVDVCIRSLSLRRTFASTAEGRRELACWLRRKKVGKAVMEASGGYEREWAKALREKDVEVRIVDPKRVRSFAQSAGRLAKNDAIDAEMIAWFAETFGEANGQAYDAARENLVQIVRARQGLLDLQTSLQNRSEHAAPEVVRKMQGRLLKKIALELAGLEAAIAAMIKATAHFAKLAEIIESVPGLGEVTAAGLIAAMPELGQVSNQAISALLGVAPYDDDSGKRRGERQIKGGRRKIRNLFYMACLGAATRHNPMLKAFYQRLLAKGKPKKVALVACMRKLIVILNTMIARRQKWDTSHYAVSRSSAP

SEQ ID NO: 176081 - protein, 395 aa, unidentified
MYSLLVGIDVSKDFFVTAGIDSEGKGSFSRSYSMDSNGFDDFLKTITSHGEDLSKVIVAMESTGCYHINLFSFLASQGVRTVVVNPLLIANFAKLSLRKTKTDKKDAMTIARFLLDHHEEVSHLSLSQDHQDLRDLSRERESLCHLIAAAKVEIKRVLRVTFPELESIGNLDTGAMLRFLQQYPSARLARAAKSKAIVKALKQPYVGNKLTYSAEDILRAANTSIGTVSSAKEIILQGKIATLLHLQGRLDEMTKLLTDLCKATRIDDLKILRSIKGVGPKTAAPFLAEMGEVQNYSSHKKLIAFTGIDPSLHESGNYVGMSKLSKRGNRDLRRAVYLMTAAVVSKNPFFKACFLRRKREGLPPQKALFATAHKLLRVIFAMLTQRTYFNPKEVI

SEQ ID NO: 176082 - protein, 377 aa, unidentified
MTTTDAAAEARETVYVAIELSKKTWVLGIAHPDRDRPSIHRVSGGNIAELVSRLRVAARNNRRILVCYEAGYDGFWLARALAKMGIECRVLDPASIQVNRRARRVKTDRIDVLALLRALIATDRGERHVCAIVRVPSVEEEDARRSHRERQRLVRERTGHINRIKGLLFAQGIRDIKPKLRRTRIDFAALETAEGHPLPDRLRRELEREYARLSLIATQLREVEKERDTADAQDPVVEQKRQLLVALHGVGATSAAILAREVFARSFASRRQLGSYLGLTPSAYDSGSTTRCQGISKAGNSWARRILIEVAWFWQKYQPASPLSHWYIQRTAGQSSRIRRIMLIALARKLAISLWRYVETGLVPEGVAIAKAKLRPA

SEQ ID NO: 176083 - protein, 339 aa, unidentified
MHVTTIGLDLAKNVFQVHGIDENGEVVFNRALRRAQVLVFFERLEPCLVGIEACGTSHHWARELIKLGHNVKLIPPAYVKPYVKRGKSDAVDAAAICEAVTRPTMRFVEVKTPEQQAILSVHRTRDLIVRQRTQTINMLRAQLAEFGIIMPQGIYHALQFAKDCINDEPLNLPMDAQEVIFNLCDELLFLHAKILRHSRHMTRIAKSEERVALLRTIPGVGPITASAIVATVGSGKQFNNGREFAAWLGLTPLNRSSGGKERLGHISKMGDQYIRRLLVLGMTSRIRSIRLEPEKFDPWFADILSRKPSRVAAVAMANKTARMIWAVLTRNEPYKVRTV

SEQ ID NO: 176084 - protein, 311 aa, unidentified
MRIICGVDVSKARLDVCIEPGAIFGSFNNDAAGIAELTGFCRRHQAEMVVMEATGGYERRAFLLLWEAGLPCAMTNPRSVRHYAEAMGVLEKTDRLDARVIARFAQAKNLQPTPAPTPAQQRLKALVARLRQVTDDLTVQKQRRAGLADAEMLASIGEVIALLKRQSRTLEGEIASMIDDDPLWAQLAQAWGSVKGVAGRTVARLMADLPEIGTYSNKAIAKLAGLAPLADDSGKRKGKRSIRGGRAAVRSILFLVAAIAAKYDNTLAAFRDRLRAAGKPKMVVRIALAHKLLVRLNAKARDARVQYANAT

SEQ ID NO: 176085 - protein, 418 aa, unidentified
MPDPTSVPEPEPPWAAFVSIDWADQKHAWRLVPAGSSSHEQGSLENTPEAVDVWATGLSVRFGGRPIAVILEQSRGALVYILGKYAHLVLFPVHPTTAARYRKVFSPSGAKDDPRDAESMLDLLLHHRGQLRRWRPDTVANRHLQRLVEHRRVMVNESTRQNNRLTACLKMYFPQVLQWFDDLDTPVVGDLLKRWPTLQELQRAQPGTLKKFFSQHNSRSEKRISERIQAIYQAVPATNDEAVLLGETAVARGLAALLKTLRENIESLDMQIARLVAEHPDAPIFASLPGAGAVTVPRLIVAFGSDRDRYDSAYQVQCYSGIAPITAASGKSKWVHFRWACPKFLRQTFHEYAFLSLRGSEWAKAYYDQQRKNDKSHPAAVRALANKWIRIIFRCWKDKKTYDEATYMEALKKRKSPL

SEQ ID NO: 176086 - protein, 338 aa, unidentified
MNYGAIDLHVRYTWIRIVTADDTVVLEDKVPTTPERLTAAFRGQPRARILIESGTDSEWVAQVLEACGHEVIVAAPSYALMYGHRDKQIKTDRRDVVALTVACRHGIYKRAHRVSAEQRQRRRRLRVREQLVRARTQLINLVRAQLRQEGYRVRACASEALPRRYAELPLAAAVRAALAPALTTITTLTEQIASCDTQLQAVATVDPIVRRLMTAPGVGPITALTFRAVLDDVARFADARSVAAYLGLVPREDSSGTRHRKGSITKAGPTGLRVLLVQASWVIWRQRGSALYDWVHQLAERRGKRIAIVALARRLGRILYAMWRTETDYCLQPTRKAA

SEQ ID NO: 176087 - protein, 348 aa, unidentified
MLADQLDYVVGVDPHRDSHALAVVQVLTGAVVFETTVAASSQGYVQALEVVDEHASGRRVFAVEGTGSFGAGLTRFLSGRGERVLEVSRLRRERCSGGKTDALDAVRAARSVLGQERPATPRAGGERQALQALVAAREGAVNAKCAGLAQLRDLLVTTPEPLRSELRPLTQAPLLRRLAATRPEGRRDPELRGSMLALRSVARRVLQLQAEQRELGRQIEALTRKLAPQLLDQPGVGPHAAAQLVLSWSHPGRIRSEAAFARLAGAAPIPASSGQTVRHRLDRSGDRKLNRALHLILVTRKRTHPPTRTYIERRIQEGKTRREANRCLKRYLARSLYRLLEHGPPIAT

SEQ ID NO: 176088 - protein, 323 aa, unidentified
MSKHIMVCAGIDTGKHKLDVALDAHSDQLQVDNTADGHKALSAWLRQRRVKRVGIEASGGYEQAVVHQLRQDGLLVIVFQPAQVRAYAMFHLQLAKNDKIDAALIATCAAATRKIHAPPDPRLAPYAEHLTLIDQITEDIALIKTRRASCRNARIRGVWKDEITRLKRLQNAELKALVKAIRQHPDLAKRLDLIESVDGVGLSTTVAILVRMPEIGRVTREEVAALAGLAPYDNDSCSQIGARHIKGGRKRLRGRLYSAALPASFRWNAQLIALYQRLTAKGKSHKIALIACARKLLIFVNAVIARGEPWTEKPIRIVHVKAT

SEQ ID NO: 176089 - protein, 346 aa, unidentified
MLYAGLDLSRKRLDFHLLDAEGATVEVGAAAPDADGLHRLTCRLDRHGEAIRAAIESMNGARFVHDRLELAGWEVEIADAQKVKGLAPLACKTDRIDAWVLAELARRDLVPAIWLPDPLVRAERERARWRLHLVRHRSSLKQRVHAVLLTHGKPCPVSDLFGVRGRQLLARLDLPQPWQGTLEASLRLIDELDREIGDCERELRRLGADHRYVPLLCTVPGISWVLAYTIAAELGDIGRFPSPRKLAGYTGLCPRVYQSGERDLRGPLAKQGPRYLRWALVEAATHACTAPVYRDRYQQTKARIGKQRGAKVAQVDLARRLAEAIWHMLTREQPFAPAGATDPLAA

SEQ ID NO: 176090 - protein, 380 aa, unidentified
MKKDIRFVGLDVHGETIAVAVAEPDGSVRSLGTIPNRPEAVRRLIKRLGPVTKLRVCYEAGPCGYVLYWQLTGMGVHCDVVAPTLIPVRPGDRVKTDRRDAEKLARSYRAGDLTPVWVPDAEHEALRDLVRAREAAKKDELRARHRLGKFLLRRGLRPASGVKAWTVKHRDWMRGLCFEQPAQEAAFLDYLHEVDHARDRVARLERALDIAVEAAPVAVRSVIDALQALRGVSKLTAVTVVSEVGNLSRFARPRFLMGYTGLVSSEHSSGSRISRGAITKTGNAHLRRVLVEAAWSARYRPNLSAPLKKRQEGLSEEVKQIAWKAQHRLYTRYRRLSSQGKAPQQVVTAVARELVGFLWDIGVHAERALGEKKGRGPVAA

SEQ ID NO: 176091 - protein, 348 aa, unidentified
MKILALDLGKYKTVACEYEAESGRHRFHTSLTTPPDLQRLVLQVQADQVVIEICNLAGWICDLLRGLGVRVRVANTSDDAWHWRKVRRKNDRCDALKLAQLVALNQLREVYIPQLTIRQWRALIAFRQHLVRRRTKIKNHIRDLLVSEGQLLPRGAKCWTQLGRAHLEALANPLEAVSPTEMWRGQLHAELRQLQVLQEELEKIEEKLHTIASADPRVARLRTVPGVGPRLAEAIVALVDRPERFQDARQVSAYLGMVPKELDSGETRRRGPITKQGSRLVRSLLVEVAWAGLRYNSWARATYQRISGGKKSRRKIAIVAVGRRLLVRCWAMLRDGTCWQAPTLANSA

SEQ ID NO: 176092 - protein, 355 aa, unidentified
MAVTIVEEARPVTCRTAITGGVDTHADTHVAAALDPVGGLPGVREFPATAAGYAGLLGWLGGFGTVALAGIEGTGSYGAGLARHVTAAGIRVVEVDRSDRQDRRRQGKSDPLDAVSAARAAQSGRAHGAPKGRDGAVEAIRALMVARRSAAGERTRTINQARALILTGPDDLRARFTRHTPAALVTGLASLRPRPGDVTGYAVRVALRELGRRAQFLDGQLERLDELIVPLVTAHAPGLLTVYGLGPRTAALLLIAAGDHPGRLRSEAAWAHLCGVAPIPASSGKVTRHRRGPGGDRRANHALWRIVFTRLGSHPATRAYAERRTAEGKSKAEIIRCLKRHAAREVCRHLRPAAG

SEQ ID NO: 176093 - protein, 414 aa, unidentified
MEKERINIYHKRNTCFVGIDMHKDTHCAVVIDCWMNKLGEVNFENRPSRYPAFVEDVRKICGTKEIVFGLEDTRGFGRNLAAYLVGRKFEVKHVNPAYTSAVRLANPIIYKDDSYDAYCVARVLRDMVDTLKDAKHEDIFWTIRQMVKRRDLIVKSNVMNKNQLHSQLAYSYPSYRKFFAMIDSKSALCFWENYPSPEYIWNTIPEEIYQTIKPVHQALKIQRIHEIISMIERDGDTRKDYQPERDFIVRNIVKDIRHNKELIAEIDDELRKLIPLTGYKLHTMPGIDLVTEAQIISEIGDINRFPDSDKLARFMGLAPVQFSSAGKGKDQRCRNGNRALNAIFHFLAIQMVAVSASGKPRHPVFREYFEQKVKEGKNKPQALVCVARRLVRIIYGMMKTRTEYRPYEKVDDKN

SEQ ID NO: 176094 - protein, 342 aa, unidentified
MDHSAGLDVSVKETSVCIVDDTGKIVREVKVASEPEALLQVLKNPAYHFKRIGLEAGPLSQWLFSALAEAGLPVICVETRHMRAVLKAQINKTDRNDARGMAQMMRAGIYRPVHVKTLRSQKLRMLLTHRKLLQSKAIAIDNDLRGTLRNFGLKVGVVRTVKFEARIRELVENLPDLAALVEPLLIVRRTLREQFCVLHRRLLAIVRDDEVCRRLMTTPGVGPVVSLTYRATVDVPARFRKSKSVGAVFGLTCAKYQSGEVDWSGRISRCGDEMMRVMLYEAAQAMLRSKKWSWLKAWAMQIARRRGMKKAIVALARRLAVIMHRIWVDGTEFRWTREVAVA

SEQ ID NO: 176095 - protein, 329 aa, unidentified
MEHWIGIDVSSATLDFALLDSGGAHLESVQVANNGKAVLKLVGQWRKRHGVDPHKSLFCLEPTGHYSRPMLTLVVEQQWPAWLAHPLDIQKSMGMMRAKTDKVDALRIARYARTFPEKSRLFTADNLRLDKLKHLLTRRKHLVRTRAKYKAHVADLNRFMDQDIKTAFDRMDKRQMKAMDKLIEGMDRMIIEQIAMDPKTQRQFELLLSIPGVGPQLASYLLAVTDGFVRFSDPRELACQAGVAPFQRSSGSSIRGRSHVSHQANKTLKSLLHMAAMSAVQRAGEIKDYYDRKVAEGKNRMSALNAVRNKLLHRACSVIRRDEPYVAIR

SEQ ID NO: 176096 - protein, 373 aa, unidentified
MQQNIRVFVGLDTSKMKISVALAEEGRQGEVRFLGDIDNTPDAIRRLVNKLTGKYQQLLFCYEAGPTGYGLHRQITAFGHECSVIAPSLIPRRPGEHVKTNRRDALTLARLHRAGELTTIWVPDPGHEAIRDLVRAREAAMEDLRAKRQHLQSFLLRHGRIYPGLRSWTLVHARWLSSLTFEHSAQYLVLREYRQAIEDAEARLERLTQQVADVVSTWSMAPVVEAYQAMRGVAFLTAVTFVAEIGDVRRFETPRQLMAYLGLVPSERSTGEQVRRGSITKAGNPRARRVLIEGAWTYRYPARLSRPLQVRQESLPKIVRAIAWKAQVRLCARYRRLMATGKRQSLVTTAIAREMAAFLWAIGHEVEPRRAVA

SEQ ID NO: 176097 - protein, 377 aa, unidentified
MSMTRPILYVGLDVHADSISIATADARRDGEVRHYGKIPATLRALDSVLNKLGHPGTELRVCYEAGPTGFVIARHLTKKGIACLVAAPSLIPSPKGNKIKTDCRDSIKLTRLHRAGELTAVHVPDATDESIRDICRARTDAVDDKRRAMCQLKAFLLRHGHGIADKTPWSEARMRTLRSIALQLPAMNIVLEEYIQAIDTAHQRIARLEHQMENVLATWEQAPVVRALMGLRGIRLVSAMILVSELGDIHRFAHPRLLMAYLGLVPSEASSGGKRRVGGLTKTGNAHVRWLINESAQHYRLPPKVSPDLSKRQEGIAREHRAEVQKISWKCQQRLYDKGRQMAGRLKIRQKVQIALARELCGFVWAIMKAVQPVTAR

SEQ ID NO: 176098 - protein, 341 aa, unidentified
MRKNLYCGVDLHSNNAMYVITDEQDKQLLRKRLPNELPVVLESLATFRPRLKVVAVESTYNWYWLVDGLMEADYPVVLAHPSEMEQYDGIKEADDLTDAAFLARLARLNILPTGYIYPKEDRPVRDLLRRRMLVVQHRTGIILSLQNMAQRQTGRSVGWRTLRKLSAEERTELLGEHDCLAFVTDEQVDLIEVLTEKIQRFEKKVLEHAQLRPAFVRLLTLPGVGTILALTIMLETGDIGRFQTVGDYTSYCRCVRARHLSNGKKKAHNNGKNGNPYLAWAFVEAVHHAVRTCPQAKSFYDRKRAQRNGALATKALAAKWSKAAYYIMQRQEDFDLTRVFG

SEQ ID NO: 176099 - protein, 359 aa, unidentified
MQKQNYKLDFKGKNIYVGIDAHLKSWRITVMANGVVCKTFSQAPSAKKLSDYLNLNYPGGNYFSAYEAGFCGFSAHRELHRYNINNIVVNPADIPTTDKEKKQKEDGRDSRKIARSLQNDELKAICVPSKKIEGLRNLVRYRRTLVKEISRYKSRTKSLLYYHGLIIPIELEKGSKHWSKRYSNWLRSLNLETVHSNYTLKSIIETVEHLRGELLQINRRLRQLEKEEEYSQTISLLRTVPGVALITSLTIITEIESIERFSNIDKLCSFVGLVPSTNSSGEHERVGNITPRSNRQLRNMLIESAWIAIRQDPALMMRYGELRQRLDSNKAIVKIAKKLLSRIKYVLKHKVSYEKGIVK

SEQ ID NO: 176100 - protein, 328 aa, unidentified
MTVQIGIDVSKHKLDVCWLRDPQALKVKTRVFKNDRPAFKELLQWLQKQTGQSPESIEVMMEATGVYHEALAYALYNAGVQVYVANPHRVHEFGKSLGTRSKTDKRDSIVLARFLGTRAHQRWQPEPEEVRQLRALLARLQALDTDIQRERNRQEKAEIQNASNTVKESIRTVTEALETERRRLQQQVDDHFDDHPGLKKDRELLQTIPGIGKVLSSELTATLRSREFGHASEPAAFIGLVPVMAISGSSVRKRPVMSKAGSGRLRAKLYLGAVVAIQHNALIKAHYERLVSRGKAKMSALGAAMRKLVQMAYGVLKHQQGYDPQWAG

SEQ ID NO: 176101 - protein, 316 aa, unidentified
MKTQVFVGLDVSKQHLDVAVRPQGRHFVTPNNDRGIKQLVKRLAALKPQLIVLEASGGYEFLATAALAEAHLPVALINPLAVRKFAGATGKLAKTDKIDAQVLAHFAEALRPEPRPLPDQDQQLLKAALQRRLQVVKMIGQEKNRLEKTFIPAVRQDIQAHLTWLHQRLEQLDRDLNDQIRRSPLWRDRDRLHQSVPGIGPGVSRAIIAQLPEIGTLPGKKAAALVGVAPYNRDSGRFRGKRMIRGGRSYLRRMLYMAAVVASRWNPVIRAFYQRLLAAGKPKKLALTACMRKLVLILNAMVKNNQPWNQFVTQVP

SEQ ID NO: 176102 - protein, 313 aa, unidentified
MESEGPYIGIDVAKGRLDIAVRPTGDTWSVANDTPGITEAVQRVAQLHPKLVVLEATGGLQMPVAAALATAGLPLAMINPRQVRDFARATGRLAKTDRLDAQVLAHFAEAVRPDPHALPDAQSQELAALLTRRHQVIEMLTAEKNRLGATRTESVRQRLKEHIRWLEQELGSLDEDLDHILWQSPLWREKDNLLRSVPGIGRVVSITLLADLPELGALSRHQIAALAGVAPLNRDSGRFRGKRMVWGGRARVRAALYMAALTASRYNPIIKAFYQRLCSGGKAKKVALTACMRKLLIILNSMVKHRQAWEPDV

SEQ ID NO: 176103 - protein, 409 aa, unidentified
MEVMHERVAGLDIGKATLTVCVRTPGPRGRRSETRTFPTTTRALAVMRDWLLECGVTIAAMESTSTYWKPAFYCLEEVLEVWLVNAAHIKAISRPKTDVKDAEWIAQLLEHGLIRPSFVPPPDIRRLRMLTRYRVQLMGDRTREVTRLELMLEDASIKLSSVAASLTSVSARAMLTALIAGERDPQVLAQLAKGKMRIKIPQLVEALTGHFDDQHAQLARTMLHRLELIEDALAELDAVIAHACRPWAHQLELLQTIPGVGPKVAQVILAETGGDMSRFPTAAHLASWAGLAPGIFESAGKSHQPEAQHGNKWLTSMLVEAAGSVGRMKGANYLSAQFARLTARRGMGRAAVAVAHSILVSVYYILSRDEPYTDLGADWLARRNDQAHARRLVAQLERLGHTVVLDPTG

SEQ ID NO: 176104 - protein, 345 aa, unidentified
MDHFAGLDVSVKDTSVCIVDDTGRIVREVKVASEPEALLPVLTNPLYRFKRIGLEAGPLSQWLFSALAEAGLPVICVETRHMRAVLQAQINKTDRNDARGMAQMMRAGLYRPVHVKTLRSQKLRMLLTHRKLLQSKAIAIDNDLRGTLRNFGLKVGVVGALKFEGRIRELVENLPDLAELVEPLLIVRRTLREQIGILHGRLLAVVRTDDVCRRLMTVPGVGPVVALTYRATVDVPFRFRNSKAVGAVFGLTPSKYQSGEISRSGAISRCGDEMMRAMLYEAAHIMLVRLAKWSWLKAWAMKIARHRGMKKAIVALARRLAVILHRIWVDGTEFRWTREQAAAAA

SEQ ID NO: 176105 - protein, 324 aa, unidentified
MMTPALGIDVSKDRLDVETTACGKPRSKYFANSPDGWRHLIAWLKELKIKRVHACLEATGRYSLGIALALWEAGHIVSIVNPAQIRDLARTKLGRNKTDAVDAGHIREYAEIFKPQPWTPPSPAMQRLGELQTIRAGIVSSLTEWKNRCGSGLADDTALALVKATITHFAAQLAEVDKAIAGTIDNDPDLSAKRDLLLSISGVGEVLAGLVLSELPGTDVLRSSAQAVAYVGLNPRSHRSGSSIDRPTRISKIGNATLRSALYMPALSAMQHNPVVAALAKRLKAQGRLKGKQIAVAAMRKLLVLCFGVLKSGKPFDPALAMPN

SEQ ID NO: 176106 - protein, 400 aa, unidentified
MPFYVGLDWASEAHAVCVLDGAGRIRWQGSVPHTAVGLSELVRRLTRLAPAAEIQIALERPTGLLVDTLVEAGFQVVPIHPNALKATRARYSAAGAKSDPGDAFILADVLRTDGHRLRALRPLSDATRALRALVRGRDDLVAQRIALGNQLRALLEAGWPGAAALFADVTSPIALAFLSRYPTAQSAARLGERRLAHFLAQHGYSGRRTPAELLARLHAAPPTRIGEQEADASAEVVRALVAVLAPLGVQLQQLSAAITAAVAQHPDGPVVQSLPRSGAVNAAQLLAELGDDRHRFTSADHLAAEAGVVPVTRASGKARGVGFRWACNKRFRRATTTFADNSRHASPWAAGVYARARQRGCDHPHAVRVLARAWLRVLWRCWQDHVPYDVTRHRGAAAAA

SEQ ID NO: 176107 - protein, 424 aa, unidentified
MKVTYQTCCGVDVHKSFLVATIVKTTGGIEPSYQKKRFSTFNNSILEFKQWLLDNDCHDVCMESTGKYWVPVFNLLEDDINVVIANPKWVKAVKGNKDDTKDSKWIGDLFRLGLVKGSYIPCKKVRILREYTRYRYKLVSCRSSEKNRYQNALTVCNVALDSVVSDIFGKSSTSIIDYLLEQSGSSINHEEIASKLLRSLKSKEDAVIESVEGYQMTDAQKYRMRLVRAHMDYITAEINDVDKMIENMISSNTDFENAVQFLCTIPGVKRDSAITIISEISTDMSQFSSSKRLCCWAGLTPGSNESAGKKKSVRITRAGVYLKPALVQCAHAAVKSDKSPYYKKKYESLVKRRGKKRAIIAIARMILTAIYQMLSTGEQWNPSDLYKIDMPVALVEKQKAKAIKQAKKLLQREGLLPPDEPFAS

SEQ ID NO: 176108 - protein, 413 aa, unidentified
MERVFGYVGIDWATEAHQVCALDAQGAVLWERSVPHNGDGLSLLADQLTAWAAGSPSAIWVAIEVPRGAVVETLLERGFSVFSINPKQLDRFRDRFSVAGAKDDRLDARVLADSLRTDQPRFRRLQVEPPDVIELREWSRLTDELKQERTRLTNRFREQLRRYFPQAAELTNNLAEPWFLDLWQRVPTPQAARRVRVATVRAILQAHRIRRLSPVEVLACLRQRPVVVAPGTAEAAQAYLQLLLPRLRLILRQIAEAERRLDDLLPDVTTPAPNDKQRDATILRSLPGVGRVVLATLLSEASQPLVQRDYHTLRALCGVAPITKQSGKRRVVVRRMACHPRLREALYHWARVACQHDPACRSRYAALRQRGHTHGRTLRGIGDHLLYVTCTLLRKGELFDPGYRRNNQQTPAA

SEQ ID NO: 176109 - protein, 370 aa, unidentified
MSVRRILAKTIDTDLEYEAIGIDLAKNCVSAALLTTDGEVVCIDRLDYSELEKSAQALSPTTFAMEPCTEMNYLVQKLEAWGHRCLVIGGKNVQNYVENHYSGQKTDLNDAQALAFLAQDKQLRTIKAKDIEQQKYASLTTLREQYIKQYRQTIVSLKGICQAWGLNISKGISGKARLKDLIENHAAFPEELKESLVDMVTHAQTAQKALNKITKTLEELAKSDKVCQLIQTIPGLGSICSCRLRATVGDIKRFKSPKDFPAYYGLVPRSIATGHNERKGKITHRGDRTMRSLMVQAAGSLVNMATKGKLKSKQLTKWILKKQKEKMPWGKLVCAVAAKLLRIVRAVLISNKPYNSKIAGVAKCSLSKGS

SEQ ID NO: 176110 - protein, 375 aa, unidentified
MGNVIEAFVAFDTSKLRNAVAIAEAGRAGEVRFLGEIENTAVAVAKLVRKLAGKYGRLTFCYEAGPTGYGLYRQIEGLGYECLVAAPSLILKKPGERVKTNRRDAVSLVKQLRAGDLTAVWVPDPHHEAMRELTRARETAVEDLRRKRQQVSAFLLRQGLHYPGERAWTKTHRDWLASQKLEYAEHRTAFEEMLLAMRQAQERIERLEQAIRVAVPDWSLAEVVTAVMALRGIDFISATAFLAEIGDLSRFRTPRELMAYLGLVPSEASTGDTVKRGAITKAGNRRARRILVECSWSYQHPPRVGKEKQERVAAAPPAVREVAWKAQCRLSARYRALTRKGKLKTVAVTAVARELSAFIWAINRQIANPARRPGK

SEQ ID NO: 176111 - protein, 392 aa, unidentified
MVVSVGIDVSKDKHDCFIVSSEGEVLADAFIIPNTMDGFHYLLQRIRHCTAPQDKIKVGLEATGHYSYNLLGFLLDNGLTTYVLNPLRTNLYRKSLSLRKTKTDRVDARTIASMLLSDAGLKPYTDTAYHNEELKSLTRYRFDKVKERAKLKSSIARLVCILFPELEKLVPSLHIASVYALLEAFPGAKQVANTHLTRLKALLETASNGHYKRDMALKIRNAAKNSIGSQIPAKSLELQHTIRLIRELDREIDEIEEQIQSIMDELHSPITTIPGLGFRMAAMILAEVGDFTRFDSPDKLLAYAGMSPSTYQSGQLKNCYPHMEKRGSRYLRYALYNATKYVCHWDPAFADYLAKKRAEGKHYNIAISHAAKKLVRLIFAMEKSRQPYCSAA

SEQ ID NO: 176112 - protein, 342 aa, unidentified
MFFLNPNSCKGFEPVPSKEGSWMMAQNDLVVAGIDVAKDKVDVCIRPLPLRRTFASTAEGRRELVSWLRRKKVGKTVMEASGGYEREWAKALRGAKIEVRIVDPKRVRDFARSAGRLAKNDTIDAEMIAWFAETFGEAPGQAYDAERDKLAQIVNARLGLLDIQTEMLNRGEHAGPEAVQKMQARMLKNIAVEIAKLEAVIAAMIEATPNFAERAEIIESVPGLARTTSATLIAKMPELGQVNGKIGAALLGAAPYDDDSGRRRGERHIKGGRRKVRNAFYMACLGAATRHNPVLKAFYDRLIAKGKEKKIALVACMRKLITILNTMIARRQKWNPNRYALS

SEQ ID NO: 176113 - protein, 348 aa, unidentified
MRQVCGLDVHKDSVFVCILNDKGIVFQGKYGVLTTELEQMLEVMMQHNVAEVCMESTSVYRMPIWRVLENHVQKLMLVNPYFIKQLPGRKSDVKDAEWIATCLLKDLIKGSYVPEERIQQLRQYDRRIFDLNKEIVYKLTKLDMALQRCNIRISNYVSTTDGKSYHEVVRLISEGRTSPDELVKVIHSRTVNRHGRETIVGALTGVISETDIDVIRQLREEVEIDNKHKDECQSKMDELCKKWFPKQFENIQTIPGVKTRSATAIIAELGTDMSSFQDAAHLVSWCGLKPRNEESAGKIKSRSITHGNKYLRKTLIECAWAAGKKQGCFYNKFSYIQTVVRRKKCHES

SEQ ID NO: 176114 - protein, 531 aa, unidentified
MAGKLSGSRRRSYTKSRAKNRQHLQKPSGAITNRVTKVGGDRFAIVSIDPAKNRSEWMMADYFGKLLIEPQTLEHQSGHFKAAIVLVRQAQQEHQIKDTIVVVERTGNYHLAPKRAFASAGFETRVVHPFATKQYRMPADPGNKTDETDLHAQHRAAVAGFGLCERELPITYRELQLRSRHRRNLVEKSSSLACQIRDNLHLSMPGYAALFDRLLENHTAMSVGRCCESPAKVLKLGRDGICKRLRNESIRCNQRAIDKILSWASQSADAPIQDGALHHAIFKDLDELNQHLNRQITAIERDLASVLVQTPYVRLMAIPGINVVSAADLAAEMGPIDGYANANAITGRCGLFPSRHQSDQTDSSGPIIRKANRRLRCALMRIADNLAAHCAYYRGLAEQDFARGVDIRASRVKTAKKISRLAFACLAGDQPLKHPAFRSPDSILEKLREFHRLHQTPMQQVLTDLTRAVEQLPGHTQGHEATVVSKVLREHAKRKRAPVGIGKLLTAVLARLGVSPNDVSKTNSLEPEDRP

SEQ ID NO: 176115 - protein, 354 aa, unidentified
MANQAHSAVVYGIDLGKTWFHVAGCDATGRSLHKVKLSRSRVFPFFANTSVALIGMEACPGSQWLARRLQALGHTVKIMPAQFVKPYVKSNKNDAVDAEAIAEAVTRPSMRFVQVKQTEQVDLQALHRARDLIVSTRTRLICQMRAFCLEYGIAMRNGAGAFKLDADVLKVLNDDTNELTPAMRHLLRELWNQLQELEARIQKFTRQIESIASRSQFARRLLTIPGIGPLGATALLAAVGDGKQFKSGRDMAAWLGLTPAQYSTGGKSTLLGVSKRGHAYVRRLLIHGARSCVIHLDRTRDRLGSWITDLQRRMHINKVVVALANKLARIAWVVLTRPGALYQRVDPAFSGGST

SEQ ID NO: 176116 - protein, 345 aa, unidentified
MPIVGGLDIHRKQITFDYLDTVTGQVQRGQISPADREHLRAWLARFAGLEDVAFAVEGCTGWRYVTEELTAAGITAHLAEPADTAFARGRKRHAKTDKTDCRHLRMLLAEGRLPECWIPPGHILECRALLETYHDLRREHTAWAQRIHAVLFHQGAPALGEGTLRSEQGVAALRAAAAAHLSPAGQLQVATALEVTGMLEARLHELRHQLLDAARHLAGAKVLAARLYGVGPVTALAMTCWLAGKDRFSSSRKAVRFTGLDVTVHSSDRKGPPGRLSRQGPPVLRWAVYEAGKTHARSSAPDYRYYAQVKDRCNGKRAALSEARKITRQACHILAEPGDDALTAA

SEQ ID NO: 176117 - protein, 410 aa, unidentified
MNTLYVGIDVSSKNNVIYLMKPDGSKHSNFKVANSLNGSKELVKRIISALNSLELTSLSIGLEATSVYGDNLVYFLREDGSIATYDKQIHVLNPKQVKKFKDSYNDLPKNDYIDSFVIADCLRFGRINKEAYLDDYRYKALQNLTRARYFAVQNLTKEKQRFLNYLFMKYSSMTQEKVFSRKYSTTAFAVYEEFESAEQLAEMDLHDLTEFIKEKGKNRFSDPDAVAKAIQKAARGSYRLPKTINDSVNQVLSISISSMRALEAQIKEFDKAIEEQVKLIPNTLQSIPGIGPVYSAGIIAEVGDINRFKNQASMAKYAGLAWSQYQSGDFEAEHTHLIQSGNRFLKYYLCEGAWSHVCCDTEYKRFYDIKYKEVNRNQHKRALALTARKFARLVYSILKTNQLYKAPVSK

SEQ ID NO: 176118 - protein, 475 aa, unidentified
MNVNGNRRKKQDAKLSVIDQQTLLRKAEEIKSDLKASTWHELETNGKFDKNDKLTFISEDMLILGCDIGSETHYVRAIDTRGRELSKSAFSFSNTEEGFKSVLDWAIKLAAENEKHQIVMGLEPTGHYWFCVATWMVNNGVSVVQVNPYAVKQTKEVEDNSQLKDDTKDPKLIANLVKDGNFGMPYLPEKLYAEIRRLSMFRDQLTEDRIRNLNRLHRELKIYFPEYKDAFGKTDGMFCQELLKVAPFPKDLMQLGADGIRQIWHDAKLRGRGYAKAESILDYAKKSVGIKDGSDASRQSVKWFVNKIQELDIQLEDVQQQLNKCCGEIPHAENIKEISGIGETTLTGILAEIGDISRFDDVKEVQKLSGLGLVACSSGKHKGETKISYRGRKRLRYWLFQAAKSAVVHADEYRQLHTYYTTRTDNPLKKMQSLIVIACKLLRVIYVILTKGTKYDPKKMLGDIKRSEKQLTAAA

SEQ ID NO: 176119 - protein, 341 aa, unidentified
MSAMYYIGLDIHKKTIAYCIKRIDGQLVRQGTVAADRTALKKWLTELPGPWLGAMEATIFTGWVYDFLKPHAVELKVAHPAMLKAITAAKKKNDRADAEKIADLLRVNLLPECHMMSEEMRELRRVLRYRTMVVRTAVKMKNKMSGLLMEVGAQYNKKRLYGKKYFRDLLERVEDVPDSVKQMLKFSRSGLELFDGVQKKLVGALLQNKTIRDRVERLMSIPGVGEITALTWVLEMGDISRFNSARNAISYCGLCSGQKESAGKEQRSPLSKQRNKHLQTMLIEAAKLAPGRNEQLAAIHEKELARGNRNRATLAVARKLVEFMLAVDRRESGFETMKHAA

SEQ ID NO: 176120 - protein, 345 aa, unidentified
MKITTVGIDLAKNVFQVHGINERGKAVLRKQLRRSQVTVFFGNLPPCVIGMEACASAHYWGRTLARFGHTVRLMASQFVKPYVKTNKNDAADAEAICEAVGRANMRFVPIKSIEQQAILSVHRVRQGFVKARTAQANQIRGLLGEFGLTIPQGIINVAKKVPELLEDASNELPAPFRHLIDRLTAHLKELDRQVKEFEKEIIAWHRCSELSRKLEAIPGIGPLAASALVASIADPHSFKNGRQVSAWLGLVPRQHSSGGKPTLLGMSKRGDAYLRTLLIHGARSAILAAQNKVDNTNGWLRNLLNRRHPNIAAVALANKNVRTVWALLAHGREFRADYAPQPIAA

SEQ ID NO: 176121 - protein, 378 aa, unidentified
MNRIIKIGMDVHTTNYTLCIFEPSFEHDGTVHCITQVKPEIKNIIHVIKTFKKKHENEELNIVCGYEAGCLGYSLYHELKEKGIECVILAPTTMKTEKGGRKLKNDYRDAKMIAECLAYGGYSAVHVPTELDNSVKEFIRMRDDIKENLKSIKQQIIAFLTRNGKQFEGKSFWTRKHIDWINIVSFSEPLLQDTLKEYMIEYNHLCDRVETLDRQIEEISLKEEYVEKVQQLQCLIGIKTHTALSLIVETSDFNRFKKGNMYSAYLGLIPGDDSSGGHEKKLGITKAGNSHLRRLLVEASQGYTRGRVGFKSKELKSRQEKCSSEVVAYADRANERLRRKYYRMTLRGKKYNVAKTAIARELACFVWGIMTDHIDLCN

SEQ ID NO: 176122 - protein, 351 aa, unidentified
MLIIGCDYHPSVQQIAFVNSETGESGERRLLHKDGEAERFYRELKLRGVSVRVGIEATGHARWFERLLAELGFELWIGNPSEIKAARVRKQKNDRLDAELLLKLLVEDRFPRIWVPSPENRDLRQLLWHRHRLVQMRTRVMNQLQAVAMNEGVRRKTALWSKSGRAQLESFVLSPWASRRRQDLLDVLDRLNPTIDELSTAVEQEAKQRPEVLRLMTHPGVGPLTALAFVLIIGSTKRFACGKQVGSYLGLIPCEDSSANRQRLGHISKQGNTLLRFLLVEAAQAAVRCDKEWRRKYLHLAMRRDPRIAKVAMARKLAVSLFWMWRKEWNYEQVIKFGSHAGQSDYVHGVK

SEQ ID NO: 176123 - protein, 384 aa, unidentified
MKNVSKALEPVKDTMAKRAVGKKKAVTAKGGRRTRPDLARETIGIDLGDKVSRYAILDVAGELVEEGSFRNEVSSMEKHFGGDTKPARIAMEVGTQSAWIERELKRMGHEVIVANARELAWITASDTKNDRSDAEKLARLARADLRLLKPVDHRTAEQQAELNVIRARDALVRARTLLVNAARGLAKGFGFRLPPAITSLFGTHASKLVPEILKPALSKLLAQIDAVTASIHEYDRQIMALAGQHKEVVFVQSIPGVGPLTALTFALTLGSAKRFEHSRDVGAFLGLRPKQRQSGDRDPQLHISKAGDKYIRKLLNQCSHHVLGRFGKDSALRQWGLKIAQRGGKNGLKRAITAVARKLAVLMHRLWQKSEIFQPFPGTVSKAA

SEQ ID NO: 176124 - protein, 285 aa, unidentified
MERYLGMDVHAASCTLAIISEKGRKLRDFVVETNGQALVEAIRMIPGHKHLVFEEGLQSAWLYEILNPHVDDIVVAGITTSQGQKSDKIDAYGLAEKRRVGNLGKRVFKAPRQFTRLRELSRIHMTLVSDTVRVQSRIKSLYRSRGIWVTGANVYGVRHREQWQSQLPSSHQTRATRLYEHLDFMLDQKKQAEADLLHEAKKHPIFSILKTAPGFGPIRAARMIPIVITPHRFRTRRQFWSYSGLGIVTRSSSDWVQTADGKWIRAQVPQTRGLSRQHNHVLKDI

SEQ ID NO: 176125 - protein, 356 aa, unidentified
MEQAHTTVGILIKKTMQTIKYFIGFDISADDFSASCITSPDNLVFSTQKFSDNFDGFEEFVSLLSKSNIKSSEAIICMEATGVYSEHLSYFLVSKEFTVCIEAPHKIKNKTKDSPRKNDFVDAQAIAEYAYRFTDKLSAWEPKDEILEQIQVLLSTREHLTVQMTANINALKTLKYKYYQTPLANQIYERTINKLKEHIKQIDNEIKNLIDKDNTFKNKVSLAKSVPGVGFLLAANLLVLTKGFTEHVNYKNTAAYSGICPYEQTSGTWLRKLPRSKRCGPAKLRKLLYLAALSVRTHNQNFKKYFLRKVAEGKNKKLVVNNIENKLLKIIFAVINSGVAYIDNYKSVNPALLKTA

SEQ ID NO: 176126 - protein, 350 aa, unidentified
MQYIAFDSHKHYTLARVEEVEGGTAREVRIDHERGALREFLGSCEGGSSVAVETIGNWYWIVDEIEAAGMVPQLVHARKAKLMMGMVNKTDRLDARGMNQLKRSGTLPTVWIPPGELRDRRDLTRTRMVLVRQRTRLKNRIHATLAKYALSVEGVSDAFGVKGRELIRQRIQALPPQTQFVTERLMETVEHLDGQVQRVEERMMEVFEGRPEVERLMTLPGVGFLLAVVIAEEVGDIGRFASAERLAAYGGTTPRVHSSGGKTRYGPLRPDVNRYLKWAYVEAANSICLNRHRWPDRHVARLYDRIKRAKGHPKAIGAVARHLAEATYWMLFKEEDYREPNLKAVSSKRA

SEQ ID NO: 176127 - protein, 346 aa, unidentified
MRFYDQQHEFYCGVDLHTKRMYLCILDREGNKRLHRNMRAKPDDFLRAIKPFRDGLVVGVECMFTWYWLADLCTDESIKFILGHALYMKAIHGGKKKNDKIDSEKIARLMRGGTFPLSYVYPREMRATRDLLRRRTFLMRRRSELLGHVQQVNQQYNHDPFEKMLQYACNRDVLDRFEQESTRQNVEADLQMIGHYDQLLKQMESNLVRQAKLHDPQACFLLQTIPGVGKLLSLVLLYEIHTIDRFASVGDFLSYARLVTPKHTSDGKVTGHSGAKIGNPHLKWAFSEAVPMMLRHCEDAQQFLARKEKKHGKARAMTTLARKIARTVYQMLKRKEAFDAVKFFAN

SEQ ID NO: 176128 - protein, 330 aa, unidentified
MKNYPLIYGVDISKNTLDICELHTDRPENKKHFQIGNDLKSIRKFIKTRKAEASFFCMEDTGVYGLRLCSCLEEAAIEYAVVPAIHIARSKGLRRGKSDKADARDIAVYALAHRSGLSAHHLPERDLQELKLLASERDKLLKGIKLFSASEESFAYLPKSVTFGAKGQNHGTVRYLQKQLVAIEKKIEELMAQNQTMRHQRQLLESIPGIGKQTAVLLICYTRCFSSFDNWRQLACYAGLAPFEYQSGSSVRGRTKVSHFAQKKLKSVVHMAALTAKKHDPDLRLYYERKVGEGKNKMLVLNAVRCKLIARAFAVIKRDSAYINTQKYAA

SEQ ID NO: 176129 - protein, 440 aa, unidentified
MVDTNPKQEIEFVAFVGIDWADQKHAWALQIPGHLDVERGDLDHTPEAVEAWAAELARRFDDRPIAVALEQSRGSLLFMLSKYAHLVLFPVHPNTLVNYRKGFRPSGAKSDPSDAGLLVDLLVRHREKLRRLDPDTEQTRTLQFLVEARRKFVSDKTRCSNRLTAYLKMYFPQVLDWFTEITSPIAGDFLERWPSLQKVQKAKPETLRKFFVQRHSCKPDNIDHRLEEIRRAVPATHDAAVTCSCSAAVLALVRIVRAVRDAIVCYDQQIETLAREHPDFAIIDSLPGVGPALAPRLIAALGTRRDRYHSASELQSYSGIAPVLESSGKQRWVHWRWACPKFVRQTFHEWAAHSIGSSDWAKAYYEQQRAKGKPRNTVVRALAFKWTRILFRCWKDHKPYSEEVYRQALARRQRCASDSSPVQLQWKNCAGFSKITAITS

SEQ ID NO: 176130 - protein, 344 aa, unidentified
MKYYAGLDVSVKETSVCIVDEKGKICRERKVVSHPDDLASFLSDPQWHFERVGLEAGPLSQWLYEGLAKAGFPAICIETRHTKAFLKAQPNKTDRNDARGIAQMMRVHLFKPVHVKTLTSQKRRALLTARALLRGKAIAIENDIRGLLRNFGLKVGMVGAVKFEDRIRELIEGVPDLAEIVKPLLAARRKLREEFERLDHKVREEARIDPVCQRLMTVPGVGPIVSLAYAATIDIPARFRSSRAVGAVLGLTPILNQSGESNRIGHVSRCGDGMLRTLLYEAAQTLLTRVARWSWLKAWAMNVAKRRGARKAVVALARRLAVILHRIWSDETEFRWTREATTAA

SEQ ID NO: 176131 - protein, 376 aa, unidentified
MKQFSQYVGLDVHKATIAVAVAEQRGEVRYVGEIDNTAEAIVKFVRQLRKGDVELSFCYEAGPCGYGLHRQLTELGWDCQVVAPSLIPRKAGDRVKTDRRDSEMLARLHRAGELTSVWVPDDAQEGLRDLTRVREDVKHLQRQAKQRLSAFLLRYGKSYAGKSNWTQAHFRWLKTVKFTHRTQQIVFQEYVDVVKAMTRHVADLDEQLTLAASESVFWPIVEALMALRGVNLLTAVTIVAESGDLHRFASAPQLMAYLGLVPSEHSSGASKSRGGITKTGNSHVRRVLIEAAWTYRHPARKTAVLQRRAERTSDEVQEIAWNAQKRLCGRYRNMDAKGKLKVQACTAVARELNRGSLKKYLTGPIHISVLNWKFVE

SEQ ID NO: 176132 - protein, 464 aa, unidentified
MQPHQQVEPEFAAFVGIDWADREHAWALEVSGSGKREKGKLEQSPESIEAWAAELAARFAGRPIAVSLEQARGALIYALSKYSHLVLYPIHPKTSSAYREAMFPSGSKNDPVDAELLLDLLIGHRKRLRPLQPDTEPTRKLQLLVEKRRQLVDQRTAQTNRISDLLKVYFPQILNWFDSLSAPIVQAFLERWPTVEKAQAENPEILRKFFYQHHSRSPERIQERLTEIQKAKTPIQDPAIVEPMQLVTHALLRVVQAFREGIAVLDQAIQKTFAMHPDAPIFSSFPGAGPALAPRLLTSFGSQRDRYGSAGEILAYSGIAPVMARSGETQRWIHFRWACPKFLRQSFHEYAEHSLTKCDWAKAFYLRQRKRLGHHAALRSLAFKWVRILFRCWQSRTPYQKEVYRRACEERTQPTPPQAAQPQNHQTTARTHPFLARLAPLVSVGSTAQYYFQSIAGFSKFTVK

SEQ ID NO: 176133 - protein, 346 aa, unidentified
MFNLTEKGKSMNHVTTVGIDLAKNVFSLHGVDGRGREVVRRTVRRGQLLALVAQLPPCVIGLEACSGAHEWARQFTALGHTVRLMAPKFVAPYRRGGKNDGNDAEAICEAVSRPSMRFVPVKSVEQQAVLALHRVRQGFVEERTATLNRIRGLLAEFGHVLPQRAVEVRRRLPALLEQLPPLAARALGDLQAHVRILDQHILDYERELARLSRTDDRAQRVQELYGVGPLTASAIIASVGSAHEFDNGRQFAAWLGLVPRQYSTGGKTRLGHITRRGDPYLRTLLILGARAVLQAATRRQDRLSRWALSVRERRGYHRACVAIAAKNARIVWALLAKDEPLRTVMA

SEQ ID NO: 176134 - protein, 416 aa, unidentified
MQKHNNSGKKSEPTTKRAKSRGPVQRDTKEVLAELVGKLKEKLDPKKAAGASAGDGHPRGELRPNLDRLTVGVDLGDQGSHYCILGLEGETLAEGQLRTTEEDFATFFQGLNGARVVVEVGTHSAWVQEVIRGCGHEVLVANPRLMDGSKRRKRKNDRIDANKLARLGRVDPESLYPIQHRSREVRQDLVMLRARDALVAARTEIINTTRGLVKSMGTRLPKCSSRSFAHKGEEAVAVEMREALLPLVRLAATLSADIKEYDKKIEELGREKYGHTALLRQVKGVGPITALAYALTLENPQRFAKSRDVGPYLGLVPKQEDSGESQPQLGISKAGDTMVRKLLVGSAQYILGPFGPDTDLRRYGLKLCERGGKNAKKRAAVAVARKLAVLLHRLWVSGEVYEPLRNAMSAPIAAAA

SEQ ID NO: 176135 - protein, 395 aa, unidentified
MDAHGTVTGEHTFPHGGEGLGAMCDWLLAATGTPAEAIAVAIEVPHGPVVETLMERGFPVHAINPKQLDRFRDRFTVAGAKDDRLDGRVLADSLRTDRHCFRPLHAADPVTVELREWSRMAEDLRQERNRLSNRVREQLWRYYPQLLKLTDDVGADWFLALWTLVPTPAKAARVHKSTVEQLLKIHRIRRIGADEAVTTLRQKPIQVAPGTTEAATAHIRTLAVRLKVVNRQIKDAHRQLDALCAKLAGPEESEPGQSHEQRDAALLRSLPGVGRIVLATLLAEAWEPLRERDYHALRSLCGAAPVTRRSGKRCVVVMRQACHIRLRTAIYHWARVAIQHDELSRRRYRELRKRGHSHGRALRTVADRLLAVACAMLRTRTLFDPARASVLKEAA

SEQ ID NO: 176136 - protein, 391 aa, unidentified
MINIGIDVGKFKHCATVLDDSTGEVLIKPFFLTNNRKGFDLLYSKTKQFIHRKHSVGMEDTGHYMINLTNYLLDKKFTVKYINPRATFLRRKELGISAKNDRKDALLIAEMLSEKRFWRSISVRSIENSKFRDITRLYHQLQEQQNQDMNRLQRALDIVFPEVNSLSWTRYSKAYMKFLSTYPSASSIALEDIRNLRKALKTEGKGRQSKVTAEEIRELAKCSVGEDNISIDLEVTSIIAIINTREEQIRILGKKIEEFSHKLNSPIISIPGISHISGMTILAEIGDINQFQNTGNLISFAGMDPLVYQSGKYDAAHMPISKHGSRYMRKALYQAVFTVCKYSPTFHDYYTKKRNQGKSHRCAQGHCARKLLRVIYKLLSTNSPYDQNHIQ

SEQ ID NO: 176137 - protein, 455 aa, unidentified
MYLPDWKWIPIRKELLLMSNKVIFNLDDLFISVGIDVGADFSWMSIALPNQQFVGKPYKILHSSIDSLTTAVSKIKEAEELYSLESRIFLESTGIYHYPLFCYLRDKGFNCSVINPIITKNSTNINIRKVHNDRFDSKKAALVGLKPDLKVSLMPSDLALNCRNLCREYYDLMDNRSAYVNKLQGELRMAFPQYLGIFSKVTINTSLTLLETYTSPSAFLEADKQEIINIIKSTARFGLTYAQNKYNAIIQAATDANQFGYIIDSNIKRIRLYISFIRKYDEEINNILESLHELVDANEDADFVKQIHLIETFKGAGFLSAVSIMGEIGDFSAFSKPKQLFAYFGLDPAVKQSGKFEGTKVQMSKRGSAVARRVIHTLTLQSISISRNGEAKNPVLREYYLKKCDSKPKLVAMGAVSHKVCNMIFAILRDNKSFEIITPQEHIKQYNASKCDMAA

SEQ ID NO: 176138 - protein, 355 aa, unidentified
MNTTTTKTIIGIDLGDKQHAICVTDRKGNILKEFSIRNRIEELKNLADQYPNSVVAMEVGTHSPWISRLFAEHGLQVFVANARKLRAIYTNPRKSDELDAQMLAKIAGFDPELLSPITHSSLCSQQDMLAIKMRDTLVRQRRSLICSIRFSLKAMGVILPLWSSSVFSKRALLRLEDQPEVLGSLKPLLHILNELTTQIKQFDKSISEIAETKYPQATWIQQIHGVGPITSLCFVLHIEDPNRFAAKKRRDVGAYLGLVPRRDQSGQTDKQLPISKAGNSYLRTLLVQSAQYILGHCGPDCDLRRHGLKLAARGGKAAKKRAIIAVARKLSVIMLSLWQNQSEYQPLRNSLTTAI

SEQ ID NO: 176139 - protein, 412 aa, unidentified
MLFVGNDWAEDQHDVEIVNEQGRRLARRRLPEGLDGITRLHALIAQFFPEEWADLEPAEAASRVKVGIETERGPWVQALIAAGYEVFAINPMSVARYRERHSTSGAKSDSGDAHVLAEIVRLDRAHHRPVAGDSELGEAIKLVARNHQSLIWDRTRHILRLRSVLREFFPAALEAFADLAAPDTLELLAFAPDPDRAARVPKSKIVAVLRRANRRGVEEKAATIQSVWRAPALRQPTQVQAAFAAIVTSQVRLITALNLEIGQLGEVVAHHFGRHRDAEIYASQPGLGVILGARVLAEFGDDRSRFADAKARKNYAGTSPITRASGTRKVVLARYARNERLGDAIQQWAFGALKGSPGARAYYDALKARKVGHQAALRQLGNRLVGILHGCLKTGALYDENTAWAHHHTAAA

SEQ ID NO: 176140 - protein, 450 aa, unidentified
MNPKRSKPKNDRTMPMIHPNAAAIDIGATMHMAAVRADRTPEPIRSFGTFTTDLHRLVDWFTECGVETVVMESTSVYWIPIFELLDARGFAVFVVNARDAKHVPGRKTDVSDAQWLQRLHSFRPKGQIAELRAYVRQRERLLEYAASHIQHMQKALTEMNLQLHHVVADVTGATGLRIIRAILAGERDSKVLACLRDYRCHSSAEAIEKALTGNYRAEHLFALEQALALYNVYQDKASACDARIEAVLKELSISRGRDAGPLPSPRRRLHGKANGPDFDVRAALFKLLGKDLTQIDGLGSYLSLRLIAECGDDLSAWPSAKHFTSWLCLAPSNKISGGKVLSSRTRRSGSRASALLRLAAVTVGRTDTALGAFYRRLSARIGKAKAITATARKIAVLFYNAVRHGMEYVDPGSSYYETRYRTRVVENLHRRAKAFGFVLLPLESKAGAVS

SEQ ID NO: 176141 - protein, 412 aa, unidentified
MSHGHVMWVSREAAFRSTDDWKDTTMPSAISPPKAVLGIDVGKSSHWACLVTREGEVALNRRVRNSEGDLDGLFSQVACDTIVVVDQCRNIGLLAISRARLAGLGVAYLPGLAAHQAARLFAGDAKTDERDALVIAKTALGIPDALLPVPEPDEALEAARSLAAQRSHMVTCATRDKNRLRSILLESCPAFEAPADLGDRHWLNMLEKLGGPWGCIDAGKPAFGAVTKGANRTRMDAAWNAAMASTRPSKRRVDAENPQVRMLARRIREALEEADRIDREITALLAGDGTYECLVTIPGIGPRTASELVIGINIEDFPDHDHLASYCGIAPRNRQSGTSISSVSASRQGNRRLKNLLIFSCNSLVRSENRFGEYYRACRGRGMCHGEALKAVARKRLKVIYAIMRDKVPYSA

SEQ ID NO: 176142 - protein, 411 aa, unidentified
MDVVNARCAGLDVHKATVVAGLRVPGPQRGERCGETKTFATTTRGLRELIDWLMAHGVTAVAMESTSVYWRPVHAVLEGHVQLVLVNARHVKMVPGRKTDVRDCEWLAQLLECGLLRASFVPPRAVRDLRDLTRLRKTLIRERGHHVNRIEKTLELAQIKLSGVVTDLMGKTGRAILQALSAGLKDPVQLAEYAQGLLRKKRAALREALVGRLTPHYAFLLQQHLSLIDAVNAHIATLDARIETAMAPFAESAAIVQTMPGVGARATQAILAETGVDMSCFPTPAHFATWARLCPGNHESAGKRQSTTTGKGAAWLRATLQEAAWAAVRSKKSYYRALYHRLKARRGAKKAIVAVQHAMIVALWHMLKHGVAHHDLGADYFERRNTARVRRHHVRRLEQLGYDVTLTEKAA

SEQ ID NO: 176143 - protein, 454 aa, unidentified
MKKAKSAPQPKAQAALQIVFPNAAGLDIGASEIMVAIPPDREGVTVRGFGTYTPDLAALADWLKEGGVTHVAMESTGVYWIPIFELLEERGFEVIVVNARHIKHPPGRKSDVMDCQWIQQLHAHGMLRGSFRPEADLCTLRAYLRHRDNLLEDRAKHIQYMEKALLQMNLQLGQVLSDLTGETGLEILHAIVGGEHDPQVLSRMRHGNCKHSQEDLIKALTGHYRKEHLFVLKQALEMFESFSQRLRECDQEIERWLEEIKPELPVDFPPLPPDPKPNSHSKNAPSYDARALLYPLAGVDLMAIPGMNEILLQKILAEVGLDMSRFPTVKDFCSWLGLAPHNAISGGRILYSHTLKNHNRAGQCFRLAARAVSRGKSVYGEFYRHIRARSGAKEANVATAHKIARTFYFMLLRGQPFLAPDLQTYLQVQREKDIRRLQARAAKYGFCLQPAQMA

SEQ ID NO: 176144 - protein, 314 aa, unidentified
MEALRTHVAGVDVHKEILAITVLIGKPEEKPEATQLECSTYTDDLMAVGLKLREMGVTDVAMESTGIYWKPVFNVWDSLGLKVIVGNAHHIKNVPGRKTDMNDSHWIAQLHRFGLIRASFIPDGEFQRMRLLSRHRTNLVEDLARVRNRVQKVLEDGNIKLGSAVSDVFGVAGLAILAEIAKGYTSPEVLVAAVTTKVKRMEDVKKAMTNCLTKEHCFVISELMEQFYFLKSRINATEQELFQRIQPYKHLVERLDEIPGIDVILAMGIIAEASTQMDAFKDERSFAAWAGVAAGNNESAGKKKDLSAVMATHT

SEQ ID NO: 176145 - protein, 370 aa, unidentified
MTQSSLLYVGLDVHKESIAVAYVAQDHGAEVVSLGTIGTRQCDLDKLIRQLHSKAKHLVFVYEAGPCGYWLYRYLTKTGHDCWVVAPSLIPKKAGDRVKTDRRDARQLARLMRSGDLTPVYVPQVDDEAIRDLSRAREDSLRDLKAAKYRLKAFLLRQDIRYTGQANWSPAHLRWLAEVVCPTPAQQIVFQEYVRAVTEHTERLQRLEQELHEQVQTWRLAPVVEALQALRGVQFTVAVTTVAELGDLTRFTNPKQLMSYLGLTPSEYSSGQRRSQGGITKTGNSHARRALVEGAWAYRYPAKVSRHLQLRLERLPKPIQDLSWKAQVRLCKRYRNLMARGKNANQVVVAIARELVAFMWAIAREIPLPA

SEQ ID NO: 176146 - protein, 342 aa, unidentified
MAKEPIAVIGIDLGKNSCSVAGLDMNGAVVLRRRMTRETLVAFASKLPACIVAMEACCGAHFLGRTFAAQGHTVRLMSPEYVQPYVKSQKTDDRDAEAIAEAATRPTMRLVTLKSEAQLDLQVLHRARERLVTARTRLINQLRAVLLERGVILPKRRAPLRHRLHELMAGELPISPRVMRLLQDLRDEWASLDDRIGAYDDELAAMTRENQQARQLATIPGIGVINATALLAAVGDGSAFAKGRDLAAWLGLTPRQHSTGGRTKLLGISKRGNKYLRTQLIHGARAALTHFAKTPRGSAHGYTNYSRGLTPTSWSSRSPPSWHALSGRCCVTVAPLNTKLLQ

SEQ ID NO: 176147 - protein, 353 aa, unidentified
MKYEKYMGLDVHQAMTVAAVLDAEGKVILETMVATEAAAVLRLVRSLSGPLRVTFEETTQAAWLYEILRSHVTEVVVCDPRRNKLLGEGSKADKVDARKLADLLRTGMLRSVYHGHEATRKLKELVRAYETFSSDTQRTMTRIKAIYRGRGIATPGRGVYQAKQREQWLGKLPEAGLQQRAEWLYEQLDQLKPLRKKAKQAMLTESLAHRAVGLLRTIPQLGPIRAAFIVATVDTPHRFRTKRQFWSYVGLAVVTHMSAEYEMKAGKVVRRRKPVATRGLNPNCNHRLKEVFISASTGGAGTEPYKSYLEKLKNKGMRSEMARLTLARKIAAVALILWKKGKEFDPKELNKTT

SEQ ID NO: 176148 - protein, 391 aa, unidentified
MTTALSFQEKSPLFVGVDLAKSVFQVAYQNPKSSRFCNRQLTRKEFRRFLTEHQGSLCVGMEACGSAHYWGRECVKMGHEVRILPAITVKYINQGNKDDRNDAHCIWQAMHLPSIKTVKIRDESNQALMSLLKLRDLIIKQKTQLQNNLRGCFYEQGVICGSGSESLIETAEAQVKELREENKEWSELIAKVSICAIGLIKGQAKQLQTIDEYITKYTQENESCRKLMTIPYVGPVTAAALYAVMFAPGNFKNARQFAAYAGFAPTHTGTGGRITMGGIPLKGNQVLKRVLYQVCLSLYSRNKRMKNQAGQNENTWLARLSRRLPVKKTVCAAADKICRIAWALLHNGECYADEKSTLGIARIKSKRIMRRHMYDSIITLSEEAEDNKYNR

SEQ ID NO: 176149 - protein, 386 aa, unidentified
MKTVAGLDVHKDSVYLCILRENGEKIERVYGVLTPQLDSMRDFMAKNKVSEVAMESTSVYWIPIWRVLVDSFELKLVNPYFIRQLPGRKSDVKDAQWIAECVMKELIRGSFIPSPLVQRLRLYDRRIFEINAELVRKYSKIDAILQRCNIRLSNYVSNADCKSYKAVVKQISEGVTSPQELLRHVHKRIINKHGEDTILAALTGVVSDSEIDMLAQYVAESAILEDNKNKCIEKMREICNSEFKEQMKNLQEIPGVSERSALTVLAEIGPDVNAFPSAKHLVSWCGFNPRNDESNKKIKSNKITHGNRFIRIASVQCAWAASRTKDCYFSKFYAFHTQVRKKFKLKVVVAVARKVLVCIWHILKFNVPYKDFEPQKSVTKDCIQFA

SEQ ID NO: 176150 - protein, 403 aa, unidentified
MNNVAGIDVSKGKSMVSVLRPFGEVVAKPFSIGHTGSELKELADYLKSLDGETRVVMEHTGRYYEPVARFLHDEGVFVSAVNPKLIKDYGNNTLRKVKTDKADSRKIARYGIDNWAELRQHTPMDTIRMQLKTLNRQQSLYTKTKTMMKNNLIALLDQTYPGVNALFDSPVREDGSQKWVDFATAFWHVDCVRNMSLTAFAERYRKWCKRHGYNFSQSKAVEVHAGAQDLIAMLPRDALTKTMVRQAIDALNAISASMERLKAEMQALAAQLPEYPVVMAMHGVGDSLGPQLMAELGDVARFTHRNAITAFAGVDPGADQSGTHEAKSTRVSKSGPPELRRALFLVMDCLLKTQPQDDPVYRFMDKKRAEGKPYLVYMTAGANKFLRIYYGRVKEYLASLEGN

SEQ ID NO: 176151 - protein, 363 aa, unidentified
MEVAKEGRFVGIDMGKTGYVLRMIDCCGKITGWEGKTNPEGRKELYKRLRPEDRIAIEACNLAFIMNKEFKKLTGTEFYILNPGKLYQIYMTDKKTDKEDALKLAKEIRDKPEADLPRVFAPTEEMKEMRKVISEYREIVRLHTQRVNRLHTVYEHCGITDMKRSDLKTRTNREKNLGLLSGYEREEAERLMQVIDLLESQKNELEKKIKEAEHSNKKVQAVEQVPGVGKITAYAFVASVGSAERFGNMTQVSSFLGFVPKIDCSSQTVRYGHITKKGNGYLRGLLVQAAWVLVRCRNGGALKEKYHDLVLHGLSKKKAIVAVARKMAELMYTLLKNGSKYEPRKFVASLGRTERLAQLAVAG

SEQ ID NO: 176152 - protein, 362 aa, unidentified
MQSTTIIAFDQHAATTVAAVLLPGQRTPALHSLTSDSPTIIRFVTRVARDNGAVRCGYEAGPCGFELQRALTAAGFPCEVIAPALIPRRPGDRIKTDRRDARQLAILYRAGALTAIHVPTDQEEAVRDLLRCREDIRADLLRARHRLSKFLLRHGRRFTATKQAWSKRHDTWLRAQTWPLPALTQTHEAYLRAVDEAVARLRTVDGQLQALVTLEPLSTRVHTLRCFRGMDDLTALTIAAELGDARRFPTARGLMAYVGLIPSEHSSGTKRARGAITKTGNAHLRRVLVEAAWHYRHHPFIGKHLRRRHVDAPDRAKQHAWRAQQRLYRRYQRLVARGKPKQHVVTAIARELTGFVWASLTQ

SEQ ID NO: 176153 - protein, 349 aa, unidentified
MDRYIGIDAHLTSCTVATMGPSGKKLNCNVVETSGKALVSAIKLIPGKRHVCIEEGGFSEWLYEILRPHAEQVVVVQPKRHRGSKSDSIDAFARADELRRGDYQPIFKDPGTMSRIRAATKSYLMIRDDVARAKHQLKATFRLRGIRVGSEVFDPLARRALVEQLPAELAHQALLLGDKLDYLGDKRDEALDWINEELDHIPDARVLMSIPGIAAVRAATLLATVISPDRFRSKRQFWAYCGLAVVTRSSSDWKQDSGRWARKPCVQTRGLNKDFQPQVKDVFKGAAYIVSKRCSPDHPWRRAYQRQLENGIKPNLAELTLARRIAATTLALWKRKELYDPEKTRCATN

SEQ ID NO: 176154 - protein, 353 aa, unidentified
MKHITTIGIDLAKEVFAVCAMDNTGAVIYNKLLKRDAFVNWGLQLPAGSRVVMEACGSSHHWGRWFAAHGHTAQLIAAEFVQPFRKSLAAKNDKNDAEAIAIASRQATMRYVSVKSIAQQEALVWHRLREGYKEERTAHLNRIRGLLGEFGIWPSKSADKLIRSLPKLSTDINTPVGVRSAIEQTLQYLKELHAQLAQCDQQIAQHLKTQPDAKRLTEMVGIGSLTASAISSTVVDAKHYKNGRQFAAWLGLVPRQMSSGGKTKLGRTSRRGDAYLRSLLVQGAKSTLQVALRQTPDKANRLQIWIAQMYVRVGYHKTLVAIANKHARTIWAILARNESYDADAWQRMSVSAT

SEQ ID NO: 176155 - protein, 380 aa, unidentified
MTITADIHDVCCAALELSQSSWLCAFSVPGGGQVSTHKLSAGNADGLIGLLSSLQAKAEKELTKKLNLVLCYEAGYDGFWLARVLNDRGIPTIVFDPASFLRPRRGRVAKTDRLDAEGMTRTLRTWLCGDHSVARAVRIPSVEEEDAKRLGRERKHLVEQRTSIVARIKGLLALHGIRITSKGIGKKLATGLDAMRTGDERPLAPFLRQEIERMLRHHAFVSNQIEEVDAVRTAVFAEDRADFPCIDKVKRLATLGGIGEISAAVLVAEVYHRSFESRRHVASFVGLAPSPYASGEVSRDRGINKAGTKLARQTLVELAWFWLRYQPNSELSQWWRDRWGAAGMRGRKVGIVALARKLSIALWRFIEQGVIPNGAVLKTA

SEQ ID NO: 176156 - protein, 331 aa, unidentified
MNFIGMDIHKQFTVAVVKDEQGNKLEESKFINSENNFGSFMQKYKPEDTKIVIESTCVWEYIYEILEAKKFEVKLANPSRTRAIAEARIKTDYVDASTLSDLLRANLIAESYIPPKTIRRLRETTRERRTFVKQTTQIKNKIRAILIKRGTELEHATLCKAAILLIREKFPDDKVVLHYLDLLEYHKEKLKELDEDISKTAYANSNAKLLMTIPGIGATRSLDIIAEIGEIERFPTADRFCSYAGLVSSIHQSGNTLRVGRLVKQSSKVLKNNLIEACWTLSQSKDSNPLKEFYKKLSKKKGKQKAICATARKLCCVIHAMLTNQEEFRYS

SEQ ID NO: 176157 - protein, 320 aa, unidentified
MRNTVGLDISKLTFDATAMVGKTEHSAKFDNDSKGLDQFSDRLKSLGYQNLHICMEATGSYYEEVADYFAQYYSVYVVNPLKISKYAESRFKRTKTDKQDARLIAQYCRSAKESELVKRQKPTDEQYRLSRMTAAYAQIKSECAAMKNRHHAAKDEEAAKAYAQIIKAMNEQLEVLKEKIKEQTEKPNCKEGVKRLETIPAIGRMTAAVLFHHLTSSKFETSNKFAAFAGLSPQQKESGTSVRGKGKLTKFGNRKLRAVLFMPAMVAYRIRAFPDFIKRLEEKKKPKKVIIAALMRKLAVIAYHVHKKGGDYDPSRYKSA

SEQ ID NO: 176158 - protein, 387 aa, unidentified
MSEVFDLRKSATAFDQASTLVVVLELSGKSWQAGASVPGVSRRPLRQLEARDLAGALRAIEHWKGEASRAGHEVRRVVVGYEAGLDGFWIARALREHGIEVYVMHPASVAVERRGRRAKTDRIDVDILLRALLGWLRGEPRHCTMAPIPSEAEEDLREPGRRREALTAARLKVENQMRSLLVRFGVVDFRPRLKKAPEHLEKLRTIDGRPLPPNTKASLDRLMAQHRLLSEQLKEIETARERVVAVTDPDRMERMIQALAALVGVGVETATTLVHEVFSRRFRDRRALAGFVGMTGTPYDSGGSTREQGLSKNGNPRVRRMLMQATWRWLMFQPQSALAQWFFARTAGAKGRMKKIMAVALARKLLVALWRTVETGVVPEGARLAAA

SEQ ID NO: 176159 - protein, 349 aa, unidentified
MVADELDYVIGVDTHLDEHVLAVIAAPSGAVVAQRSIHASARGYAAALRFAADKANGARVWAIEGTGSYGAGLARFLAGAGETVLEVSRTPRAERRLRGKDDALDATRTARAALASETLALPRSGQRREALRLLLVARRSAVDVRREALGQLRGVIVTAPDKLREELRGLPVGRLLDRCSRLRRSRSASADELATRLVLRSLARRIQAATLEAAELERELLGHIRALAPPLLEEPGVGPIVAAQLIVAWSHPGRLRSEAAFARLAGVAPVPASSGKTTRHRLSRGGDRQLNRALHTVVLHRRQHDPQTKDYIARRIAEGKSRRDATRLLKRYLARHLYRLLQQQAPQMT

SEQ ID NO: 176160 - protein, 337 aa, unidentified
MTTIYLGTDMAKATFEAALRQQEIAKPLGEFNNNPSGYKQLSKKLQRYTKGDQEIHLIIEATGTYHLGLLGFAYEQGWQVSLPNPKTVREWAKGQGQRVKHDKIDARTLANYGAKEKPGVQQPLPEEVLTLSLLLNRQADIEKTLRQEQNRLESFRQRPNACPIVLDDIQQSIAFAQQRLRHLQQAIKAHLQAHPHLKQQHTHLLQVPGIGEKSVLHILVFLYRWDAHTCGQGDFSGLTAFAGLDPVEFSSGSSVFRRPSISKMGDAAIRRTLFLCALGGVHAKDNPLVAFYQRLLGRNKPKKLALVASGRKILAWAFGVFRSGTPFDPALASPKSL

SEQ ID NO: 176161 - protein, 325 aa, unidentified
MRQPRLPVKPQTQVGLDVSSQTLDTHIRVDGKAFSVPNTDEGFDRLCELLSAYDVTMILMEATGGYEDNVACYLQLQGYDVVVINPRHARRFAQSMGRLAKTDRIDAAILAHMAFMIDSGPDRERYIKPVTDEQRKQLSRMSSRRRQVVDLITIEKQRLTHADDYARESINEIISLLNAQLKRIESDIFRYVKKNFSELANRLLAIPGVGEQAMIVLIADLAELGHVNRRRISALLGVAPFNHDSGKFKGQRRIRDGRQSVRNVLYMGVISATRFNPVIRAFYDSLLSRGKPKKVALIACMHKLIRIINAMMRTGKPFDMSLHGV

SEQ ID NO: 176162 - protein, 355 aa, unidentified
MRILSLYLSKYKTVACDYEAETGRHEFATVLTTHKGLHDLIVDREPDRVVIEICSIAGWVCDLVRSLGIELQVASTNDERWQWRKVKTKNDRRDGLKLAQLSARNELDLVHVPQSEMRQWRALIAYRQHLVQRRTKIKNHIRELLLREGQLLPRHRSAWTQDGLAALEAMVKPLREVSMDELWRGELEVELAQFKAVQAQLTEVVAKLDALGAANHNVRLLQTASGVGPRLAEAVVTMFDDPGRFRRGASVSAYIGMVPKQWDSGETERLGKITRHGNRLVRSLLVEVAWCALRHNPWARETYQRISGGKKSRKKIAIVAVGRKLLVRCWAMLRDQTPWHWEGQSAVVTPPAPIA

SEQ ID NO: 176163 - protein, 508 aa, unidentified
MKSSEKVLRPKHTRVGRIALDGSRSCEPHLKKVSPSTPVRPAASVLKSERTIAREARCIRLTGDRAEDARANERQKNMKAWKEITYYAGFDWARDRHAVVIVDRRGQIVEDFIFEHSSEGWGKFSQKTTGFEPLAVAIETNQGAAVDQLLQRGYTVYPVNPAAAAAYRKRKAPSGTKTDQLDGWSLADALRMDGHGWKALQPSDELTEQLRLLCRDEVSLIEQRSALVNQLEQALSEYYPAALEAFEDWTNPSTWDFIIQFPTPEALTKAGRRRWEKFLHSHRLWRPETVEKRLAVFAQADQFKGSSGVTKAKSQLALSLCKLLRTLQQQLDQYRKQIEALFAKHPDHHLFGSLPGAKDMLAPRLLAAIGSDPTRYGFDRHCQRLKTSSFSFQVLQSLAGTAPISYQSGSIHKAQVRWACDKFMRHTVHLWADCFRKASVWGQTYYRKKREQGKSHACALRCLGQRLLKILFRILTDKRPYDAELHARNQQKHGSWVLALVNQTTTAP

SEQ ID NO: 176164 - protein, 355 aa, unidentified
MARLARIGVDTSKSVFQLHGVDEKEQVVLRKQVRRREFLVFLAKLDPTSIALEACGASHHWARELGKLGHQVMLIPPQHVKPYVGHNKNDKTDAAAICEAMSRPKVLARLVPIKSIEQSAAQTLLGIRETLIKRRTQLSNSIRSHAAEFGLVAAKGLDKIEPLLARIEGDDTLPILVKEVFVALGQEFRDIKARSAAIDKKMLAFQRANELTRRLVEVPTIGPVAACLAVTKIVNPHGFHSGRQCAAWIGLTPKDRSSGGKQRHGGITRAGDESLRAALVCGATAYLRHVRSGRTTPSPWLAGLLKRKPPKLVAVALANKTARIVWKLMTTGERYDPARAWAQSDIAADAIGIAA

SEQ ID NO: 176165 - protein, 320 aa, unidentified
MQTPSAVLNIGADVAKDEIVVACSEGSFPVRTLANQRTALRAFLKGLPVGSRIGMESTGTHHELLANAAHQLGFIVFVLNPKDARHYAKAVGQRGKTDRVDAELIARMIAHEHPKLHAWVPPTPEQREMARLLKRRAKLSSLRQALGMSLKGVPGFAADLKALRARFDQVIAHLDERLKALLEANPDRQQHATHLRTIYGVGPVVAAALVNTLERAPLKSADAFVAFTGLDPRPDDSGQHRGKRRLSKRGPAELRRLLYVAAMSAKKTKAWKPLFEHYRAKGLSSTAALVILARRIARTAWSIYTYKTDFDPARLTKALT

SEQ ID NO: 176166 - protein, 346 aa, unidentified
MKKIAHLAMDLHAKNCTLGQMDDDGSFLGNIEFPTSENNIIDGLKSIKAKEKYLAIEAGTLTYWAAQVANPYVSQVIVCDPRENALIYKSPYKKDKVDTRKLCRLLRLGELNHVYQPENDDRAIFKAAAQHYIDLRNQLIRLKQKVKAMYRHWGVINVFTDAVYSKSGRDKYLAQVKHLPVRDQLLRLYYLMDQTEAMRKSALKSMKQLGRKYAEIREFKKIPGIADISAHVFDAFIQTPHRFAKKNRLWKYCRLSVTDRSSDGKPLGFQRIDPSGIGELKALSYRAFMATMKSDNEVKRFYLGSLQRTHSRKHARLNTQRKILSVMYSIWKKGAAYRPELFAGSA

SEQ ID NO: 176167 - protein, 407 aa, unidentified
MMIKLSGSKQLPNIFKGCGSMIYVGIDIAKQKHFAAAMTADGEVLIPPFGFTNDAEGFKLFLSKIKSFKKENTLIGLESTAHYAENLICHLFDLGYHISVINPIQTSTLRKTNIRKTKTDKVDCLLIIKSMIVNKPRLYSKSDIDSLRLKSLCRFREKIKKAKAKLKIQLVAYVDIIFPELQYFFKSGIHTNTCYQLLKKHSSPDDIAALHLTYLANLLQKASHGRFGKEEAIALKGLAKSSVGTDNTAVSIQITQSIAQIELLEQQLADLDGIIESIMLEMDSVILTIPGIGFLNGAMILGEIGNISRFSNPSKLLAYAGLDPTVNQSGKFNAKSTKMSKRGSKLLRYALINAAWNVSLNNKTFNDYFNLKRSQGNNHYAALGHVAHKLVRIIFKMLKDNVAFNLN

SEQ ID NO: 176168 - protein, 415 aa, unidentified
MALKIVYKICCGIDVHKTFVVACIASTDSNGVTIYEHHRFSTYTKGLKDLLQWLLKHNCKDVCMESTGKYWIPVYNVLENDCSIVLAHPKYVKAIRGKKTDKKDAKWIADLFKHDLVAGSFMPPADIRQLRDLMRYRFKLTCFKSSEKNRLQNCLTVSNIQLGNVVSDTFGKSAQAILDKLLENPADTSFDLEPLVYKSLKKKLPELRDAIDGYITPEQAGKLKVIKAHYENLESRKAELEELILALAAPYQQELTILQTAPGISSEFTAIGIISEIGTNMEAFPSAKHLCSWAGLTPTNNESAGKKKSVRVSKAGCYIKPLLVQCANAVVKSTKHPEMRNRYLRLKKRRGHKKAIIAIARMLLTALYHMLKNGENYNAELYQKSDLLPVDREITVEQALMIARNQGYKIKSATA

SEQ ID NO: 176169 - protein, 341 aa, unidentified
MENVALIGIALGKHSFHLHCQDKSGKALQRKKFTRTNLMQFLATCPSTVVVMEACAGAHFMARRISDIGHEAKLISSQFVRPFVKSNKNDFVDAEAICEAASRPSMWFVQPRTEVQQAMRALHRARESLIRDKVKTTNQINGFLLEFGISLPVGDTVIKRLPLVLVKHEIPEYLSRLLMKLHAHYLYLVEQITELESELNQSIKTDDATQRIMTIPGVGPITASLLSSQLGDGKQFSCSRDFAASTGLFAASTGLVPRQYSTGGKSTLLGISKRGDKNLRRLLVQCARSFMMRLEHQQGRLAEWVREQLSKKHSNVVACALANKLARIAWAITTNHNAYQA

SEQ ID NO: 176170 - protein, 412 aa, unidentified
MEGETVIAGVDTHKDVHVLCLLDGLGRKIWSGSFGADPEGYDRLAEAIGDPGSCMVVGVEGTASYGAGLTRRLVELGYNVVEVLRPKRDKARPGEGKSDPLDAERAARKAASGRGCSVPKSQDGWVEAVRQLYVARRLAVATSTSCVACAKSMLTTAPGALRERFRGRERPKDLMPLLARGRKAGDALEESVLASLRSVAAVWKEARSQVESLDERIRALLEANAPALLGIEGCGTTTAAALVVAAGDNPGRLKGEAAFSMLCGVSPIPASSGKTERHRLNRGGNRQANWALYEIAIKRMAYDERTRRYVARRTSEGKSRREAVRCLKRYIAREVYHVLMDPNPDGAAPEGPELAKMRKAMRVTQKKAAAELGLSAATLGHLERGKRRSTKLERRYYELLCELERALPQTAS

SEQ ID NO: 176171 - protein, 367 aa, unidentified
MQNTIVHYEGAASLEAAATKVKPSGARIKIGLDVHARLYVAVAQYDHLLPKAAQRLRPGEFVPWVEALLGRGHGVHVVYEACGFGFSLYRQLMAAGAHCYVIAPRKLDEEGSRVKTDPRDATTLCQRLSRYLEGNTRELALIRVPSEEQEQARHMSRQRGQLVHHRQKLEAQGRSLLINHALPAPAHWWKEQTWTRLGQHLPAWITTRLQTARPALLSLQQQINALTSELEASAPSILPRGVGKLTSVVLTREICDWHRFNNRRAISSYTGLCPGERSSGSKRVPGSVTKRGNPRVRAALVECAWRMVRFQPQYPPVQKRLAILSKGSRALGAVRKKAIVAVARRLAVDLWRLHTGRCTAQQLGFTI

SEQ ID NO: 176172 - protein, 350 aa, unidentified
MWSIGLDVHDRYFAICILDEHGKTIKETKLHCGLKELIAHLKALPKPWSICYEVSCGYGHLLDLLAPLARKVVVAHAGQLRLIFKSKRKNDRVDARKLATLLFLDQVPAVHVPSINVRSWRNLISFRYRQVRRRTRVKNAIRTVLRTHGIEAPKGNRLWSGKGRGMLDQVVFPTPMAALQRDLLIDELDQVGRTVNRVEQELNHMGDAHPGVTLLQTIPGVGPRTAEAVVASIDDSRRFAKNKAIGNYFGLIPCQDQSANKNRLGHITQDGPAIVRALLTEAAWQGIRRSVHLKKYFERICHEDPMRKKIAVVATAHYLARVMLAMLRSGQAWRYERKGGKQQTEEAQAA

SEQ ID NO: 176173 - protein, 326 aa, unidentified
MAQKMDVVGIDVSKATLDAYALTSQQARQFANDPAGHQGLVAWLQELGVGVAVFEASGGYERAAAQSLRRAGLVAHVVDPKRVRHYAQAAGQLAKTDRIDARMIAAFGAAFLLGKPSGVAGGDDPARQDLAELVGTRQVLVDHRTSLQQQADAVTSAIAKKLLLATLKQFDRQIETSDRQIAAAIARHEPFAALARRLDTVPGLGPVSIAALIAWLPELGQLDRRQLAALVGVAPFADDSGKRTGQRHIQGGRMKLRNVLYMATVGAATRHNPVLQARYRRLLENGKKPKVALIACLRTLLTILNAMVAHQQDWNPGLPAAEPVAA

SEQ ID NO: 176174 - protein, 413 aa, unidentified
MKKDHIQFEQVVERGCGMDVHKGTIVVTIRGKGIKTQTKSYSTFTNSLIKLKEWLKKHGITHIAMESTGVYWKPVFNVLGDDFQILLVNARHVKNVPGNKTDKRDSRWLAKLLLSGLLRGSFIPSQKIRELRDLTRYKTKLTNQVTAEKNRFQKILEDANIKLSSVLSDVFGATGKKIIARILEGDYQPEQLLYYVHGRVKANREDIKEALTGYVTEHHRFMLKTILSSISRIETTLAEIEVQIEKVTEPYKEIIELLETIPGVAYDGAIGIISEIGVDMDEFPTHKHLTSWAGVSPGSNESAGKNKSGRITYGNKYLRALLVEQGWAASRTKHTYLSSKYKSLVGRRGKKKAVIAVGHKILIAAYFIIRDKVAYDELGEDHLNNFRKDKLVEYYKKQLAKLEPNTDFDKEVA

SEQ ID NO: 176175 - protein, 347 aa, unidentified
MALTIVETPITGGVDTHADVHVAAALDPVGGLLGVAEFPVTPAGYARLLSWLGGFGAVCLVGIEGTGSYGAGLARHLATAGIRVVEVDRSDRQDRRRQGKSDPLDAVSAARAAQSGRARGAPKGRDGSVEAIRALMVAKRSARAERTQTINQARSLIVTGPDDLRIRFARHTVAALVAETASLRPRPGSTVGYATRIALRELGRRAQFLDGQLERLDELIVPLVTARAPGLLALYGVGPDTAALLLIAAGDHPARLRSEAAWAHLCAAAPIPASSGKRTRHRLNPGGDRQANHALWRIVITRMSSHPPTRAYVERRTAEGLSKTEIIRCLKRYVAREIYPRLRAAAD

SEQ ID NO: 176176 - protein, 346 aa, unidentified
MLHVGLDLSRKRVDVCLISDQGELIDQFPAPADRDGLFGLTRRVAVYDEPVRGVIESMNGARFVHDELVTRGWEVLVADAHRVKGLAPLACKTDKIDARVLAELSLRDLVPAIWLPTPELRREREISRWRLHLVKHRSILKNRVHSTLIAFGYQVPMADLFGVAGRKLLKRLDIPEPWRGHVDASLALIDDLERRICAIEAELRRSGADHRYVPLLMTAPGFGWITSFTVACEIGDINRFSSPVKLTGYTGLCPRVSQSGETDRRGPLSKHGPRYLRWGLMEAAIHAASHPLYKERYQRTKRRLGRQRGAKVAQIDLARKLTEAIWYMLTRNQPFAPAGAAFRLAA

SEQ ID NO: 176177 - protein, 423 aa, unidentified
MYVAVPPDRAPEPVRVFDTFTNDLQALVKWLQQCRITTVAMESTGVYWIPLFQMLEDAGIQPCLVNARGLKNVPGRRTDWHDCQWLQYLHSVGLLRAAFRPEQEVCAVRSVWRQRAELVSMASQHVQHMHKALTQMNLQIHHVINDITGVTGLAIIDAIVAGERDAEKLAQLREPTIQASPETIRQSLVGDWRREHLFVLAQSRRLYQSYREQIAACDREIQALLSPLPPRADPRDLPPPGKPVRKTKRTAGAITFDYRAEAYRLFGVDLTRIPGLEGNVLALFSEVGRDLSRFPTAAHFVSWLGLCPDNDKSGGQVLWRGARKIQQRAGQLFRLAAHSLHRNRSRLGEFLRRMKAKLGPKAATTATAHKLAVIFYTLVTRQIEYDESIWAAHDEQNRKRMEKRIKRQASLLGFQLVPIEVPQ

SEQ ID NO: 176178 - protein, 387 aa, unidentified
MQKPHDNSKASPAAFMQDNTLIAVIELSLSNWLVAGLIPGVSREPLKKLEPNPEDLLKLLHGWRDEAIKAGRPITRIAVAYETGRDSFWLARWLRKHGIDAHVIHATSVAVSREHRRAKTDRLDTAMLKRGFLGWLRGERGHCTVAIVPTMEEEDAKRPHREREGLVHEQTRAVNRMKSALIQYGVRNFNPKLRKASVKLETVRTPEGKSLPPNTIAALRRDMERLKIIKEQIKAIEQARLQQFEQKPEALVNRMVYLLVRIYGLGLETADLLAHELLSRTLRDRKAVARYAGLTGSPDESGSKRREKGLSRSGNARVRKIMIQLAWRMVKFQPDSALVQWFKQRTESAKGSRKPMIVALARKLIIALWRYANDGVIPEGFKLHSAA

SEQ ID NO: 176179 - protein, 370 aa, unidentified
MKETITSYVGLDIHKDSIAIAVAEAGRSAPRFIGTTPPELATVCKALTRCTKRGHTLVVYEAGPCGYGWARYLNAQGWRCEVISPAHITRKGAEKLIKTDRLDAVLLARESRAGNLVKVALPDERDEAMRDLSRAREDAGIARLRARLQLKAMLLRHGRAYHGKSSWTAAHERHLADIKFDHPAQQIAFDEYRQAVKDAHERVERITQAMREQYEQWRMKGVVKALMCLRGIDFVAAVTLIAELGDLSRFTHPKALMKYLGLIPSEFSSGNTRRQGPITKAGNKHARRILVEAAWTYRFNPRVSRPIEVRQEGQPKAIREIAWRAQLRLAYRFRKLNAGRKMTQNKCCVAVARELAGFLWDIARQVKIPA

SEQ ID NO: 176180 - protein, 342 aa, unidentified
MDYFAGLDVSVKDTSVCIVDDTGRITREVKVASEPDALLQVLRNPAYRFKRIGLEAGPLSQWLFSALAEADLPVICVETRHMRAVLKAQINKTDRNDARGIAQMMRVGLYRPVHVKTLRSQKLRMLLTHRKLLQSKAIAVENDLRATLRNFGLKVGMVGTAKFEARIKELVENVADLAVLVEPLLVVRRALREQIGVLHRSVLAIVRDDEVCRRLMTVPGVGPVVALTYRATVDVPARFRRSKSVGAVFGLTCSRDQSGERDRPGAISRCGDEMMRAMLYEAAQSMLRSRKWSWLKAWAMQIARRRGIKRAIVALARRLAVIMHRIWVDSTEFRWTREATAA

SEQ ID NO: 176181 - protein, 427 aa, unidentified
MNHSAYQPILCVGADVHLDEIVLRAVDKTLGHEVVERFRVTNNLPGAQLAAATIAGVATELGYSRIAIGWEATGMLWIPFHRFLSTEPLLQPFELDLVCFNPKLVSNFKDGLLLRSPKNDDRDALDVAERLRFGELPVSYVPGDFWQGLRRLTRYRYRLSKALSREKMRFQSQAFLKCSDWKRVKVFSDIFGATSIALLTQFTVAELHEMTLDQLTDLISHRGHGRFGDPAATARAVRQALLTSYPIDPLMDEMLTAALAAGWEHIRYLQRSMKHLDQLIARHIDLVPNPLITIKGLGSIITAGTLAEIVDILRFPEERHLAQYMGLTWHKNSSGRFISQNTRLTKVGNVYLRYYFIMGANLLRQHNLEYKAYYWRKYQEVSKYQHKRALVLTARKLVRLVHALLTKNEPYVRPRTTRQDREEYSLQ

SEQ ID NO: 176182 - protein, 407 aa, unidentified
MERPAPIRSSWVTLRVGDSQTQSHMRKEPVMKKVRFIGLDVHADTIAVAVAEPSGDVRSMGVIPNRPESIRKLVKKLGPAAQLRVCYEAGPTGYVIYWQLTGLGVRCEVVAPTLVPVKAGDRVKTDRRDATKLARSYRAGDLTPVWVPDAAHEALRDLVRAREAAKKDQLRARHRLGKFLLRHGRRPATAMTPWTQRYLTWVRQVQFEQPAQEATRLDYLHEVDHVADRIERLERAIDDAVKTAPPCMRAVIEALQALRGIALVSAVTIVAEVGELSRFTRAPQVMGYSGMGAREDSSGTRTRRGGITKTGNAHLRRIAIEAAWAYRHQPAIGGTLRKRQATLSEEVKAIGWKAQLRLHARYRKLLGRGKCQQHVVTAVGRELLGFIWAIGVTVEREQRKTMSSIAA

SEQ ID NO: 176183 - protein, 403 aa, unidentified
MNMNAVGIDVSKGKSMVAILRPFGEIVSTPFEVKHTVSGIRSLIEHIKAIDGESRIVMEHTGRYYEPLVRELSQADLFVSAVNPKLIKDFGDNSLRKVKSDKADAVKIARYTLDSWTELRQYSLMDEIRNQLKTMNRQFDFYMKHKTAMKNNLIGVLDQTYPGANTYFDSPAREDGSQKWVDFATTYWHVDCVCKLSLNAFINHYQKWCKRRKYNFSQSKAVEIYEASKEIVSVLPKDDLTKLIIKQAVEQLNMASQTVEQLRTMMNDAASKLPEYPVVMAMKGVGKSLGPQLMAEIGDVSRFTHKGAITAFAGVDPGVNESGSYEQKSVPASKRGSGTLRKTLFQVMDALIKTKPQDDPVYLFMDKKRSQGKPYYVYMTAGANKFLRIYYGRVKEYLSSLPK

SEQ ID NO: 176184 - protein, 309 aa, unidentified
MKQSVVYIGVDVAKAHLDVAWEKRSRRFPNDKSGRAALVAWIKQSPTAVQLICEASGGYEQRLLESLEQSGLKVTLVQANRVRQYARAAGILSKTDKVDARVLSAFGAAMQPKPTVPQSAEQKRLREYEAQRRHLNRILLAEQNRLAQLGSAELRALNRSLMSKIKKQIAVLDTRIGTLIAQDEELRLKAQKLTSITGVGERTAALVLAQMPELGQLNRRQAAALGGLAPFNRDRGTLRGKRTIFGGRRALRSGLYVAALAAARHNQILSPFYQRLRATGKPHKLALTAVMRKLLLALNHSLKPIASPA

SEQ ID NO: 176185 - protein, 344 aa, unidentified
MTVYIGVDFHARQQTVSCLTTEDGEMHQYQLEHGTDDVRRFYGQFKGEVIVGLEASGYIEWFEEMMLELGHEVWVGDAAEIRRKAPRRQKNDKRDSELILKLMVKGDFPRVHRQSPESRTVLRQVRYRHRLVKLRTIAKNSLQAMAVGSGRYFGKRVHTRTGRQQLVNLPAILAEQAEQLIKVIDGLTVEIKRVEGWLTKQAREDERVMRLQTHPGVGVLTSLVLVHTLWPVDRFANSRKVTAYLGLDPVEDSSGNRVRIGSISKQGSRLARFLVIEAAGVAVRCDKELKGYYQSLVSRRGKPIAKVAVGRKLLTHCFILLRDEIDYNEFLRRGVEVRSSRLSR

SEQ ID NO: 176186 - protein, 345 aa, unidentified
MMVIGIDAHKRSHTAVTVDEMGRQGFVKTVGTTTQDHLRLLKWAVGLAGERLWAIEDCRHLTRRLERDLVAAGESVVRVSPKLMARVRDSARSYGKSDPIDDLAVARAALREPDLPIARLDGIEREIRLLVDHREDLVAERTRIIARLRWHLHELDPGWTAPTKLERHSAFDKVKAHLSDHNDGAMVRRLALRLVEHLRLLTDEIDELTAEITVRVTRIAPSLLAIVGCGALSAAKIVGETAHAGRFRSKDAYARHNGTAPLPVWSSNKQRHRLSRTGNRQLNAALHRIALTQARCYQPARELLERRKNGGDGGMEGLRVLKRRLSDVVYRAMLTDETVPLRRTA

SEQ ID NO: 176187 - protein, 343 aa, unidentified
MDQYIGLDVSLKDTAISIRQDGKRIWRGKCPSDPKVLAQVIRKHAPHARRVVFETGPLSTWFYHALTAEGVPAICIEARHAQKVLDETLNKTDANDADGLAQLAEAGFYKAVRVKSFDAMLTRTLVGARNQLLSISTQLSNQIRGLMKTFGLIVPNGTGRVFDGNVRELLDGNDGLARIILPLLEAWRDIRKRAADLGRQLVAAARESQATKLLMTIPGIGAVTAVSYVAAIEDPGNFRTSRSVGAWLGLTTRRYQSGEVDYDGHISRRGDNHLRGLLYEAATVILTRTSARNESSLKSWGLKLRERLGFKRAAVAVARKLAVIMHSMLKTGEVFNALAGATA

SEQ ID NO: 176188 - protein, 408 aa, unidentified
MERYYLGVDWSDKFHQVWVSDAQGQKVAEQKVVENVAGLIEFGRWLDESRSQGIELWAAIEKPQGRIVDFLLDHGVVVYPVNPKALDRARDRFRMSPSKSDSFDAHVLAEFLRTDHGHFRALEPNSNEAQELKLLTRDQHRLGRHKTRLLNQIGLTLKEYYPRPLELFPDLEAQIARDFLKHYPTPRALSDLTRRQWNRFAKREHHLGEGRCQELWEKLNQPQLGVPDHVVRAKSQLLRVLLAQLEALSGALESYHERVKNFFATMPAAELVKTLPGAKTGTIVAMLWAELGDSKNRWQSFHHLQAEAGVVPVTKASGKSRVVHFRFSCNKVMRHASYWLAFVSLNRSEWANHYYRDQRAKGHNHHQAIRALGAKWLKIIFVMWRDHKPYDENYHLANITRQKMRQAA

SEQ ID NO: 176189 - protein, 407 aa, unidentified
MHYLGIDISKKSFTVSVLDEEGEAITKFLTFPCTRKGMEKLVDKISSLKLKKSEVVIGIEATGNLWENLYSFLEGYKVIILNPYQTRKYHQVLSKKAKTDKVDSLVIAGLLRSKEALASYVPEEEVQVLRELVRLRHHLQKDKKNYLRKAYSLLNLVFPEYTDLIKSPFKKVSSMILKKYPTAIHMARARRTDLVKMARRIKGNNYSSELAEKLIQAAKESIYSGKASEVRGMALRIIIDEIQFLKNKIKEIEDKIEEILSSDEPSSPQKRLLGIPGVGPKTVAAFLGEVGGDVTRFSSANKLIGFIGWHPRISESGEKKNLHPKMSKRGPSALRASLYMAAVASLKHNPYLRSLYHRKISEGKESKQALICVGKKILSIMYSMLKYEANYDPQRIFFQFEKEQVLT

SEQ ID NO: 176190 - protein, 342 aa, unidentified
MNQVNQSIGIDVSKDAIMCCMGTLESGQHCFSKSKSFPNTPKGFEALLEWSTPGKTSAVFVMEATGVYYENLAYWLDSQGYQLSVLLPNKMKHYAKSLNVKTKTDAVDAQVLSRVGLERTLHYWHMPSAMMREIKFLSREYRETKAKLVVIKNQLHAKKHSFACPLSVEKRLIGQMALLETQLLEIESELRAAAISDPQFYDRVTRLNTIPGISFITIITILAETNAFALIKNTKQLASYAGLDVEHRQSGAKEGKTKISKKGNRFIRNALYMPALCATKHNPHMKPFYTRLCERKPAKKVAVTAVARKLLVLTFTLWKNNQEFIENYTEESRQALKPAYTG

SEQ ID NO: 176191 - protein, 343 aa, unidentified
MEYYVGLDVSLKHTSICVVNPTGSIVQEGVVDSDPEAIALFVRSRAPGTVRIGIETGPTTTWLWTELNRLGLPVICIDARHAKAVLKMQINKSDRNDAAGIARIMQTGWFKEVRVKDLDSHAVKALLASRALLVKIKRDLENQIRGLLKNFGLVIGRGKFNVFAVRAAELIENRPELIAAVRPLLEARKAIEQQVDDLDRKVHKLARHDVQVRRFMTVPGVGPITALCFKATIDDPTRFKRSRSVGAYLGLTTRRHASGEIDWSGRISKCGDAMLRMYLFEAAGVLLTRVPKWSGLKAWGAKLTKRNGLRKAKVAVARKLAVILHRMWIDGTEFNWLTKKAAA

SEQ ID NO: 176192 - protein, 355 aa, unidentified
MYGLKHQKEKRSMDHFAGLDVSVKETSVCIVDDVGKIVREVKVASEPEALLEVLRNPAWHFKRIGLEAGPLSQWLYSALAEAGLPVICVETRHMRAVLKAQINKTDRNDARGIAQMMRVGLYRPVHVKTLRSQKLRMLLTHRKLLQAKAIALENDLRSTLRNFGLKVGMVGTVKFEARIKELVENLPDLAALVEPLLIVRRVLHEQLGILHRRLLDIVRNDEVCRRLMTVPGVGPVVALTYRATVDVPARFKNSKAVGASFGLTPSRHQSGESDRPGAISRCGDEMMRVMLYEAAQVMLTRTNKWSWLKAWAMKIARHRGMKKAIVALARRLAVIMHRLWVDGTEFRWTREVVAA

SEQ ID NO: 176193 - protein, 454 aa, unidentified
MSRHTTKPASFETLPIVNPNAAGLDIGSDEILACVPIDRAAQPVRKFGTFTPDLIALADWLIACHIETVAMESTGVYWIPVYEILEARGLKPQVVNARHLKNVPGRKSDWQDCQWIQRLHTVGLLAGSFRPEAEMCALRAYLRHRATLLEHRAAHIQHMQKALQQMNVLLTQVLSDITGETGLAIIRAIVAGDRDPVQLAQLRNPRCKSSEEEIAKALTGHYRAEHVFALKQALALFHFYTQQLRECDTEIERQFKAIKPVTRDDLPPLDSEDKRDSHSKNAPSYDARTLLYQITGVDLVAISGLNAVTVQTIVSEIGTDMTCWPSEKHFCSWLGLAPHNDISGGRVLRSHTLKNRNRAGQAFRLAAQSVSRSENAFGAFYRRMKARLGPKQAIVATAHKIARTFYHMLTHHESFQAMDAAEYEKRFRDREIANLRRRATKLGLSLVEASVAST

SEQ ID NO: 176194 - protein, 356 aa, unidentified
MAPIYIGVDFHARQQTICYLKTETGELVISELKHQNKEQVRAFYQQFQEPVIVGLEASGYSPWFEALLEQLGCEVWLGHATEIRRRARWRQKNDRRDAELIWDLMVHDEFPRLHQPALSSREVLRMLRYRQKLIKLRTMTKNSLQAIALQAGLAKGPQLFTAAGQEQFKAAEMSPVLQWQRDHWFELLKPFNQQLLETVVWFKAQSKDDVQIQRLRTHPGIGLLTALCILHTLQPVSRFRNARKVAAYVGFDPVERSSAERQHFLGISKAGSRMLRYLLVEAVQTAVRHDEDLKRFYKRLAERRGRPKAKVAAARKLLIRAYIMLRDEIDYAEFRRRAVAARLARHGQGPTKCPRY

SEQ ID NO: 176195 - protein, 426 aa, unidentified
MWDARRRVLKIKSLKHGIIQDKRGNIMRTVFGIDVSKASSEVAILVNGEKIHGYTMLNDAIGFNRLLNDLKTVHNPEIIFEATGVYSRRLRAFLEEYGYAYTQLNPLEAKKQLDSLRVRKTDKIDAEKLAHSQFILNRKPTYAQEEVYQHLRDLSRFYQNLTEDIVRAKNRLHKVLQVTFPELENLLSTPTGEQYWNLVMAFPCKEFVLSLSQSNLCEIIRQSTSKRISEKRIAYLTDKLIKLAKQSFCAVKKISPMLEEVRYYAQELLRLSEHRQVVLDDMVALAQPLPEYDILRSIPGIAETTATSIIGELGDIRRFQSTNQINAFIGIDLRHYESGNFLAKEHITKRGNPYARKILFKCIHNIASASHTNPCHIADFYEKRKRQSTIASTKPHTIASIHRLIRTMYYLITHNKLYDYSLTQNR

SEQ ID NO: 176196 - protein, 408 aa, unidentified
MNTLYVGIDVSSRSNVVYLMLPNGNKHSNFSVANSHEGSVQLVKRIHSALTSHSLDTVLIGLEATSVYGDNLVYFLREDATLAPFNRKIHVLNPKQVKKFHDAYNDLPKNDYVDSFVIADCLRFGRINKEVYLGDYRYKALQNLTRARYFAVQNLTKEKQRFINVLFKKYSTLTQEKVFSNTFSTTALAVYNEFESAEALANMDLHELTDFIMEKGKNRFPDPDTVAKAIQKAARSSYRLPKTVNDSVNQVLSISITSMKALEAQIKEFDKAIKSQMELLSNVLISVPGIGPVYSAGIMAEIGDINRFNNQAALAKYAGLAWKQHQSGGFEAETTRLIPSGNRFLKYYLCEAAFSLVRCDKEYSDFYHLKYKEVNRYQHKRALALTARKFVRLVFRLLKDNRLYCLAK

SEQ ID NO: 176197 - protein, 339 aa, unidentified
MQVTTIGLDLAKNVFQIHGIDDHGEVVFNRALRRSQVLTFFERLEPCLVGIEACGTSHHWARELIKLGHDVKLIPPTYVKPYVKRGKSDAVDAAAICEAVTRPTMRFVEVKTPEQQAILAIHRTRDLIVRQRTQTINMLRAQLAEFGIILPQGVYHALQLAKDCVAGEPLNLPTDAQEVVFDLCEQLLFLHAKILRHTRHMTQVAKREKRVALLRTIPGVGPITASAIVATVGSGKQFKNGREFAAWLGLTPLNRSSGGKERLGHISKMGDQYIRRLLVLGMTSRIRSIKVEPERFDPWFADILSRKPSRVAAVAMANKTARMIWAVLTRDEPYKVRTV

SEQ ID NO: 176198 - protein, 343 aa, unidentified
MDKVDTVGVEVSAKVLVVALKSNGQIRACEFANTASGHKQLISYVRRYSQRVRVCMESTGLYGLDLALAVKAQKGMEIMVANPRSVRHFAEAMMKRSKTDPVDAKLLAEYAERMPFQVWQPPSLAARRLCALARAMHQLTEISTMQKNQLHAAGSTETTPKIILTELRRSLAQQQRAIEHLLKEAIDLLQSDLLLQKRFQLLLGIRGIRELSAVHLLGELVLIPADCDVRQWVAYAGLDPRQYKSGDSVEKKVRISKVGNRHLRRALYMPALVAVRHNPHFRAFYRQLLAKGKLKMVALVAVMRKLLHGIYGIFKSQQPFDATKLFSLSLVSALEPATEKMAC

SEQ ID NO: 176199 - protein, 353 aa, unidentified
MNSLTDLREVVDVVIGVDTHVHTHSAAVVDAATGGVLDEITVDATAQGYAELVEFANNHPVLRAWAIEGTGGHGAGLSRHLMELSEIVIELDRPKRAARRNGAKSDPLDAIRAAREAMARPRLGTPRAGGERQALSVLLAARRSAVNASTEAQQQVFSLVIAAPEPIRVRFRGQKLAAMLNTAATLRVQSAWDVETTSTVVALRTLARRAHAMLKEARELQKAMVAIIRSWRPDLLEEFGVGPIVAATVLCAWSHPGRIHSEAAFAMLAGVAPIPANSGQVTTRYRLNRYGDRQLNNALHTVVASRIQYQPATRDYVARRTAEGKTGREIKRCLARYVARDLYQLLENTPTAA

SEQ ID NO: 176200 - protein, 325 aa, unidentified
MENSNLQGWDTKCCVGVDVSKDWLDVGIGHSRLERCTNDVAGHDALIQSLKQGPVELIVLEATGGMEFEVACALQAAGFAVAVVNPRQARDFAKAMGFLAKTDRVDAAMLVQFAQVLSRHPERDRFVKPLADEARQTLAALVTRRRQLLEMLVAERNRLSMSHATARKSIKEVIELLKRQLDVLDRQLQRHVETHNAEIAGLLRSAKGAGPVLTATLIGLLPELGRLSRRKISALVGVAPLANDSGTHRGPRRCWGGRADVRNTLYMATLAAIRYNPAIHAFHQRLTQKGKKPKVAIVACMRKLLTILNAMVRDNKSFDLSLSAT

SEQ ID NO: 176201 - protein, 428 aa, unidentified
MSYKIAGIDVHKKMLAVVVSDVEIESEYQFERRMFSSNPEQLRSLAAWLVEQEAEEVVMESTAQYWKPVWEALERYWKPVREKREGARRRSGTLHLAQALSNRGRRGRKRDFPDAERLVKRLVARELTLSFVPDAEQRLWRTVTRKKYQLRRDRVRLHNQLEALLEEAHIKLSSLVSDLLGASARRMLKALADGETNPAALAVLAHERLRATPEQLCDALGACTDLKPVYRRLLKMTLEQLQILEQQIGQLDQELATLLHPHQDAVQRLAEVPGLGVDSAQQIIAEVGPAAATFPSEKCLSSWVGACPGEEESAGVNYSHRSPKGNRHMRRLLNQAANAAVKVKGSIFEIIYRRSVPRLGHNQAIGVIAHRQCRLIWLILHQGARYEERGPAVSKQSRYQRTWRMIRQLRNLGYRIELPDPQASQAQA

SEQ ID NO: 176202 - protein, 343 aa, unidentified
MEVAIGIDTHKGSLAAAAVDALGRVLGIREFTNDPTGHRSLLRWVTELGQPRTIGIEGSLSYGSAAARALLAHGEDVREVAPSLTHLERRRRSKGKSDPVDAVAIARVVAADETLPSARRTALLADLKLLVDYRDQLVRARTQVANRVHANLVVIRPGYEQVVPNLRAKRHVINARSLISRDRSVQAELLRRRLGEILRLEAEIAEADRRLADKLDEADTSLTQIPGVGPFIAAKILGEVGEISRIRSKASFAMLSGTAPLIASSGQTHRHRLNRRGNRQLNWALHYVALVQARSTPEAKAYLARQREAGKSHKEAMRCLKRHLSNVVYRHLLIDARRLEQAA

SEQ ID NO: 176203 - protein, 353 aa, unidentified
MKKYYVGMDVHKATIAIAVLDASGKLVSQSIIETSTQAVKDFLHSLRAEVHVTFEEGNHAAWLYDIVEPLVKRVVVCNPKHNHHLMSGSKSDRIDARKLAELLRLDAVKAVYHGEHGTRTLKPLMRSYECFVSDITRVKNRLKGLYNSQAIVQRGRELYHTRKRQVWLEKLTNAGQRTRAELLFLQLEELKKLKRVAQKAMVAESTRHEAHRILSQVPELGPVRVAQIIATVDTPFRFRTKRPFWNYLGLAVESRTSADHEVVDGRVQKRKKVIQTRGLNEDYNRRLKSIFKSAAVHASGCGAYKEYYEGLLQGGMREEMARLAVARKLAATVLAVWKSGEAFDAGRIMSKAA

SEQ ID NO: 176204 - protein, 345 aa, unidentified
MQIRSIGIDLGKTTFHLVGLGERGKSVIRKKLSRKQLLAFTANLPPSLVGLEACSGSHFLGRALSQQGHDVRLIPAQFVKPFVKSNKNDYLDAEAIAEAVERENMRFVPIKTDDQLDLQALHRVRERLVSRRTAVINQVRAFLLERGITFRKGPATLRRQMPEILENAAAQLSPRMRNLLATLWQEWKQLEEQIDCLSADIETICIADPACQRLRQIPGVGPLVATAVVAAIGNGAAFHKGRDFAAWLGADPEAVFDGWESQAARHQQTREPVSPQDVHPWRSRCSVASETRRFLARCLDERIGGQGTTQRVGRGDGKQTGADHLGCAVERRAISGCSAGRLASP

SEQ ID NO: 176205 - protein, 400 aa, unidentified
MSGLKGHFDCFVGIDISKDKFDTCGITGEEAKLFQFSATMDRKGFEKLKGHLAAVSISSVLIGMESTASYHVNLFSYLVSEGYNVLLINPLLISNYVKMQLRKTKTDKKDAVVIARFLLTNGDTLIQRATPFLISDLRDLSRQRESLVVEMTALKIEIKRLLNITFPELEHMTGIFTKAILKLLLSYPSARTLRGADRDQLTKMLIENSQGHKRDVFAESLLKASQFSIGTDSHAKEMILKQKIALLLHLEDALQEITDMLIGMSRKLMDEDINIMTSIKGIGDKAAANFLIEMGGDINQFERSGKIIAMAGLDPAVYQSGKHEGKGRITKRGNRHLRRIIWLMTTKVIQYTDIFNVYYLKRRKEGLPYKMAVLATAHKLIRVIYAMLTQRTTFCAQVNS

SEQ ID NO: 176206 - protein, 366 aa, unidentified
MLYLAIDLHRKQMTINLRGEDGEPILRRQVSTWGPDPRTLLADVQRRAGEDGFVAILEVCGFHDWLTELLPQFACREVVLIQAEKKSSRKTDRRDASQLGELLWLNRGRLLAGRKVQGLRRIVPPQPAQREDRRLTQLRFNLTRELTRTINRVKYILRRLNIEQHCPTKGIQTQPAKAWLKKLALPTLDRLEMDQLLARWTALAQQRDQLDRRIVERAALDPRVQWLRTTPGASHYTALALACRIGEIGRFPTPRSLANYWGLTPRCGSSGETERLGSITKEGSPLARYLLAQMVLHVLRKDTAMREWFRRIKQRRGAKIARVAVMRRLTVIFWHMLTKLQPYTTAAPATRRAKSRRMAKSAPGNN

SEQ ID NO: 176207 - protein, 454 aa, unidentified
MTKARGRRGTLDGFAEINHDAAGIDVGNAQHWVAVPCGRAVESIRMFGCFTADLHALANWLERCGIKTVAMESTGVYWIALYEVLESRGFQVCVVNARQAKNLPGRKTDVKDCQWLQQLHTYGLLTASFRPQGEIIILRRYLRHRETLVQEAATCIQRIQKALTEMNLQLANVISDISGTTGLRILHAIVEGERDPQRLAAMRDWRIKATPDEVAKSLLGNWRDELIFVLGENLVLFEVYQQKIERCGHRIEQHLKSMSAQVDNNTNPLPKPRKGKRPHGNSPSFDLRTELYRVTGTDLTQIDGINVVTAQAILADTGTDMSAWKTEKHFVSWLGLCPDHRISGGKVLQRATRKVTSRAATAFRLAASSLRRSQSALGAKYRRLQSRLGAPKAITAMAHHLARLFYRMIKYGSEYVDHGVAAYEARFREQQLKWLSRKAAELHLCLPPLPNSAA

SEQ ID NO: 176208 - protein, 350 aa, unidentified
MTMVGGLDVHRQQITFDYVDDDGLVHWGQIRPATRKTLRGWLAEHFRDGDADFALEGCTGWRYVSEELAAAGLGVHLGDPAETAALRGRKKRAKTDRADARLLRTLLVEGRFPESWIPPGHVVEVRTLGRLYCTLMDERRAWQQRIHAQVFHQGCPPIRALLTRAGREALAGAELSAAGRQYVDTALRRIDELSAEIDPLRTQLISFARRQPGCRALQRHYGVGWLCAVIIWAEIGDARRFSSSDQLVRFAGLDVTVYSSDAKRAPGHLSRQGSPELRWAAFEAAKSAARRGSPDHGYYQKLAAKHDGHNGKNPTLAVERKILRRCYHTLRELGDAALALPDIRPQEVAA

SEQ ID NO: 176209 - protein, 376 aa, unidentified
MSEITRGEIARVGVDLAKRVIQVHAVDAAGRRVVSRAFKREQFMAWCVQLPAGCLAAMEACSSAHHWARKLRALGLDARLIAANFVSPYRMEGRSGKNDATDAAAICEAASRPSMRFVPVKSCEQQGVMSLHRVREGFKEERTACINRIRGLLSEFGLVFAQSPKALRAELAETIEDASNELNTMARLVLERAFAHWRELDEQLRWCDRQVGQHVRSSAAARRASKITGIGELGASALTAGVGDFKQFKGGHQFGAWLGLVPSQNSSGGKVSLGRITKRGDDYLRTLLIQGAKAAVMSAGKRKDPTSRWLVDLTARVGWQKACIAMANKNARILWAVMTRDREFDAEHVSEKPLAKKAAGERPAVVARSPAVAVTA

SEQ ID NO: 176210 - protein, 316 aa, unidentified
METPQPFVGIDVSSQRLDVDSLPASHYFSEPNTEDGIASLVLRLRKLNPQIVLLEATGGYEIPVAYGLYEAGLPVVIMNPKALRHFAKAIGKLAKTDKLDAQVLALSAQSIRPPVRPLRDQEQLELANLMTRRRQLQGMIVMEENRRRTCTPRVRSNIELSLAHLRQLLKDLDREIHDSIRRTPLWHENSEILQSFTGIGPKVSASLIAVIPELGTIPGTKAAALAGLAPMNRDSGQYRGTRKIQGGRPAVRQALYMAALVAAHHNPVIMEFYQRLRLAGKPAKVALTACMRKILVILNAMLKNRTYWNPQLPLAA

SEQ ID NO: 176211 - protein, 354 aa, unidentified
MSNKSNSLVATIGIDIGKNAFHVVGLDRRGAIVLRQRWSRGQVQARLANMPPCLIGMEACVGAHHLSRGLHLQGHDARLMPAKYVRPYSKGQKNDFRDAEAIAEAVQRPTMKFIATKTAEQLDLQALHRVRERLVSQRTGIINQIRAFLLERGIAVRQGLRFLRTELPIILATRSDLLSPRMLRVIEELMADWRRLDERIEGLSEEIEAVARQDPACERLMTVPGIGPIISSAMVAAIGNGAVFTKGRDFGAWLGLVPKQISTGDRTILGPISRRGNRYLRALFVQAARVVLVRTKDSDRYGLKAWIDAAKKRLHHNVLAIALANKLARIAWAVLNKERAFECVSTRATSSQPA

SEQ ID NO: 176212 - protein, 347 aa, unidentified
MNFYTLPHKHYCGVDLHSRTMYLCIVGRDGAMLLHRNLPCNRDRFLLAIAPYREDLVVAVECVYSWYWLADLCAREGIAFVLGHALYMRLIHGAKAKSDRVDSEKTAVLLRGGLMPRAYAYPADMRATRDLMRRRLLFVRQRGSLLAHIQITHHQYNIDPPGKRITYRSNREGLGDGFEDSSVRHSIAADLALADHYEVTIGELELAVLRQARIHDPNAFALLTSVPGIGKVLALTILYEIHDISRFPSVRDFASYSRLVKCDRSSAGKSLGSGGNKIGNAYLKWAFSEAAVLFIAKSELGRTVLTRLERKYGKPKALSVLAHKLGRAVYYMLARKQAFDPQRFATS

SEQ ID NO: 176213 - protein, 458 aa, unidentified
MDQATRFIGMDVHKDTIVVAVTATGDVGKATPYGTFPNTAVTLEKLVGRLRQAGSGPLKFCYEAGPCGYGVHRTLTRLGEDCIVVAPSMIPRKSGDRQKNDKRDAASLAVLHRGGLLTAVWVPDAAHEAMRDLIRTRLAAVRAVRTARQQLSAFLLRHERIYPSGGKAWTKAHRGWLADQSFAQPAQQIVLEESIEAVRLGEQRRDRVDGYLRAQIPTWSLFPLVQNLGALRGLDAIASAGLAAAIGDPSRFASAPDFMAYLGLVPSEHSSGPRRRIGGITKSGDIHARTLLIEAAHSYRFPARIARHKLAAVDAVPEAVRTIAWKAQTRLCQRYRQMMAKGKPKPVVVTAIARELAGFVWSIACITSDPPAKTAAAATTADEVCPTKSTGHPRVLRRQRLKAATPHAARPEQTGAPIELRYVTVDRPYPEADNPKESTPASPMRGSAAASGLNKAPA

SEQ ID NO: 176214 - protein, 432 aa, unidentified
MERVVERAGALDVHKAQVTACVRVPGEQPGSRRHEVREFKTTVRGLLGLADWLRGHGVTVVAMEATGVYWRPVWAVLEGEFELMLCNAAHVKNVPGRKTDVADAVWLCQLLEFGLLRASFVPPKPVRELRELTRRRRTLVRERGQEVNRLHKALEDTGIKLDCVATDILGVSGRLMLDALLAGERDPARLAGLAKGRLRVKQPALLEAFEGCRFGAQNTLLIGGLVRHLDFLDGEIAALDEAIAAHLAAEREGDHPAPFELAVQIACSLDGIALVTARMLIGEFGTDMTRFATDKHFASWASQCPGNHESAGKRRSGRTRKGPKWLDGALHDAAMGAIRVKDGHFARKYRRIKARSGHKTAIGAVKHALLIALYHMLKNGELYKPPTPNPQAERRAHERATKRLLAQLERLGHTVTLQTATTTATTPAAVTP

SEQ ID NO: 176215 - protein, 343 aa, unidentified
MKKSLFIGIDFSKKTFDVSLIDGNNPNGISGYNQFENTKVGCNQLLKWVRSWSKASTTEWLFCGEHTGLYSVLLSEFLIKKNLFVWLENPLQIKLSTGIKRDKNDKVDSREIALYALRFQDKAKESQLSDKSLKSLELLLGFRDRLIGNKHALLVSAVELRAVLNRDVTARYIYEQSQKDIERINKEIKCVEAKMKEVVDSNDAIKETYEVVSSIKGVALINTVAIIVATKNFSRFENSRQFACYAGMAPFGKQSGTSIKTGPHVSHLANKRIKTLLTQAAQCAIRYNSDLKQYYTRKVAEGKNKWVVLNNVRNKLIHCIFALVRDKQLYQEGFLQHMEKSIA

SEQ ID NO: 176216 - protein, 371 aa, unidentified
MADYREAFVGIDVAKLKNAIAVAESGREGEVRYFGEVDASYASMRRIIQRIAAKFDRVHFCYEAGPTGYGLHRLIQSLGHECMVVAPSLIPRKPGDRVKTNRRDALALARLLRAGELTAVWVPDEGHEAMRDLVRARAAAVETLRVHRQQISAFMLKHGRIYPRKKGWTMRYLCWLQEQQFDHPAHQIALQEMVEAVRVSKERVERLEKVIEEFVPNWSLAPVVRSLQTLRGVDLIVAVTFATEVGDVSRFESPRQLMGYLGLVPGERSTGETVRRGAITKAGNGRVRHMLVESAWTYRHPPKVGARKLYRLEQAPPKVREIAWKAQNRLTARYRMLTGRGKRTTVVCTAIARELTGFMWAVAREAQAIRS

SEQ ID NO: 176217 - protein, 427 aa, unidentified
MTLNDDVLIAVDPHKASNTAAVLDPVTKTVIEAARFANTVGGYAELIAFAARWAQRRWAVEGCHGAGRSLAQRLVADGELVLDVPAKLAARVRVYSRGHGRKTDKDDAVSVGLAALDGTGVTLVACDDATVSLRLLCDRREELTAQRTQAACRLHRLLAELTPGGMRRELSANKAQALLARIRPAGDVATVRVHIARDHLADIRALDARITYLGGQIAALVTASGTGLTGLFGIGPVIAGRLLAEVGDVARFATKDTFASYNGTAPIDASSGEQVRHRLSRAGNRRINHALHMMAVTQIRYPATPGRLYYERKRREGKTPKEALRCLKRRLSDQVYYQLLTDRRGTIGTCGSPTTPPPTRSTSTSPAARSHQAAPPSRPLHRPAPPGSSRWTGKTAASSASRSSTPAPASPTTSSTRPKPTAKTATS

SEQ ID NO: 176218 - protein, 350 aa, unidentified
MSTVAATQLVVTGGVDTHLDTHVAAAVDHIGGLLGTAAFPATASGYRRLLAWLRGFGEVGRVGVEGTGSYGAALARHLSGQNVSVIEVSRPNRQVRRRHGKTDVVDAIAAARAVMSGEATATPKTHDGSVEGLRILKVLQRSANKSRTQALNQLRSLLVTAPPELRAKLQHLARRDLLATCAAFRVAPDDDSLPGLTRFALRDLAQRIQSLDERLKQVDTRLRRITTVAAPQLVELHGVGPDTASTLLITAGDNPERLTSERSFAALTGCSPIPASSGKTHRHRLNRGGDRQANAALWRIAIVRMASDERSQKYIAKRISEGKSKIEAIRCLKRYIAREVFDALPQTAAA

SEQ ID NO: 176219 - protein, 374 aa, unidentified
MENTITYVAMDTHKKQHKIALHYPCQEEIVEFTINNTVRDIRKMVNKIKKQAPGKIEFCYEAGVCGFTLKRRIEQLDCRCCVIAPSLVPRKPGERVKTDRRDARKLLMMYQAGLLTEVHAPDEHQEAARELTRLRETARDNLKRIRHQLLKLLTRHGYVYTEGRHWTQRHITWLRTVKFAEPTLTNVFENYFNEMIYCIGRLENLDKEVGLLASSQEYKEIVGLLCCYHGIDTLTAITIITEIFEFGRFESPRHLMSYLGLTPSEDSSGEKQKKGAITKAGNKRIRRLLNETSWHYRHRYVPSAALKKRRKGQPQWAIEIADAAGRRLSKRHRYLINKGKMPCKANIAVARELAGFIWFTVTQYQARKNTNDAA

SEQ ID NO: 176220 - protein, 317 aa, unidentified
MHENNIHAAGIDTGKAKLDVALGGGKARLQIDNALSGWRELATWVKRHNVDRIGIEASGGYERGVVAYLREKGFTVILFQPLQIRAYAGFRLQRAKNDRIDADLIAACTAATTTVRQAPDPRFQAFCEHLTLIEQIEEDVARAKTRLEGFRDSRHREILASEIKRLKAWRTAELKRLLAALRRHDDLANRLTLIESVPGIGPRTALALLIRMPELGSLSREEAAALAGLAPYDDDSGKHQGLRHIAGGRERLRRSLFAAALPAAFQWNPSLVALYGRLTGAGKSYKVALIACARKLLIFANTVVARGTPWTEHHATA

SEQ ID NO: 176221 - protein, 360 aa, unidentified
MIGHRTSVGLDVHARSVVGCALDGDTGEVWERRLTPNYQDIWDWLRSLPGPVAVTYEAGPTGFGLARFLIAAGVLCLVGAPSKLQRPSGDRVKTDARDAAHLARLLHLGQIVEVSVPSAEQEAARDLVRAREDCRGDLMSSRHRVSKLLLRQGIVYCGGRTWTGKHEGWLRGQRFDAAPLQLAYDTALDTMLATVDRRNRLDEAIAKLAADSAYTPVVTRLGCLRGVSTLTAFGLAVEIGDWDRLTGRSIGAYLGLVPTEYSSGASRSQGPITKTGNGHARRLLIEAAWHHRQPYRPGVDLRRRWDAASPPARARGQQANRRLHTRWSRFDARKKRPVVANTAIARELAGWCWSLAVLDT

SEQ ID NO: 176222 - protein, 401 aa, unidentified
MGIWVGVDWGSGAHAVCVIDAKGMVLDRFEVSHDRAGLAVLVTRLQKHGALDVIPIAIERPSGLLVDALVEAGFVVTPIHPNVVKACRPRYRAVAAKSDPGDAFILADILRTDGHRLRPLAPQSDAIKALRGLVRGRDDLVGTRVALAHQLRALLASFWPGAARIFSDLASPIALAFLERYPTPEAAARLGPKRLAGFLAQHRYCGRRSPEALLERLRSAPEGGAGEAEGQAKGELVRALARTLQTLVAEIAKLSSRIEHAIAALPDGRIVMSFPRAGTICAAQILAELGDVRARFPSEHQLAAEAGVAPVTYQSGKSRGVGWRWACNKRLRAALTCMADNSRHQSPWAADVYRRARARGCDHPHAIRILARAWARVLWRAWTDRVPYDPGQHRGAQAFAA

SEQ ID NO: 176223 - protein, 340 aa, unidentified
MPALTIGLDIAKNVFQIHGVDRHGKTVVQRKLRRAEVLKFFAKLESSLVGIEACHGSHFWARELTSLGHMVRLLPTQYVKPFLLGGKNDANDAAAICAAVTRTGIHFVTIKSAEQQSRQSVHRMRQRLILERTAKSNQIRSMFAEEGVIFAVGVPQLRKGVVELVNNPDAHITALLRRLGSMYLEQLKALQQWLDELTAEIAEIFKSNEACQRLATVPGIGPVIATALVSSVGDPSQFRNGRQFAAWLGLTPRQKSSGGKTRLGGITKRGDTYLRTLLVQGARAVMHFVNRRDDRHSRWIKAVMQRRHVSIAAIALANKTARIAWAILTGKCSRKIYLEF

SEQ ID NO: 176224 - protein, 337 aa, unidentified
MKLYCGIDLHSSNNVVAVSDEQDRPLYEKRLNNDLDTVLDVLKPFKGELVGCVVESTYNWYWLVDGLMEAGFPVRLAHTGAMAQYAGLKYTNDFSDARYLAHLLRLGILPTGYIYPKEERGLRDLLRRRLSLVRQKTLHHLSLQSLIARHSGQRLTANEIKQLETGQLAAYLESPILLGGQITHQARCWLDEAIRRIEQELQRQIQPREDYQLLQSMPGVGPVLGTTIALETGTIERFPSPGNYASYARCVKSEKISNGKRKGQGNKKNGNKYLAWAFMEAAHYGAIWSPPIKRYYQRKQSKSHILVAKKAVANKLARACYHMLKRGEVFDVTRAFG

SEQ ID NO: 176225 - protein, 327 aa, unidentified
MEQPILGIDVAKETLDVALWNGGRMVTRQFENTLSGQQLLAGWLDKQGARGAHVCLEATGQYGDGVSEYLYQQGYCVSVVNPARIKHYGNSKLRRNKTDKADAQLIAEYCLREKPALWTPPPASFKDLQALVRHLDDLQGSRLQASNRLSSGVRTPFVVEQLHAQIAFLDTQIEQTKQAIQQHIDCFPELKHAQDLLVSIPGIGRLTAAKLLGEIRNILAFEDARQLAAYAGLTPRIFISGSSVHKKSRLSKTGNANLRKILYMPAISAKHWNPIVKQFCERLLQSGLRSMEVIGAAMHKLLHLVYGVLKTGRPFDPDYLVKVQVTS

SEQ ID NO: 176226 - protein, 485 aa, unidentified
MAKRRMSTFERLESGRLNRKQRRELGRQVAVADPGLTIVHANAGGIDVGNESHYVAVPPDRDPNPVREFGCWTAALNQIAEWLQSCRIDTVAMQATGVYWIALYDVLEQHGIQVVLANAQHTKNVPGRKTDVQECQWLMKLHTYGLLRDSFRLAQEMESVRTIWRLRDRHVKEAGRAVQHMQKALTKMNIQLANVISDINGLSGQEIIAAILQGERDPWKLADLKHYRVRASREEVARSLEGNWREDVLFELQQAVDSYHFAHRQMQECDRKLEGYLASLPARMLDTPVQPEDTQAATPKKKTKKAKRPSGNQPHLDLKTELKRICGVDLTSIDGIDVMTALTIVSEIGTDVSRFQDETHFASWLGLTPAKDITGGKTIGRGKRKVKNRVAVALRTAATTLLKSDSYLGARYRSLRRKLPSFASAVKAMGRYLAVLIHRLLTKGEAWVDRGATQFERRHTEQELASLSFKARAQGFKLIPITEAS

SEQ ID NO: 176227 - protein, 487 aa, unidentified
MSVVTGHVCDIGEAAKAVIPFERVSITTYPNRCGIPNEMMEEDMAQRKRTALELAHPNAAGIDIGSASHFVAVSPDRDDEPVREFKSFTEDLEELADWLVCCGVDTVAMESTGVYWIPLYEILEARGFAVNLVNARHVKNVSGRKSDVLDCQWLQQLMSYGLLSGAFRPADEICMLRAVSRQRDMLLASQSRHIQHMQKALTQMNVQLANVISDIVGETGQKIVRGIIAGERDGHVLAKMKNARIRASEEEIAKSLQGNWREEHLFALKQAMALYDNYGTLLAECDTKLEGMLATLVGDNDSDPGRGRRASNSKNAPQFDVRTYLFRLCGVDLTRINGINPTTALKVIAEVGPDMSRFKSAKHFASWLGLCPGTKISGGKVLAGASKRTTNRAAQSLRLAAAALHKSQSALGAYFRRLAARLDRAKAITAVAHKLARLIYTMLTKGAEYTDQGQDYYEERYRQRVMHHLAKRAEKLGMQLVPAPQST

SEQ ID NO: 176228 - protein, 338 aa, unidentified
MTIKTLGIDLAKNVFQLYGADADGGCVLQQRVRRETLLAVVGSLPPCTIGIEACTGAFFWQRRFERLGHEVKIIAPQYVKPFLKHQKNDRNDAEAICTALRQPNMRFVPKKSVEQQDIQTLHRARQRLVNHRTALVSQMRGILLDRGIGFATSITRARRMIPEIIADADNDLTELCRETLSSLLAFLHEIDVRIRHFDRRIDQVFRASEACQRVARIRGVGPKTATAVVAAVGDGREFQNGRHMAAWLGLVPRQHSSGDRRILMGISKRGDRHLRTLLVHGARAVVRTAASKSDGFSAWVNTLRERRGTNRAIVAVANKNARVIWALLRRNEEFRPAI

SEQ ID NO: 176229 - protein, 443 aa, unidentified
MSRKQNTHLRGERGQALTEQIRHIPMDRILCVSLDIGKYFHVVMIHNLLGEIVTPTFEIDIFRTGFARLCAAIDEAVAQTRARVVWVGMEPTGHYFENLARQLRERPQPVRLINSFAVKHNRDQQMMRHEKTDEIDVAAVGDLLRRGEGTPYRPPTGVYLPLQHLDRVRVSKLKVQTMLKNQVIGHLDRIFPGLVIQGKEATDRYTPLFATPFWQCRTLQHLIRVCPDPRRLASLTPTELVALFHARCYPLGQKIAARIIAYAQKVLLPDAELVAIRSELLQHDLALLAEVERHLRQLEDRLCQLLAQTPAAVWARLKGLSPVQAASLVAAMGDPADYTCAAQIFRRAGLVSGRNDSGTRQRQGKGKPVVKVGDVYLRRALMAALETLILHQPILRTYYAHLKKTKHPGVARVATARKALGILWATLRDQCPVTLVLKKGETM

SEQ ID NO: 176230 - protein, 468 aa, unidentified
MNEKVFLGIDVSKGYADFIILDSKNKEREAVFQLDDTSKGHVQLSKILYSFLEKNPQTEICCGVESTGGYERNWYRYLLSLSETKPIKVALLNPSAVKGVDKALLRRTVTDGVSAENIAIYLKNYPEKVVYGKLEQERVLLKEGRSHQTYIKMLIKQKVQLVNQLDKVLYQYFSEMLTYCRHGVPSWLLRVLIKYPTANHIIKAGVDKLVKEPGVSKEKAKSLIMKAMQNTQNAGEHIGFIIQNSCSEILHKEEMIESNKKYLRSFFKNDFFVQLLMSIKGVGIDSAIMILLEIEDISRFESSKKLASYFGLNPVYRQSGDGTYGMHLSKKGRSLIRATLYMVCLSAIRSSELFKNRYASLRAIGRKHQDAMGILMHKMLRIIYGMLKNETQYSPEIDRKNQEKSSKIQEDKQEQKKKQVKEEMKKKRRYQKQDLKESPISKRMVKKVKDLEQPQTVNTVDTGSCQAL

SEQ ID NO: 176231 - protein, 413 aa, unidentified
MRLFVGDDWAEDHHDVELMDEGGRRLAKARLPEGVAGIARLHAMVGGQLGEDADEEDAGQVAVGIETDRGPWVAALIAAGYTVYAINPLQAARYRERHGVSGAKSDAGDAHVLADMVRTDSHQLRTVAGDSAQAAAVKVVTRTHKTLIWERTRHTQRLRHALRDYFPAALEAFEDLDAPDTLELLARAPDPASAARLTTAQISAALKRAHRRGIAGKAGQIQAVLRAAHLGQPAIVTAAYAASVRALIAVLGTLNEQVTTLQGQVEAYFGQHPDAEIITSQPGLGPILGARVLAESGDAPARYASAKARKNYAATSPITRASGKKKAVLARHVHNDRLLDALMSQAFSALQASPGARAYYDRQRTRGSGHNPALRQLANRLTGILHGCLKTRTLYDEATAWPQHAAKPEKAAA

SEQ ID NO: 176232 - protein, 471 aa, unidentified
MIRGASKKSCRSEPFRGLRVTNPHVAGIDVHAKEHWVAVSPEDALPARVDQPAHLPRHVRKFGTCTADLEMLADWLQACGVTSVAMESTGVYWIALFELLERRGFEVYLVDPRQTRHAPGRPKTDVLDCQWIQRLHSYGLLRPSFRPPDSIVALRCYWRQRQMQIRYAATHVQHMQKALEQMNVKLTEVLADITGVTGRRIITAILQGQRDALTLARLRDHNCKNDLASIAKALQGTWRPEHLFALRQAYELYQFHHQQIDQCDDMIQAELARLPNRAAGKAFTTKPRRCGRKANDLSFDACGPLFKALGVDLTEVEGIDVGTALVILAEIGVDVSRFPTEQHFASWLGLCPRVHESNKTQKKKGPRQGKNRVAIALRMAAQALGRTQTPLAMFYRRIKSRIGGKGAVTATAHKLACLVYRMLKFGREYVKQSLAEYEAKIRKQAERSLQRKAAALGFELVPKPLPTAVPS

SEQ ID NO: 176233 - protein, 320 aa, unidentified
MLSFCGIDVSKDRLDVIVLPEEQCCSVSNDRTGWADLVERLRGRSIAGIGIEASGGYERGVTRALLAAGMPVRQVNPFKLRQFARASGVLAKSDPLDARMIASFVAIMPTRPAQRTPAGAAQVAEMLAVRRQLSAEKVAAENASRLLEDAMLRRLSRRRIGRLAGDIDLLDKRMVEIVANDPALAHRYRLLTSMPGVGSLLACTLIALLPELGCITRKQVAALVGVAPYAFESGTLKGRRCIWGGRANVRQVLYMAAMSASNWNPALKPFHDRLNAAGKKPKVTIVAVMRKMITTLNAIVRDDVLWADRHSGRHSVTTTR

SEQ ID NO: 176234 - protein, 457 aa, unidentified
MACEEMAAVMEPQEIEDEEHEQILERAAAVDVAKAAGMVCTRVPHQARPGKRRTRVWQVDATTNAVLELGEHLAAEGIEKVTLESTSDYWRIWFYLLEAAGLDVQLVRAADVKQAPGRPKSDKLDAVWLAKLTERGMLRPSFVPPSEIRQLRDYTRLRTDLTRERTRHYSRLEKLLEDALIKVSAVASKLDTLSARDMIEALIAGERDPRKLADLARGKMKAKRAALIEALTGRFDDHHAELARMLLDQIDALSAQIGKLTARIEELIAAIPAAQGIDADGTTGPAAGQGQGAPVLPAVDRLDEVTGIGREAAQAIIAEIGLHMSVFPTAGHLVSWTKICPRTIQSGARSRAGHTGKGNPYLKGVLGEAAAAAGKTDTFLGERYRRLARRRGKLKALVAIARSILVIVWHLLADRNTRYQDLGAGYHATRIDKDRKTRNHIRQLEALGYTVTLTQAA

SEQ ID NO: 176235 - protein, 348 aa, unidentified
MLTYCGVDFHSRQQKVVFCDLATGEIQRKELKHQSDEVRQFYTQLPKPVIVGLEATGSSQWFEKLLAELGHEVWIGNATEIRRRARSRQKNDWRDAELVLDLMVKDEFPRIYRLSEESLEILRRLRYRHRLVKMRMMAKNGLHAIALSAGLSMRSKLLTKSGRAKLELLDLSPTLKDQRDEWLDMIDQLNHRIARLGSEIEQIGEADPRVQLLRTHHGIGPLTALALVHTLEPVTRFSTSRKVTAFVGLEPCEESSADKVRWRGISKAGSRLLRFLLIEAAGVAIKYDDELKRFYLHLLHHRDWRKAKVAVARKLLVRAWIMLRDQINYAEFLKRGVAVRSARTGRRP

SEQ ID NO: 176236 - protein, 310 aa, unidentified
MNATAKVETYAGIDVSKTSLDVGIMGATQVERYSYDAAGIEAVVEVVQRHEPRCIVVEATGDLEKELVTALVVAGLPVAVVNPKRVRDFARAAGRLAKTDRLDALILAQFGQVFRPALYQAQNAAAEQMSAWVSRRKQLVEMLVAEKNRLKSTRDATVRQQIEAHIRWLEGEIAALSDKLNQLVAADPQRQATGVMLRSVPGVGQVVTVTLLAELPELGQLNRQQIAALVGVAPLNRDSGQRRGKRHVAGGRASVRRVLYMAAMTAVRCNPVIKPFYQRLLAAGKEKKVASPEEEIVHFISEPKSIRSLV

SEQ ID NO: 176237 - protein, 314 aa, unidentified
MRNCIGIDVAKKYFDLHILKTGQDRRMENSTGGIGKCVALCNKIKPELIVTEATGGYELTLAATLQAEGFAVAVVNPRRIRDFARAAGQIAKTDKLDARIIAQFAATMEPMPTERINENTQKLKALVARRSQLTGLHTAESNRLEHADGKEIRRSIDAILKVIEAQLKTIDRQIKDHIDNTPRLRQRSEILDSVPGIGPTTAHMLVTELPELGRLNRRQIAALVGVAPIARDSGTFRGKRMTGGGRKKIRSRLFMPTLVAVRHNPILRAYYNSLLSRGKCKMVALVAVMRKLICIMNTMAKNNQKWDPNFIKNS

SEQ ID NO: 176238 - protein, 365 aa, unidentified
MKKIANVGVDYHLNSLSIAVLAEGEKEFHQSIHLKNDDRLIAKYLKKLSKIFELRICYEACSSGYDFQRKLNAWGYHCDVIAPSLIPRKPGDRRKNDFRDARNLAQHYANGMLSVVHPPTEEEESVRSLIRCRLAFKEDARRTKHRINSFLLTQGYSWKKSTWTKQHRWWLSKLEMPYEYLHKVLDEHLGQLEYLESRLKHLDQQIEEIARSEIYAPSVKKLRAFKGIGTLTAMLLIAEITDFRRFPTPRALMAFLGLIPSEDSSGDKTKGGSITKAGNIRCRTSIVEAVQHYVKKPYISAQMKANLAEVDGKSANVALHCMYRLHKRFWALSMKGKIRPVAITAIAREFVGFIWAMMRPELVEA

SEQ ID NO: 176239 - protein, 450 aa, unidentified
MRKKKMDLEIVNPNAAGIDVGSRSHYVAKGQQADDVREFGVCASDHRELISWLKKYGIKTVAMESTGSYWQNLFSVLQDTGFEVLLANGKFTKNIKGKKTDVLDCQWIQKLHSLGLLSGSFLPDETTEQLRTLCRHRGNLMDMAASTSKKMQKYLRLMNLRLDIVVKDICGLTGLQIIEAICQGESDSKILASFRHGNCRKTESEISKALQSNGRKDYLFALQQEYQIYNELQEKITQCELEIKKYLDIIIKAQPQNKKLKTTDKLHKRANKNAPKSIDLNQAAYKYFGGIDLMDIEGLSHSTILTLMSEVGPGGLMKFPSGKHFASWLRLAPNNKISGGKILSSRIPKGSNRLKTALRLAANCIGNMKNANLHNFFIRICIRKGRTAAITATARKLAIIIWNMVVKKIPYNPPNQYEFLDQKRKRKVLEMRKLIQKLDIKPIEIGFVTS

SEQ ID NO: 176240 - protein, 313 aa, unidentified
MSTDHVYVGVDVAQDTFDVAVYDSDEHWTADNRASGIADAVARLQAVAPALVVMEATGGLEHGLARMLAAVQIPVAVVNPARIRAYATALGRLAKTDRIDAAVIAHFAQAIKPAAQDQPTADAQERKDLLARRSQFVSMITAEKNRLHRSSARIRPTITAHIDWMEQQVEQIDRELDDKLSADKQYQQRQQQLTSVQGVGPKVARALIIGLPELGQISGKKVSALVGVVPYNRDSGKFTGKRYVTGGRSAVRTALYMAALVGTRWNPVIKALYERLLKAGKCKAVALTACMHKLLLILNAMVRDGSYWQPNQA

SEQ ID NO: 176241 - protein, 402 aa, unidentified
MNCVGIDISKGKSTIAVMRPFGEVVVSPFEVCHTASELSELARLLKSLDGETRVVMESTGNYHAPVAWLLHDAGLYVSVVNAMLVHDYGNNSLRRAKTDKKDAVKLANYGLDHWLTLPRYVPDEDTRLMLKTCYRQYQQYSKVQTMLKNNLISLLDTTFPDANRLFTSPPRADGSEKWVDFVAAFWHCECVCGLSEKAFTAKYQKWCRKHGYNFSEDKALDIYASACGHFGVMPKTDTAKLLVEQAISQLRTTSAALAALKQEMQSLAASLPEYPVVMGMFGVGPALGPQLMAEIGDVRRFHSKKALVAFAGIDSPPYQSGQMDVRSRSISKRGSASLRRTLFLVMGVYLQNAPTNEPVFQFMNKKRTEGKPYRVYMMASANKFLRIYYASVKAYLESLEHD

SEQ ID NO: 176242 - protein, 337 aa, unidentified
MHYMGMDVHSKVTMICLLDENGRQVREREVRGNLGCLVAAVAALKRERGSLKVCYEASCGYGWLHDELVRLGCTVQVAHPGKVRMIFRAKRKNDRVDARKLATLLYLDQVPLAHVPPAERRQWRSLIEYRRRLVDRRGAAQNRLRALLRMNGVSAPRGLWTRRGQEWLAGVTLSECETIQRDLLLAEVRGLREQARQVERALNRVARREPAVGLLMTIPGVGPRTAEAVVAYIDDPTRFRHNKSVGCYFGLVPCEDTSVKSRLGHITREGPPTVRKLLTEAAWQSIRRDVGVRTYFERVRRGDPNRKKIALVATAHHLLRAMHAMLRTGEAWRSAMA

SEQ ID NO: 176243 - protein, 318 aa, unidentified
MYCIGVDVSKQQLVTYDGKRRRTFPNTQDLNELAAFLKEKGHDVTVVFEPTSTYSRPLESLCRSQRLRCWRLNPRVLPHLREVSQGRSKTDRTDAELLWQYGQEHGPGELVEEDRLGRVLKVYLSCYAQAQKARIASQQLREALGHDPATPGGILEELEQEISRLKAREQEMLAQAERCIEEDERVGQSYRLLRTIPGVGRVTATVLVALFRRYPVANRGQIVALVGLDAMEYRSGGSVHGKARISKRGDGFIRKTLYEATLAAVRFNPAVRNTYLGLKENGKPEKVARIAAARKLLLIAPAVYRTGQPYRAFAASGG

SEQ ID NO: 176244 - protein, 340 aa, unidentified
MQLYAGIDLHASNNFIAVIDADGKRMFKKKLPNEAELILSTLGSFQEEMAGVVVESTFNWYWLVDLLGEAGYRMHLANPSAIQKYSGLKHSDDKHDAFWLAEMLRLAILPEGYIYPKEERPIRDLLRKRGHLVRLRTSLILSLQNIVARNCCVRLSANDAKRLRKDVVNPLLKSNEDLAMAGMVSKESIDFFTREIRKVETMVEQRVKLKNQYRYLLTIPGIGKILALTIMLETGPISRFPKVGDYVSYCRKVSSKWTSNDKAKGKGNKKNGNKYLAWAFSEAAEFARRNDTQCRGYYNRKMQKTNFMVAHQALSHKLARAAYCIIKQEVPFTPERLFAS

SEQ ID NO: 176245 - protein, 348 aa, unidentified
MSQTAQTSISVIGIDIGKNSFHIIGHDERGTIVLRQKWSRHQLEGRFANLPPCLIGMEACVGAHHLSRQLKMLGHDARLMPAKYVRPYSKGQKNDFRDAEAIAEAVQRPTMKFVATKTVDQLDLQALHRVRERLVSQRTGIVNQIRAFLLERGIAVRQGQRFLRTELPRILATPDVLSPRMARVIEGLTGDWRRLDERIEGLSAEIGTLAHADSGCERLMSVPGVGPIISSAMVAAIGSGDAFTKGRDFAAWLGLVPRQMSTGDRTILGKISKRGNRYLRVLFVQAAWVVMIKPASWERHGLKSWIEAAKKRLHHNVLAIALANKLARIAWSVLARGRGFEASKLHAA

SEQ ID NO: 176246 - protein, 412 aa, unidentified
MEAIVSRSAGIDIGKAMLKATVRVQGGQRGKTRREVRTFGTTTPQLLALRDWFVAEGVTLVGMESTGVFWKPVYYMLEDVVECWLLNAQHLKKVPGRKTDVSDSEWIAELVAHGLVRPSFVPPPGIRRLRDLTRYRTALTQDRTREIQRLQNVLEDAGIKLDCVASDIMGKSARAMLAALIRGERDPQVLSELALGRMRPKVGELQQALVGRFGDHHARLCSKMLAHIDDLTATIDELTGEIGVEIEPFQRVRKRLRTIPGVSDRLAENLIAETGGDMSRFPTPQQLASWAGMCPGNNESAGKHFSGRTRKGDRWLRGALGEAAAAAARTKGTYLSARYRRLAGRRGKKRAKVAIGHDILVAAWYIMRDGVDYADLGADYFDTHVMDPRRKATRLTEQLQALGYRVTLEHVA

SEQ ID NO: 176247 - protein, 341 aa, unidentified
MGIVTVGIDLAKNVFALHGVDQSGKAVFIKPKVVRGQLLEMVAQLPPCLIGLEACSGAHHWAREFSRFGHTVRLMAPRFVAPYRMSGKRGKNDAADAAAICEAVTRPNMRFVPVKDVDQQAILCLHRTRQGFIEERTALYNRLRGLISEFGIVLPQKVERLRREIGAHLEELPGWANRCVGDLLAYADRLNERIEEYDRAIAEAARQDARSRQLMQLPGIGPTTASALVASLGGGHDFKNGRQLAAWVGLVPGQYSSGGKARLGRITKAGDAYLRSLLVMGARSVIAGLGEKQDRFSRWARSLVERRGYWKAAVAIAAKNLRLSWAVMKYGDDFRLTAALA

SEQ ID NO: 176248 - protein, 340 aa, unidentified
MNVTLISIDLAKNIYQVCGVNQACKPQFNRPIKSDKLLPFLIKYHPGVTVAMEACGGSNYLGRTLQAHGFNVRIIPTRHVKPFVKGNKNDRNDAFAIAEAAMRPSMRFVSPKTVEQTDLSITHNIRERQVAARTNIVNQLRGLLREYGINMPQGIERVKEMLPFILEDAENTLTTAARRNFNLMMEEWRYLDDAIHQQEKIIREQARTSPAAELAMTIKGVGIITATAAVAHMGDPSQYKNGRQYAACLGLVPREYSSGGKQKLGGITKRGNRYLRKLLVQGAWSIIRHSKNADDRLSRWVEQVIIRSGKHKAAVALANKLARILWAVLAKQAPFELKGM

SEQ ID NO: 176249 - protein, 430 aa, unidentified
MNYKQNERLNQLTNETLIIGIDIAKEFHVARAQDIRGVEFGKSIKFNNSLSGYLEFENWIKEIKLAEGKRSVVIGMEPTGHYWINIARYLKDKEDYKVVTVNPMHVKKIKELDDNNQTKTDKKDAKIIAQLVKDARYSTPNLLEGEYEELRNAKNLRQVMIKDLNRTKNQIHNWLDRYFPEYKTAYVGWESKSFIKIIKKYVFPSEIQKLSPNEIYEMLPPKMRRGVGLRKIERLVTASKNSIGIREGHSFAKMEIKYLLEKYEGFIQQIEEIDNHVAELCSNMDETKKIVQIKGIGIVTASGIVAELGDIRKYKNAKQVIKMAGLSLTENSSGKMKGKTTISRRGRKDLRRILYQVILGMIRTNAAFKDMYIYYTTRNKNQLTGKQAIIALCRKLLRVIHTIILKNIDYDESKMRSEIRYPEEFLNPAA

SEQ ID NO: 176250 - protein, 421 aa, unidentified
MGNKSFPITAGLDIHKNSIVCALLLDKDRVIRANFARDRTGIDLLTGFLRQYGCEQVVMESTGPYYILVYDKLSDAGFKVSLINALDNPTRGRVKTDFRDAERLVRKFLAGEVRPSFVPEGPIRELRKLTRRRHKLVAIRAMVKNLIRAEIDELAIPIDKVFSSIGKKAKEFLLTITSEKDLEALLAKYPSLRGKIEAIRAIIDIEIPEVNGFIINVLVKLLMEIDKTIKEIDSAIEKIVTSCHRLLNSVKLLMTIPGVGFIAAVTILAEIGDISRFPSYKSLAMYAGLCPRIVQSGGKLYQAPLPWRCNRRLRWIMYEVAQSLLRTRSRLKDFYERIKKRKGHKVATIALAHKILIGIWHMLTRNEPWLEKIKQPKKLSATTVEKKTIKAIRLLRSLGYIVIKEDNKFVPKDNLKFYDPP

SEQ ID NO: 176251 - protein, 356 aa, unidentified
MKQTVQPDFTGQNIYVGMDVHKKSWTVSIFSEHHEHKTFTQPPNAQSLVGYLKRTFPGATYHAVYEAGFCGYWIHDSLHEQGVASMVVNPADVPTTDKQRRGKNDKIDSRKLGKNLRSHDLQPIYIPGSMQREDRSLLRTRYGMVRKQTRCKNQIASLLAFYGVFLPAEMETKRWSRRFISWLESVQFEHTSGTIALKTLIEELLHLRKLIAGLTRQITVLSRTYDYAEAVWLLKTIPGISTLTAMILLTEIGDISRFKNLDKLASYAGLIPDTKSSGEEEHITNITMRRNPMLRAILVESSWVAVRKDPALMLAFNKLCRRLKKTNAIIHIARKLLNRIRFVLNNRQPYVVAIVE

SEQ ID NO: 176252 - protein, 396 aa, unidentified
MLYLAIDQHRKQLTVNLRNEAGDVILKRQVSTQWARVREFMEEVRNRSVPEGGFVAIVEVCGFNDWFLKLLAEYGCKEIVLIQPEKRTKNKTDRRDANALGELLWTNRQRLLAGKKVQNVRQIVPPSQHDAEDRQLTTVRQRMGQLRTRAINRVQHLLLKHNLQQECPTKGLQTQAAKKWLAKLPLGTIDRLELDQLLAQWELLDRQLKVLEAKIVERQAESQTAAIIATVPGAAAYGSLGLASRIGSIERFPHARSLAHYFGLTPGCRNSGDATRRLGSITKQGSALARFILAQMVLHVLRRDARMKEWFGRIKRRRGAKIARVAAMRRLATILWHMLKHQQPYRLGGKPGEGSGPDMGCLPPERDAFLQALQGRSRGGKEKGCPGLATEAAARA

SEQ ID NO: 176253 - protein, 337 aa, unidentified
MEKIIRIGLDTSKTVFQVHGVDALEKVVLRRRLTRSQMPKFFGNLPATLIGLEACGASHHWARLLQDLGHEVQLLPPQYVKPYLKRGKNDAADAEAICEAMSRPSMRFVPVKTAENQAALMLHGARDLLIKQRTMLVNAIRGHAAEFGIAGTKGVGRVSELLARLKSDKAVPDLAREIFAQLADQLGSLEKKIRALEAELVAWHRNDQRSRNLATIPGIGPIGATALAMKVVDPAQFHSARHFAAWLGLTPKDHSTAGRQRLGAITRAGDETLRHLLVAGAMAVIQQAKPGRSSPWLLALLARKPKKLAAVALANKTARIAWVVMMRGQTYQRPSLG

SEQ ID NO: 176254 - protein, 391 aa, unidentified
MIYVGIDVAKDKHDCFITNSDGEVLFKSFTIPNNREGFETLFQKVQSASDDLTKVKVGLEATGHYSYNLLGFLLDKGLPTYVINPLHTNLYRKSLSLRKTKTDKVDAHTIASMIMSDVNLKSYSDTSYHNEELKSLTRYRFDKVKERAKLKSSVSRLVCILFPELEKLVPRLHMASIYALLSEFPSAHAVASAHLTRLTNLLYESSKGRYGKDTAVMFREAARSSIGSHMPAKSLELKHTIKLIQELTSEINEIEIEIKSIMDEINSPILSIPGISYNMGAMIIAEIGDFNRFDSADKILAYAGMSPSTYQSGQLDNCYSHMEKRGSRYLRYALYNATKYVCHWDESFGTYLAKKRAEGKHYNVALSHATKKLIRTIYAMEKSRQAYIIVA

SEQ ID NO: 176255 - protein, 411 aa, unidentified
MKTIVGIDWSEKKHCVHLYNEAGALLSRFEIEHSVAGFMQLERRLAKVNPEPTDCLVAIETNDNLIVDFLHSRNYTLYVLAPSLVKHNRGRQGSSGAKDDDRDAQLLADILRTDRGRFIPWQADGPLVRQMRTLLSSVDDLTGQIVAQHNRLRALLLRYYPQPLTAFESLLSNIALHFLADFPAPSDLEGLTFDQFEAFCRHQGYFYASYMPKMFAHLLEPAPALDDLVVPAYRFQTVFLANQLLLLTQQKKATIKQVNKLFHRHPDAPIFDSIPGAGELLAPKLLVMFGDHRQRYPHRSFLPGIAGTAPVTVASGKSHYVQFRRACNRRYRNTAQQLAHASTRQSVWAISYFDQARARGHSKSHAYRCLANRWLHIIWTLWQTRQPYDEGYHLQQVARHRRPAEELRLAT

SEQ ID NO: 176256 - protein, 396 aa, unidentified
MISVGIDVSKGKSTVCIMKPCGEILESPFDIGHTADELDSLISLIKSFDEETRVVMEDTGHYHLPVATYLSSHNIFVCCVNALRMKKFCSQSIRRAKTDKIDSIKIASFGITYWNELVKAYPSNVIYDELKFLARQYYQVTGMLVKSKVNFSNLLDQVMPKINDVLSNQGENHKLTEFVNRYIHFQNILDMGEMKFTSDYCKWAKKKGYRLNERKAAEILALAQNGIPTLPNSQSVKIAVSEAVKLIHSIEESRNTILAQMQDLCNTLPEYSVVKEMDCIGDTLAPRIIAEIGDVRRFKNKHSLIAYAGIDAPPYQSGAFHASERHISKRGNSYLRKTGYEIMQSLIKHKLADNAVYNFIQKKRSEGKCGKEAMIAGLNKFLRVYYGKVMEFYSEH

SEQ ID NO: 176257 - protein, 373 aa, unidentified
MAKIQDGFAKWKPVYVGIDVHKRDWVVTVLCQGEELYHATVVPDPAGLVRLLKRFEASEVHTVYEAGPTGYWLHEALAEAGFDSIVTPPSLVPHVGGRVKTDRRDSRKLAAMLAGGFLRRVYVLAPEERAHRQLLRTRNQIEQHRRKAQNQIKSLLLFHGKRAPATLKERWSETHVHWMETTEWEYPSLKISLNAMLTMYRNLTEQYKDLTHEIELLALTEKYRERARLLTQIPGIGMFTAMAILIELQDIERFARADQLASFLGLTPSQHSSGERIRMGHITRCGNYHVRTRLVESSWTLIRYDAGAKATYERIKHQTGSGRKAITAIARRLALRIRRVLLDKAPYRLSDGGRLATGRDKTREAKRFVLRPL

SEQ ID NO: 176258 - protein, 364 aa, unidentified
MINSESQITNTTIIGVDISKNYFDIYVLTSGKTMRFDNNTRGIKKFIKYIAPLNPTIVAMEYTGGLERKVFFALQNNNIPCCCLKPINIKNFSKTIDAKAKTDPISAKLIAHYTFLYKPAPQPKPDEKLLLLKDLASRHLQLTQFLSSEKNRLSSSTFAKTKSQINKSIKVVEKLIEDNRKQLKELICLDTELKAKVELLDTMPGVGEHSAMMLAVLLPELGTISGKQIASLCGVAPFVNQSGKATGKASIRGGRDKIRQILYMVALVAIVYNPTIKEYYNRLIQKGKPAKVALVACMRKIIRILNAMIKNNNPFIPDYYETYVREQNNITKLILTKNNEVEQDNYLVLSDTNFLREPDLKNIT

SEQ ID NO: 176259 - protein, 461 aa, unidentified
MSQRQRKNHRRRKLAAAQTPLNVTHHPDAAGIDVGAEELVVAVPHGRGDAPHVRTFSAFTAGLHALRDWLVACKIKTVAMESTGNYWLCACALLEDAGLEVCLVNARHVKGVPGKKTDVCDAAWLQQLHAAGLLRGSFRPQKEILPLRYLLRHRGDLIAQAGQQVQLMQKVLTEMNLHIHHVFSDVDGVSAQAIITAILAGERDAGKLAALRDRRCRATLDQIKSALVGDYRGEYLFVLQQCQTRWQQLNAALLECDTEIALRTAAIAGVTDAPLPKAPATQRRVQKNMTAAMPVYEEAHRLLGVDLSSVPGVSGGVLCVLLSELGTATHIRQKFRSAEAFASWLGLCPDNRISGGRILKAGTRKVTNRISNILRMAANALSREQGRMGEYVRRFKGRLGKAEGIVAGAHKLARIIWAMIVSGQPYEENKAFATTPASLARRLKNLQHQAKALNLTLVAAQ

SEQ ID NO: 176260 - protein, 385 aa, unidentified
MKPVDDLSRSLVAFDQESAVVAVIELSNTSWLVAGTLPGVARRPLKKLDPDPAALGQLLTRWRIEAEAAGRQIGRMIVAYEAGRDGFWLARWLQARGIETHVIHPTSVAVSREHRRSKTDRLDSAMLMRVFFGWLRGERGHCSMVAIPSLEEEDAKRPSRERESLVGERTRIINSVKSGLLRLGVRGFNPALRRAAKQLETLVTPEGSALPPNTLDEIRRDLARLAVVREQIEAIERDRLARLQQAPQSRSNAMVVLLARVVGVGLETADMLVQEVLSRPLRDRRAVARYAGLTGSPDESGARRREKGLAKSGNARVRRGLIQLAWRFLMFQKGSGLAAWYRFRTEAAPTGRKKMIVALARKLLIAFWRLVTTGAVPDGIVLRAA

SEQ ID NO: 176261 - protein, 425 aa, unidentified
MSEKDYNRQVVKRERISRETLVIGVDVGNASNAVGFMNKEGNVLGSCAKLYNSREGFEQFIKTTEGLKAAHGMKDVLIGLEPTGHYWRKLAYFAQDKGYEVRFVRTTALKHHRELDESSSAKSDKRDALTIANITREGKYIDTVIEDGVVRQLRTLSKVRERLLRYSVGAKNALHAALDDYFPELHEIFWSMNSRSLWAILDRCPFPEDVVSMKHAVLKEVIAHSSRKKAGAAEKAKALQQAAKKSIGVKRIGNSDRYRVKICLEEVKRTVLMLKDIDQQMKNTLKEIPYSEYLLSIPGIGPLSAAIFLGELGDPACFQNARQIIKYAGYDPQESDSGYRISRKFISKKGRWLLRKCLFFMSMRVVVLTKYFQEYYQRKLQTKNRVGQLPRRKEILCAVAIKLIKVIFALLRDKRSFQDTVTIAA

SEQ ID NO: 176262 - protein, 379 aa, unidentified
MPTPTTHTDPPRAVPTLHVALDLGNTSWCLAGAPAVAAPARVRMFPARSLARLHAELASARQHCGLPADAPVVLCYEAGRDGFWLQRACTAAGIVALVVDSSSIEVSRRARRAKTDRLDATALLRLLFRHTAGERGHWRVLHVPTVEEEDRRQVHRELARLTQERTRAVNRLKGLLALHGIRLTSLRAVPDQLPHLTQWDGTPLPPGVGERIQLIWTRLTLIQAQRTALVRARRTLLETATDPTIQMVRRLLQLRGVGEVSAWLLTMELFSWRRFRNRREVAGVLGLTATPQASGDRRRELGIGKGGSALLRGLAMELAWGWLRYQPTSALSQWYRTRFATGGSRHRRIGIVALARRLMIALWRYVETGQVPAGATMKA

SEQ ID NO: 176263 - protein, 317 aa, unidentified
MAERCGVGIDVAKATLDVAWSTNPGARWQTTNDEAGWAALVAHVHTLDPAVIVLEATGGYETGAASALSAAGLPVAIVNPRQVRDFAKALGLLEKTDAIDAAVLADFAGRIQPTPRPLPDDLQADLHALVARRRQLVEMLTAERNRVPQARGPVRKNVLAHVAWLEKQLSQTDRDLRTRIEASPLWRVRDQRLQSVPGIGPATSACLLACLPELGTLTHRQISKLVGVAPLPDDSGTRHGYRRVQGGRGHVRTALYMATVSAITHNPTIRAPYRRWRAAGKPSKVALVAAMHKLLIHLNAMLRHQTVWCPIPSAPTA

SEQ ID NO: 176264 - protein, 409 aa, unidentified
MHVIHARCAALDLGKDVLVAGVRLQDGATVQRECRTYRTTGRQLLELSSWLLSLGVSHVVMEATGSYWKSVWHILEGQFELTLANPAQIRNLPGRKSDVNDATWMADLLAHGLIRGSFVPPAAIDGLRELTRTRKQFVREITRHTQRIQKILDIASLKLTGTISDVLGMSGRAIVKSLIAGETHPERLADLVHPRVKVKREVLVEALHGKLTLQQRHLLAMHLNLVETIEASIEQLDRDIEKAVDPFRDIVDWLMQIPGLSDIGVPALLGEIGVDMTKFKTHKHLISWARICPRLDESAGKVHSRRTQKGAVWIKTLLIQAAWAAIKTKDSYLRAQFLRLRARRGAKKAIVAVAASILTAVYYVIRDRTPYRDLGIQYFTQHDRSRTARRLVARLQTLGYNVQVSEAAA

SEQ ID NO: 176265 - protein, 461 aa, unidentified
MRAKKPTGPQKGSVQKKVDWKALEIVHPDAAGIDVGGSEHWVAVSPDRDPEPVRRFGCFTADLREMGQWLVQKGVRSVALQSTGVYWMPVFEVLEQHGLEVYLVNAQHTKNVPGRKSDVQGCQWLLKLHAFGLLNNSFQPTDEIRIARTLWRQRGNLVAEASSVIQRMQKVLTEMNVQLSNVLSDLSGVSGMKIIGAILHGERDPWTLAALVEPGVKATPEDIAKSLEGNWREELLFVLRQHVELYRIYQEKISDCDLQLRKHLESLSSKRDLKTQPIGPKPKGKKGSRNAPQFDLRTELYRITGIDWTQINGIDVLTAQTVIAEAGADLSAFPSEKQFASWLGLCPTNEQSGGKILNRRTRKVVNRATVAFRNAALTLLRSQSYLGAQYRRLRTRLGAPKAITAMARKLACLFYRLIKHGQPYVDKGTEYYEGRYREQQIRSLTKRAQKLGLQLVIPTTA

SEQ ID NO: 176266 - protein, 346 aa, unidentified
MPIVGGLDIHRKQITFDYLDTVSGQVQRGQITPADREHLRAWLARFAGVVDVAFAVEGCTGWRYVAEELAAAGVAAHLAEPADTAFARGRKRHAKTDKTDCRHLRMLLAEGRLPECWIPPGHILEARALLELYHDLRAEHTAWVQRIHAVLFHHGAPALGAGTLRTAQGVAALRAAAAGWLSPAGQLQVATALEVLEALETRLHELRHQLTAAARQLTGAKVLAARLYGVGPVTGLAITCWLAGAGRFSSSRQAVRFAGLDVTVWSSDRKGPPGRLSRQGPPVLRWAVYEAGKTHARASAPDHRYYAQVKDRCNGKRAALSEARKILRQAHHILAELGDDALAPAG

SEQ ID NO: 176267 - protein, 328 aa, unidentified
MRDQYIGIDLHKTFFQACAIAPTGERVWEGRFPRSAAGLEALAARCTPRSALAVEASTPTWHFADGIVTAVGELRIVDPLKTKLKAGYAAKTDRLDARRLADALRRDSVVGIYYPPVAIRELRELCRYRHALVQVRTAIINRLRAVLLRQGIADGRRLARTRSDAWLETLALPPRAAASIAGLRRLLQTVRAEAQHAQGAVEAAAASDPIAERLQTIPGFGPVRSLMVRAEIGDIARVPTPGHLASYAGLVPRVDNSARRIRYGRITRCGSPWLRWALVEAALQGTRRTDRIGRWGRSLALRKGALKARVALARTLCEEIYRHWSVVA

SEQ ID NO: 176268 - protein, 430 aa, unidentified
MKQYELLHSLFVGIDVSMKENVVHAMPFSPEDHPGHAHLRFSAPNTPAGSVGIVEKVSDFLKFYPDVIQVVIALEATSVYSFHLATFLSVAHFNGHIPAIVYSVNPKEIHAYKKTFTDVGKDDYVDAMVIADYARSNKIRSRPWKGPELLGLRVLTRLRFRIAKLMGIVKNSTGNSIYLECSGLMTGENPFCNVWTTTCQELLTTFQGPDEILSLPDEELLNFITEKGHGRFSHPLDVVEKVKKAARNSYRLDKRVYEPLTSGLSVSFFIIHSLEAAIKKLDKSIETMAKSFSSDSYQILLSIDGVGPVIAGGLLAEIGDIKRFKTDDALAKYIGLTWRGKQSGQSESPVKHLSKAGDVYLRYYVLLATGQIINYSAKYREAYERIRSRKTLFPYRAALNLVARKIVRLIFTLLDKHQLYSDNKVMVTLE

SEQ ID NO: 176269 - protein, 403 aa, unidentified
MAAVSGIDWASQWHDVDIADELGTRLLAARFAHDERGVCALIAALAEHGVERVAIERPDGLLVARLLAAGITVLAIHPNQVAAARDRFRAAAGKSDRFDGFVLRELCRTDSHRFPVLAPCTDETLALRALVRTREDLVGARVALANQLRAQLDAAWPGATRIFRDTDSPIALAFLRRYPSHADARGLGPKRLDAFLARHGYCGRKTPEQLLKRLRSAPTPAIGEHEADARRNAVLGLVAALEPLVCQISQLTGEIRGAIRRHPDGPIFLSLFRDPKSVVCAAGLLAEIGDNRARYPHSDALAADAGQAPVTKQSGKHRAVSFRWACDKRLRNHIGVLADSTRHWHPWAHDVYQRAIDRGCDHPHATRILGRAWTRVLWRCWQDHTPYDPTQHRALTRHITLQG

SEQ ID NO: 176270 - protein, 466 aa, unidentified
MENNYILYVGMDSSKGKADAAILKVSDRRSVKPKFLRKKLSFKFVKSEVTSFLETVRSYSDDNCTSICFALEVTGIYSTNVYNFIKDNLNDNESIKFLNTDFVNQWRNAHNIAKSDPLDAQTISTIIGTDSDVQYVNDNVFENKNGYQDLKALVHRHYQIKKIYSQEINRLIAQCDCLFPELQYVFEPKSAAFIAVLSSYPTTHDIINASRLEVFNVVYEATKHRCSMDKIDKLFDLCHDTLVPDNISSYGRSIILDLVENIKNIKGQLKMIERYIRDVASLNPAYKLLLTITGCGPLTAATVIAETGDIKRFKNADCFVSYSGTSPRNKRSGTSVETMGKISKKGSRYLRHAIYMIAEFARRHNPVLKHQFERIKNGNKKRHKLANIAIANKIARYIYSIMKNESSFVILHEHIMRLPEETQNTFFNSISLDFPENTRKQIYQYSDIDGEVHKFVYTKLEETMII

SEQ ID NO: 176271 - protein, 356 aa, unidentified
MDETARADVIVGVDTHKHVHAAVAIDALGARLGATTIPVGERGYQALEAWARSLGPIRAFGVEGTGSYGAGLSRFLVAQGHAVLEVNRPDRQLRRRKGKSDPLDAESAARAVLGGQATARPKSGTGTVEMIRHLKVARDTAVKGRTQAMVTLKAIIVGAPAALRERLDRITGKMALIRHLAALRPGPITSTAASAKASLRAIARRWLALDEEIRGHDGHLETLTAARAPELVQAHGMGAGTAAAMLLLVGDNPERIRSEAAFAKLCGACPVPASSGKTTRHRLNRGGDRRANAALHRVVVTRMRGHQPTLDYVRRRTREGKTKPEIMRCLKRFVAREIFGYLCATPKPAAPSPEAA

SEQ ID NO: 176272 - protein, 353 aa, unidentified
MRKMQEYIVKGNRIFIGLEDSKRTWKLCVRCEGMVVDETSMPTDYGNLHTYLTNRYPECEITVLYEAGFQGFWLHDLLVEDGFTCIVTPANKVTQAKDDRVKTDKRDARRLAKNLENGDYVSCQVPDRERREDRQISRTLSQVQEEITRLKNQIRRFLDFHGLNDGLKTGAWTDADYRALADFNLSHSLKASLDVYLQLLESCFAAKKKLREELHALCKKERYATAVRVKSSTPGIGWLTAIRLTLEWGDMSRFRTGKHIASFTGLTSSEYSTGETIRRGRITGQSSEQVRSWLIECAWRAVIKDPALLDKYRRVKQNSGSAKKAIVAVARKLAVRLWALETTGNPYMIGVVR

SEQ ID NO: 176273 - protein, 358 aa, unidentified
MRIIGVDLHTRQQTIAMLDMKTGEVVEKTLQYEGENVREFYAALPGPVRVGIEATGSMHWFLNLMEELRIDCQVGHPAKIRTAETRKQKHDRRDAALLLKLLAEDRFPSIWMPSTEQRDLRALLLHRHQWVRMRTIVQNSLQAIALSNGLRRGSSLWSQGGQHTIESLPLAQFAARRRTELQTLHRQLNERIEELHEQVREQALQRPGAQLLMTHPGVGPVTALATEVFLGDTERFANGRALASYVGMIPSEYSSAGRQRLGALSKQGNSFLRFLWGEAAMHAVRKDPNLKRFYRRKLIQKGLGKARMAAARKLGIRLWIMLRDQIDYEEFCRRGQMRQKNGGAYAGIPESDTGPAEQ

SEQ ID NO: 176274 - protein, 344 aa, unidentified
MDHFAGLDVSVKETSVCIVDDMGKVVREVKVTSEPEALLAVLKNPAYHFKRIGLEAGPLSQWLFSGLAEAELPVVCVETRHMQAVLKAQINKTDRNDARGIAQMMRVGLYRPVHVKTLRSQKLRMLLTHRKLLQSKAIAIENDLRGTLRNFGLKVGMVGKVRFEARIEELVENFPDLAELVEPLLIVRRALREQTVILHRRLLAVVWDDEVCRRLMTVPGVGPVVALTYRATVDVPARFRKSKSVGAVFGLTCSKYQSGEIDRSGRISRCGDEMMRVMLYEAAQSMLRSKKWSWLKAWAMQIARRRGMKKAIVALARRLAVILHRIWVDGTEFRWTREQVPAAA

SEQ ID NO: 176275 - protein, 348 aa, unidentified
MEHYAGIDVSLECSSVCVVDANGKIVGEDKVASEPEALIGWLASLGHGLTRIGLEAGPLSQWLYAAMKRAGLAVELLETRRVRDAFSAMPVKSDRNDARGTAQLMRLGWFRPVHCKSIGAQEVRAMLTARKLVQLKLQDVENSLRGILRGFGLKVGKTTPRSFAGRIRELVAGHANLHSIAQALLSVRAVLLRELGAFEKRVRYMARADAKSKLLMSTPAVGPIVALTYASAIDDPARFKSSKQAGAHFGLTPKRYQSGTIDRTGRISKIGDASVRTALYQAAHVMLTKPIKDCSELKSWAMRIARRGGHNKAKVALARKLAVVMHRMLADATTFNPTAKTKMMAAAV

SEQ ID NO: 176276 - protein, 356 aa, unidentified
MQTKVTKKIDFSNHNFYIGLDVHKKSWYVTILTDGMELKTFTQPPSAQILADYMHGNYPGGNYYSAYEAGFCGFSAHRQLTSSGINNIVVNPADIPRSDKELTYQTDKSDSRSIARELRNKQLRGIYIFNPAHEEFRALFRYRMAIAKDVRRTCNRIKSFLFYRSIPIPPKYDNANWSNNFLSWLEQLPLELSPAKNVLLQLVDFYRLLHRKKLEVELQLRKIAKDKDPQLFKVLISVPGIGPLTAIAFMTEIGDINRFKQFKQLASYVGLVPRISQSGEKAYTGRMTYRNNCFLRPLIVESAWQSIRSDPTMLAYYKQACGKTISKKAIIKVARKLLSKIMFVMKQREPYQNNKN

SEQ ID NO: 176277 - protein, 386 aa, unidentified
MQKLNDLSRSLTPLKPDGTLIAVIEMSLSSWLVAGIVPGIERQPLKKLEVDESTLLKLLIRWREEAKKSGHSIERIAVAFEAGRDGFWLARWLRARDIEAHIIHASSVAVSREHRRAKTDRLDTELLKRAFLGWLRGERDHCKMVAIPTIKDEDAKRPNRERESLVGEQSRIVNRMKAALVRLGIRGFNPKLKKAVERLDGLRTPEGEPIPPNTLAELRRDMARRRLVSDQIRQIEDTRLERLEQAPSDGPHAMVRLLARVIGVGIETADMLVQEVLSRNMRDRRAIARYAGLTGSPDESGRKRREKGLARSGNARVRRGMIQLAWRFLMFQKDSTLAQWFRARTENARSARKTMIVALARKLLIGLWRLVREGVVPDGVVLRPVS

SEQ ID NO: 176278 - protein, 391 aa, unidentified
MIYVGIDVSKDKHDCCILSSDGQVLVKPFSILNNLDGFNYLYSTICSYEENSDKIKVGLEATGHYSFNILFYLLDKNLNCFLFNPLHSNLFRKSLTLRKTKTDKVDSVVIAKMLLSEVDSKPYSKALYHNEQLKSLSRYRFSKVRERAVLKQQLSRLVNILFPELEKLVPSLHIASVYALLEEFPSASLVASAHLTKMTNLLSASSKGHYKKSKAIEIRNAAISSIGSVMPAKSLELKHTIHLIRILSEEINEIELHIQEILSEIQSPITSIPGLGFRMAAVILSEIGDFSRFDSPDKILAFAGISPSTYQSGKLDNAYAHMEKRGSRYLRYALYNAAIYVCNWDKTFADYLHKKRSEGKHYYVAISHVIKKLVRVIYHLQLTGDIYKTVV

SEQ ID NO: 176279 - protein, 350 aa, unidentified
MKRIVKQVVGVDVAQEELVVRFGSMYDDWVPELGPSKAFENTAKGFDELTVWVNKWSKPEADVRYVMEATGVYHENFAYFLDEHGYAVSIVLPSKISNYVRTLEKKTVTDSTAAEAITRFGLERKLEQWSRPQGVYRKMRQLTRERSQLIELKTICTNQLHAEQTEAQPGKKTIVRLKKRIELLNRQESEIQTELKELINSDEKIKQLIALLCSITGVGVLTASIVLGETNGFDLIRSKKQLTSYAGLDVKEKQSGTSVKGKPKISKRGNKYLRKAMHFPALTAIRHDERYKAVYARLISRHGIKMKAAVAVQRKILEMMFTVFSKKEKYDKTYLQNNTTNEQALSLKKD

SEQ ID NO: 176280 - protein, 372 aa, unidentified
MKATIIYVGLDVDDTQYHGTAFDKATGEVIDFKCRPTLKGLLGQLDKISKHFPECSLRLCYEASYIGYCLQRDLIDKGFHCDVVAPTSTPTPRGRAIKTDRIDAGQLAQYYANDLLTMVQAPDAKQEQDRDLLRTRQNLLKQRTDLRKHVQSLLRRNGLHYKAETGNKTHWTKHYHGGLERTINDLSGSIKVNLELLLRQLKATNDIVTEYDQQIEVLAKTPYYEKSVQALTCYKGIKNIFALTMITEIGDIKRFAHPRKLMSWVGMDIREYSSGGKHNRFGITKQGNRYLRTAFVEANQRGYRTARISKDLKTRRSNTAPEFIAIADRCLHRLNKKGNRLLLAGKHPNKVKVACAREMVGFVWESLNKAAA

SEQ ID NO: 176281 - protein, 475 aa, unidentified
MTPRRQKNGRVVPSPEPLRVANPHAAGIDVHAAVHWVGVPPDHVPPPKSADGAANLPPHVRKFGACTADLELLADWLQQCGITSVAMESTGVYWIPLFELLERRGFQVYLVDPRQTKHAPGRPKSDVLDCQWIQRLHCYGLLTASFRPDDQVVVLRGYLRQRHMLIRYAGQHVQHMQKALEQMNVKLPEVVSDITGVTGLAIIEAILAGQRDPRQLAKLRHERCKRTEAQIARALQGNWREEHLFALKQALELYQNYRHLLRECDAKLEAHLATFADKSGGQKLAPKPRRCGRRHNEPAFAARLALHRMSGHDLTVLEGIDDNTALVILSEIGTDMSKWPTEKHFTSWLGLCPQHQGSAGKIKSRRVRRGSNLAARALRLAAQGCHHAKNALGAFYRRIQARCGGVKAVFATARKIAERIYRLLKYGVDYVRQGVDAYEAAYRKRLLKGLAHRAQSLGYALVAVPEPPPAAPATP

SEQ ID NO: 176282 - protein, 365 aa, unidentified
MRYHGVDLHKKYATISVRNEAGTEEKFVRAQADIKSYVASLSSEDAVVLEASAGALFWAEKIQKQGARCVVIDAYRFRIIRDSWQKTDRRDAANLSLALWLSSRSGEMKLPEVWQPDPVVRELRRLFGLYELLNKQVRQLKNEIHGVLLDSGVRDRALGDRIVDNPAKAEKILEKVELSAASVVCIRTSLTLLVSLQEKKEAIRAEIYRAGKPFEPQVKLLLSIRGVTPLLALAFLSEVGDVRRFRSARRLHSYLGVVPTVRSSGGVTHNGAINRSSRHLSRTLFTQSVRHFVDSSPLLEHFYRDLVDRKGYGRARIALLRKVFSVMRRMLLAGELYRWTEPKLYEGKLKDYVKKTKKEENQEVA

SEQ ID NO: 176283 - protein, 421 aa, unidentified
MSYTVAAIDVHKQVLMVVAATGAAQVEDPANEPLEFESRRFGTGHAERQHLVSWLKQHNVMEVVMESTALYWKSIWLDLESHFPKLHLAQAHSNKAPRGRKDDFRDAKRLARRLVAGELLLSFVPDPEQRMWRTLTRSKYQLIRDRVRLQNQMECLLEEMRIKLSVVISDLLGLSGRRILAALAEGETDPQKLASYGDRRLQCSQEELTDALTGNPELLQREVLKLFLKRLQVLDEQIEHLDKLAATALKKHEDALVRVAQIPGFGPDSAQQLIAEIGHDAASFPSAGEFSSWVAICPGSNITAEKNHSSRSAKGNRFVRRLLSQAANAAVRRNGCFLHLLYRRHLPTLSHNGAVSVVAHRLARIVWKILHAGVRYIEMGTEGSPQAKQQRTKRLVRALRKLGYDVTLVPKTTDPAPAPAS

SEQ ID NO: 176284 - protein, 315 aa, unidentified
MNSKEVFVGIDVSQDHLDIGVHPTGKTWQLVHDEAGKEQLCQELRKLKPDLIVMEASGGMEGALAVKLQEAKLPAVVVNPRQVRDFAKAHGILAKTDRIDAQVLARFAERIRPEVRPLPNEAQRALGGLMVRRRQLVIMMTAEKNRLRRASKEVAQGIQDHIEWLKRQLDEVDREISRRIQHNDVWKQKEKLLKSTPGVGPVVSRSFLSGLPELGTINGKKISALVGVAPFNCDSGKFKGRRRIWGGREHIRSILYMGTVAAVRWNPIIRSFFLRLVKAGKSKKLALTACMRKLLVMLNAIIASNKPWKYGKVVY

SEQ ID NO: 176285 - protein, 352 aa, unidentified
MSTILAIDLGKYKSVACLYDGDPTAARFLSFTTSRAELMRLLGQHPVAVVVIEACALAGWVHDLCVERGHTCLVANTASEAWKFKHTKRKTDRDDALRLAQLQALGQLPTVVMPAQQTRQWRGLIAYRQMLVGRRVTTQNRIRSFLVGQGLPAPRGARAWSSTGLDGIAQHAKPLADCATDELWRGLLLLALTELRQVRQLLDQAEERLDQLARVDASVQILETIPGVGARTAETVVAYLGDPQRFDNGKQVSAYGGLVPRQYQSGEMDRRGRITRRGPALLRKLLVECAWVMLRYNPWARAVYKRLSHGKARKKQAIVALARKLLVRCWAMLRDGVPWRDDTPEEPEAVPA

SEQ ID NO: 176286 - protein, 420 aa, unidentified
MEVAQDDQEIIARVAALDIGKAEVVCCVRVPGVGPRARRMQEVRTYSTMTRSLLAMADWLTGLGVTRVVMEATGDYWRPPFYLLENSFETWLVNAKDVKHLPGRPKTDRLDAVWLCKVAERQMLRPSFVPPPAFRELRDLTRYRVDLIEARTAEKQRVEKLLEDALIMMSVVASDIFGVSGRDMMAALVAGERDPKVLAQMARGRMRAKTARLEEAFTGRFTDHHAFLLRAMLARIDGITADIDIVQGRIDEQIAPFAATVTRLDEIPGVGVTTAQAIIAEIGLDMTRFPTPSHLASWARFAPGISESAGRKKGNSGTGKGNRYLARALGEAAVGVRRTDTFLGERYRRIAHRRGKKKAIVAVGRSMLMIVWQLLSDDEARFVDLGSDYYESRVNLNRRTRNHVRELQALGYKVTLEPAA

SEQ ID NO: 176287 - protein, 356 aa, unidentified
MAMLAELVDGVIGVEPYRDSLTAAAVTRLGGVLAQTTTSADAAGYQRLLGFAQAHLPGRRCWAVEGAGSFGAGLAVLLHQRGERVVEVGRPKRPASRSGAKSDALDAVRAAREALGQDQLATPQRRGEREALRVLLTTRRCATLARVAAIGQLKALIVAAPEELRAELRGRNTASQIDYCARLRPRPTRSLEHQATVRALRATAQRIQLLQAEADQLQAKLAVLVGAMAPWLLEVPGVGPLSAAQVLVSWSHAGRFRSEAAFAALAGTNPIPASSGQVTRNRLNRGGDRQLNRALHTILLVRLRSDPDTRAYMARRTAQGKSRRDAKRCLRRVIARQLFRLLERYDQPGVEILRAA

SEQ ID NO: 176288 - protein, 445 aa, unidentified
MFIQSQDDSQCCYSLFIKVVILMMKLKYSICCGLDVHKNVIVATIVTTNKDGISEYKQKSFSTINSDIQKFHNWLIENNCYHVCMESTGKYWIPIFNYLENDIDVCLTHPKYVKAIKGKKTDKKDSKWIADLYKFDLVRCSFIPPKDFRQLRELSRYRFKLVCMKSSEKNRIQNCMTVSNVGIASVLSDPFGKTATEIMSYLLEHTADSMDEKAVRKLIKKGAKSKSDEIIEAIKGYTIETDQAKKLELARGHLEYLDDMITQTEVELYVRIKPYYEFVEFVSTMPGMTELSSTIVLAETGVDMDIFDDAKHLCSWCGLSPANNESAGKKKSVRIAKAGDYLKPMMVQCALAAIKSKKQPYFAIKYGRIKKRRGHKKAIIAIARMMMVCIYHMVSEKKPFTPTDYEELMDPQNHVESVVLNENNVFAYLESLGYDSSKLVKRNDN

SEQ ID NO: 176289 - protein, 422 aa, unidentified
MRFIGLDVHRDFCEVAIAEGGALRSAGRIETTPAALRLFAESLGSEDSVALEATTQAAQVARLIEPHVARVVIANTRKLAAITQAKAKTDRLDARTLARLLASGYLEQVWAPDEETRSLRRLVARRSRLVRARTRAKNEVHGVLARNLCPRPPVTDAFGKAGRRWLSTLVLPDDEQLTLEGCLRQIDFLDEEVGAIERKLAERALQSVDIRRLMTVPGVNVQTAAAFVASVGDIGRFSSPRKLVSYLGLDPRVRQSGSEVARHGHISKAGSAEARHMLGEVAWKVMMTPGPLRAFFERVRSRRGPQVAATATARKLVVLFWHLLTREEDYAFARPAMTRKKIRQLELLAGAPPRKGKAGGAGNFANRHVREAERELSGQAEAAYRRLVSDWRASGPKKKGAGATPGRASSRPSKRQAARQAQ

SEQ ID NO: 176290 - protein, 351 aa, unidentified
MSHKTAATVAHTIGIDTGKNTLHLIGLDDQGAIVLREKIARGRIAARLANVPRCLIGIEAGMATHYVARELGALGHDVKQVPPAYSKPFRQGHKNDFRDAHAIAEAVQRPSTRCVPVKTDDQLDLQALHRVRSRLVGQRTAVINQIRGFLLEHGIAVCQGLRFLRQQLPDILAKRSDVLSPRMIRIMEDLSGDWRRLDERIEHITKEIEVLAGTDVNCGQLMTVPGIGPIVASATVAAIGNGAAFARGRDFAAWLGLVPKQMSTGDRTILGRITKRGNRYLRMLFVQGARAILLRPKSWVKHSFGPWLTTAARRLHRNILTIALANKLARIALSVLIQGRSYETRIVPAAA

SEQ ID NO: 176291 - protein, 462 aa, unidentified
MAAQRRSPVPRRLTTPSAPKPQPALTVKNPRAAGIDIHDGVHWVAVPPDCDPEPVRRFDTFTADLETLADWLTACGVDTVAMESTGVYWIPLYELLERRGFKVFLVDARAVAKVNGRPKSDIHDCQWIQRLHSYGLLEKAFRPQDEIVVLRGFVRQRQNLIAYASQHIQHMQKALVEMNLKLTLVVSDIVGKTGMAIIKAIPAGRRDPVELAKLRDERCKRTEEEIAKALVGNWREEHLLALKQAVELYEFYHCKIAECDRAIDDYLERLPNRAGENPLESQPRKSRKKDNEPMFDARKRLYEMLGVDLTAIDGISVGVALIIASEIGHDVSAFRNEKAFSNWLGVAPNHKITGGKIKSRKTRPGANRIATALRMAGASLLRTPTALGAFGRRMRSRVGSPKAITAVAHKLAKLVYRMLKHGEEYVKQGAEEYEALYRERRIAALRRNASALGFRLEAQPAK

SEQ ID NO: 176292 - protein, 360 aa, unidentified
MEKVTSQPKNSKSKINFASDERVFIGVDVHKHSYTVAFYTEKFGHGDAFVMDAKPLDLIRKLEPMKERIERVVYEAGLTGYGLVRQLRAAGIRADVVNSGKIPRPATEQTKTDRIDCRKLAEYAACGLLKYIGVPDEQQDVDRQLLRLRDVCVQSIQKTKVRIKSFLSYNGIKEPKGLENWSRDGVKSLKSLKLNPELRFNLDMQLGELGSAEARLKKINARIAEMEKEDRYAGNSANLRTITGIGVITAMKVLTEMFQPERFEKETEVAKMMGLSPRISQSGETRRNNGLSPSGNRRLRTCLIEAAWRWRRGDARAAARYDKLRKNTGSPNKAIVGVARKLGIIMWRMITRGEPYREVS

SEQ ID NO: 176293 - protein, 333 aa, unidentified
MNKITLIGIDTAKQVFHLVGVDARGHYVWRKQLSRCRLLSALAQLERCEVVLEACGASHHWARSIKALGHTVRLIAPQHVRPYRRGQKNDYRDAEAIISAALSPGMHFVGVKRVDQEAEQALHRVRSRLMSHRNAAANELRGLLGEYGVVFGRGLKPLRAGARCFVETEEAHTLGLVELVNDVLEEMDVLQRRMDHYERQINQRVQADEISRRLREELSGVGKLGASALRVKVADVRDFGNGRHFAAYIGLAPGHSGTGGTVRIGHLKRGHDRYLRQLLIHGARSALSHLGDKQDPQSRWLRGLLERRGFNIASVALAHKNARQAWAIMAREQ

SEQ ID NO: 176294 - protein, 342 aa, unidentified
MQDNIYDHYIAIDWSIKNMAIARMTKKSNKITAIDVPSDLEDLQAYLQNLRGTKILTIEETTTSQWLYTELREYVDRIIICDPNRNKLLNEGPKTDKIDATKLVHLLKAGLMKEVYHSTDRFLYLRRIVSGYEDLVKAGVRSKNQRYALLRAVGKKGFEKKDLKLGTSGEQFVLECLDRQIKAYEQEKELYEKEFRKLARKHPEIRHQKGLPGIGTINAVKIVARVVTPYRFSDKGHYLSYTGLVKLNKISGGRSYGKKNPRFCRQLKSVYKSGVLAAIGGNNPINDYYEYLIQEKGYPEHNARQMACRRLAILSLGVFKSGKKYQPFRWNHVKIREGASGL

SEQ ID NO: 176295 - protein, 345 aa, unidentified
MITIGIDPHKASVTAAALDRTAGTLDHRRVACTTETAEHLLAWAEAWPERVWAVEGAAGLGHGVAQQLLAAGERVVDVPAKLAARARLLGGGSARKTDLTDAVSVASVAIHNPGLHDVVAEGHPVVLRLLSDRRDDVVAQRTRTMNRLQVLLRELVPGGAPRELTAARAAAFLAKVRPMTAADAQRKSIARDLLDDIRRADRQLKALAAEVNHAVAASGTTLPELLGIGAILAAKIIGHAGDITRFASKAHFASYTGTAPVEASSGDIRRHRLNRAGNRQLNTALHTAALVQVRCGGPGRDHYHRKISELKTPKEAQRSLKRQLSNVVYRRLVDDHEQRQQRLAA

SEQ ID NO: 176296 - protein, 407 aa, unidentified
MLEVKVERCAGIDVHKKFVMVCVLIGLAHQKPASEVRRFGTSVPELERLRAWLLEKSCTEVVMESTGSYWKPVFNILERNLKVILANAEKVKALRGKKTDPKDCRWLAGLLRHGLVQASFIPPRDIRELRDLTRRRRTLMQQGASERNRVQKILEDANVKIGNVLSNVFGMSGQAMLEALLDKDMTAEEMADLAQGRLRPKIPQIIEALDGHTMRDHHRKLLRQILKHMAFIEDMVAELDNEIWHKLKPYDQEVQLACSVPGIGRDAAASILAEIGPDMSDDGPFSGCHQLASWAGICPGNNESGGKRKSGRTRKANRWLRATLAQTAWAGIRKKNSVFRDRYQRLKPRRGPQRAATAVAHAQLIAIFWALRNRVPYQERVQQLDDRRRDAMIHHHLNRLKELGYPA

SEQ ID NO: 176297 - protein, 459 aa, unidentified
MAHHKKPHARSQPALPPQLAAVNLHAAGIDIGAEAHYVAVPPSDDPQPVRRFGAYTVDLEALADWLAACGITTVALESTGVYWIPLFEHLETKGFEVLLVDPQQVQKIKGRPKSDVHDCQWLQRLHTFGLLAGAFRPPDQVCVLRSYLRQRAMLLAYASQHIQHMQKALTQMNLKLQHVVSDVTGETGMAIIRAMLAGERDPVQLARLRHYRCHHDEETIAKALHGQWRDEHLFALAQAVALYDMYHEKIAECDRQIEAQLGTFADCQDREALPPASRPRKRTRNRPHFDVRGSLHRITGVDLTAIEGIDEPTALTIIGEIGLDMGRWPTVKHFTSWLGLCPHHRVSGGKVLSRGTKPCANRVATALRLAASCLQRSQSALGAFFRRMKARLGTPKAITATAHKLARLIYTMLKHGTAYVRQSLADYEQQYRDRTVQSLARRAKALGYALVQTPVRTPA

SEQ ID NO: 176298 - protein, 349 aa, unidentified
MSVDPAYKVVRGGALAKEAKWKDRIVIDGLLGIDVSKDTLDASMSSCNKVRAKSFANSPDGWRHLLDWLISQKIRRVHACLESTGRYSLGIACKLNEAGHVVSIVNPAQIRDFARTKLGRNKTDGVDASHIREYCELFKPSPWAPPSHAHRQLGELQTIRAGIVAGLTEWKNRKNSGMVDAVAQSLADATISHFTSQLGAVEKAIAQTIDNDSDLRRKRDLLLSISGVGETLASAVLAELPGPDVLRSSAEVVAYAGLNPRQHQSGTSIDRPTRISKIGNVVLRSHGALPAMSAMRYNPAIVALVTRLKARGRLKPKQIVVAAMRKLLVLCFGVLKTGKPFDPALAMGC

SEQ ID NO: 176299 - protein, 352 aa, unidentified
MKISRVGIDLAKNVFQVHGVDGRGKVVWKRQLKRSHWLRVLGERIDTDCEIGMEACGGAHHWARELRSRGYQVKLMPPQFVKPYLKGNKNDASDASAICEAMGREDMTYVAVKTVEQQDIQAVHRVRASIMGRRTASSNQIRGLVAEYGLVAPKDLGPLRRAIPDWLEDAENGLTERFRRLLHELWTELLRLDERVVALDREIEVIAETHADAKRLLKLRGVGPLVATALVARFGDGSHFKRGRQAAASVGLTPRHHGTGGKNRIYGLSKEGDRYLRSILIHGARAVVSQAKRRDDRLSLWVTDLKERSHMNVAAVALANKTVRMAWSMLRNGTDYEPELAAGERYRGWVIA

SEQ ID NO: 176300 - protein, 415 aa, unidentified
MAMSVLYTRCAGLDVHKETVVACLMLTASSGKITREVRTFATTTLGLQTMAQWLASQQVTHIAMESTGIYWRPVFNILEGRFEVILVNAQHMKAVPGHKTDVKDSEWLADLLRHGLLSASFIPPKPIRDLRDLVRHRKTLVRQRAQAINRVQKVLETANIKLSSVASDVLGKSGRDMLDAMLAGLGDAEALAGLARGRLRAKLPALREALSGRVEATHRLLLRQLLDVIDFLQGQIDAISTDIDALLLPHKQQLSRLMQIPGIGPLAAAAILAEMGTDMTCFPSAKHLASWAGVAPGNKQSGGKRLKAHTNKGNTHLRAVLAEVVWVISHTRDNYLSAQYHRLAHRLGKKRAIVAVSHSLVTIIYHMLQENEDYHELGFHYFQTLDTTRQRDTAVRRLQALGYKVSLEEITEVRA

SEQ ID NO: 176301 - protein, 339 aa, unidentified
MKLYGGIDLHSNNSVLVLIDEQDKVVYEKRLDNKLELTLNELKTYQKQVVGLAVESTYNWYWLVDGLMEAGYSLHLVNTAAVKQYDGLKYTDDRHDAKHLAHLLRLGILPQGYIYPKAQRAVRDLLRKRMQLVQQQTANVLSIGSLITRLTGRGPTCNHIKRMTDEGLSRMGIEGEWKLSLNANLSVLHCLSEQIDTVEKVVLARVKPEPGFTSLLSVAGVGKILGMTIWLETGDIGRFKQVGNYASYCRCVGSQRLSNGKKKGQGNHKNGNKYLSWAYVEAANFGRRYYVPIDRFYQRKRARTNAIVATKACAHKLARASYYVLRDQVPFDIERAFST

SEQ ID NO: 176302 - protein, 429 aa, unidentified
MKIIYPRVCGIDVHKKFIVAVICISESVEPTYLKKRFSTFHNDLIRFRDWLIQNDCQNVCMESTGKYYIPVYNVLESHISNIVVANPKWVRAVKGEKDDDKDAKWIADLFKFGIVRSSFIPQKDFRILRELTRYKYKLVNMRSSEKNRYQNALTSGNCKLDMVFADVFGKSASNIIDLILSDNPYTDEDILSKIHRNCKASPDMILDSIYGTDLTPVQKSRIELVNDHIKQLSSNIQRLDKLIDVMIEPYEDYISFLCQIPGVSRNSAITILSEIGVDMNQFTSTRRLTSWAGLTPSSNQSAGKKKSVRISRAGVYLKPCLVEVAHAAVKDKNHPYYANKFNKISKRRGKKRAYIAIARKILVAAYHMLLTGEIWNPADLAEVETPVEQRIKYVKNNLKSDIKQLLDIGLTVEELTLMIQQNANIIATQ

SEQ ID NO: 176303 - protein, 369 aa, unidentified
MGERTRFVGVDAHAKTLAVAIAEEVGQPESYGQIANEPTAVRKLVSRLGGRGVRLVVAYEAGATGFALHRQLAALGVECMVVAPSLIPSRPGDRIKTDRRDALKLCRLLRSGDLTPVWIPDEEHEALRDLVRSRGDAKQDEVRAKHRLSKLLLRRGITPPVGTRAWTQAYFLWLDRLHCDLPADQIVLEDYREQVRLARARVARLDKALIRCADGGRHAPLLAALQAFRGFGFLTAVTIVAEAGDLRRFATARQFMSYTGLVPSEHSSGSSQHRGHITRCGHAALRHVLGEAAHHARHAPHVSTTLRRRQRSVPRDIVDASWQAQERLNYRYRHLAGRLGRPIALTAVARELAGFVWAAGHQVEVVSAA

SEQ ID NO: 176304 - protein, 385 aa, unidentified
MQASTQTSTICTPTREQSATFFVAIELSLKGWLVCIHSPDRDRLSHYDIGAGDCDKLLALIEQARARVTRALGVKPEVVSCYEAGYDGFWLHRVLVAAGVKNHVFDPASIAVERRGRRVKTDRIDNESMIRTLMAYLRGEPRVVRVVRVPSPAQEDARRLMRERERLVKERTAHVNRIKSLLRTQGLAAGHPKRADWLTWLEAQCDHRGRPLGQCLVAELKRQHQRLRMICQQVKALEDERASAMPQALVTKATALTRLKGIGPNFATNLTGEVYWKDFENRRQVASYVGLAPSPWQSGGLSRDQGISKAGNRRARCTAIQLAWLWLRHQPDSELSQWYRARVGDARGRLRKIMIVALARKLVVALWRYLETGLVPTGAVFKKGK

SEQ ID NO: 176305 - protein, 381 aa, unidentified
MKKHMRWVGLDVHAETISVGVAEANGEVRPLGTIPNRPEAIRHLVRKLGGPEGLRACYEAGPTGYVLYWQLTSLGVMCDVVAPTLVPVKAGDRVKTDRRDAEKLARLHRSGDLTAVWVPDAQHEALRDLVRAREAAKGDQLRARHRLQKFLLRHGRRAPAGVNAWTLKHLAWVKGHVRFEHPAQEATLMDYISEIDHVAERLERLEKAIDRAIAEVPEKLRAVIEGLQSLRGVAKLTAVTIVSELGEISRFPKARQLMGYTGLVPSEHSSGDKTRRGGITKTGNARLRRVLTEAAWAYRLRPSVGGALRRRQAGQSEAVKEIAWKAQHRLHDTYRRMLGRGKPKQKVITAVGRELVGFIWAIAVEVDQAQTTFSKRKAAIA

SEQ ID NO: 176306 - protein, 336 aa, unidentified
MEKHYVGIDLHRRRSVIFTMDAEGQRLGCKRIANEPMALVEAVTEFGAEAEVVIEATYGWYWAVDLLRDEGLNVHLAHPAGNDWGKRRVKNDERDARDLADLLRLGRLAEAWIAPKETRELRELVRYRHKLVDLRTGLKTQVHAVMAKEGVLPAFGEMFGPGGNAQLDAMDLAEPYTIRVESLRDLIAVYDREVAMLERDIHRRLKGDPGYEAIQVIPGVGRVLGAIFVVEIGDVTRFKGPEALSSWAGLAPRHHESDTKVVRGQITKMGSKLVRWAAIEAVSGRRGGTKLREDFHQIAERRGKYKARAAVARKLLTLVYYGLRDNEIRCLAEEAS

SEQ ID NO: 176307 - protein, 342 aa, unidentified
MNLTTIGIDLAKNVFQVHGADEKGKVVLKKQLKRAQMLPFFANLTTCRIGMEACGSAHYWARKLQSFGHTVQLIAPQYVKPFVKRNKNDAADAEAICEAMTRPNMPAVPIKNASQQAILSVHRARQGFVKARTAQANQIRGLLAEYGIVIPKGIGHITKRVPEILEDGENDLPGSFRLLIQRLVDHLKELGRQVGELEAQIQLWHKDNPASQKLAKIPGVGPMTASAMAASIGDARNFKNGRQLAAWLGIVPRQHSTGGKSTLQGISKRGDTYLRTLLIHGARAVIRVIERKPNAAPWLKNLLARRHKNVAAVALANKNVRTIWALLAHDREYQTGYARAAA

SEQ ID NO: 176308 - protein, 332 aa, unidentified
MSAPLIPVGIDVSKAILHVAILFPERSKPLYQTFDNSEAGYAGLQGWLEGQGVTSAHVCLEATSIYGHGVATALHQQGHRVSIVNPVRIHGYAKSQLKRTKADRPNATLIAQFCRDLKPGAWQPVTADIEALQAYTRRLDALTHMLSQEKNRLDISPEALKPDIEAHITFLEDQVKALKKQFRTHIGSHESLQTQAALLDSIVGIGPDTAARLLAEIGDIKAFDSARQLAAYAGLTPQEHTSGTSVQGKTRLCKIGNARLRKALYFPAIAFLRCAPELQPWRERLVAAGKTKMAIIGAAMHKLIRIVYGVLSSGQLYDPEKLKPQKSAKVIP

SEQ ID NO: 176309 - protein, 355 aa, unidentified
MKNTKVDFSNQTLYIGIDVHKKHWTVSIFSENIECKTFTQPPDSEKLVKHLHRHYPNGTYKAVYEAGYSGFWICDELQERGVDCIIVNPADVPTKGKERRHKNDRVDSRKLGRELRDKELRGIHIPDPSIRADRSLVRVRTQTVRKQTRCKNQIKSLLSYYGIKLDADIQYKYWSRKFIDWLQSIEFDHSEARTTLDHLIDELLFFRQSILRMTRQIRQLSRLPRYAENVQLLLSVPGVGILTAMILLTEIIRIDRFKSLDQLASYFGLIPTEDSSGDRKSDGTITPCGNKFLKHIIVEATWIAVRKDPALNCKFENLAKRMKKQKAIIICAKSLLNRIRYVLKNQQCYVIGVAA

SEQ ID NO: 176310 - protein, 344 aa, unidentified
MNSIDYIGFDIHKKTISFCAKAQDGRILDEGTIAARRGELNVWAKARPRPWAGAMEATLFTGWVYDHLKPLAQELKVAHPAMLKAIAASKKKNDKVDARKIADLLRCDLLPECYMAPRAMRDLRRVLRYRNLVVREATRMKNRIAGLLMETGTGYNKERLHGKAYFSELLGSLRETPPSVIDLLRLSRQQLEFFESIQKRLVKGLREHATLRERVQRLQSIRGVGEVMALTWALEIGEVQRFSSIADAASYCGLTSAQHSSAGKEQRGPISKQRNAHLQTMLIEAAKLAPRHNPQLAAVHEQELKRGNRNRATLAVARKLVAYLMAVDRSGKPFEVRVSQAEVV

SEQ ID NO: 176311 - protein, 347 aa, unidentified
MLHAGLDLSRRKVDVCLLSDQGEHLDQLVVPPDAGSLRTLARRIEDVHAQPVCAVIESMTGARIVHDTLEAEGWAVEIADAQKVKGLAPLACKTDKIDSMVLAVLSHRDLVPAIWLPDPSVREERELARFRLHLVKHRSMLKHRIHSTLINFGRPCPVTDLFGVEGRKLLERLDVPEPWRGNVLGAVKLIDDLSEQIDETNHRLRTGHADHPYIPLLRSAPGIGWVLAFTIASEIGEIERFASPDKLTGYTGLCPRVVQSGDSDRRGPLSKHGPRYLRWALLEATMHALRHPAYAERYQRNKRRLGKQRGAKVAQIDIARRLCHAIWHMLSRSEEFAPRGAAFRLAA

SEQ ID NO: 176312 - protein, 433 aa, unidentified
MRVMHERVAGIDVHKDMIKVAIRSPGEKRWTRKTEIFEFRTFYGVLQAMARDLRARGVTHVVMEASGVYTEPVYYALCEQDFDEVAVVNPAHVKALRGHKTDAADCRRLAELFECGLLHGSYIPPAQLKEVRDLTRYRMKTVQARTSEIQRLGKALESAGIKLGSVASEITGASATAMIDALIDGERRGPVLADLAIGRMRTAGKIADLSMALAGRFTDHHALLCRLHRDRITLFDDAVAGLDGQIAQKAGRWQQELDLLKTIPGFGDVIAQAWLGEIGPAPHRHFASHEKLACWVSLCPGNNISARKRKHGRTGDAGAYIKPMLIQAAWNAIRTKGRLQARYSRLVRRFGGEKNPAAKKKAITAIAHTLLKIAYQVLKSGQPYQDLGADFYTRRESPAQQHAYLERRLQKLYPGQTIIITISPPPGGPAEAA

SEQ ID NO: 176313 - protein, 360 aa, unidentified
MVGQRTSVGLDVHARSVVACGLDRETGEVVERRLTPDHHDILSWINGLPGPVSVTYEAGPTGFGLARALTVAGIECQVAAPSKLIRPAGDRVKTDARDAAHLARLLHLGQITAVAVPTTDQEAARDLVRAREDCRGDLMAARHRLSKLLLRQGIVYYDGATWTSRHELWLRKQRFDNRALQLTYDAAFDAMTACIDRRDRLEAAIEAMAADSEFTPVVRRLGCIRGIATLTAFGLATEIGDWHRLTGRTIGAYLGLVPSEFSSGGNRVQGEVTKTGNKHVRRLLVEAAWHHRSPYRPGQVLRRRWDLASPAARARGQAANRRLHYRWTGFDQRRKRSVVANIAVARELAGWCWSLAVLEE

SEQ ID NO: 176314 - protein, 403 aa, unidentified
MRVVYEHCCGLDVHKKTVVACVMTPEGQETRTFGTMTQDLLALSEWLEHWEVTHLAMESTGVYWKPLFNLLEDTFEVLVVNAHHIKAVPGRKTDMRDAEWIADLLRHGLLRGSYIPDRPQRELRELVRYRRSLVGNRTQVVNRIQKVLEGANIKLASVASNVVGVSGRAMLEAMVGGTEDPRVLAALAKGKLHAKQPALEAALQGLMGPHQRLLLASHLRHLDFLDAEIAQLNQEVAARLGPFQEALERLDEIPGVGRRCAEDILAEVGTDMSRFPTAAHLASWAKVCPGIHESAGKRKSVGTGHGNKWLRATLTEAAQAAGRTKGTYLSAQYHRVAARRGKNRATVAVGHTILTTVYYMLCRGTRYQDLGPNYFDERDRHAAVRRTVHRLERLGYRVTLQAA

SEQ ID NO: 176315 - protein, 405 aa, unidentified
MRVVGLDVSRTLAEIAYLEHGEVKSGGRIDLVQGTLARWAATQLRTTDHVVLEATGNTTAVVNAVRSHVARVAVANPFQVRLIAEARVKTDKIDAAVLAQLYASGFLPEVWIPDDATQTLRRQVARRAQIVRQRVRLKNEVHSVLHTYLIPRCPAADLFGHKGRAWLANQPLPMEERLGVEQRLRELDRLGDDLKTIDRLLGEAVVHNQAVQQLLTITGVNATVAIGIWAAIGDVTRFRSPEKLVSYFGLNPSVYQSGTQPARHGHISKRGRSHARAMLVEAAWAASKSPGPLRAFFHRIRAKRGLQVAAVATARKLAIIAWHVLTKDEPYAHHRPSLLAIKRRALELQAGQPARRGQKGPAAAYSIKQLRDRERATVEREERAYAKRVAHWQERPPARRHNASA

SEQ ID NO: 176316 - protein, 311 aa, unidentified
MTDHNIGVDISKSHLDVFRLEDKMAKRFNNSVAGFRALIRWLGKTSVARVVFEPTGAYHKAFEVALETTLPLVKVNPLQARRFAEAHGTRAKTDAVDARMLALMGAAFNLEPQVPQSKETRDLRDLHVARAGLIKDRTRLRNRAVTQDLSILKRQTKARLKLVEQQIAELDVEIVTLIEARESTARTCDILCSMPGVGAVSAAAMLTLMPELGTLDRKQAASLAGLAPITRKSGQWQGKSFIGSGRKPLRDALYMPALAAMRWNPDLKAKYEQMRAAGKPAKVAIVAIMRKLIEIANALVKANRKWTPKTA

SEQ ID NO: 176317 - protein, 349 aa, unidentified
MKFYTKQHRFYCGIDLHADAMYVCILDAAGEVVVHQNIPTKPKTFLRLIKPYRAGLVVGCECMFTWYWLADLCAAEGIDFVLGHALYMRAIHGGKAKNDKIDSHKIAVLLRGGSFPLAYTYPHPMRATRDLLRRRNHLARKRGELFSHIQNTATQYNLAEPLGRIAKPSERGDLLKKFPDPVVRKMVEVDLLTIEHYEHLLDGLERELERIAVGHDPVNLALLKSIPGVGRILGMVMLYEIEDIARFPREQDFASYCRLVKPAKQSNGKNYGHSGKKIGNAHLRWAFGEAVVLMLKGNKPAQQVLQRLASKHGKGKALAILAHRLGRAVYYMLKNQVPFDQERFLRKAA

SEQ ID NO: 176318 - protein, 406 aa, unidentified
MRLFAGDDWAEDHHDVELMDATGQVLASRRLPEGVAGMARLHELTGQQLGEAGEDAEVVIGIETDRGPWVAALVAAGYTVYAVNPLQASRFRERLGVSGAKSDPGDPHMLADMVRTDSRQLRAVAAGSAEAGGIKVVARTHKTLIWERTRQVQRLRHQLREYFPAALEAFEDLAAPDALELLGKAPDPARAARLTRAQVSAALKRARRRAIADQTTQIIAALRSQQLARPAALTAAYAVTVRALAAVITTLNEQVKALESQVEAHFGQHPDAEIYLSQPGLGRILGARVLGELGDDPHRYPDGRARKNYAATSPLTRASGKKKTVTARFIHNDRLIDALMAQAFSALNVSPGARALYDDLRARGIEHNDALRRVANRLVGILHGCLKTRTLYDEATAWSHRQNLAA

SEQ ID NO: 176319 - protein, 433 aa, unidentified
MEDVQDEPLFVQRVAGLDIAKAEAEVTIRVPGDTTPGRRQQETRTFGTTRRQLLDLADWLRSWGVTKIGMEATSDYWKPVFFLLESKGFDCDLYNAGQVRALPGRPKTDRADSIWLAKITERGMISSSFVPPAPIRALRTHTRYRRHLTQARTAEKQRVEKLLEDGHLKLSSVISDIHGVSGRDMLDALAAGQRDAHALAAMARGKMRGKIRRLEEALDCSFFTGEHAAVLAMMLTVIDHHTAQISQLTVTIEKLAEPYLPQIEQLDAVPGIGMICAQDIIAEIGIDMAVFPTAAHLVSWAKWSPQVKQSAGKRKGSNSTGRGNPYLGAALGEAGTSAARTQTFLGARYRKLTRRMPKKKALVATGNSMLTIIHALLSDPAAVYTDLGADYYEQHMHARRQARNHVKSLERLGYKVTIKAIDTATGELLTTTS

SEQ ID NO: 176320 - protein, 497 aa, unidentified
MLLGFELSGESAFGGYPDWNNFKVRSYIPGSSYYQPFKYFIMSKKHVSLEVVNPNAAGIDIGSRSHWVAVGQDAQDVREFGVYTEDYQELSKWLKKHEVTTIAMESTGTYWQNIFSFLVAEGFDVILVNGRQTKNIKGKKTDIKDCQWIQKLHTLGLLSSSFLPDSTTDVIRTYHRHRQNIIKQTGATVQKMQKYLRLMNLRLDVVVKDIVGLTGQKIISAFVAGERSGKELAKYRHYNIRKSEEEIAKALQYNGREDYFFALKQEWKTYLHLQKQIDETDKEIKKLLKKIIRSDENKKKHTAKKKDYKRKNKNAIRNTDMNKIGVQYFEGIDLMAIEGVNDATVMAFISEIGLEGIKKFKTAKEFTAWLRLAPNNKISGGKVLSHHLPKGSNRLKIALRQSANVIGNLKEGHLNDFFRRINYKKGRATAISATARKLAVIIWNMLAKGIQYQPPKEYLFLDQKRKLKLVSRIKKNISKFDIKPEDVGFSKYLIINN

SEQ ID NO: 176321 - protein, 385 aa, unidentified
MAPIRMPEAVIGLDVGKSSHWACVATRDGEVLLSAPVANREDDLDSLFGRFPDALVVVDQSRNIGALALARARAAGMSAAYLPGLAAHGAARLFAGDAKTDERDAMVIAKTALGIPDALLPVGDPGPTIAAARALAAQRNFLTCENTRNKNRLRSILLESCPAFEALVDLSDGPQLRLMASLGGAWSVADAGPRRAAALTRGAARGKIEALVRSTTSSTRPDASVVAAEDRAVKLLAHRISENSAEIEAITAEISALLEGDDTYRCLLTVPGIGPKTASELAISIDIEDFPSHDRLASYCGLAPRNRQSGTSISSVTASRQGNKRLKNLLIFSCNCLTRTEGRWGDYYTRCRERGMSHGKALKALARKRLKVIYAVMRDRVPYAA

SEQ ID NO: 176322 - protein, 325 aa, unidentified
MAKRNMFVGMDVHKESIDISLAEEGRAGEVRHYGVIPGDLNALAKVVRALRAPHRTLRFVYEAGPCGFGIHRYLTGEGEDCAVVSPSSMPTRSGDRVKTDRRDGDALARLHRAGELTAIYIPTADDEAMRDLVRAREDAVGLSTQARHRLKAFLLRQGRRYAGRAGWTQPYRRWIADLSFPLAPQHIALQEYRDTIAEAEHRVERLTTQLRELTPAWRWAPVVEALQALRGVSFVTAAGLVAEIGDLRRFQHPRELMGFVGLVPSEYSSGPRVRRGGITKAGNPHVRRLLAEAAWAYQGVPRVGRAHLARQAALPKAVCDIAWKA

SEQ ID NO: 176323 - protein, 313 aa, unidentified
MTDLSEYVGIDVSKAMLDAACFQSRAFQQFRNTPKGISKLVIWLLEIHPNLVVLEATGGLELACVAELMQAGLPVAVVNPGRIRGFARSIGQLAKTDKLDAMVIAHFAQATQPKPRKAHTPQEEQLSALLTRRRQLIEMLTAEKNRQHSARFGMQTDIQEHIDWLEQKLDQLDEEIQACIDQYPDWKQKADLLSSVPGVGRVTTVTLLGLLPELGTINRQQIAALVGVAPVNKDSGKRQRKRRVFGGRANVRSILYMAALSASNHNPQIRDFYNRLLKNGKEKKVALTACMRKLLVILNAIARSNQIIEASLA

SEQ ID NO: 176324 - protein, 482 aa, unidentified
MKKRNIYQNQSQELLTLFEEAGNSAKVMCIPIDYAKTDHVVMFCNGHGDIVRKPFSVKNSPLGVDYLTDQVIRSCKNRGISKRHVFFGGEDVGSFAANFVTTLRSQGWLVAGVNAHDAKKQRANLQASTDRLDLMGIASMLLNRRANSCPAQSGIYWNLRTVVRHRQKLVKLTTEVRNRIHGVVDRLFPGYLDEEKSGISPFSKSSLWLMQARFSTPQIRRRKRSTLIKGLRKLGAKNPEITAAKLQQYAAQVLKPPQEYIATLQFSLSQHVKHFSCLQDNIDQLEKEMAVGLAQTQGAFLTSFRGIGIVLASGVTSEIGNPYEQAPLNNLVSYTGIIPRVKQTGGPQGESYSGKVAKRCNRILKNYVVQSASHLGLHGPQELMADYKRREAAGQHADFGMGRRFLRIAMCLMRTSQIYLPPRLREPEAKLQERADYYLMNWPSLHEKWRKSGALEVAFDKNMPLGQWRNIVQHLYDIKLAL

SEQ ID NO: 176325 - protein, 397 aa, unidentified
MSTLFVGVDVSKDDASAQGLDREGKKLFYLEFSMDGEGFSRFLDRVKAHCGNLSEVTVAMESTGCYHINLFSFLSSEGIPCVVINPLLISNFARLSLRKTKTDKKDALSIAQFLLAHKDSLSRVAFSQNSQDLKDLARERESLTVMISGLKNDIRRLLKMSFPELEHRSKIFTETMLHVLIKFPSARALTAAKPKEIAKALIHVEGKRKRVLIRAEEIIQMAKASVATDSAAKELILSEKISTLFYLEEKRKKITGVLVKTCQSMRVEDLEIITSIDGIKQINGSTFLAEVGEMNHFKSHKHVIAFAGLDPSIHQSGQYEGISRISKRGNRHLRRVIFLMTTCVVRSNNIFRQYFLKRKAEGLPPKKAILATAHKLLRVLFAMLTSKSYFRKEVVEV

SEQ ID NO: 176326 - protein, 345 aa, unidentified
MPIVGGLDIHRKQITFDYLDTATGEVGRGQIAPADRAHLRAWLARFAGRDDAAFALEGCTGWRYVAEELAAAGIAAHVAEPADTAFARGRKRHAKTDKTDSRHLRVLLEQGRLPECWIPPAQILECRALLEAYHDLRREHTAWIERIHAVFFHQGAPRLGEGALRTERGLAALREAAAVHLSPAGQLQVATALDMLAAIEARMDTLRQQLLHAARHLAGARALQARLYGVGPLAGLAMTCWLGGAGRFSPARKAVRFAGLDVTVYSPDGKRSPGHLSRQGPEILRWVAYEAGQTHGRAPAPGHDYYAAVKDRTDGKIAALSQARRLIRQACHILAELGDDALTAA

SEQ ID NO: 176327 - protein, 357 aa, unidentified
MDKSTKLDFSGYNIYVGLDTHLKSWRVTTMVEDKVYQTFSQEPNAEALKTYLAKRFPKANYHSAYEASFCGFHIHRKLLALGINSIIVNPADIPTTDKERKQKEDTRDSRKIAKELSQSDLVPIYVPDIEIEGDRQLVRYRKTISKEITRSKNRIKSQLHFLGIEIPPRFSNATHWPKRFTQWLEEVEVPTNSAKIILDSHLETVTGLRKKQLMINRAIRQISKKDIYNKNYNLLISIPGIGALTSMIILTEIGDISRFENFDHLSSFVGFVPMTNSTGEKDKVGDITIRRNSMLRGALIESAWVAIKADPVLMLAYQNLTKRMVANRAIVRIAKKLLSRIRYVLINQKPYEKGVVE

SEQ ID NO: 176328 - protein, 330 aa, unidentified
MNTMKKNTAPVYVGMDVAKATLQVHLNGHQFEFKNNSKGHTQLFKKLAKLTLPHVVCEATGGYERPVVEACHKAKILVSVLNPAHTLAASQAQGKRAKSDPCDAAALTDYGQRFHPEPTLAVPPATREITELTLWLKQLIDNRAVVKTQAEHHANSFVGQQHQALLDHYQSQIKTVEQKIKKLVHAHPPFQQRVDSLTQIQGVGFRTALLTLVFMPELGSMNRGGTAALAGLAPWTRDSGKMKGKRCIGGGRAQVRPVLYMAALSASRCNPVLAPFYRGLKKRGKLSKVALTAVMRKLLIHMNSELKKLAVKPGIEKPGTSAKTKKILAK

SEQ ID NO: 176329 - protein, 347 aa, unidentified
MQQVSRIGMDTSKQIFQLHGVDGAEEPVLRKKLRRKEMLKFFEGLPPTQVGIEACASSHHWARLLQSFGHEVKLIPPQFVKPYIKRNKNDAADAEAICEAMGRPSMRFVPVKTAEQQAALMLVGMRERLIRNRTQLSNLIRGYAAEFGLTVAKGLTRIAELLERVGSDETLPTLARELFALHGREYARLNAELERIEARLMAWHRADTCSQRLAQIPGIGPIGASMLVMKTPAPETFRSGRHFAAWLGLTPKDHSSAGKSRRGGISRAGDEALRSVLVVGSTSVLRRVRQRGTGAPWLIDLLKRKPPKLAAVALANKNARIAWKLMVSGERYRPAKPITGFSSPKAA

SEQ ID NO: 176330 - protein, 413 aa, unidentified
MRVMIERCCGLDVHQGSVVACLLIGTPGARPTKEVRTFRTMTRELEALRDWLKSAGVTHVGMESTGVYWRPIYAVLEGHFELIVGNARHIRNVPGRKTDVKDAEWIADLVRHGLIAKSFVPARPLRELRELLRYRRKLVESQSAERNRLLKLLETANIKLASVASDVFGVSGRAMLKTLSEGNTSAEELAALAKGQLRRKHEELVLALEGRVEEHHRFLLSIQLHRLEAAEHDIEALDSRIAERLEPYRTQHALLMQIPGVDWVVAAVLIAEIGIDMSVFLSANHLASWAGVCPGNHESAGKQKSGRARKGNVHLRTILVSAATSASRTKGSYLKDKYHRLKARRGALRAALAIAHKILIAAYHMLAKGLAYRDLGEAYLDQLDQTRTAANLKRRLERLGYTVVLQLKEAATA

SEQ ID NO: 176331 - protein, 350 aa, unidentified
MLIIGCDYHPSVQQIAFVDTDTGELRERRLGHREEAEQFYRELKQQNLTVRAGMESSGHSRWFERLLQELGFELWIGDPAEIQSKRVRKQKTDRQDAHLLLRLMMEDRFPRIWIPDAVNRDLRQLLWHRHRLVQMRTRVMNQLHVVALNEGLRRKKALWRPAGRAELEAIALAPWATRRRQDLLDLLDQLTSKIQQLTQALEEEVEKRPVTRLLMTHPGVGPLTALAYELVIGTPERFHCGKQIASYVGLVPEEKSSGDRRRLGHISKQGNALLRFLLVEAAQVTVRSQPQWRSKFLHLAMRRGRKIAKVAMARKLAVHLYWMWRKGHDYGRLQKFGSHAGEPGNRDGVQ

SEQ ID NO: 176332 - protein, 332 aa, unidentified
MKYKVFIGIDVSKLTIDAHLHGIGASKTFSNEERGFALFLSWVKKYRKQSEPAEMIICFEHTGMYSIKLATYLNDIGIPFAMLPALQIKQSIGIRRGKNDQIDAQRIAEYAWLHRETIQATLLPAKSILKLQSLLTLRNRLVCDRGGYEATWKEQKKALEGKEHKGIFQVYKSLIMNLTVQVKKIEEQIKAVIESDETVKLNYQLLTSIKCVGPVLAANMIAYTHNFTRFATWRKFACYVGTAPFEHQSGTSIKGRTRVSSLSNKQLKKLIHMVAICACAYNPEMKSYYKRRVSEGKNKMSTLNVIRNKMISRMFAVINRGSGYIDLMKYAA

SEQ ID NO: 176333 - protein, 350 aa, unidentified
MREDSTVFVGLDLGDRYSEMYVVDGAGEMMETGRLATSAPAIERRFGNSPACRIGLEAGTHSSWVSQLLKSLGHEVVVADARRLRLIYQNERKNDRADAEYLARLVRLDPELLSPVHHRSPQSQADLALLRARDGLVRARTQLINQARGLVKSFGGRLPACSAESFHCRAAEAVPPPLQPALAPLFAAAGELTRQIRSYDREVGKLAKERYPETMILRQPAGVGALTALAFVLTLEDPRRFRKSREVGPTLGLVPRQKQSSGHDPQLRITKTGDAYLRRLLVGSAQYLLGPFGPDSDLRRWGLALAARGGKNAKKRAIVAVARKLAVLLHHLWLTGEVYQPSQLPLPQAA

SEQ ID NO: 176334 - protein, 355 aa, unidentified
MDNAKYIGMDVHKETISIAVLDSAGKLVMESVIETKAITIVQFMRGLHGDLHLTLEEGTWAAWLYDLLKPYVHEVLVCDPRKNALLKVGNKSDRVDARKLAELLRGGHLSPVYHGEHGVRALKELSRSYVTISGDAARVMTRLKAVYRSWAIPCAGKQIYAPRYRAEWLGKIREAGVRRRAEFYYQQLDELRSLRQQVRRELLVESAKHQASKLLCQIPSIGPIRAAQLIAILQTPNRFRTKRQLWAYGGLAIETHSSADHRYVDGQLGPSKQPVSLRGLNRNHNHELKNIFKGAAIIAATTAGPFQEFYAGLVAKGIRPEMARLTLARKIAAITLIVWKKGVSFDAQHLKPQTA

SEQ ID NO: 176335 - protein, 386 aa, unidentified
MIEAVIERCAGIDVGKKFLVVCVMSGSLEAEPKTEIRKFGTIVAELEHLRDWLIQEGCSHAVMESTGSYWKPVFNILEDSVEVVLANAYDVQNRRGHKTDPNDSRWLAHLLRHGMIRPSFIPERAIRELRDLTRRRRQLVGERARERNRIQKILEDANVKLGDVLSDVLGLSGRLMIDALLEGRLQVEEIAQLAQRKAKQKIPDLIAALQRNRLTDHHRFLLRHALRHLDFLVEEIEALNIEIRSRLTTEQFRQKHALLQSIPGIQEEASAAILAEVGPNMAQFPSDAHLASWAGLCPGNHESAGVRKTGRTNRGNNWLRSILTQCAWAASNKKNSMLQSFYFRLSSRCGRKRAIVALGHRLLRVIYQVLLRDQPYQESNVRPFSA

SEQ ID NO: 176336 - protein, 414 aa, unidentified
MTNLQWGVLSMNNVAGVDVSKGKSMVSVLRPFGEVVAKPFAVRHTGSELKELADFLKSLDGETRVVMEHTGRYYEPVAQFLCGEGIFVSAVNPKLIKDYGNNSLRKVKTDAADSRKIARYGLDNWVELRQHTPMDTIRYQLKTLNRQQGLYSKTKTMMKNNLIALLDQTYPGVNALFDSPAREDGSQKWVDFAASFWHVDSVRSMSLSAFTERYRKWCQRHGYNFRESKAVEIHAGAQDLIAMLPKDALTKLLVKQAIDSLNAISKSVEQLKSEMRMLAMQLPEYPVVMEMRGVGDSLGPQLMAEIGDVTRFIHRGSITSFAGVDPGSNQSGTFEAKSVRTSKSGPPELRKALFLVMDCLLKTMPQDDPVYLFMDKKRAEGKPYLVYMTAGANKFLRIYYGRVKEHLASLENVD

SEQ ID NO: 176337 - protein, 371 aa, unidentified
MGEKTLYCGIDIHYKKSSLCILKRNGEEKEQIEINTDKREIENIINKYQKYNMQYAIEAGNMTRYFHKIANNFNNTKKVHIVHPLKFKIITESRQKNDKNDSKNLALGLLKDYLPYPVYIKSENSRQLKLLLNLRRRYVTTKTKIIQQAKSIIRSLGIKPMVKSLKSVRSFNIVIDLMENNFDKDTIELLREELVEENKKIVNIEEKIMELINKAYKEEYDLLISIPGIAFVTAATLIAHIDDIKRFQKAGQLSSYFGLVPSEYSSGEKVKHGRITKEGIKEARALLIQAAWVFIRMRSKNDDRLKALRNKYHKIAFKGKNSQKAIVSIARHLSRIIFGVLNSRMLYSGIILNKQESIKPAVYKAVRELPS

SEQ ID NO: 176338 - protein, 341 aa, unidentified
MKNLFIGVDFSKEKVDVAIIFADGLTETAPRVFNEFKTTVSGYKQLVKWVEQNSCGIDSSLWLFCGENTGDYSKGLCNFIYGKGYDMWLENAKSIKDASGLRRLKSDRADASMIAEYAMRNYDKAIMYEPLSESLAQLRELFLYRQMVVRHRCSFQVRRGEKRLTMEKSPIKTMISQSGRHIVSELNKEIEKIDKRITALIKSDKELTEVFTIVTSVPGIGTQNAVCLMVYTDNFRRFNYDSRKISCYYGIAPFGKDSGTSVHSDPHVHYMANRQIKAMLTQAALAAVNFNPVMARYYMRLVERGKKKQVALNNVKNKLVHLVTAMVRNRQTFTPEYKISA

SEQ ID NO: 176339 - protein, 355 aa, unidentified
MTTITIGVDLAKNLFSVCSVNATGRVLDRQEFRREKFAAWLAQRPAGTAVAMEACSGAHHWARVCVELGLQPLLMAAQFVKPFRKSAGSKNDRNDAEAIATAARQGNMRFVPLKSLDQQVRLSWHRVREGYKAEGLAIGNRIRGLLAEFGVVIAPSDAALRRWLADLDAVSLPSELIELIRDLAAHWEAVVKRVITCDRRIEAHARADERCVRVRSIIGIGALTADALVATIGSGIEFKNGRQLAAWLGLVPRQHSSGGHARLGGITCRGDAYLRTLLIQGARSSLQRAKAVSVEKATPEQRWIRSLTQRLPFGKLLVAIANKHARQLWVMLARKVDYDAHALYHHPMHCTEATA

SEQ ID NO: 176340 - protein, 346 aa, unidentified
MKTIALDVHSEESQMAVVSPVGEVLLEMKVPTQPEQLRHAVAGVKGPKRVVFEEGPMSGMLQDALKDVAEEVISCDPTHNALIAGAEDKNDERDALRLAMLSQVKAIHSVYIPPEPYRTLRSLVRYDHNLQNNITGVKNRIKAMCRRMGIRYRGVRVYSKAGQKEVLAQITNAGLRWQVRSMYRQFRVLRSERLKARKVLLRQSREFPEIERLKSIPGVGPVIARTMVAWIVDPHRFTSRRALSSYAGLGLGQGWTNWQPINRARASKKGQRELKRVLFIAARAALLRENALARRYQARVYSGWEDGKAIRDVARCILMITRAVWITGRTYDDAMVSVPVVKAHGR

SEQ ID NO: 176341 - protein, 423 aa, unidentified
MISAVLECCAGIDVGKKWIAVCVLKGPANGDAQAEIRRYQTTNQCLEQLCEWLVECGCTHVVMESTGEYWRPIYNVLEEATDLEIILANSQQVKGLRGHKTDPSDAHWLAHLLRHGMIRPSYIPPLPIRQLRDLTRRRKQLVRSGAQERNRNQKILEDANIKLGSVLTDVFGLSGQLMLDKLLEGEATPEEIAELAQKRARKKIPQIRASLEGHRMNALHRRLINLSLDHMAFLEEQISTLDEEIVQHIQAHGLEKPYQLLQTIPGVKEEGAASLLAEFGPDMEVFGNAKKLSSWAGVAPGNNESAGKKRRAAALRGNPWVRSTLTEAAWSASRKKDSEFKDHYDGWKGRLGHKRAIVAVAHSLAETVFEALSTGQPYTKPGTDPMSETKAAHLIRHHTRRLKTLRKRLKPQYQRHERQHATP

SEQ ID NO: 176342 - protein, 412 aa, unidentified
MEDVLNCAMGLDIHRDTVVACLLQGELTDTPSAEIRTFSTLAPDLLKLRDWVVESRCPNIAMESTGIYWQPVYETLEDCFDGNICLMVVNARHMKNVPGKKTDMKDSQWIAQLLRAGLLKGSFVPARPFRELRQLTRYRKNITHDITTQKNRIDKFLQCSGFRLSVFISDIFGASGRNIIRHLIAHGNMTMEALDKCLKTKTRARINEIMIAVNGQLSPHQRTCLRMMLSHLETLEAHMHEVEAEIENEIAVHSEALALLCSFPCIDVTSASAIIAEVSTDMSSFPTAEHFCSWAGLSPGNNESAGKRKSAHINKGNPYLKSMLCEVAWIIASKRNTYLSAWYWKLKQRKGAKRAIIALARKILVVIYVMLKTGKPYDETNYEQRKLACEQKQVNRYIHELTRLGYSVSVPN

SEQ ID NO: 176343 - protein, 348 aa, unidentified
MWIIGCDFHPSWQQVAWCNTETGETGEQRLEHSNGEAERWYRQSPAGSRIGLEATGNSQWFVELLQRLGHEVWIGDAAQIRASYVRKQKTDKRDAAHILRLLLEDRFPRLWRPSPEQRDIRQLLIHRHKLVEIRTRVKNGLQHLAMNRGMQKKRQLWSEAGQRALRELAMPGWAGCRRQDLLETLAYLDRKIAPLDRAAEETAQRDKMALLLKTQPGVGSITALAFAVTIGEASRFPRGKHVASYLGLIPREHSSGGKQRLGGISKQGNRFLRQLLVEAAQSAVRYDESLRRPYLHRCHRKPKGVAKVAAARQLAVRLYWMLRTQTPYPEIVRIESSPRVALVVRHGG

SEQ ID NO: 176344 - protein, 365 aa, unidentified
MIYSLGTDISKQEFTACLQRYNLSEQTHQVLARKSFANTPSGFKACMRWVARHTDDPAPLRVTMEATGVYYEALALYIHEHHRQVHLAVVLPSTSKKYIKSRGLRSKTDKIDAYGLALMGAERKLSAWGGIDPFWRRLRAMTRTRTELMDERTALRNRLHALRHSGVEAKKAIQALEYCIQALTQQIDALYRRICKALRAREKVAEMVDYLRTIPGVGLLTIAVVLAETAGFERFQSISQLISYSGYDVKIRESGTWVGQPKISKQGSKYIRRAMYMPASTAIRSGAGPLWEFYQRLRAKHDNQVNMKAHVAVQKKLLRYMYVLWNKQQAFDPQHIRRLQAHHNNVAPSRTHSEEATVDPSQAAA

SEQ ID NO: 176345 - protein, 363 aa, unidentified
MQNSITWVGMDVHAENIVLAALRDSSDAVLFRAEFPNTPKGRERLAGRFAENAPVRCVYEAGPCGYELRRFLESKGIECDVAAPALIPRKPGDRVKTDRKDAEKLARLHRLGELSTVFVPTPAQEALRDLLRTREDAREDLLRRRHRLSKFLLRLGRRYTEGVRWTTRHWDWIRAQTFTDHNTETVFREYIVAIEQEVERIRRIEQQIVEESKNPEVGKTIARLRALRGVDTITAMTIITEVIDLNRFRSPRELMAFIGVVPRERSSGGRERRGSITKTGNAHIRRVLIESAWHYQRLPAGTPKTILVRREGQPPEVIETARKAELRLHRKFMKLLGRGKPKGIAAVAVARELAGFIWALRRG

SEQ ID NO: 176346 - protein, 376 aa, unidentified
MIEKLRFLGLDVHAETITVAVAEADGEVRSLGTIANREESIRKLIRKLGPVEHLRACYEAGPTGFVLYWQLTQLGVKCDVVAPSLVPKKPGDKVKTDRRDALKLARSHRSGDLTAVWVPDEASEALRDLVRQREAAKQDQLRAKHRLTKFLLRTGQRPPLGVKAWTERYVEWVQQVRYTHPAQEATLLDCLNEVQHMEERVKRLEQSIVEVIQLAPVPMQDVVRGLQALRGIAHISAVTIAVELGNITSRFERARDLMGYSGAFPSEDSSGERIRRGGITKSGNAHLRRIVVESAWSYRHRPAIGARLRKRQEGLPAEITEIAWKAQNRLHKRYMTLMARGKEQRKTMTAVARELLGFIWPIGIKAEASCKQQLAA

SEQ ID NO: 176347 - protein, 443 aa, unidentified
MTRKNQKRFEVIHPDCAAVDVGGREHLAAVDPSKYSDPVKRFSTFTDDLHAMADWFESMGVKVVAMEATGVYWIPLFEILDRRGFEVYLVNSRATRQITGRKSDVLDCQWILLLMTHGLLRGAFRPSDNVCSLRSLVRQRGNKVRDQAKALNRMQKALVQMNIQLAQVISNIAGVTGMSILRAIVDGERDPEVLAMLRDKRVKADQATVARSLRGNWRAEHLHALSQELAAYDFLEKQIGECDQAIAFALERLPVLQEQVIPPSKTLRNPHRSNEQQSVLHRALNQVMGVDLTAIPTIGIDTALVLASELGPDLSRFPTSQHFCSWLGLAPPTRISGGKPLAGKGVKVINRAAQALKQAASIARNDKSFIGASHRARLTRMDTCCAIKATAHQLARLIYAMLTKGQPYVEKGIEEFEERSRDRQMRALERKARKLGLELVKAA

SEQ ID NO: 176348 - protein, 352 aa, unidentified
MIIGCDFHPSFQQIAYVDQETGECGERRLSHREDALVFYRSLAGRPVRVGVEATGNDRWFRKLLGELGHELLVGDASAIHASAPRQQRTDKRDARHILRLLVENRFPCVWQPPAGNEEQRQLLLHRCRLVRMRTRIKNQLDSIAKSEGLTGSRSWSAQRRGQIEALPLTGWYAGRRADLLELLDGLELRIKPLNAAVEAAARQDAQARLLMTHPGVGPVVSLAYVLVVGDWRRFPRGKQVGSYLGLIPSEASSGKHQQQMGHITKQGNTLLRWLLVEAATTAQRHDASWHRQYVRLSMTKHHGVAKVAIAHKLAVRLYWMLRSGQDYGQMMERGSHARQSECPVGRSKGPIE

SEQ ID NO: 176349 - protein, 346 aa, unidentified
MKNITTVGVDLAKDVIQVCVVAQNKVISNTEMTPQEFRCFLTKKKSCIIVFEACGTSNYWKQVSLSEGHDARLISAKLVSQIRQNQKTDKNDALAIVQASQLTGVRFIQGKQFSQQELQSISKMRQLALKHKTATSNQIGALLLEFNIRVSNRNGGINGVVQATLEDATNNFSTEFREALYETWQGYLALVARIEKYDEHLNTSVDNTPDCKKLMALEGVSTINAVNLYTSLACSEDSVFTSPKDAAASLGVTPVQHSSGGRIQIGRIAKRVKNALLRSNLISGAMAVVKQVSLREPQTAKEKWLKALIERRGTKCAAVALANKTVRTAFAMLRDGTEYQAQALTD

SEQ ID NO: 176350 - protein, 463 aa, unidentified
MGHEPEAEHNPDAFRNNQLSPPTGMSTRECFGFSHPASIDCLTEEEFTLQILYPRCCGLDVHQKSITGCCLWFDAEGRRQEEIRKFGTHTTELRRLAVWLRQHEVKHVVMEATGSYWRPIWNVLEGEGFEQTLANPQHMKAVPGRKTDPHDAHWIADLFQHGLIAASFVPNQQMRHLRDLTRMRTKVTEDRARVINRIEAVLEDANIKLSSVVTDIMGASAQAMVKGLLRGERDTAQLAELAQGRMRAKRPQLQTALEGNLQPHHVFVLQRLLMQSRFLQQQREAIERQIKRRLDPEMRQAIAFWDSIPGVDEDIATILVAEMGIRSDQFADGAHVASWTAICPGNHESAGKRKSGKMREGNRWLRGALTQAAWAATHTKGSYLSALYRRIAARRGSKRAIVAVAHAILISAYYMWKKKQAYHELGDNFLDTLKPEKTADRLLKRLAKLGYAVTVTGFPSPAA

SEQ ID NO: 176351 - protein, 349 aa, unidentified
MGQVITIGVDIAKSVFQIHGVDADGTVVIRRRVGRARVLEFFADLPPCRVGMEACATAHQWARELKKLGHDTRLMPPTYVKAYVKRGKNDAADAAAICEAVTRPSMRFVPIKNVEQQSALMLHRTRDLLIRQRTQLINALRAHLAELGLVAAKGREGLHQLVTVVTECGDERLPSNARFACQAIVTQLHAVQIEISGLDKRITQIHRTNADSKRLDTIPGFGVILSTAVVATMTDPKAFRTGREFAAWIGLVPRQNSTGGKERLGSISKQGDRYLRRLLVVGATSVINSARARPYKYPWVIALLGRRPTKLVAVALANKMARIAWAVLAKGEPYRAPTRSSNAVVPVAA

SEQ ID NO: 176352 - protein, 341 aa, unidentified
MDHYAGIDVSLECSSVCVVDASGKIVWEDKVASEPEALIAWFKSLGVSLVRIGLEAGPLSQWLFAGLQQAGLAVELLETRHVRDAFKAMPVKSDRNDARNIAQLMRLGWFRPVHCKSLAAQETRAVLTARKLVQSKLSDVEMSLRGILRGFGLKVGKTTSNRFAARINELVVGQPTLEVIAAAMLAVHAVLLREFKGFEKRVRATARHNAQARLLMSTPGVGALVALTYASGIDDPARFKSSKRVGAHFGMTPKKYQSGETDVTGRISKIGDKGVRTALYEAAHVILTKPVKGCGLKSWAARLAKRVGMKKAKVALARRLAVIMHRMLVDGTEFKFAAAAA

SEQ ID NO: 176353 - protein, 424 aa, unidentified
MKVTYQTCCGVDVHKSFLVATIVKTTGGIEPSYQKKRFSTFNNSILEFKQWLLDNDCHDVCMESTGKYWVPVFNLLEDEINVVIANPKWVKAVKGNKDDTKDSKWIGDLFRLGLVKGSYIPCKIVRILREYTRYRYKLVSCRSSEKNRYQNTLTVCNVALDSVVSDIFGKSSTSIIDYLLEQSGTSINHEEIASKLLRSLKSKEDAVIESVEGYQMTDAQKYRMRLVRAHMDYITAEINDVDKMIENMISSNPDFENAVQFLCTIPGVKRDSAITIISEIGTDMSQFGGSKRLCCWAGLTPGSNESAGKKKSVRITRAGVYLKPALVQCAHAAVKSDKSPYYKKKYESLVKRRGKKRAIIAIARMILTAIYQMLSTGEQWNPSDLYKIDMPVALVEKQKAKAIKQAKKLLQREGLLPPDEPLAS

SEQ ID NO: 176354 - protein, 406 aa, unidentified
MYMTPQACADAGAAYPDYELFIGFDVGKSFHVAHARDRAGRRVGSGRVDNVEAAVDAFLSRAIGAAGADPSRTLVVVDQRRNIGTTVIRRARAAGCEVAYLTGKREKKARELFPGVAKNDAKDAEVIAAAAAGMPQSLLPVPEEDDGLEGARRLRSQLSFAVKQRTQCMNRVRAALVESNGAFERLVDLDRAWALDVLERIGGPWQVLDAGRERLAEVARGASGEELDALWESLSRATRPTEEQVRSEAATFRILARRIRSLREDAEELSGLIAAEVEGDETYRCLLTVPGIGPATAAQLVAGVDIAAFPGNDKLASYCGLAPKDTQSGTTSSSATSSPEGNRCLKNLLVFTCLSLARSDGEFGRYYRACRERGMRHTAALKATARKRLKVIYAVMRDRRPYSPPA

SEQ ID NO: 176355 - protein, 415 aa, unidentified
MALKIVYKICCGIDVHKTFVVACIASTDKHGVTSYERHRFSTYTKGLKNLLQWLLEHNCKDVCMESTGKYWIPVYNILEKDCSIVLAHPKYVKAIRGKKTDKKDAKWIADLFKHDLVSGSFMPPADIRQLRDLMRYRYKLTCFSSSEKNRLQNCLTVSNIQLGNVVSDTLGKSSQKILDKILENPLDTSFDIEPLIHGSMKKKLPELELAIDGYITPEQAGKLKVIRGHFKDLESRKAELEQLILALASPYQQKLDIILTAPGINNPFTAIGVISEIGVNMEAFPSAKHLCSWAGLTPTNNESAGKKKSVRVSKAGCYIKPLLVQCANAVVTSKKHPEIRNRYLRLKKRRGHKKAIIAIARMLLTALYHMLKNEENYNAELYRKSDILPTEREITIEQAVIMAQFQGYKIKSAAE

SEQ ID NO: 176356 - protein, 341 aa, unidentified
MMLIGVDAHKATHTAAAVNRQTAELLDQATVDATPAGHEQLLAWATAIDADRVWAIEDCRNLSSGLERVLLQAGERVLRVPPKLMASQRKSERTFSKSDPIDALAIARAAIREPRLPQAALPGIEQEIGFLVDHRDDLIKDASGHQRRLRWHLHQLDPEFDIALRTLNQPATLDRVARWLKRQPQSAQVRISRELVTRIRELHRRATAIARELAELVKQTNPELLAITGCGTLCAAIIIAEVAGIKRFANDAQLAAYAGVAPLDASSGRQQRHRLNRTGNRRLNRALHIIAVTQVRIHPPAIEYYARRKADGKTNREALRALKRHLARTIYNTLATSPALT

SEQ ID NO: 176357 - protein, 383 aa, unidentified
MPMRQVCGLDVHKDSVFACILNENGVVLQEKFGVLTPELEQLAARLQEHEVSEVCMESTSIYWMPVWRVLEPYVMDLKLVNPYFIKQLPGKKSDVKDAEWIATCLLKDLIRGSYVPADIIQRLRQYDRRISDLNAECVRKLGKLDAALQRCNIRISNYVATTDGKSYREVVRLISEGVRDPVELTKVIHGRTVNRVGRDVIQASLTGVISETDIDVIRQLREEVDLARRHKDECQSKMDAICQQYFPDQLKNLQTIPGIKGRSATAIIAEVGTDVSSFQDAAHLVSWCGLKPRNEESAGKIKARSITHGNKYLRKTLIECAWAASKTQGCYLNKFSYHQTVVRRKNKMKVQVAIARKILVAVWHVMHDNVAYRDYTPDIVPAA

SEQ ID NO: 176358 - protein, 390 aa, unidentified
MRFFGIDVGSLSHVVAMVDEDLHILLKPTSFGEDAAGYDKLRKLLGEVTDCLVVMEATGHYGWNLHRTLAGWGFTISVVNPLRTRRFAEEDLRRAKTDSIDALGIARFAALKRPTPTAPLDEVAEQLRELVRLRLRLVQDLGDRQRQLHRLLDLCFPEFTRHVRDLDTDLARGILREFPTAQAIGDCTLRRLARHRCGRRTVGTTLARNLIEAAQASVGRHQAEVYGRQVRFLCEDAGTLANEIRNLESEIQARARKHELALLLTTIDGIGLLTAAHIVAEVGDPATLRCAAALAAYVGVTPGTKQSGRWQPQKARLSMIGNARLRRALWMPTLAAVRCNPWLSAHYQRLREKGKPPKVALIAAMRKLLTAVYSVAKNRKPFAYHAESKS

SEQ ID NO: 176359 - protein, 340 aa, unidentified
MLYAGLDLSRKRLDFHLLDRDGATVEVGAAPPDADGLLGLTRRLDRHREPIRAAIESMNGARFVHDRLELAGWQVEIADAQKVKGLAPLACKTDRIDAWVLAELARRDLVPAIWLPDPTVRAERERARWRLHVVRHRSSLKQRVHAVLLTHGKPCPVSDLFGVRGRQLLARLALPEPWQQTIEASLRLIDELEREITGCERELRRLGADHRYVPLLLTVPGIGWVLAYTIAAEIGDIGRFASPRKLAGYTGLCPRVYQSGERDLRGPLAKQGPKYLRWALVEAATHACTAAVYRDRYQHTKARIGKQRGAKVAQIDLARRLSEAIWHMLTRDQPFAPKGA

SEQ ID NO: 176360 - protein, 415 aa, unidentified
MSSRTLPKKLASVKPGALYAGVDLALDSNVVVVLDEGARQLARFRFPNDRDGYDFFYGQLERLRERHSASEVWVGLEPTNYFWKLLAADLEQHQYGYRLVNPYTVKKHREGDQLDRSKDDPRDAFTIGDLLRTGKYTETRLLHGSYAELRQHVTVYDRLQRDLRRQMTLVRNTAGQLFPELAREFKDFTGATASALLRGHAAASRVRQLPLDIFLAEVRADFQGQRLLVSKLRRIHALAAQSVGLTESVQGLQLALRLQLDTLDMLQRQLNETEAALTDVFLTLSEAPYLLSIRGLGLITAAIILAEIGDPRHYRHGRQLIKLAGTQPVPNASGRKSRSQTPMSHKGRPRLRTALFFAVLRLVQVDDAFARDYQQLQQRDKNPLTKMAALGVLMNKLLRILWALMQNQTFYRSAA

SEQ ID NO: 176361 - protein, 342 aa, unidentified
MREVSIVGLDLAKRVFQVHAAGSDGAVVLRRKLSRGQVIAFFTELPNCTVAMEACATAHYWAREIGKLGHDVRLIPPAYVKPFVKRQKNDAADAEAIVEAATRPSMRFVVPKTQGQQACSMLFRTRDLFVRQRTQLINALRAHLAEHGVIAPQGIANLALLTEIIEDHDTGLELIVVETARLYLDQIDALSSRIASLEKALRSEAKRSQSTARLMSMPGMGPITAMAVEAFAPTMATFRKGRDFAAWLGLVPKQHSSGGKQVLGRTSKMGQRDIRRLLIIGAMTVIRWACRKAPPENSWLSRMLARKPRMLAAIALANKMARSIWAMMTKNENYRDSGLAAA

SEQ ID NO: 176362 - protein, 400 aa, unidentified
MRSIGMDVHRSFAQVAVLDQGKVMEEFRVELDYDAVVAFGQKLRKDDEVILEATGNTSAIVRLLTPFVAKVVIANPLQVKAIAHARVKTDKVDARILAQLHAAGFLPEVWAADDDTLNLRRLVSERAALVRSVRRVKSRVQAVLHTNLVPKYSGHLFGKGGRDWLSTAPLPKAERDLLARHLDELDWLKGKLEKLDGAMARIALDDTRTRKLTTIAGINSVVATAVIAAIGDISRFPTPDRLASYFGLTPRVRQSGDRGAIHGRISKQGNAIARTMLIEAAWSAASVPGPLRAFFLRIKDRKGLNVAAVATARKIANLIWQLLTKEAPYRWARPAFVAMKMRKLELRAGAAKAHGPAGPARDYWIKEIRHREMELVAQAEAAYAAMVEAWRDRPPKPQKG

SEQ ID NO: 176363 - protein, 411 aa, unidentified
MVKENFIYVGIDLHKETHTAVMIDCYNQKLGEITFPNRPADFPKLVTKVKKCNTDAKEVVYGLENAYGYGRPLAVWLIDKGYFVKDVNTAISHRQAKHRGAMYRKSDSDDAKAIALATLNMLDKLPDACPNDAYWSLGQLVHRRDNIMKQRTRLVNQLHEQLCIAYPSYKQFFNDISRPTALYFWEHYPSRKYLKGKSVEDLRTELVPVSHNRCSTKNCEKILDAVASDKVKNNAYQDARDMVTLSIVSDLQHYDSQLAEVDKMLEQMYKMLGCTLTTIPGVNVITAVKILAEIGDIKRFSNANKLAQFAGIAPLHLSSSGKGKDVATKQGNRRLQATIYFLAIQMVQVSSKGTPRNSVVRAYYEKRKAEGKTSQQALICISRRLISVIYGMLKNGTEYRMPVVENAGENR

SEQ ID NO: 176364 - protein, 340 aa, unidentified
MTDHNLVSIDLAKTVFQVCRFTDNNKILSNKRVSRKKLNQEIAQLRPTTVVMEACYSAHYWGRTFEQYGHTVKLVPAQHVKPFVRGNKNDANDAVAIGEASMRPNMKFVRVKSLEQQDIQSLHRIRERFVSHRTRISNQTRGLLSEYGLVATTGFKALTTLIHEALESDALTTLFKEELVSIYEELLDLAERLKRVNGKLKAMAQQYPLCRLLMTIPGIGFVNATAIYAAIGDGKQFETARDFAVWMGLTPQQYASGTRSFTGKITKRGNRYLRKQLVHGARALMNRTKGKKDKLSVWTNEIKERRGVHKACVALAHKLARIIWAVLSKGEEFKAQKMGA

SEQ ID NO: 176365 - protein, 379 aa, unidentified
MVSAATPASLAETASATLFVALELSRSTWLVALHSPLTNKVSQHRLDGGDADGLLALITRKRGQAEEKLGQPVRVVCCFEAGYDGFWLHRWLCARGIENRVLDAASLLVDRRARRAKTDRLDAAGLLRTLMALERGEMQVCRVVHVPTPAQEDARRRSRERARLVVERGQHTSRIKGLLMTQGIRDFEPTRRDWQVRFEALRTPDGLPLAPCLRAELLRECRRLWLVMEMIAEVEAEQKAVADAEDGPAARLAQLRGIGLTFATVLGDEVFFRDFRNRREVGGYFGLAPSPWQSGGVRRDQGIAKSGNPRARRTAIELAWLWLRHQPGSALTRWFHERVGSTKGRLRRIMLVAIARKLIVSLWRYVTVGLVPDGAVLKS

SEQ ID NO: 176366 - protein, 348 aa, unidentified
MKIVGCDLHARQQSIAMLDRETGELTEKVIRHEGNAVREFYASLGKPVVVGIEATGAMQWFLELLEELGIESRVGDPAKIRAAETRKQKHDRRDALLILDLLERDCFPAIWMPTSEQRDLRSLLRDRHQWVKMRARLQHTLQAIALNHALRKGSSLWSGTGQEALAKLPLPACTCQRRNELMSLYAQLQRRIQQLDKQVEEQAQHRPQARRLMTHAGVGPVTALATDVFLGDPSRFTTANEVASYIGMIPSEHTSGKRQRLGKMSKQGNSLLRYLWTEAGMHASGKDPELKRFYRRKLIQKGMGKSRIAAARKLGIRLWIMMRDEIDYEEFCRRGKLRQIGESPCRSA

SEQ ID NO: 176367 - protein, 422 aa, unidentified
MKYAPVQVLPDVPAGGVFAGIDWATADHVACVVDVAGRILDRFSAAHDKAGIEMLIMRLRENGATEVAIERGGGVLVEALLAAGLTVVVVSSHQVKNLRARYRSAGGKDDRFDAFVLADTLRTDRARLRPLVPDAPATLALRAAVRARRDLVAHRVAACNQLRAHLAVAFPAAAGLFFDLASPISLRFLASFGSQDAAARLDEQAITAWLKTIPERGKTAPASVLCARLRAAPDGVTGEDGAALAVITAALTVTVGMLAAQVKILETRIGAQLAAHPDGDIFTSLPRAGTLRAARLLAEIGDCRSRYPGPQSLAALAGVVPVTRESGTHTSHAFRWAVSRPLRDAVCDFADGSRHASPWAASVYQAARDRGKDHPHATRILARAWILVIWRCWQEGTAYDPARHAALQRILDQQAAQAGDTP

SEQ ID NO: 176368 - protein, 343 aa, unidentified
MQTVSTIGLDIAKSVFQVHGIDAEGKVVIRRQLKRRYVLAFFEKLPPCLIGIEACASSHHWSRELQALGHTVRLMPPAYVKPYVKRQKNDATDAEAICEAVTRANMRFVVTKTPEQQSGLVLHRARHLFIRQQTAVINAIRAHLAEFGIIAPVGRHGVEELLNVVADPNDKRVPEIARACLLAFGAQLRRLKEQILEFDRMIRAWHRSSETSRRLDDCPGVGPALATALVATVADPKSFRSGRNFSAWIGLVPKQHSSGGKNRLGSISKQGDRYLRGLFVAGALAVIRYAKIHGTKHRPWLTALLARRPTKVAAIALANKIARMAWVMMAKGERYKEPVALAA

SEQ ID NO: 176369 - protein, 325 aa, unidentified
MGTSPHQQGWDTKMEKLSYGGIDVSKDRLDVVVLPEERFFSVSNDAAGWAELVARIRPLAVSAIGIEPSGGYERGIIRALLAAGLSVRRINPNKLRQFARARGVLAKNDRLDARLIAEYVAIMPTRVVQRDEAVEKLAEVVTMRRQLRDEHVTVENQAAHIEDAMLRRLNKRRLARLEADTRLLDKRLAEMVATNAALAQRYELLTSMPGVGPVLAFTLIALLPELGQMSRKQIAALVGLAPYDFDSGKLRGHRSIYGGRMPVRNVLYMAALSGCRYNPALKAFHKRLAAADKKSKVVIVAVMRKMITTLNAMLRDNVEWQPKSA

SEQ ID NO: 176370 - protein, 441 aa, unidentified
MEKVISFEQVNEAAAGIDIGSEKIFVSPDDLLVENFGTYTSEYYRCINYLQEQGIKRVAMEATGIYWISLYNLLESAGIKVSLVNPKETKQKKGKKTDVRDCRWIQKLFSAGLLKESFIPEGKLLEIRYLVRERLDIIEMGSTYVNKMQRCLELMNIKLTQVISQVHGTSGMRMLKAIIKGERNPDVLLLLCDERIKKQKGVEVIKALEGNYNDTWLFMLEQNISLWERHQEQITQIDKRIEVLLEDLTTGKSVEEGVVGKIKPVRHHRPQINNLHETLVKFFGVNVTSISGVNSYTCLRLIGETGADMSRFETKKHFTSWCGLSAGHHQSGKRSKWVKQAPCNKAGQIFKEAAQSLENSKYIAIGSFIRRLKARRGASVAYKAGARKIAEAYYNILTKGTAYVERGLQQYEQQIKQREIATLKKLAKKHQVQIIEKQEAA

SEQ ID NO: 176371 - protein, 371 aa, unidentified
MNACLTPKSTVVGVDVHKYSHTAVAMDCFGQEKARLDFSNERLNDYVLWLRELGDKEDIIVALEDVNGYGFHIVERLSKEKISMRYVPAILTERERKKSIHREKSDYEDAKRVGKVILTKFDETLPAKESIADDQERELSANLDLLTAERRILVQEKTILKNQLHAMLHQIYGDHYGEGFPKVFHKKAIKSFRQKLTQTKFDNPIRVALAGSSIRRFDRLALVEKQLKEIDGSINNIGQKSEAVLALSDNIHGCGIITAASIIAEVTTISRFCDKSRFARYSGIAPIDKSSGRHQRLYTSPFGNRKMNRALHTIALCQIACKGDDRGKIYFKKKLAEGKTKLWALRCLKRQISNKVFQALKEQKRRETTAQ

SEQ ID NO: 176372 - protein, 360 aa, unidentified
MFSERTSVGLDVHARSVAAAAIDSVTGELFQTRLTPAHDHVREWVLSLPGPVAVAYEAGPTGFGLYRSLIESGIRCEVVAPSKLQRPAGDRVKTDAKDAVHLARLLRIEEITPVSVPTLEQEAARDLVRAREDVRRDLMGARHRLSKLLLRHGIVYSGGKAWTGKHDAWLRTQRFAMPSTQMTFDSGYDTVLTTSARRNRLDQAIKAIATDSDFTPVVRRLACLRGISMLTAFALAVEIGDWHRFTGNTIGSFVGLVPSEHSSGASRVQGPITKTGNQHLRRLLIEAAWHHRPRYAPGAVMRARWDLAPAAARARGDLGNRRLHGRWVGFDARSKRSVIANTAIARELAGWCWSLAILED

SEQ ID NO: 176373 - protein, 362 aa, unidentified
MAQRTAVAESRALGDAGLVTVGIDVSDRYSHLCVLGDDGEVLREERVRTTTAALTPALGRVPGARVVMEVGPRSPWLSRMFSELGHDVIVANPRQIELIARSQRKTDRSDAEHLARLGRYDPKLLFPIRHRGATAQADLQVLRSRDALMRTRTALINHVRGAVKAWGSALPSCTASAFHRAVAGHIAGELRPALLPLLRQIEQLTGEIRRADKEIAAMCERYPETGTLQQIVGVGPITSLTFVLTIEDPARFPKNREVGPYLGLVPRSRDSGDRQPQLRITKEGDVALRRVLTHAAHYILGPFGPDSDLRRWGLRYAESGAGNAKKRAVVAVARRLAVLMLALWKSGEVYEPLRHAHAAEAA

SEQ ID NO: 176374 - protein, 349 aa, unidentified
MVGVDTHKDVHAAAVVDVGGALVATASFGADREGYRALIEWAAQFGTVLRFGIEGTGSYGRGLASAVRRHGHEVIEVARPNRQDRHRRGKSDLFDAENAARAVLAGQAEAIPKTADGAVEMIRHLKVAKDAAVKARTAAMQSLKAVLITAPAELRETLQPLPDTALLRRCAALRPGQLTSVTAAAKYSLRAIAQRWHNLHAEITAHEQLLGRLVDQLAPRLTATIGIGPDNASQLLLALGDNPARLHSEAAFAKLCGVCPIPASSGKTVRYRLNRAGHRQANAALHRIVIVRMKYHHPTRAYVARRTTEGKTKPEIMRCLKRHIAREVWTHTKHLRQQPHAHPPTTCHL

SEQ ID NO: 176375 - protein, 403 aa, unidentified
MTSFSYFAGIDWASQSHSVCVLDAAGRVELRLDIAHSQEGIERLIRQLKSFAGIVIAIERPSGLLVDALVEAGLRVVPIHPNVLKASRPRYRGAGKSDPGDAYMLADIVRTDGHRFRALEPQSDEIRALRALVRTRDDLVAERVALANQLRSLLESFWPGAAEIFSEIDSPIALAFVARYPTPESTARLGEKRLAGFLAQHSYCGRRPVGVLLERLHAAPTGRAGELEAEAKGELVRSLASILERLVTELAKLTARIEHTVANLADGQIIMSFPRSGRICAAQILAELGSVRERFPNEAQLAAEAGVSPVTYESGKHRSVVFRFACNHRLRRALTCLADQTRHAHPWAADVYHRARSRGCDHTHAIRILARAWVRVLWRVWYTKTAYQPHLHRSAAAFNATTG

SEQ ID NO: 176376 - protein, 408 aa, unidentified
MIYCGIDWAEKTHDVALVDDDGKLLAKRHITDDAAGYKILLDLLAEHGDTEDDPIPIAIETSRGLLVAVLRTGKRQVYAINPMAAARYRDRHAVTRKKSDPGDALVLANILRTDMHAHRSLPQDSDLARAIAVLARAQQDAVWNRQQLSNQLRSLLREYFPAALDAYLHWQNGLCRPEARVLLELAPTPTRAARLSIAQLHSALKRAGRQRRIGTDAERIREVLRADYAHQPPLVEDALGKQMLALLRQLDAACIAADQLAEAVEEAFPQHPDAEIILSFPGLGTQLGARILAEIGDDHTRFTTARGMKAYAGASPITRASGKKSSITRRWVKNDRLNHTGYLWAFAALTASPGAKAHYDRRREAGDWHAAAQRNLFNKMIGQLYHCLQKHILFDETLAFRIELPAAA

SEQ ID NO: 176377 - protein, 347 aa, unidentified
MNVVHYIGFDVHKKSISYCVKTVAGEIVKEGKLAADRATLTEWAEKQMQPWRGAMEATLFSAWIYDTLKPYAVQLEMGHPARMKAITCGKKKSDKIDARTIADLLRCNLLPVCYVMPPGLRDLRRLLRYRSLVVRESVRMQNKIAGLLMETGSPFNKEKLHGKKYFAQLIQTLEQVPESVKDLLQMSRSAMEMFETTQKRLVKQLLVNPALAQRIERLAGIRGVGEITALTWALEIGDPHRFRSNGDAMSYCGLTAAWRSSADKQQRGPISKQRNAWLQTTLIEAAKLAPRWNPQLAAVHAHELERGHRNRATLMVARKLVAYLLAVDKSQKPFEVRDTASTAACAA

SEQ ID NO: 176378 - protein, 365 aa, unidentified
MKKTSTAATRSNKNLHGKLTIGLDLGDRSSWYCVLDEAGEVISEQKLSTTPKAMKEVFGAMPRSRIALETGMHSPWVSRLLSELGHEVIVAHARNVRLIGESRRKDDRLDAMTLARLARIDPQLLSPVRHRSAQAQADLTVIRSRASLVRARTALVNTARGLTKSYGERLRGCNPRNMDTEKAQTLSPQLQAALGPLLQAVESLSERIAEYNQQIEAIAQQSYPQTALLKQIKGVGTLIALTYMLTLEDPHRFRKSRDAGCYAGLQPGRRNSGQSEPQMHISKEGDPYLRTLLVQGAHHILGPFGADSDLRRWGLRLAERGGKAGKKRAIIATARKLAVLLHRLWVSGEVYEPLRNTKRTMSAAA

SEQ ID NO: 176379 - protein, 340 aa, unidentified
MQVTTIGVDLAKNVFQVHGITESEEVVFNRALRRAQFLSFFEKLDPCLVGMESCSSAHHWARELTALGHEVRLIPPMYVKPYVKRGKSDAIDAEAICEAVTRPTMRFVAIKTVEQQSLLSLHRARDLLVRQRTQLINGLRGLVAEFGIYIPRGLARVIGFAEDITLGEVLDLPDIANEVIRNLCEQLMALHKRVRWYEERLKQVAKEDARVRLLRTIPGVGAVTASAIIASIGDGHQFKNGREFAAWLGLTPANKSSGGKEKLGRITKMGDQYLRQLLVVGMTSLVRQTRSHPERASKWLRSLLERKPARVATVAMANKTARIVWAVLTRDEPYSPRSTT

SEQ ID NO: 176380 - protein, 464 aa, unidentified
MIDDRRLVGIDLGIASDHTVRVLDGRGGEVCRRRARPTVESLAAVETAALAGVAPGTRLEVVIEPTGPAWLPIAVFFTARGHQVFRVSSAKAADLRRFLSRHAKSNGIDADTLARLPLLAPASLHPLELATTAETAALDRRVRACDRLTQQGALHQRRIKDLVRQLMPVTPLTGELTKTDLAVLGRWPDPRALLGAGRARLLTVITTVSHGHQGLDRAEQWRAAAAAAVELYAGHPAMAWADLAAEVATEVALLAAARAELAGHAAARAEAYRFTDPARLAASLPGLAEVGAPTVTAIVGRAGRFRTGRQFRSFTGLAPRASETGQTDRKGQPMSKAGNRLLRTTLIRAADNARRQDPQLAKIYWVQMVERGAEHLKACCVVAAHLAERLHAVLVRGMPYVVCDTDGTPVDPATARQIIATHWTVPCEVRARRRSRKPLRPVPDSKAGKALSTSTQDEKRRSPI

SEQ ID NO: 176381 - protein, 368 aa, unidentified
MQETTTAFVGLDAHAESTAIGVAEAGRAVPRFVGTVGPKFTELSKTLAKLGDPCKLLIVYEAGPCGYALARELKRTGYRCEVVAPSKVPRRPGDRVKTDRRDALTLAGLARAGELTFVVVPDERDEAIRDLSRARIDAVRARLKARQPLKALLLRHNRRYSGKTSWNAAHERYLAAVSFDHRAQNVAFVEYRQAVSEGQARVERVSEALAQELESWRMRPLVRALMTLRGVDQLVAMTLVAELGELKRFAHARELMGYLGLVPSEHTSGEKRRLGAITKTGNSHARRVLVEAAWNYRFPPRISVPLQKRQEQQPAEIRTIAWRAQLRLNHRYRQLTARHLQHNKICVAIARELAGFVWSIGQQLTIPT

SEQ ID NO: 176382 - protein, 400 aa, unidentified
MLSIGIDVSKGKSTVCGMKPGGEIVYAPFEVQHTREGMLELVSLLRSSCEEVRAVLESTGSYHCPVVAALLENGIFVSVVNSLRMKRFCSQSIRKVKTDRIDAMQIALYGLAYWQELQPTKLPEDIYRELQLLARQYYQMTSLLIKAKVDFNAICDQVLPGMQELMSDHAGRHKLSDFVLRYRHTTRILEMGETRFRKDYCKWAEKKGYRNCERMAALIFATAQNGIPVLPNAPSTQIVITEAIRVLHTVEASRDAILTQMQAPAKTLPEYSLVREMPCIGDTLAPRLIAEIGDVRRFHSKRALIAYAGIDAPPYQSGKFCANNRHISKRGNRYLRKTGYEVMQSYVMHKPANDPIFTFIEKKRGEGKSGKLAMVAGLNKFLRVYYGKVTELYRSLPAIE

SEQ ID NO: 176383 - protein, 420 aa, unidentified
MKKSSSERHGLPVIHERAAGIDIGSRFHVVAVPADITEEPVQTFKAFTADVERMADWLGDLGVTTVAMESTGVYWIPVYEILESHGLHLVLANARDARAVPGRKTDVNDAQWIQRLHACGLLRASFHPDREIAALRSYLRLRERHLDYAAAHIQHMQKALTHMNLQLQHVAADITGATGMRIIRAIVAGERNAATLATLRDTRCKSSVETIQSALVGNYQPEHVFALAQALAMYDAYQAQLEVCDHQIAQSLQRLSRKRPSPSEPLPKPRHRARQPNALNFDVRALLYQLVGVDLTQIHGIGPYLALRLVAECGTDLSRWRTAHHFTSWLTLAPGCRISGGKVLSAHTRKTKNRVTAHLRLAAVTIGRTNTALGAFYRRLSARIGKAKAVTATARKIAILFYNAMRFGMAYQDPGADHYV

SEQ ID NO: 176384 - protein, 399 aa, unidentified
MRQYFVGIDVSKRCHTAAVVDEDGQLRLKDFDFTDDATGYDSLLGALARLPEAGDLHACLEATGNYAHRLAAFLRAQPGFTVSVVNARSSHHFAQVLMARTKTDRVDAVVLARYARALRPRATVAARQEALARLTRSRHTLQLSLIAQVNLLRNLLERVNPGVERGFYRLDCGGALAVLERYPTGSMLARARPEKVAQLKINKRLVGKVRADRLVASARSIPGEQGTATDAVLVRQLVAAIRQLQRSLAALEQTIAEQVQGHLLFTIEGLGPNTVPVILAELPVDQLDTDTQAIAFAGLNPRLRQSGRFAGKVKLSKCGPAALRHALYLAAVSVRNYNPVLRQYYLRKLAEGKRPKTAIIACMSKLLRIIFAVLKTGRPFDSDYETNRTRARTLAPQAA

SEQ ID NO: 176385 - protein, 335 aa, unidentified
MVSPIKYSVGTDVSKSDVYVAILLQTNDLKTVVKGTRKFANTPDGFKQFEHWIHSHKKFDIPVHITMEATGNYHENLAFYFDNQCFIVNVVLPNKAKKYFQSLGNKSKNDKIDARALAQMGAEQPLMQWKPFSESIYALRSLTRYCEQLSAHRTMCKNQFEALSAGMYQVEDVKIQLLELIKTVEKQIFETKKKIETTAKQDKKIWDRMEKILLVKGLGIYSLATIIAETNGFELFNNERQLCSYAGYDIIEKQSGKRNGKTRISKKGNSHIRRILHLPALNVVKYGEKKFVQIYERIMNRHSKKMVAYVAIQRKLLALIYVLWKKNEAYDANYQ

SEQ ID NO: 176386 - protein, 436 aa, unidentified
MRGCRCSMIMGFTKPIEHFILQRKKVITMNTLYVGIDVSSKSNVVYLMLPNGDKHSNFSVANSHEGSTQLVKRILSALTSHSLDTVLIGLEATSVYGDNLVYFLREDATLAPFNRKIHVLNPKQVKKFHDAYNDLPKNDYVDSFVIADCLRFGRINKEVYLGDYRYKALQNLTRARFFAVQNLIKEKQRFMNVLFKKYSTMTQEKVFSDTFSTTALAVYDEFDSAEALANMDLHELTDFIIEKGKNRFPDPDAVAKAIQKAARSSYRLPKTVNDSVNQVLSISITSMKALESQIKEFDKAIKAQMELLPNVLISIPGIGPVYSAGIMAEIGDINRFNSQAALAKYAGLAWKQHQSGSFEAEVTRLIPSGNRFLKYYLCEAAFSLVRCDKEYSDFYHLKYKEVNRCQHKRALALTARKFVRLVFRLLKDNRLYVPAK

SEQ ID NO: 176387 - protein, 447 aa, unidentified
MAGQLQDTAPRTWVAIDIAKRSHVALVEFSDGKRRHYRVQRGLPEVDRFVAFLHDQEAPVRVGFEPTSNYHRTLAYRLNQDGFELRPISSVASARYREAMFNSWDKNDPKDAAVILALLKQGLTQRYYDPLEAGIHDIQEISKTYHQIVLGRMRVQHSLPTHYLPHYFPKMDRYCHTARGEWFIQFLLQFPVPASICTLAQKAFIKQAWTVVGRKVNKRAVLEELYQLAHRSAALPIKEGAPAVEMFRVQLRRYLDLCAERSHMEELAHSLLADDPDYERLRTVPGIGPILTLTIMAEAGDLRRFHHHRQFLKYCGLDLAKSQSGATRGLNQLSKRGNARLRCGFWFAGRVAVRMRENSFRAKYERYIRTDPKNPDRRRKALTAVAAKMARRLNWAPSESLSPTVGLDSAVSTLSESTVWTRTACSSIKGSTSSFMICTAVSGSLPL

SEQ ID NO: 176388 - protein, 432 aa, unidentified
MERIRANAAGIDIGARKVFVSIEGQEVKCFFTFTEDFEKLRDYLIEFAIVTVAMEATGIYWNVLYDILEEAGLDVWLVDGSQTKQVPGRKTDVKDCQWIQQLHSYGLLNRCFVAESDIKELRIYQRLREDHIRSAAMHINHMQKALIEMNIRLPEVLNQIHGASGLAIIEAILKGERDKEKLLSLCNARIIKNKKDEVLKSLNGRYTKSGLFALKQALDSYNFYQIQIKQCDAMLGEVLKRIGKGKSDQTTSSERKLIRHHKPDIDNLGITMLKIFDGKDATTLSGITDYTWMRLLSESGTDLSRWETEKHYTSWLGLAPGQHTSGKMKKNKRKSGRPKAGQIFREVAQSLLSSKHIALGAFGRRLRSRKGSPVAIKAVARKLAIMYWRIMVKGTGFVEKGIQNYEDQLMAQKQRSLLRLAKELKMQVVNYV

SEQ ID NO: 176389 - protein, 312 aa, unidentified
MEVKFAGIDVSKAALDLDCLPPRAPRQFGNDEEGIAALVELLKGSGVERIVLEATGGYETNLAAALAAAGLPVVVINPKRVRDFAKASGVFAKTDRIDAHVLARFGEMIAPPVRALPDEAQRELTELLDRRMQLVVMRAQEKARLTTVLPVARRDIKEHIAWLDKRITKFEGDLSQRLRNSEVWKEKVELLDSVPGVGKVTIFTLLARLPELGRLNRGQVAALVGVAPFNDDSGKRRGQRFIQGGRCDVRCVLYMAALTAKRHNPAIKQFFERLIAAGKPFKVAMTACMRKLLTIINVIMKTQQPWTNLITA

SEQ ID NO: 176390 - protein, 324 aa, unidentified
MLPTLGIDISKDSFHLELSINDKLRHRKFANRKEGFGELCVWLAKHKATQVHACLEATGPYSEALALYLHQQGHTVSIVNPVQIKAFGQSELLRNKDDRPDAGLIRRFCEKQRPAPWRPPPMHLRELQALTRHLENLIETRQQQVNRLETTNTKQVAKSLRKLVTHLDAEIERTEQQIDDLVDRHPDLKQQSELLESIPGVGKRTAAKLLAEIPNITQYKSARQVAAYAGLTPRNNRSGTIRGKTRLSKTGNARVRKALFFPAIVAKRHNPIVRAFCERLSRNGKNKMQVVGAAMRKLIHIAFGVLKSGRMFDPNHELLINQAC

SEQ ID NO: 176391 - protein, 384 aa, unidentified
MQKPNDLNQSGIVLKQDSTLIAVIEMSLRSWLVAGIVPGVERQPLKKLAVDESALLKLLNRWREEAEKAGRRIERITVAFEAGRDGFWLARWLRARGIEAHIIHASSVAVSREHRRAKTDRLDTELLKRAFLGWLRGERDHCKMVAIPTTKDEDAKRPNRERQSLVGEQTRIVNRMKAALIRLGIRGFNPKLKRAAGRLENLRTPEGEPIPPNTLAELHRDMERRRLVSDQIRQIEEARLERMEQAPGDGPHAMVRLIARVIGVGIETADMLVHEVLSRKLRDRRAVARYAGLTGAPDESGSKRREKGLAKAGNARVRGGMIQLAWRFLLFQKDSALAQWYRTRTEGGRNRKTIIVALARKLLIALWRLVTTGEVPAGVVLRAA

SEQ ID NO: 176392 - protein, 338 aa, unidentified
MNKITTIGLDLAKDVFHAVCCDARGKIVSKRMLKRSQILEYFGNRERCLVGMEACASAHHWGRELEALGHKVKLIPAQYVKAFVRGNKNDYNDALAIAEAVVRPEMRFVTIKTPAQQDVQALHRLRKGCVGMRAALCNQIRGLVGEYGLVAPKGVAALRRRIPEWLEDGGNGLSDLFRRLLSESYVRLQELDTHIAFYAKEVEHQSKQDEACQRLQTIPGFGPIVSSVFHSQIGNGEAYRRGRDASAALGLVPRQHSSGGKDTLLGISKRGDSYLRSLLVHGARAVVSRAEHKDDRLSLWINKIREKRGFNKAVVALANKMARIGWAVLANKTVYQAA

SEQ ID NO: 176393 - protein, 365 aa, unidentified
MDTHKKEHTVALHYPGHEEIVRFTVRNTAREITKMTKKVIKQAPGAVEFCYEAGVCGFVLKRRIEAHGCHCAVIAPSLIPRKPGDRIKTDRRDALKLMTLFQAGLLTEVHAPDPQQEAARELTRCRQAAQENLKRVRHQLLKFLTRHGYLYSDGSHWTGKHLKWLRALEFEETLLQDVFDNYFTEMQHCIQRLSSLDNQVETLAKSESYQEIVGLLRCFHGIDTLSAITIITEIFDFGRFSSPGELMSYLGLTCSEFSSGEKQRRGPITRAGNKRVRRILVEVSWHYRHPCNISKALRERRKDQPQWVIDIADRAGQRLRKRYRHLTHCGKMPCKVTVAIARELAGFIWSVFKEYEARKHVKKAA

SEQ ID NO: 176394 - protein, 387 aa, unidentified
MVQVNDLSRSLAAFDPISTLVVVVEMSKATWLVSSVVPGVERQPLKKLEPDATAVLRLIERWRNEAVRVGRPISRIALAYEAGRDGFWLARWLIARGIEAHVIHSASVAVSRERKRAKTDRLDAAMLMRVFLGWLRGERGHCGMVAIPTMEEEDARRPNRERESLVKERSRIINRMKSALARLGIRGFKPHLRKAPERLAGLRTAEGTGLPANIIEEFRRDMARLALVREQISSIEKTRAERLERAPDTGPHAMVRLLARVIGIGIETADMLVREILSRKLRDRRALARYAGLTGSPDESGLKSREKGLAKAGNARVRRGLIQLAWRFLMFQKDSALARWYRTRTEGPSGARKTTMIVALARKLLIALWRLVTTGEVPDGVELRTAA

SEQ ID NO: 176395 - protein, 391 aa, unidentified
MDQAWAGVDASKEFHWAHVLDASGTELLSRRVENDEADISRLIDDALSLAEEVLWAVDQPGGGAALLLALLWERDQKVLYVPGLCVDRARQTYRGESKTDAQDARVIAEQSRMRSDLGELAPGEQELSELRLLLGRRRDLITDRSRVIARLRETLLSLFPALERALDVNSKGPLILLTHYQTPAKLRGAGHKRVAAYLRNRSVKGSDKVAHKALSAAGSQSVALPAQEVASRIVAELAAEVLTLKQRIESIDEEISQRLFARPEARILASLPGMGPILGTEFLVCVGDIRAFESADRLAAYAGLVPAARDSGKRVGNCRRMRGGNKTLKRIFYQSAFASLRGCAESRAFYDGKRAEGKRHTQAVVALARRRVNVVWAMLRDGTEFEERTAA

SEQ ID NO: 176396 - protein, 401 aa, unidentified
MNAVGIDVSKGKSMVCVMRPFGEVVLEPFEVLHTAQNLNDLAGKLKALDGETRVVLEATGNYHKPVAFVLHDAGLFVSVVNPVLIHDYDNNSLRRVKTDRKDSVKIANYTLDKWTRLRQYLPEDDTRLALKNCYRQYQQAVAIRTMLKNNLISSLDLTFPDANKLFTSPAKNNGCEKWVDFIGEFWHSGCVSSLSADAFAKKYLKWCQKHRYNFTRSKSDEIYSCAVNATSLPKSPTSKLLIQQQVAQLKAVSKSVAAFQQEMLRLSQQLPEFDTVMEMYGVGPSLGPQLMAEIGDVRRFSSKKSLIAFAGIEPQPNDSGKIVGNDKGISKVGSAVLRRTLFLIMTVILQTQPQDEPVFQFMNKKRSEGKPYKVYMMASANKFLRIYYARVKAVMDSECSQ

SEQ ID NO: 176397 - protein, 424 aa, unidentified
MKVTYQTCCGVDVHKSFLVATIIKTSGGIEPSYQKKRFSTFNNSILEFKHWLLDNNCRDVCMESTGKYWIPVFNLLEDEINVTIANPKWVKAVKGNKDDTKDSKWIGDLFRLGLVRGSYVPCKTIRILREYTRYRYKLISCRSSEKNRYQNALTVCNVALDSVVSDIFGKSSTSIIDYLLEQSGHSINHEEIASKLLRRLKSKTDAVIESIEGYQMTDAQKYRMRLVRAHMDYITAEITDIDSMIENLISSDSDYENTVQLLCTIPGVKHDSAITIISEIGIDMTQFCTSKRLCCWAGLTPGSNESGGKKKSVRITRAGVYLKPALVQCAHAAVKSDQSPYYKKKYESLVKRRGKKRAIIAIARMILTAIFQMLSTGEAWNPSDLYKIDMPEVLLEKQKQKAIKQAQKLLIREGLLPPLEPLAS

SEQ ID NO: 176398 - protein, 328 aa, unidentified
MQGKVSSERTAMATVYVGIDVCKEWLDIHLHPLGRSFRVTNDTAGLRRLKRELDALDQMPPSALHIVMEATGKWHRAVQRSLHADGFYVSVVDPLRARLFAKACGFLAKTDRLDARLLAIMGEALKPAQTPPQDQALEALQELVNARSAANGERTALSNRMKTAVTAFLRKELTRRLAALDTHIARLDAEIERSIGAEPEMRRRLDILISIPGIGAVTAASLIAGLCELGACSGKQAAMLAGLAPLACESGERAGHRAIRGGRPAPRNAIYMAALSASRHNPDLAHFAERLKKAGQPNKVVLVAVMRKLIVLANTLITKNRIWTPNPP

SEQ ID NO: 176399 - protein, 345 aa, unidentified
MMNNAKQTKNTKQTKTNVANKPNEPIYCGIDVGKKVFVVSLSCKDKTKTFSNTGGDIKQAMAYLNTNAGTNLALVVLESTGGLEIPLAKALYQSGFNVVIANPNKTSQFAKSYSNAKTDNQDAKMLALYAKFLSLDESKLTHLLYVPPSEEQERLEALVVRRHQLVAMRVQEKNRIWQIHQSQLESVKQVIAYLDEQIAKLEQDIDTLSKHFDDTTKKFKDIKGIGGVTVATLMSMLPELGTLSNKEIASLVGVAPHPKESGTLKYKSHCKGGRQSVRNVLYNATNVARQYEPKFKQFYERLIGKGKPFKVAINACMRKLLIVINAIVRNDSVWQADYHLNLSVK

SEQ ID NO: 176400 - protein, 408 aa, unidentified
MDVQIERCAGLDVHQATVVATVRYPGERGRASVTETFGTMAADLAALRDWLEAYGVTHVALESTGVYWKPIYYMLEDRFTLLLINMQTLKHVPGRKTDVKDSEWLAQLLECGLLKASFVPPPPIRELRDLTRYRLQQVRERAREVNRLCKVLEDSNLKLTSVLTDVMGVSGRAMLRALVQGTTDPAVLAELARGRLRTKLPELRRALAGRFRRHHAFLVEQILAKIDYLDEALARLNAEIDERLVPFEPVLTRLDTIPGVHRTVAISIIAETGGDMPRFATAGHLCSWAALCPGQNESAGKRRSGKTRDGNQYLRGQLIQGALGAIHSQGTALQARYHRIKRHRGHKKAVVAVAHQMLEIAYYVMRDGVTYQELGADYFDRRHAERAVRRHVRQLEALGFTVTIEKAA

SEQ ID NO: 176401 - protein, 360 aa, unidentified
MAKAKTLVGLDVHATRIVAAVLDAETGQLQTFGMSGESTTAAAFCAGLPKPVRVAYEAGPTGYGLARELAKRGIECIVAAPSKIPRASGDRVKTDRRDAEHLVRLLLAGKLHPVRVPGDEEEALRDLVRAREAVRVDLMRSRHRLSKLLLRHGIRFDDGQAWTDRHRDWLASVTLEWPAAQATLLDAQGAIDALAHRRGVLEREIVAMLPACPWTVQVGRLRCLRGVDTLTAVGLCAEVGDFERFARAEQLMSYIGLVPSESTTGQQRRLGSITKTGSGHARRLLVEAAWHYRKRPTIGKALTDRQHDQPPEAIAVAWSAQRRLHRTWTRLEKRAKRRTIIAVAAARELAGFAWAITQIE

SEQ ID NO: 176402 - protein, 398 aa, unidentified
MLSIGIDVSKGKSTVCGMKPGGEIVYTPFEVQHTREGMSELVSLLRGSGEEVRVVLESTGSYHCPVVAALLENGIFVSVVNSLRMKRFCSQSIRRVKTDQIDAMQIALYGLAYWQELQPTRLPENTYRELQLLARQYYQMTSLLIKAKVDFNALCDQVLPGMQELMSDHAGRHKLSDFVLRYHHTAHILKMGETRFRKDYCKWAEKKGYRNCERMAVLIFATAQNGIPVLPNAPSTQIVITEAIRVLHTVEASRDAILTQMQALAKTLPEYSLVREMPCIGDTLAPRLIAEIGDVRRFHSKRALIAYAGIDAPPYQSGKFSANNRHISKRGNRYLRKTGYEVMQSYVMHKPANDPIFTFIEKKRSEGKSGKLAMVAGLNKFLRVYYGKVTELYRSLPQ

SEQ ID NO: 176403 - protein, 323 aa, unidentified
MSQPNLQCMGIDVAKLSLDIATTDTIEPFTVGNDEDGFAVITDKLKHTKINLILMEATGGLEAAIACKLQSEGYDVVVINPRQARDFARSMGYLAKTDKLDAAMLAQLALVIDRHPDRSRYIRHLPDEARAVLAAMVVRRRQLNHMLVAERNRLYPSHPQSRKSIDNIIDALQNELDRINEQMKQHMTAFFQEQARLIGSVKGVGDITVASLIAELPEQGKLNRREISALTGVAPLNRDSGKMRGKWTTFGGRAGVRATLNMAALVATQFNPAIKLFYQRLLAAGKPKKLALVACMRKLITILNTMLRKGEEWNASFQSQVIS

SEQ ID NO: 176404 - protein, 323 aa, unidentified
MNTMDVLGIDIAKKTFDVALLRNDKFRNKKFPNNPEGFKQLDAWLAKQGVIRVHACLEATGSYSEALAVHLHQASHIVSLVNPARIKAFGQAELQRNKTDRADAMLIARFCLKHNPAPWTPAPPEIRELQALVRHLDDLIGTRTQLNNRLTDGQRIESVLESLRSVIKALNAEIKLIRKKIREHLNRHPDLKADHDLLVTITGIGKQTATLLLAEIQHLRHYKHARQAAAYAGLSPMLFDSGTSLKHSRLSKTGNARVRKALFMPAIVASRHNPVLREFSERLSKRGKSKMVIIGAVMRKLLHLAFGVLKTRKPFDPNHALGA

SEQ ID NO: 176405 - protein, 311 aa, unidentified
MEFFCGLDVAMDETAVCVVDDHGAVHLEATAVTDPDALFAVLKPFLPRLRRVGHEAGSLSPWLHPELKKLGLPAVCLETQHVRAALSAQRNKTDKTDALGIAHIMRTGWFRQAHIKSQSCYRTKLLLTHRRNLKAKFLDLENAIRHSLKAFGIRLGKVGRGAFEQAVRTAVAEDPLSSELMDAMLTARAALWGQYCRLHNLVVKMVARSELCRRFMAIPGVGPVTALSFMTAIDDPSRFRRSRDVAAYFGLTSRRWQSGTSIDVQGRISKAGDADVRRSLYEAASGLMTRFKGMDKVNSWGPGDRQTLLSP

SEQ ID NO: 176406 - protein, 402 aa, unidentified
MSECKRKIAKIETATALAAVDAAGQFDRYGLFVGMDVHKETIAVALAWPGRSEPAYRGEVANRPREVSRLIKRLSEQAEGALLLFCYEAGPCGYGLYRQIVESGHDCQVVAPSLIPKKAGERIKTDRRDALKLARALRAGDLSAVWVPNEEQEAIRDLTRAREDIKLIERTARQRLGAFLLRHGWVYGGKSRWGQAHFRWLETVKFAHAVQQIVLQEYIEAVLEAQRRIEALEGQMRAALQSWSLGPVAEGLMALRGVSLITAMTTLAELGDITRFDSPRQLMAYLGLVPSEHSSGGTRRQGGITRSGNGHVRRVLVESAWNHRFPARKTRGIQRRAEQTSPAVQAIAWQAQKRLCGRYQGLLRAGKDSKQVTTAVARELAGFIWAIACEVTGKPHASKALA

SEQ ID NO: 176407 - protein, 344 aa, unidentified
MEHYAGIDVSLECSSVCVVDATGWVVREAKIASEPEALVGWFRQLDVDLARIGLEAGPLSQWLYAGMRDAGLAVELLETRHVRDAFKAMPVKTDRKDARGIAQLMRLGWFRSVHCKSLPAQETRALLTARKLVQSKKHDTEMSLRGILRGFGLKVGQTSQRTFASRVRELVAGHPTLQLVAEALLATRAALGEQLSKLEKRVRMLARSDPQVRRLMSTPGVGVIVALTYAAAIDEPTRFRSSKAVGAHFGLTPKKYQSGETDVTGRISKIGDASVRTALYEAANVILTRPVKGSSLKSWAMRLAARAGMRKAKVALARKLAVVLHRMLVDGTTFSAERAAATRA

SEQ ID NO: 176408 - protein, 397 aa, unidentified
MFYLGIDIAKHKHYASIIDQTGKPITKPFPFQNHKEGGQTLLNQIYQYIESPTEILIGMEATGHYWLAVYSFLLDHGFSVIVLNPIQTNAWRKGTEIRKRKTDAIDATMIADIIRFGRFVETPLVDEKMFALKQMSRFRNALVSNMSDLKRKALVVLDQTFPEYQSIFSDVFGKTSSQILLEYASPSDYEQISIDDLTQIIEQTSRNRLGKKTANKLMELASNSFGVTFCKNAFSFQLKMLMEQIRFIEDQIKECEEEMSQLLIDLDTPIMTVPGVGPILGATILSEIGDIHRFDKPSKLVAYAGIDASVSQSGQFESSGMSISKRGSSHLRRALFQAAITAHKHDPVLKAFYEKKRKQGKHYYVCIGAVARKLCYIIYAILKNNKPYEIPQYSKEV

SEQ ID NO: 176409 - protein, 398 aa, unidentified
MLSIGIDVSKGKSTVCGMKPGGEIVYAPFEVQHTREGMSELVSLLRGSGEEVRVVLESTGSYHCPVVAALLENGIFVSVVNSLRMKRFCSQSIRRVKTDQIDAMQIALYGLAYWQELQPTRLPENTYRELQLLARQYYQMTSLLIKAKVDFNALCDQVLPGMQELMSDHAGRHKLSDFVLRYHHTAHILKMGETRFRKDYCKWAEKKGYRNCERMAALIFATAQNGIPVLPDAPSTQIVITEAIRVLHTVEASRDAILTQMQALAKTLPEYSLVREMPCIGDTLAPRLIAEIGDVRRFHSKRALIAYAGIDAPPYQSGKFCANNRHISKRGNRYLRKTGYEVMQSYVMHKPANDPIFTFIEKKRSEGKSGKLAMVAGLNKFLRVYYGKVTELYRSLPQ

SEQ ID NO: 176410 - protein, 348 aa, unidentified
MIVLGADSHKRSHTIAAVSAATGELLGERTVQVGATGFAALVGWARELGTERVWALEDCRHVSGSFERFLIARGERVLRVTTKLMADSRRRARARGKSDSIDALAVARAALREGLDALPAAQLGGPELDLRLLVDHRESLARQRVALNNTLQWHLHDLWPELRLPGSSLFHGTWGPRVARRLARAEQTTRVRIARDQLRRIRELTAALKTLEAEIAQLVAHIAPQLLAEPGLGPLTAAKLVGEIAGADRFATDAKLARAAGIAPIPVSSGKTNRHRLDRGGNRQINATIHRIAITRLRCHPETQAYIARKRAEGKNTKEAIRCLKRHLTRRLWHLLQPPHPETERSIS

SEQ ID NO: 176411 - protein, 485 aa, unidentified
MAKRKESTFERLQRGQPLNRRERREVANGLNSPDPGWEIVHPHAAGIDIGNESHYVAVALGEDEHPTREFGSWTADLERMADWLQACGIQSVVMQSTGVYWMAVYDVLQRRGFDVHLVDARGTRNLPGRKSDVQECQWLLKLHTYGLRRCFLPGEEIRRVRTVWRLRDQHVKEAGRAVQHMQKALTEMNVQVHNTISDLSGVTGQAIVRAILEGERDAARLAALRDSRIQASEPELVQSLRGNWQEDALFELRQAVEAYDFYRQQMKQCDAQLEQYLAALPSREPVAAPPTAETPEASRKRPVRRGFRKPRKAPGNQPALDLRTELQRILGVDATSIDGIEVMTVQTVVAEVGADLSAWKTERHWASWLNLAPKREVSGGRVIRHTREHRTNRVGNAFRMAAQSLIRSESYLGARFRYLRAKLGGIKAVKAMARTLACLYYRLVTRGQAWVDRGAAEFERRRQEREFAILQRKAGDFAMKLVPAV

SEQ ID NO: 176412 - protein, 339 aa, unidentified
MVYGAIDLHTRFSEVRIIDATGEPVRHRRVHTTRERLVEVFGGLGPMRILVEASTESEWVAQTLEAVGHEVIVADPNYGPMYGTLRRRVKTDRRDAVALAEANRRGWYRPTHRVSREQRTMRQRLGIRRHLVRMRSGLIVRVRAVLRQEGLRIGSGTSATFSARVSRLTLPADVREVVTPLLEAATAVGRLIAGEDRALTHVANRDPIVHRLQTVPGVGPIVALTYRATLDNVARFPTASHASSAVGLVPREDSSAERRLRGHITKVGSREARSMLIQAAWSCWRSRTIRTTPLRGWADALAARRGVRVAVVGLARRLSRILFAIWRDATTFYGPVPVL

SEQ ID NO: 176413 - protein, 368 aa, unidentified
MEIVYPRSCGVDVHKSFIVAVICISESVKPKYIKKRFSTFNNQLIQFRDWLIENNCQNVCMESTGKYYIPVYNALEGHISNVVVANPKWVKAIKGEKDDNKDAKWIADLFKFGIVRSSYIPEKDIRILREFTRYQYKLVNMRSSEKNRFQNALTTGNCKLDIVFSDIFGKSASAIVDTILSNNPYTSEDILSKVHAGCKASHEDILSAVEGIQLNQFQKARIRIVQKHMEYLDSLLDEIQHHIDLMVANYEEYIQLLCTIPGINRKSAITIVSEIGTDMSQWSSHRKLAAWAGLAPGCNESAGKKKSVKISKAGVYLKPCLVQVAHAAVKDKNCDYYADKFNKISKRRGKKRAIMRLREKYLLLSITF

SEQ ID NO: 176414 - protein, 416 aa, unidentified
MNAVGIDVSSRKSTVAVLRPLGEVVCLPFDVTHDIAGLASLAEKLKAIDGETRVVMEHTGRYYEAVAKALHEAGFFVCAVNPLLIKEYGANSLRRVKTDKADAVKIARYALDNWADLRDFTPMDAIRYDLKTLNRQFQLASKQRKASANNLIALLEQSFPGIRKCFDSPVRSDGTQKWVDFAHSFWHVDCVRKQPFAAFCERYRKWCKRHAYFFKLSNAEEVHALAKRAVVLTPKSKVVKVLVQEAANQLISISRSVEVYRAEMDRLAAMLPEYPVVMAMYGVGKSYGPQLMAEIVDVRRFERKQALVAFAGIDPMPNQSGDKNVRSNKSSKRGSPYLRKTLFNVIRTYLQCAPQDEPVFQFLNRKRAEGKPFYVYMLAAANKFLRRYYAKLRDYFASLDTLQPVAPIPTILKATL

SEQ ID NO: 176415 - protein, 340 aa, unidentified
MDEYIGLDVSLKETAISVRRDGKRVWRGKCASEPAVLAQLIRDRAPNAKRIVFETGPLSVWFYHALTAQGLPVICIDARHAKAALDMAPNKTDANDADGLAHLAEVGFYREVRVKQYDSMLTRTLVAARAQLIKAGVEFSNHIRGVMKTFGLVIPKGAGRVFEANVRDLLTTNAGLARIVLPMLDAWRALRSQAANLDRQLVASARTNPASQLLMSIPGVGAINAASFAAAIEVPGNFSNARAVGAWLGLTTRRYQSGEVDYDGHISRRGDRYLRGLLYEAATVILTRSLADSALRQWGLALRERVGFKRAAVAVARKLAVIMVTMLKTGEPFRRSIAAA

SEQ ID NO: 176416 - protein, 344 aa, unidentified
MATYYIGMDVHCNNTELAVEKGRKIVERYSVPTTIPAISEVLESLSGKKHLAMEEGPMAGWLYRNLFDKVDRLIVSDPRRNRLIASEGDSDDKIDSAKLATLLRGGYLRAVHHSLDLDQWCLKRWVGLYHDRIKDATRAINKIRAYGRMHGIKTPRVVIRDVVKRRQWLASLDDRNAAALLEVLCIGYDAAAQQCRRAKQQLLGRSRHYPIVNWWQELAGVGPVRAATMFAYLDTPWRFKRKNQLWKYCGLGLVHNSSGKDSRGRYKTGQLRLAWHANKRLKNAVMGAAISIINGKDGVFKDYYEKLINDGLTRSNARHAVARKLLTVMWGMWKRSCRFDESLV

SEQ ID NO: 176417 - protein, 369 aa, unidentified
MDGPRRHQACQNEVVLDLRQRRPSKEQITRIGIDTSKHIFQLRGVTAAEEPALRKELRRKGMVTFFQQLAPTVIAIEACGASHHWARLLQSFGHSVKLIAPQLVKPYVKRGKNDAADAEALCEAASRPTMRFVPVKTAEQQAALMLVGVRDRLIRNRTQLANAIRGYAAEFGLTAAKGKAHLKPLLARLQGDESLPALARELFAAQAREYAQLREQIDEIDAKLMAWHRADECSQRLTKIPGVGPIGAVLLSMKTPEPELFRSGRQFAAWIGLTPRDHSTAGKIRLGVITRAGDEGLRSVLVVGATAVIQHVRRGGRSSPWLTELLKRKPPKLAAVALANKMALIAWKRMITGDNFAETSMPAKLAGTA

SEQ ID NO: 176418 - protein, 337 aa, unidentified
MEQYVGLDVSQETTSIAVRQDGRRVWRGKCPTDPKALSEVIRGQAPHAVRVVFETGPLATWLYHALQAENLPVVCIDARHAKAALDMAPNKTDANDADGLAQIAEIGFYREVRVKGYGPMLTRTLVGARSQLLRISVQLSNQIRGIMKTFGLIVPKGAGRIFERNARALLETNEAVARVVLPLLETWRVVRARAAELDRQLIAVARTGPSYRLLMTIPGVGAITAVSFVAAVGVPENFKRSRAVGAWLGLTTRRYQSGETDYDGHISRRGDRHLRALVYEAAVAVLTRARTDCALRSWGLKLKAKVGFKRAAIAVARKLSVIMHTMLKTGAAFAAAA

SEQ ID NO: 176419 - protein, 344 aa, unidentified
MTYYAALDVSLRSVNICVIDDQGEIKAETKLDSEVTDIIAYLDSLEMEIASVGLEAGTLCQYLTYGLQSAGFEVVCMEARQVKAALSAMRNKTDKNDARGIAQLLRTGWYSKVHIKSMASHRIRVLLSSRKAVLCKCIDLEQEIRGLFKVFGIKLPPKLGHGAFDAAVRSIITTDATLSFALLPLLEARLVLYHCFRELDNRTRNMAHADPVCQRLMSAPGVGFITALTFKAGVDNPARFKRSRTVAAHFGLTPRRFQSGEIDIDGHISRCGDRNVRSTLYTAANALMTRSSRWSSLKVWGMQKAKTRGHRRAVIAVARKLAVILHRMWVDETQFNWGMEDARS

SEQ ID NO: 176420 - protein, 400 aa, unidentified
MKTVLSVDVAKGKSMFMLMNSEGEIFIDSIELKHNLENFNKLKKQVETFEISDLTVFMESTGIYHLPVERYFKENGFNTLVINSLTTKNNYDTIRKTKTDKKDCFRLAKLFFVNEVEYHDLSKKDLYANLKAMTRQYFYLTQVNVSCKNRYKRLINICFPELETIFKSSRIYEETALNFIKVFPHAEIVKEKRIDALYNNLYKTNSRHDYYYKRLAHEIKEIASNSYPGIDKAHSDVQNLSNIAEMLQNNIKNINELKERMIETAKQSPYFKIINSFYGIGEVLTAELLGELGDITRFDNHKQLIAFCGLDPTIIQSGKSINVHGAISKRGDKYARWILFNISQMVVKLGHQYLEHPVYNYYLKKKAEGKHYYESLTACSTKILRMLYSMCKNNKQFLEK

SEQ ID NO: 176421 - protein, 394 aa, unidentified
MIYIGIDVAKDKHDCFITNSEGEVLFNAFTIPNNADGFHDLFQKISSLTNDFSNVKVGLEATGHYNYNLLGFLIDKGLPTFVINPLHTNLFRKSLSLRQTKTDKVDAHTIALMMMSGVNLQSYSNTSYHNEELKSLTRYRFDKVQERAKLKTSISRLVNILFPELEKLVPSLHMVSIYALLAEFPSSAQIASCHLTRLTNLLANASKGHYNKEKAIEIRNAAKHSIGSNMPAKSLELKHTIRLIQELTSEIDEIECFIKSIMDEIRSPILSIPGINYRMGAMIIAEIGDFNRFSSPDKILAYAGLSPSTYQSGQLDGCYSHMEKRGSRYLRYALFNATKFVCIWDNQFSAYLAKKRSEGKHYNVAISHAAKKLVRVIYQLEKSGQLSHLSLIHI

SEQ ID NO: 176422 - protein, 464 aa, unidentified
MGTCHGKKVAARCQAKEGLFEVINPAAAGIDVGAWEMWVCVPGENEQERVRKFGTDTMELEALAAWLLQRGVKTVALESTSVYWIPLFQVLENHGLDACLVNARHVKNVPGRRKTDRLDCRWLQKLHACGLLSASFRPTAEICRLRTCMRHRATLIQEQSAQIQRMQKAMRKMNVQLDAAVSDVTGVSGTRIMDAIVAGQHDPATLAQMADPRVRKSPEQIARCLQGDYRPEHLFVLRQALAAYRFFLEQIQDCDREVERYTSELEKAAGRADTALPAASAETRKRKAGNVPEYDVQTHLYRLAGVDLTRIPGIGELSAQGLISETGLDMSRWQTHKHFASWLDLCPSPKVSGGRVIGQGRRHASNRAAQIFRQAASSLKNSQSWLGSLYRRMRVRIGAAPAVKATAHKLALIYYHVLSTHTEYRQIEAQQYDQRLRERTICNLQRRARQMGMDLVPAEAPAVT

SEQ ID NO: 176423 - protein, 401 aa, unidentified
MVSDFRKGRYNLMKIFVGIDIAKLNHFAAAISSDGEILIEPFKFTNYADGFQLLVSKLESFDKNSIIIGLESTAHYGDNLVRYLVAEFYQVCVLNPIKTCQMRKNNVRKTKTDKVDTFVIAKTLMMQDDLRFITFFDLDMMDLKALGRFRQKTIKQRTRLKIQLTTYVDQVFPEIQYFFKSGLHQNAVYALLKEAPSPKEIASMHMTHLANLLKVNSHGHFTKEQAKELRVLAQKSVGANDSAISIQITQTIQQIELLDSQLEKIEAEMTDIMKFNDSVIMTIPGIGYINGGMILGEIGDIHRFSNPNKLLAFAGLDPSVYQSGNFQAKTTRMSKRGSRVLRYALVNAAWNVVRNNATFKAYYDAKRSEGRSHYNALGHCAGKLVRVIWKMLTDEVEFNLE

SEQ ID NO: 176424 - protein, 296 aa, unidentified
MGNVALRRVPNRSSGLSVLKRILSRYSVSLVLCESTGGYENLAVTYFQSLGYDVCVINPRQARDFARSMGRLAKTDRIDAQILCRLADVIDVSPERTRFVKPLTDERRQRLVSMVRRRRQLCDLMISERNRRAKTDSYGSESINTVLDFLTAEIARIDRDISAHVGSCFSDISSLLQSFTGIGPVTASTLLGELPELGKLNRRQITALVGVAPFNRDSGYMRGRRRISGGRSGVRNVLFMAVLSAVRFNPVLKAFFARLVAAGKPKKVALVACMRRMVCILNAMLRDGSRFEVAPG

SEQ ID NO: 176425 - protein, 396 aa, unidentified
MELQAPDGKVVSRARLPEGVSGVARLHAMVADAAGVLGCGPDELEVQVGIETDRGLWVAALLAAGYVVFAVNPLQAARYRDRLSVSGAKADRTDAHMLADMVRTDAHQLRTVAADSPQVEAIKVVTRAHKTLIWERTRAQQRLRFALRDYFPAALEAFADLHAPDVLELLGKAPDPASAARLTLGQISAALKRARRRNVADKAAAIQAALRSAQLTQPAPVVAAYAVTTRASVAVLTTLNEQIDAVAEAVQAHFLAHPAAEIVMSQPGLGPILGARVLAEFGDAPDRYASAKARKNFAGTSPVTRQSGKKKTVMARWVHNDRLIDALTAQAFAALTGSPGARAYYDTLRARGTGHRAALRQLANRLVGILHGCLKTGSLYDETTAWTQQAITDTAA

SEQ ID NO: 176426 - protein, 400 aa, unidentified
MISVGIDVSKGKSTVCILKPYGEIVASPFEVMHTESELKNLIQMIQRLDGEIRIVMEATGIYHLPMLSALQDQNFFVAVINPFEMKEYASRGLRRVKTDKQDSITIANYGIDNWYRLENHQGSDDVYSELKLLGRQYCHYMELHVKALLELTHMLDYTMPGVKKEFHSWNESNGKDKLSDFVERYWHFDNITAMTKEDFIEDYISWAAEKKYHQNQSKAATLYDLASDGIPTLPANTPSTKMLVLEAVRVLREIDSTLLKIITRMKELAKTLPEYETVRAMGGVGDVLAPKLIAEIGDIRRFHSGKALIAFAGIDAPPYESGQFVGTNRKISKRGSKLLRKIGYETMRVLKTHKAPDDDVVYRFILKKEAEGKSKRQAKIAGLNKFLRIYYARVSEVYKA

SEQ ID NO: 176427 - protein, 370 aa, unidentified
MAQGSRLFVGLDVHKETIAVAYVAEEREAEVVFLGTIGTRQCDIDKLSRKLQAKGKKLHFVYEAGPCGYWLYRYLTKKNLLCWVVAPSCIPKKASDRVKTDRRDAVQLARLLRSGDLTPVYVPAVEDEAIRDLVRARADALKDLKAAKVRLKAFLLRQDLRYAGRATGGPAHLRWLANVVCPTPAQQLVFQEYVRAVSEQTDRLQRVEAQLPALVQSWRWAPVVEAIQALRGVQFIAAVTLIAELGDLTRFENPRQLMSYLGLVPSEHTSGERRRQGAITKTGNSHARRVLVEGAWAYRYPAKVSRHLQLRLEKVPKAIQDISWKAQVRLCKRYRRLVARGKQVNQVVVAIAREMAAFVWAIAREVAAAH

SEQ ID NO: 176428 - protein, 345 aa, unidentified
MPIVGGLDIHRKQITFDYLDAATGEVKRGQIAPADRQHVRAWLARFAGRDEVAFAVEGCCGWRYVAEELAAAGIAAHLGEPADTAALRGRKRHAKTDKTDARHLRTLLAEGRLPECWIPPGHILEFRALLETYHDLRREHTAWVQRIHAVFFHQGAPPLGEGALRTEQGLAGLRAAAAAHLSPAGQQQVATAVDMLAAVEARMGPLRRQLRQAAAHLMGAKVLAARLYGVGPLTALALTCWLAGKDRFSASRKAVRFTGLDITVHSSDRKGPPGKLSRQGPPVLRWAVYEAGKTHARTAAPDHGYYATVADRKNTKRAALSEARKIVRQACHILTELGDDALTAA

SEQ ID NO: 176429 - protein, 368 aa, unidentified
MIVIGVDAHKRTHTLVALDAVTGVAQGETTVQATDDGALNALRFAAGIDQDRVWAVEDCRHVTARLERALLGAGERVIRVPPSLTGESRKATRTAGKSDPIDARAVALAAIREGIEHLPIAFLDEQAHEIRVLCDYRDQLINERVRLINRLRWHLVRIAPHLEAQLGPEALKGPRIRARLARQLGQLPASTELRVAKAQLRRINEITKEQKELFAELTTLIQAHAPQLLAQQSIGTVTAAVIIGRTAGAQRFRSEACFARHAGTAPIPASSGNTTRHRLHRGGDRQLNRAIHIIALGRMAWDPETRTYIQRRVSEGKTKREALRCLKRHIARQIWHLLYNLQPIAPALPQPPRQRVTVNAPGLMPCTR

SEQ ID NO: 176430 - protein, 341 aa, unidentified
MKQPLTKNCLGIDVSKPWFDVSLMPVIDHVKQPIITERFDNTTSGMSAFKSWLKTSGVSLDSNSLLVIENTGVYHRLLWSFCSKHNLPLHIGNAAHIKWSLGITRGKNDVIDSVRLCQYCCKQSDELKASPVLNPVFMKLKDLMSSRTRLVTQLHSTRNYMKELQCSHDKILLATLEKAHKAAIEGIKKSILQIEELINRIIQEDPVIYKNYLLIKSVPGIGHLTAVYIICCTNNFAVKVTGKQLASYAGVVPFEHSSGVSVKGRNRVHKMANKELKKMLHLCALTAIKYYPEFKDYFNRKKATGKNGMLVLNAIRNKLILRVVAVVNNQQPYVNNASIAA

SEQ ID NO: 176431 - protein, 408 aa, unidentified
MRVVGLDIHRVFAEAVMLDEGKVTRLGRVGMTREHLGSFARKLTHDDHVVIEATGNATAVAEVIGPHVGRVVIANPRQVRLIAEARIKTDVVDATVLARLYASGFLPEVWVPDQRTLALRRQVTRRNQIVRQRARLKTIIQSILHAHLVPPCPHADLLGAKGRAWLLGQALPPDEQDAVARHLREHDRLSEDLRVVEREIARDALADADTKRLMTVPGIDMVVATGLLAAIGPVERFAGPDKLVAYLGLNPSVRQSGEGRPRHGRITKQGRTHARTMLVEAAWQAVRGPGPLRAFYQRVARRRGNHIAAVAVARKLAVIVWHLLTRGEDYAWVRPALHAKKLRDLELRSGQPARRGQRGAAYAYNLTRTRLEEKRRAEQAETAYRRQTEGWSRRGRRAPTGAAREERP

SEQ ID NO: 176432 - protein, 419 aa, unidentified
MSTERRKVCGIDVHKKFLVATILDREGKSETRRISQNTESLLDLRNWIQSENCESVAFESTADYWRSLYLILENHVPVTVANAHHIKHVPGKKTDITDSHWIAQLELNNLIAPSRIFTGERYDLRTLTRSRELLVQSRTELKNKIHHLLDSTNIRLSSLLSDLFGKSGSIILKGLAQNKPLDEIIESLPKKMRGNADIISATIPASIPPVVLVLLQSYLKLVDDLDVEIKLLEGRIRESLANKSREFQIITSVPGIGFIGASTLIAEIGNVHDFDDADKLTKWAGLTPTVYQSANVTRTGSITKQGSRHIRWILVELAHIAIRSPGRIKSFFERLMPKKGYKKTIVAVARKMLRIVWHLLVHDELFVDDFPRSKQVKFPKLPKKIQDIGINKLIELLSKASEVIFRDCDKEIFRLGMSN

SEQ ID NO: 176433 - protein, 368 aa, unidentified
MLRFRLMVETRSALSGLKHQKEKRSMDYFAGLDVSVKETSVCIVDDTGRIVREVKVASEPEALLQVLTNPAYRFKRIGLEAGPLSQWLFSVLTEASLPVICVETRHMKAVLKAQINKTDRNDARGMAQMMRVGLYRPVHVKTLRSQKLRMLLTHRKLLQSKTIAIENDLRGTLRNFGLKVGMVGKVKFETRIKELIENVPDLAVLVEPLLIVRRVLREQIGILHRRLLAIVRDDDVCRRLMTIPGVGPVVALTYRATVDVPARFRNSKAVGAVFGLTPSQHQSGEIDRIGNISKCGDAMMRTMLFEAAQAMLMRSAKWSWLKAWAMKIARHRGMKKAIVALARRLAVIMHRIWVDGTEFRWTREVAAA

SEQ ID NO: 176434 - protein, 403 aa, unidentified
MNRNAVGIDVSKGKSMAAILRPYGEIVSSPFEIKHTSGNIQSLIQQIKSIEGESRIVMEHTGHYYKPLARELSLAGLFVTAINPKLIKDFGDNSLRKVKSDKADAVKIARYTLDSWTELKQYSLMDEIRNQLKTMNRQFGFYMKHKTAMKNNLIGILDQTYPGVNTYFDSPAREDGSQKWGDFAAAYWHVDCVRKMSLNAFVDHYQKWCKRKKYNFSRDKAEEIYGAARELVPVLPKDDLTKLIVKQAIEQLNTASKTVEELRTLMNETAAKLPEYPVVMGMKGVGPSLGPQLMAEIGDVTRFSHKGAITAFAGVDPGVNESGTYEQKSVPTSKRGSSSLRKTLFQVMDCLIKTKPQDDPVYAFIDKKRAQGKPYYVYMTAGANKFLRIYYGRVKEYLMSLPE

SEQ ID NO: 176435 - protein, 374 aa, unidentified
MDTIYIGVDFHARQQTICYLKTETGELVTCELKHLDKHAVRAFYAQFHGRVIVGLEASGYSPWFERLLEELGCEVWLGHATEIRRRARWRQKNDRRDAELILDLMLHDEFPRLHRPAVQSREVLRMLRYRQKLIKIRTMSKNSLQALALQSGLAKGSRLFTQAGQQELSAAVMTPVMHWQREHWLQLMEPLNQQLLETMVWFKEQSKGDVCIKRLRTHPGIGLLTSLCIVHSLQPVSRFRNTRKVAAYAGFDPVERSSAERKCFLGISKAGSRVLRFLLVEAAHTAIRKDEDLKRFYQRLAERRGRPKAKVAAARKLLIRAYIMLRDEIDYAEFRRRAVAARLARQGQGPKVPEVLIGQPASADHRDEPTSESQ

SEQ ID NO: 176436 - protein, 398 aa, unidentified
MSKYLNSTIVGIDVASEFSYVAILCPDGHEYRKPFKLVHTRNGFNYLLETIKKVENEFNMKPIFFMESTGVYHLTLFHFLKDNKFEVLVINPLVTNSNKNKSIRKVKNDRFDALSIAKLGKYEDVKVSSDLDLNIFTLKLLIRDYYKLIDDRSGYKKKLSSSLYISFSGYKDVFSDICGSVSINILKACPSPQAVLSAPKQDIMDILLCSRKGLKWAEKKYSKLMDCALNAQFISLPSSRLSISVTTCISLYEAIDAEAAKLLREIECFINSDEMPPALSKNILLLTSIPGIGYITAITILAEIGSIDKFVTPKQLVAFFGVDPAVNESGKFKGDRMKMSKRGTRLGRRALYAVALVAIMHKLIKYLFAVLRDQQEYQIRDPKLHQKMFLENNSKQVA

SEQ ID NO: 176437 - protein, 446 aa, unidentified
MSRKKHTHLRGERGQAFADKIRGVPLEQILCVSLDIHKYFHVVMIHNALGEIVTTTFEIDIFQAGFDRLCQAIDEAVARTNVQVVLVGMEPTGHYFENLARHLHHDQRSPQPVTLINSFAVSRNRDQQMMHREKDDEIDVAAIGDLLRRGEGTPFQPVRGLYLEMQHLSRVRLSKVKMQTALKNQILGHLDHIFPGLVIQGKVARERYEPLFVANFWSCQTLQHLIRVCPDPRQLATMAPQDLRTAFHEQGFALGPKTAARIITYTQKVLLPDPEVVAIRCELLARDLALLAQVEQLIAELEDRLHALLQQTPYWVWTQVRGLSMTQVASLAAAIGDPSHYTHAAQVFRRSGLVSGRNDSGTRRHKGKGKRVVKTGDVYLRRALMTAIMSLIRHQPTLQDYFNELHRTKHAGVARVATARRAMGILWAMQRDQHSRTLVLKRGTEM

SEQ ID NO: 176438 - protein, 345 aa, unidentified
MKKISIGIDFAKEKFDVTAKNVETGASVYGQYPNTPAGGRSMVKMVRKFAKGTDSSEWLFCGEDTGYYSQTIARYLTEKGYFMWLQNPYSIKHSEGDIRRGKDDKADSAAIADYAHRYEDKARKWEMPSKVSEELHLLLTRRDAYVRAKRVIQSGANEIPKRDKQGESVSLIKSSAKRLLREIDEEIERLEAQMEKIVKEEEAMQKNYEILRSFTGIGLVNSMCFIAYTDNFKKFDLNARKIATFWGVAPFGKDSGKTVHVAPHVSQFCNHWLKAIISNAANSALKWNPIIIAYNERLVKRGKCEGIRRNNVKNKIIQTVVAMIRKGEKFDPEYKFTNEMAAEEC

SEQ ID NO: 176439 - protein, 334 aa, unidentified
MQNITLIGIDLGKHTFHVHAQDKNGYALLRKKFSRTQLTAFLSTCSAATVVMESCAGAHFMARHISQLGHQVKLISPQFVRPFVKSNKNDFIDAEAICEAASRPSMRFVTPRTEDQQAMAALHRVRDALVRERVKTTNQMHAFLLEFGISMPRGIAVIRRLAAVLEEHPLPPYLTRLLLQLRQHYVYLSEQIEALEQELKNHMADDDTAQRLLSIPGVGMITASLLATKLGDGKNYAGSRDFAASTGLVPQQYSTGGKNTLMGISKRGDKNLRRLLVQCARSFMRQLEHNPGRLAEWVKVQLTRHHSNVVACGLANKLARIAWSLTAYRTVFSQ

SEQ ID NO: 176440 - protein, 357 aa, unidentified
MAKSVFALSGADSPGRVVIRRQLRRAQVLGFMRGLPRCVVGMEATGGAQYWARQFTALGHEVRLMSPALVMPYRKGNKTDRNDADAILEAVSRPSMRFVMVKSVAQQELLALHKVRAQLVKSRTALCNQLRGLLRERGVAVRVGVAALKRSLPAALTDESSELSGEMRELLSEMSQWLRTLEQRIASCEARITRKFKHDERCVRLAEVPGVGPLTATALVAAVGNAQRFKNGRELSAYLGLVPRQHSSGGKTVLLGITKRGDRYLRTLLIHGARSALRQCKLEGDARSRWMARISAARGPNVAAVAMANKNARILWALLSRGDRYRPSRVLTRAVLRPGSPPPVERARGAKLRVAKD

SEQ ID NO: 176441 - protein, 410 aa, unidentified
METIFERVAGLDVHKAQVTACVRLPAASGGREQHLAEFSTTVRGLMGLRDWLEAHGVTDVAMEATGVYWQPVWHVLEDAFELMLVNARHVKQVPGRKTDCSDAAWICQLMEAGLLRGSFVPPKPQRALRTLTRYRKTQIQARADEANRLHKALEDTGIKLDCVATNILGKSGRAMLDALVGGTTDPAVLAELAQGKLRPKIPALREALEGRFEPHHALVIGAILAHLDFLDEHIDRLSEAIEKQLGPFAPGVPLAATITGVAERTAQVMVAELGTDMSRFPTPAHLASWAGRCPGNDQSAGKRRSGHTRKGSKWLRIALEEAALAATRTKDSYLQAQYQRLRPRIGHRRALVAVEHSMLVAYWHMFTTGETYHDLGGDYFRKRDPERATRRLIAQLEALGHKVTLEPTAA

SEQ ID NO: 176442 - protein, 370 aa, unidentified
MQTVRSFVGMDVHKETISISVAEDGRSGPVRFIGVIPNQPDDIAKMAKRLAKHGGLDFCYEAGGCGYNIYRQLTALGHSCTVAATSMIPRKPGERIKTDRRDSQKLAILHRSGDLTKVWVPDATHEALRDLVRARVDASMHLMRCRQQLLAFLLRHGRSYPTGKHWTQRHRSWLAGQTFELEVHRIVFQDYVEAVWTAQERRDTLIERIAAMTTVWSLGPLVEALRGLRGIDLLSSATFLATTGDLSRFESPRMLMGYLGLVPSEHSSGGSVRRGGITKTGNREARRMLIEAAWSYRYPARVAKEKAEILVRLPKSVRDIAWKAQTRLCARYRAMIARGKKPTVVVAALARELAGFIWAIGQEMRTPMTT

SEQ ID NO: 176443 - protein, 413 aa, unidentified
MDVLVERCAGLDVHRDTVVATVRSPGKRAGTRHSETKTYATHTAALMELADWLVDQQVQLVAMESTGVYWKPVFWVLEERLTVWLVNAAHVRNQPGRKTDVSDSRWIAQCLECGLVGPSFVPPPQIRELRDYTRYRRALVEERTRNTQRLEKVLQDAGIKLSTVASKVLTKSGRAMLEALVAGETDPVVLADLAKTRLRAKIPQLQDALAGRFRAVHHGPLVARILGHIDYLDESIADLEAQIDELLRPFAQVLARIITITGVNRITAAVLIAEIGVDMSVFTTAGHLASWAGICPGNHASGGKRKHGTTRKGSTALRTGLTEAAWAAARTRNTYMNAHFHQIRGRRGTSKAIGALRHDILIAYWHIVHNQVDYHDLGPDWFTRRHTPDHQRRRLTRQLEQLGYTVTLEPTAA

SEQ ID NO: 176444 - protein, 351 aa, unidentified
MDYFAGLDVSLETANICIVDADGDILSEKKVEAEPAAIIAALKQFGQAFKRIGLEAGPTSSWLYSELHRSGYPAICLECRHVKAGLSAMRNKTDRNDARGIAQLVRLGWFRQVHVKSEEAQRVRMLLVNRQQLLTKALDLENSVRGSLKVFGLRVGTVTRRTFEGRVLQLVAEDRSLLAITAPMLRVRRALISEFEQLDRLCRQLARRDPLCHRLMTVPGVGTVVALTYRTGIDAPERFSKSRDVGAHFGLIPRRHSSGQTDYDGHISRCGDAMVRTALYQAANVLLHHGRWSSLRSWAMRIAKRSSVKVAKVALARRLAVVMHRMWVDGTDFRWSAIATAAAPVSTAIAR

SEQ ID NO: 176445 - protein, 339 aa, unidentified
MFCIALDLHKENTYGVVLDDKSGQLVWEGNFASTFRAAKETLEPYFVHGTKIAIESTSCFYPMYDGLKSIKGINISVVNTARLEKPAIKTDRRDAHRIAHLLRRNELPTAFIPNKKLRLQRELCSLRMRLVHSCTQCKNRISSILHKEGKRPLGVKDAFSDKGLAQLEKLRILRKEEMNEELDLLRILKKKLSRIEKQISEVIEQDARLRKQVGLIDSITGFAQTLAFVCATELGPIGRFNSEEAVVSYAGMHPCIDSSGGRTKHGKIMRVGRKLFRWALIEAAHVCGRTDTILGNYYRKKAKQKKSNHAAAVATANKLARLIYQILITQKDYDPGLGQ

SEQ ID NO: 176446 - protein, 375 aa, unidentified
MEEDMTKEQLTIHVGIDVSKDKLAVAIAGGGVRDEVLSLGTFENTPASVDRLLKKLSGRGLPVSVCYEAGPTGYGLYRQVRAFGIECCVVAPSLIPVRAGDRVKTDRLDAIRLARLFRAGELVPIWVPDATHEAMRDLVRARESAAEDQRHKRQLVSAFMLRHGRIYHRTKPWTMRYRRWLQSQSFAHPAHQLALQEMLQAERNATERHDRLTGHIEALVPEWDLAPAVTALQALRGVALISAVTFMAEIGDVRRFETPVKLMAYLGLVPSEYSTGKTTKRGGITIAGNSRVRHKLIEGAWTYRLPARPGARKLYILQEQSAEIQDIAWKAQSRLTARYRKLSQRGKKSTVVTTAIAREMAAFMWDIARRTMPAG

SEQ ID NO: 176447 - protein, 347 aa, unidentified
MESILKQVVGIDVSQDELVVKLGRMRKDCITEVYASKNFVNNLSGFTSLVSWVNKLKNNNVSIRYVMEATGVYHESLAYYLDENAIEVSIVLPVKISNYMRSLDKKTITDSTSAEAITFFGLERDLAKWQRPTKVYKSLRQLTRERSQIIEMRTICKNQLHAEKSEAEPSESGVVRLNTHISLLDLQEREVMSEIKALIKSDQEVREAAELLCSIPGVGILTAATVLGETNGFDLIRNKKQLVSYVGLDIIEKQSGTSIKGKPRISKKGNKYLRKSLHLPALSAIRHDERFKGVFVRLVSRDGVKMKAAVAVQRKLLEMMFTIYKKNERYDPNYFIAEPKSVVCEKN

SEQ ID NO: 176448 - protein, 411 aa, unidentified
MDRLLERCAGLDIHKKTVVACRIVHMDDDQWQVETRTFGTTTRDLLQLADWLQIAGVTHVAMESTGVYWKPVFNILESQCKVMLVNARHIKQVPGRKTDVKDAEWIAQLLQHGLLRASYIPEAPQRNLRDMVRYRTKLIQDRSSEVNRVQKVLEDTNIKLASVVSDIMGASARDMLAQLLQGTDDPQAMAQLARGRMRSKIEQLEQALTGFVQEHHRLMLRLHLEHIDYLNTQINRLEEVIEQAMVPFDEADVVERLTEIPGISVHTSHIILAELGVDMTRFETAGHAASWVGLTPGKNESAGRNYSSKTAKGNKYLKSALVQAAHTQRRADNYLGAQYRRLARRRGAKRAAVAVAHSILVIVFHVLRDGTRYQERGADYFDQHDRIHLERKLVKRLEQLGNKVSLEPHAA

SEQ ID NO: 176449 - protein, 414 aa, unidentified
MNTPVSNVSMSGTLIALDISKKHHDAKIRYPDGRTSYLRIENTLEGFNRLLALTASPHDSIIAAFEPTSDYHRNIAWWLHQQGVKCHLVSSVRCARAREMLFKTWDKNDRKDASVIMYLLEQGLSSPFYDPLANGVIDIQEISNTYHQVTLARTRCLNSLVNHYLTLYFPEAEQFLHMSRAEWFCQFLLQFPTPSCITSLNRDLFVKQAWDVVGRKQYKQQFLEHLYDISANSIALPLSDGSLAITTFKLQLHRYVELSAQRLQLEKQAENYLQERSDYQHLRTILGIGAVIALMIIAESGDLTRFAHYRQYLSFCGFNLSVSQSGQKHSGYRLSKRGNARLRYAFWLAATVAVRTRGNSFRYKYERYIRENGDKPDQKRKAMTAVATKVARVAHAIVKQDIDYKGYYEISHGT

SEQ ID NO: 176450 - protein, 423 aa, unidentified
MEIMYERVAGLDIHKATIVACVRLGAGRNVTRECRTFDTTTDGLRALLAWLEECRCSHVAMEATGVYWMPVWKILGEGDFALIVANAAHIKNVPGRKTDLNDAMWIADLLACGLIKPSFVPEEDVQELRSLLRTRKQLGREQTRHVQRIQKTLAEANVKLDSVLSDIMGASGRRIIEAMIAGVRDPRRLAALANTRIKATPKQLYDALHGRLTDHHRFLLTLHLRQWDNLDATIREIDQEVEARIARMDEEVKADEAPFRDLIGLLCTIPGVSTLSATTILSEIGRDMSRFPTAGHLVAWAGLCPGQNESAGKRKPVRLRKGAPWLKTMLVQCAWAAKRKKDSYYKAQFFRLQSRRGPQKAICAVAASILTAIYHILKNGTEHHDLGADHFNRRSTEGQTKRLVAQLTRLGFEVQLQRTAEAA

SEQ ID NO: 176451 - protein, 356 aa, unidentified
MLQKLNSEIAVIGIDIGKNSFHIVGQDQRGAIVLRQKWSRGQVESRLANLLPCLIGMEACVGAHHLSRKLTALGHDARLMPGKYVRPYSKGQKNDYRDAEAIAEAVQRPTMKFVATKTAEQLDLQAMHRVRERLVGQRTGVINQIRAFLLERGIAVRQGLRFLRAELPGILATRTDVLSPRILRIVEDLMGDWHRLDERIEGLSGEIETLARQDQGCARLMSVPGIGPIISSAMVAAIGSGDAFSKGRDFGAWLGLVPKQMSTGDRTILGSISKRGNRYLRALFVQAACVVLVKLGPKQWDRYGLKSWIEAAKKRLHHNVLAIALANKLARIAWAVLHNGRAFECVRTNETASQPA

SEQ ID NO: 176452 - protein, 420 aa, unidentified
MPREAAPQNVRKFGTFTADLEAMAEWFKACGITSIAMEATGVYWIALFQILERRGFHVILVNARQTKNVAGRKSDVQDCQWIQRLHTYGLLQGSFRPEDPYCVLRTYLRYRDELVVARGTQGQHMHKALLQMNVQLPQVLSDVTGASGLAIIAALLKGERDPVKLAALVDRRVRASQPTIQAALQGDYRTEHLFVLRQAHELYHTYEAKINACDEQIVRELTALPAKVAPVLPPLPARKAGRRPGLDKMAGVDLRPELHEKFGVDLTGIEGIGVLTGLVLLTEVGPNVSRFRSEKHFCSWLGLCPDNRISGGKVLSSRTRRVVNRASDALRLAASTLERSQSALGGFARRMKARLGAAEGITATAHKLARIIYRLIKHGEAYVRQGVEDYERKFQAGKLKKLQKTAQAMGFDLVQKQIVT

SEQ ID NO: 176453 - protein, 401 aa, unidentified
MKSLSGGIDIGSESHHVIIIDGTGKVLYDRRVAHKFREFREVIGEFKGLEEREQGEITFAIEGKNGYGAPFDRILIESGFKLYNVDNLKLRRFRDVFGAEWRNDRRDAKMLAKMLKLKDHVDAEEEKAFIAIEKTPAVNEKLRILSRHQQSLIDEKIRIQNRLRKRLLEVCPDILEFGDTDGKKLLQLLKKYPEFSKYKKITLAALLKIETIGKKTAVSILEGLRNIQYVEELTGIYKAIISSYCRRILELKEEIEMLDRELEETGEKSSEVMKLKSMMGVGIKLSSRLAGEIGDIRRFNRESQLAVYCGVACINDDSGKSKKTKAVYKANRICKATMIEIAGCTIRYVQESKAYYDKKRAEGKDHNHALRCLARQLIKVIFKMLTENREYIYKEELKKAA

SEQ ID NO: 176454 - protein, 406 aa, unidentified
MRAIGLGVHRDFCEVAVVEDGVVGSAGRIQTTPETLELFAGSLGRADRVALEVTGNAWEIARILEPHVARVLVVSPADTGIAGARAKTDRLDARTLAKLLWAGELDAVWTPDERCRVMRRRLSRREQLVRSRSRAKNEIHAVLVRRLVGKPPMSDLFGVKGREWLRGLELPIEECETVEGCMRHVEFLDAEIAAVERQIARQALSSLEIRRLMTVPGVNVIAAAEFMAAIGDIRRFRGSRQLAAYLGLDPKVRQSGSEPARSGRISKQGSASARWALVEAAWSVVRQPGPLHAFHERLRARRGSQIAAVAAARKLACLFWCLLTRDQDYAHAQPSLTAKKLRLLEIRAGAPTLKGTNTGTWATRTKMRDAERKLAEQAEASYTRMVRDWQASRPAKVGASVTPGRA

SEQ ID NO: 176455 - protein, 326 aa, unidentified
MPVAEVDTFAGIDVSAHELSVALRRGQGHDKPAMAKFPNHPSGHKALVAYLLRGGGRVRVCLEASGNYSLDLALTLQAHRQVEISVINPRRARRFAESLGERSKTDPVDARVLCEYAARMPWVRWQPPSPVALHLRALTRAIADLGVIHTQQNNRAYAAAASQALPVLVVKEMQRHKKYLEQRMTRLRREAVRLIACDPELDRRFRLMLTTIGIAETSALQILGELAVLPDMLDARQWVAFSGLDPRLFKSGKSVEKRPLALRRDPYLRVFYQNLLARGKARLQAVVAVMRKLLHALFAMFRSNQPYDGSKLCAVDLAVHAIPACA

SEQ ID NO: 176456 - protein, 415 aa, unidentified
MTDQITIPQKRFIGLDVHKHYLIALGVDAELNVVLPAQRVELFRLEAWMKKTLTKQDAVALEMTTNTWEIYDELSPCAHSVTVVHPPHVALITRSQVMNDKMAASILARLLAKGLLVSIWVPPVEVRELRALVAQRSKMTRLATQAKNRLHAILQRHHIVPPEGNLFHADQTEWWCALPVGKLEKINLQSDLDTLRFAETQLTRLASTMNELAVKDERVTRLIHLPGFGAVVALTVLAAIGEIARFEDAKHLVGYAGLGARIHDSGLTTRTGRITKAGRRDLRAALVEAAQVAANSHPHWKAELARLEPRLGRNKAIIAIARKLLVAVWFVLSKQTTDRFAQPEMVARKLMQFAYKVGKHNRPANQSAAQFIRQQMDALQIGADLSAIPWGTKKRSIPLPPSALLENKMSDVPNT

SEQ ID NO: 176457 - protein, 401 aa, unidentified
MSTMRDNGTRVKRFRELKATLRTDRSRLLVGLDIAQAEHVVHLRHAHTRVVVPTLTIPNTTRGFTQLWTRIQQAQRATRCREVVCALEPTGTYHQAIATFLETQGADVVFCSSSVAYWNRRTQDGTWDKHDRKDAVNCADLLEQGKVLFYSQPTGPLAELRHLVKCLRRARTELAACKARWRTTLRPALAPMGESLPQRLWAELPAMLQAWERAAPGRPAMPKGRLSLGLATACADLGAQVTAVQARIAVIEAACTPLAERLPAYPLLRSIPGVGATVAAVLLAEIGDIGWFTQFSQLRKLAGLDIVRVQSGQYAGQQRISKCGRGLLRWALYHAAVGAARTAGGRARLAALKAKRRGDRFAGFKAIVELAAKQLRVIWGVWRSGTPYDPTRAGGLQRQRR

SEQ ID NO: 176458 - protein, 344 aa, unidentified
MTYYTGIDVSLRSVSICVIDEQGAIKFEGKVVSDVEAIVAVLRKLGAQIRQVGLEAGTLTQYLTYGLRAAGYEVICLEARHAAATLAAMRNKTDRNDARGLAHILRTGWYRTVYVKSVQSHQTRALLTSRKAVLSKCIDLENELRGLLRVLGVRLPMRVGHGAFDALIRRHLQHHPDWAGALLPLLDARTMLYQTFLKLEYAVRSMARQDPVCQRLMTVPGIGPVSSLTFKSAVDDPVRFRSSRTVAAHFGLTPRRFQSGESDNPGRISKAGDAGVREALYTAAHALLTRSGAWSTLKAWGLRLAKTRGHRRAVIAVARKLAVILHQMWVRATDFQPRRPKATA

SEQ ID NO: 176459 - protein, 325 aa, unidentified
MGTVMNQSSSVYIGIDVSGSALDVAIHDTTEHFRVDNEPVAIEQLVQRLIALSPTLIVMEATGKLELAVLRALCEAGLPAVAVNPRQVRDFARATGSRAKTDRIDAFAIAHFAAVLKPAVRPLTDVQTGQLQALLLRRAQLIEMLVAEKARLERAHAAARDSLNDHIKWLKQQIRVADNDIDSFLRSSPAWRQKEDLLRSVPGIGPGAAATLIAFMPQLGSLNRREIAALTGVAPFNSDSGRHVGKRRIQGGRASCGERSIWPACRRCVLTQPSGLSMTGYARPANRSRLLSRPASASSSSRSMRWSVTPHPGVRRLTELRHALP

SEQ ID NO: 176460 - protein, 405 aa, unidentified
MNAVGIDVSKGKSTVTIRRPGDVVIMPPCDIPHTQSAINCLIEQLQNLDGDTKVCMEHTGRYYEPVATWLSDAGIFVSAVNPILIRDFGDDSLRTPKTDKADSKKIARYALDRWAKLKQYGNMDKTRNQLKTMNRQFGFYMAQKTAMKNNLIALLDQTYPGANDFFDSPARSDGSQKWVDFVHTYWHVDCVRSKSLNAFTEHYQNWCKRKGYNFSVGKAEKIYHLSADLIAVFSKDDNTKMLIRQAVAMLNNASETVESLRSQMNELAATLPEYPVVMDMNGVGSTLGPQLMAEIGDVTRFTHREALTAFAGVDPGKNDSGQHVQKSVKTSKKGSPYLRKALFQVMDSLIKRSPVDDPVYAFMDKKRAQGKPYYVYMTAGANKFLRIYYGRVKEYLATLPKNEEI

SEQ ID NO: 176461 - protein, 384 aa, unidentified
MRHVEQTEAARDRAVVFVAMELSKTSWLLAARASPSGKTSSHRLNGGDVAGLLALLRRLQAREQRQGGHDVEVILGYEAGYDGFWLQRRLSAEGITCWVMDPGSLQVDRRARRAKTDRLDAAMLLRALMAWWRGDRAVCSMVQVPSVEREDARRTHRERQRLIAERVQHVNRIKGLLATQGIYDVQPLRRDRWERLDELRTGDGRELPPRLRREIEREFKRLELVLEPIEASEAERDAAVAVPAADDADAAKVVQLAKLGGIGTELATVLVREALHRSFTNRREVAAYAGLTPSPYASGERHRDQGISKAGNPLLRKAMVELAWLWLRYQPDSALARWFTERVGTVRGRMRKITAVALARKLLVALWRYVRTGLVPEGARLKAA

SEQ ID NO: 176462 - protein, 419 aa, unidentified
MKSTKTKKIKWINKKTMLCTIDIGKNVHYAYFRSPEGNECEPFAFNNSFKSYRWFWNKICQFKKQNQLEDIVIGFESTGPYAEPLYHYLMKKPVKLVQVNPMHSKRVKEMSGNSPNKTDRKDPRVIADIISLGHALTLVVPEGAAAHLRRLAHSRERALKARTAIFNQLQHLIAVIFPEFLSIMRNMSTKTAAYLLKHHADPQSIVELGLEDLTQAIRKISRGKLGRQRAEQLYQAARGGIGIHEGKESILMEIEHFNRMIEYENEFIARLEKEMLYYLEQIPYSVNLLSIKGLGVVTVAGLIGEVGDFKKFDTQSEIMKLAGFDLFEVSSGQHQGQRHISKRGRALMRKLLFFAAINAVKTHGIMHAPYHQMLSNGKPKLKALVAISRKLLSLMFALARDNTMYVKNYDPTHKYKLAA

SEQ ID NO: 176463 - protein, 340 aa, unidentified
MQKSVKFYLGMDVSKLWIDIVVMCVEDHQKQPAISGHFDNDATGIKALHKWLKKHNVSFDENSLLVIENTGVYHRLIWEYCSSHGLPLYIGNATHIKYSFGLARGKNDKIDSERLCAYAFKNADEIKVTPVLNPVFLKLKDMMTSRSRLLEQKNSIKVYLGEMKLSNSKEMQMIIENAHKAALEGLEASINFVEKQIKQIIKENAEIENNYKLLITVPGIGHLTAVYIICCTNNFICKISGKQLSSYAGVAPFGNTSGTSIKGRHKVHKMANKELKKLLHMGAVSAITHYPEFKDYYERKVKEGKHQLSAINAVRSKIALRAVAVINNQAPYVDKYKKAA

SEQ ID NO: 176464 - protein, 353 aa, unidentified
MKRIMAIDLGKFKSVVCNYQAPSGKHEFVTIETKPQALHDLLVEHQPDVVVVEVCGLIGWVYDLVRGLGIRIKVANTNDERWRKRMIKRKTDRKDALKLARLEAMSELPQVYIPEAAVREKRALINYRKSLAERVTQIKNSIRSLLERQSLSLPLGKKGWSKAALLQLRSWSRPLGQAGVQELWRGELTMELSLLETVTEALAAVEEKLDALNAQDKQVQLLQTIPGVGPRLAEAVAAYIDDPHRFGNGKQVGCYFGLTPRQYQSGTMDRQGRISKDGNNLVRSLLVEVSWLAKLWNPWVERMYEQLWRGSKTRKKIAIVGVARRLLVRMWAMLRDGTAWQMPALPAVNRKAE

SEQ ID NO: 176465 - protein, 415 aa, unidentified
MKIVFPTCCGVDVHKTFLVATIITTPTDSLQPHYQKKRFSTFNSDLNRFADWLLKHDCLDVCMESTGKYWVPVFNILEKRGIRVVIANPKWVKAVKGNKDDTKDSKWIGDLFRIGLVKNSFIPNLDIRILREFTRYRYKLVSMKSSEKNRFQNAFTVCNVALDSVVSDMFGKSATAITDYLTSDECFAPEHCVSLLQRSLKKKAKLVLESIEGYSIADEQKLRIKIIREHHNFLEQMIAKVDTCVNEMVKKYEGEINLLCTIPGIERNSAITIISEVGTHMEQFASSKQLCCWAGLTPGNNKSAGKKKSVQISRAGVYLKPALVQVAHAAVKDNKHPYYKLKYERIAKRRGKKRAIIAIARMILTAIYSMFRTGEVWNPVDLFKIDMPEHLKGQQLAKAIKQATKFLEKQGLTVA

SEQ ID NO: 176466 - protein, 391 aa, unidentified
MSQSKPYDLSRSLTALEQDTTLIAVIEMSHASWLVAGLIPGVDRRALKKLEPDTAELCRLLDRWRQEAERTGRVIRRITVAYEAGRDGFWLARCLQARGIEAWVIHPNSVAVSREHRRAKTDRLDTEHLMRAFLGWLRGERRHCQMVAIPTLEEEDARRPNRERESLVEDRTRLVSRMKATLARFGIRTFKPTLRKAEERVAALQTAEGTPLPPLTVDELRRDMTRLRLIREQIKAIETARLRRLQQAAPDSGAHAMVHLLARIIGIGIETADMLVNEALSRRFRDQRAVARYAGLTGAPDESGKQRREKGLARAGNARVRRGMIQLAWRLLMFQKESALVHWYRARTADGRSGTRKTMIVALARKLLIALWRMVTTGEIPSGFVLRPAAS

SEQ ID NO: 176467 - protein, 345 aa, unidentified
MLIIGCDFHPGFQQLAIFDKSTAEITYRRLQHPEQARQFYASLAEPARVGMEACGYTQWFERLLAELQHQLWLGDAAQIRASVVRRQKTDRRDAEHILELLLEERFPRLWVPSNEERDVRQLLLHRHHLVRNRTQVKNQLQAMALNQGVQKKRKLWTKAGREQLQKLTLPAYTAQRRDECLQRLDYLDEQIRQLNQKVEAEAEQREAVRLLRTHPGVGPQTALAFVLTIGEVKRFANAKRVASYVGLIPAEYSSGGKQRLGRISKQGSPLLRFLLVEAAQTAARLDPSLKRMYVRLCMRRSRGQAKVAVARRLATRLYWMLRSGNNYAQLTASGAGKPVSSCGAA

SEQ ID NO: 176468 - protein, 428 aa, unidentified
MNYNTQNAKIASITEKTLIVGIDVGSETHFARAFDWRNFEYTRKPLKFSNTEAGFLAFKEWMEDIAKKHGKAAVIPGMEPTGHYWFALGKFLQDNGMKPVHVNPHHVKKSKELDDNNPNKNDRKDPKTIAALVNEGRFSYPYIPTGVYAEIRSLSNLRFQTQEEITRIKNRIARWFAIYFPEYKDVYGDLKAVSGRMVLKVASLPEDIRKLGVEGVNQIWRDAKLRGVGMKRARKLVSAAEHSVGSKEAPEAARMELKNLLNDMDVYASRLEELLQSLEEKMKEIPHVDKLMEIKGIGLVTVSGFMAEVGDIGRFDNPKQLQKLAGYAIVANDSGKHTGESRISYRGRKRLRYVLYEAAISAVGKNAEFREIHEYYQTRKKNPLKKMQSVVAVACKLIRIFYVILTKGVDYDGSKLLGDIRRPQVQAA

SEQ ID NO: 176469 - protein, 414 aa, unidentified
MEQIHERVAGLDVHRDSVAACVRMTGPRGGVANEKERFATTTTELARLAGWLAERQVTLVAMEATGVYWKPVYYALERGFDVWLCNAHHVKNVPGRKTDMSDAEWLADVAAHGMVRPSFVPPPAIRELRELTRYRKTQIDARVAEIQRLEKLLQDAGIKLTSVASKVLTQSGRLMVEALIAGQCDPAALAELAKGKLRPKIPQLTEALNGHFGAHHAVAAQRILGHVDFLDASIATLTEQIDARMQPYGAARCLLAPVPGLDRLIIDTVIAETGADMTRFPSAGHLANWAGVCPGNHESAGKRRRVGVVPGNRWLRRALIEAAHAAARTKASYFGAQYRQIARRRGPNKAAVAVAHSLSDLVWHMLSTGECFTDLGADYFQRRRDPQREADRLVRQLQALGYRVNVTEPPTPAA

SEQ ID NO: 176470 - protein, 438 aa, unidentified
MSALPLIDPKAAAIDVGSEQMHVSIAGGEPKVFGSTTAQLHALRDYLLGEGVSSVAMEATGVYWLCPYEVLEKAGMQVVMVNGKYVKNLPGRKTDMKDCQWQATLHAHGLLKAGFVPPEHIRRLQDYQRLRADHITAAASCEQHMQKALERMNIKFHDAISDLTGVSGLKVIRAILAGERNPVALLALCDCQIQKKKAARVCESLVGTWKEEHLFALRHALAAWEFYRGQIAECDQALERVLKELTDDRPGPPEPLPSWGRRSGVNTPEILQLRQMLWKLCGGKDPTAIPGISDYTLLQLVAETGTDLSTAWKTEKHFTAWAGLAPGARQSGKRRGSQKRSRNRAGRIFCVIARSVGRSADKALGGFYRRLRARRGGLVANLALARKLAQLFWQVLVHGMTYVEQGLKKYQDRVQKTEQAWLQTLAKKHGMVLLPRKL

SEQ ID NO: 176471 - protein, 400 aa, unidentified
MPFHGGLDWGGTAHAVCIVDGTGKAVARIEARHDAAGLADMLTRLRKLAPPAQLPIAIERPSGLIVDALIEAGHTVIPIHPNVVKACRPRYRAAGGKSDPGDAYMLADILRTDGHRFRPLMPLCDDIRALRALVRGRDDLVAQRVTLANQLRSLLEGFWPGAAAIFADIDSPIALAFLARYPTPDSASRLGEKRLASFLAHHAYCGRRSPAELLARLRAAPKGLASEAEADAKGELVRVLAALLERLVSEIARLSSRIEHAVAELPDGKIVMSFPRAGRICAAQILAEIGNVRERFPTEDQLAAEAGVAPVTHASGKSRGVAFRWACNKNLRVAITCFADNSRHASDWAADIYGRARQRGCKHAHAIRILARAWVRVLWRAWQDGEAYNPAKHKAAVRIA

SEQ ID NO: 176472 - protein, 406 aa, unidentified
MEVVYRCVAAIDIGKRQSVVHVKTPTVEATRSFGMMTADLLELADWLRECGVQQVVMESTGVYWKPIYNLLEGDEFDLWLVNARDFRSVPGRKTDVQDSEWLCNLMRHGLLRRSFVPPKGQRELRELVRYRRSLIEERAREFNRLEKVLEGANVKLGAVASKLTGKSVRLMLTAMVNGEADPKTLAELAKGRLRNKRDELVQALQGLMGAHQRFLLKEQLGHLADLDTRILRLDLEVEERLRPFVDELERLQTIPGVGARVSQELLVEIGWDMSRFPSAQHLASWAKLCPGNNLSAGKRKHGRTGHGNRYLRTTLTEAAHAAGRKKNTYLQAQYQRLASRRGQKRAAIAVAHSILTIAYHLLVQKTKYQDLGANYFDERKEQTVVQRLQRRLEKLGYQVDLTKQVA

SEQ ID NO: 176473 - protein, 381 aa, unidentified
MPHSLFCRTQRKYKLMFKYMQTMNRKDTLFVGIDVHKDTHTAVGLTPFGEKVFEMTLGNEAEDFISFIHKTKVESEKLGLVPSFGLEDVHSLGERLSSFLVEEGQLVRTIAPVLVDRRRSKMTHPEKSDSLDAQGVAEVMIQRIDSLPLYKLSDEAKKAKQIRELSLEREWLVKERARLKNQLHILLYRIHNTSYRTKFKNPFSLKALKYWKRNVPKHIDTILGQRMKRNIRRLLDLREEIQEIENELEVMMKENKQTLVTASGCGVVIAAELIGEIGDINRFHSPGALAKYAGCAPKEHSSGKTIRWRKTRSGNRRLNRAFHRMALSQISKSGNDAARIYFKRKVSEGKTKSQALVCLRRQLVNIVWMMLKHKTEYRLPC

SEQ ID NO: 176474 - protein, 355 aa, unidentified
MESVKYVGLDDHDSTISVAVRNREGKVLMESVIATKATAIVDLLKGLRGSVQVAFEEGTQAAWLYDVAVRHVARVVVCNGRKNALLKSGNKNDRIDARKLSELLRGGMLSPVYHGERSTRTLQQLVGSYMAFTEDTGRTMRRIKALYRSQAIACTGKKCFGKRHRGEWLEKLTNAGQRRRAEWLYQELDALQGLRREARLAVIAEVHKYAAAKYLRTIPFFGPLRTAVVIARVQTPHRFRTKRQLWTYCGLGLETRSSADYIEQDGQIVRRKKPVFIRGLNWNYSHELKNVFKSAATTASAMDGVFREFYEMRIAQGMLPAMARLTLARKMAAIALVLWKKGETFDRQHLTPQAA

SEQ ID NO: 176475 - protein, 433 aa, unidentified
MQAVYANCAGLDVHKKVVVACRIRQGGNESKQQEVKSFGTTTPELLGLVDWLLEWRCTHVAMESTGIYWKPIYNILEGSFEVLLVNAQHVKHVPGRKTDVKDAEWLADLLQHGLLSPSFIPPAPQRDLRDLTRYRTKLVQERASETSRVQKVLESANIKLSSVATDIFGVSGRSMMDALIAGHADPEAMAQLAKGRLRNKLPELEKALTGIFGDHHRFLLVNQLAHIDFLDEQIAVVSAEIQRRIHEMSQPHDDTHDVFQEPPEASVPLSVDQAVALLDTIPGVDKVTAEAIVAELGTDMSRFPTSAHAASWAGLAPGNHQSGGKHHSGRTKKGNRVLRSVLVEAALAASRTKNTYLSSQYHRLAGLRGKKRANVAIAHSILVMAYHILARQQPYCELGANYFDERKKEVTIHRLTKRIVKLGYNVSLAPVAA

SEQ ID NO: 176476 - protein, 449 aa, unidentified
MAQRKQVRKLDYDVLEQINLDAAGADVGDEEIWVTVPRGRDPEPTQEFKTFTADLRRIADWLGACGVTTLAMESTGVYWIPLYELLESRGFDVCLVNARHVKNVAGRKDDITDSQWLQQLHTYGLLHASFRPPEHICALRALVRHRDTLITHRSAHIQHMQKALQQMNIKLTTVLSDITGVTGMKIIRAIVSGVRDPYVLAGYRHGQCHRSVEQIALALEGNYRLEHLFTLQQALELYDFYAQQLQACDEQLEALYVAYEARPTDQPPPKPRTRKRRKNQPHFDLRTQMYRITGVDLVAVDGLDVLTVQKVIAEVGTDMSCWPTHKHFGSWLGVAPQHQITGGKIKSRGTAKNANRAATALRVAAQSLWRSDSALGAFYRRQKARHGPAKATTATAYKLARIIYHMLKEQQPYRDPGATAYQQQHRERAVRNLRRKAAQLGYRLEEAPS

SEQ ID NO: 176477 - protein, 444 aa, unidentified
MARKSKKQRLQIIHPNCAGIDIGSQEHWVAVDPDKAEEPVRSFSSFTDSLNEMADWLEQVGVEIVAMEATGVYWIPLFELLDRRGFKVQLVNSRSTRQVTGRKSDVLDCQWIWQLMSHGLLKGAFRPADAVCCLRAVVRQHASKVQEQARCIQHMQKALTQMNIQLDNVVSDLMGKTGTDILRAIVAGERDPQKLAALRNSRLHADVETVARSLCGNWREEHIFALTQALEHYDFLGEQIQACDKLIGQQLTGLPQLADNPPKPGKVLRNPLRTTAQQTALHQALYGVMGVDLTAIPTIGIETVLVLSSEIGADLSRFPNEANFCSWLNLVPPTCISGGKQLHGKALRVINRAGQALRQAASNARNSNSFIGASHRARLARMDKASAVKATAHQLARLIYAMLTKGQPYVEKGIEAFEAQTQDRQLKALQRKAQKLGFKLVEAA

SEQ ID NO: 176478 - protein, 365 aa, unidentified
MTSMTTIPGPVTGGVDTHGDTHHAAVIDQVGREIADAEFRATPAGYRQLLGWLRGHGSLQRVGVEGTGAYGAGLARHLRGQGVSLVEVDRPDRKTRRAKGKSDPIDAYAAARAALNGSATGTPKTRDGRVEAIRTLRVARRGAVKARTQAMNQLKALVVTGPADLREALRDLPAGVLIDTCARLRPGAQGADLAALSDPAAATKTALRHLARRHQRLGQEITELDADILPLVRAAAPALLALRGVGPEVAGQLLATAGDNPDRLRCEAALAHLCGVAPIPASSGRTDRHRLNRGGDRAANNALHTIVMSRLRYDPRTQQYMARRTAQGLGKKEIIRCLKRYVLRDVYRALRTPPAEPAKDLAPAT

SEQ ID NO: 176479 - protein, 382 aa, unidentified
MEKREVREFSTLTCQIKALSKWLKENDVTGVAMESTGIYWVPVWNILEEAGFHLTLVNPYFIKQMPGRKSDVKDSQWIAQLLAKDLLRSSLIPCKQIRTLRAYSREYVKRQQAITRIVVSMERTLETANIRITSMTSKIESKTVLNIIELIVKGETDVEKLLEKVHGRTKNRKGALVAQSLEGFILPEHRFLLSQQLEEYRLYYKQADELQKQMSAICKEHYAKQIELLQTMPGTDEQSVMQLIAETGGDMSAFETSNRLSNWAGLCPQNDESAGKIKSKATTKGNKYLRRIIVQIAWAASRTKSSSYYNKYNQLAIRKGRKKALVAVARKQLTVVWNILKYEQPYDINKQPVITPEQLMAKKKYHEKELGKLSILAIAANQ

SEQ ID NO: 176480 - protein, 343 aa, unidentified
MKDTIYNHYIAIDWSIENMAIARMTKKANKITVIDVPSDIGEMKVYLKKLKGSKILVVEETTTSQWLYTELKDYVDKMVICDPYRNKLLNDGPKTDKIDASKLVRLLKAELIKEVYHSTDKFLYLRRFVSGYEDLVKAGVRLQNQRYSLLRACGKRGYELAGTKLDSPGDQFAMDCIDRQIEVYKQEKEGYEKEFARLSKDYPEIRHQKSLPGIGPIHAVKIVARVVTPYRFADKGHYLSYTGLIKLEKISGGRSYGRKNSRYCRQLKSVYKTSTWAAIGGNNPINDYYEYLIQEKRYPEHNARHKACRKLAILSLGVFKSAKKYQPYRRGHVKGYQEIKPGL

SEQ ID NO: 176481 - protein, 365 aa, unidentified
MLLRRDDVLVGVDTHKDEHVAVLLDGLGGRLGEKFIPATAAGFTDLLSFCQSHIGPAGRLVGFGVEGTGSYGIGLARYLRRQGQTVHEVHRPPRRGERRMSGKSDSIDAEYAARQVLAGSMMAVPKTADGQVEALRLLKIARDSAVKAQTSAMITLKATLVTADDQLRAELEPLTDHKLVLACAALDSPPCLSDPDAAMRHVLASLARRWLTLHDEVKIHTAHLKTQTKTAAPQLVAAVGVGFDIAAEMLTTAGDNRTRIKSEAAFAKMCGACPIPAGSGKTNGRHRLNRGGNRQANAALYRATIVRMRWHQPTIDYVARRTQEGLSKREIIRCLKRFLAREIYHLLPPLAEQLEAPQQPLQTAA

SEQ ID NO: 176482 - protein, 360 aa, unidentified
MEVGQTVADHGVVGGVDTHKDLHVAAVVDELDRVLESRCFATTRHGYQQMLTWMRSFGQLRRIGVEATGTYGAGLLRYMQNAGVEVLEVTTPDTHDRRKRGKNDDLDAQNAAHAAFAGRRTVTPKSRDGMVESLRVLKACRKTAVAARRVALQMIHNTIVCAPDELRETLRRMTRMQLIRTLAAWRPDLTDYRSVVSAYRITLKSLGRRYLDLHDEIADLDTMIVAIVDELAPALVARNSIGHGSAAQLLVTAGENAERLQSEASFAALCGASPVPAPSGKTTRHRLNRGGDRAANSALHIIAIGRLRTDPRTKAYIAKRVAEGHSKLEAIRCLKRYIAREVFSLISQRKREINQGRNAA

SEQ ID NO: 176483 - protein, 389 aa, unidentified
MSSVPADAAVSRSLCTIYLGMDVHKDSITVAVLPEAASTPTRVERLSYDLKKLRRFLDRIALDAELKCCYEASGAGYVLQRAMREWGYSCEVIAPSLIPKRPGVQRKHDKRDAVDLARLYRAGELSTVRIPSEAEERVRDVVRLRETLQRELLKSRHYVLKFLARKGFVYREGKNWSVRHYRWLKKLQGSQSPLAVEDEFIFSELLALLEYKLQRRDELDRVVEKLALTPSLAPAVGYLQCFRGLAVHGAMVLQTEIVDWRRFEKATQYSAYIGLVPRENSSGPTERRGSITKAGNSHCRHIFVQAAWSYRHRPKISEELKRRQEGMPAWVVAHSWRAQQRLYKLFHAISRRKSPQIAAVAVARELAGFVWAVMRELPAQEEKLQMQAA

SEQ ID NO: 176484 - protein, 355 aa, unidentified
MSKLNQLDFTGTTIYCGLDVHLKNWRIHIRDEEMELRDFSQNPDPILLSYFLKKNYPGATYKVGYEAGFCGFHIQRKLTSLGIECVVLNAADIPKGNKDKRQKNDKRDARIISEEIKKKQVGIYIPSVDWEYGRSLVRTREQQIADSTRMKARIWQFLYFHNLAAPQKQEVGQHWSRRFIEQLQAHDCHNNAQLKAALHIMLTDYLQKRKLLLEVIKAMRRLYRQEPYKKNMELILSIPGIGEINAAVILFELQDIHRFKTFDQLCSYVGFIPDTDDSGETKRDKGITHRFNRRLRKALIESSWVVIRRDPALLMKYKHYCKRMHKNKAIVRVAKHLLARIRFVLKEQKNMWKVF

SEQ ID NO: 176485 - protein, 348 aa, unidentified
MLADELDFVVGVDPHRDSHAIAVVEVRSGVVVVESSVAADSGGYAEALRVAEEQAPGRRAFAIEGSGSFGAGLTRFLAEQGEQVFEVGRLRRERRSGGKTDALDAVRAARSVLEQKRPATPRCNGEREALRALMAARDGAVNAKRAGLCQLRDLLITTPEPLRSELRPLSRARLLSRLSTTRPHRRHDPELRGTLLALRALARRVQQLTAEERELAQEIEKLISTLAPQLLSQPGIGPLLAAQIVLSWSHRGRLVSEAAFARLAGAAPIPASSGQTIRYRLDRSGDRQLNRALHQIVLTRRRMHRPTIDYIERRVREGKSRREATRCLKRYLARKLYRLLEHGSPLAT

SEQ ID NO: 176486 - protein, 341 aa, unidentified
MANVHVVGLDIAKSVFQLHGLDEAGTIVLQKRLTRARLLPFFEKLSPCLVGIEACATSHYWAREIARFGHQVRLMPAQYVKPYVKRQKNDMADAEAIAEAVTRPNMRFVAPKAPEEQSAMMLHKVRLMLNRQLVMLTNAIRAHMAEFGIVAPVGRGGVDRLLQVIEDEADARVPSAARQCLQMLVGQLHLVKRQILENDRQVLALTRSSELGRRLMEVPGIGPLVASALVACVPDPSVFRCGRNMAAWMGLVPRQNSSGGKERLGSITKAGNRYLRQMLFAGAMAVIRRAMQSTRRTWIVRLLERRKPKVAAIALANKNARIAWAMMMSGDRYREPMAIAA

SEQ ID NO: 176487 - protein, 341 aa, unidentified
MMRTTYVGMDIHKNFIQAAAMDEHGNILREQKFKSTGDAIKNFIESLQAQKIQAAIESTCTWYHVYETLNSLNIETKLVNVRRTKVIAESKIKTDTLDAKNIAHCLRTGFIATAYIPSKPIMEQRNILRHRLSLRKELTRYKNKIHAILLRNGINHNFSDLFGVKGKRFLKTITLPDSERNNLDSYLHIVETLLNEKTQISQRIETLCRNNNQAMILTSITGINYYSAMAILCEIGEIIRFPNPKKLCSYAGLVPRTIQSGSHVYHGRILKECNQNLKWILNQCTHVHIRHCKNSPITKLYYRVLRKKGPNKATVAASRKLLTCIWHMLTKNEMFKYSSDD

SEQ ID NO: 176488 - protein, 380 aa, unidentified
MARMHDSARSKTTVYAAIELSKKSWVVAIARPDRDRPSIHRIAGGNLADLIGRLRKAAREKQRIVVCYEAGYDGFWLARSLAKIGIDCRVLDPASIQVNRRARRVKTDRIDSLALLRALIAIDRGERHVCAVVRVPTVEEEDARRSHRERQRLVRERTGHINRIKGLLFAQGVRGIEPKRRRTRIDFGKLATAEGVPLAGRLRRELEREYQRLELIETQIRIVEKERDTADAQDPAVEQKRELLCALQGVGGASAAILAREVFARQFASRRQLGSYLGLTPSAYDSGSTTRCQGISKAGNSWARRVLIEVAWLWRKYQPGSPLSHWYARKTADQSPRIRRIMLIALARKLAISLWRYVETGLVPDGSVMAKTTPHMAAAA

SEQ ID NO: 176489 - protein, 343 aa, unidentified
MPHYVGLDVSQKTTAICVVDAQGKRLWRGVCATDPGPISARISQHAGVDAKVGIETGSMTPWLVHGLRAAGLDVACLDARRVKAALQMQLNKTDENDAEGLAQIMRTGWYRAVHVKSLDAHRARALLGARAQLVGMTTRLSNMIRGVLKTFGLLPGAGRGLRFDRKVEALLEGAPEIALVVRPLLATWRQLREQIAVFDKAVLQQVRADPICRLLMTVPGIGALSSLMYVSTVENPSRFSRSRAVGAHLGLTPRRYQSGETDRSGHISRCGDGLARTLMYEAATVILHRVKRPLHLKDWAEAIERRSGSGKARVALARKLSVILHSVWRSGEPFRWAAPAMAA

SEQ ID NO: 176490 - protein, 408 aa, unidentified
MQILYERCAGLDVHKRSVVACLLFPENGQPRKERQTFSTMTPDLVRLRDWLKDHDCSCVAMESTGVFWKPIYNLLEEHFQVLVVNARHIKTVPGRKTDVKDAEWIADLLQHGLLRPSFIPPVWQRSLRDLTRSRSTLTQERTRVIARLQKGLEDANIKLASVVSDVMGTSAQHMLQALVKGELSPVAMAELAQGKMRPKREQLAQALTGHLQPHHRLLITEHLAHIGNLEQAITRLSAEIAERLTPYEEILLRLETIPGIKRRIAEILLAEMGPDMSRFPSAAHLASWAGMCPGNRESAGKRLSGKTRKGSQWLRTALVEAAHAASHCKESYLSAQYHHLAFRREKKRAAVALGHTLLIIIYHLIAEKKEYEELGGDYLDQLDRQGKEKRLIRQLEKLGFEVSLTPTK

SEQ ID NO: 176491 - protein, 331 aa, unidentified
MSVHVGLDVGSRSTAMAWRHKGRPAGTWDIDQTPKGRKNAVKKLLALNPVSVVMEATGIYYLDLAIELSAAGLPVSVINPKSSRNFARLMLQHNKTDAIDAQLLAEYGERMTPRIWKAPTPGQLELRAIGRHINRLTCHRTRAKNELHALLATETTSRLLIEDEEEAIAMFDKRIERFRAAGRELIANDPILSAQFGHMTAAPGMGDVSTLAVLAELTTLPATLKSAQVSRHAGLDVRVTQSGTSIDKPGRLSKSGNAYLRSAMFMPAMSAIRCDPYVKAFYEGLVSRGKRKMQAICAVMRKYLTGLWACMHSGEDFDTAKLFSEKHLQKA

SEQ ID NO: 176492 - protein, 403 aa, unidentified
MSSAVSYLCRRMKGSTALIIIGVDPHKRTHTASVVETDTDKVLATLQIDASFAGYRRLLKWASGFEQRRWAVENARGLGRHLAQWLVAREEVVDDVPSTATARVRELSRGGRRKNDVIDAAAAASVAALRGDANPVVADDLTTVLAMLDERRDNMVTQRTRLINQLHALLRDLLPGGAPTDLTASGASRLLTGVRPAGPVEAARKQLARDLVAEIRDTDQRLKTLTAQITDSLDAHGTRLREVPGIGPVIAGRLLGRTRRAGRFRSASAFANYAGVAPIEVASGDHARHRLPRGGDRQLNLALHIVALTQVRMRESTGRAYYDTKIVAGKSHNEAMRCLKRRLANRVWRLMLADERRLAAGPGGHSGATLTSSAAGSTPTTSSSDKSLPGPADRNSTTPSPAA

SEQ ID NO: 176493 - protein, 415 aa, unidentified
MIAAVTECCAGIDVGKKFVVACVLKGPANGDAQAQIRKFGTTNVVLQELREWLVNCGCTQVVMESTGEYWRPVFNVLEEAESLRIVLANSQQVKGLRGHKTDPEDAHWLAHLLRHGMIRPSYIPPPCIRQLRDLTRRRRQLVRCGAQERNRVQKVLEAANIKLGNVLSDVFGLSGQLMLEALLEGKAEPAQIAQLAQRSAKKKIPQIQEALEGHRMQPMQRKLIGFSLDHMGFLEEQITALDEEIATHVRVSELQHPYEILQTVPGVKQEAAGSLLAELGPDMKVFGSGAKCSAWAGVAPGNNESAGHKKRAPALRGNPWVRSTLVECAWSASRKNGSEFQQQYERLKPRLGHKRAIVAVAHSLALVIFQVLATREPYTKPGANPMPETQTARLIRHHTRRLKTLRHRMRTQTKT

SEQ ID NO: 176494 - protein, 366 aa, unidentified
MKKVSTAAAMQTKNFRDQQLTIGLDLGDRSSWYCVLDAVGGVLLEQRLSTTPKAMKEVFGGMPRSRIALETGVHSPWVSRLLSELGHEVIVAHARNVRLIGESRRKDDRLDAQTLARLARIDPRLLCPVKHRSRKAQADLTLIRARAGLVRARTALVNTARGLTKSYGERLRGCNVRNMNPEKADGLSVELRSALQPVLAGIESLSEQIREYNERIEKLAEESYPQVELLKQVKGVGTLIALTFLLTLEDAHRFHKSRDVGCYLGLQPGRRNSGQSEPQMHISKEGDPYLRTLLVQGAQHILGPFGPDCDLRRWGLKLAERGGNNGKKRAIIATARKLAVLLHRLWVSGEVYEPFHNRKPMAATAA

SEQ ID NO: 176495 - protein, 343 aa, unidentified
MDDCDYKVGLSPQAPGIAHPNMKDPVLGIDIALATFVAALRFDDGRLARMEFANNPNGFRQLLNWLRRHFVGQLAVGLESTSTYGDALAQWLFAHGHTVYLLNPERVATYARSQGQRNKTDPSDAAMIAAFTAQYKGTPWQPPSPEQKKLRSLTRTRHQLICCQTQLKLQIRTAEPAGTVHLKAVLKKVQSELQALTRQLKEHLRLHPTLDGQVKRLRTFKSVGLTTAATLVAELPPIGPDSDPRSICVWAGVIPQRRQSGPKEYRTRLSRKGNAYLREALYMPALVGRRYNPVLRAFAARLKQKGKTSGAILGAVSHKMLRILVGMLRTQTDFDPNWSPSMP

SEQ ID NO: 176496 - protein, 307 aa, unidentified
MANHVTKITLGIDVAKDQHLTYNWQTNQTSRLPNKAGDIRTWLKSFHGPVRIAIESTSNYHLTLVDEALALGYEVYLVNPRQLVHYREAVNVRNKTDPLDAWLLARYLEHEADHLRPFQPRDPRAQRLWGLILRRATVVKSRQQLQQSFAEVQMSIQGLLTQYENLMARIESQIRKLIKEIGWWSDYQCCLSIPGIGHGNASALVVAYHRGAFSGSDAFISYLGLDVRIRESGCFKGRRKLTKRGEPELRRLLYCAAYPARHYHRFAEFYQRQLDKGLSKIAARVVLARKLARIAFTLMRNEENFMK

SEQ ID NO: 176497 - protein, 344 aa, unidentified
MKNSNVMGIDLAKNIIQVCKVDKHGELTSNKAISPNKLKELLAKSVPSIVAMEGCGACHYWARLARKYGHDVRIISPRRVKAFLQGHKTDANDALAVAIAATQFGMVFSQIKEEEQQSLQTLETSRKFLDKELTALNNHIRAYLYEYGITMNRGQKSLRATMVIVLDDLDTRLPECLKSTLKVLWERYQLTVIQLKETERYRAALVKQLEPCKRLMALEGIGEVCAAMLYASMGDGREFKNGRQASVYLGLTPKQHSSGGKTYMRGIDKQGGNKALRAALYQGALSVISRLPSEPRTVKEEWLLKLVERAGVKRACIALANKTVRTAWALLATGKSYEPVLLSR

SEQ ID NO: 176498 - protein, 325 aa, unidentified
MDVIGIDISKLKFDVVLIIGERSKHAVFSNTEAGFQQLLAWLGKQRPDPDCSLHACMEATGNWGLDLADFLHGQGVQVSIVNPLRIKAFGQSELARNKNDKLDAGVIARFCRSQNPPLWVPPAPHLRELRELVRRCNALKDARVQETNRQKSGFASPAVAKSIEAHLSWLDRQIDEVSAAVLRLVQGDTTLRKNLSLLRSITGFGEVSAAILLAELPNIADFTPKALAAFVGLSPKEHSSGSSVRRPGRMSKVGAERLRGTLFMCAFSAKRFNPRLADFVQRMKNAGKAPKVILVAVARKLLVYAHAVIRTQKPFQPLPNAPSSI

SEQ ID NO: 176499 - protein, 345 aa, unidentified
MTNNIQFSSVCGIDIAKSVMQVYKVTSDGVVSNKAVKRADFLNEFRNIPPALIGMEACGGSQHWARELQSLGHTVHLMPPKLVKPYVTGLKNDKNDARGIYKALEMSVREVPVKSAAIRDLALLQTMRTKRQREKVAKINHIRGILTEYGLVMGKSINAFLAKAGSLIVQLKERADVSPYIVSELTALFREVKEAMEKIKELETNIDSIAKTLKQYDLFRSAPGVGPITAATMLVLLCNPEVFKNGREFAAYIGLAPKSSGSDGKNFVTHIPKKCECNNDVRALLVQCAHSICRCKHKSDWVSSILARKPKKVAIIAIANKLARQLWIMAKKGEKFEKRFILAAV

SEQ ID NO: 176500 - protein, 372 aa, unidentified
MNYNTVYVGMDVHKESFSLCAYTIEAEKASHYQRTEADYKKVLNYLEFLRTIYGDDANFICGYEAGCLGYTLYHQLTANNVKCIILAPTTMLEQRSKKRIKTDKRDAEIIAKCLAQHNYSPVHIPTAKDEETKEFLRMRDDHKLALKKVKQQILAFCLRHNYRYDGKSHWTAAHLKWLKALTPEALYKEILDEYLLTYQTLSDKIERLDKRIEELATQDEYKEAVKKLCCFIGVKTHTALSVLVEVGDFKRFASAQHFASYLGLVPGEDSSGDDQNRLGITKAGNRHVRLLLTEASQCYARGQVGFKSKELKARQSGNTPAVIAYADKANERLRRRYYKMVLNKCKKHNVAKTAIARELACFMWGMMTDNLA

SEQ ID NO: 176501 - protein, 423 aa, unidentified
MEGQRAPARARRSKRTKTGPDREVVVYRKRQSYTRKEPAVNKNSASSHQSEPQTFVGLDVHKETIAIAVADRGSAAPRSLGIIHNDLDELRKALRRLGSPAQLQVCYEAGACGYAIHRFLTRLKIACLIVAPSLIPRKPGDRVKTDRRDALALARLLRSGDLTATWVPDPEHEALRDVVRAREDAVEDRLRAWHRLTKFLLRLGISPPAGVRARSVRYRQWLEGLQFDDAAQGLVFTEYRYCVEEIDQRVKRFEKRLTELAQSSKHAATIAALQAMRGIQLLSATTIVSEVGDLGRFASPRQLMAYAGLVPSEHSSGSRLRRGCITKCGNAHLRRVLVEMAWHARLAPRTSDALRRRQGSVHRQACTIAWNAQHRLYKRYRHLCARGKRPQQAAVAVARELLGFIWAIGQVVRSSNISLNTAA

SEQ ID NO: 176502 - protein, 354 aa, unidentified
MTVYCGVDFHARQQTVCYCDTADGEVKFSELKHNREEIIAFYGSMKGEVIVAIEASGYSRWFEELILGMGHQLLFGNPTLIRRRAPRKQKNDRRDAELILTLLIKGELPIVQPHPAESGEVLRQLRYRHKLVKVRTLAKNSLHNISISAGCSLQKSMLYKGRAKLEALKLPEDLGRQRRQWLETIERQDKLVDEIESWLEKKAAGDRLVKLLQTHPGIGLISSMVIRHTLEPLTRFSTTRKVVAYVGLDPVEDSSGERKRFGSISKAGSRLLRFVLGQAGLVACRRDESLKRFYKRIAAHRNHQTAKVAVARKLLVRAFIMMRDEIDYAEFIRRGVEARSARLTRRPAAQSSHQ

SEQ ID NO: 176503 - protein, 339 aa, unidentified
MKITTIGLDIAKSVFHLFAVNKMGRFVKKKQLKRRQVLSYLARLEPCLVAMEACGGANYWSREIEALGHEVKLIAPQYVKPFVKGNKNDYNDAEAIAEAVQRPTMRFVPIKSVEQQDIQNLHCRRERVKKARTAVGNQVRGLLAEYGIVIHKGIAAVRRDLPDILEDAENGLTMRSRELFADLYQELRELDERFKQCDRQIEISNRGNEVCQRLDEILGVGPLIASATYAAAGDGKNFVNGRHLSAWIGLVPGQHSTGGVTTLLGISKRGNVYLRTLFIHGARSVLQHSAGKTDPFSLWAQALLARRGHNKACVAVANKMARIAWVVMAKGETYRPAMS

SEQ ID NO: 176504 - protein, 354 aa, unidentified
MSATILLRHCWCVGIDLHKDTMTICICCRCCGELIFRKIACKNRDQVEKFFRALPRPHVVAIEAVGFYRWLWELLEPIVEKLVLADATQARALAGRRIKTDRQDAENIATLLADGRLPLAYAPPLEVQILRDWTRQRNRLSRAHARALHGVKSLMNINNRPGPARLSAERLTGYVKAYGDRLPERHVRMLWQHQRQLSLIEEEIALCEREIARLLESPRFAVQAALLRTAPGVGPTVTATVLAEVGDFLRFPDAKAVGRYAGLTPRVFASGGKERHGHISKTGPRDMRWVLQQAAWTAIRCDERIKKRWLKIARGSGKKAAAVAIARQLLVALWQMVRHNAPYQPRITQPQQVA

SEQ ID NO: 176505 - protein, 403 aa, unidentified
MNMNAVGIDVSKGKSMVAILRPYGVIVSSPFEIKHTSGNIQSLIEQIKSIDGESRIVMEHTGRYYEPLARELSLAGLFVTAVNPKLIKDFGDNSLRKVKSDKADAVKIARYTLDSWTELKQYSLMDEIRIQLKTMNRQFGFYMKHKTAMKNNLIGILDQTYPGVNAYFDSPAREDGSQKWVDFAATYWHVDCVRKLSLNAFVDHYQKWCKRRKYNFSKDKAEEIYGAAKELVPILPKDDLTKLIVKQSIEQLNTASRTVEELRTLMNDTAAKLPEYPVVMGMKGVGPSLGPQLMAEIGDVTRFTHKGAITAFAGVDPGVNESGTYEQKSVPTSKRGSSSLRKTLFQVMDCLIKTKPQDDPVYAFIDKKRAQGKPYYVYMTAGANKFLRIYYGRVKEYLMSLPE

SEQ ID NO: 176506 - protein, 487 aa, unidentified
MAKRRKSTFERLSTGQMNRSQRRELGRRVAAGDAGLAIVQANAGGIDVGKESHFVAVPPDRDTNPVREFGCWTAALNEMAEWLKSCRIDTVAMQATGVYWIALYDVLEQHGVRVVLVNAQHTKNVPGRKTDVQECQWLMKLHTYGLVRDSFRLQQDMEYVRTIWRVRDRHVKEAGREVQHMQKALTKMNVQLANVISDVSGVSGQAIITAVLKGERDPYKLADLADYRVKASREEVARSLEGNWRADVLFELQQAVDSYHFAHRQMQECDDKLTLYLVSLPTRMLEIPVPSKGAPETPESPAQKRKKARKPRDNEPRMDMKGELKRICGVDLTSIDGINVMTAFTVLSEVGTDMARFKDEDHFSSWMGLAPSKDISSGKIVGRGKKKVKNRVAVVLRTAATTLLESDTHLGARYRHLRRQLPTHKAAVKAMARYLAVLIYRLLTKGEAWVDRGARQFEQRRTQREMVSLQTKAKAKGFTLVPLAEAR

SEQ ID NO: 176507 - protein, 338 aa, unidentified
METKKQTINWFLGIDISSATLDVSILTSGNEKEYAHKRFSNDVQGFKEILSWLKSSGVKLKQSWFCMEHTGIYGLELCCFLSKKKLPYTMYSPLHIKKMMGIVRGKNDKADSKMIAQFAYLYRDRLKPSEMPSKTLISLRILINHRQSLVKRKSELKQQSHKIDRMELIVNVSFVARSIIREIDWLEGEIEKTEHEMTELINQDNLVKTNFDLLNTVPGIGLVVASSFLVQTKNFEAFETGRQLACYSGAAPFEYQSGTSIRGRTKIHPIANRQLKTLLTNSAYAALRYDPEIKQYYDRKTAEGKAPMSVINAIRCKQIYRMFSVVKRGTPFVKNSQG

SEQ ID NO: 176508 - protein, 359 aa, unidentified
MAKRSTRHEGEVGGLDLGDRYSRLCILDGATGEVVEEGRVATTEAALRRRFGSVGPMRIAIEVGTHSPWVSRLLSECGHEVIVANPRKVRLIYKNRRKNDAIDAMYLARLARTDPALLSPIRHRGQEAQKNLAMLRGRDALVKSRTQLINHVRGAVKATGKRLPRWGSDAFARRAAGALPPELVTALGPVVEAIASLTAQIRSCDRALEALAGAYPETSLLRQVKGVGPITSLAFVLTLEDATRFAKSRAVGPYLGLVPAQRDSGDSKPQMRISKEGDAFLRRLLVGGAQYILGPFGEDCDLRRHGMKLGASGSKKDKKRAVVAVARKLAVLLHRLWQSQATYEPLYNAKRAIRTTLAA

SEQ ID NO: 176509 - protein, 313 aa, unidentified
MSHKETFVGIDVSKKELQVYVRPDGKRDVFANTEEGVAQMLTFLKSFSPTLVVLETTGGLEIEATNALVDHSLPVVIVNARHVRNFAKALGTLAKTDRIDAEIIAHFAEAVRPEIRPLRDEQAQRLHALNVRRRQLVQMITSERNRLSQASKWTAKTIQDHIDWLSREISKIDKEISHLIKNSPVWREKDAILQSFKGIGSITSSVLLAALPELGTLNARKISALVGVAPLNRDSGIFRGKRFVWGGRKEVRCALYMATLSAIRFNPVIKTFYKRLIQAGKPPKIAITACMRKTLVILNSMIKNMTYWQPSIP

SEQ ID NO: 176510 - protein, 406 aa, unidentified
MSLYQNQNYVLCGIDISKTSFDYCFLDQNQQILGRNHLLMDRSSFEKLYDISQDFVNKKVVFFMESTSTYHRNLQYYLMEMGYDVYVIQPLLIKNFNSSFDLRKTKTDKKDAYIIAAFGLFNIDRLHTLSPDYDALHKLFRLYLHFKKTLTALKNKLKGEIDFCFPELSNEVNIYSKTMLNLLHKYCLPSEIAKKQVRAIDRLLHAFGGNIKSITAKKMIEMAKASVGNGDEIDKISVKHLIESIWEIEKRLKNIEQTLDTKTEEIFQEEKEILTSVNGIGTYLAMSFLLETNNIRDFGNWKQLCAYAGLDPGRKESGTSLKSNGKITKKGNKRLRYILYLMAKGVSKSCPRYKAYYEKKKREGKCYFDILTAISNKLIKLLFYLLKTGKKYMDNYEQSLKLERVI

SEQ ID NO: 176511 - protein, 331 aa, unidentified
MGVKARMYKEGHCTMLSKQEGQYLGIDLSKEWISTELFPSGQTETVARTQEALQEWIAKLPSGIMLAVMEASGGYEALPAALLHEAGISVAVVNPRQVRGFAVALNLKAKTDEIDARLIAQFAHDIHPSPKPMNSPNQDQLKELLSRRGQLMKMQTAEKNRLGMAHNPRVKKSIKTHLEWVALELANIDKELDSLIKASSLWKAKEDFLKSVPGVGKITARSLMAGIPELGCLNRKEAASLAGLAPFTHQSGKWQGKSFITGGRSAVRSALYMATLCAIRCNPTIRTFYERLTSCGKPKKVAIIACMRKLLTILNALMREERFWQISSIPA

SEQ ID NO: 176512 - protein, 384 aa, unidentified
MQKDNILFIGLDTHKEQTQVAYTLDHRTSEINNLGRIQSTKAGFVKLARQLQSKFPHATLHFVYEAGPCGYWIYRLLTSLGHCCFLIAPSLIPKKPGERVKTDKRDAQKLARLLKNNDLDPIYVPEPEDEAVRDLSRAREAAMRDLNDAKHQLKSMLLRNNIRYSGTANWSLKHLRWLTEMVLPHPCQQIVLQEMIQSIDERTKRLKRLDNELTHQVKKWRYYPVVKAIQAMRGVRLLIATGLVAELGDLSRFDTPRKLMSYVGLTPSEHSSGDKRKLGSITKCGNGRVRRLLIEGAHSYRYSARVSKEMQVRQEGLPKNIIDMAWQAQLRLCRRYQRLMKRGKNYNVVVTAIAREMIAFIWSISREVVLPKIDTKTRLSRVPA

SEQ ID NO: 176513 - protein, 358 aa, unidentified
MKQTRVEYILRKERVFVGLEDAKRTWSLCVRSGGMIVHETSMPAKYGVLRSYFHNKFPECQIQVMYEAGFGGFELHDQLVADGWECVVTPPHTVTEEKCQRKKNDRTDCRRLAKNLENGDYRKCFVPDKGLREDRQISRTCGQVQADITRVCNRIRRMLEFHGLDNGLPAGRWSGAAYAQLRQHLKKVEMSDSLRFSFEVMFRELENLRQLKKELVLQLRKLARSDRYRGSVRLLMSAPGIGMLTAIRLTLEWGDLSRFGRKEDFASFLGLVPSDYSSGDQEHRGHITKQGNRSVRWWLTESSWVAIRHDPVLLDKFRRVLRHCGSKKKAIVAVARKLALRLRKVWLSGEPYVVGVVE

SEQ ID NO: 176514 - protein, 391 aa, unidentified
MIYVGIDVAKDKHDCFITNSNGEVLFKAFTISNNQDGFNVLYQRIESVMEDVTKVKVGLEATGHYNYNLLGYLIDKGLTTYVINPLHSNLYRKSLSLRLTKTDKVDARTIAYMLMSDVNLKSYSDTSYHNEELKSLTRYRFDKVKERAKLKTSVSRLVCILFPELEKLVPTLHMASVYALLSEFPGAKHIAGAHLTRLTNLLSYASKGRYGKDTAITFREAARASIGSNMPAKSLELKHTIQLILELGSEIEEIENEIKIIMDEINSPILSIPGINYRMGAMIIAEIGDFSRFDSPDKILAYAEFSPSTYQSGQLDSAYSHMEKRGSKYLRYALYNAAKYVCHWDSTFAGYLAKKRAEGKHYNVAISHSVKKLVRVIYHLVKSNQQYIKVA

SEQ ID NO: 176515 - protein, 412 aa, unidentified
MQDILTCAMGLDIHRDVIVACLAKGELGTDPEIEIRSFSTLIPEMRKLRDWVLEAECCYVAMESTGIYWQPIYEMLEPCFDGQINILVVNARHMKNVPGRKTDMRDAQWIATLLRAGLLKGSFIPDKTFRELRHLTRYRKSIVRDITAQKNRIDKFMQSSGFRFTAFLSDAFGASGRNIIRHLMEYGNISREALDRCLKTQTRKRIDEILIALNGSLSEHQRGFLRMIFGHLEALEQHRHTVEDAITKEITKHEEALSLLCSIPGIDVTAAAAIIAEIGTDMSAFPDSQHICSWAGLSPGNNESAGKRKSAHINKGNPYLKSMLYEVGWVISGKRSLYLSGWYWRIKQRKGAKRATIALARKLLALIYTMLKTGSPYNEDCFEIRRKQSERKRASRMVNELQKLGYFVVAPS

SEQ ID NO: 176516 - protein, 363 aa, unidentified
MTEGICFAGLDVHARKTAAAAVQLGSGEVFKAQLSGSPSAVIEWLVSLPGPVRAVYEAGPTGFGLARQARAEGVEVMVCSPGAIPRQPGDRIKTDTRDALKLARLLAAGQLRPVVVPAPELEALRDLVRAREDLRGDLMGARHRISKLLLRRGLIFDGPGETWSQRHLAWLSKVRFEQPLVEVVFGEYLAHHEVLLARRDRLDRLLLEQSTQGPWAPRVARLRCLRGVDTLTAVGLIAEIGDITAFKHPKQLASYLGLVPSEHSSGERRRQGAITKAGSSHARRLLVEAAWHYRRAPRVSLTLKRRQADQPPAAIDAAWRAQLRLHRRWAHLDAARAKKRTTVAVAVARELACFVWEIANQPD

SEQ ID NO: 176517 - protein, 316 aa, unidentified
MLYVGIDIAKNKHDVTALNVQGKTVLKPLTFSNNKAGFELLDLSLRQLNQDCLIALEDTGHYAFNLLNFLHEQGYKVYTYNPLLIKKFAKSLSLRKTKTDKKDAHGIALKLLSDPNREQFQHNNRQVELKILTRHIHRLKKKQSDWKVQYTRCLDIIFPELDKIVGKHSEYTYQLLTRYPNPQKRIEAGFDKLIEIKRLTASKIQDILSVAPRSIGTTSPAREFEIIENIKHYKRLIDKAEKCVNDLMAELNSVITTVTGIGNRLGAVILAEIQNIHAFDNPAQLQAFAGLDSSIYQSGQIDLAGRMIKRGSPHLR

SEQ ID NO: 176518 - protein, 333 aa, unidentified
MNEHAVGIDVSKKKLDICVISSEKYKTKVLSNTAAGHAELLRWLAGRQLPVATPIVLEATGPYSEAVAIALADAGWAVSVVNPARVTGFAQSELSRNKTDQADAKLLAKFAQRAALAIWKPPSREVRELRALVDRLQALIDMRQQELNRLEALAQGLPSNVTDMVHEHVAWLDEQIRKLQDAIDDHIDGNPALREDAQLMQSIPGIGKRSTAQFLAYIGDTRRFKSAKALAAFIGLSPKQKQSGASVRGRTTISRAGHAAARRALYMPGLVAKRHNPVIIALAKRLESKGLAPKAIIGASMRKLVHLIYGVIKSGRPFQAGIPLRGLEIQEGI

SEQ ID NO: 176519 - protein, 390 aa, unidentified
MDVLYQSCAGIDVHQANIVVCILHGPLTSTRPKREMATFDTTTKGLRACHDFLSQFHVEAVGMESTGVYWRPVWHALCDDFKLILAQPAHMKAIPGQKTDKKDAHWIAKLTRIGLLPRSFVPDETIQELRELTRQRKHYVESRNRETNRIHKILQSGGIKLTTYIEDIMGLSGRNLLQLLVDGTPITPRIVHQSVYTSLKKKVPQLLEALDGYFSDHHRFMLKQSLEIYDFYQKQIELLEERMNVYLSQYENHVEILDSIPGIDVITASVIISEVGVDMSQFPTAGHLASWTGLCPGNNESAGKKRSTKIRHGNSYLKKCLCQAAFAVKKQKGSPLADRFYQIQSRRGSQKATIALAHQLLKIAYILLKEQITYPEFLAQKKTTRDELVA

SEQ ID NO: 176520 - protein, 315 aa, unidentified
MSDVPCFVGIDVAKAQLDIALRPSGERWAVPNDASGVMTLVDRVQALCPTLIVLEATGGLERAVTSALATAGLPVVVVNPRQVRDVARATGQLAKTDALDARALAHFADVIRPTPRLLPDAQTQELRALLGRRQQLIGMRTAEQNRLAGPSARLTKDITAHITWLNADIATLDDDLETILRASPLWRETDDLLQSAKGIGPVCARTLLLELPELGTLTRQQIAALVGVAPLHCDSGTLRGRRMIWGGRAHVRTVFSMGTLVATRFNPQSKVFDERLLAAGQVKKVALTACMHTLLTILNAMLKHRTPWQPQEVQS

SEQ ID NO: 176521 - protein, 345 aa, unidentified
MQESIYVGLDLGSSRCYQSVIAADGTLCGSRPIPTSEQHLRSAFAKLNGAVQVHLEAGELSSWVASIIEPLVQSVIISHPRSLAWIGKDSQKDDKVDARKLAELLRLGRVHQVFRQTDDSRRTFKYLVVHYEQLSREQARFKSKIKARLRTLGIIRQDARLFSMTGQTALLDAIKSVSIKQMLTQSFTVLNQMLASFDEAKRAMIEFSKQFREVQLLQTAPGVGIITACRFVAYLQTPHRFSNKRKLWRYCRLGVSRRESNGKRLAHPRLDSAGVGSLKDVSRKVFEAARRTKTDNSFKRFYEQSLANTKNAVHARLSTQRKILATLRAMWISNQPFRNDLTEIG

SEQ ID NO: 176522 - protein, 385 aa, unidentified
MGNQRFIPRDYDVFAGLDVDKKSISATFIDHQGFLKSLNMPYKVEHLLNYVRKHYPDKKVAFAYEAGPTGYGLYDGLEAQAYPCLIASPSMIPKAPGQRVKTNRLDSRGISENLRGGQLKSIHVPTPLYRELRHLTQLRDTLVSEMVRMKQRIKSLLLMEGLEFPPAPAGSQWSFLVKKKLRELPCSSTVRFKLNRLLDSLEFDEKQVLKATREIRRFCQANPELFGCIEYLKTLPGIGWIVASQLVARVGDWRQIKNIRQLPAFLGLVPTENSTGERTERGSITHTGDGRLRSKLIQASWSAIRQDGELREFFRTVAKKHPRHLGSRIAIVAVAHKLSVRAAVVLMKQRPYEVRQKVQSAPLTQEETVPQGTTRRQAVPGETNS

SEQ ID NO: 176523 - protein, 394 aa, unidentified
MPELFVGIDVAKDTSSAQGIDSNGKGRFSLTFAMDSEGFMQLWKAITAHRKDLLEVSAAVESTACYHINLYTFLTAKGISTVVINPLLIANFAKLSLRKTKTDKKDAMSIAQFLLVHRETISQLSLSQDLQDFRDIARERESVGNLLSAHKVEIKRLLQSTFPELERIGDLSTRVMQEFIAAFPSARLVKAAKPKAIQKILQRKGVGTRLTYTAEDLIQAAKQSVATISPAKELILQGKVRTHEHLRERYEELTKILTEYCKSSMLEDFEIITSIDGISKCTATTFLAEIGCIGNYASYKKLIAFAGIDPTVYQSGKFEGSSRISKRGNRHLRRVIWLMTTCVLQHNATFRAYFMKKRSEGQPFKKAVFATAHKLVRVIFAMLTQRTMFREVCA

SEQ ID NO: 176524 - protein, 321 aa, unidentified
MTMLAETIDAVIGGDTHRDTHALEMCSPTGATLSTLEVSNTDAGFAQAMRWANEYAPGPNIVVALEGTRSYGIGLARAMSAEGMRVIEAKAPRKSERRGMGKTDPIDAHMAAVNALNLDAGSLPVPRADGNREALRILSVARREMTSTQTRHINQLRTLLLGGDDSERELARGALANTRLGQIARRRSRDGEGVEQVVGRCEARRLALTIKASRVALVENKEQLAELVDQSVPTLTDGFGIGPVSAAQVIVSWSHLGRCRNEAAFASLAGVCPIPASSGRTIRHRLNRGGDRALNRALHDIVITRWRACTRTRAYIEKTPG

SEQ ID NO: 176525 - protein, 342 aa, unidentified
MQWTVAIGIDTHKHTHVAVALDRFGAQLDTFEAPATSAGYLALYRWAHEFGEPAFALEGAGSYGAGLARLLQAAGCRVYEAERPKRAERRRGKSDLIDALIAARRLLAGERLGAPRGLSGPREDLRLLLLERRGAVRARTAALNQLQAVVVTAPARLRSRLGDGTSEQLARAVAHLRPGAGEQAVVRGVMRRLGRRALRLDEELAELDRELEAIVSALVPELLDECGVGPVCAAQLIVSSGDPARMASEASFAALAGTSPVDASSGQQQRHRLNRGGDRQLNRALHVIALTRVRYHGETAAYHQRLLASGKTTREARRCVKRMLARYFHRKLCSLPALALTT

SEQ ID NO: 176526 - protein, 404 aa, unidentified
MQVVHERCGGLDVHKRTIVACVLTSERKQTRTFGATTAELTELSSWLIAEGVTHVAMESTGVYWQPVFNLLEQLDLAILVVNARHVKQVPGRKTDVKDAEWLADLLRHGLLRGSAIPDRARRELRELVRYRVTVLRQRAQIVQRIQKLLEAANVKLSSVVTDVTGATGRAVLEALADGTTDPAQLAGLARGSLVRKRERLAAALRGSMGAHQRLLLGSQLRHLDFFDAEIAQLSNAVADRLRPYEAIIDRLDAVPGIGRRVAEHILAEIGPDVDRFPTAAHLASWAGLCPGNNESAGKRMSGRTRKGNVWLRGVLVEAAWGAARTRRSYLAAQYRRLAARRGAKRAAVALAHSLLVIVYHLIRNGTIYDDLGTNYFDERDRAATLRRSVRRLERLGYRVTVEAA

SEQ ID NO: 176527 - protein, 430 aa, unidentified
MKSNTQNAKIEAITEKTLVLGIDVGSEMHYARAFDYRGIEYSKKPFKFSNTEAGFVTFKEWILDLKERHEKDKVIPGMEPTGHYWFNLGKFLQDNEMKPVLVNPHHVKKSKELDDNNPTKNDRKDPKVIAGLVREGRYMIPYLPDGVYADLRTASNIRFQLQAELTRIQNRISRWFNIYFPEYKTVYGKPDAKSGMLILKAAPLPEDILTLGIDGVNQIWRDAKLRAVGKARAKTLIEAAEHSVGSKEGAVSARMEIRMLLEDYESRNTRLQEVMVLIEELVRKIPMAEKLLEIKGVGIRTVSGFLAEVGDISRFNNPKELQKLAGLALVENSSGKHKGETTISRRGRKRLRYLLFEVAMSLVAKNPEFRELHNYYTTRRLNPLKKMQSLMAIAAKLIRVFYAMLTKGVDYDPKKMVSDIKRPAVYLQAA

SEQ ID NO: 176528 - protein, 350 aa, unidentified
MQQFIGCDAHKRYSVFVAVDDRGNATKPVRIEHVREDYAHFLSQLPEKSEIAVESTGHWYWLVDEMERAGHHVHLANPMEAKKRMGKTNKTDALDAKGLAILLRNGTLPESWIPPGSLRDQRELLRTRMALRDLRSSLKHRIHAAVDRYGLHTDSLTDLFGAKGREYLAARLAEFPPATARMVEVQLCALDELAAHIETIEQRIHAEIAPTAEVQLLRSVPGVGEILAPVIGLEIGDVNRFPRAENLASYAGLVPRVFSSGGHTRLGGISRFVNQYLKWAFVEAANCAVRLKAHRHSHVGCLYQRLLAKRGHGRAIVAVARHLAEASYWILRKQQPYRAPRQNNTSSRNG

SEQ ID NO: 176529 - protein, 343 aa, unidentified
MKHYAGLDVSVKETSMCIVDETGKLCREVKAPTHPEDLARVLKDPSWQLERVGLEAGPLSQWIFSGLADVGLPVVCIETRHTKAFLKAQVNKSDRNDARGIAQMMRVNLFRPVHVKTLTSQKRRALLTARKLLQEKAIAIENDIRGLLRNFGLKVGGVGAVKFADRVHELVDGVTDLAEIMASLLDARRMLREHFTALHRTLLATVRDDDVCRRLMTIPGVGPVVSLAFVTTIDVPARFRNSKAVGPVLGLTPVLNQSGESRRVGRISLCGDGMMRTLLYEAAQTMLTRTTKWSWLKAWAMKVVTRRGMQRAIVALARRLAVVMHRMWSDGTEFRWTKDAQTA

SEQ ID NO: 176530 - protein, 392 aa, unidentified
MIITVGIDVAKEKHDCFILSSEGEVLADVFTIQNNAEGFNQLLQVIQSCASPIDKMKVGLEATGHYSYNILGFLLEKGLPTFVINPLHTNLYRKSLSLRKTKTDRVDARTIATMLMSDVGLKSYTDTSYHNEELKSLTRYRFDKVKQRAKLKSSITRLVCILFPELEKLVPTLHIASVYALLLEYPGAKQLAGANLTHLKAVLYEASKGRYGRDRAIMLRDAARNSIGSYMPAKSLELKHTIRSIQVLDTEIEEIETEIEKLMEQIQSPITSIPGIGSRMGAMILAEVGDFSNFDSADKVLAYAGLSPSTYQSGRMNNCYAHMEKRGSRYLRYAIFNATKYVCYWDPIFKAYLEKKRSEGKHYNVAISHAAKKLVKLIYATQRSGQPYRKAG

SEQ ID NO: 176531 - protein, 339 aa, unidentified
MKITTVGIDLAKNVFQVHGVDGHGKAVLKKQLKRDQFATYFANLEPCLIGMEACGSAHHWARKLQGLGHTVKLISPQYVKPYVKTNKNDAADAEAICEAVGRPNMRFVSIKTLEQQAVLSEHRVRQSFVYARTAQANQIRGLLAEFGLVIPKGIYHLPKQIPQLLEASELPETFRNLIDGLLAHFRELDRQVAELEAKIKAWHRNSEASRRLEKIPGIGPLGASALVASIGDAKSFKNGRQLAAWLGLVPRQHSTGGKPTLLGISKRGDVYLRTLLIHGARSAILAAQRRSESDSWVGKLMQRRNPNVAATALANKNARIIWALLAHDREYQSGYAAAA

SEQ ID NO: 176532 - protein, 361 aa, unidentified
MTGTMTWVGLDVHARSTQGAAIHSLTGELERVRFGPGVEPVIEWLSGLPGPVRAVYEAGPTGFGLKRAADQAALAMQVIAPGKTPRAATDRVKTDRKDAELLARLLLAGQLSPVFVPDAWIESVRHLARRREQVRADVMRARHRISKLLLVEGRVYCEPTTWNVRHRQWLSRQAFAHEPTELVFVDLLAALDGLLARRDALEERLSRLAQDERLWPTVARLRCFRGVDTLTALTLHLELGADWQRFSSPRQLGGWLGLTPSLSQSGQTSTSGSITKTGSSLARRLLVESAWHYMRPPRIGATLRNRQTGQPDHVLQIAWRAQHRLHKVHHKMRDRGKPHNLTTVAVARELAGFLWAAATAP

SEQ ID NO: 176533 - protein, 462 aa, unidentified
MKLYLGGDVSKGYADWVILSEKKQTVLENFQLDDTYAGHCKLYSMVEAYVEKYPGSEIFAAVESTGGYENNWLNTLKSYQKVFNLKVARINPAGVTFNRKAGMKRNVTDAISALSIAEFMIDHPKNITYDQDDKWKSLCRHWNFVEMQKQQRVQTINQLETILYSANPTLMRYKKGDLPNWLLELIIQCPTADKLAKAKPEKLAKIPYLSLARAKELVAEADQNIASATDRNAEILVSQIAMQIKLFDQNIKSQMQLIERDLTCPEIELLKSFKGISTISAIGLLLEIETIERFPTVKGFSCYFGLHPKFKQSGDKVIGVRMSKQGSKNMRKILFNIAKGAITYNPLIMSVYEKKLSHGMKKMAAIGVCMHKILRIIYGMLKHKQEYNPLIDKLNCEKSKDKKQEKQQQENANIEKSRRYQEYDVKAPISRKQTKKRREHDLSQCEITSQSTGSTCSSETKL

SEQ ID NO: 176534 - protein, 324 aa, unidentified
MSLPSPSTNVGIDVSKETLDIAVHETAAHWTSKHEFTEFPQLLKSLRAVAPTRIILEASGGVENLLVSYLAMAGLPVIVINPRQVRDFARATGQLAKTDRIDAFVLARFGATLEPAVRQLKSAETQELEALVARRAQLVNMLTAERIRLQQAQQQRRQSIVSDLKAHISWLQKRLDKCERDLSQLLGSSPIWRATDERLQSVPGVGPITSLVLIAELPELGQLPDKQIVALCGLAPHARDSGKWHGKRTTRGGRARVRTALYMAALVATKHNLVIKSFYRRLLSAGKQKKVALTACMRKLLVILNAMFRNQTSWQPPRLTQELN

SEQ ID NO: 176535 - protein, 370 aa, unidentified
MNDSIFVGLDVHKAMISVAVAEGMRGGEVRNFGIIPNRADQIDKLAKKLGKGDRQVSFCYEAGPCGYGLHRQLKGLGHNCIVVAPSLIPMKAGDRIKTDRRDAAMLAKLHRSGELTAVWVPDAAHEAMRDLVRARATAMRVLGKARQHLQGFLVRHGRTYAGKKGWTLAYRRWLTTVRFDHPASQIVLQDYIHAVTDAEARVDCLTKRIEELAPQWSMTPFVDAVQAMRGVAFIVAVTVVAEVGDFSRFDNPRQLMAFLGLVPSEHSSGATIRRGGITKAGNALARRALIEGAWTYRMQARVSRKLHDRNERLPQAIRDIAWKAQVRLCARYRRLSAAGKPKVIVTTAIAREMVGFLWAIARQVQLGPAA

SEQ ID NO: 176536 - protein, 352 aa, unidentified
MSQRPESTIAVVGIDIGKNSFHVVGLDKRGAIVLRQKWSRGQVEARFANMPPCLVGMEACVGAHHLSRRLKALGHDARLMPAKYVRPYSKGQKNDFRDAEAIAEAVQRPTMKFVATKTADQLDLQALHRVRERLVSQRTGIINQIRAFLLERGIAVRQGLRFLRAELPRILTTPPDVLSPRMVRIVEDLAGDWRRLDERVEILSDEIEATACQDAGCERLMSVPGIGPIISSAMVAAIGTGDVFTKGRDFAAWLGLVPKQISTGDRTILGKISRRGNRYLRVLFVQAAWVVLIKPKSWERHGLKSWIEAAKKRLHRNVLAIALANKLARIAWSVLARGRDFEAGSIATVQPV

SEQ ID NO: 176537 - protein, 447 aa, unidentified
MKKVFIGIDVGKFKNSISIIDTEGNPIIKKGLSIENDYYGFARLEEQIDLIINNYGFTYDDCIAGVESTGHYWFNLRDYLKDIGIETVMIKTDSVKHRRALEEGQKGKNDTLDARVIASCLRNGNYVYIRENERELRALQKLTRMRNDISDELVALKNKIHRCIDICNPVFFKIFENLNSKTGVALIKLYPSPQDIINVELDNIKKELGEIVDKPNMRMVSLYKEECEIWSRLIKEPSHAEKVEMTAYIDKFLLQNKSKEHLDKQIKEIAKNIIPLYSEFEQIKGIPLIQLISVLSEIGDIRNFKNTRAILAFLGLSLKGNASGKYIGERKINKAGSRIVRKHLFNIMDTLIKHNEYFRIAYCYYKSYNHKNPTKKRSMQIAVMCKFVRVMYGMLKYNTSFDYKEMLKGYYFGDCNMKVFKEEFEGEKGTKKIENYKLAYSIFINYS

SEQ ID NO: 176538 - protein, 317 aa, unidentified
MISTAKIFVGVDVSKATLDVYRPDTKEVFKIENSDEAIALLCSQLEKMKRKVMVVMEGTGGCEYLLLKHLAVHKLEASVVNPKRVRDFANGIGLDAKTDPIDAKAISKYAEVVEPKPIATKSDHELKHGALVARRNQLLELVNQENNRLKQSWDDDAKQSIRDVLEVLKKQVKSIDSQLAKMIQADTENQRTIEILQSVKGVGPVMISTVLAELPEIGKLNRGEIAKLVGVAPINRDSGKKSGKRFIGGGRGQVRRVLYMATIVAIRHNPAIKAFYVHLKSKGKESKVAIVACMRKFITILNLLIKTNQLWENKMSV

SEQ ID NO: 176539 - protein, 387 aa, unidentified
MPKQNDLSRCLITLEQDRTLIAVVEMGQASWLVAGIVPGLNRCPLKKIAADGDGLLRLLHRWRNEAAKAGRAIDRIAVAYEAGRDGFWLARWLRAQAIEAYVIHPSSVPVPREHRRAKTDRLDTELLKRAFVGWLRGEPKHCSMAAIPTLEDEDARRPGRERQTLVGERTRILNRLKANLARLGIRGFRPNLARAEGQLEALRTPEGAAIPKNTLAEMRRDMGRLQIVKRQIKEIEKTRAQRLSKEPSEQRDAMVRQLGRVVGVGIETADMLVQEVFSREIRDRRALARHAGLTGAPDESGQRRRERGLAKAGNSRVRRGMIELAWGHLLHQKDSPLTEWFWKRASDGRGATRKTMIVALARKLLIVLWRLATTGETPAGLRLRPAA

SEQ ID NO: 176540 - protein, 439 aa, unidentified
MRPNAGGIDLGATEIFVGVPADRDSDSVRSFPTFTEDLHQLADWLQRCRVDTVAMESTGVYWIPLFQILQARGIEVHLVNAQHVHHVPGRKSDVLDCQWLQYLHSVGLLRASFRPEQAVCEIRSLMRHRENLVEMSCVHVLHMHKSLDQMNLQIHHVISDITGVTGLAIVDAIVAGKTNPKELAKLRDHRIKASIETVTKSLVGDYRPEHIFTLKQSLTAYRYYQQLIADCDHEIQQRIEAFDSKDQGPTAPADATSTETSKESGFNLHSHLERIFGVDLTLMPGFECLRIQTILSELGADLSKFPTDDRFCSWLNLCPKDGSSAGRRIRAPRIKTKNRVAQTFRLAAQSLHNNQSYLGDYYRSQRARYGAPKAIKNTAHKLARIFYRLVTTRQPYDETVLAKLEMHNQKRRLHKLQSLAKQMGYSLVPHEEGNFRSRL

SEQ ID NO: 176541 - protein, 338 aa, unidentified
MRLYGAIDLHSNNNVTVLIDEQDKVVYEKRLPNDLGLIAQQLVAYQSSLEGIVVESTYNWYWLVDGLMDKGHHMHLANTAAIQQYEGLKHTDDTSDARWLAHILRLGILPEGYIYPKEERAVRDLLRKRGQLVRQRTANLLSIQNLITRNTGSSMSSNRIKTLQPQQVDELLADGDLVLAVKANVAMVQCANGQIEILERTVRDRIKPRPEFCFLKTVPGIGQTLALTIMLETGDIARFAGVGNYASYCRCVGSQKLSNGKKKGKGNTKNGNKYLSWAFVEAANFAIRFSSRINSFYQRKKAKSHGVVAIKAVAHKLCRACYYIMKNRVAFDVTKAFA

SEQ ID NO: 176542 - protein, 400 aa, unidentified
MTQSNATQQVVVERTAAERLSAASDVHAAYIGLDVHKASIAVSIAEAGRHEPEFRGEIANEPTAIDTLIRQLSQRFAGQPLLFSYEAGPCGYGVYHQIQATGHDCDVVAPSLIPRRAGDRVKTDRRDAQMLARLSRSGELTPVWVPTPEQEAIRDLTRAREDMKAIELKARQRLSAFLLRHGKVYGGKSKWVPVHFRWLETVRFDTPVQQIVLEEYVDAVKEAQRRVAGLEQQMEAALPSWSLAPVVEALMAMRGIGLITAMTVLAELGDISRFDSPRQLMAYLGLVPSEHSSGGSRRQGGITKTGNGHVRRVLVEAAWSYRFPARKTRIIQQRAERTSPTVQAIAWEAQKRLCGRYRRLMATGKVKQQVTTAVARELAGFLWALACEAMGKPHGSRATT

SEQ ID NO: 176543 - protein, 445 aa, unidentified
MKNLFIGIDFAAKKFDVAVIYAEGLQEQAPAEYNQFENTDEGFKAFVSWVKKNSHKTKAQDWLFCGEDTGDYCRRLCNFLCRKEYDMWLENPKCIKDSGGLRRAKSDKMDARAIAEYAMRNYDRARLYKEPPKILSDLRELFQYRQWLVRDKVANTLRWKIKKENLEKSSATGFVVRKNQETIKHYEKQIKQVDDKIQKLIKSDEKLLATYKILKSVKGIGPVNICCLIVYTENFTKYDYDPRKIACQCGIAPFGQESGTSVHVSPHVHYMANKTIKALLTQAALAAVRFNPLISRYYNRLIDAGKIHPVALNNVKNKLIHIMTAMVKNGTEFDENYEAKRKTRTALNTESSTVSTDEKGICTPAEQPTDAVSQLPELPIDEAFHEASQLPELPADGASQLPENSNQDTQMHIDFPQKSMATGHAHIPLKGSESCRPIEKSHIPI

SEQ ID NO: 176544 - protein, 315 aa, unidentified
MTDVFVGIDVSKRWLDVALRPSLETWRVTNSPEDVAALAGHLVTLTPVLVVLEATGGHERDLVAALSAQALPVVVAHGWHVRQFARATGRLAKTDRVDALVLAQFAERIRPEVRELPDAFVEELRALVVRRLQVQGLRLAEGKRLLMTRHEVVRASLTGSVAHLKLLEGTLDKEIMACVGHNEAAVVRFGLLTSAPGVGPTLAVTLLALLPELGRVSHRQVAALVGVAPVNVESGTKISRWRIHGGRGKVRHVLFMATMTAVRCNPVLHDAYVRLKGRGKPQRVAMVACMRRLLVMLNAMARDGKPWRERKEAPA

SEQ ID NO: 176545 - protein, 447 aa, unidentified
MTTPSLPVLDPLAAFVDVGSEQMYVSIAGGPPEVFGTVTDQLHRLRDWLQERKVKSVAMEATGVYWLPLYGVLEAAGFKVVMVNGKQTRNLPGRKTDMKDCQWGATLHAHGLLQAGFVPPAQIRRLQDYLRLRADHLVSAAANVQHQQKALERMNVKLHDVISSLVGTSGSKVIAAILAGERNPDRLLALCDVQIQKKKAERVKESLRGTWAEEHLFALRQAVENWEHYQRQIAACDQRIEAVLREINGPDQPANPHPPIASSKRAGANAPEIDDLHSLLVKLCGGKDLTVLPAHTDYSLLQLIGEVGTDLTHWATEKHFTAWAGLAPGSHQSGKRKGSVRRKRNRAGRLFCVMARSLARSKHIALGGFYRRMAARRGGLVANIALARKLALLFWRVMVKGLSFAEAGLKAYEEQVLETKRRALCRLAKQLGRVVLPSLAEMQTKPA

SEQ ID NO: 176546 - protein, 322 aa, unidentified
MAMLSFGGIDVSKDRLDVMVLPEEQCSSVPNDAAGWAKLVEQLRGFSISAVGIEASGGYERGAVRALLAAGMSVRQVNPFKLRQFARASGVLAKNDPLDARMIASFIAIMPTRPAQPHAPAVERLAEILTMRRQLSDAKVATENASRLLEDAMLQRLSRRRIARLAADIDLLDGRLVEIVMADAALVRRYQLLTSMPGVGPVLACTLIALLPELGRMNRKQAAALVGLAPYAFDSGKLKGARCIWGGRASIRRVLYMAALIAMRCNPALKAFHNRLAATGKKPKVVIVAVMRKMIITLNAMLRNETPWVDRSSGRHSVLTAR

SEQ ID NO: 176547 - protein, 340 aa, unidentified
MTITTIGIDLAKNVFAVHGVDQNGKTVLVKSRVTRAALPGLIASLPPCVIGMEACSGAHYWARLFLQYGHEPRLMAAKFVSPYRMAGKSGKNDAADAQAICEAVRRPHMRFVPVKDESQQAMQCLHRTRQGFIEEKTATYNRLRGLISEFGVIAPQSTDALRHMVSAQKSSLPLQVQQCVDDLLEHVDRIEANITEYDRTLSRIAKTDHRSQRLMKLKGVGPTTACALVACIGNAHDFKNGRQLAAWLGLTPSQYSSGGKSKLGRITKAGDSYLRTLLVQGARSVLIGAEKRTDSFSRWVCSLVERRGYWRAVVAIAAKNARLCWASLHYGDDFRLYSAS

SEQ ID NO: 176548 - protein, 331 aa, unidentified
MKFLETSGIDVSKDTIDATLHLKKCHNQFNNNTTGFRSFIRWVEKRSGLDITQVQICFEHTGLYSMKLAAFLSNNRIKFSMVPALEIKKSLGIVRGKNDKLDAQKIAEYAYMRRDKLTSYNLPSSQVLKLQALLTLRAQMVRNRTGYQSSLKGIKTFFRRKDNEELFQTLQSEISGLNKKIKKIEGHILAIIKSEETIAFLYYLITSVKGVGLILGTNFIVITNCFTNFENSRKFACYSGIAPFDKQSGTSLNAKSRVSHFANKKMKVLLNLAASSAIQCDPELKQYYNNRIENGKSKMSTLNIVRNKIVYRVFAVVKRGTPYVPLHQHAV

SEQ ID NO: 176549 - protein, 411 aa, unidentified
MDKIYDKCCGIDVHKKLIVACFRCGRKQEVRDFGATTRELLELADWLKEGGCEMVAMESTASYWKPLFNILESSDLNAMVVNAHHMKAVPGRKTDVKDAEWIADLLQHGLLRPSYIPDRDQRELRELVRYRKSLVGERTRELNRLQKMLEGANIKLSGTVSDINGKSARSILEYLLTGESIDEAKYDEMYEQKVIAHNLKATKEQIIDDLNGVMSPLQRRMMKELLKHLDELNIHIKNLDDEIDNFMKPEEKKASAAIQEVTGIGNTSAQAIISVIGSDMERFPTDSHISSWAGLCPGDNESAKKRKTGKTRKGNALLRTTLITCAHAAAKNRKSYFYAQFMRISAHRGPKRAYVAVAHSMLIAIYHILKDGVVFKDLGADYYNQFNKERKINAYLKKLKALGWEPPAVVA

SEQ ID NO: 176550 - protein, 388 aa, unidentified
MRQFKGSAQAAVDYNSTIIGALELSEKKWVLAVQLPGVDRHSRHVLDACGDSLASFVERLKARCTSAGRKIARVILTHEAGRDGFWLARFLTRQGIEVHVMQPSSLPVDRRARRAKTDKIDVEMLLRTLMAWLRGEPRVCSMVPIPSEADEEARRANREREDLTKERRSIVNKIDGILATLGIKGYKALRRDRRGQLNCVRQPGGDPIPQKAKARIERLLDRLELVLKLIDHVESARDDVLKKGAPANESERMIRSLTALRSIGPDIATLLVREAFVRQFRNRRALAGYVGLGGTPFSSGGSEREQGIGKDGNRRVRAAMVELAWTWLRWQPDSALSVWFRARVGAMGGGRIRKIMIVALARKLLVALWRYLKDGVIPEGANVKVAVA

SEQ ID NO: 176551 - protein, 338 aa, unidentified
MKLTADQLNTATFVGIDSHPDSHTALALNRFKEPKGHVTFPNTHEGISQFQTWLQTLETQKEHVVIGVEGGGNARNALLTSILPTYEFLFEVNPLYTKHKRSFGTKGDKTDLDDAKLIAGVLTTELEELPRIRPGQLTSAMLRLKKAVWFYEEVTVQGARLQNQLHKLNREHKLTQDKAEKQLLATIIKARKKELSFVQKTKADMERELKTLLAGNGLNLTGIRGIGIITVARIIAHTGGIERFSNRDAYVRYTGIAPLARSSGKTNFFVKANRGNRKLNSVFYYAALCRIVHDPAVKELYQKKIASGKTKKEAITFLMRKTAILAYGMLKSGEAYRE

SEQ ID NO: 176552 - protein, 386 aa, unidentified
MIYLGIDVAKNSHVAAAMSSEGEVLLMPFSFANSADGFTLLREKLNNLPKLPLLVGLESTAHYGENLICFLCGNGYHVAMINPLQTAAIRKSAIRKTKTDKVDAFVIAKALMMEGYTELQQSDIQILKLKGLCKTRQNLILMRTRCKIQLGSFVDQLFPELNRFFRSGLHINVSYTLLKAHPRPAEVGALHLTYLSNLLRKASRGKYKKDAIRLRELARNSIGTDNPALALQIRQAVSQIELFSAQLKQVESEISTIMDSLDSPIMTVPGIGYLNGAMILSCIGNIQRFSSPAKLLAYAGLDPAVVQSGNFSAKSTRMSKRGNSMLRYALINASHNVVRNNETFAQYYNSKIAQGKSHYCALGHTAHKLIRVIFALLTNNIAFDLA

SEQ ID NO: 176553 - protein, 340 aa, unidentified
MFYVGLDIHTKHIALCVLNESGQVVRRARVRGIDEMLVILKGLPDRFEVCYEASCGYGHYHDLLKPLAARVLVAHPGQLRLIFRSKNKNDRNDAERLAKLLYLGETPTVHVPSLEVRTWRELINCRSQVIAKRTRAKNTLRALLRGAGVVPPRHPGLWTKKGLAWLRQLDLPTASQQLRRDLLLEEVEALNRQVRRIEQELNRRAQQTPAVARLRSIPGVGIRTAEAVAAFIDDPHRFRHAKAVGRYFGLVPCQDQSGDKNRLGHITREGPAVVRQLVAEATWQAVRRSPRVRAFFERTQRGDPQRKKIAVVATAHYLVRVMWALLKRGTVWQENEARAQ

SEQ ID NO: 176554 - protein, 307 aa, unidentified
MDVASDKLDVGCHGMAEVASFANSAVGIESLLSSVRAQGVALIVVEATGGYETPLVVQLAEAGLPVVLINPRQLRSFATAVGELAKTDTIDARIIARFAHDVRPEVRPIPSENQRFFADLAARRRQLIELRTAERNRRQQTSRAEIIASIDAVLELLDEPVATLERQLAELIASNRHWRQRNQILQSVSGVAAATSHTLIADLPELGQLDHKQISKLVGVAPLNRDSGKFRGRRAIVGGRSTVRAALYMAAFNAIRCNPRIREFYRRLRQAGKCYKVAITACMRKLLTVPNAMVRDNTPWRKPAMTT

SEQ ID NO: 176555 - protein, 370 aa, unidentified
MRHYVGMDLHSNNTYVGILDENDRRVLKGKFANELPTILKILAPYKEETEGVVVESTFNWYWLVDGLIDAGYRVHLANPCATQQYKGLKYTDDRHDAFWLATMLKLGILPEGTIFEKQERQLRDLLRKRLMLVHQRTTHILSFKSLLNRNLSLRINSNRIKTFTENDIDELIEGPHLNLSARANIATMRFLDSQIRIIEKEILGQVKLTPEFEKLMTIPGIGKALALTILLETGDIKRFKSASNYASYCRCVPSIRLSNDKAKGKNNRKNGNKYLGWAFVEAANFAKRYCPLAKQYYQRKTAKTNSIIAIKAMANKIAKTCFYIIRDGADYDPMKIFANPLINKGCDSKPTQGLANNQNAPIGLTVATTR

SEQ ID NO: 176556 - protein, 427 aa, unidentified
MSLISADGRYLLDTFKEVFLFMISVGIDVSKGKSTVCAIKPYGEVLMTPKDFKHTRDELESLTKQLSRFKEEIHIIMEATGNYHLPVYQYLKSKDYLISIINPLEMKRYRCQGIRNPKTDRIDSLIIAQYGIDYWYRFKPNDDMDAKRQELRLLGKQYTSYMRIRMIRCQDLCHILDRTMPGVYGFLDDFNRDNGQDKLCDFAEKYWHSGNITKYSEKAFIERYNSWLKKKGYRSNGKEARQLYSIAKNAIPTLDSKLPSTKLLVQEAVNVLREVDSSLYDILNQLKTLSKAMPEYETVLAMKGIGETLAPRFIAEIGDPRRFHSAKALIAYAGIDAPPYQSGQFTGTKRHISKRGSSNLRKLGYELMDSINKHKSLYGGDPVCEYFMKKRNEGKPYRVAMIAAFNKFLRIYHSRVSEVLNGNENNH

SEQ ID NO: 176557 - protein, 410 aa, unidentified
MLFIGDDWAEAHHDIEIEDEAGRLLVRKRLAEGLAGVRLLHELIAEHLDPSGEPDQVLVGIETDRGPWVQALLATGYLVYAINPLQVARYRERHSTSGAKSDPGDAHLLAEIVRLDRAHHRRIAGDSEIAEHVKVAARAHQTMIWSRVRQVNTLRSLLREYYPAALAVFGTDLASPDALAVLAAAPTPELGRRLSQARIETLLRKAGRQRNIAATAARIKTALGSDQLTARPGVVPAYAASASALVAVLTTMVTQTEVLAGQVEQGFGRHPDVEIYRSQPGLGVILGARVLAEFGDDSDRYADAKARKNYSGMSPITRASGTKRVVLARYARNRRLGDALFRQAYSALRASPGARACYDRQRARGASHYQALRTLANRLVGILHGCLSHHTLYDENQAWHTPDDKLTIAA

SEQ ID NO: 176558 - protein, 352 aa, unidentified
MAATAQSAIAVIGIDIGKNSFHVVGLDGRGAIVLRQKWSRGQVETRFANMSPCLIGMEACVGAHHLSRKLKALGHDARLMPARYVRPYSKGQKNDFRDAEAIAEAVQRPTMKFVVTKTADQLDLQALHRVRERLVSQRTGIINQIRAFLLERGIAVRQGQRFLRVELPRILATPPDVLSPRMVRVIEGLASDWHRLDERIEGFSSEIEELAKRDAGCERLMSIPGIGPIISSAMVAAIGTGDSFSKGRDFAAWLGLVPRQISTGDRTILGKISKRGNRYLRVLFVQAAWVVLVKVKPTRWQGHGLRPWIEAAKKRLHHNVLAIALANKLARIAWSVLAHGRAFETNKLLAAA

SEQ ID NO: 176559 - protein, 339 aa, unidentified
MKITTVGLDLAKNVFHVVCFNDRNKEVKKRMLRRNQMLEFFTQLPSCQVGMEACASSHYWGRELRALGHEVKLISPQHVKPYLRGNKNDYNDARAIAEALVRPAMPGVGIKTVEEQDMQAIHRIRSQCTRDRTALSNSTRGLLGEYGIVFAKGVSTLRKKIPEILEDADNGLSLRFRNLLSRRYEQLVELEEHIAFYTKELELISQQDAACQRLQTIPGFGPIVASAFRSVIGDGRAYSRGRDVSASIGLVPRQYSSGGKNVLLGISKRGNKYLRKQLVHGARSVVLQAANKEDPLSCWVNRIREERGWNKAVVALANKMARIGWAVLRHNTYYQPVSV

SEQ ID NO: 176560 - protein, 408 aa, unidentified
MAGKVAGIDVHKKVLMVVVIDADTPAAKPERRRFTTMPSELCRLSTWLKEYGVEEAVMESTAQYWRPVWLELEPHIRLHLAQAFSNRAPRGRKHDFKDAERLVRRLIAQELILSFVPDGEQRIWRNLTRMKLQLTRDRVRLQSQIECLLEEMRIKLSVVVTDLLGLSGLRILHALANGETDAKNLAMLGDHRLKCSEEQLIEALTGSSHPMHRQMLALQLERLRLIDEQIAKLNSLIAQAMNPHQDTVIRLAEVPGLGIDSAQQIIAEVGVTAGTFPSAAEFTSWVGTCPGKQESAEENSSSRSAKGNKYMRRVLNQAANAAARSKGTHFQAVFRRLLPRLGYQSAVWAIAHRLCRLVWKILHEGIRYIEQGIESEPRLLIYRAQSLGKQLRKFGYNVQITPANRAPA

SEQ ID NO: 176561 - protein, 387 aa, unidentified
MAKVDDLSRSLTALDQEETLICVVELSRSSWLIAGMVPGVERQPLKKLEPDAPGLMRVIERWRDEAIRAERMITRIVLAYEAGRDGFWLARWLRARGVEVHVIHSTSVAVSREHRRAKTDRLDTAMLMRVFLGWLRGERGHCSMVAVPTIDEEDAKRPSRERESLVGERTRIINRMKAALARLGISGFKPELRNAPARLETLRTPEEVMLPPNTLGEIRRDMARLDVIREQIKTIEQARLESIGRAPDEPAHAMVRLLARVIGVGIESADMLVREVLLRGFRDRRAVARYAGLTGAPDESGAKRREKGLAKSGNSRVRRGLIQLAWRFLRFQRNSALARWYVERTSGTNGARKTTMIVALARKLLIALWRLAITGLVPDGVVLRSPV

SEQ ID NO: 176562 - protein, 411 aa, unidentified
MNAVGIDVSKRKSTVTIRQPGDKVVLAPRDYRHTQSSINELIATIKSLDGETKVCMEHTGRYYEAVASWLSAAGIFVSAVNPWLIKDFGNESIRAPKTDKADAKKIARFTLDRWAKLRQYSRMDELRNQLKTMNRQFGFYMDQKTAMKNNLIALLDQTFPGANAFFDSPARPDGSQKWVDFVYTYWHVDCVRGKSLAAFTEHYKSWCKRKGYNFSASKAEEVYRAASDLIAVFPKDDNTKMLVRQAVSVLNVTSETVEALRVKMDQTASQMPEYDVVLGMDGVGPTLGPQLIAEIGDVTRFEHRGALTAFAGVDPRKKESGDYERRSNPTTKKGSPHLRKTLFQIMDGLIQRSPQDNPVYVFMDKKRAEGKPYYVYMTAGANKFLRIYYGKVNAFLSPKEDAEAEADESDS

SEQ ID NO: 176563 - protein, 383 aa, unidentified
MNKHSMIFIGLDTHKEFHEVAYCEEQRGAAPVHYGRIPSSKVSVKKLLRQFESKYPGATLHVVYEAGPCGYWIYRLITSLGHCCYVVAPSLIPKKPGERIKTDRRDALKLVRSLKSEDLTPIYVPEPDEAVRDLSRAREAAMKDLKEAKYQLKALLLRNNIRYEGTANWSKKHLRWLTELILPHPAQQIVLQEQLQTIEERIRRLERLDNELTHHVHQWRYYPVVKAVQAMRGVRLLVAVGVVAELGDLHRFDHPRKLMAYLGLVPSEQSSGGKRHLGAITKAGNGRARRLLIEGAHSYRYPANVSTELQLRQEGLPKDIVDIAWKAQLRLCKRYQRMSKKGKHYNLIITAIAREMAAYIWAIAKEVVLTPVNPKLRLSRVPA

SEQ ID NO: 176564 - protein, 412 aa, unidentified
MKRIRDRVAGLDVHRDSVVACCRVVDPDGEVEVTKARFATTRRGLVELAGFLSEAGVETVAMESTGIYWRSPYYALEGLFSELWLCNAQHVKNVPVRKSDLSDAEWLADVAAHGMVRPSFVPPPEIRELRELTRYRKTQVDARGKEIQRLEKVLQDAGVKITSVASKVWSVSSRQIIEALIAGERDVAVLAEMAKGRMRSKIPALEEALSGNFGQHHAIVCRQVIGHIDFLDSSIAALTEEITARLVPFEAAVTIVTSIPGISRTTAEVIVAETGADMSRFPTAGQLCAWAGVAPASYESAGKRRPAGTRHGSQWLRRSLIEAARAGARKKGSYYSAQYARIARRRGPNKAAVAVANSMLFTIWHLLTTGALYEDPGADYFQRRHDPAVEAKRLARRIEELGYAVSLSEKAA

SEQ ID NO: 176565 - protein, 377 aa, unidentified
MKRIKFVGLDVHAETISIAVAEQGGEIRSLGVIPNREESIRKLVRKLGPVEELRFCYEAGPTGYALYWQLTKVGAKCEVVAPTLVPVKAGDRVKTDRRDALKLARNYRAGELTAVWVPDAAHEALRDLVRAREAAKKDELRARHRLNKFLLRHGRRPPMGVKAWTMKYLEWVKREVHFEQRAQEATLLDYLHEVEHAGARIARLDGAMEEAVKLAPPQMRVVIEALQALRGIAQVSAVTVVAELGEFSRFARAKQFMGYGGIVPSEDSSGERKRRGNITKTGNAHLRRVVVEAAWAYRHRPAVGAKLRRRQEKLSEEIKEIAWKAQHRLHERYRKLLAKGKNKGVVMTAVGRELLGFIWAIGVQAETAQKEPLQRAA

SEQ ID NO: 176566 - protein, 321 aa, unidentified
MKLAKIFVGVDISKDNLDVFLRPLDQYFRVRNNVSGLNEILNKLSGYDTVRIVCESSGGYEKLLIRTLSNAGHFIWLVEPKRIKSFIASDGIKAKTDKIDASMIALFAQQKELPEQTRIKIPKKDEELLKALVRRKNDLTGMIVREKTRLIHPQVEFCKDKIQQHIDFMTAQVMGLEKEIEQLIDNDDDWKHKQDIITSIPGAGKGTSATLLAFFSELGSIGNKQVAALLGVAPYTNESGNHKKKSIVKEGRPLPRKMLYMPTLSAVRHNPDFKIFYERLRGEGKPPKVALIAVMRKFIILANVLLTENRLWAPNKNAYST

SEQ ID NO: 176567 - protein, 375 aa, unidentified
MGDHIEAFVGFDTSKLRNAVAIAEGGHGGEVRYLGEIENSATATTKLVRKLEAKYAQLTFCYEAGPTGYGLHRQIKGLGHQCVVAAPSLIPRRPGDKVKTNRRDAVSLAKLLRADELTAVWVPDSHHEATRDLTRARETAAMDARVKRQQVSAFLLRLGRHYPAGKSTWTKAHLKWLAQQKFDYPEQRIVFEEMMLAMRQACERQERLEQAIRAAVADWSLAELVSALMAMRGIDLIAAATLLAEVGDLSRFPTAQAVMAYLGLVPSEDSTGDTVKRGSITKAGNRRARRMLLECAWSYQHPPRVGQAKQAKVDAAPTAVREIAWKAQHRLYRRYRALIRKGKLKTIAITAVARELAGFIWAVSRAITRARVATS

SEQ ID NO: 176568 - protein, 349 aa, unidentified
MKKCSTVSFEGQVIFVGIDVHKESWVVNLRHCHRELDKFSMNPCPEMLAKYLRKNYPGAEYRSVYEAGFCGFWAHRRLCELGIQNIVINPADVPTSGKERDRKSDAVDSRKLARELENRTLEGIYVPPEDNLELRNLVRRETKLTGNITRVKNRIKGHVNFMGLKFEGWSGRSLKIMYADAEKRHDYALQSMLRELRFLREEKLHVVRDERQCLKRLKRDKIQEHLQSIPGVGFHTAVMLQAELWDLQRFEDKDALSSYVGLAPRLVGSGEHEVLKSAGNRKKKQLHAILIQAAWRSIVYNLETRARYGALLHKGANPQRAISIIAKKLLYALRAVWLQERDYVVSANE

SEQ ID NO: 176569 - protein, 412 aa, unidentified
MSQMFVGIDVSLKSHHVQFMNEDGTSIASFSVSNNQTGADTLIKKMLETCEKHELNSMKIGMEATSNLGWHLAHYLRDQLQGYEPNIQAHVYVLNARMIARFKKGYDSLVKNDRIDAWVIADHLRFGRLPNEMKESIHYEALQRLTRTRFHLMKNIARDKTYFLNQVFLKFSGLRQDNPFSNMFGATCIAVIQELEPEQIAEMSIEELIDFLQEKGKNRFEKPEEIAKYLQKIARSSYRLNKAMADPVNISLSVTLSVIKHMESEVKRLDKEIDRLMKGIPNTLISIKGIGPVFAAGLIAEIGDIKRFKNHHALAKYAGFVWNQYQSGEFEADETKRMLTGNKYLRYYLVQAADKIRKHDSEYRDFYQKKYKEVTKHQHKRALVLTARKLVRLVYALLSTNQLYTPPERRDQ

SEQ ID NO: 176570 - protein, 422 aa, unidentified
MKKRIYRRMPVNDFQPQSISPSDLGERLVFAIDVAKVDMVAAFAASDGRILHTICWKAPQENAVVLGILRAYRSAGLTVEVAMEPSGTYGDVLRRQLADDGFPVFMVSGKRTHDAREIFDGVPSLHDAKSAAIIARLHADGLSTRLVPEPSERRQLRAALAIMDLHQERYLQLVHRLESWLARHWPELPTVLELTSSSLMALLARLGGPADVAAQPKRATRLLLGISHRLIPDDKVAAVIACATTSVGVPLVGLERDALMAIADHAYRAHRAFTTAKTKVDQLAARSPAAALAPVVGHTTAGAVFAEVGDANAFSSTRAFLKAMGLNLKEKSSGTIHGQLKITKRGPSRVRQLLWLAVFRWIQTDPIANAWYQRKKLRDGGRASRAAVALMRKLAKALYHVGRGATFDSRKLFDTRRLALHG

SEQ ID NO: 176571 - protein, 361 aa, unidentified
MSFKILKNNCCGLDVHKTWIFACIGITDSHRRTEYKHARFSSFTKGLQELCDWLAKYNCTDVCMESTGKYWIPVFNVLEKNNIWVTLSHPKYTKPQKGNKTDRKDAKWICDLYMCGMVKTSFIPPADIRQLRDLVRYRFKLTCMITSEKNRAHNCLTISNFKLDEVFSDIFGKSSRSITEQILQHPGETFDVAQFVDGRCKTPIEEIQAAVDGALSTEQAVKLRQCLNHIDELEKHQAEIEREIFRLSDKYEEVLNLIRTVPGFDKNPMTAIQVLSEIGGDMSVFPTAKNLVSWAGCCPRNDQSNQKIKSTRISRAGSYFKPVLVQVANALIKSKKHPEFTDRYRRIKARRGHKKAVIAAV

SEQ ID NO: 176572 - protein, 339 aa, unidentified
MAILYVGIDLAKNVFAIHGVDEHGKPALVRPSVPRARLHQLVAALPPCTIGMEACSGAHHWARLFAKQGHTVRLMAPKFVAPYRMSGKRGKNDAADARAICEAVQRPNMRFVPVKSHDEQARLCVHRVRQGLVEQRTATINRIRGLLSEFGIVLAQKAATVRREAAAHLEDLPGWANTAVGDSLSELHRLDERITEYDRHVVHMAREDERSRALMQLSGIGSTTASALVSTIGNARDFKNGRQLAAWLGLVPGQYSSGGKTRLGGITKAGDGYLRTLLVLGAKAVLAAARNKHDRLSRWAMALEVRRGYWKAVIAIAAKNARMAWAVLAKGDEFKPLVA

SEQ ID NO: 176573 - protein, 435 aa, unidentified
MEEVTDEPLYRDRVCGIDIGKAGMAATIRVPSDKDPARRAAETRSFGTTRREVLALADWLRSWQVPAVVMEASGDYWKGPFYRLEAEGFECVLADAKQVKNLPGRPKHDPGDSRWLAACLERGAVTSCFVATPEFRIIRLHTRYRRDLTEERTREKQRAEKLLESAAIKLSSVVTDLHGVTGRDIMDHLIAGERSPKVLAQLARARARRKITELEQALEGAEFFTPGHAALLAAMLARIDRVNAEIARLSEVIETLLEPYEEQLQQAESMPGWGRRAAQDAVAETGTDMTRFRTGAHLASWAGRTPLDNSSGKRKGKAKSKKGNRYLGGLLGETAVAAGKTQTREGARYRRLARRRGKAKALVALGNTQLNVYHKLLSSPGMRYQDLGPDYYERRAEISRQVRHHVGKLGALGFDVTLCRIPEPEPAGPGTTQAA

SEQ ID NO: 176574 - protein, 365 aa, unidentified
MWYVGLDVHFRQSTFCVLDEHGRKVRTETIKGPWANLLLALAKIKEPWVVCFEASTGYGVLWRRLKPMAQRVVVAHPGHLRLIFRSKRKNDRIDAERLAKVLYLDAVPAVHVPGEAVLAWRGLIAHRNHLVKERTGLKNGLRALLRGQGIVAPRSLWSRKGIAWLRALELPTLLDGLRRDQLLERVLTVHLQIRRVETELNRIGQEHAGVTLLRTIPGVGMRTAEAIVAYVDDVRRFANVRQVGSYFGLVPSQDASASVNRLGHITKQGPSLVRRLLTEAAWQGIRRSPRMRTYFERIGQGNRDRRKIALVATAHYLVRVMVAMLRNGECWRPEKAEPTEAGATESTALAATTPTPGGLSAGAVG

SEQ ID NO: 176575 - protein, 364 aa, unidentified
MIVIGADTHKQTHTCGAVFAASGQIAGELTVPAREPGFRELLAWGRGLDGERIWAIEDCRHVSGSLERFLVASGERVLRVPPKLMGQSRRGERTAGKSDAIDALAVARAALREDPESLPAAHLDEDALDLKLLLDHREDLVKARSEDQQRLRWHLHDLWPGLELPSRCLDRVLWLDRVARKLSRAEQSTRVQIARELVVEIRRRTRRVNELEAEIAARVEEQAPQLLDLEGCGALTAAKLVAETAGAARLASDAKFARLAGVALIPASSGKRVRHRLDRGGNRQLNCALHRIAITQGRMHPPAREYLARKQAEGKTRSEALRCLKRHLARRVWQLLIKSEIDQSMSNPVNPQRGSLAPQIAAVA

SEQ ID NO: 176576 - protein, 336 aa, unidentified
MNYCGIDLASKASAICLMDGTGAIVREEEIPTDADGFRICLGGEEAMKCVVEASPLAEWVVQVLERLGHEAVIIDARRAKAVVCTKKKTDRVNARDLANMARTGWYTAVHRKSGAARELRTWLAAQAGLVETANALNARIRGLLRAHGIKLGKVAEREFEMKVQAVVEAREPALAGALTPLLNLWRQSIDAAEVLRKEIKVRIRQDSVCRRLMSVPGVGPLTAAAYLATIDDPERFQRSDQVGAYLGLVPSVYQSGDIDYRGRITKEGDGLLRWLLVEAAHSLLSHTRRDCALKRWGERLQAQKGIGKARVAVARKLAVILHRLWITGETFDWQRV

SEQ ID NO: 176577 - protein, 418 aa, unidentified
MGTSLSKKLARFKPGLLYAGVDLALDSNVIKVKDERAKLLASLEFPHTRAGYDHFHRWMQALVERHRATGFVVGMEPTNYFWTLLATDLERRQVGYVLVNPYTVRKHREGDQLDRSRDDARDASMITDLLREGKYTETRLLHGGYANLRQYATLHYRLERDIAREKTLVRNIAGQLFPELSSVFKDLCCASAVALLKNHAAATRIKDMTEEDLIAAVRADLAGKRLAVSKLRRIHKLAATSVGVQDGVEALQLALRLHLETLRTLQTQELVVRQAMLKAFEALPEARYLQSLSGLGSLTGAMILAEIGDPSRYKHGHQLIKLAGTQPTPDASGRKRRGQTPFSRKGRSRLRTILYFACLRLIQVDDAFARLYQHYQQRDKNPLTKMQALGVLMNKLLLVLWSLMRHSKDYDPARVYSA

SEQ ID NO: 176578 - protein, 339 aa, unidentified
MTIVEDARVITGGVDTHAGLHVAAALDPLGGLLGVQEFPATAAGYARLLDWLGGFGTVALVGVEGTGSYGAGLARHLAAAGVPVVEVDRADRQDRHRQGKSDPLDAVSAARAAQSGRASGAPKGRDGAVEAIRALMVAKRSARHERTQAINQARALIVTGPDELRARFAGHTPAALVEAIAALRPRPGDVPGHATRVALRELGRRAQFLDAQLDRLDELIGPLVAARAPGLLSLHGVGPDTAALLLIAAGDHPERLRSESSWAHLCGVAPIPASSGKVSRHRLNRGGDRQANHALWRIVITRLSSRPGHPATRAYAERRAKEGLSKKEIIRCLKRYVAR

SEQ ID NO: 176579 - protein, 344 aa, unidentified
MTSIDYIGLDIHKKTISFCAKAQDGTILDQGTIVARRDTLLAWAKARPRPWIGAMEATLFTGWIYDLLKPLAQELKVAHPAMLKAITAAKKKNDKVDARTIADLLRCNLLPECYMAPSAIRDLRRVLRYRNLVVRQATRMKNRLAGLLMETGTPYNKERLHGRAYFSELLASLREVPRSVVELLQLSRGQLEFFATIQRRLLKGLCQTPDLSERVARLQTIPGVGEIMALSWALEVGEVKRLPSIAQAASYCGLTSAQHNSAGKEQRGPISKQRNKHLQTILIEAAKLAPRHNPQLAVVHERELQRGDRNQATLAVARKLVAYLMAVDKSGKLFAMRAIGEEAA

SEQ ID NO: 176580 - protein, 357 aa, unidentified
MTTAQKQSCMFVGIDVHKDTHTAVGISPYGEKLFEITVGNYKEDFETLDLKVKEHSGVLSPYIGLEDVRGYGERLAGYLYEKYPVYHVPSILVDRARQNATHPEKSDSLDALGVAKVMIQSIDTLLPYTISQESEKAKQLKEISIDREDLVLERTRLKNQVHTLLYRIYNTEYADKFKDPFSLKALRFWRNAKPSCDPFLLKTMKRKVRRLLDIHVEVTDLEKDMDKLLTEGKYTIQTASGCGLVLASTIVGEIGDINRFTSPGALSKYAGCSPRERSSGKKVRHVKSRSGNRRLNCAFHRMALSQISRMGNEKARAYFKRKISEGKSKSQALVCLRRQMVNIIWMMLKHKTIYRNA

SEQ ID NO: 176581 - protein, 347 aa, unidentified
MQDGLVVIGVDAHKRTHTMVATDGVGRRLAETTVEATSDGHLRALEWAARWSSRKWAVEDCRHLTRTLESDLLRAGEELVRVPTKMMSGARRAAREAGKSDPIDALAVARAAWREPDLPVARLAGPERELRLLVDHRDDLVRERTRIQSRIRWHLHEIDPCLHVRLRGLRSQRVIDCLLEQLADRKGTIVEIVREQLARVRELNQRALELERQIMLLVVRLAPSLLTIPGCGALTAAKIVGETAGAARFRTKAAYARWNGTAPQPVWTGNQARYRLARTGNRQVNSALHRIAVTQARELTLGRCYFERRIAQGNSRKEALRLLRRRLSDVVYRTLLADESAAVSRAT

SEQ ID NO: 176582 - protein, 394 aa, unidentified
MKLIGIDIGKNKHFFCVMDQQTGEIISQPVSFSNDKEGFDFLVQEIKSYPKDSILIGMEDTGHYHFALLKYLLDLQYTVALINPKTTDFNRKMQGGITKNDKLDTINICDVLDTPERKKQYRITKVNSFDLYEQKQLTRHHHNLKEEENVYKNRLQKCIDIVFPEFNKLFNSKYGIVYMNILKMFGSAENIANTDIRTIRKCFEIEGRGNRISLTPERLKECARSSIGISSSAEVIQIKHLTAQIELIEEQLTEIDKKIEEFSIQNNSPILSIPGISHFSGTSILAELGDISNYSKPSQIIKFAGVAPLHYESSQFNAQHTAITKKGSKYLRKTLYQIILPVIRHNPVFNKYYQLKISQGKGHRCAQGHCVRKLLRIIYHLLKTNQQFDPQLLR

SEQ ID NO: 176583 - protein, 397 aa, unidentified
MIAVGIDVSKSKSTVAIINADGTKRVTPFEVKHNLPELNALIKYLNDLNENIVILMEHTGHYHYPILKKLNDEGFQVCLVNPYQMKKYGDTELRRTKTDKKDAIRIATYALEKSYQLVPYNSMEQKYEDLRLLSRQYSQRMATLTFNKVHLGNLLDETMPGITSILSLNTRDPDTSLSMLFIKKYKSYDYIRKMGKTRFLESYSKLLKKARNRRADHLGLSIYELATQSITTHGENTYTIMAQTQCLNLVAEAQKAADAIISQMQSIAITIPEYKVLRSMNGVGDRLGPLILAEIGDVRRFHSGKALNAYAGNDAPPYQSGNFESHNRHISKRGNAALRKYCFEVMQALKLLKPQDDPVYLFLVKKEQEGKPYNVAKMAGVNKFLRIYYARAMELEQ

SEQ ID NO: 176584 - protein, 407 aa, unidentified
MIAGIDVHKKMLAVVIRRQSEQVQYEQRKFGTTRAEIQHLEAWLRARAVEEVVMESTAQYWRPVWYGLESHFRLHLTHPLKTRAPRGRKSDFRDAQRLADRWSAGDLEASFIPGAEQRAWRWLTRTRVQLKKKLGVIHSHVEGLLEQGGIKLSAVVSDLFGVSGWAMLERIAEGVTDVDVLAAEARGVLRNKDAELKEALAGRLEPVYRLLLKQHLEQVRLLRRQVEEINAALAEAMAEHLAALHRLTRMPGVDLYAAEELVAEIGPQAAAFPSAEQFASWVGVCPGSQESAGVNYSRRSAKGNRYLRRLLCQIAWAAIHTKATFFAGLFARLKPRVEGKGAAWAVAHRIAKVVWRVLHEGVEYQEKGSAPPNERTLVRKFKRMLKEFGRLGLDVRALVDQQLPAPA

SEQ ID NO: 176585 - protein, 343 aa, unidentified
MSEVSIIGLDIAKNVFHAHGADASGRALFSRKIGRGKLLEFFAGHQRCTVALEACGGAHHWGRELTRLGYEVKLIPPAYVKPFVKRNKNDAADAEAICEAAQRPRMRFVAIKSEEQQASGLVFRTRDLLVRQRTQLINAIRGHLTEYGWVAPKGPSHVAMLGDLLEDEMGSSLPEAARAMFRTMLDLLEELNEKIGDLDKEIARRAREDAVARRLMTIPGVGPITATALAALAPPAETFTKGRDFAAWLGLAPRQMSTGGKQKLGSISKMGERTLRRLLIIGCSAVVLQASKRGAPKGSWLEQMMARKPRMLVTVALANKTARIIWAVLVKEEDYRAPVAAAA

SEQ ID NO: 176586 - protein, 328 aa, unidentified
MSSVLGVDVSKAKLDVALLNDEGKYRCKVFANTGSGFAALQQWLQIHLPQGQELAALHVCMEATGSYHEPLALYLHDLGVPVSVVNPLRVKRFIELEGTRNKTDQGDAKSLARFCRMTAPEPWEAPSPGVRALQALVARLDALQEMRQSEVNRLEVAHGVVQPSLHEMLATLDKAIAQVKAQIRETIDDDPDLRQRAQLLHSIPGLGERTIPQLLAYIGRPERFRSVKALIAYASLSPVIRQSGTSLDKRIGTHAHGHRQLKHALYFPAMVAGQHNPAVAAFWQRLKAQNKPGKVIVVACMHKLLAIVYGVLKSGMPFDPTRFSHANA

SEQ ID NO: 176587 - protein, 366 aa, unidentified
MKKITTRTVCRISKLQDRKLTIGLDVGDRSSFYCVIDGKGEVILEAKVATRPEALKEVFSRMPRSRIALETGTHSPWISRLLSELGHEAIVAHARDVRLIGESRRKDDKIDAQTLARLARIDPQLLSPIQHRSAEAQADLSVIRARYALVRARTALICAARGLTKSFGERIRGRNPKAFRPEMGETLSRQLRIALTPLLNALETLTERIREYDGQIEQLAEEKYPEVALLKQVKGIGTLIALTYILTLDDPRRFAKSRDAGCYVGLQPGRRNSGQSEPQLHITREGDSYLRMVLVQGAQHILGPFGEDSDLRRWGLKLAERGGKNAKKRAIVAVARKLAVLLHHLWITCEAYEPLHNTRKHRLAAA

SEQ ID NO: 176588 - protein, 426 aa, unidentified
MAYRIAGIDVHKKKLAVVVADVETEDEYQFERRWYGSNPEQLQLLAQWLVEQQVEEVVMESTAQYWQGVWGALERYWRPTCQKREGAGAMSGKLHLAQAQSNRGRRGRKRDFPDAERLVKRLVAQELVLSFVPDPEQRLWRTVTRRKHQITRLHVRMQNQLESLLEEAHIKLSGFVTDLLGVSARRMLQALADGETDPAALAALADKRLRATPAQLCDALGACTELNPVYRRLIKMALAELQFLEQQIAQLDQEIAHLLRPHEDAVKRLAEVPGLGVDSAQQIIAEVGPTVATFPSDKHLCSWVAVCPGDNESGGVNYSHRSPKGNRHMRRILNQAANAAARTKGSVFEIVYRRQVMRMGHNQAIGVIAHRLCQLIWILLHRKVRYEERGPAVTERSKRKRTARMVRELLSLGYHVAPPVQQQTSA

SEQ ID NO: 176589 - protein, 522 aa, unidentified
MATTRKSATTRTRRRKPQFVQKARGAFHPRVQKVGPEHFGLVCVDCAKARSKFLVTDFYGNILIAPTLLEHNRPELEAAITRIRAAFAEQAIHDCLVAIERTGRYHHVIKQAFSAAAFDTRVVHPFATKQHRLPADPGNKTDDTDLFAIQRAAVNGFALREADWDVSWRNLQLLVRHRRGLVQKSSALCCQIREHLDATLPGLAKCFDDRLWDSAVAWHLIRHFPSACALQQAGRDGLADSLRQAGIRFQRRTLDTVLAWAAQAAPAEPTADIHHQLVLALNADRLQKTLEIKSLERRIAHALVATPYVLLLSIPGVNVVSAAEFAAEMGPIEHYANARAITGRAGLYPARYQSDEVDKANGPLIRCANRRLRATLLFVADNLILCNQYFRARAAHWRLAGCNAGNIHVKVAQRFCRIAYQMVAGRQVFRHPCLQQRSYILEKLNAFHAEHDTPVADLMTDLRQAIEQIPAKEHAAEAKPLQESLNDRQRGPQQLRDIVPILLARLGVGRVQSTESGEADLN

SEQ ID NO: 176590 - protein, 369 aa, unidentified
MGKDTTYVALDDSKRKIVAGILRPGDAQPELREIANDPRQIRRLFERLKREGPVAACYEAGVSGYDLHRQIVALGVACDVIAPALTPRRPGQRIKTDRRDAAKLVRLFRAGELTAIHVPDESEEAVRDLVRCRDDIRRDVLRWRHRVLKLLARHGRAYLAGKNWSQAHWRWIREQRFDLPPLQRAFEATLFALEQALARQAELDKELEAVAITAPYREPVGWLRCFRGIDTLSALILLAEVVDFQRFRRPRELMAYLGLVPSEYSSGETQRRGALTKAGNSHARRVLVEAAWHYRHRPTIGRALASRSQGQPDEIVSHAWRAQQRLHRRYRHLVGHGKRTPVAVAAIARELVGFIWAAMTRHESRHQAA

SEQ ID NO: 176591 - protein, 423 aa, unidentified
MDVVHDRAAGLDVHKDSVVACVRAMCGTRATRECRTFATTTEGLLALLEWLNSEGCRLAAMEATGVYWLPVWKILSQGEFELIVANAAHIKAVPGRKTDMNDAMWIADLAAHGLIKASFVPEEEMHDLRTLTRTRKQLVREQTRHVQRIQKTLTEANIRLDSVLSDIMGLSGRRMIEAMIAGVRDARKLAALAGRGVKATPKELYDALHGRLTDHHRFLLKLHLGQWDALQASIRVIELEVDARVARMDTEARADKARFSDHVSQLGSIPGVRKVSALGILSEIGTDMSRFETAGRLIGWAGMCPSQNESAGKRKGARLRKGAPWLKTMLVQCAWAAKRAKNSYYRAQFYRLRARLGPQKAICAVAASILTAIYHMLKNGTFHQDLGADYFDRRSPESKVKRLARQIAKLGYEVTLQPAAKAA

SEQ ID NO: 176592 - protein, 500 aa, unidentified
MKTKRSKAKIRAGRRGLSVTASEPEQKLEILKPDAAGIDCGAQEHYIAVPPDRVRAGQPTVRCFSAFTEGLHAAVDWLKQCRVSTVAMESTGVYWIPLHQKLEEAGIEVYLVNARHVRHVPGRKTDVQDSQWLRQLHRFGLLNASFRPDDIICRLRSLHRHRDNLVSSSASEIQHMQKALQEMNLHLHHAVSDITGLSGLRIIDAILAGECDPEKLVKLRDRRVSKSTPEQMKAALEGDCRPEHLFVLSQSLQAYRFYQARIEESDREIEPLLEKLAQQVEAASGNVNLDALGPSVLEGGSTTPEQLSQAKPASGPKSKRKRKPRANEPKIELAGLLERICGIDLTQVVGLNVLNVLLIISEIGVDMSKWRSAKAFCSWLGLCPGNKISGGKVLDSRTRQVVNRVADALRLAAQLAGRTQTCLGIFYRRKQAHLGAPKATTATARKLACLIYQLLRNKRPYQEPDPVIYQLRLQKSAFTRLQKQAASLGYTLLPTALVPA

SEQ ID NO: 176593 - protein, 370 aa, unidentified
MSSLARTAGPVHVGMDTSKNTIMVAMLWPDEEIPVTERILNDEPSVRRLLGRLADKADGPQYLRCCYEAGPGGYDLYRLLDSMGIACDVVAPSLIPKGSGDRVKTDKRDSRRLARLHRAGELTPVRVPSRDEEAVRDLARARTALLEDRKTAQKRLTAILMRHGRTWRGPAYWTRAHRDWIAAQKFAEPALATAVGCYRAALETRETELAAIEAELLPWVSREPLAEPAARLMCYRGIAELTALTLAAEVVDWRRFPAARAFMGFTGLCPAEDSSGDTARRGHITKAGPQPVRTALVESALAYRHPPAIGAVLRRRQRGASPDTLARSWKAQRRLHARYIHLASHGKTPPEAVTAVARELAGFTWAEMTS

SEQ ID NO: 176594 - protein, 339 aa, unidentified
MKVTTLGIDLAKNIFRSHGVDGRGTVALRRQVTRRQLLALLANLPSCLVGMEACAGAHYWAREIGKLGHTVRLMSPHFVTPYRKSQKNDGNDAAAICEAVGRPSMRFVPVKSAAQQDVQALHRIRFQLIKWRTALANEIRGLLAEYGIVIARGIGPLRRQLPLILEDGEDRLSGLFREMLGEMAERFKLIDQRIRQYDLKVEHVFRQDERCQRLARVEGVGSLIATALVAAVGNAHDFKSGRELSAWLGLVPRQHSSGGRNVLLGISKRGDRYLRTLLIHGARAAVRVVERRRDHRSVAINRLKLRQGPNVAAVALANHNARVLWALLTRGEEYRPRCA

SEQ ID NO: 176595 - protein, 485 aa, unidentified
MAVRSKHVTTGADGTDAATVAEHGGDGAEVAEERVQVVERAAAIDVAKGSGMVCTRVPGSRPDRRRQKVWQVTATYGAVTALMDQLRCEGIQRLVLESTSDYWRIWYYLAEAAGLEVWLVNARDVKHLPGRGKSDRLDCVWHCKLNERGMLRRSFVPPQAVRDLRALTRTRARLAQDQARHQSRVEKILEDALLKISVVISDLFGASGRRFLDALVAGERSPKALAALGDTRLKASRKELEDALTGRFRDIHAFEITTHLRLIDAINDEIARLDEAIGQQLAKVPGTAPACTACGLAGGGHAPGCGARGTVLLPLAQRLDEITGVGERNAAVIIAELGTDPSQFPTPGHAAAWARLTPRTMQSGQTARPGSTGKGNRYIRGALGQAAMTAAKTDTRLGAMYRRIARKRGKQKAIVAVSRIICEIAWILICDPAARYQELGPDYYSPRSPARQTRDKIREIERLNPGTKVILAPIDPGPEAGTAAA

SEQ ID NO: 176596 - protein, 326 aa, unidentified
MAVLGIDIGKTSFDVHLLADDHAASVHLPNAAAGFADLRDWLVRQRQTEPAALHACMEATGNYGLDLAAFLVAEGIKVSIINPKQIRAFGIAELRRNKTDKLDAALIARFCRAQNPAPWTPPLPDMLALREAVRRCAALKEIRTAELNRQKAGFSSEAVRASIQRNLDHLNTEIEAIAGEIRTLIAHNAELHRKAHLLRSIPGIGEITATVLLAELPNIADFEPKGLAAFAGLSPAEHSSGAQTKHSGISRIGNGTVRSACYLAALSASRHNPRLTDFAQRLKAAGKPKKLVLIAVARKLLVLAHAVIRTDRPFDADHIDANPANT

SEQ ID NO: 176597 - protein, 335 aa, unidentified
MSLKLLAIDLGKRSFHCHGIDSDGVILSRKVSRCKLLETIKELAPETIAMEACASAHFWGRLFLANDHRVLLINPRFVKPFVKGSKNDAADAEGIYEAALRPTMRFVPVKSIEQQDLQSLHRARERVVCARTALINHMRGLLGEYGVILPQGAWRFLTQAADAIVTAELSDLTRELFGDLLEELRVLDLRLDKLDRQLLAICRTNEACRRLSKLPGVGPVIATALVAAVDDGHHFRSGRELAAWIGLVPRQYTTGGKPRLGGIGRRANHYLRRQMIHGARAVMFRLAKHDDRRSQWLKELAARRGFNRAIVALANKTARIAWTVLTRKEDYSAAA

SEQ ID NO: 176598 - protein, 443 aa, unidentified
MTRKNQKRFEVVHPDCAAVDVGGSEHLAAVDPAKCADPVQRFSAFTDDLHAMADWFSSMGVKVVAMEATGVYWIPLFEILDRRGFEVYLVNSRATRQITGRKSDVLDCQWILQLMTHGLLRGAFRPSDEVCSLRSLVRQRANKVRDQAKSLNRMQKALVQMNIQLAQVISNIAGVTGMSILRAIVEGERSPDVLARLRDKRVKADEATVARSLRGNWRAEHLHALSQELAAYDFLEKQIGECDQAIADALDRLPVLQSDVTTPTKTLRSAHRSNEQQLALHQALNKVMGVDLTAIPTIGIDTALVLASELGADLSRFPTSQHFCSWLGLAPPTRISGGKPLPGKSAKVINRSAQALKQAASIARNDKSFIGASHRARLTRMDTCCAIKATAHQLARLIYAMLTKGQPYVEKGIEEFEERSRDRQLRALERKARKLGLQLVKAA

SEQ ID NO: 176599 - protein, 405 aa, unidentified
MAKLFVGLDWSETHHDVFIEDDDGRRVDSGRLPEGVEGVARFHAMVADRVDNPAEVIVATETDRGLFIGSLIAAGYTVMAVNPMSTSRYRERHSTSGAKSDPGDAKVLADLARTDYHNHRPVAGDTDLVNSIKVLTRAHQSLIWTRQRQTNQLRSTLREFYPGALNAFSDLTHGDALEVLRVAPTPELGRRLSISKIRSALRRGGRQRRLDDRAAEIQQALRADQLAAPDLITESMGSVVTALVGVISELNTQISGLEADLADRFDQHPDTKIIRSLPGLGMTLGARVLAEFGDDPNRYADAKSRKNYAGTSPITRASGKHRVVLARYARNKHLADACYLWAFASITVSPGARAFYDNRRERGDTHNRALRALGNRLVGILHGCLRHHTPYDEHTAWAHRHDLAA

SEQ ID NO: 176600 - protein, 360 aa, unidentified
MAKIKSVLTPSVVGGVDTHKDLHVAAVVDENNRVLGSEFFATTRQGYRQMLTWMTSFGTVARIGVECTGSYGAGLLRYLQSAGITVLEVTAPDKMERRRRGKSDTIDAESAAHAAFSLIRTVTPKTRSGMIEALRVLKVCRKTAVAARRIALQMIQMNIVSAPDELRDQIRNLTRMQLIRTLAAWRPDVTAYRNVQDAYCIALKSLARRYLELHDEIADLDIMIASIVDELAPELIKRNAIGYESASQLLITAGDNPQRLQSESGFAALCGVSPVPVSSGKTNRHRLNRGGDRAANSALHIIAIGRLRTDTKTQEYVAKRVSEGHSKMEALRCLKRYIAREVFTLLRNQNRQINSTQIMT

SEQ ID NO: 176601 - protein, 326 aa, unidentified
MNSAPTVLGIDVAKLKFDVCLIKLSGKLKHKVFFNNASGFEQLIRWLGDTDAAEIHACLEATGAYGEALALRLHEAGYQVSVVNPAAIKAFASACLSRTKTDKVDAALIARFCLAQQPPAWRPPAPEVRELQSLVRRLESLVEMRVAEDNRLSSGISVAAVRQSLEEHIAYLIEQIKQTEHLIQKHINNHPDLKQQSDLLDSIPGVGTATAALLLTEITNITQYKSARQVAAYAGLVPRERSSGSSVRGRVQLSKIGNARLRKALYFPAITALRCSNFFKGWADGLRTRGKCKMSVIGAAMRKLIHLAYGVLKTGKPFDPNWAKVA

SEQ ID NO: 176602 - protein, 345 aa, unidentified
MEYFAAIDVSLELSSVCVVDETGKIICEKKVASEPEALVAWFNDTGLEFTRIGLEAGPLSQWLHAGLTAAGLSAILIETRHVKAALKAMTVKTDRNDARGMAQLMRMGWFRPVHVKTVPAQEIRALLTGRKLLLGKLRDVELGIRGLLRGFGLKVGRVSKGRYEARIHELTAGHPMLEPVAAAMLQARVSLRAEYGKLHRMLLGIVRADATCRRLMTVPGVGPVVAVSYKTAVDDPARFRKSKELGPYFGLTPSKYQSGEVDWTGRISKVGDAMVRTALFEAANVMLSRVTRFSTLKAWALRVAKLRGMKRAKVALARKLAVVLHRMWVDGTDFRWRKMPAAVAA

SEQ ID NO: 176603 - protein, 452 aa, unidentified
MCLTDRPAVEANAAGIDIGARELYVAVPPDRDTEPVRMFESFTEDLHRLADWLEACGVTTVAMESTGVYWIPLFEILESRGLKPHLVNARHMKNVPGRRTDWHDCQWIQYLHSVGLLRGAFRPPDEICAVRAIMRRRQSLVEMAAQHVHHMQKALTQMNLQIHHVINDITGLTGLAIVDAILAGERDPAKLAALRHYRIQADEKTIRKSLAGAWRNEHLFALRQSREMWGVYQKQIEQCDAEMARLLADIEARVDPAEKPLPPDRKERRARNGRNPGGTGFDMRTEVYRLFGVDVLQIPGLEHTALSLLTEVGTDLTRFSTAAHFVSWLSLCPDNDMSGGRWWRGVRKTNSRTGQMFRQAASSLDRSQTGLGDFLRRMKAKLGPLGATMATARKIAVIFYTMVTKQVEYDDSIWAEQEAARQRRLEARFKRQAAKLGYLLVPQNGDPQTSRA

SEQ ID NO: 176604 - protein, 345 aa, unidentified
MNTIKVTQSQGKGKSLCVDDFDHFLALDWSMKVMAIAHMRRRSKEPETFERPSDLKEFKQYLATLKGRKVLAIEETTTAQWLYVELIDHVDRIILCDPYHNRLLSNGPKTDKIDAGKLCLLLRAGLLKEVFHSLSGLYELRRLVSAYEDLVKAGVRVLNQKSSMEQGHFESGKHAPFILEHVEQSIELYQRSKQQYERKFTDLSRRNKLVKNLMEVSGIGIIGAVKIVAIVVDARRFARAGNYLSYCGLIKHEKISGGRSYGRRRPRFNHTLKTVYKLAAMSVISGNDNPIREYYEYLLAKGIAEHNARHAVARYIARLTYGMLKTGKRYQPYQGRNQAAGHQAA

SEQ ID NO: 176605 - protein, 346 aa, unidentified
MNSMNYIGLDIHKKSISCCVRQADGTIIQESTITATRHALDGWMRQLPDPWIAGMEATLFTGWIYDHLVSGGALVKVAHPAMLQAIGAGKKKNDRVDARKIADLLRCDYFPECHMAPREIRDRRRVLRYRNLLVRQAVQMKNKVSGLLMEAGVPYNQQKVHQKKYFAALLQTQKQEMPPSMPELLRLSRSTVEALTGMQRQLIRALENDALLAARVERLASIPGVGRVVALTWALEMGDISRFGSVKKAVSYCGLCGAEKSSGGKTERTPISKQRNKHLQTMLIEAAKLAPRWNAELALVYERSKQKGNRNRATLAVARKLVAYLMAVDREERPFDTQMRVAGNAA

SEQ ID NO: 176606 - protein, 401 aa, unidentified
MEAQPLHVALDVGCRRHRAAIASPQGQMLAEFDVEHNAAGFAEFFGRIEEQRQAQQPVWVAMEGCNGYARPLDAQVRQRGYRLLNVNNLKLARFKEMFPGPAKTDALDTHRMLELLRVQAQVPLAKGIVQEVGTVPAVNAQLKRLTRRRRQLVAEKVRIVNRMQADLHAVSPGLVAITGGVDNVWFLGLLSCRDDLRKIAKLRGATVRKLRRVGIKHAAIIAQWQRDAHFAADVEWVGPMIVADARRILALLDEIATLEHQLAALATQSELYQRLASVPGFGLVCSAELAGEIGTHERFAGEASLALYIGATSLDDSSGQHQGCKTARQVNRRAKAALITAVDHHRRCVARSQVYYEKKRAEGKTHNQAIRALARHLVRVLWSMFVHDRDYELREPTTKPA

SEQ ID NO: 176607 - protein, 346 aa, unidentified
MQPVIGCDAHKKFSVFVSVDQHGKSSRPVRVDHDLNLYCEYLRTLPPASEIALEATGHWYWIVDAMEQAGHRPHLANPFEAKRRMAKSNKTDALDAKGLAILLRCGTLPESWIPPGELRDQRELLRTRMALRDLRTSLKHRIHAGIDRYGLQADAISDLFGTKGRAYLASILKALPTETAHMTAVQLHSIDQLEEKIEAIERRIAETLKASPEIRLLRTVPGLGPILAPLVWLEVGDVDRFPRAEHLASYAGLVPRIIASGGHIRHGSTCRNVNHYLKWAFVEAANCAIRMKAHHEDHIGRLYHRLYPNKGHGRAVVAVARHLAEASYWVLRKRQTYRAPQPRIAG

SEQ ID NO: 176608 - protein, 401 aa, unidentified
MPTMRDNAMRVKRFRELKATLRTNRKRLLVGLDIARSEHVAHLRHAHTRIVLPKLVIPNSTGGFAELWARIEQAQRATGCREVVCGLEPTGTYHEAVATFLEGQGVDVVLVSSAVAYWNRRTQDGTWDKNDRKDAANCADLLEQGKVLFYSQPDGPRAELRRLVRCLRRARGELAACKARWRTTLRPALGPMGEPLPSRLRAELPAVLQAWERAAPGRPAVAKGRLPLGLATACADLGAQVTAIQARIGVIEGALTPLAERLPAYALLRTIPGVGPTVAAILLAEIGDVAWFTKFSQLRKLAGLDIIRVQSGTFAGQWRISKCGRGLLRWALYHAAMGLARTTAGRARLAALKAKRQGDRFAGFKAIVELAAKVLRIVWGVWRSGTPYDPRRTGGLKRQAR

SEQ ID NO: 176609 - protein, 399 aa, unidentified
MVEATTHVGLDVHKQSISVAMLLPGSVKAVQWEMRNESGEVRRLVRRLRRDAGGGAMLCAYEAGPCGYVLQRQLVREGVACQVVAASLIPRKPGDRIKTDRRDARKLAELLRAGLLTEVRPPSEAEEALRDLCRCREDARVDLMRARHRLGKMLLRRDLRYVEGRPWTEQHRAWLWSLKLEHAAERMVLEDYLLAVEQVSTRLATLDAQLKELADQEPYRERVGWLRCLRGIDTVTALSVLAELHGFERFQKPRQLMAYLGLVPSESSSGASVYRGAITKTGNRHLRRLLTEAAHHCRHRPGVGAALRRRRAGQPAAVIALADRAQQRLHRRYSRLLLGRGLPVQKIVVACARELTGFVWALLYLQPRQLISPGDETRARRPNPGATARGLRAAAGKTR

SEQ ID NO: 176610 - protein, 347 aa, unidentified
MSITMIGLDTAKSVFQVHGVNETGKVEIRRKLRRSELIPFFEKQEACIVVMEACGAAHHWARILSSLGHEVKLIAPEAVKPFVKKGKKNDPADAAALCTAASRPDMMFVPIKNIEQQGILALHSVRSLLVKQQTMLANAMRGLATEFGLTVPKGIDRLEELLALVDADKAFPEKARQVFTGLFDQCRALAESIRAFEVEIVAHARHDDTARRLATIPGVGPITASLIAATVVDIGLFKSARHFAAWLGLVPRQYSTGGKTRLGRITKTGNREIRKLLVLGATSMVYRAPQWNSVVGAWTRGILERRPVRLVTVALANKMARIAWALMTRKEVYRATGRVAAATEAAA

SEQ ID NO: 176611 - protein, 312 aa, unidentified
MANQTFIGIDVGKSNLDVNLHGNQAVKRFSNSPTGIQKLEYFLREQIEPLVVMEASGGYESLVAKTLRQAGFPVCVVNPTLVRRFAQGMGTMAKTDAIDARIIARYASIKQPKPQAARGEDEERLVALMDRREQLNEMMIMEKNRLFTAPIMIRESIQMHIEMLKQQIKQIDQVVYELIAANQDWQKKIKILTSFKGVGTVVAVTLLAELPELGQESRERIGALAGLAPINQDSGTRSRKRKTLGGRAKIRRVLFMVALGGIRYNPVIKEYYERLLNRGKEKKVALVACMHKILTILNALLRKEQLWLPDYA

SEQ ID NO: 176612 - protein, 339 aa, unidentified
MNNSVIGLDIAKNIFHLFTLLDDGKTLKKKLKRHELLAFFANYPASIIGIEACGSSHHWARELTKLGHEVILLNARFVKNYVVGNKTDFNDAEAIHEAVLRPNKRVVAIKTVAQQDIQLVHNIRKDLVDQRTALVNQTRGLLSERGIVINQGIEQLREQLPLIIEDAENSLTDLSRELFAEQYEKIKTLDAEIKAQDQRINRLCNANDLSKRFLDVPGVGPLTATIVAADIGDGGKGYKSSRDYAASLGVVPKQHSSADKQHYLGISKRGNRYIRTLLIHGARAVLKNCGKKTDKLSLWLQALVARRGFNKAAVALANKNARILWAMASNGKDYEALVA

SEQ ID NO: 176613 - protein, 322 aa, unidentified
MSHKNYGGIDVAKKDIVIGIFGQEQTKTEANTAKGHAKAVAYLKKHNVDLVVLESTGGLEVPLANALHAAGMRVVIANPQRTHKYAGSFSPSKSDHLDAKMLADYAQALDARKLADDMCYVPPSEEVLVLEALVKRRGQLVTMRTMEKNRLKQTHVSQQASVRALIEHLSEQIAALDKEIDKNNRDGFGGKGEILKDVAGVGKITCATILSMLAELGRVRHKRAALLVGVVVPSLQSGEKEGKRGCVGGRMAVRNALYMAALTATRKEPKIQIFFERLINRGKAFKVAINACMHKLLRILNARMRDYLASLEKTEETESQSV

SEQ ID NO: 176614 - protein, 386 aa, unidentified
MKLVGIDIAKYKHAAFIMDASTGESLCDPFLFKNNKDGFQKFYDELNKYTQDELLIGMEDTGHYNFAIESCLLAKGYKVALINPITTKNLRKASLKTVKSDKEDAILITKALLDKDYYRIISIQDEKLKEAKELTRYRTQLTIEMNRKKNILQRHIDIVFPEFNTLFNNEYTITYLNILRKYGDAYTIAHTDIRSLRKCFKYCNIFSAEDLKELASNSVGIHDVSISFIIQSVISSIDLINSQIEVLDKKIEELAITQDSSITSIPGISIITGTSILAELGDISKYSNAGKLIKFAGVNPYISESGEFSADKTAITKKGSKYLRATLYQVIIPVIRHNPAFNNYYHLKRSQGKGHLCALGHCVRKLLRIIYHLEINHITFDINSLK

SEQ ID NO: 176615 - protein, 407 aa, unidentified
MDVVHPRCAALDLGKDELVGCVRIHDETIRQECRPFRTTVKELLALSDWMASEGVTHVVMEATGTYWKPVWHILEESFTLILANAAHVRGIPGRKSDVNDAMWLADLLAHGLIRGSFIPPAPIQDLRDLTRTRKQLVREIVQHTQRIQKTLDDANLKITGLITDILGVTGRAILKALIGGETNPERLADLARGRLKAKRSRLIEALQGWVTPHHTMLLKLHLDLIEAIEAAVDNLDREIGDALAPFRNAAQKVKTVPGISDLAAQGVIAEIGVDMSRFPTHQHLLSWACLCPRLDQSAGKIHSTRTRKGALWLKTLLIQCAWSAVQGKDTYLRAQFYRIRARRGPKKAIGAVAASMLTAIYYILRDNVEYRDLGPNYLDTIDRSRLSRRLVRRLENMGYHVELSGAA

SEQ ID NO: 176616 - protein, 302 aa, unidentified
MCRRTGSTLRSCPHGDAFAVGNDDAGIDALIGRLKAVGADAVALAATGGFETQAVAGLSSAGLTVLVVNPAQVRAYTNAIGRRAKTDPIDATVIAAFVLANKPEIRPLRDAETQALSDLVARRHQIVQMIVAEENRLRMMLAKQAQKSIKRLRTALRRELESLDADLDGHIRESPIWQVRETLLVSVPAVGSTTARTLLAELPELGSLDRSQIASLAGLAPWTRQSGTWKGKSFIGGGRGKVRAVLFMAALVASRYNPALTTFRDRLVAQGKPKIVAVVATMRKLLTILDAILRDNKPWQNA

SEQ ID NO: 176617 - protein, 318 aa, unidentified
MTTSNHLITSINVGIDVGKAQLDIHLHEPDLYCSVQNNPEGIARALKWLDQYPIKRIVIEATGRYEQRFVEAALDHRLPVIVINPLLIRRYAGAIGQLAKTDQIDCWLIAQYAAVIQPLVRKHKSKNIIRIKDLLARRRQVIEMTTMEKNRYQIMPSFLKADIKRLIEHLQSQRLKLDKQIEQQVEREDSWRHKRDILQSMPGVGPVVVSTLLGDLPELGQLNNKQIAALTGVAPYNRDSGKLRGKRRIRGGRACVRTTLFMAVLSAVQHNPVIKAFYQRLVAAGKHKKVALTACIRKMITMLNAMIRDNKMWQTNIA

SEQ ID NO: 176618 - protein, 330 aa, unidentified
MSGFVGIDVAAKAFDVVVRIDSKASKVEQFSQTPDGHAAAVRKLQKLAPELIVMEATGIYYLDLAVALAKATLPVSVINPKSFHHFAALKLNGNKTDAVDAALLAEFAQCMSPRLWRAPPDELLGLRDIGRQLNRLTASRTQAKNRLHALTSKSTTLPMLIEDEQEGIEQLESRMKRLTKAALALIAGNAMLAAHFEHIIAAKGIGETSAIAILAELCVLPPTMKAPQISRYAGLDVRQTQSGSSINKPARLSKAGNVYLRAALYMPAMSAARHDVRAKAFYEALTGRGKKKMQAQCAVMRKYLTGIWACMQAQTAFDSTLLFSEKHIQN

SEQ ID NO: 176619 - protein, 346 aa, unidentified
MQYYTERHRHTCGVDLHGRNLYLCVLDPDRKIVLHRRIDCDEEELLRALAPYREDLVVGVECMFKWYWLADFCDEHGIPFVLGHALEMRAVHGRKSGNDRLDAERIARLLGSGMFPVAYAYPSEMRSTRDLMRRRSYLVNQRSSLITHIQVTNQQYNLPELGKISKADKREGIETRFDDPAVRATVEADMAVIDILDVVIVRLERAIIKAARGHDGHAFALLKSVHGIGDIIGLTVLYEIHDINRFDSLGGFLSYCRLIKCTKTSDGKPKGTGGRKQGNHHLKWAFSEAAALFLRANPEGKKLHSRLVKKHGKAKALGIIAAKLARSVYFMLLRNTPFDMDRFVRA

SEQ ID NO: 176620 - protein, 497 aa, unidentified
MPNKSTIYSRSNPQLLKLFETAGHPAKVLCVALDYAKAQHTALICNGVGDLLKPSFALDNTAQGAAQLLSEVRACAKSRKVRCEHVFFGGEDYPSYAENFLRHLRQEKFLVVRVNAWEAKQQRDNFQASSDSLDLLGIARCCLHRRGQSVRDLPQAYPNLRIATRDRDKLVRMRTAVSNRIHTYVDRLFPGFLSVGKSPLEPFSKASLDLMEDRFSPAQLRRRPRQALTEWLGRRGVTQPRDTADELKQFAQHVLEPAPEQTVMLQQTLAQLVGLYRNLEQSIVRIDREVAYWLARTPGAWLTSIPGFGITLAAGWTAELGPPSQWHSVRQLCSYSGVVPKSKQTGGPEKEPIVGAVQPRCNKRLKNVVLQAVEKVIQHGPEELRRTAQELQARGAHTEFALAKRLVRLGKYLTVTGTVYRPKTLMDPDIPKANLAAHYQSVWEKLLPKWRDKADLRDVFAPQHPLGQWRQMVQELYALELRLPQQRAAQPSSAVIP

SEQ ID NO: 176621 - protein, 411 aa, unidentified
MMRRIRDRVAGLDVHRDSVTACAQLFDGREVEVDKARFATTAVGVRALGEWLAEREVSLVVMEATGVYWKPIFYPLEGLFDEVWLANASHVKNVPGRKTDMSDAEWLADVAAHGMVRPSFVPPPPIRALRELTRYRKTQIAARGQEIQRLEKLLQDAGIKLSSVASRVWSRSGRAMVEALIDGDSSPERLAELAKGRMRAKIPALVEALEGRWDSHHSAVARRILAHIDFLDESIGVLNDEISERLRPLEAAVTLLCTIPGVSTLTAEVIVAETGADMARFPSAEQLAAWAGVAPANHESAGKRRPAGTRQGGRWLRNALIEAAKAAARTNDTYLAAKYRGVARRRGPNKATVAVAHAMTVAIWHMLTTGQPYHDLGGDLFEKRRDPEREAQRLIRKLADLGFNATLEPAA

SEQ ID NO: 176622 - protein, 327 aa, unidentified
MDNKYHYWGIDVSKDSLQIATQLHDSSWLDTKISNEVEAINQWIADVVNEHPAPFFIFEHTGPYSTRLAYCLKLQGLHFYIMTASQSSGFTKTLKNISKTDKADARNLFLYGQKMNPEPTELMEEEFVYRRELFKHLSTLKEEKRCFENRLHAHTFDPRASVIVTDSLEKSIAFFEQQIQKLETELFKNNDPNLEELEQKIQQVVGIGPKSAMAIITATNGFATFEHAKQVAKFLGVCPSVRQSGSSLRGRASIQKSANAYVRQCLYMAARSAIKHNNACKALYERLRLKGKPYRVAMIAVVHKLIRQIFSIVKNDTIFNNDLCLEK

SEQ ID NO: 176623 - protein, 407 aa, unidentified
MELLHPRCAGLDVHKDTVVACVRLAADNKYTMHLETFSTTTDGLLSLANWLEGHQVDHVAMEATGVYWKPVWHILEGSFELLLANPQHIKSVPGRKTDMKDAQWIADLHAHGLIAASFVPPEPIQDLRDLTRTRKQLVREKVQHTQRIQKVLQDCNIKLDSVLSDITGKSGREMLRAMIKGETNSKRLADLACGTARNKLPALQQALRGKVRPHHRGLLRIHLDLLESIEDSIKEVDDLLGKALGAMTAQRDRLTTIPGVSDQVALTIIAEIGTDMSKFPTADHLISWAGLCPRNDESAGKKRSTRLRKGDPWLKAMLVQAAWAAARTKGTYLRAQFMRLTRRGPKKAVVAVAASILTAAYYILRDGVTYVDLGAEYFNKRDEEKVVARLTKRIRDLGYDVEAKKAA

SEQ ID NO: 176624 - protein, 340 aa, unidentified
MNITTLGIDLAKTSFSIVGMNEHGKVLLRKTLTRKKLLPFIAQQPICLIGMEACSGAHHWARKFKELGHQVGIIAPRFVQPFLKKGKNDNNDAEAICEAVSRPNIWFVPVKSPEQQAVLCVHRVRQGLIADRTGLINQLRGLLSEFGIVMPQGRYSAQKEISFILEDAENGLPDLARQMINNLWQRIQQANGQILEYDRELARLVREDEMAKRLMTIPGVGEQVATGMVASVPDPKMFKNSRQFAAWLGLVPKQFSTGGKIRLGRITKRGDKYLRMCLVHGARAVLANVKDKQDKISCWIRELIERRGYNRAIVALAARNARLIWTLMIKREDYRVIPCE

SEQ ID NO: 176625 - protein, 342 aa, unidentified
MNTVYVGLDLGSSAFQQVAIKSDGSTKVNRSFSTSETNLRTAFRDLGGEIHVHLEAGELAPWAASVIGPLVTRVVCSHPQSNAWIAKDADKCDRVDAYKLAELLRLNRFKEVHYAPDQPRRNFKQLVQHYDELTAQQARLKTKLKARLRMQGVIVTGARLFSATGRKPVLAEVKSPDLRTAISQLYAVLDQSVEAQTQARLLMLRAAQAFPEIKLFRTAPGVGPIGACRFSAYIHTPNRFSTTRKLWKYCRLSVSHRSSNGKPLRRPRLDRCGCGRLKDVSRKAFDVAIRSRQDNGFKRAYQRALETTHDATHARLTVQRKIVSTLRAMWLTMTPYCDELSR

SEQ ID NO: 176626 - protein, 437 aa, unidentified
MRVLYEHVAGIDVHKDMIKVAIRSPGEKPWTRKTEILEFRTFYGVLQEMARLLRRRGVTHVVMEASGVYTDPVYYALCEQDFAEVAVVNPAHARALRGHKTDAADCRRLAELFECGLLRGSYIPPAELREVRDLTRYRMKTVQARTSEIQRLGKALESAGIKLGSVASDITGKSATAMIDSLIDGERRGAVLADLAIGRMRTAGKLADLSMALTGRFTEHHALLCRLHRDRIAGLDAAVADLDDQIAGRAGRWQRELDLLKTVPGFGDVVAQTWLAEIGPAPHRHFASHEKLASWVTLCPGNNISARKRKHGRTGDAGTYIKPMLIQAAWNAIRPKGRLQARYSRLVRRFGGEKNPGAKKKAITAIAHTLLKIAYQVLKSEVPYQDLGADFCTRRESPDQQRAYLERRLRKLYPGCAITITISPPEAVLTSTVSNAP

SEQ ID NO: 176627 - protein, 341 aa, unidentified
MKIIGCDFHPSYQQMAMVDTETGELWEGRLEHEQGEARRFYQALVGQVVRVGIEAVGNSQWFEQMLAEMGHELWIGDAARIRRLVVRQQKTDRRDAKHILDLMVDGRFPKLWVPSQQIRDVRQLLRHRQKLVEIRTQVKNQLQHLALNQGVRRKRRLWSEQGRRVLEQLPLQGWTARRRSDLLGMLDRLQEQVGELDRAVRAEAEQRPEVRLLMTHPGVGPVVGLAYVLTIGPHTRFKRGKKVASYLGLIPREHSSGDRQSFGPISKQGNTMMRTLLVEAAQTAARFDEELRRAYGRLKAKKHSAPAKVMVARKLAVRMYWMLRENKSYTELYTRRPVARM

SEQ ID NO: 176628 - protein, 340 aa, unidentified
MTITTVGIDLAKNVFAVHGVDQNGKTVLIKSRVTRTALPGLIAGLPPCVIGMEACSGAHYWARLFRQYGHEPRLMAAKFVSPYRMAGKSGKNDAADAQAICEAVCRPHMRFVPVKDESQQAMLCLHRTRQGFIEEKTATYNRLRGLISEFGVIAPQSTDALRHMVSAHKDSLPLQVQQCVDDLLEHVARIEASIAEYDRILSRMAKTDHRSQRLMELKGVGSTTACALVASIGNAHDFKNGRQLAAWLGLTPSQYSSGGKSKLGRITKAGDSYLRTLLVQGARSVLIGADKRTDSFSRWVCSLVERRGYWRAVVAIAAKNARLCWASLHYGDDFSLYSES

SEQ ID NO: 176629 - protein, 365 aa, unidentified
MDEHSRQGSGVTIGVDLGDRYSHLCVVDEHGEVCEEGRIATTARAMRKRFEGMARCRVVIEVGSHSPWVQRLLEELGHEVITAHTQAVRLIYGGTNKNDRLDAERLARLGRVDPKLLHPIRHRDGSVQADRAVIRSRHVLVGCRTSLINHARGMVKSMGGRLPSCSAESFHKRAGTALPDELKPALLPVLETITSLTQEIRRYDQRIETLASERYPETLLLRQVSGVGSVTALSFVLTVEDPRRFRKSRSLGAYLGLQPRRSQSGDKDPELRITKAGDEDLRRLLVNAAHYVLGPFGPDTDLRRWGLALAARGRKNAKKRAVVAVARKLAVLLHRLWVTGEVYEPLRDHQRRTNTSALVAQAMSA

SEQ ID NO: 176630 - protein, 339 aa, unidentified
MMIIGCDYHPSFQQVAFVDTTSGECGERKLTHQMEAESFYRNLHGQEVRIGMEATGHARWFERLLAELQFELWIGDPGEIRTKRVRKQKTDRQDAELLLQLLVENRFPRIWVPSPENRDLRQLLWHRHRLVQMRTRVKNQLQAIALNEGLRRQKGLWSKSGRAQLEALELAPWSARRRQDLLELLDRLHPRIEELSAAIQQAAEQKPEAQRLMTHPGVGPITALAFVLILGVPHRFRCGKQVGSYLGLIPCEQSSGGRQRLGHLSKQGNTLLRFLLIESAHAGVRYEPDWRRRFLHLALRRGRSIAKVAMARKLAVRLYWMWRKGRDYQQISQFGSHVE

SEQ ID NO: 176631 - protein, 368 aa, unidentified
MDETITGFVGLDVHAESTAIGVAESGRTTPRFVGTVGRKFSELSKALAKLGDPSRLLTVYEAGPCGYALARELKHAGYHCEVVAPSKIPRRPGERVKTDRRDALTLAGLARAGELTFVVIPDERDEAMRDLSRARIDAVRAGLKVRQQLKALLLRHGRRYTGKTSWTAAHERYLAEVSFAHRAQDIAFVESRQAVSEAHARVERLSEALTQELENWRMRPLVQALMTLRGVDRLVATTLVTELGELRRFAHPRELMGYLGLVPSEHTSGEKRRRGAITKTGNCHARRMLIEAAWSYRFPPRITLPLQKRQEQQPAAIRAIAWRAQLRLNHRYRRLSARGLPQNKICVAIARELAGFIWSIGQQILIAS

SEQ ID NO: 176632 - protein, 417 aa, unidentified
MSTDVRFFVGIDWASETHQVCLVAADGKIIGERAFAHGGAGLAEMCDWLVTTSGEEPPKIAVAIEVPHGPIVEILLERRFQVDAVNPKQLDRFRDRFTVAGAKDDRRDAYVLGDALRTDRHCFRRLAVEDPVVIELREWSRMAEDLSQERNRLANRVREQLWRYYPQALELGDDLAADWFLDLWVLAPTPAKAVRPRESRVTSLLKAHRIRRLEAAEVLRILRQKPLVVASGTIEAATAHITAVAARLKLVNQQIKQAHRRLDELADKLAEGREEDAPGQKSKQRDVTILRSLPGVGRIVLATLLGEAAEPLRKRDYHALRTLSGVAPVTRRSGKRCVVLMRQACHLRLRTAVYHWARVAIQHDARSRARYAELRKRGHSHGRALRSVADRLLAVACAMLKTQSTFNPEHAAEAATA

SEQ ID NO: 176633 - protein, 358 aa, unidentified
MAGKVTETAVVGGVDTHKDLHVAAVVDQNNKVLGTQFFSTTRQGYRQMLAWMTSFGALKRIGVECTGTYGSGLLRYLQNAGLEVLEVTAPDRMERRKRGKSDTIDAECAAHAAFSGIRTVTPKTRNGMIESLRVLKTCRKTAISARRVALQIIHSNIISAPDESREQLRNMTRMQLIRTLGSWRPDASEYRNVTNVYRISLKSLARRYLELHDEIADLDVMIAAIVDELAPELIKRNAIGYESASQLLITAGDNPQRLRSESGFAALCGVSPVPVSSGKMNRYRLNRGGDRAANSALHIIAIGRLRTDDKTKEYVARRVAEGHTKMEAIRCLKRYISREVYTLLRNQNRQINSIPITA

SEQ ID NO: 176634 - protein, 415 aa, unidentified
MKTYSELKYYGGLDWAKDHHQVCILDGQGQRVEGFRFEHSGPGWKALRERIQGYPALGMAMETSSGAVVDQLLASGVTIFAVHPKAAKSYRQRQAPSGVKDDDLDAWSLADDLRLDGGQWRALSEQDPLVEELRLLCRDEEELIEQRTALVNQLQQALAEYYPAALEAFDDWTAPYTWAFVKKFPTPQQLVAAKPYRQREFLHVHKLWRSDTAPQRLEIFGRADQFCGSPALVRAKSRLALALCQSLQTLQEQLVEYRAAIEELFAQHPDHNIFGSLPGVGPKLGPRLLGSVGAQRQEYPQAQGLQCVAGTGPVSFKSGQMRVVQIRWHCDRFLRHTVDLWANTSRKTCAWAQAYYLAKREQGKSHSCALRCLGQRWLKILWKMWQTHSRYDPEYHARNQQRHGSWVLQFQPTQA

SEQ ID NO: 176635 - protein, 345 aa, unidentified
MEITTIGLDLAKNVYQVHAINGAGEVVVRKTIRRAQVLRFFERLDPCLVGIEACGTSHYWAREISKFGHEVRLMPPAYVKPYVKRGKTDASDAEAICEAVSRPTMRYVAIKSCEQQAALTIHRTRDLFVKQRTQLVNMIRGLLAEFGIEIRRGITHALSLAERIAAGDMPGIPALAAKMIASLAGQILDLEARLREIERELLAWHRSSEIARRLATIPGVGTVCATAFAASVTDPHQFRSGRQFAAWLGLTPLQHSSGGKERLGRISKMGDKYLRRLLVVGMTSLVRRAKYKPEAVDRWLAALLTRKPARVVTIALANKAARVIWAIMARGGIYRAPQPAGAAVA

SEQ ID NO: 176636 - protein, 368 aa, unidentified
MMGWMAPLRHLGAKVLVGENQPADREPSMSEITTVGLDLAKNVFQVHGVDAEGSTVLRKQLRRAQVLAFFSGLPRCLVGMEACATAHYWARELRALGHEVRLMPAQYVKAYIKRNKNDAADAEAICEAVARPTMRFVPAKTAEQQAAVLLHRGRERLVRQRTMLVNALRGHLAEFGVIAPQGLRNVGRLIAIIRDEEDARLPGLARQVLQVLAVQIEQLEAAIAALEKQLMGWHKSNPVSQRLATIPGIGPIIATAIAAMVAEPSGFRSGREFAAWLGLVPRQNSTGGKNRLGGISKRGNQYLRRLLINGASANLLRSKATNADPWVIGLRRRRPSLVVAVALANKTARIAWAVMHRQENYQRMATAA

SEQ ID NO: 176637 - protein, 369 aa, unidentified
MQEVTTYVGVDAHKKDLFIAMLIGDRPTPVTWTVPNERQAVRRLVRKLEREAPGPVRCCYEAGPCGYALQREVTTPRVSCQVIAPTLIPRKPGERIKTNRRDARKLAELLRAGLLTEVRPPTPEEEAVRDLCRARDDAREDLQRSRHRLGKLLLRRGLHYSSGRNWTRGHRRWIDSLEWAQPAERVVVDDYLLAIDHLEARLIEFDRRLEDVAQSDPYREPVGWLRCFRGVDTLTAILILAELHDFRRFHSPRALMAYVGLVPDEHSTGEKQRRGRITRTGNALVRRLLVETAWHYQHRPGIGPALTRRRKGQPSRVIAIADKAQQRLCRRFRSMAERHKPAPKIAVAIARELAGFLWAALQPVPARTN

SEQ ID NO: 176638 - protein, 350 aa, unidentified
MKKNSKAVERHPAETIGVDLGDKMSKYAILNEEGVAVEEGSFRNNAESIAKHFGERSKARVALEVGTQSAWISREFAKLGHEVIVANARELKWITSSDTKNDRNDAMKLARLARADRNLLAPVEHRTAEQQAELAVIRARDALVKSRALLVNTARSLAKGFGLRLPASITPTFGARALARLAEDLRTAMSGLLEQVDALSLKIRDYDQRIKEVATKHPEVERLASVPGVGTLTAAAFVLTLGRRERFAHSRDVGSFLGLRPRQKQSGERDPQLGISKSGDTYLRKLLVQCAHHILGHWGKDSSLRQWGLSKSDGASGKKRAVVAVARKLAVLLHRMWTTGEIFKPFPKMA

SEQ ID NO: 176639 - protein, 457 aa, unidentified
MEAYLGIDVSKGYADFTLLDKEKQELEKVFQLDDTCGGHDALKKLLKQFTLQHNISTMYCAVESTGGFENNWYNWLIVLKKELPIKVARLNPSGVKNNVAASLERNVTDALSSRYIAQYIISHAEKVKYDVPDNIYSSYRSMSKHIALLKKQNTQLINEMKMVLYSTFPELMRYCKQGMPAWVLDVLKKYPSPAAIEKLKVEQLSKIKNVTHDKALSIINKAKNSTTSRNNTVQEFLIKSLAKQIADKQELIDEHKNYLADNCKGAEVDLIDTIPGIASYSAAAIMIEIESIHRFATPSHLASYFGLHPVMKESGDKQFAYRMSKKGRSGMRALLYMCAQTSVLHDEHLKNIYHRHRSKGKNHKQAIGVIMHKMLRMIWGVLTSTQPYNATTDKNNQTKKIKQQPDNKKEELKTKRRYQALDTDAPISNIQSKKRKAQSEPQVSSAEQVRDHQIAPV

SEQ ID NO: 176640 - protein, 355 aa, unidentified
MNGEKYIGLDVHQATISVAVLDSSGKLVMESILETSAATILQFFAGLRGRLLVTFEESTSAAWLYDLLKPRVAELLVCNPRKNFLLNQGNKSDRVDARKLAELLRGGQLKPVYHGDSGVRTLRELARAYLTTVQDLTRVMSRLKAVYRSWAIPCGGRDVYYARHRAEWLAKIPHPGPRRRAELLYEQLDALQPIRQQARRELLRESRRHPAAARLQQIPYVGPIRAALLVALIQTPHRFRSKRQLWAYGGLALETRISGEYRYLEGQLLRSKKVLAIRGLNKDHNPDLKGLLKSAATMASTRPGPLQDFYQAMLAKGIMPAMARLTLARKIAAIALTLWKKGESFDVEKLKSQAA

SEQ ID NO: 176641 - protein, 356 aa, unidentified
MTSNIKYIGMDVHTESISIAVMNSIGKVVMESVIETKASMILQFIDGLRGDVQVTFEEGTSAAWLYDLLKPHVTKLVVCDPRKNKSMREGNQNDKIDARRLAELLRLNHLTPVYHGEHGLRTLKELVRSYLTVTKDLARVMTRVKAIYRSWAIPCSGKQVYARRHRQEWLGKITEPGVRRRAEFYYQQLDALRGLRQEARRDLLAESKKHKAWKQLCGIPSIGPIRAAVLLGILQTPHRFRSKRPLWNYGGLAIEMHSSADHRSVDGQLQRSRKNVLVRGLNRNCNHDLKNLFKGAAAVASSKPGPFQEFYTALVAKGMRPEMARLTLARKIATIVLIVWKKGVCFDANHLKPQTA

SEQ ID NO: 176642 - protein, 386 aa, unidentified
MSRPSNILLRAINYDHTLVLAIELSNKSWVLAAQVPGLPQTKAQRTIEPNKNALLAAIDGYRARAAAVGYAVDRVITTYEAGWSGFWLARWLVAQGMEVHVVQPSSVPVDRRLRRAKSDGIDAELLLRTLLAWLRGEPRVCSMVPIPDEADEDARRSVRERTELLSDRVGLTNRIGAVLATLGAGDYNPLLQSRRRRLAELRTGLGEPIPPNALAKIERLLARLELVLAQIAELERERDEVAAADAPDRAGKMIQQLASLRGIGVQSATVLVREAFVRHFSNGKALGSYAGLTSTPYSSGGIDREQGIGKAGNRRLRTVMIELAWLWQRYQPGAAQVAWFRDRVGSTGRRVRKVMVVALARKLLIALWRFVIDGVVPEGAVMKPSI

SEQ ID NO: 176643 - protein, 350 aa, unidentified
MTMVGGLDVHRQQITFDYVDDDGLVHWGQIRPATSKTLRGWLAEHCPEGNAEFALEGCTGWRYVVEELAAAGVGVHVGDPAEIAAARGRKKRAKTDRADARLLRTLLVEGRFPESWIPPAHVLEVRTLGRLYCTLMDERRAWQQRIHAQLFHQGCPPIRALLSEAGRAALTRAELSVVGRQYIDAALRRIDELSAEIEPLRKQLVDFARHQPGCRALQTHYGIGWLCAAIIWAEIGDARRFGSSDQLVRFAGLDVTVYSSDSKRSPGHLSRQGSPQLRWAAFEAAKCAARRGSPDYAYYHKLAAKHDDHNGKNPTLAVERKILRRSYHTLRELGDAALAVPDTRSQEAAA

SEQ ID NO: 176644 - protein, 335 aa, unidentified
MDPTGKLGMECILETKASTILEFLAGLRGSLSVAFEEGTWAAWLYDLLKPHVARVVVCNPRKTALLKHGNKNDRIDAGKLANLLRLDNLEPVYHGQTGVRTLRELARSYLTIVKDLSRVMNRLKALYRGWAIPCAGRDVYYTRHRSEWLEKIPHAGTRRRAEQLYQQLDMLQHLRQQARRELLAESRKHSITAKLRQIPSLGPIRSALAVALIQTPHRFRSKRQLWKYSGLALETRISGEYVYVHGERRRSKKQISIRGLNKDHNHDLKGLFKAAATRASVIPGPFREFYQRSLAKGIKPTMVRLTLARKIAAITLTLWKKGENFDVEKLKSQAA

SEQ ID NO: 176645 - protein, 430 aa, unidentified
MSCRFGGIRSGGGEAVEIIYPRVAGIDVGKREIAVAVRTPGDVPGRRRQQIRKYKTYYLVLRGMVAWLVEQGVTHVTMEATGVYWKPVFHALCEAKQIEVLLVNARHVKNVPGRKTDVKDSEWLAQLLECGLLRGSFIPPKEIAAIRELTRYRKKLIEERTRELQRLSSVLEDGGIKIDSVASSITTLSARDMIEALIGGERDPRVLAELARGVMRNKIPDLTMACEGRFGDHHALLARMHTDQIDNLASMIQVLDDRIEEVVDPFAEQLRLLLSIPGIGERAAQVIISEIGVDMARFPTAAHLASWAGLCPGNNESAGKHKSGRTRKGNAEVRSILTECAWSAGRTGTYVGAQFRRMHRRFGKTGGGKAAIAVAHTLIVIIWHVLHDGAAYRDLGSDYFTRHDNPEARKRRLVHDLQSMGYQITITPAA

SEQ ID NO: 176646 - protein, 356 aa, unidentified
MAEGTWVGLDVHARKVVAGVLDARSGEVRSLRAPTLPTEMVGWLGQFSVPVRVAYEAGPTGYGLARACVAAGIACTVAAPSKIPRAPGDKVKTDRRDAERLARLLRIGELVAVHVPEPHEEAARDLVRAREDARGELMRARHRLSKLMLRHGLVYDASAWTLAHDAWLRRQRFDSRPLSIAFDECYDAVQQAKRRRDALDRAISGVAGEPPFAEIVGRLCCLRGVSTLTALALTVELGDWTRFRPQSLGPFLGLTPSEDSTGERRRLAGITKTGNTHARRLLVEAAWHQRRPLRESALLERRRQGQPAAVRARADLSARRLHQRWHALEGRGKRRTIVAVAVARELAGHCWALATM

SEQ ID NO: 176647 - protein, 411 aa, unidentified
MLKIMHPICCGIDVHKTFVVACIASTNDKGVTTYQTERFSTYTKDLRELSDWLAANNCKDVCRESTGKYWHPVWNVLETTCHPVLAHPKYLKAIRGKKTDKKDAKWIADVFKHDLVSGSFIPPAKIRELRDLLRYRFKLTNYTTGEKNRAQNCLTTSNIQLDHAFSDVFGKSATTILNYLLEHPDEKNFDVTPFVDGRCKTPIEEIQLAVDGNISHEQTEKLKIIRSHMDSLELCKLNLESAILTLAEPFLPQVNLVSTVPGIKDFSAIAVIAEIGVDMSVFPTAKNLCSWTGLAPQCNESGGKKKSSRVSRAGAYIKPLLIQCSNAVVTSNKHPEIRNRYLAIKKRRGHKKAIIAIARMLLTAIFHILKKNEPYNPELYRQSDIAPVDRVDQAVKLLEKQGFVVSKTSVE

SEQ ID NO: 176648 - protein, 410 aa, unidentified
MEALHPRCCGLDVHKETVVACVRLVIDGKPVKEVRTFSTTTAGLIELSEWLTETKCTHVAMEATGVYWKPVWHILADDGFQLVLANAAHIKNVPGRKSDVKDSDWISDLLAHGLIRPSFVPDGPTQEMRTFLRTRKQFVHEKGSHILRIQKTLEDANIKLDSVITDIIGVSGRKMIEALIAGERDPAKLASFADRRLKASQQTLRQVLRGRVTAQHRFLLRLHLDQIDALDAAIARIDREVEASIVPFRTAVEQVRTVPGIKSLAAQTILSEIGIDMSRFSSSGHLISWACICPRSDESAGKRRSTRIRKGSPWLKTTLVQCAWAATRKKGSYLQAQYYRIRARRGPKKAIVAVAASILTGIYHMLKDGTMYQDLGPNHFDAHAKERQKNRLLKRLADLGYAVQLAPLPN

SEQ ID NO: 176649 - protein, 380 aa, unidentified
MDTTATCTGHSTTGRRLYLALELSNSKWKLGFTVGMGQDPRQRTIEAGDTRALRQEIAQAKQRFFLGPDSPVVSCYEAGRDGFWLHRYLTQEGIENQVVDSSSIEVNRRARRAKTDRIDLGKLLAMLIRYHEGERSVWRTVRVPTVAQEDRRQLHRELTTLKQARTQHSNRIQGLLVSQGVRLRVTPEFSQQLAEARTWDGSPVAPGLQDRLLREFEQWSFIQAQIRALEAQRRELIRTSDDPDIVMVRQLLKLRGIGVNSAWVFVMEVFGWREIKNRRQVGALFGLAPTPYASGSSAREQGISKAGNPLARTMAIEIAWGWLRYQPDSELTLWYQERYGHGNKRQRRVGIVALARKLVVALWRYLTTGLVPTGAILKAA

SEQ ID NO: 176650 - protein, 328 aa, unidentified
MEKIKFIGIDISSKTLDICIKSDGMRISMVIANEQGQIKEFLSNNSGSNIKLIIAMENTGRYNWTLYEVFAETNFQVYVIPPLHLKKSMGLVRGKNDKIDAVRIADFIEKNYQELIPWQPSSVSIRKLKVLLTERNYRIKLKRQLISQKSDYKRMHNMGLEDELTSLNAEMVENINKQIKILEDKIQNLIECDTQLKQMDKIIQSVPGVGKVLSWYFIAKTNAFTDIKDPRKMACYAGVVPFEHQSGYSIYRKPHVSVFADKLLKSLLHLGAMTAIRGKNDLREYYLRKVGEGKNKMSVLNAVRNKIIHRVFAVINKKTFYLNDLHLS

SEQ ID NO: 176651 - protein, 418 aa, unidentified
MRNSWTPYKFTFGGTRMYNAVGIDVSKGKSTVAVLQPAGVIIRKPFNVNHTSSELDELAKYIGSLEGETRVVLECTGRYHEPVVKTLSEAGLFVSAVNPHLIKNFGNNSIRKVKSDPADAKKIARYTLDNWIELRQYSSMDNTRTQLKTLNSQFSFFMKQKVAAKANLIALLDNTYPGVNKLFDSPVRDDGSEKWVDYAYSFWHVDCVRKIGLKTFTERYQAFCKKHHYNFQPAKPAELFLASKDLIAVFPKEASYKLLIQQSIQQLNLASSHVEELRSKMNELASTLPEYTTVMGMYGVGKTFGPQLIAEIGDISNFSHREALTAFAGVDPGVDQSGTHNSKSNKASKCGSNHLRKTLFQIMSTLLQTAPEDDKVYQFLVKKRAEGKPYYVYMTAGANKFLRIYYGKVKECIRNLEQ

SEQ ID NO: 176652 - protein, 309 aa, unidentified
MEIVVGIDVSKERLDVAILPQEEVFAVGNDHAGIDELAERLKGIGVDAIALEATGGYETLAVAGLSAAGLTVLVVNPAQVRAYAHAIGRRAKTDPIDAAVIAAFVLATKPEIRPLRDAETQALSELVARRRQIVQMIVAEENRLRMALAKQAQKSIKRLLTALRRELESLDADLDSHIRKSPVWRVREALLTSVPGVGATTARTLLAELPELGSLDRRQIASLAGLAPWTRQSGKWKGKSFIGGGRGKVRAVLFMAALVASRYNPDLKAFRDRLVAAGKPKIVATVATMRKLLTILNAIIRDGRPWQTA

SEQ ID NO: 176653 - protein, 343 aa, unidentified
MDHFAGLDVSVKDTSVCIVDGTGKIVREVKVASEPDALLGVLRNPDYCFKRIGLEAGPLSQWLFSALGEANLPVICVETRHMRAVLKAQINKTDRNDARGMAQMMRVGLYRPVHVKTLRSQKLRMLLTHRKLLQSKAIAIENDLRGTLRNFGLKVGIAGRTKFEARIEELVEHVPDLAVLVEPLLVVRRVLREQIAVLHHRLLAVVRDDAICRRLMTVPGVGPVVALTYRATVDVPARFRKSKSVGAVFGLTCSRDQSGERDRPGAISRCGDEMMRAMLYEAAQAMLLRSAKWSWLKAWAMQIARRRGMKRAIVALARRLAVILHRIWVDGTEFRWTREAAAA

SEQ ID NO: 176654 - protein, 409 aa, unidentified
MFYVGIDIAKNFHVVTIIDESEKKVTTKPIRVTNCIDGFNKFIAKLEKISSNTNDFIIGLEATGIYGENLWEFLNSHGYDVKLLNPFQTTRYREQHTMKKVKNDNIDSWIIALFLKDGKFSSGYVTDDEYQSLRTLYRNRASIQSDMKEVKKRILTQVTVTFPELENFIDIFSISGLALLDKYPTAHHYKHSSVDRILKIFRHIQGNNFNNEKALKVLELSKNSIYSGKAKDARAIAIKSSIRLLRMYQEELSILEDEILSLLDKQGISKEEDAPTNSLIENLKTIPGVSSKTIAAVISECGDLSRFSKPTKFIGYLGLFPTENSSGNSKSTGRLSKRGSSLAKHALYLASVSCMIHNPQLKQYYDTKRSQGKSKQEGLIAVSRKLATIIYSIFKYNTPYDPARVFSKS

SEQ ID NO: 176655 - protein, 375 aa, unidentified
MVKRSREVGDLTIGLDLGDQYAHVCAVDATGEKTEEARIRMTATGLKNRFGSMARCRIALEAGTHSAWVSRLLKACGHEVIVANPRKLRLIYENDRKNDEADAEYLARVARMDPKLLAPIQHREAKTQADLAVLRSREVLVESRTKLINHVRGMAKAMGGRLASMSAEAFGKKAQVSIPDELRAALAPVMEIIRGLTQQIREYDQWVQKAADERYPQTAHLRQVAGVGALTAMAYVLTIQDPGRFSKSRTVGAYLGLRPKQAQSGQGDPQLRISKAGDGYLRRLLVGSAHYILGPFGPENDLRTWGLKLAARGGKNAKKRAVVAVARKLAVLLHRLWASGKRYEPIRPVKRALSPVPTAAAGSRSSPSVTAAIGT

SEQ ID NO: 176656 - protein, 349 aa, unidentified
MSQTLSDAVAVIGIDIGKNSFHIVGLDGRGAIVLRQKWSRGQVEARLANLPPCLIGMEACVGAHHLSRKLKAFGHDARLMPAKYVRPYSKGQKNDFRDAEAIAEAVQRPTMKFVATKTAEQLDLQAMHRVRERLVSQRTGIINQIRAFLLERGMPVRQGLRFLRAELPRILATPPDVLSARMVQVISDLAEDWRRLDHRIDHLSNEITLLARQDTGCERLMSVPGIGSIISSAMVAAIGTGDAFTKGRDFAAWLGLVPKQISTGDRTILGKISKRGNRYLRVLFVQAAWVVLIKPMSWERHGLKHWIEAAKKRLHRNVLAIALANKLARIAWAVLAGSRTFEANKIQAA

SEQ ID NO: 176657 - protein, 385 aa, unidentified
MLSSDVGEILLEPTEYTHNKSDFEKIDSNINKLNIKDNLTIIMEATSIYHKAPERFFKENNYHVIVFNPLIGKEITNTIRKTKTDKQDCIKLTNLFWKGSIPDRKYTEDEIYTKLNELSRQYYHLDEGLTRHKNRYKELLHLCFPEFELCFKDGKIYDLTPLNFIKEFPHAYIIKGKRVNALAYNMANTNNRHLNYYKRKANVIKEYAINSYPGVSQNSKDVDNLKQLADVVVDLTKRKDEVKNQVIQLAKETKNYECINSLFGIGELSASLIIAELKDITRFNNIKQINASCGLDPTIIQSGKSINYHGPISKRGNRYARKLLFNCSRNIITLSAKCNKENSIYVYYLKKKQEGKHFYACLTACSTKLIRIIYALCMNNSTKQN

SEQ ID NO: 176658 - protein, 316 aa, unidentified
MKNYIGIDISKSSIDVYDGKKSYKFENNERGFRETVSLVENIKETIFIFEPTGIYSYDLTEFCDKNSIGCVIVSPKVSRDFARSLNVRSKTDKIDAKVLYKYQSHVEPNMVKVPKINHHAIQIQEMLNSYELLKSNIQQFKNQLESISADNKSLVRLTKKMIKFNETEADKLFAKIEKLLFKDESIKRKYEAMLTIPAIGNKSALYLISFFLKYPLANAKEMTALVGLDPVMKDSGTYKGKQRISKHGGQQLRNLLFLPTLASIQFNDRIKIFYTRLTTNAKSKKLAVIAAMRKLILMAFSIFKSEQNYEPLYVKN

SEQ ID NO: 176659 - protein, 390 aa, unidentified
MTYYVGIDIAKYKHDCFIADDSGCVIRDSFSFSNDKDGFNVLLSILKELKPKGQIKIGFESTGHYHFNLKLCLEANGFDYVEFNPLLVHKFISTQTLRRTKTDKKDASMIAKYLMTIDYKPYVNSFYHINNLKSLTRLRETLITDRTRFLNQITSYLDQIFPEFKSLFENGLNKSAFYLLTHYMTPTKMSKLDSNKYSKMKSELGHTISYQKICQIKDAAINTIGHTSKALEYALKSSLNVYLYLDNQIDELESKIIEIYDSLNCHIHTIKGIGKLTSAGILSEIGNFNKFLTPAQFQAYAGLEPSKNDSGTHDGLGVMVKHGSSYLRKYLMNSAETFYIYNPSISDFYWKKRNEGKHHRVALSHVARKLINTIFYIEKHNQDFDSKLVK

SEQ ID NO: 176660 - protein, 412 aa, unidentified
MTATNQFAAHVGLDWADKKHDVCVHFKNGERVFHVIEHTAESLDVWLTELHQKVKGRIAIAVELKKGPVVYALQKYPFITVFPVHALSLARYRQAFSPSGAKDGPRDAELALELMLRYPHKIKAIEPDNAEIRLLQQLVEQRRQLVEDKRRFVNRIINTLKQYYPQPLEWFSHRGSLLLCELIIRWPSLQKLKRARRDTIRNFLNAKGGRAMALTEQHVASIDNAIPLTIDPSVIEANALMATALATQIKVVSEIIKTYDERIETLFDTLPDAGLFKSLPGMGPCMGPRMLAALGDNRDRFNSAEEIQNYAGIAPVTERSGQKSWVHWRWQCAKFVRQTFVEWTAKTVNSSYWARLYYQGLREKGKSHQSAIRALAFKWIRIIYRCWKTRTQYDEAKYLLALEARHSPLLKP

SEQ ID NO: 176661 - protein, 340 aa, unidentified
MTATTDHYLGIDLHKRQAQVAVLDDEGQVTEEVRVANADLDEIAQKYAGSSAALEAGSNYFTIYDRLDEELDVTLANPAKADWLEDQKQKNDRKDAKNLARFLRLGEVPESYVPPEEFRRYRALARGRKKLVDKRSDFKNEVNSLLDQNGVTYDGSLWTDEGREFLRELTLDDVSELLLEQWLEAIDEFTVKIKRMQRRIEAVAAEVDELDTLMSAPGIAAFSGLMIHGEIGEVERFDRAAEVVSYAGLDPVIRESGDSRREGQISKEGNGYLRWILVQCANTAVHNAKDPYLSQFYWRLRNKRNKPHKVAIVATARKLLVALFNMLRKKEPYDPPEVSA

SEQ ID NO: 176662 - protein, 344 aa, unidentified
MEQYAGIDVSLELSSVCIVDARGKIVKEAKVASEPEALVGFFEALGFAVKRIGLEAGPLSQWLHAGLKRAGFEAVLLETRHVKAALSAMTVKTDRKDARGIAQLIRMGWFRPVHAKSIGAQEIRALLVARKQLLGRLIDVELSIRGILRGFGLKVGPVTRKSFEARIRELVTGQATLERIVAAMLSARATLKAEYTKLHKAVLTIVRDDTVCRRLMTVPSVGPLVAITYKSAIDDPHRIAKSKAAGALFGLTPKKYQSGEKDVTGGITLAGDEMARTALYEAANVLLSRITRFSKLKRWGMDVAKRRGSKRAKVALARKLAVILHRMWVDGTTYRWAEAGAITA

SEQ ID NO: 176663 - protein, 320 aa, unidentified
MSDRLAVGIDADSKTLVVACHGTKGSTRIPNSASAIGKWLSTLPVGSRIGVEATNRYHELVVQAAQKAGHVVFVLNPRDIKHYAKGVACRGKTDSGDAQVIARYIAKEADNLHEHVARSPAQEQLHVLLQQRDSLVRSKAKLNLSLGAGASESAIFGRIFDGLKEAIALLDQQIQQLCRSGEQRDLYRRIMTIPGIGPTVAAFVTHHITRWPLTSSDAWIACTGLDPRPNESGARIGRRRLSKRGNASLRQILYMAAMGLTRSKNGKALYNAIRERGHSSTASFNILARKLARIAWGVFKSGRDFDPAMLKVGQACFQQG

SEQ ID NO: 176664 - protein, 388 aa, unidentified
MTQVDDLSRSLITFEQNSTMVVVLEMSQSSWLAAGVVPGIERRPLKKLDPDPTTLLRLVEGWRDHAMKAGRMITRIVLAFEAGRDGFWLARWLRARSIEPFVIHSTSVAVSREHRRAKTDRLDTEMLIRVFLGWLRGEPRHCKMVAIPTLEEEDARRPSRERESLISERTRIINRMKAALIRLGIRGFKPELLKAPQRLEAQYTAEGVPIPPNMLDELRRDMARLAWVRQQINAIEQARLERLEQAPSTGPHAMVRMLASIIGVGVETADMLVQEILSRNLRDRRAVARYAGLTGSPDESGVKRREKGLAKAGNARVRRGLIQLAWRFLRFQKESALGQWYRARTEGAAGKRKTTMIVALARKLLIALWRMVTTGEIPAGVALRTAAA

SEQ ID NO: 176665 - protein, 316 aa, unidentified
MEHAAKEASFVGIDVSKDRLDIHVRPSGRAFAVARDGTGLDQLVDDLRHLAPALIVLEATGGFELTVAAALAGAALPLAVVNPRQIRDFARATGRLAKTDALDAQVIALFAERIRPEPRPIASADRQVLAELIAPRRQVVEMIGMETNRLHQARNPRVQRMLRATLKTLKAQLAELDRDIDDTIKRSPVWQAADDLLTSVPGVGDVTSHTLIADLPELGQLDRRRIAALVGVAPINRDSGQMRGRRTIAGGRIDVRNVLFMATLTAIRWNPVISRHYQALVDRGRPKKVALVACMRRLLGILNAMIRSSTPWQCAA

SEQ ID NO: 176666 - protein, 391 aa, unidentified
MIYAGIDVAKDKHDCFITNSDGKVLFQAFTIPNNRDGFDELYQKITAVTDDLNKVKVGLEATGHYSYNILGYLLDKGLATFVFNPLHTNLYRKSLSLRKTKTDKVDAHTIATMLMSDVNLKSYSDTSYHNEELKSLTRYRFDKVKERAKLKSSVSRLVCILFPELEKLVPTLHMASVYALLSEFPGASFVAFSHLTRLANLLSESSKGRYGKDTAIMFREAAKASIGSHMPAKSLELKHTIKLIRELDAEIEEIETEIKTIMDEINSPILTIPGISYRMGAMILAEIGDFSRFDSPDRILAYAGMSPSTYQSGQLDNCYAHMEKRGSRYLRYAFYNATKYVCHWDESFAAYLAKKRAEGKHYNVALSHATKKLVRLIFAMEKSGQAYNKAA

SEQ ID NO: 176667 - protein, 448 aa, unidentified
MGNGSGLSRGDRNRNARLARLRELVPVSHAIVGIDLADETQAAVVTDHDSRVIARRRVSVRAWELGELLDWAVAKAAGAGFASVTVACEPTGHRWRVLDQLAAGRGLALVCVQPLLVYRAREGEDLTRDKSDPKDAVLIARLAGELRCYEPERADAVWARLRHLGARRSQLTTGATAAVNQIRDLLECAWPAVLAASGSPFRSVSWCASLAVVLDRCAGDLSRVRRLGLARFTAAVRRELPRWGGIRPCLRIIRAVFAALADPAGVTAHRPGALERAHLALGDWRDIRARLADAETRMCAVLEELGLAGLVTTIAGLTVTGAAAILAETGDPARFATPRALVKHAGLCPRDNASGAAQGKTSISGRGRPGLRLAAWRAVWAAMPNNPVMAARFTHLTTRQDNRLARQQARTACAAALLRWIHVVVTRHVPWDPAIAAGIRPALATASQ

SEQ ID NO: 176668 - protein, 408 aa, unidentified
MEIIYPRCCGLDVHKRSVSACVRRLEADGRLDQETRTFGTMTRDILEMADWLAAAGVTHVAMEATGVYWKPIYNLLEDRFTLLLVNARHVKHVPGRKTDVKDCQWLAQLLQAGLLQPSFIPARPQREFRELTRHRSQLVAEKARVANRLQQVLEDANIKLGAVATDILGASGRDMLRSLIAGEQDSEKLADLARRQLRSKIPELRRALEGKVTNHHRFILGQLLAHVEHLEGQIEALSRRIEEMSGPFAPAREAVVGLPGFEQRATENVLAEIDVDMSVFPSEHHLSSWAGVCPGSNESAGKRKSGKTTKGNRWLRSAMVQAAWAATRKKDSYFQAQYRRLAARRGKKRAILAVAHSLLTVIYHMLKNGSTYQELGGDYFDKLNKNRLVPYLVRRFKDLGFRVTLEAA

SEQ ID NO: 176669 - protein, 427 aa, unidentified
MRVLHDRVAAIDVHKDMVKVAVRVPGARRGARKTDVAEYRTFYGVLQEMGRELRRRGVTHVVMEASGIYTEPVYYALAELDFTQVLVVNPAHVKALKGHKTDAKDAVRLLDLYECGAVVRGSCIPSPELKEVRDLTRYRVKTVQARTSEIQRLQKTLESAGIKLSSVVSDVTGASATAMIEALIDGERRGRVMADLAQTRLRTAGKMADLSMALSGRFTEHHALMCRLHLDQIDGLGQQIDGLDERIAVRTARYSRETGLLATIPGFGDVVIAGWLGAIGPAPHQHFATAQRLASWATLCPGNYMSAKKSKGGRTGDGGAYIKPLLVQAAWAAIRVPGRLQARFHRLVRRFGGPRNKGAQKRAIVAIAHTLLKIAYQILKTGRPYTDLGDGFYDTRDTTQAKQDYLIRQLRKLNPGCHITITPAEAA

SEQ ID NO: 176670 - protein, 336 aa, unidentified
MTAYVGIDLHRRRSLAVCIDEDGERLWWKRFENSPQTLAEVVSEAGPDPEVVLEATWGWYWAADVITEVGGRVHLAHPLGIKGFENRRVKNDLADATMLADLLRVGSLPESWIPPGSVRQMRELVRYRNKLSRLRTGLKCQVHAVLGKEGVIPQLREMWGPAGFGYLNQVRLGEAYEIRLESLRDLIEILNVEIRGLEASTHRQLRDDPGYRVIQQLNGVGRVHAAVFVAEIGEVTRFRNPRRLCSWAGLTPRLRESDTKTYRGGITKQGSALVRWSAVEAVSRYHGGAPIRDSFQRIADRRGRNIARVAAARKLLTLVFYGLRDHEIRCLHEEAA

SEQ ID NO: 176671 - protein, 390 aa, unidentified
MLFIGIDVASKKHDVIIISKYGEILSESFTIENSSAGFKKLHTEISSHTELFDNVHIGLEETGIYSSNIRDFLHSAGFNVYMINPVLTHHSRMAYSLRNTKTDKLDCLAICRYIMHNFTHLKPYISTLYTTSELKSLSRLRLDKLHTLAKAKMEFTRLLQIIFPEFIKHFKQHSQWAMNLFSSYPAPAKIARMHLDTLVSIIKIKGDRVSAAQLIKNLAKKTIGDTSITNSLLIESIIDDINHYNKQIAIIDKHLDALMADFDFITTIPGVGNVIGASIIGEIGDISRFNSPSQLLAFAGLDPSIYESGEFKGKRCRISKRGSKYLRTSIFTATRVACVGKGKNNQFRQKYHKKKLQGKHHNSALCNVSKNMINTIFAMLNSKEDFIYIT

SEQ ID NO: 176672 - protein, 313 aa, unidentified
MTIQTVIGIDVAKHDLVVYRQDLEAQETLENRKPVLKQWLRGLPPHCAIAVEATGTYHVALIELAYQLGHEIYVVDGFQLHHYRQGVGGRAKTDSSDARLLARYLDRERELLRAWTPPPAAYRSLQTLLRRRATLVQARVAIQQSCAELPWLASHLKRLVAQLTRLDELIQTRLRSIVREAGLRHQVARCKAMEGVGELTATALVMAFLRGDFRHSDAFVAFLGLDVRVRDSGKQRGRRKLTKRGDPEVRRLLHNAAMAARRQPGWKETFERYQARGLKSTQVLVILARKLARIAFSLMKHETGYRPPSPIKA

SEQ ID NO: 176673 - protein, 349 aa, unidentified
MPSFYIGIDLHHTVIQACVLDDRGERVEERRFVFDGLEEGLLVVGFLASYGSDIRVAVEALGLNRWFVNACLERSIDVLVCDPRKLDLKKLGRKTDKRDAQEIARRLYLGDLDRMATTYYPTDEEYAARKLLRVRHKLIQLRQQTTNQLRGTLMAYQLEAPTTVLYTGPSQEKLSGIKMPAKELQAPFDALRAVLRSLQEQILVLDREVDRKGRRDPDIVVMKESLPSVGAQTAATILAELGDPKRFGSARAVAAYAGLVPRVAQSADRAHHGKMTKQGNPELRWVLSQWAVRLLTKDPVVREWAAVLRKRVHKNKVRMALARRLLVGVWAMLRTGEALDLRRCLGMPA

SEQ ID NO: 176674 - protein, 425 aa, unidentified
MSASDSLSSPVEVSDFAYVVGVDIGSQQAVYCVCQPDKSQVVKPTEVANSRAGFEALDQRLRQLAVPPQRILIGLEATGRYSENMYQFLQEQGYRLCLLHPRQTHQFAQQRGLRAKTDRLDATTIARLLLSREARPGYVPDELISTYRELERLHSQLTNDSARYQNEIQALLVVLFPEFVQVFADPCRPTAVGVLKRYPGAQAILDAGVEALTSTLRELAPRHYGRPTAQELVRLASQSVATPLASSGRALSLKVLCDQLEHTLTNLAQIAHELDQLLDRDHGASGLKSTPEFGRKTVAVLRAELGDVTRFQRVDQVVAYVGLDLQVRQSGKWKGQVKLSKRGSGRVRQVLYMAALRSLALPASAFGAYYRRLVARGLKARDALTAVMRKMLIVAYHLLRSNETYDPTKVCAVACTLPRTPSSDS

SEQ ID NO: 176675 - protein, 325 aa, unidentified
MGSDEVALSCPSVYLTLMPLWIGIDVAKDTLAVHVLPLDQLLSFPNTAQGHQRLCDHLAGQCVGNALLEATGGYERAVMTAQATAGIPVTRINPRRARAFATALGTTAKTDPLDAALLARMAQLVQAPAPVPDPLREQLRMLVQRREQLVQQRDDERRRLHQATLAMVRACLIEQIGDLRRRIQRMNQAIKQVRCQLDDALAHALGTVPGIGEVTTASLMAYLPELGTLDRRQIAALVGLAPYNVDSGQHCGKRRIRGGRATIRRVLYMACWSVVRTQASFKERYQQLRARGKPAKVAITACMRVLLIRLNAMARDRTPWREVIG

SEQ ID NO: 176676 - protein, 351 aa, unidentified
MDHKASDSIVTAIGIDIGKNTFHLVGLDERGAIVLRQKLSRGQVVVRLSNMLPCLVGMEACVGAHHLSRQLLALGHDVKLVPGQFVKPFLKGQKNDFRDAEAVAEAVQRPTMRFVPTKSVDQLDLQALHRVRSRLVSQRTATVNQIRAFLLERGIAVRQGLRFLRHALPDILANRAELLTPRMVNMIKDLAGDLHHLDQRIDDVTGEIETLARNDQACQRLMTVPGIGPIIASAMVASIGDGSAFRRGRDFGAWLGLVPRQISTGDRTILGRISKRGNSYLRMLFVQAARVILLRPANWPKHSFGRWLEAAARRMHHNVVATALANKLTRIAWSVLYHGRSYQPRIGAELA

SEQ ID NO: 176677 - protein, 317 aa, unidentified
MLVNDQRKCPCGASIDVYDGKKSYKFENSEIGFKQVVSLSQESKETIFIFEPTGIYSYTLTHFCSTHKIKVVMVGPKESRDFARSLKVRSKTDKIDAKVLYRYQSHVEPKMVKVPLVNHHAVKIQEMLNIYEGILSAKQKFKNQIESTSKEHKDLIRTLNRMIVNLDLEAQKLFNKIELLLLKDESIKAKYDAISTIPSIGQKSALYLAAFFLKYPSANAKELTALMGLDPVMRDSGTYRGKQRISKHGGQQLRNLLYLPTLCAIQHNDRIKAFYEGLTSRAKTKKLAVIASMRKLILMAFSLFKSEEVYQPLLVKI

SEQ ID NO: 176678 - protein, 460 aa, unidentified
MEVPREVPDEEHERVWERVAAVDVAKGSGVVCTRVPDEDRPGRRRSHVWTVPARTGAITELGDHLRGLQAQVVTLESTSDYWRIWYVILEAAGLKVQLVNARTVKNVPGRAKTGKNDAVWLAKLTERGMLRPSFVPPPEIRRLREFTRLRADLVHDRTRHWARLEKLLERALIKISDVTSTLDLKSVRAMIEALIAGQRGPRILADLARGPLRKKRAALAEALDGRFEDHHGEIARILLDQIDSLTAQIEALTGRIGELAAEIPAAWGVDADGTAGPGAGHAPDAAVLPAVARLDEITGCGPYAAQAVIAEIGLDMTVFGAPGRLVSWAKLCPQTRQSGKKTSHGKAGKGNPWLGGILGEIAATAARTDTFPGQRYRRIARRRGKRKAQVAIARSILIIIYHLLADPAARYRDLGPDHYDLRVNRDRKIRSLIHQLQAINADPAEITALLTTHPPAARPA

SEQ ID NO: 176679 - protein, 409 aa, unidentified
MERLIERGAGLDVHKKSVTACVRVPGPAGSRRQEVQTFGTTAAALLTLRDWLQAHGVTHVAMESTGVYWKPVYYVLEELFTCLLVNAAHVSKVPGRKTDVRDCEWLAQLLEHGLLRGSFVPPVAIRELRDLTRYRTVLVQDRTREANRLHKVLTDAGIQLASVASNVLGKSGRAMLAALVEGTHDPEVLADLAQGKLRSKLPALREALAGHFRGHHAFLVSQLLAHLDYLDEALDVLTAQIQEALGPFASEAARLDAIPGVGARTAEVLIAELGVDMRQFPTARHLASWAGLCPGTHESAGKRRAVRTGKGNRWLRGALIEAALAAINVRDGALASRYHRLRPRCGHKKAIVAVAHKILTTAYVLLADGRTYHELGAGYYDAQRKDRDIRRALHALERHGYRVSLEPAA

SEQ ID NO: 176680 - protein, 337 aa, unidentified
MKYSGIDLHSNNSVVTVIDETDKVIAEKRLPNDLAKILAFLEPHRDELGGVVVESTFNWYWLVDGLHEVGHTVHLANTTAIKKYAGLKHSGDETDARHLAHLLRLGILPTGTILPPQHRAVRDLARKRMQLVQTRSTQIVSIETILSRTTGRRLNGNQIKRLKVTDLPALGLAEDVTLAIKAHVVIIEVLQQQITELEMRLQEKVAPETDFKRLMTVPGIGKVLATLIYLETGPIDRFASAGNYASYARCVNSEYSSNGKKKGSGNTKNGNKYLAWAFVEAAHLAARYCPQAKRFYERKKAKGSTALATKALAHKLARACYHILKQREPFDMTRCFA

SEQ ID NO: 176681 - protein, 400 aa, unidentified
MLSIGIDVSKGKSTVCGMKPGGEIVYIPFEVQHTREGMSELVSLLRGSGEEVRVVLESTGSYHCPVVAALLENGIFVSVVNSLRMKRFCSQSIRRVKTDQIDAMQIALYGLAYWQELQPTRLPENTYRELQLLARQYYQMTSLLIKAKVDFNALCDQVLPGMQELMSDHAGRHKLSDFVLRYRHTTHILEMGETRFRKDYCKWAEKKGYRNCERMAALIFATAQNGIPVLPNAPSTQIVITEAIRVLHTVEASRDAILTQMQALAKTLPEYSLVREMPCIGDTLAPRLIAEIGDVRRFHSKRALIAYAGIDAPPYQSGKFCANNRHISKRGNRYLRKTGYEVMQSYVMHKPANDPIFTFIEKKRGEGKSGKLAMVAGLNKFLRVYYGKVTELYRSLPAIE

SEQ ID NO: 176682 - protein, 325 aa, unidentified
MENKNNYCGIDVSSETLDAYFKNKKGIEQHLQVSNSVSGFRELIKETGKETHFVMESTGVYHLSFIFFLNTKNIKFSVVNALQIKRYIQMHLERNKSDKKDAKRIYEYGLDRHPELYQMPDNTYFECRSLNNCIHDLTKEVTKFSNHIHSLKKCPFDTKSVEKSFDKIIKKLREEKQNLELELQEKLVEWEGETLKLVQSVKGIGTRASAELIIYTKGFKDMNSYKQLISYAGLSPTEYQSGSSIRGKVRICKQGGKQLRNILYMCALNAKKTNAHCSALYDRLVANGKNKKVALIAVCNKLLKIVFGVVKNRTLYQNIYLQKTA

SEQ ID NO: 176683 - protein, 351 aa, unidentified
MKKIVKQVAGIDVAQKELVVCLGRMHDDWTPELYASKTFANTARGFESFVEWVKKLTEVSVPVRFVMEATGVYHESLAYYLDEQEIEVSIVLPNKISNYARSLEVKTVTDKTASEAIALFGLERKIDRWSRPNGLFKKLRQLTRERGQLIDERTVLKNQLHAEQTEAEPYTKSIVRIKKRITLLDSQEKEILKELRDLIKTDKELQQLVILICTLCGVGLLTAATVLGETNGFELIRNKRQLTSYGGLDVKEKQSGTSVKGKPRISKKGNKYLRKAMYLPALAAIRHDERFKAIFIRLVAKHGIKMKAVVAIQRKLLEMIYTIYKTGKPYDKNYLSKQNKEVEMIAEAEKN

SEQ ID NO: 176684 - protein, 332 aa, unidentified
MKYKVFIGIDVSKLTIDVHLHGIGASKTFSNEEKGFALFLSWVKKHSKQSEPAEMIICFEHTGMYSIKLATYLNDIGIPFAMLPALQIKQSIGIRRGKNDQIDAQRIAEYAWLHRETIQATVLPAKSILKLQSLLTLRNRLVCDRGGYEATWKEQKKALEGKEHKRIFQVYKSLIMNLTVQVKKIEEQIKAVIESDEAVKLNYQLLTSIKCVGPVLAANMIAYTHNFTRFATWRKFACYVGTAPFEHQSGTSIKGRTRVSSLSNKQLKKLIHMVAICACAYNPEMKSYYKRRVSEGKNKMSTLNVIRNKIISRMFAVVNRGSGYVDLMKYAA

SEQ ID NO: 176685 - protein, 365 aa, unidentified
MNVYTGVHTYYCGIDLHARTMYVCVLDKDGKKVYHKNIPCRPDRFLQAIEPFRGDLIVGVECIFCWYWLADLCEEEGIDFVLGHALYMKAIHGVKTKNDRIDSLKIARLIRGGNFPVAYVYPPEMRATRDLMRRRNHFVRKRAELLSHIQNTTMQYNLEPLGTLSRPHHRRDKDIVGHFPDPVVQLIVETDLQLIDHYDPIIKNLDKQILKLAKGHDPTSLHLLRSIHGVGEVLSLTMLYEIHTIDRFPSRGEFCSYARLVKGQKSSAGKNYGTTGGRIGNAHLRWAFSEAAVLFLRKNTQAERYYNRLINRHGKSKALSIVAKRLGIAVYYMLRRGNPFNIKMFLQSHMATEKHNGRGAGEPDV

SEQ ID NO: 176686 - protein, 338 aa, unidentified
MELKRISIDTSKSVFTLHGVDAQERPVLRRNLKRAHLEAWFAKQAPTEVVLEACGGSHHWGRVLGAMGHHVRLIPPQYVKPFVKRGKNDRNDAEAISEAASRPSMRYVPVKTAEQQARAMVLSVRELLVKQQTQLVNALRGHAAEFGVIAAKGIDKLATLVALIAADAAVPAEVQEAIGVLAGQIEQIVEQLRALDRKLLTLHKATPMSRLLGEIPGIGPVGALSLVLTVDPGQFKSGRHFAAWLGLVPKERSTGGKQRLGSISREGNERLRQLLVLGATAVVRYAKPGSKSASKWLLELLERRPRKVAAVALANKMARIAWAMMTSGEGYRRQPIAA

SEQ ID NO: 176687 - protein, 341 aa, unidentified
MYYAGLDVASKGSFLYVQDRRGRKVEGQEILTTKWAIEEAFKKYKSSLIEVAVEAGGSTRWIYDTLKGMGIRVYVVNPNKVKAIADSKRKTDKIDAKLLSDLLRLNALPQEVIMAEGEARELRDLVQARQKVIDGYTSLMNYLRGLLRQEGVRLPERAFNNDHWLTELGKQDLPQHVRQIIDRYALLIDTMIVEKKEIEGKIFGYHSSDIDLIKTIPGIGELSSRTITAAIGEIKRFKKAKHLASYCGLVPSVRSSGERTEYGHITREGRSEVRRVGVQCAHAVLRSKSKEGEPLRRWHARIAGHRGMKTAVVALARKMITIVFYVLRDKKPYDYKLLAVS

SEQ ID NO: 176688 - protein, 401 aa, unidentified
MLGKLAKKCRKYQVFVGIDIHERLCVAAILNIPTGEAKYVEFFTTKASIVAFAKAHLQKNMVVGIEATSNSFFVASILKEYVAEVIMITPEKHKDGVKTDKIDAYRIAISLAQGTFNPCWIPPDDIQSLRELIGLWMALNDLIIRLKNRIYAVLMAYGIKVSSKDLSSKKAEEEIRQAIEKLPFCAAYKLSKNFKNLKSAEEDKEELSYYLANIAKDNPQVHLLITIPGISFVAALVIISEIGDISRFSSPKRLTKYAGLTPAIYQSGKRSYTGGITKAGRRRLRWILVQAANNAVRVEGRLRKFYLRLKEKKGHNKAIVACARKLLTIIWYMLTKGEIYRDSLERLYTKKKRITEKKAEKFVAPSLSDLASEVIEFLRREDAPPPTIENVEVIERLVKNT

SEQ ID NO: 176689 - protein, 424 aa, unidentified
MEVIYPKACGVDVHKSFIVAVICDSTSVKPQYLRKRFSTFNNSLINFRNWLLANDCHNVCMESTGKYYVPVYNALEGHISNVVVANPKWVACIKGEKDDNKDAKWIADLFKLGIVRSSFIPEKDIRILRELTRYLYKLTNMRTSEKNRFTNALTVGNCKLDMVFSDIFGKTSSAIINTILSQNEYNDKDILKNIDKHCKSSNEDILNSISGISWEDTQKQRMKVIQEHIDYLDKAIKAVREIIDSIIAPYESAITLLCSIPGIDRKSAITIISEIGTDMSQFSSHYRLASWAGLAPGCNESAGKKKSVKISRAGVYLKPALVEIAHCAVKDKNNPYYANKFNVLSKRRGKKRAYIAIARKILVAIYHMLSTGEFFNPSDASKVETSDKDKIKFTKNNFMQSTKQLLSLGLTVDELQFYSLMTKS

SEQ ID NO: 176690 - protein, 338 aa, unidentified
MKLYGAIDLHSNNNVTVLTDEKDKVVYQKRLTNDLPLILEQLSPYASSIEGIVVESTYNWYWLVDGLMEKGHRVHLANTAAIQQYEGLKYTDDDSDARWLAHLFRLGVLPEGYIYPKEERAVRDLLRKRSQLVHQKTANILSIQNLYARNTGQSISANRIKQLSSEKVDAVFPNADLALALKANLTVMRTLESEVATLERVVKDRIKLRPAYRYLLMVSGIGQVLALTIMVETGDIRRFPKVGNFASYCRCVGSEKLSNGKRKGTGNTKNGNKYLSWAFVEAANFAIRFEPLIAHYYQRKKAKTHRVVAIKAVAHKLSRACYYVMRDEVPFDVNRAFA

SEQ ID NO: 176691 - protein, 319 aa, unidentified
MLIGIDVAKAELVVAARPSGERWTVANDERGVHTLMERMRREAPELIVLEATSGYELLCVAGLAAVGLPVVVVNPRQVLDFAKATGQLAKTDRIDADILALFAERVRPAVRPLPDAEAQELDALLARRRQLIEMLGAERNRVGQVFGRGHRHVKKSLKSHIKYLERELRIADTDLGDMVRQSPAWRERDDLLQSVPGVGRVLSLTLLADLPELGRLSRREIAKLVGVAPLSRDSGTFRGRRFVQGGRASVHAVLYMGALVATKYNSLIRTFYQRLLAAGKPKKLGLVACMRKLLTVLNTMVRTNQRWSANHISAALIPA

SEQ ID NO: 176692 - protein, 343 aa, unidentified
MYYIGLDVHKKTISYCVKDAAGRVYQEGKIGSTRRELDGWIRTMPQPRMIAMEATIFTGWIYDHLLPHAEKVKVAHPLMLRAIAAAKKKNDKIDAGKIADCLRCDFLPECHMASTEIRNRRRTLRYRNLLIKQMVQMKNRVSGLLMETGVSYNKQRLHKVGYFAELLTTNEEVNESIRPLLKVSREMICRSQKLDYALISSLERDPLLKERLRRLRTVPGVGPITALTWALEIGDYTRFASIKQAISYCGLCGDEKSSADKVMRMPISKQRNKHIQRVLIEAAKLAVRECHELAVIRARELERGNSNRATLAVARKMVCYMLAVERRHQDFVPAEKFSRTPAA

SEQ ID NO: 176693 - protein, 450 aa, unidentified
MAQRSGLTRGDRRRNAKIEELRAVVRPDRAILAIDLGEDKQVAALLDHDGRVLGRRVVRDKAHALGGLLRWAAEQAGRHGFAGVVLGCEPTGHRWRSVMQLADAAGLGFVCVQSLRVHLAREADDYTRDKTDHKDAVLIGKLIARLDCYLPERAEEDWARLRHLGQRRFRLVGEMVACRNQIDDLLSCCWPAALECAVKPLDSTTWLACLAVTVDRCNGNPAKLRGLGRDRFSAAVRRELPRFGAQRVCHKVADRFFAALTDGRGVTVQRRGALERVGMLIDDWRSAIARLGEVEARMVAVLDGLGLTTLVTSVPGVSAVGAAVILAETGDLSRFATARSVVKHAGLNPAENTSANFRGQTRVSHRGRPALRAAAWRAAWGALPHNPVLGARFTHLTTRERDRLAPGQARVACAATLLRWLYAIVTSRESWNPDRAAGIRAGQAGEAAAA

SEQ ID NO: 176694 - protein, 331 aa, unidentified
MSHIIGIDVSKATLDCAWLRDPDQNKAKRKTCQNEVSCFESLITWAETFSGVPRQSLAFVIEPTSIYHEQLVQFLHSKGATVYLVNPGRVRKFAEGIGILSKNDVIDADLLARYGLMAKKLIVFEPAPQEINDLRSLLNRLDVLEKNLRREHNRQEKAGKSLTFHHLEQQSITRSIKRHEAEIVSFKNAARDCVNASPWLRRGVELLSTVPGVGEKTAWLMMVILSSRQFKSAAEVASFLGLNPIEKRSGKSEYRKPRLSKSGSSHYRQALYFPAMVASRKNPDVQALYERLVDAGKPKMCALGAAMRKLVHICYGVYKNQQPYQPQVSST

SEQ ID NO: 176695 - protein, 421 aa, unidentified
MPNIEIGVDSMVKENFIYVGIDLHKETHTAVMIDCYNQKLGEITFPNRPAAFLKLVTKVKKCNTDGKEVVYGLENAYGYGRALAVWLIDKGYLVKDVNTAISHRQAKHRGAMYRKSDSDDAKAIALATLNMLDKLPDACPNDAYWSLGQLVHRRDNIMKQRTRLVNQLHEQLCIAYPSYKQFFNDISRPTALYFWEHYPSRKYLKGKSVEDLRAELVPVSHNKCSTKTCEKILDAVASDKVKNIDYQDARDMVTLSIVSDLQHYDSQLAEVDKMLEQMYKMLGCTLTTIPGVNVITAVKILAEIGDIKRFSNANKLAQFAGIAPLHLSSSGKGKDVATKQGNRRLQATIYFLAIQMVQVSSKGTPRNSVVRAYYEKRKAEGKTSQQALICISRRLISVIYGMLKNGTEYRMPVVENAGEKL

SEQ ID NO: 176696 - protein, 322 aa, unidentified
MRFIGLDIHRDFCEVAISEGGKARRAGRVASRPAELELFAQSLGADDRVVLEATGNALAIARIIEPHVGEVVLAHARKVRAIAEAKVKTDAIDACTLAELLAADLVPGVWLGDERTRLLRRLVSRRRQLVKQSTRTKNEISAVLLRTLQGRPPVSDVFGKGGRAWLAKLELAIDERETVDAGLRQLDFLQHELAHVDRTIAEQALASPEIRRLMTIPGVDVTTAAALMAAIGDVTRFPSPRHLAGYLGLEPKLRQSGVAKPRQGRISKEGSAAARHALVEAAWSAAKAPGPLRAFAARTAARRGRHIAAVAVARSPCSRGIC

SEQ ID NO: 176697 - protein, 411 aa, unidentified
MSQMLIGIDVSLRSHHVQFMAGDGRKLASFSVTNDRHGADTLIRRMLDTAAEVGCQTLRIGMEATSNLGWHLAHYLKDQLAPYEPNVQAQVYVLNARKVARFKKGYDTLPKTDRIDAWVIADHLRFGRLPHDMNEVVQYQALQRLTRTRFHLIHSIKREKAYFLNQVFLKFSGMRIDNPFSDTFGATSLAVIQELDPERIAEMPMEELIEFLQEKGKKRFANPQEIAELLKKLARSSYRLDKAMSDPVNISLSVTLSVIKNMEAEVKKLDRQIDKIMKGFQQTLTSVKGIGAVYAAGILAEIGDISRFDDHNALAKFAGLVWNKYQSGDFEAEDTERVMTGNKYLRYYLVEAADKVRKYDSEYEAFYHKKFNEVTKHQHKRALVLTARKLVRLVFMLLKTKKLYTPPERRN

SEQ ID NO: 176698 - protein, 348 aa, unidentified
MTTMVEDARAITGGVDTHAGMHVAAALDSIGGLLGVQEFPATAAGYASLLGWLRGFGTLAVAGVEGTGSYGAGLARHLAAAGVRVVEVDRPDRQDRARQGKSDPLDAVSAARAALSGRASGAPRGRDGAVEAIRALMVAKRSARHERTQAINQARALIMTGPEELRARFAGRSPAQLVEAIAALRPRPGDVPGYATRVALREPVRRDWFLDAQLSRLDELIGPLVTARAPGLLALHGVGPDTAAMLLVAAGDHPERLRSESSWAHLCGVAPIPASSGKTAGRYRLNRGGDRQANSALWRIVIVRMSSHPATRAYADRRSKEGLTEKEIIRCLKRYVAREVYRQLRDSA

SEQ ID NO: 176699 - protein, 344 aa, unidentified
MGEVITIGLDIAKSVFQVHGVDSAGAVVIRKRVSRAKVSVLFADLPPCLIGIEACPSAHHWGRELESLGHTVRLMPPSYVKAYLKRSKNDANDAEAICEAVTRPSMRFVALKTKEQQAALMLHRTRQLLVRQRTMLSNAMRGHLAELGIVSAKGRNGTGELLRIISDSTDSRLSPVARGILEVLARQYSAIGTEIDSIQKGILAWHRSCEASRRLEEIPGIGPIVATALVAEIGDWKAFGSGRDLAAWIGLVPKQRTTGGKDRLGGITKQGNRYLRWLLVTGAMAVIRYAQRHGTRKRPWLGRLMDRRPTKVAAVALANTMARVAWAIMVHGDRYKEPELQAAA

SEQ ID NO: 176700 - protein, 344 aa, unidentified
MQIARIGLDLAKYVFEIHGVDRHGKTVLRRTLRRNAVSIFFANLPPCLVGMEASNGAHFWAKAISELGHDVRLISPQFVTPYVKSNKNDRNDAEAICEAVSRPNMRFVPVKSSEQLAVQAVHRIRSRLVADRVRLVNQVRGLLGEHGIVVAKDIGNLRRALARIASDDEDRALNPLVRSLMGELRRELAELDARIADYDRKIRELYRNSEICQRLGKVEGIGPVTATALVAAVGDRSSFKNGRQFAAWLGLVPKQRSSGGRARSFGISKRGDRYLRTLLIHGARSALGRVREKQDPRSLWLGKMRQRRHPNIVAVALANKNARIAWSLLTSDSAYDASLSVRAA

SEQ ID NO: 176701 - protein, 362 aa, unidentified
MKEYIGVDLGKRKAVVVKKDRLGKVTGKVTLAVTEAALENYFSKQDRRSKVVVEATGNWMYLYETIEKYVPEVVLAHPLKTRAIAEARIKTDTIDATTLAELLRLDGIAKAYIPPREVRDARELLRYRASVVSMRMGLKNKVHAVLTKNGMECGFSNVLGKRSRQWLKTLSVRDCYRRELDGYIRLAELSTGLIQEITTKIKEVVSVTPQAQLLMTVPGISYYSALLILSEIGQIDRFPSAKHLCSYAGLVPSVYSSGSKSFHGRITKQGSRWLRWICVEISIHAANGDVAFQSLYRRICRRRGLATAKVAVARKILTVIYAMLKNNEPFRRRRPRHQILAKAWSKKNKESSGHPPGVMIQA

SEQ ID NO: 176702 - protein, 434 aa, unidentified
MTTRFIGFDIHKREATVCILDAEGAQRLSRRFDLSRVALQAFAETVLQPEDRVALEATTNSWAVAELLRPHVAEVVVSNPLATKAIASAKIKTDKVDAEVLAQLLRCDYLPRVWEPDPATRQLRELTGRRASLVQQRTALRNRIHSVLAMRLIGEPLALFAPAGLQWLASLLASDGIDAEGRLLIESDLALLASLQQEIDRFDQVLAGRGWNDPRVKLLMTLPGINVTTAESVLAALGDIKRFRAPEKAAAYLGLVPSTRQSAKKCYHGPITKRGNNQARWMLIQAAQSVGRHPGPLGHFFRRLKKRKNHNVAVVATARKLVMIAWHMLTTGEPYRYAQPRSTEEKLSRLRVKATGQKRRTGPRKGERCVAKLPGGSRTIHALDRVYELEQVPPRRPLSPGEQRAVRASGTMEFVEGLDREHFIPRNKGAGKEK

SEQ ID NO: 176703 - protein, 348 aa, unidentified
MKKVIAGMDLHSNNVMIGIMDMDGKRLASRKMPCELKEVVKFLAPYKKRLERVAVESTYNWYWLVDGLQALKYPVVLANPAGMEQYSGIKHADDTNDAFFLAELLRLNILPTGHIYDAQLRPVRDLLRRRLGLVHQRTSLMLSSKSLYTRTTGQEMALSRLKGLEVKEAQKLYEHPANQLIAGMQIKHIEQLTESIEKIEKAVMGCARELPYYAKLETLPGVGRILAMTITMEVGEIKRFADPGRFASYCRTVEAQRTSNSKKKGENNSKCGNKYLAWAWVEAANFARRYDEQCRKWFDRKAAKTSKVIATKALACKLAKAAWYLMAEGTDYDPKRMFGQAGKTKMKT

SEQ ID NO: 176704 - protein, 349 aa, unidentified
MRFYNRQHRFYCGIDLHARLLAICVLDQAGNIVLQTQIGADKQLLLETLAPFRPDVVIAVECLFAWYWVADLCAREGIPFVLGHALYMKAIHGGKSKDDDIDAEKISRLLRGGNIPVAYVYPKGLRETRDLLRRRNYLVHKRAELIAHIQITNAQYNLPPFGKKLVYAKNRAELKVAEHFPDAHVRKNIELDLALVDHLDEQLADVELYLQRTVKVEDPHSYYLLQTIPGVGKILALVLLYEIHQIARFADVGDFLSYARLVRCVRRSAGKQVGTGGKKIGNAHLKWAFSEAVCLLIRSCPAVKAWQARHEKKHGKKKTLGILAAKLGRTVYHLLRKNVAFDVRRFLGQ

SEQ ID NO: 176705 - protein, 421 aa, unidentified
MKVTYQICCGVDVHKSFLVATIVKTTGGIEPSYQKKRFSTFNNSILEFKQWLLDNGCHDICMESTGKYRVPVFNLLEDEINVVIANPKWVKAVKGNKDDAKDSKWIGDLFRLGLVKGSYIPCKKVRILREYTRYRYKLVSCRSSEKNRYQNALTVCNVALDSVVSDIFGKSSTSIIDYLLEQSGTSINHEEIASKLLRSLKSKEDAVIHSIEGYQMTDAQKYRMRLVRAHMDYITAEINDVDKMIENMISSNPDFENAVQFLCTIPGVKRDSAITIISEIGIDMSQFSSSKRLCCWAGLTPGSNESAGKKKSVRITRAGVYLKPALVQCAHAAVKSDKSPYYKKKYESLVKRRGKKRAIIAIARMILTAIYQMLSTGEQWNPSDLYKIDIPVALVEKKRQKLSSRLRSCCNGKDYFLLMNH

SEQ ID NO: 176706 - protein, 351 aa, unidentified
MRKNRIMDFSGKKVYVGIDVHKKTYSVCCRCDKQVVKKATMGATAGRLVDFLKFHFAGAEVYCAYEAGFSGFILHRVLMANGVNNLVVNPSSIETAANDRVKTDKRDAAKVSEQLEAGRLKGIFVPTLEQEQQRLVTRTRAQLVRERTRIGNQFKSRLSQFGLIPHDDETKMSKAFIDDYLNQDLAAPLKQSLSVLARVWKSLDMEIEALKREMAKIGAEQRVAIIYQSVPGIGPVASVVLALELGDMSQFRNERTIFKHTGLIPGEHSSGEHIRKGHITRQGSSRLRLLLTEAAWKAIKDDPKLAADFNRIAHKRGKKRAIVAIARKLIGRIRACLRKNQTYELGFGMAA

SEQ ID NO: 176707 - protein, 343 aa, unidentified
MQRVTTIGLDIAKSVFQVHGVDAIGNVVIRRQLKRRHVLAFFQKLAPCVVGIEACATSHHWSRELKAYGHTVRLMPPTYVKPYVKRQKNDAADAEAICEAVTRANMRFVATKTPEQQSCLMLHRTRHLFIRQQTAVINAIRAHLAEFGVVAPVGRRGVDELLDVVADSSDERVPEVARGCVAALGAQLRILKAQILEFDRQIMAWHRSNETSKRLDEIPGVGPALATALVASVADPKAFRSGRNFSAWIGLVPKQHSSGGKDRLGSISKQGDRYLRSLFTAGALAVIRYAKIHGTRHRPWLAALLARRPTKVAAIALANKIARMAWAMMVKGERYKEPAALAA

SEQ ID NO: 176708 - protein, 366 aa, unidentified
MNKHIMVGMDVHDENILMKYAVDREDPKLLSVKNSDGGRQRMIRILKKCAQDEGEAKVVFAYEASQLGFGLYDELTDARFEGYVLAPTKLSHSPKHRKQKTDEADAEDILEVIRGHILAGNKMPKIWIPDHQTRNDRELVRMRLTVGEKITSIKAQIKCLLKRNKLTKPGNTGQGWTKKYRDWLEVLTSDDSELPLGVKAALRSLLRQLKMLEQEVRSLDNDIIALSGTPRYAEPVKELIKIKGVGFLTAMVFLTELGDLRRFPNRQCLASYLGLIPSCRESGKRNDHKGHITHQGPARVRKMLCQTGWTIARCNPDEKVVYRRIVDKNPQHKKIGLVALMRRISIKMWHRGLEAQLRANCFQDAA

SEQ ID NO: 176709 - protein, 445 aa, unidentified
MDVVFPHCAGLDVHKKRITACRVSPDPTGQNADGVMEVQDFGTLTIELLALSDWLSQVGVTHVAIESTGEYWKPVYNLLEGTFTVFVVNAAHVKNVPGRKTDKADARWLAKLMRYGLLQASFIPPQGQRDLRDLTRYRTKLVQERSREVNRVQGVLERANIKLASVATDIMGVSGRAMLEALIAGRTDAATMAELARGRMRTKIPVLEQALTGVVREHHRRLLAIQLAHVDFWDEQIATLSEEIRHVLSALCPSELPGSPTDGAGATPTAPEPGSSAPSMTFMHAITLLDSIPGVNQQGAELLVAEWGIDMERFGTASRLAAWSGVAPGNHESAGVQYSGKTRKGNRALRTGLVQMAHAAAHTKDTYLSTLYHRLAARRGKKRAIVAVAHSIVRSAFHMLSRNEPYHELGGNYFDEHRREHLVDRLTRRIERLGYRVALEPVVTS

SEQ ID NO: 176710 - protein, 420 aa, unidentified
MVYLERGYNLKELPWSKIVSNSFLFKEACMILVGVDVAKDKHDCYIMTSEGEVLFKSFTIANNMEGFNQLYEKILSVIDNFDNVKIGLEATGHYSYNILGYLLDKGLTPYVINPLHSNLYRKSLSLRKTKTDKVDSHIIASMLMSDVSLKPYSNTLYHNEELKSLTRYRFTKVQERAKLKISISRLVTILFPELEKLVPTLQMNSIYALLYEFPSAHAISKAHLTRLTNLLNTTSKGHYTKDKAVLIREAAKNSIGSNMPAKSLELKHTIKLIKELTSEINEIEEEIKIIMNKINSPILTIPGIGLSTGAQILAEIGDFKNFSSPDKLLAFAGLSPSTYQSGNMYSSNTKMEKRGSKYLRFALFNAAIYVSYWEPTFSQYLKKKRVEGKHYYVAISHVVKKLVRVIFHLEKTNERYSTVV

SEQ ID NO: 176711 - protein, 375 aa, unidentified
MQNKVRFLGLDVHADTIAVAIAEPDGEVRSLGTIANRAESIRKMVKKLGSIEHLRACYEAGPTGYVLYWQLAELGVNCEVIAPTLVPMKAGDRVKTDRRDAERLARSHRSGDLTAVWVPDAGSEALRDLVRAREAAKQDQLRARHRLSKFLLRSGQRPAQGMKAWTQAYMIWVKQIRFSQVAQESTRLDYLTEVEHMGERVARLEKAIEEAVKLASPEIQEVVKDLQALRGIAQISAVTIAAELGNISRFEGARQLMGYSGTVPSESSSGKRRQRGSITKTGNAHLRRIAVEAAWCYRLRPGIGPVLRKRQDGVPEEIKEIAWKAQHRLHRRYCKLAAAGKDHRKIITALGRELLGFVWAIGTKAEAAVKLQRAA

SEQ ID NO: 176712 - protein, 420 aa, unidentified
MKIFVPVAGVDVSKRFSDLCVLSPDNNVLLRQKIYHDMVSMKLAEKKLHEIELECGARPVVVMESTSHYHLILFQFFTDAGFEVVVVNPIQSGALKNINVRKVKNDRVDAYRIAMLYRLKVLRPSQIPTSSLRGLRLLTRQRSELKGDVARFKNRMTAYLDQIFPGYGEVFSDVGGSASRAVLHMCPTPEKLLNADGSLLAKAICEAGNKGPKFGAEKAAKLREAAGSAQVIGVRSASNASLIKNVLDIIEGLLAAIQRIEREIKELVTQDTRLDEDVKLLCSIPGIGFSSAVVIAAEMGNISLFRKPKQLAAYFGLDPGERQSGTFKGRKNKLSKRGSPQVRAALHMAAVSSVSRNRDGTYRNPVLAEYYERKCAEKPCKVARVAVMRKLSNIIYAVLRDRRPFELRTPQEHMALLAAA

SEQ ID NO: 176713 - protein, 371 aa, unidentified
MKETITSFVGLDIHKNSIAIAIAEAGRAAPRFIGTINPRPAELCKALRRQRCRPENTLLVYEAGPCGYGWVRYLRRQHWRCEVIAPSRIARSPNEQRLKTDRRDALMLARQVRAGELTNIVIPDERDEAMRDLSRAREDACATRLRIRQQMKAMLLRHGRDDVRYKSWSQAHERHLATIRFEHPAQEIAFNEYRQAAAEACERVERLTAALRELCESWRMKPLVRALMCLRGINFVGAVTFVAEIGDLGRFAHPRALMSYLGLIPSEFSSGARRRQGGITRCGNKHARRMLVEAAWNNRFKAQIGRDLQLRQEGQPKAIREISWKAQLRLAKRWRALAMGRKLHQNKICIAIARELAGFVWDAARHSPLKL

SEQ ID NO: 176714 - protein, 359 aa, unidentified
MSTQSKPFSFKGQKIFVGLDVHLRSWSVTVLSEQAVLKKFTQDPSPAALNKFLTNTYPDAEYYSVYEAGFCGFWIHWELHNLGINNIVVNPADVPTMAGERLRKTDAIDSGKLARSLRSGELKGIYVPDSLATEIRSLIRLRDSLTKDQTRHKNRIKAHLRYLGFDIPEEFQRPGCTWTNKFVLWLKRLDLETDYGRKTLDLLIAQYEDLRAQQLKMMKELRLLSRTERFEEPLRYLMSVPGIGQLAGLTIISEVDDIARFKDAAHFASYVGIVPMCYSSGEHDGTGNITVRRHAKLRWLIVEAAWVASRKDPVLSSAFVEYCRKMKPSKAIIKIARRLVNRIYFVMKHQQPYVNCYVS

SEQ ID NO: 176715 - protein, 392 aa, unidentified
MNRIVYIGMDVHTSNYTLCSLDPGYGVEKDNYFAEVQFTNDFIKNVVNYVSNLKKKLKDCEFVCGYEAGCLGYSTYKDLTKVGIKCVIMAPSTMAVQKGGKKVKNDRRDARVIAQCLAYQTYKEVYVLSEHDEAVRGYLRMRDSHNKALKRIKQQIIAFCTGHGLFSPTKSNWTVAHLKWLKDLKFNDPVEQEILNEYLSSLTFLSDKIKAMDVRIEELASEKQYCENVKKLRCIKGIETNVALTLLAEIGDFNRFSKPTDFAAYLGLIPGEQSSGDKVRGTGITKAGNSTLRRKLTESAKGYWRGRIGIKSATFKKLEKELPKEVTEYALKANTRLQRKFFNMTHVKGKNMNVAASACAREMACFVWGLITNHYDKAPAVPKTDEELLDLN

SEQ ID NO: 176716 - protein, 527 aa, unidentified
MARSFRCQESTRKNYDALVVKPNGAIRPRVQAVGPEHFGIVAIDVAKLRSKFLLCDFFGEVLIEPTYFDHNQPAFQAAIDGIRAAMERHHLLDLTVAIERTGTYHRPVQHAFAKANFETRLVHPFAAKQFRQAADSGIKTDDTDLAAIFRATSNGFGLLEPTWPDLYLQLQWLCRQRRDLVYKSSALRCQIQEHLHALMPGYLPLFRQHFFDGPIPLLIALHTGSAQAILSLDTKGLRDLIHQHAPGAVCRTSTLARIVDWARHAPKAPTTPLAQVPLVRACLHSLVADFHGKSKEISLLEQDIARLLARTPYILLLALPGINVVGAGELAGELGPIENYANPERITGRAGLMPCRYQSDQVDRANGPLRRRGNRRLRAALLQVADNLVRHCHYYGAKNARWQHDRKDPRWIRVKVAKSFSRLGFAMVTSRRIFPHPACHERHYLLDKLLRFHHEHGTPMTQTMIDLEQAFTHLAPRNRAEEIGHLRVQLPEINQRRRGPVALTSLIPQVLARLGVGVVQSESEGLS

SEQ ID NO: 176717 - protein, 366 aa, unidentified
MRKVMAGMDLHGNNVMVGIVDDQGARLQHRRLACELPEIIEFLAPYKAELESIAVESTFNWYWLVDGLRAAGFPVVLANPAKIDQYSGIKHADDKNDAYFLAELQRLKILPTGYVYDPELRPVRDLFRRRMSLMRQRTTLFLSAKSLHQRTTGRGLELRRLKAMEPEEAAALYTHPANQLIAQIQKEHIDSLDQSIRQIEKAVLKVALQQPYYQRLQTIPGVGIILGLTISMEVGDIARFAGPGQFASYCRTVDAKRISNGKTKGDNNQKCGNKYLAWAFVEAAHGARRFDATCRRWYDRKAAKKCTTVATKALACKLAKAAWYVMAKGTEYQAGKIFPGLTEPKAEEISGEQASASKGVGPNPED

SEQ ID NO: 176718 - protein, 335 aa, unidentified
MQVYGIDLSMEKIDINFIDAKGKEKQKEVKNGVNSISKFLSTVLKDSILCAEYTGAYGDLLIYLCNQVKVPIALVPGYTMKHSLGLLKGKDDPLDARRIREYGERFTDKLVFSEYDEECIVELKQLYTLRSQLVKARKTLLTSDKERDHLPMQSISAHNHLQPVLCSLNEEIQAVEEEIEALIRSNEDLYENYEFAKSVTGIGPVIATDLLIKTGNFRKIDTARKAASYAGVCPFPNKSGKMEVKSKTSPFADKKLKSLLYMGAKSAVKHNKEYRLYYQKKQLEGKPHYLIMNNISNKMLRTIYSVVKNKTLYSQDYICLDPRERNINSSTKKVA

SEQ ID NO: 176719 - protein, 346 aa, unidentified
MKILALDLGKYKTVGCAYESESGAHQFKRGLTTAAGLAGMVQEVKPDRVVIEICSIAGWVCDLMWGLGVEVQVANTSDDAWRWRKVKQKDDRRDALKAARLSAVNQIREVYVPAIEVRQWRALITYRQQLVRRRTKIKNHIRDLLLREGQLLGRGSSCWSEARLKQLGEQARPFSECGPAELWRGELQVELEQLQEIQRQVATVTAQLNKMGAGEARVQLLRTVPGVGPRLAEAIVALLDQPQRFRKASQVSGYIGMVPKALDSGETERRGHITRQGSRVVRSLLVEVAWAGLRHNAWVRQTYQRLSGGKKARKKIAIVAVGRKLLVKCWAMLRDHRAWDWQPQIT

SEQ ID NO: 176720 - protein, 366 aa, unidentified
MTSVALAAERIYLGMDVSRDKIAVAVLRPGQDVPAVEVISHDGEMVRRLIGKFADRSVLAACYEAGPGGYELYRLLASMGVACDVVAPALIPKGAADRVKTDRRDSVRLVLSHRAGLLTAIRVPSEQEEAVRDLVRTRADLVDDRKRMMQRIGALLQRHGRVWRAPRWTYQHRAWLDQQSFTEPALQAALRTYLAALDARDAELAVLESQLRGCWASVDPLASMVRQLGCYRGIAELTALTLAAEVADFRRFASAPAFMGFTGLTPSEYSSGARTRRGAITKAGPQLVRGALIEAAWSYRHRPAIGATLRRRQAGCAAETLARSWKAQQRLHATYAKLTRRGKIPSVAVTATARELAGFVWAEMTS

SEQ ID NO: 176721 - protein, 387 aa, unidentified
MPQRDDLSRSLVPFQQDGTLVAVVELSRSSWLVAGLVPGIGRHPLKKLDPSEEALLALLRRWRDEAAGAGRPITRLAVAFEAGRDGFWLARWLRARGVEAHVIHPTSVAVSREHRRAKTDRLDTGLLKRAFLGWLRGEPGHCTMAAVPTLEEEDAKRPSREREGLVGERTRIVNRMKGALARLGVRGFKPTLRKAPERLEALRTAEGAPLPPNTLAELRRDMARLRLVREQIAELEAARLERLRQAPEDRPHAMVRLLARVVGVGVETADMLVREVLSRELRDRKALARYAGLTGSPDESGARRREKGLARVGNARVRRGMLQLAWRFLRFQADSRLARWYRARTADARGGTRKAMIVALARKLLIALWRLVTTGEAPEGVALRPAA

SEQ ID NO: 176722 - protein, 411 aa, unidentified
MEEILCGIDWASDHHDVVLIDAQGRKLGRRRISDTAAGLGELTAMFAAHGGGPGTVKIAIETERGLLVAALRTAGYEIYPVNPKAVDRYRDRHHLARGKSDAGDALVLAHILRTDAHLHRPLPADSGAARAIEVLARAHQDLVWSRQHEVNRLRSLLAQYYPAALAAFGDLTTRTAAAVLAAAPTPAQAAQLSTEDLLGLLAAAGRGRRRSEARRLVEVFAAPQMRQPPEVEHAMGAAAIAIITAITAMTTGLAALGQQIDQHFEQHPDAAIYHSMPALGSILSARVLGEFGDDPTRWPDPASRRAYAGSAPITRASGKKRLVLARYIRNQRLYDAVRWWAFAALSVSPGARAYYDTRRAAGDNHEAALRRLASKLIGQLHHCLAHRVPYDEQTAWPQPENQPKPASAHAA

SEQ ID NO: 176723 - protein, 334 aa, unidentified
METLLKQSVGIDISKDTFMASICCIYQSGKMDFITTEPFKNVKTGFNQFVKWVRKNSSKEVQITFLMEATGVYYEQLAYHLHKLNFHISVLLPNKVKNYAKCLNIKTKTDKVDAKVIARMGAEQNLSQWTPPTPVYQQMRLLTRYYQELKKQKTTLQNRIEALNYSVFTDDFVAQSYLEQLSLLDKQIELCEKKLKTLVKEDEELASKFENVETIKGVGFITIAIVVAETQGFSLITNRKQLASYAGLDVIERQSGTSVRGKSKISKKGNSHIRAALYFPAMVSSVRNISLRNDYQRIIKHKPNKKIGLVAVQRKLLLLIFTLWKNNVKYQERE

SEQ ID NO: 176724 - protein, 354 aa, unidentified
MDIKYIGMDVHKETISIAVMKGDGKLVMESIIETKASTILQFIQGVRGDLHVTFEEGTWAAWLYDLLKPHVTELIVCDPRKNALMKEGNKSDKVDARKLADLLRGGYLRSVYHGENGLRTLKELARSYLTISKDLTRVMNRVKALYRSWGICCGGQQVYAPRHRAEWLNKIGEAGVRRRAEFFYQQLDALRALHQAVRRDLLAESRKHGGTKLLRQIPSIGPIRAALLIALIQTPHRFRSKRQLWTYSGLAIDTRDSAQHRFVDGQLQRSKKPQQLRGLNQNHNHDMKAIFKSAATMASSGEGAFHDFYQGLLTKGMKPAMARLTLARKIAAITLIVWKKGAHFDAEQLKPQAA

SEQ ID NO: 176725 - protein, 412 aa, unidentified
MRVVHPVCCGIDVHAKMLVACLILTNGEKKTRTFSTMTADLLQLRDWLMATHCTHVAIESTGVYWKPVFNILEEALTVILINPEHAHALRGRKTAVKDAEWLADLLRHGLLKPSFIPPPLIRELRELTRYRESVVREQASVANRIQKLLESGNIKLGQVASDALGASGRAIVKALANGETDARKLSALARGKLKEKSLSLEQALQGRLTVNQRFVLGELLDRWEQLEAAEARVSREIDKYVQANPKLARARELLDSIPGIGPRVAEVISAEMGIEMALVFADAAHLASWAGICPGNKATGGKRLSGRTRKGNTYLRAALVQAAWGASLKRDCYLSSQFHRLVKRLGRKKALVAVAHSLLVISFHVLQNDQTYTELGGDYFDRHHVEQQREYYLRRLQMLGLKVTVEELRPAA

SEQ ID NO: 176726 - protein, 322 aa, unidentified
MSVSVLGIDIAKQKFDVALLVDGKTKNKSCKNSVEGFETLVLWLERQGIQKVHACLEATGNYGEDLAIYLYEAGHTVSIVNPARIKGFGQSELIRTKTDKIDAALIARFCLAMKPGEWIPPSPVIRSLRALVRRVDSLIDMRSQEKNRISTAHESVIVLIKEHITYLDQEIEKIRRQIADLIDQNPSLKQKKVLLDSIPGIGKATIPTLLAELDDLDKFNHVREVVAFIGLAPKETLSGSSIKGKARLCKIGHVRLRKALYMPALVSIQCNPVMIAFYNRLKEKGKNGKLIVCAIMRKLVHVIFGVLKSGKMYDPNFKQNLA

SEQ ID NO: 176727 - protein, 401 aa, unidentified
MAPTAGIDWASGSHEVCISEEGQVTERFSAAHDERGIAALAGRLVKLGVARVAIERPDGILVERLLAAGLEVLAIHPNQVKAARARFAVAHGKSDRFDAYVLAELARTDAHRFRVLVPDRDETKALKALTRAREDLVGVRVELANQLRAQLGACWPGALIFSAVDSPISLAFIARYPSPADAKGLGAGRMGAFLTRNSYSGRTDPAELVARIKAAPQGTAGKAECAARRAVVAGLIDALGPIVAEIAALDTQIHERLAAHPDAEIFRPLFRDPRTTICPATLIAELGDCRGRYPNEAAMAADAGMSPVALESGKLRVATFRRACDKRLRVAVATLADSTRHWHPWAKEVYAKARARGQDHPHAIRTLGRAWIRVLWRCWRDEVPYDPRRHGNFNRFQTAGG

SEQ ID NO: 176728 - protein, 428 aa, unidentified
MNEDELSRLKEFRQLKKQIQGSERHLIVGIDVAKDRHHAFVGTATGRTLVKKLIFANTSVGFAELLARVEAVRAQSGLSEVVFGLEPTSNYHKPLGRYLISKGCHVVMVGGKAVKNNRELLDERWDKHDTKDAANIADLVSRGKCFYYDMPSREIEELRDLHSLRARLKKEEHSLSLRIRNNLLAKHFPELDAFYSACERETLAIVRWCLNPQKIAVMPFEEFFKRVAPNARGIAQKLRLQKIHRLAHESIGCPVGSAVQFQARLLAEKIKEVRGQISDVDHLIAQACAPFPSYEYLLSIPGFGPYVASKVLATIADPRRFDSAKQIIRTSGYDLCADRSGKRSDQAVPVISKKGNSQLRYALYQAAMIASSRHRFFMAYFARMLQGREREQGIRTKMRVKLAAKMLVIAWTLMKKGEPFNPEHLSVQ

SEQ ID NO: 176729 - protein, 412 aa, unidentified
MVETIVERPAALDVHKAQVTACVRVPADGGGREQHVAEFQTTVPDLLALRDWLAAHGITQVAMEATGVFWKPVWAILEDEFEPLLVNARHVKQVPGRKTDVSDAAWLCQLLEAGLLKASFVPPKPIRTLRNLTRYRKSQIQERQREANRLHKALEDTGIKLDCVASDILGVSGRRMLDALIAGTTDPVVLAELAKGSLRRKIPALRQSLEGRFDRHHALWIGAILNHIDFLDEQISALSEAIEEEIRPFVPAVKLLCSVPGIQQRGAECIIAEIGVDMSVFPTSKHLASWGGQCPGNDKSAGKRRSGKSRNGSKWLDYALEEAAMAAIRASDNYLAAQYQRLRPRRGHKKALGAVKHSILCICWHMLATGELYYDLGGDYFHRRDPERQTKRLVKQLEALGHTVALQEAVTA

SEQ ID NO: 176730 - protein, 370 aa, unidentified
MKEDITSYVGLDIHKDSIAIAVAEAGRSAPRFVGTTPPEMTSLCKALTRCAKRQNTLVVYEAGPCGYGWVRHLSAHGWRCEVISPAHIVRKPAEKRLKTDRLDAVLLARESRAGNLVKIAVPDQRDEAIRDLSRAREDAGAARLRARLQLKAMLLRHGHAYQGKTSWTAAHERSLAAIKFAHPAQQIAFDEYRQAVRDAHERLERLTQALREQCEHWRMKGVVNALMCLRGIDFIAAVTLIAELGDLSRFAHPKALMKYLGLIPSEYSSGNTRRMGPITKTGNKHARRILVEAAWTYRFNPRVSRPIEVRQQGQPKAIRDIAWKAQLRLAYRFRKLNAGRKMTQNKCCVAVARELAAFIWDIARHVQIPA

SEQ ID NO: 176731 - protein, 418 aa, unidentified
MAKFNGNYSVYVGIDWANDKHDLCVQQANSDIRKFKVIKHSANTINAWIIKLHKQYKGQIAVAVELSKGPIVYALQKFDFVTIHPVNPSMLAQYRKAFSPSGAKDDPTDAELALDLMLNYPKKIKALKMESEPVRKLTYLVEQRRRLVEDRRRFSNRLINTLKQYYPHLLDWFSHRGSGLFCDFITRWPSLQKVKRARPETLRKFFISHKGRSSAYTEQRIKSISEAEPLTLDKAVIDSHQLLAVALAKQMLVAVEAIEIFDSEISELFDTLPDAELYRSLPGTGPCLAPRLLVAMGENRSRFTSASEIQMSVGIAPVTEPSGQKCWVHWRYQCSKFVRQSFIEWAAKSVHQSYWAGIYYQQQRSKGNTHQSSVRSLAFKWIRVLYRCWKTKEPYDESKYLKALRDRNSPLLFKEKAC

SEQ ID NO: 176732 - protein, 342 aa, unidentified
MQITTIGIDIAKNVFQVHGIDAKEKVVARKQLRRSRVITFFKALPPCLIGMEACATAHYWARELTKLGHEVRLMPAKDVKAYVKRNKNDAADAEAICEAVRRPTMRFVRIKSAEQQGQLMQHRTRDVLIRQRTQIINALRAHLAELGLVAAQGNAGVNELRAIVTDEQDTRLPIDARASVIVLAAQLEALESVIGAIEKRIKMQHRSSEASQRVEAIPGIGVIGATAIVATVADPTIFRSGRDFAAWIGLVPRQDSTGGKQKLGPISKQGDRYLRRILVVGAIAVLRRAQENPGKYPWLTQLLARRPFKVVAVALANKMARMAWALLAHGGTYRAPELAETA

SEQ ID NO: 176733 - protein, 341 aa, unidentified
MMTIATIGLDLAKSVFQAHGVDENGATVLVKKLHRKQMLPFFSKLPPCRIGVEACGTAHYWARTLFAMGHEVRLIPPSYVKAYVKRGKSDALDAEAICEAVQRPTMRFVPAKTVEQQAILTIHRTRSLLVRQRTMLANALRAHLAELGHVANLGIANLAKLTSEVLAEENALLPMARTALEMLIRQVMTISGEIAVLDRQLMAWHAQSEASRRLSGIPGLGILTATALAATVTDPDQFHSGRQFAAWLGLTPQQHSTGGKTLLGGISKQGDRYLRRLLVVGATAVIRHIKDNPTPMASWVRKLMEKKPFRLVSVALANKLARIAWVVLTRKETYQPYKLPV

SEQ ID NO: 176734 - protein, 350 aa, unidentified
MVTLGGDSHKRTHTLVAVDENGRQLAQRTLLATKAGHLEALQWAGRWSERKWALEDCRHVSRRFEADLLAAGELVVRVPSKLTAGARKAARTSGKSDPIDALAVARAALREPELPVAKLEGAGREVRLLLDHREDLVGERTRIQNRLRWHLHEFEPEAVIPARMLSRYHTLTELEGRLRTQHGVVVEIAVELVVRIRELTRRINQLEEDIAGRVSGLAPTLMQLTGCGALCAAKVVGEAAGVSRFRSKAAFAMNNGTAPVPASSGNQKRHRLNRGGNRQLNAALHRIAVTQLSRPGPAKDYVARRLANGNTKTEAVRALKRRISDEVYRRLLHDERALLTSPSSKFEAAA

SEQ ID NO: 176735 - protein, 332 aa, unidentified
MKKIVHYIGLDVHKDSIAVAIAPQNSTEVRRYGIIGGTLQAVDNLLKKLAKPNLELRLVYEAGPCGFVLCRHLRSKGIHCDLVCPSLIPKKASDRVKTDRRDADQLARLYRASELTPIHVPDQEDEAIRDLIRARTAAVCDQRRARNRLKGFLLRLGFRYTGKTSWNDAHKRYLSGLLMPRPAQQIVFQEFIHAIDDAAERVARLNTAVADALPGWKWEPVVRALITLRGMQELSAMTVIAEVGDLSRFENPRSLMHFFGLTPSEHTSANKRVQGPITKCGNAHCRRVLTEAAWHYRLKPLVSEAMQKRQEHQTKEVRMLAWKAQERLHKRF

SEQ ID NO: 176736 - protein, 355 aa, unidentified
MNDAKYIGMDVHQATISVAVRDSRGNLVMEAILETKAETILQFIRGLRGGLYVAFEEGTWAAWLHDLLQPHVARVLASDPRKNALLKAGNKSDRIDARKLSELLYLNKLSPVYHGEQGIRTLKELARSYITITRDLTRVMSRLKAIYRGWGIPCAGQQVYAPRYRAGWLAKISEAGVRRRAELYYHQFDALAALRQGTRRELLAEARKHPAMRLLRQIPAIGPIRAALLIALIQTPNRFRTKRQLWAYCGLALRTYTSGEYRFVGGQLKRSKKVLAVRGLNINHNHDLKNIFKGAATRAAATAGPFQDFYQATVARGMKPHLARLTLARKIASITLLVWKKGARFDAEHLKQQAA

SEQ ID NO: 176737 - protein, 320 aa, unidentified
MQKIALGLDISKQTIDAYFSGQEDFMRVMNNQAGIEKLIERIKSHQQQGKEIHACCEYTGVYYLPLVSALHESGIKISVINPLSIKLYAEYRLRRTKTDKQDAKLIADYCEKENPPLWRPISEKRNTLKVLNRRIEQLNVLLNIESNRQEVSDTVIKSGIERILEAIKNEIESCKKAIQNLIDSDKELSHNQKLLQTISGVGKSTAAWLLSVLVDIDKFENSKKLISYLGLSPVIKDSGTSVRQAKISKMGDKKVRKALYYPARAACLRSKLWRPWFEQKIKQGKHPKQIYILMMCKIVKYAYAVIKTGQPFDENRHKPA

SEQ ID NO: 176738 - protein, 346 aa, unidentified
MLYAGLDLSRKRLDFHLLDIGGATVEIGAAPPDADGLHTLTSRLERHREPIRAAIESMNGARFVHDRLELAGWQVEIADAQKVKGLAPLACKTDRIDAWVLAELARRDLVPAIWLPDPRVRAERERARWRLHLVRHRSSLKQRVHAVLLTHGKPCPVSDLFGVRGRRLLASLGLPEPWQGTIEASLRLIDELDREIGECERELRRLGADHRYVPLLCTVPGISWVLAYTIAAELGDITRFPTPRKLAGYTGLCPRVYQSGERDLRGPLAKQGPRYLRWALVEAATHACTAPVYRDRYQQTKARIGKQRGAKVAQIDLARRLSEAIWHMLTRNQPFAPKGATDPLAA

SEQ ID NO: 176739 - protein, 414 aa, unidentified
MEVLYPRCAGLDVHKATVVAAVRLAAGGRVAREVRTFATTTAGLRELAAWLSENGCTHVAMEATGVYWKPVWHILAEGGFALVLANAAQVKNVPGRKTDVGDAAWLAELLAHGLVRASFVPDGPTQELRSLLRTRKQLVREQASHAQRIQKTLEDANLKLASVLTQVMGKSGRAIIGALIAGERDPDALLRLVQRGVKAPPERLRAALTGRVTERHRFLLRLHLRQIDALEAAIAEIDQEVDRDLDPFRQAVRLLRTIPGLSDLTAQVIVSEIGLDMSRFPTAGHLVSWAGLCPRNDESAGKRRSTRLRKGAPWLKTTLVQCAWAGTRKKGSYLQAQFQRLRHRRGPKKAVCAVAASILTAAYHMLRDGTFYQDLGPDHLRRATPEAQASRLARQITKLGFTCTFAPAHNPVSV

SEQ ID NO: 176740 - protein, 353 aa, unidentified
MKPRMESNTSPPTVVGVDIGKDVFHLVGFGAGGKIAFRRRIRRLGLKDAFEKLPPCIVGMEACLSAHFVSRTLRALGHEPRIIPAIYVKPFVKGQKNDYNDAEAIAEAALRPNLRFVQEKSQDQLDLQACHRVRSRLVSRRTATINQIRAFLIEQGIAVRTGPRALRNSLFAILENRKDEISARTARLIRGLYEDWCYLDERIETVTGEIEALSRSEAKCRKLMSIPGVGPLISTAMVAAIGSGEAFERGRDFAAWLGLVPRQYSTGGRSILGRVSKRGSKYLRTLLIQAAKVLLMRPHNWARYSFGPWLNSASVRLHRNKLAVALANKLARIAWSVLRNDKAFDTHLEVAAI

SEQ ID NO: 176741 - protein, 432 aa, unidentified
MRDIALDVHVDFCEVAIAEAGEVRSAGRISTKPEELELFAQSLDPRDRVALEVTGNAWAIRRIVEPHVAEVIVVSPNDTGIRGARAKTDRLDARTLARLLAAGELDGVWMPDRETQVMRRRIGRRTQLVRSRARAKNEIHATLMRCLVGRAPFREPFGPKGRRWLAALDLPAEERESVDAALRQIDFLDCEIEAVERLICAEALRSPEIRRLMTVPGVNVICAATFMAAIGEIGRFESPRKLVGYLGLDPRVTQSGSSPATHGRISKRGSVSARHALVEASWSVVRQPGPLHAFYARVRARRGHSVAIVATARKLACLFWFLLARKEDYAYAQPSLTAKKLRLLEVRAGAPTRRGIPSGTWPTRQRMRAAEQELATQAESAYKRMVAEWQRTQAKRKAIAEKQGAGATPGRASSDPSSGQAARQNKAPTPAL

SEQ ID NO: 176742 - protein, 399 aa, unidentified
MRTVFGIDVSKHTINLAIVVIKVKVDECKLTLDRPGLADLLKLLKSFHQPEVVFEATGIYSRILQHFLDCDEFEYTMLNPLAAKKQLDNLRPYKSDRSDALNLAQTSFIIHRSLSYKQSPIYEQLHDLSRFYQEVSRNVISHKNRLHRALQLTFPQLESLFSNTNNELYWAIVQHFACPSQVFNTSFTELYSFILNSTNKIISANRANRIAKKLLVLAKKAYPVVDDNSYVYEQIRYLANRIMKEVHEKDKIITEMHHKAENLPEYNLLLSIPGFGVRTVTSLIGELGDIRRFHSSNALNAYIGIDLRHYESGNFVAADHISKRGDAVARKILFRSIQNIAVASHFHLNHINDFYQKRKRQSSQPGTKKIAIAAIHRLLRTIYHLVKYNQSYNYQIAKS

SEQ ID NO: 176743 - protein, 352 aa, unidentified
MATLDELVDHVIGVDPDRDRITAAVVCAKTQGELAWKTFAATARGYGQALRWAKEHTDDGCRAWSIESTGSYGAGLAASLAVKNEFVIEFDHPNTRAAKDGAKSDALDAVRAAREALGRKTWATPRARGAREGLRTLIAARDSAKLARVAAINVLKALVVTAPVDLREELRGRTLGQLVGRCQRLRPDTASDPEYAATKLSMRSTANRIRQLTDECRELEQAMVPLVRAMAPALLDEPGVGPLMAAQILVSWSHPGRCRDEAAFARLGGAAPLEATSGQTQTRHRLSRGGDRQLNRALHTVILARAKIDPTTKAYIARRINDGKTKREAMRCLKRYYARHLFRVLEAAPMTA

SEQ ID NO: 176744 - protein, 347 aa, unidentified
MFVHLATFSVAFLDSAGKLVMEAILESKAETILQFIHGLRGSLHVTLEEGTCAAWLHDLLKPHVTQVLVCDPRKNALIKAGNKSDRIDARKLADLLYLNKLNPVYHGETGIRALKEVARSYLALTRDTTRVMNRLKALYRSWAIPCAGQRVYAPRYRSEWLVKITEAGVHRRAEIYYQQLDALRSLREQVRRDLLAEGRKHSAMKLLRQIPSIGPIRAVLWIALMQTPHRFRTKRQLWAYCGLALKTSTSGEYRIVEGRLKRSKKFLAIRGLNANHNHDLKNIFKGAATRAAAVPGPFQEFHAGLVARGMKPTMARLTLARKIAAITLIVWKKGVGFDAEHLKQQAA

SEQ ID NO: 176745 - protein, 355 aa, unidentified
MPSKTDTAVAHTIGIDTGKNTLHMIGLDEKGAIVLREKVSRTRIAARFVNVPPCLIGIEAGMASHHIARELAALGHKVKQVPPAYSKPFRQVHKNDFRDAHAVAEAVERPSTRCVPIKTDGQLDLQALHRVRSRLVGNRTAVINQIRGFLLEHGIPVRQGHRFLRQQLPQILATRADVLSPRMIRIIGDLIEDWRYLDERIERVTNEIEALARADEGCQQLITVPGVVPIISSAIVAAIGNGAAFCKGRDFAAWLGLVPKQMSTGDRTILGRITKRGNLYLRTLFIQGARAVLLHPTSWARHGFGPWLTTAARRMHRNVLTVALANKLARIAWTVLAQGRRYEARVEPRIEPAAA

SEQ ID NO: 176746 - protein, 393 aa, unidentified
MICVGIDVAKDKHDCFIISSEGEVLADVFTIQNNAEGFDTLLQTIRRCTRPEDKIKVGLEATGHYSYNILGFLLNEGLPTFVINPLHTNLYRKSLSLRKTKTDRVDARTIAAMLMSDVDLKSYTDTAYHNEELKSLTRYRFDKVRERAKLKTSVSRLVTILFPELEKLVPSLHSASIYALLSELPGARQIAGAHMTHLKAVLSNASKGHYGRDMAETVRNAARQSVGAVMPAKSLELQHTIRLIRELDSEIQDIEAAIQTMMKEIASPITTIPGMGVRMGAMILAEIGDFSRFDSPDKILAYAGMSPSTYQSGQMSLAGAYSHMEKRGSRYLRYALYNATKYVCLWDPTFNAYLAKKRAEGKHYNVAISHAAKKLVRLIFALEKSRQPYSPAA

SEQ ID NO: 176747 - protein, 349 aa, unidentified
MYYMGIDHHKQYSHITVLSEKGEVIKAEKVWSIGREVKEFLSGLDDESAGVVEAGRSSYTMVDLMESLGVKMKIAHAEQVKAIAKAKIKTDKRDSWMLAHLLRMDLIPEVYRRSGENREDQRVLRHRVSYVRMRTQVKNRIYSLLAQQGEEVRQMADLEDDLFTARGIKVLHDLILPGKDNEMRLSLLETLGHLDAKIKQSDALVRKIYRSCEQARLIKTVPGFGVFFSVLVSTEIAEIERFSTDSQLHSYAGVIPSTHASGDRLYHGRLVQRGNKWLRWAAVEAVWPAVRSDFDIRLYYQKRKKRKGANSAKVATARRLLTIIYRVMKEKRAYIPYKREKHTAAFTRI

SEQ ID NO: 176748 - protein, 383 aa, unidentified
MGSRAGNRLVAAVAVPQSDGVWETESGWACSTHHRGTTMEYYAGIDVSLESASLCVVDATGRIVREAKVASEPEILIEWFRGLGFAVARIGLEAGPLSQWLYVGIREAGLTVELLETRHVRDAFKAMPVKTDRKDARGIAQLMRLGWFRPVHCKSLPAQETRALLTARKLLQTKNHDVEMSLRGVLRGFGLKVGPTTPRTFPGRIRELVAGHPTLSTVAEALLAARRTLFEQWQKLEKRLRSLAREDGRARLLMTAPGVGTIVALTYASAIDDPGRFRSSKTVGAHFGLTPKKYQSGETDITGRISKIGDRGVRTALYEAANVILTRPVKGSTLKSWGMRLAARAGMRKAKVALARKLAVVLHRMLTDGTSFVADKVAAAVTR

SEQ ID NO: 176749 - protein, 397 aa, unidentified
MYIVGIDIAKRKHEAAVIDGEGTVIIKPFSFTNNCSGYNRLLAMLTKAKLPLDEVSFAMEATGHYWLALFTRLQKEGFRVQVINPVQTNSIRSFYIRQAKTDPRDALLIAEVIRFGHFSESTLHPENIYELRELCRGRHAIVSMQADVKRKVVALLDQVFPEYETAFTNLFGDTSMAILQTCPTPKELSEMPLEELCHLIEVSSHKRFRMAKAQELQALAHGSFGFAMAGDVFSTMIRLYAKHLDFLKQQVREMDRKIAEIMDTLDTPITTITGIGPTLGAYILSEIGDISRFSSAAKLAAYAGIDPTMRQSGEYNGVRNRMSKRGSPYLRHAIWLATSSAVLHDPALKLYFQKKRDEGKPYMASVGHACRKMVSIIYAVMRDNKAYTPYIPNEISA

SEQ ID NO: 176750 - protein, 337 aa, unidentified
MKYSGIDLHSNNSVIVVSDETDHVVCNRRVPNDLRTVLMTLEPHREEIVAVVVESTFNWYWLVDGLQAAGYTVCLANTAAMKRYEGLKYSDDDTDAAHLAHLLRLGILPTGYICPVEERGLRDLGRKRLQLSRSRTQHILAVESNVARQTGGRITSRAVKELTEEAVKGLGFSADVSYAMAANVAVIQALSAQIEKLEARLHTRMRPRAEFALLITVPGIGEILATTIVLEIANIERFAGVGNFASYARCVDSKRLSNGKLKGRGNVKNGNKYLAWAFVEAAHFARRYCPEAKRFYERKKSRTNPIVASKALAHKLARACYHMLKEKKPFDVKRCFA

SEQ ID NO: 176751 - protein, 412 aa, unidentified
MELLHLRCAGLDVHKQTVVAGVRLASEGKVTTEVKTFAATTAGLLALADWLAENGVTHVAMEATGVYWKPVWQILSDGDFELLLANAAHVKNVPGRKSDVSDALWLAELLAHGLLRASFVPDAATQDMRTLLRTRKQLTRERSRHTQRIHKTLEAANIKLDAVLADVLGKSGRAMLDAMVAGESDPERLAALAHKGVKCPPERLREALRGRIKEQHRFLLATHLGLIDAIDAAIARMDQQVEASLAPFQQAVELVSTIPGVKALSAQGIVCETGTDMSRFPSAGHLLSWAGMCPRNDESAGKRRSTRLRKGAPWLKTLLVQCAWAAIRKKGSYLQAQFLRLKSRRGPQKAICAVAASILTAVYHMLKNGTLYHDLGPDHFHRRSKSSQIRRLLARLQNLGCAVKITPMPTTA

SEQ ID NO: 176752 - protein, 331 aa, unidentified
MFPVGIDVSKNTMDLCMLYDGIKGRIKTRNIQNNRHSVENILRWLRLQHCSPEDVHVVMEATGVYHERLATELHDAGFRVSLANPHRSREFARGMGIMTKTDKVDAYMLACYAFLKKPHRWEPPAPEIRYLGALLRRRDVLLGDALREENRLEKYLSTDTPADIISSCRRMAQLLREEVSNIERQIKAHIKASPALRRDYTLLTSIKSVGPQLGMHMLVVLRSHNFVSAEQAAAFLGVVPIEKRSGTSVRRRPRMSKIGPPQLRAKLYMSALCGKIYNKRMRNIYDEMCLRGKPKMVAIGALMRKLVHWCYGVLKTGTVFNDEDLKPVLST

SEQ ID NO: 176753 - protein, 369 aa, unidentified
MTKLIDLNQCLYVGIDPHKDAHVALATNRFEEKLGVFKVPNNLKEIESFLKQIEVLAHQKKSLTTIFGIEGSRGNGELLTQHLIKNNSIVYEVNPVRTHENRRKTISRDKSDLKDAEKIITELTRKLQELPLLTVESESKLPTAINETSLYRDELVREQTAIKNQLHILFHKDNPDYQSLFKTIFSQKALKYWFLRAKYKEKKSTDILERIRAKFMRMKIKRLKEIEKEIKILEEELKLLIAKSKQQLETLRGISTTTAAQILGEIRNISRFKGPDRYVRYCGIAPQEVSSGKKKKFKKSKTGNRRLNSAIYRIALTQIRTDPKVKEYFLKKIAEGKTKRHAITCIMRRIAVIIYGMLRTKGAYIQSGN

SEQ ID NO: 176754 - protein, 361 aa, unidentified
MNVVKHIVNRILKYIGMDVHRDSTTVVVLDSQGKVLMEVTLKTEATVLVDFIRGLSGTLYLTFEEGTYSAWLYDLLSPYVEKLIVCNPRKNATRGNKSDRRDARKLAERLRAGQLSSVYHEPLARRTLKELAASYLTVVRDGTRVMNRLKAIYRGRGIRCEGKQVYSPRHRQRWLEQLKEPGVHQRAELLYLEWDGLLKLRAPARRALLTEARKHSARRILASIPGLGPIRVALLLALLQTPYRFCTKRHLWSYGGLGLITRGSGQYHLVGGELVSSPRAVLVRGLNPEHHPELKAILKGAALAVIESPGPQEFYLRCLDHGTKPELARLTVARKIATLVWTLWKKGEVYDAERLRQSQAA

SEQ ID NO: 176755 - protein, 337 aa, unidentified
MTLYCGIDLHSNNSVVAVLDEQDRTVYEKRLPNDLETITEVLCIYQTELAACVVESTYNWYWLVDGLMDAGFPVRLAHTSALPEYSGLKYSNDFTDARQLAHLLRLGLLPTGYIYPKEDRALRDLLRRRLLLVQQRSLHHVSLQSLIARHSGQRLNTFQIKQLTKGQLAGYLQGYALLGGEITHQARCWLERAVRKIEQELQRHIKPREDYQLLQTIPGVGSVLGTTIALETGTIERFASPGNYASYARCVKSEKISNKKYKGQGNKKNGNKYLAWAFMEAGHYGAIWDPRIKRFYQRKQAKAHILVAKKAVANKLARACYHMLKRGEVFDVTRAFS

SEQ ID NO: 176756 - protein, 369 aa, unidentified
MADRITYVGLDVHKESIVVAVASGGLRGEVREYGRIANTATALDRLLRKLGGEGMTLRFCYEAGPCGYGIQRRLSTQGHECVVVAPSLIPKRAGDRVKTDRRDAASLAKLHRAGELTAVWVPDARHEAMRDLVRARLDAVHSLRRARQQLSGFLLRQGCHYGRPAWTKLHRRWLAGLTFDQAVHHLVLEDYIAAVEAAMARRDRLTVQIEAMLPDWTLAPVVAALQTMRGMALVNAATLIAELGDLSRFTNPRQLMAYLGLVPSEHSSGASVKRGGITKAGNGAARRLLIEAAWSYRFPARLSRELLLRQENQPRPIRDIAWKGQVRLCARYRRLTRAAKPANVVTTAIARELTGFVWAIARQVAVSPR

SEQ ID NO: 176757 - protein, 345 aa, unidentified
MKITTVGIDLAKNVIQIHGVDERGKTVLRKPLKRAQVAAFFATLEPCLIGMEACGSAHHWARKLQGFGHAVRLMAPQFVKPYVKTNKNDVADAEAICEAVGRPNMRFVPLKTTEQQSVLALHRARQGFVKARTAQANAIRGLLGEFGIVMPQGMTSLAKRVPEILEDGENGLTGSFRQLLQRLMEHLKELDGQVGELEQEIQVWHRQNEASCKLAKVPGIGPITASALVASVGDAKNFANGRQMAAWLGLVPRQHSSGGRPTLLGISKRGDSYLRTLLVHGARSVVRYAEGKTNPAADWLRSLLSRRNTNVAVVALANKNARIAWALLAHDREFRSDYVPARAKA

SEQ ID NO: 176758 - protein, 412 aa, unidentified
MSELLQQVLPGSVLVVAIDPGKVQHRVWFSTGDGGLLAGPMSVPSLRPGLDEVTATIQRLAGPDGPLVAIEATGALHGSWVRALEERFPSSVRVFAPSETAAARAQLGSRRFKSDDRDCAALTYLARQGQGRPVADDPAGAMRAAVRYRRGLVAERKVAQQRLHDQLNALCPGLSAPAGHGRVLELEDSSGQAVLACAVAFAGRPPSPRSLQARAPGRLFASNARYWAGRWKACLPPPPDATVRAERLGRSVARWQAIQADILAVEADIAALLAATAGQVLTTLPGVGVIRAASFAAFSLPIERFPSAGHLYSAAGLAPARYQSATIHRTGRISRTGLAEHRDALMSIAWGLSQRCAPFAERDAELRARGMAPIQARVALARHACRLTYRMLRNQQPFDEQRYRQSRHPSGR

SEQ ID NO: 176759 - protein, 367 aa, unidentified
MSKNIRFWVGMDVHADKIQVAVYRGHEEFPLEEYESQTDARSLARLLKRLKELPGKVRCVYEAGPCGYELQRYLTKNGIVCEIAAPALIPRKAGERIKTDKRDARKLGRLYRAGELTMIYIPSAEQEAVRDMIRARERAVEDVRRKRHQLCKFLLRHGHRYRDGKQWTQGHLKWMKGIQFDISLLKTVFEEYILSLDQAEERVKHLTGEIEEIAKRPEQARQVSALMILRGVQVITAMTILFEIGDMRRFLRAKDFMAALGLVPSEYSSGNSVHRGSITKTGNSHIRRVLVESAWHYRHRPTVGKGIKARRVGKPRELLEIAQKADVRLNRKFRRMTEHKKLSTVAAVATARELAGFVWAIGQQVHA

SEQ ID NO: 176760 - protein, 387 aa, unidentified
MQASTVDTPTAGHCGTIFVAIELSQKSWLVTLHSPDKGKMSRHRLEGGDHAELLALIGRERDRAARALGAVPAVVSCYEAGYDGFWLHRLLMAAGITNYVFDPASIAVDQRARRVKTDRIDGEKMLRTLMAYLRGEPQVVRIARVPAPEQEDARRASRERGRLIKEQTAHTTRIKALLRLMGMAVGKPRRRDWLNWLATQRDWQGQAVPPRMLAEIKYEHARLMLVREQLEGLAQASAQADPAPAAAQMAERSELLLRLKCLGPVFATTLASEVFYKDFRNRREVASYFGLTPSPWQSGGIDRDQGISKAGNPRARCAAIELSWLWLRHQPESALTRWFRSRTHNNASKRNKRIAIVALARKLMVALWRYLTTGLVPEGALLKAVKA

SEQ ID NO: 176761 - protein, 429 aa, unidentified
MKIIYPRVCGIDVHKKFIVAVICISESVEPIYLKKRFSTFHNDLIRFREWLIQNDCQNVCMESTGKYYIPVYNVLESHISNIVVANPKWVRAVKGEKDDDKDAKWIADLFKFGIVRSSFIPQKDFRILRELTRYRYKLVNMRSSEKNRFQNALTSGNCKLDMVFTDVFGKSASNIIDLILSDNPYTDEDILSKVHKKCKASPDMILDSVNGTDLTPVQKARIELVNDHIKQLSSNIQKLDKLIDLMIEPYEDYISFLCQIPGISRNSAIIILSEIGIDMNQFTTSRRITSWAGLTPSSNQSAGKKKSVRISRAGVYLKPCLVEVAHAAVKDKSHPYYANKFNKISKRRGKKRAYIAIARKILVAAYHMLLTGEIWNPADLSEVETPVEQRLKYVKNNLKSDIKQLLDIGLTVEELTLMIQQNANIIATQ

SEQ ID NO: 176762 - protein, 412 aa, unidentified
MQDILTCAMGLDIHRDVIVACLAKGELGTDPEIEIRSFSTLIPEMRKLRDWVLETECRHVAMESTGIYWQPIYEMLEPCFDGEINILVVNARHMKNVPGRKTDMRDAQWIATLLRAGLLKGSFIPDKAFRELRHLTRYRKSIVHDITAQKNRIDKFLQSSGFRFTAFLSDAFGASGRNIIRHLMEYGSISWETLDKCLKTQTRKRIDEILIALNGSLSEHQRSFLRMVFGHLEALEQHRRTVEDAIVEEITKHEEALSLLCSIPGIDVTAAAAIIAEIGTDMSAFPDSQHICSWAGLSPGNHESAGKRKSVHINKGNPYLKSMLCEVGWVMSGKRALYLSGWYWRIKQRKGAKRATIALARKLLALIYTMLKTGTPYNEECFEIRRKQSERKRASRMVNELQKLGYLVVAPG

SEQ ID NO: 176763 - protein, 402 aa, unidentified
MHYLGIDVSKASHQCVILDAEGEALGKSFTIQSSKDDFANLVKKLSDLNIPQTDITAGLEATGSLWENLYVYLKERGFNIVLLNPFQTSKFHQAMLKKAKTDSIDALVIAGLLRSGCAASSYIPDEEIQSLRDLVRLKDGYLKDTKNYKRKAYSLLNLVFPEFLNLIKDPFNISCTEILSKYQTASDFKNIRPKDLLKIARGHQGNNYDEAWAGKVIQAAKDSIYSGKASKARSIVLKSLVLNIKNLKEQMSELDNEIQNILKTDGGSSNNDIDNLLTIPGVGPKTIAVFIAEVGDITRFTSCKDFIGFVGLYPKIEQSGSSLNRAKLTTKGSRILKHALYMASVASLIHNPYLKSVYNDKLSQGKCAKQALIVVARKIACIMYSMLKNNAVYNPGRVAIAV

SEQ ID NO: 176764 - protein, 494 aa, unidentified
MAVHGDKKAAEGQRQRQQYRQRKGRAEEDLAERRQQETQRVSVLPPVNSQAAGIDIGSRTHWVCVGYTADPNDDQRIREFSAYTDGLRSIVGYLREYGVTTVAMESTGIYWIPLFELLEAEGFEVFLVDPSYTKQVRGRPKTDRRDCQWIYRLHSVGLLAAAYRPDAKTCVLRCFLRQRQSLIRYAARHIQHMQKALEQMNVKLTEALSDITGVTGLKIIRAILRGVHNPRKLARLRHRRCHKDEEEIARALDGNWRMEHLAALELAYQLWQTYQKKLDEVDARIAKHLGVMKLERALPPLPEKKANSHSLRHNAFRFEAREALYLVIGMDLTEIEGISDSTALTVLAEIGADVSKFPTVKHFCSWLGLCPCLKKTGGKVKSSRTRRGVNRAAQALRVAANALWNSRSALGAYYRRMKSRLGAAMAVTATAHKLARLVYNALKYGLPYVQKTQEEYEAISKARQIKALQRRARQLGFRIYAEGEVPNEPVATTS

SEQ ID NO: 176765 - protein, 429 aa, unidentified
MPYRIAGIDVHKKMLAVVVSDVEIDSEYEFERKKFSSTPEQLRSLAAWLLEQEVEEVVMESTAQYWKPVWEALERYWKPICEKREGARRKSGTLHLAQALSNRGRRGRKRDFPDAERLVKRLVAQELTLSFVPDVEQRLWRTVTRKKYQLRCDRIRLQNQLESLLEEAHIKLSSLVSDLLGFSAQRMLKAIAEGETNPATLAALADKHLRATPEQLCDALGACTQLNPVYRRLLNLALEELRLIDDQIGRLDREMASLLGEHQDAVQRLAEVPGLGVDSAQQIIAEVGPSAATFPSQKCLSSWVGACPGDDETAGVNYSHRSPKGNRHMRRLLNQAANAAARTKGSIFEIVYRRSVPRLGHNQAIGAIAHRQCRLIWLILHQGVRYEERGPAVTKRSKQLRTWKMIRQLRSLGYRIEPANPQPSQAQAQ

SEQ ID NO: 176766 - protein, 343 aa, unidentified
MDHFAGLDISVKETSVCIVDETGRIVGEVKVASEPEALLQVLMNPAYHFKRIGLEAGPLSQWLFSALGEAGLPVICVETRHMQAVLKAQINKTDRNDARGIAQMMRVGLYRPVHVKTLRSQKLRMLLTHRKLLQSKAIAIDNDLRGTLRNFGLKVGMVGKVKFEARIKELVENFPDLAVLVEPLLVVRRVLREQLGILHRRLLAIVRDDDVCRRLMTTPGVGPVVALTYRATVDVPARFRNSKAVGAVFGLTPSKYQSGEINRTGAISRCGDEMMRMMLYEAAQTMLMCSAKWSWLKAWAMKIARHRGMKKAIVALARRLAVIMHRIWVDGTEFRWTREVAAA

SEQ ID NO: 176767 - protein, 353 aa, unidentified
MQCIAFDSHKHYTWALAQDEKGKVLAEKRIDHARGALRGFLEEFEAGSPVAVETIGNWYWITDEIEAAGMTPRLVNARRAKLMSGSINKTDKLDARGINRLQRSGTLPTVWIPPKPLRDARELPRTRMVLVRQRTKLKNRIHANLAKYGLEVGEATDIFGVRGRRALAERLEEMPTQTQYATRALLEQLDQLNDRIRDLEGRMEAVFGATEELERVRTLPGVGFILGVVILSEVGDVHRFPSASHLASYAGMTPRVHASGGHTRLGRTRPDVNHYLKWAYAEAANVIMVHRRRHPGRHVSRLYERVKRQRGHPKAIGAVGRHLAEATYWMLKNREPYRDPATDRAPGESTRAT

SEQ ID NO: 176768 - protein, 333 aa, unidentified
MQYSYMLGIDVSKTTIDIALRQNKANASIVNNKFSNNLKGYKALLAWLHKEKVQIGQVLICLENTGIYHRCLVSFLQSEQAFVWVENPIAIKWSMGLVRGKNDAVDAQRICLYAFRNQDKAKAYSGMDKSLQKVADLLATRERLVQARKLLLTPIKEFKEVGLQKNSEALERACRKTLSALDKEIEAIEGELENRIEKEQSLKDNYRFVRSVRSIGLVTAIQLLVYSHNFERFANAKKLATYAGLAPFEYSSGTSIRGRIKVHPMANKTLKTALHMCALSSIRHNYEMKIYYERKVGEGKNKMSVLNAIRNKILHRVYACVRDQRMYEYKQAA

SEQ ID NO: 176769 - protein, 357 aa, unidentified
MTAPYDYHIGVDYHKTYSHLVVQDSAGKTLRSGRVRNDRQSLGSFLERYRENSHAVMEATRNWMVMYDWLDDICDDVVLAHPLKVKAIADAKIKTDKIDATVLAHLLRADLVPEAWAPTEKARDLRVALRERMFYVRLRTMVKNRVVTVFDRYPEQTAQLKKLGDLFNKTGLQQLATLNVSAIDRIQIDRGLEFIGDIDGRIKQAEATIKAMTKTNGNVKLLKTIPGIGEFFARLIDAEIDDIDRFRNPKKLAAYAGLVPSTYSSGGKTFHGKIIKQGNKWLRWAFVEAVAPAVASDLQLRAQYEHLKLNGTNKARVAIARKLLTITFQILRDQRPYERRGVDSDEGASATISRLSR

SEQ ID NO: 176770 - protein, 310 aa, unidentified
MNSETYVGVDVCKSSLELNILPDNQSQKFPNDDRGIKQLVKFLRKIDPNLIVFESTGGLEILAVSNLVQYRLPVVVINPRQIRDFAKATGKLAKTDAIDAATIARFARDIRPEIRPFKDEKTQALAALNTRRRQIVDMLVAEKNRLHTALKPNRKSIEKHIDWLEKALSDINNDIDQMIKQSPIWCKNDKILQSFKGVGPVTSATLLCALPELGSLDRKKIAALVGLAPLNCDSGKYRGRRRIMGGRAQVRHSLYMAAVSALRYNPTIKSFYDRLIDAGKPPKLALTACMRKILVTLNAMMKNRSYWIAS

SEQ ID NO: 176771 - protein, 386 aa, unidentified
MQDHEPEGQTAIRTDLGAIFVSLELSRSSWLITSLSPGGGEKMSKHSVPSGDISGLSMLFLRFRERARKRTGKDFPIIVIQEAGLDGFWVHRVLEQEGIESHVVDAASVMTSRRRRRAKTDRIDGEALLRALMAYKRGEPRVCAMVRVPTAEEEDRRRISRERKILTAERVAHVNRIKGLLFSQGIAYEPLHGNRRARLEQLRTGDGRALPEHMKRQISRELDRLELLLEQIKAVEAERNTMLAVSEGEKIPTPAKMLMQLRGIGSESAMVLWSEGLFRHFDNRRQIAAYAGLAPTPWQSGTIDREQGIGKSGNHRLRTTMIQLAWLWLRHQPDSALSRWFHQRVERSGGRFRKTMITALARKLLVALWKYATAGVVIEQATMKTA

SEQ ID NO: 176772 - protein, 317 aa, unidentified
MALQRIFVGIDVSKDWLDLWLEPPKRFERVSNDAAGWAAILGLLNALGAAAGLVVAFEATGGYERGLRQVLLEAGFEVRRLNPLRVRLYAKSLGRNAKNDRIDARVIARYAEAADTMPETLDPARERLAELVAHRRRLIAERVALGNQTAMLGCRLLQTQNRKRLALIARHVDQTDALIREAVGQIPSLLAKLELLKTLKGVKDITAITLLALLPELGRITRRAIAALVGLAPFDHDSGKLKGARAIAGGRTPVRTALYMAARAAARRKSPLGDFYRRLIAAGKTPKVATVALMRKMLVTLNAMVRDNQTWKHAKPC

SEQ ID NO: 176773 - protein, 338 aa, unidentified
METYAGIDLHSSNNFIGVINDKDKILYGKRHQNRLDDVLRALDPFKDSLQGVVVESTFNWYWLVDGLQDHGYEVHLANPSAIQQYEGLKHTDDPWDSVWLAHMYRLGILPEGYIYPKEHRAVRDLLRRRLLFVRHSTAHILSLQSMINRNLGFKMSNNEIKKLKPTDIESLFDCSNLVFMANNSLCAIEFLKKIVKGIEKKVKSQVKMRKEFEMLLTIPGIGNILGLTIMLEVGDIGRFARVGDYSSYCRCVESKRLSNGKKKGENNKKNGNRYLAWAYVEAAQFARRYCVKAQSFYQSKEAKTKPVVAIKALSNKLSKASYYIMRDQVAFDEDKLFS

SEQ ID NO: 176774 - protein, 412 aa, unidentified
MEVLHPHCAGLDIHKDTVVACVRHMAGGTVKREVRTFKTTTTDLMALSEWLSAEGCTDVAMEATGIYWKPVWHILADGDFKLILANAAHVKNVPGRKTDVNDATWLADLMAHGLIRGSFVPDEPTQEMRNFLRTRKQFVRERTSHVQRIQKTLEDANIKLDSVITDIMGLSGRRMIEALIAGETDPFALAALAHRRIKASQAELEAALRGRVSDHHRFMLRLLLQHIDAIDAAIGQIDQEVDAHVEPFRTAIQILSSIPGISDLSAEVIVSEIGIDMNRFPTEGHLISWAGLCPRNDESAGKRRSTRMRKGAPWLKTTLIQCAWAAARTKGSYLQAQFQRVRARRGAKKAIGAVAASVLTAAYHMLKNGTLYEDLGSDHFDRRAKGKQILRLVSRIQNLGFAVQITPIGAAA

SEQ ID NO: 176775 - protein, 343 aa, unidentified
MKIAILGIDLGKNSCSLVGLDGRGKVVKRRHMRPASIVGFTKSLPPCIIAMEACCGAHHLGRLLKAQGHEVRLMSPEYVRPYVKAQKNDDRDAEAIAEAATRPTMRFVELKSEEQLDMQTLHRARDRLVGERTALINQLRAILLERGIVIAQGRRNLERELDAMLFEEDGLAVSPRLRKLIEGIREEWRDLDRRIAAFDDEFAARAKTDEAARRLATIPGIGVLNATALAAAIGEGQTFARGRDLAAWLGLVPRQITTGGKPRLAGITKRGNCYLRKLLIHGARAVLPTLCKSETLLGGWLRALLARVHKNAAVVALANKLARIVWAVLRRKETFNPSATALA

SEQ ID NO: 176776 - protein, 335 aa, unidentified
MSSLVCGLDVHKDSVYATVMNYGGEVVDKRKLTNDEVVSYLGRYPIDKVAMESSTSIVPVYRALRGKGYEILVSHPKKTRLIAESRIKTDRVDSWALTELARLDALPLSYMPPDDIAALREKVRRRAFLVRMRSKLKVKIKAQLVINGFTPPSEYGLFTAKGLGWLRSLQLDAVDSYLPVISTLDIQVGKLSRELRGLASGDEDVRLLMTIPGIGYYSALLVKSEIGTVDRFPDGEKVCSYAGLAPSVSISGRYRRYGSITKEGSRWLRWIMVESVHTHLKYDTSITRAYHAIAERKGAQIAKVAAARRLLMCCYSVLRNREPYHDPAGHYQASS

SEQ ID NO: 176777 - protein, 347 aa, unidentified
MSITMIGLDTAKSVFQVHGVNETGKVEIKRKLRRSELIPFFEKQEVCTVVIEACGAAHHWARILRGLGHEVKLIAPEAVRPFVKKGKKNDPADAAALCTAASRPDMMFVPIKSIEQQGILAVHSARSLLVKQQTMLANAMRGLATEFGLTVPRGIGRLDELLKLVDADKTFPEKARQVFMGLFVQCGALAESIGALEAAIVAHARQDETARRLQTIPGVGPITASLIATTVGDISLFKSARHFAAWLGLVPRQYSTGGKTRLGRITKAGNREIRKLLVLGATSMVYRAPQWNSALGGWIRKLLERRPVRLVTVALANKMARMAWALMTRKEVYRAKGRVAAATEAAV

SEQ ID NO: 176778 - protein, 388 aa, unidentified
MSFDHHHEAPTAIQNHLAAIFVSLELSRSIWLITSLSPGFGEKMSKHSVRAGDVAALLARFSELKRKASERTGKSFPIVVIQEAGLDGFWLHRVLQNEGVESHVVDPASIATSRRRRRAKTDKIDGEALLRALLAHKRGEPRVCAMVKAPTPEEEDRRRLCRERKALIAERIKHVNRIKGLLFSQGVSGYEPLHRDRRERLESLQTGDGRPLPGHLKAQILRELDRLELLLKQIKAVEGERDALLVEQDVATPAPAAMLLDLKGVGPEFAAVLWSEGLFRHFDNRRQVAAYAGLAPTPWQSGSVDREQGVSKAGNPRLRTTLIQLAWLWLRNQPKSALALWFKERLDSNGGRLKKTLIVALARKLLVALWKYVTAGVVIEGAIVKSAS

SEQ ID NO: 176779 - protein, 421 aa, unidentified
MKNNAARKLRQVPAGYLRVGVDPHKKKHVAVTMTEDFLVQGKFKFTNSRDGFEEALERARADMEKAGCQGVIFSIEAASHLWRNFAYFLDEKGIPFRLINPFSLKRRREGKDLNRRKNDFRDAEVAAQLLCTGEFTETILPQGVYAELRATYSAYRRVVKEKTRSVNLLKGLLDGLFPEFTQIFKEVSGQTALRVLSVCPIPELIDGMTEDEFIKFVREGYQGRLMKGKLLALHYVARHSAGVKAGAWSVSSEISLLAEKLCLVNRHIRQIEQTLVRLVDEAEEGKYLLSIIGLGYISVAGLLAELGSFKSYHNARQMIKMAGSNPTESESAGKRKSKTPMSKKGRPGLRHCGWTAVVSLLSHNPDFRTWAKRLRERPAHANPLSGREIVGAGINKLLRIGFTLVKKQTFYQLPQVAQLVS

SEQ ID NO: 176780 - protein, 372 aa, unidentified
MNYNTVYVGMDVHKESFTLCAYTIDAEKGSHFQRTEADYKNVLKYLEFLRTIYGNDANFICGYEAGCLGYTLYHQLTEHHVNCVILAPTTMLEQRSKRRIKTDRRDAEIIGKCLAQHNYSPVHIPTATDEETKEFLRMRDDHKLALKKVKQQILAFCLRHNYRYDGKSHWTAAHIKWLKSLNPEALYKEILDEYLLTYTTLSDKVERLDKRIEELASKDEYKESVKKLCCFIGIKTHTALSVLVEVGDFQRFASAQNFASYLGLVPGEDSSGDGQTRLGITKAGNRHVRMLLTEASQCYARGQIGFKSKELKSRQAGNSPQVIAYADKANERLRRRYYKMVLGKSKKHNVAKTAIARELACFMWGMMTDHIA

SEQ ID NO: 176781 - protein, 364 aa, unidentified
MRRKEPRDRGTGGAGRPRVIGMKSVSYYVGLDVHRQSVSYCIKRPEGTIVREGKISAQRQALLEWVQSLSSVSWCGGLEATICSHWIYHLLRPYAAELKMAHPSRLKALIASKRKTDCLDARTLADLLRCDLFPECYVLAPDYEQLRQQLRYRSLIVRTSVLFKNKTAGLLIENGVPYETSKLHGKKYFAALLQNAEGMSEQLHKLLSFNRSQLETLARIDRTIIAILLQDPLLCDRVQQLRTVDGVGEITALTWVLETGDPARFSNAKQAVSYCGLCAAQRESAGVSKRGPISHQRNILLQTTLIEAAHLAPRFNPTLRAVYQAELAKGHRHRATLEVARRLVRYLLAIDRQYFQQHPSLAAA

SEQ ID NO: 176782 - protein, 350 aa, unidentified
MFIGIDVHKDTHTAVGVSPFGEKLFEITVGNYQSDFDQLRQKVELVKGSLSPYFGLEDCQGYGERLSSYLHDNGERILAVPSVMVDRQRQKETHPEKSDSLDAFGVAKVMMQNIDSLPAYTISEEAKKAKQIKEISIDREYIVEERTRIKNHLHNLLHRIYNSEYRVKYKDPFSLKALKHWSKSKPKCDQFLLRSMKRKIKRLIDIHYEILDLEKEMETLLNESYTIQTASGCGSIVAGMIIGEIGDINRFHSPGALAKYAGCSPRECSSGKNHRHRKTKGGNRRLNCAFHRMALSQISRSGNDLARTYFKRKISEGKSKQQALVCLRRQMVNIIWCMLKNKTNYNPRMN

SEQ ID NO: 176783 - protein, 409 aa, unidentified
MRTIGLDVGRTFAEVAIHEGGRTRSAGRTPVTPAGLRSFAAGLHADDEVVLEATTNTWAIAGLLAEHAGRVVVSNPLRTRAIADAKHKTDRIDAATLAELQAARYIPEVWQPDPATRELRSLVAHRAGLVRVRTAQRNRVHAILDRALIASPVADAFGVAGRAWLAALELPDLARLELDAALRLHDTAAAEVTAADRLLAERIVDDPRARHLLTIPGVGPAVAASLVALIGDIGRFPRPANLASYLGLDPRVRQTGGKPAFTGHISRAGQAHARGLLIEAAHAAVRVPGPLHAFHARLLRRRHSSGVAVVAVARKLAVLAWHLLSADADFRFSPPVRTAEKLRRLDLAAGRPKRAPGGRGPGGAKERRRAARTAEWTVLEVAEAAYEELVRARTIPRGSTDAAAAPGSD

SEQ ID NO: 176784 - protein, 349 aa, unidentified
MTMLAEVVDVVIGVDTHKHTHTAAVVTATTGAVAEIVTVATDLDGYDELVALADRHAGLRAWAIEGTGSYGAGLTRHLQVGGEEVLELDRPKRPPRRMGAKSDDIDAVRTARDALAREINATPRQGSERAALSVLLTARRSAVEAAKVAHVQLQSLICAAPEPLRAKFRGQGSRQILTSAARLRIHPSWDLETVAYATVLRDLARRRHAMDTEAKAHENAILAIVKGWRPELLDQFGVGPIVAATVLCAWSHARRCRNDAAFAKLAGVAPIPASSGLTNKHRLNRFGDRQLNRALHVIVMHRLRHDPRTIAYTQRRRAEGKTDREIKRCLKRYIARELYRQLERPLDRQ

SEQ ID NO: 176785 - protein, 350 aa, unidentified
MQKLTTIAVDTAKLVFEIVIDAKPKRRSMRLSRDEFHSFIVNQQRSHFVLEACGGAHHWARLMAEHGHEVRMLPAPYVKPYRRRNKTDRADCLAMLEADKNTEILSVPIKPVDAQALQALHRARSGWMATRTARINALRGHLREFGIVLPEGINKARAMFAESIDDDAVPQMLRPALHILLEEIGDLELKVDMVECQLAGFAKQSTSAKQLMCIPGIGLLTATAMLASAGKASYFRSGRHLASWIGLTPREHSSGSRRTLGGISKRGDPYLRMLLVHGARSLLRAANQRLKSGRPLDTLQRWALQLQERTTHNKAACAIANKMARIAWACWAKDTAYAREPKLAAAQATR

SEQ ID NO: 176786 - protein, 421 aa, unidentified
MRGLRAKGMRMVKEGTLIATVDIGIASNTGYCATLDGISTKSFRFDNTREGFEKFWWMTVASKNRFGCDEVLVGYESTGPYAEPLVHYLAKKQVKIVQVNPMHTKKMKEVNDNSPLKTDEKDPRVIADIIRLGHALTIVVPEGDAAHLRRLNNARERHVGEQTALLNQLQQLVYLIFPEFKTVLKNMKGKTAQHILKRYTTPERIGILSQEALGEEMRRRSMGKFGIKEAESLIGLARETVGIKEGVVGIFMDIRHILMQLEAEVRFISEIEVEMRATLERIPCSARLLSIKGLGTVSVAGLIGEVGDFSKFSTQSEIMKLAGLDLYEISSGKRKGQRRISKRGRSLLRKILFYAAIQMIRKNGIMYDYYVRLTGRGMERMRALIAVSRKLLRIIHAIVRDNRDYVGQYQAPQRRVIKMAA

SEQ ID NO: 176787 - protein, 337 aa, unidentified
MKYCGIDLHSNNSVVMIINETDQVLYSKRHANELSQILAALEVHRAELAGVVVESTYNWYWLVDGLQEAGYCVHLANTAAIKQYDGLKYRGDESDARHLAHLLRLELLPVGHIMPKDRRAVRDLARKRMQLVQQRTTQILSIENSVSRHTGAQISSNSIKGLRETDVEAMAVGEKQALGIKANLAVLQTLQAQIDSLDKVLVGYCRSEPGYRQLKTVDGIGEVLATVILLETGDITRFADVGNYASYCRCVGSKHESNGKKKGEGNTKNGNRYLAWAFVEAANFAVRYCEPARRFYQKKKAKRNSTVAIKAVAHKLARACYHILRNKEAFAVERCFA

SEQ ID NO: 176788 - protein, 324 aa, unidentified
MLPTLGIDISKDSFHVELSINNKRRHRRFANRKAGFAELCVWLAKHKAGLVHACLEATGPYSEAVALYLHQQGHTVSIVNPAQIKAFGQSELLRNKDDRPDAGLIRRFCEKQQPTAWQPPPAHFRELQALTRHLENLLETRQQQVNRLEVTTTKEVRKSLRKLVAHLEAEIKRTEQQIDDHIDRHPDLRQQCQLLESIPGIGKRTATRLLAEIEAISRYKSARQVAAYAGLTPRNNRSGTMCGPTRLSKTGNARVRKALFLPAMVAKRHNPVVRSFCQRLARHGKNKMQLVGAAMRKLIHIAFGVLKSGKVFNPDHELLSNSVS

SEQ ID NO: 176789 - protein, 361 aa, unidentified
MRRLVLKELGNQYPPQPGAVVIIGVDLARSKWVYACRWGGQERRRFGSAGELKHLQAVVREYQDRGCEVHVVYEACGFGYEIAWWVEEQKARVIVVPPSTVERAPGARVKTDGLDAGSLALKYEKGLLKRIYIPSRAQHEYRQLSRTYGQLLKDRHRQQVRVRLLLQEHGYTPPRRGTGWCALQRWVQAQQLPTPVALCIAELVALRTAAGASVRRLAKELRAVARLPQYAPLVKALAQQSGVGPFTAVRFVLEIGAIQRFPTADSLPNYLGLTPREYSSGELVHRGPVRKCGPGALRAWLVQCAWVAVHRRKDQPLVDCFERLEPGAGAKKAIVAVARKLALRLRARWREFEATTSAQAA

SEQ ID NO: 176790 - protein, 337 aa, unidentified
MEQEQQYVGIDLHRRRSVIVRRSDAGETLETVRIDNDPVALASELAKAGEHPEVILEATYGWYWAADVIQACGGNVHLAHPLGNNWGNRRVKNDERDATDLVDLLRMGRLAEGWVAPPPLRELRELIRYRGKLVHLRSNAKAQVHAVLAKEGVAVPMTDLFGVGGQRLLDEVELAKAYRIRVESLRDLIELYDREIAMLEKETAPYFAGDLGYHAVQAIPGVGPVLAAVFVAEIGDISRFTSARHLASWAGLTPNHHESDEKVRRGHITKQGSRLVRWAAVEAVARQRGDTVIRRHHRQVGERRGNQIGRVAAARKLLTLVYYGLRDGEIRCLAKAG

SEQ ID NO: 176791 - protein, 364 aa, unidentified
MKRKVYVGMDVHKETIQIAYLTSNTKEMLKEQQIKHNEVHIKKFINKLKTEWNEIHCCYEAGVTGYPLYRYLKSLGVNCILVAPGKIPRQSSDKIKTDKRDAIKLARLLRSGDLESIHVPSEEDEAVRDYLRSRDSLRLDLGRNRQRLMKFLLRKGNVYSTTKYWTVSHYKWLNNLHFENEILHETFNDYYSRVRVQEENLKAMDQKIQEIAKSEAFRERVGILRCFRGVDYLTAMFLLSEVNDFRRFKTAGSFMSFLGLVPGEYSSGSKRKQTGITKTGSPRLRRILTEAAWQHRFPGTGSKIVAARRTGQPALVVALAEKASLRLHKKFRNLQLRGKTPQVMITAVSRELSGFLWAAMNLVA

SEQ ID NO: 176792 - protein, 402 aa, unidentified
MVKGPTRFIGLDIHKEYFVAIGVNAQREVIFGPLRVSNYQLEEWISQHLTFEDALVLEMTTNAYHFYDSLLPHVHSVLVVHPPNVTLVTNVPVKTDKKAALALAQLYAAGLLTGVWIPPHNVRDLRALIAQREKMIQLSTLAKNRLNSMLHRNHLLLPEKPFTPEQRTWWESLPLPDTELFLLRSDLDTLQFAQKQIEQLEICLKQASAQDERMSQLIQLPGVGWLTAITILSAIGEITRFPNAKHLVGYAGLGARVHDSGLTHTTGRITKAGRKDLRRAMVNAANRAVQHHVHWKKELERLQPHLGRSKAVVAIARKLLVAIWHVLSEKVADRFADPSAVARSFYDHAYSIGRKNLPEGQSVLTFIRTQMDQLGIGKDLQEFPWGGRLRKLPPSKMFALTK

SEQ ID NO: 176793 - protein, 340 aa, unidentified
MSYYAGIDVSLESSHVCVIDGNGKIVREAKVASEPEALIAWLGSVALELTRIGLEAGPLSQWLYAAMRDAGLAVELLETRHVRNAFKIMPVKTDRKDAQGIAELMRLGWFRPVHCKSMEAQETRAMLTARKLVQKALHEVEMSLRGVLRGFGLKIGKVAPTQFEARIRKLVEGHPSLEVIATAMLSVRATLRREFNGFEKRLRAMARSDVRAKLLMSVPGVGTIVALTYAAAIDDPARFTSAKTVGAHFGLTPTRYQSGETDRIGRISKIGDASVRAMLYESAHIIITRPVKGCTALKSWAMRIAKRAGTKKAAVALARKLAVIMHRMLVDGTTFTTEPA

SEQ ID NO: 176794 - protein, 381 aa, unidentified
MPHKVDKLDQWARSLYRQYGGPIAVALELSKGPIVSVLQKYDFFVIFPIDPTTLANHRRTFTPSGAKDDPTDAEYALDLLLKHTEHFKALNPQSVEMRTLMTLVEQRRRLMNDRVRITNRIRSTLKQYYPQALEWFDRIDTQLFCDFIKRWPSLVQAKRARKTTFEKFFREHNMNRKALFERRMTAIKSALPLTEDEAIILPYRLQATTLVAQLEVALASIKIYDDEIAALAPQHPDYALFDGLPGAGPSLAPRLLVAFGEQRERYGKAAELQKYAGIAPVTERSGQSTWIHWRWQCPTFLRQTFVEWSAQTINKSYWAGLYYYQQKAKGCSHQAAVRALAFKWIRILYRCWITRTPYDEAKYLKALQRRGSPLLKMAEAA

SEQ ID NO: 176795 - protein, 350 aa, unidentified
MEYLGIDWSYRRAAWCSLSDAGVIVGEGAVPADADGLARLVIERGTDVRAVVEMMSGAVWVRDQLAAAGWRVQIAHARKVRDVAPLACKTDKVDARVLAELARRDLVPELWVPPLEDRALRERLRRRTHLVRMRASAMNRIFGLQTQWGLRLSLRRLRSPDAMTLLERQGMPAVWRRSIAEALDVIDLLDARITPIDHELRPLARADARVILLDTIPGIGDLLGLTLASEIGDVARFGSPRKLIGYAGLAPKINQSGDRSRTGALSKAGSRTLRWAAVEAAQHAWRPTNPWHQLYTDLAERAGKNPAKAAVARKILIAAWHVLSRQQPFKPAAPRRLDPVSASSRCFLAA

SEQ ID NO: 176796 - protein, 310 aa, unidentified
MEQVFIGIDVSKDRLDVAVRPSGEAFVVEQTAAGFDRLIARMRELGPSIVALEATGGMEAAVAAALGGAGLPVAIINPAQIRAFAKALGQHAKTDPVDAAVIAHFAEAVKVEARPLPDEATRLLADLIARRRQIVEMIVAERQREKRMTAPRLRKSVIRLIKALEKELASLDEDIDDAVRGSPAWREKEDLLASVPGVGPTISRTLIASLPELGQLGRKQIAALVGLAPFTRQSGKWRGQSFITGGRSAVRAALFMGALVAKRYNPVLKAFFDRLVAAGKPKMVALIAVARKLLTILNAIIRNNRPWQTA

SEQ ID NO: 176797 - protein, 335 aa, unidentified
MKEITTVGVDLAKSVFTVHGVDAMGQVVLRKTVRREQLVELIAGLPPCLIGMEACGGAHEWGRKFQTHGHRVGIMMARFVAPYRKSSKNDGNDAEAICEAVARSNMRFVPVKSAEQQAILSLHRVRQGFIEQRTATINRIRGLLAEFGVVLPQRAEQVRRAAVSRAERLPVLAREAIADLRAHLTYLDERITRYERQLVSLARQREAAVRIQRLPGVGPLTASAITASISDGHEFANGRQFAAWLGLVPRQYSTGGKARLGRITKRGDPYLRTLLMLGARAVLRSAARKTDRVSRWALALRARRGYHRAIIAVAAKNARIIWALLAKHREFVLPV

SEQ ID NO: 176798 - protein, 352 aa, unidentified
MAATAQSAIAVIGIDIGKNSFHVVGLDGRGAIVLRQKWSRGQVEARFANMSPCLIGMEACVGAHHLSRKLKALGHDARLMPARYVRPYSKGQKNDFRDAEAIAEAVQRPTMKFVVTKTADQLDLQALHRVRERLVSQRTGIINQIRAFLLERGIAVRQGQRFLRVELPRILATPPDVLSPRMVRVIEGLASDWHRLDERIEGLSSEIEELAKRDAGCERLMSVPGIGPIISSAMVAAIGTGDSFSKGRDFAAWLGLVPRQISTGDRTILGKISKRGNRYLRVLFVQAAWVVLVKVKPTRWQGHGLRPWIEAAKKRLHHNVLAIALANKLARIAWSVLVHGRAFETNQRQAAA

SEQ ID NO: 176799 - protein, 441 aa, unidentified
MAKIINPNAAGIDISAKEHYVAVSEEICKEDVRCFKSFTRDLHELANWLKECKVETIAMESTGVYWYHLYTILLDYGFEVYLVNAYHVKNVPGRKSDVRDARWLQQLHSYGLLNSCFQPDNLTRSLRNYVRQRKSIVKQMATEIQRMQKALEQMNIKLNNVIRDITGKTGMQIITKILEGERDPKILAQFRDRRIKASRELLIKSLEGNWRQEQLFNLELAFEHYHFLQNQLLKCDEKSEDIVDQMSDDSIDKKKLPPVRKQKNQPNFNVAQYLYHILGVDVTEIYGLKATTALTIFSETGPSLKEKFPSVKQFLSWLNVVPDNKITGGKVISSRVKKKKNRAGQAFRDAANALWNSQTPLGDYLRSKKAKKGARQAIVATARRIASIYYTMVTERVNFDSHYLEKYTLEYLKNKLIHLEQAVSKTKVLIFGNETLCKLVI

SEQ ID NO: 176800 - protein, 345 aa, unidentified
MKEISVLGLDLAKTVFQIHGVDSQGEVVIRKQLRRSQLRQYFARMAPCLIGMEACGGAHYWSRELTRLGHCVRLMAPAFVKPYLKSNKNDRNDAAAICEAVQRPSMRFVAAKTPEQQSVLHLHHARRLLVQQRVALGNHIRGVLLEYGITLPQGVQVVSRRLPALLEDGDNELPMISRHLLAQLQAQHDDLQQRIGVLQGQIQDWHQASAASQRLATIPGVGVLTATALAATVGDGQVFRNGRQLAAYLGLVPRQASSGGKERLLGISKRGDGYLRQLLIHGARAVIHHIRRRLKAGQPGGNPWVEQLLQRCHVNEVAVALANKMARMAWVVLVRGETYQVPTPA

SEQ ID NO: 176801 - protein, 354 aa, unidentified
MSRIADPPGPVTGGVDTHADVHVAAVADQIGRVLGTESFPATAGGFAALLGWMRGFGELAGVGVEGTGSYGAGLARHLAAAGVEVAEVNRPDRQRRRRRGKSDAVDAVNAAVAALKGEETGIPKTGDGAAESIRALRVARRGAVKARTQAGNQLRDLIVTAPAALREQLAGLDTAGRVAAAAAFTPGDAVDPAEGMKAAMASVARRWQDLDAEVKATDTALDDLIARTAPPAFLARRGVGTQSAAALITAAGDNPARITTEAGFAALTGTSPVDCSSGKQEHHRLNRGGDRQANSAIWRIVTTRIRTDPRTQAYVAKRTAQGKTRKDIIRCLMRYVAREVYKNLIRPAAQAAAA

SEQ ID NO: 176802 - protein, 442 aa, unidentified
MAMRKREDSPEVFPNAAGIDIGASSHWVAVPKGAADEPVREFGAMTDDLNAMADWLLACGIDTVALESTGVFWIPVYEVLEQRGLTVWLVDARQMKYVPGRKSDVQDCQWLQKLMSLGLLRAAWRPGEEVCVVRAVARQREVLLTEQAGWVQRMQKALVQMNLQLTEVLTDVMGVTGQAIVRAIVAGERNPKVLASYRHGRVRASAAEIERALTGNWRDEHVFVLGQALAMFDSLGERILECDVKIEALLKPLGVHEVELSGPGKRGGKNTPQFDARTALARWAGVDLTRINGLSITTVMTILSEIGPDLSRFANVKHFCSWLGLCPGTKISGGKVLSARTRRSTNRVRQALKLAAMSLSRNDSALGAFYRRLCARMDKPRANTAVAHKLARMVYFMLTRGEAFVDEGQQRYEEQQRQRNIAALRRRASALGFEITPAGQVT

SEQ ID NO: 176803 - protein, 352 aa, unidentified
MAAKKRHVIGGVDTHGKTHHAAAIDQIGKLLGDREFPTTAAGYRALLAWLRRFGLVIKVGVEGTGTYGAGLARYLASEEVELVEVDRPDRKTRRAQGKSDPIDAIAAARAALSGQAAGAPKTRIGPVEAIRALRVARRGAVKARTAALNQLHGLITSAPEGLRAQLLDVPAVSLVAHCAALDVDEAAMADPVNATAAALQAIAARICHFNAEIALADKRVRPAVAKTAPRLLALKGVGPEVGGQLLATAGDNPDRLRSEAALAHLCGAAPIPASSGRTDRHRLNRGGDRAANNALHTIVLCRMRHDPRTHAYVERRTKQGLGKKEIMRCLKRYIVREIYEALLADFAALSTA

SEQ ID NO: 176804 - protein, 346 aa, unidentified
MKVLIGVDPHKGSVAVAAIDEATGELLERTAFPQDRSGLRRLEHWARRFPESRWAVENAGGLGRHLAVRLAGSGESVVDVPPKLSARVRVLSSGNARKNDGLDALATALAASRNERLAPVDPEAASEALRLLSERREDLVAERTRSLKRLHALLRDLLPGGVTGKLSADRATRILRGIRPKGTSARLRRGLASEVLRDLRTLERKIAELNGRIEAEVEASGTTLTEIYGIGPILAARILGTVGDVRRFPSKGHFASYSGTAPVEASSGEVMRHRLSLAGNRKLNYALHMVATSQARSDAPGGTYYRKKLAEGKSSKEALRCLKRRVCDAVYKSLVADSQAPSHRAA

SEQ ID NO: 176805 - protein, 342 aa, unidentified
MNISTIGIDLAKNVFAIHGIDERGRVVVRRELRRSQVLPFFAKLPVCLVGMEASAGAHYWGRELMKLGHDVRLMPATYVKAYVKRGKTDAADAEAVCEAVTRPTMRFVPVKSKEQQGLLSLHRARDVLVRQRTQTINVLRSLAAEFGVIAAKGKLPFSQLEALILDEADGRLPQAARLALKPLMDQIQSLLRHIVLLEREIVGRARKDEANARLQTIPGVGPITASALLATLGNPSRFAKARDLAAWIGLTPKAHASGGKARRSAISKQGDPYLRRLLVQGASAVIRTARKPNSKASAWLKTVLLKLPPKVALIALANKTARIVWAILVKGGVYGHSQTVAP

SEQ ID NO: 176806 - protein, 445 aa, unidentified
MAHANRLSRGDVRRNARLDRLRGVVSRDRAVLAVDLADDKQVVVVCDHDSRVLARRTWRCRPWQLDQALGWGLAVACRQGFAGVVVACEPTGHRWRVVVEHAHRLGLEAVCVQPLLVRRAREAEDFTWDKSDDKDALLIARLTTQLHCYLPEQPTAAWARLRHLGNRRVEQLTHTTAAQQRLRDLLECGWPAALEVARHPLDSLTWRAAMTVGRCDPVYIRRLGFTRFARAVARELPRWGGRRRNLGVLRVLYAATGDDRGVAAQRAGALEQAALVLADFKQALAALAEVEARMAKVLAELGLAELVTSIPGLSVVGAAAILAETGDPTRFDDAKAVVKHAGLCPRDNASGSFAGKTTISGRGRPLLRLAAWRAVWGALPHNPVFAARYTHLTSRQHNRLSDGQARTAVAAALLRQLWVVCVNRIPWELAVASGTTGKEVTDPAA

SEQ ID NO: 176807 - protein, 316 aa, unidentified
MVPSPLFVGIDVAKATLDIAVRPTAETWSVSNDATGIDALVLRLGAWAPTLIVLEATGGSQGPLVAALVAAALPVVVVNPRHIRAFAQAVGILAKTDRIDARVIAHFAEAVKPAPRPLPDAETQELRALLVRRRQLVEMVSAERARLDTVPPRIQDAIQAHIAWLTTQVAGLDDALTRAGQTHPVWQAKDDVLQSIPGVGPVLARTMLGQGPEWGTRGPKPLAALIGVAPFNRDSGTLRGRRTVYGGRAEVRAVLYMGALVATRHNPVIKTFYERLLAAGKAKKVALTACMHKLLTIMNAMVRALKPWQPQEVPSA

SEQ ID NO: 176808 - protein, 435 aa, unidentified
MSNIIKYDSFISVGIDVGADFSFMSIALPNQTFVGKPFKILHSDLNSLSIAVSKIKEAEEMYSLESRIFLESTGIYHYPLFCYLRDKGFCISIINPIITKNSTNINIRKVHNDKFDSKKAALIGLKPDLKVSLMPSDLALDLRNLSREYYDLMDNRSAYVNKLQSELRMVFPQYLKIFSKITTNTSLTLLEKYTSPEAFLNASKDEIICSIRSTARFGLTYAEKKYNAIIKAANDATTFGYSVSSNFKRIRLYIRFIRQYDEEVSSILSDMHELVNTNEDTKFVKQIHLIESFKGAGFLSAVSIMGEIGDFSAFHSPKQLFAYFGLDPAVKQSGNFNGTKVSISKRGSRIARRVIHTMALISISRRKNSSAINPVLRNYYLLKCQSKPKMVALGAIMHKVCNIVFAILRDEKVFEIITPEEHHINYQKAKCDVAA

SEQ ID NO: 176809 - protein, 347 aa, unidentified
MYPFYLGIDLHLKRTYLVLMNGEGEVLDKQRLKNTDIPAYITENVPKETYAVMEATRNWPFFYDLLEKHVDRVELAHAKGVRMIAAAAVKTDQIDASVLAHLARLNFLPIAYAAPKEIRDLRQHLRYREWLIDERRRAKNRVHAVLAGYNLASPVTDLFGRAGREWLQEVVEEELRFSSKKVVIETLEMINQLDIQIKELAKDIPLPEELEPKAELLMSMPGIGKLNSAVILAEIGDINRFSSPKALCNWAGLTPRVHKSDEVVRHGRISKQGSRYLRTAMVSAAMTACRISPRWYGVYEHLSRRIGRRGAKVAVGRRLLTVVYYMLKRDQPYEEDYEQRRSVEQGA

SEQ ID NO: 176810 - protein, 402 aa, unidentified
MHYLGIDVSKASHQCVILDAEGEALGKSFTVQSSKDDFANLVKKLSELSIPKSDITAGLEATGNLWENIYTFLKDQGFKVTLLNPFQTNKFHQAMMKKAKTDSIDALVIAGLLRSGCAASSYIPDEDIQSLRDLTRLKDGYLKDMKTYKRKAYSLLNLVFPEFLNLVKDPFNISCTEILSKYQTAVDFKNLRPKDLLKVARGHQGNNYDEAWADKVISSAKDSIYSGKASKARGIVLKSLVLNIKNLKDEIDSLDNEIQNILKPDDGSSNDKIDNLLTIPGVGPKTIAVFIAEVGDIQRFASCKDFIGFVGLYPKIEQSGSSLNKARLTTKGSRILKHALYMASVASLIHNPYLKSVYKNKLSQGKSAKQALIVVSRKLACIMYSMLKNNSIYSPERAAIAV

SEQ ID NO: 176811 - protein, 353 aa, unidentified
MVLHVGLDLSRSRVDVCVLDAASGVVVYVAATPDERGLRGLVGRVQEMGQPPVAVRAVIESMTGARFVRDVLTEHGWDVLVADAAKVKGLAPLACKTDKIDAAVLAELSARDLVPAIWLPPVPVRQQREQTRYRAHLVKHRSMYKHRIHSTLMTLGVPVAGSDAFGPGGRARLARLELPEPWAGHITSSLALIDELSVAIDDCDTAIAAWAGADPAVRRLRTLPGVGQVLGATIAAEIGDITRFATPGRLVSYTGLCPRVYQSGGTDRRGSITKTGPAQLRWALIEATIHACRHPAFATGYQRTKTRLGRHRGTRIARVQLARELAHATWYMLTRDQDFTPHPAAGAANDLAA

SEQ ID NO: 176812 - protein, 344 aa, unidentified
MNQIYIGMDLHKNTSTFAVKDKDGQVIDECKIATEPSAIKGYLKQYPDSSLAVEPVSQWYFYGDLIQGLGIDVHLANPLKVKAIASARVKTDKIDASALCDLLRSNLLPEAYFASADARYWKEMVRYRSSLIRLRTQIKNKIHSILFRNGLRHDFTNLFGVGGRKWLDSLDLAEHFAFNLKHYLGLIDAFGQLIKEADERIEKVVGDNQPAKLLTSIPGISYVSALTIMAEIGTVERFASAKKLQGYAGLVPSTYASGDRMVHGRLTKQGSRWLRWTMIEIAQRQLLCKKKPGFDWYYQRIKQRKGSGAAAAATARKLLAVVWRILKDNRPFEIIPPRVGSPGC

SEQ ID NO: 176813 - protein, 412 aa, unidentified
MISVGIDVSKGKSTVCILKPYGEIVSKPFNITHTQKDLSELSSMLFRLNDEVKIVMEATGIYHLPVLTYLQEKGFFVSVINPYLMKSYRNESLRKAKTDKIDSRIIANYGIDHWFKMKEFQTSGEIYEELKLLGQQYRHYMKLHLLSLAELTHLLDLTMPGIKNLLASWNETNRKDKRSDFVERFWHYDVITSMSEQEFTEEYILWAKEKKYVPSQEKAKVIYTLAQESIPTLPSETSSFKMLVTEAVRVLKEVDATLGLILSRMQEIAKTLPEYSVVREMGGVGNTLAPKLIAEIGDVRRFRNGKALVAFAGIDPPPYESGQFVGCNRKISKRGSASLRKVGYETMRSLKMRSRPEDPVYRYVVKKESEGKSKKSAKIAGLNKFLRIYYARVTELYKNCLLYTSPKPTRRS

SEQ ID NO: 176814 - protein, 347 aa, unidentified
MEKVTRIGVDTSKNVFQLHGVNAEEKPVLRKKLTRLKMIAFFKDLAPTVIAIEACGSAHHWARQLSSFGHEVKLIAPQLAKPYVKRGKNDAADAEALCEAMSRPTMRYVPVKTADQQAALMLVGMRDRLVRNRTQLANAIRGYAAEFGLTVAKGICRVEVLLTDIASDDTLPELARDLFAIHRREYELLQVEIEKVEARLMEWHRKDECSQRLSRIPGVGPIGASLLMMKTPDPRLFKSGRDFAAWMGLTPKDHSTAGRARPGGITRAGDELLRSVLVNGATAVLKQVRAGRGRNASPWLQKLLEHKKPKLVAVALANRTARIAWKMMVSGESYRATPVQPVLAKAA

SEQ ID NO: 176815 - protein, 417 aa, unidentified
MKAWTELTHFAALDWADDHHDLVVVDARGQVVLELTFAHNAEGWQQAQQALAAWPGLPVAIETSAGPAVDQLLQRGFVVYPVMPKAAARYRERKRPTGSKDDRHDAWSLADALRTDGHGWSALSPLDPLTGELRALCRDEITLIEQRTALVNQLQAALKEYYPAALEAFEDWTAPYTWAFVLAFPTPKALAAAGKRKWEKFLHSHKLWRPQTSSQRMEIFARAMAFSGAEAITAAKSLLAQSLARLLQTLEQQLANYRARIQALFDQHPDHDLFGSLPGAGAKLAPRLLAELAGADWSQLSQVQARAGTAPVTYQSGKIRRVKIRRACTHPLRATLHLWADLSRHYSTWAAAFYRAHRDKGQSHSCALRCLAHRWLEVIGAMSRTHTIYNAEQHLREIQKHGSYVLRLISSPDPKPL

SEQ ID NO: 176816 - protein, 407 aa, unidentified
MSQKKTTPDRFVGLDVHKHYLIAAAVDPDRNEVMSPRRVQLVRLDSWVRKTLTSQDAVVLEMTTNAFQLYDDLLPHVHSVTVVHPPHVALITRAQVMTDKIAARTLAKLHAVGLLPSVWIPPQEVQDHRALVAQRTKMVRLSTQAKNRLHAVLHRHHLLPPPGPLFEPAMHQWWLGLEISPLERARVRCDLDTLVFAQGQVDLLEEALLALATQDDRVPLLLQLPGVGLITAITLLAAIGDISRFPLAKKLVGYAGLGARVHDSGQTHRTGRITKAGRRDIRAVIIEAAHVAARTHSYWQEELARLEPRLGKNKAIVAIARKLLVSVWHVLTKGCSDRFADPEYVARKLLKHAYRLGRAHRPQGQTAAQYVRYLLDRLGLGAELTSIPLDKTRRIHLPPSQLGTAAD

SEQ ID NO: 176817 - protein, 343 aa, unidentified
MEHYVGLDVSLKQTSICVVNETGSVLREGVVASAPEAIAAFVRSKAPDVVRIGLETGPTTTWLWTELKRLGLPVICIDARHAKAVLKMQINKSDRNDAAGIARIMQTGWFKEVRVKDLDSHAVKALLASRALLVKIKRDLENQIRGLLKNLGLVIGRAKFNVFAARAQELIEGRPDLVAVVGPLLNARAAMEQQIRDLDGKVHKLARYDAEVRRFMTVPGVGPITALCFKATIDDPTRFKRSRSVGAYVGLTSRRHASGEVDWSGRISKCGDAMLRMYLFEAAGVLLTRVPKWSALKVWGTRLARRNGLRKAKVAVARKLAVILHRMWVDGTEFNWSKKEIAA

SEQ ID NO: 176818 - protein, 309 aa, unidentified
MKQSVVYIGIDVAKAHLDVAWAQTVRRFSNERSGHAALVRWIKQSTTPVQLICEASGGYEQALLESLEKSEVKVTLVQAVRVRQYARAAGILAKTDKIDAKVLAAFGSAIKPQPTPPLSVEQKRLRQYEAQRRHLSRILVAEENRLAQLSCAELRTLSRSLMSKIKNQIGTLDRRIGELIAQDQTLCEKAQKLTAISGVGERTAALLLAQMPELGQLNRRQAAALAGLAPFNHDSGSVRGKRAIFGGRPALRSGLYMAALSAARFNPILSSFYQRLRAKGKPHKLALTAVMRKLLLALNQTLKPLPCST

SEQ ID NO: 176819 - protein, 395 aa, unidentified
MQIPQIVVGIDIGGRSHRVTIAGPEGQLLEEFDMEHTAAGFGDFFQRLETHERRLKLPVAIAMEGFNGHARPLDTQILMRGYPLYNVNNLKLARFKEIFPGPAKNDPIDSRKIVELFELRAHLPLAKDVLQEVAAPPAENEKLKRLTRRRRQLVEDKVRVVNRLQADLQSVSPGLLAITGNVDNRWFLRFLTSRDELPQLGRLHHSTLLKIPGVGQHYAETIEQWQRQAYFAPAVEWVGPMIVADGQRILELIEQIEQLEGQIAGLAQQSEIAQALFSMPGFGPICSAELAGEIGTLERFASERSLALYLGMAPLDDSSGTYQNSKPPRQVNRRAKAAMMTAVDQHRKQVLSSQHYYQKKRMEGKKHNPAIRALGRHLVRVIWSLLSQHRAYEIR

SEQ ID NO: 176820 - protein, 351 aa, unidentified
MKRPALFVGIDVGSETFTASIGKFEEERGWQILAKATSFINNYDAFIQFVYWLNNNQALAKDCIVCMESTGVYGEALAYCLVSNDYKLVIEAPLKVKRAFDPEGHKSDPVDSRQIAEYAYRFFDQLRYWRPKDVVIEQLKTLLTVREQLVEQRTAHKNANQAIKRKVVRTSLAEDVHKKAIKELKEHIKAVEKEIKRLIDDDPSSRELQRLIESVPGIGSILATFLVVTMYSAPEPYNPKALAAYIGICPYENSSGTSRNKRPTSRHYGPSPMRRLIHLAAMSVRQHSPVFKRYFLRKLAEGKHKQLILNNIANKLLKIVCAIARTRTPYIPGYRSIHPELLTLKQPLTVS

SEQ ID NO: 176821 - protein, 352 aa, unidentified
MKSYFGCDAHKKYSVFASINEAGHRGSCIRVENDRYQFSRFLQTLPPGSPIAVETVGNWYWMIDEMEKARHEPRLTHAGKAKLMMGQINKTDKLDANGLALLLRNGTLPSVWIPPGELRDQRELPRMRMAMVKVRTLFKNRIHASLSKYAIQIKEVSDIFGAQGRKLMENRLSELPQQTRRSVEEQLKLLDQVKEHIKECEKQIEEIIEETPAMRQLMTIPGVGSILAIVIAMEIGQIDRFPRAENLASYAGTVPRIKESGGKIRYGRVRPDVNRYLKWALIEAANVVVLNQNRWPESHVVQLYRRIKQRRGHAKAVVAVARHLAEATYWMLKRNEPYKEPKKNKTVSSTRK

SEQ ID NO: 176822 - protein, 360 aa, unidentified
MTTTTTQTATAADTILALDLGKYKSVACVYRAADDLRFTTVTSGRQELGRLIDTCQPAIVLFEACLLAGWVRDLCADKGVKCLVANTTSEAWKFKHLKRKTDRDDALRLAEVYRLGKFPAVALPEKEVREKRGLIEARQKLVGRRVALQNRVRAILVSQGLPAPRGARAWAAPGLAGIAAYAQPIGECGPLELWRGRLHLALTELGHVKGLLGQAEKKLDDMGKADERMKLLDTIPGVGPRTAEAVVAFLPAPERFRTAKQVSAYGGLVPRQYQSADTDHRGRITKRGPRTLRKLLVECAWVMLRYNRWARSVYERLTHGGRSRKKQAIVAVARKLLVRCWAMLRDGTAWRAEPAGAVAR

SEQ ID NO: 176823 - protein, 350 aa, unidentified
MIIIGVDFHPSDQYIALVDTETGEYEERQLNHSAGEAEKFYRELATRGVSVRVGIEATGYSRWFERLLAELGMELWIGDAAKIKTKRVRKQKTDREDARLLLRLLRENNFPQIWVPSPENRDLRQLLWHRHRLVQMRTRIMNQLQALAMNEGQRRKKKLWSEAGRAQLEKLALAPWASRRRKDLLELLDRMNPQIQELTGAAEQEAKKRPEVLRLMTHPGVGPLTALAFVLIIGTVERFQCGKQIGSYVGLIPCEDSSAGHQRLGHITKQGSSLLRFLLGEAAQAAARCDADWRRRYMHLALRRQRNIAKVAMARRLGVRLYWMWRKGWEYADWVKFGSHAGQLGTGNGV

SEQ ID NO: 176824 - protein, 320 aa, unidentified
MAMRMQPLLIGVDVSKAKLDICEAQGQPLRQLCNERSAIRAWLKALPGPACIAVEATNTFHLLLLEEAHRLEHTLYVIDGYRLNRYRESIGGRAKTDASDARLLRRYLEREQAELRPWSPPPKGYVCIQRLLHRRAVLVKSKVALEQSLRELPELKRSAKVLMRQLTRLDTLIQQRLRQALEQQGWLAELKRCQAIEGVGPLTGAALVMAFNRGPFKSSDAFIAFLGLDVRVRDSGQCRKRRKLTKKGDPELRRLLHLAAMRACHTPAWEAFYQRYLDRGLTKIQALVILARKLARIAFALLKNQTTYRTNALRETCLTT

SEQ ID NO: 176825 - protein, 344 aa, unidentified
MNHYAGIDVSLECSSVCVVNASGKIMREAKVASEPEALVTWFSSLGLALERIGLEAGPLSQWLYAEMKKAGLAVELLETRHVRDAFKAMPVKTDRKDARGIAQLVRLGWFRPVHCKSMEAQETRAMLTSRKLVQSKLQDVENHLRGILRGFGLKVGKVSDRSFAPRVRELVDGHPSLQIIAEALLAVQAVLQREFKAFEKRVLAMARADERARLLMSVPGVGATVSLTYVSGIDDPARFKASKAVGAHFGITPRRYQTGETDVTGRISKIGDASVRTALYQAAHVILTTAVKGGALKSWAARIAKRAGMQKAKVALARKLAVILHRMLVDGKPFDFAAAAAARQ

SEQ ID NO: 176826 - protein, 355 aa, unidentified
MCAKKTGSIEDLAVVGIDIGKDTFHLVGFDRSGQLVIRKQIKRLALNATFEQLPRCIVGMEACLSAHFVSRTLRGMGFEPRIIPAIYVKPFNKGQKNDYNDAEAIAEAALRPNLRTVSEKDQDQLDLQALHRVRARLVSRRTATINQIRAFLIEQGITVRSGLRALKNSFETILEQRRDEISPRMRGILIGLYGDWLWLDKRIEDVSGEIEEISRTEENCANIMTIPGIGPMISTAMVAAVGKGEAFDRGRDFAAWVGLVPRQFSTGGRTILGRITKRGSRYLRMLFVQAAKVIMMRPHRWSDFSFGPWLTEAVARMPRNKAAIALANKLARTAWSLLRHGTRFDAPKDATMEVI

SEQ ID NO: 176827 - protein, 342 aa, unidentified
MEISTIGLDLAKTVFQVHAINDAGEVVVRKTLRRSQVLPFFTKLPPCLVGMEACGTSHHWARELLKLGHDVRLMPPAYVKPYVKRGKTDANDAEAICEAVTRPTMRFVPVKSPEQQAALALHRTRSLLVKQRTQLVNMIRSLLAEFGIAMPRGLNHALALAKQLSEGHTADVPELAGSLVTSLAHQIGAIHQELATLEKELLAWHRSNELSQRLATIPGVGLIAATALAASVSEPERFRSGRQFAASLGLTPLQKSSGGKERLGRISKMGDRYLRQLLVVGMTSLVRRARTAPASVDPRITAMLGRRPARVVTVAAANRTARVAWAIMTRGGTYRKPIAAAA

SEQ ID NO: 176828 - protein, 344 aa, unidentified
MDYFAGLDVSVKETRVCIVDDTGKIVREVKVASEPEALLAVLTNPAYHFKRIGLEAGPMSQWLFSALAEAGLPVICVETRHMRAALKAQINKTDRNDARGIAQMMRAGLYRPVHVKTLRSQKLRMLLTHRKLLQSKAIAIENDLRGTLRNFGLKVGMVGTAKFEARIKELVENLPDLAVLVEPMLIVRRVLREQIVILHRRLLAIVRDDEVCRRLMTVPGVGPVVSLTYRATVDVPARFHKSKSVGAVFGLTCTKYQSGEVDWSGRISRCGDEMMRVMLYEAAQAMLRSKKWSWLKAWAMQVARRRGMKRAIVALARRLAVIMHRMWVDGTEFCWTRQQAAAAA

SEQ ID NO: 176829 - protein, 424 aa, unidentified
MKVVFQTCCGVDVHKSFLVATIIKTTGGIEPSYQKKRFSTFNNSILEFKQWLLDNDCHDVCMESTGKYWVPVFNLLEDKINVTIANPKWVKAVKGNKDDTKDSKWIGDLFRLGLVKGSYVPCKAIRILREYTRYRYKLTSCRSSEKNRYQNALTVCNVALDSVVSDIFGKSSTSIIDYLLEQSGTSINHEEIASKLLKSLKSKEDAVIESIEGYQMTDAQKYRMRLVRAHMDYITAEIKDIDSEIEKMISSNPDYENAIQLLCTIPGVKRDSAITIISEIGTDMSQFCSSKRLCCWAGLTPGCNETGGKKKSVRIMRAGVYLKPALVQCAHAAVKSSKSPYYKKKYESLYKRRGKKRAIIAIARMILTAVYQMLSTGEAWNPSDLYKVDMPAPLVEKQKAKAIKQAIKLLQKEGLLPPDEPMAS

SEQ ID NO: 176830 - protein, 337 aa, unidentified
MSVYVGIDVHRKRSQVAVVTEDGKVQLNKNVVNGSEPMLRLIGDLPPGTPVAFEAAFGWGWLAGLLEDYGFEAHLVHPLRCKAIASARLKNDKVDAAILAQLLRADLLPEAWIAPLEVRQLRALLRHRASLVRLGTGLRNRIHAVAADHGYDRSASYWTGPGRGWLAELDLPAASREIVTDCLAVIDGLAPVIERIDGELHARAKADPRVKVLRTLPGVGEFTALMMLAEIGDITRFPSARKLASWAGLTPTVRGSDLKVRHGHISKQGSAWLRWVMNQAAQTAKRSPEFAATYAAIAKRRGKKIATIAIARKLLTRAWHLLAEMPATDATTPPRRP

SEQ ID NO: 176831 - protein, 383 aa, unidentified
MSDHSEAFVAFDTSKLRNAVAIADGGRGDEVRFLGEFDNTPAATAKLVRKLAAKYEKLTFCYEAGPTGYGLYRQIKGLRHECIVGAPSLIPKKAGDRVKTNRRDAISLAKLLRSGDLSAVWVPDRQHEAMRELTRARETAMNDLRAKRQQISAFLLRRGVHYPPDKKTWGKMHINWLMSQKFEFTEERIVFEELMEAMRQAQGRLDRLEAAIRAAMPDWSLCKLVIALMAMRGLDIVSAATIVAEVGDLSRFRTPRELMAYVGIVPSEDSTGDKVKRGPITKTGNRRVRRMLVECAWSYQFPPRLSKDKQVKVEAVPQAVREIAWKAQSRLNQRYRALLRRGKLKNIAITAVAREFVGFIWAVAQAVGAAPAAANTKAPAVAS

SEQ ID NO: 176832 - protein, 359 aa, unidentified
MNSVKYVGMDVDQATLVVVIEDSKGKFLMEAFVPCSSGDIREFFKTIKGTIHVAFEEGAQAAWLYDLIQPLVAKVVVCDPRQNKLIQSGKKSDRIDAGKLAKLLRLGELHEVYHGERTTRGLKELVRAYECLVEDTARTKNRLKGAFRGRGIRCRGKNVYHQAERKEWMGKVDIAAMGLRVMGLYEQLDFLSKLREEAKKAMLAEARKHSANKLLITVAGLGPVRSAQIIATVGTPHRFRTKRQFWPYCGLGVVSEASGEYEIVENKPRRRKKPAQTRGLNKNFNRRLKAVFKGAAKSAIVGEPFKQYHQRLVDNKIREELALLTVARKIAAITLAVWKKGEKFDSDRVNQAAQGTGNE

SEQ ID NO: 176833 - protein, 353 aa, unidentified
MAHPQPPRVTVGVDTHKDLHVAAARDQLGRRLATTQVEASGAGYAQLLGWARSLGQVQAWGVEGTSSYGAGLARFLAAHHQQVWEVNRPDRAARRHRGKSDPVDADAAARTVQAGEASGTPKAQDGRVEMLRALRVARHSAVKARTQTINAIKALLVTAPTELREQLATLPTTALIRQAATLEPGTLATPTAATMLAVGGLARRYQHLDAEIGLLTGKLDQLTAKTAPKLRALLGVGPDSAAALLICAGDNPSRLRSEAALAALCGSSPVEASSGKTRRHRLNRGGDRQANAALHRIVIVRLRWHQPTRDYLARRTTQGKTKKEIIRCLKRYVAREVFAALRQTDQHDLTAAA

SEQ ID NO: 176834 - protein, 427 aa, unidentified
MKYNQNFKIMQVTESTLVIGVDIAKKKHYARAFDWRGIELDKTISFKSTYQGFKNFEEWANEVAAKYCKDKVIVGLEPTGHYWFTFAQEILTQGYMVVQVNPYHVKRAKELDDNSPSKSDCKDPKTIAMLVKDGRYQIPYMPQGLFAELRKANNLREEWLVKSWTVKNKVQRWIDTYFPEFPDVFNSWEGKAALLTLSEMPLPGMITKLPAEDIVSIWRTVVKRAVGLKRAHKLKQAALYSVGIKEGTEMALYEIRLLMKEYQEIQSILDSIEVRLEEMVLTIPGAARLLEIKGIGIKTAAGFLAEIGDINRFNHAKQITKLAGLNLRENSSGDHKGMTTITKRGRSRLRAILFRAMLPLVAKNAEFNALHKYYTTRSENPLKKKQSLIALCGRFIRIAYTLITRNVEYDPAKVLGGLALSDTPIAA

SEQ ID NO: 176835 - protein, 327 aa, unidentified
MMFIGIDISKEKIDLSWLRDQLTNKIKTKVFKNKRQDFLAIEKWLLNTTKSAANELVITLEPTGVYHEALMYFLHEQGFNIILANPGKAKKYADALNIIHKTDKSDATMLAHYGCAKHAVVSYWQPDALEVRELKALIRRLDALESNRQREANRLEASEFSNVSARVCQSIKVTIAFLDDEIKQLKSDIDNHIDNEPDLKRNRKLLESIPGIGPVLSRELTYLFAAKKFNKAKEAAAYCGLIPRHNESGKLKGRTSISKLGPARIRCKLYMAAIVAGQWNKTIKRHKLTLINNGKTPMQAVCANMRKLIHICFGVIKNQEAFKLQES

SEQ ID NO: 176836 - protein, 338 aa, unidentified
MATYAGIDLHSNNIFLGIIGQDHKRLCNKRLPNKLSVIKKALQPFKKTLSGIAVESTFNWYWLVDGLQEAGYKMHLANPSAIKQYEGIKHRDDKSDALWLAQMLMLGILPEGYIYPKDQRPTRDLLRRRLLYVQQRTAHILSLKSMVTRNNGNTISTRTIKKLKPQEAHTLFDQEHLCLACSHALATIHFLSSQIKSIEKEVMKHAKIKPEFNSLLTMPGIGNILGLTIMLEVGDIHRFPRAGNYASYCRCVKSERRSNEKKKGAGNRKNGNKYLAWAYVEAAHFAIRFQPKARRFYNRKASRTNNTVARKALANKMARASYYIMRDQVAYDESKMFP

SEQ ID NO: 176837 - protein, 359 aa, unidentified
MQTQDTKLDFKNQDVYVGIDVGKKGWAIRILVGEHIFKPFTQPPQPAILAHYLRRNFPGARYHAVYEAGYFGFWIYQALKKEGIDCIVVSPADVPTTHKDKRRKTNPRDAWRMARGLRSGELEPIYVPSQECLEDRTLVRTRLWYVRKQTRCKNQIKAILQFYGLKPEESTIETHWSRRYIQWIEHIQMGYPSGDKALSHLIDELLYLRKKITELTKQIRELSRTDRYRERTQCLCTVPGVGLLSAMVILTELIDIHRFHTEDQLASFVGLVPDERSTGEDETIIGITRRHNAILRTILVEAAWIAIRTDPALMMAFSGYTHRMKKNLAIIRIARKLLNRVRFVLKNQQPYQIRLVKAA

SEQ ID NO: 176838 - protein, 338 aa, unidentified
MVLIGIDPHKATHTALAVDNEETALGELTVKADRHQVERLLKWAIDFPERRWAIESANGLGFLLAQQLVAAGEDVVDVPPTLAARVRVLGSGKTQKNDANDALSTAIAALRAKRLRSVVAENHGGVLRLLADHHHDLGSLRTQAVCRLHALVRCLIPGGTQLRLSAARAAVVLRSVRPTNVVDVERKRMALGFVADIRRLDAEIAASKARIVTAVAASGTSVTELYGVGPVVAAFLIGHSGDMARFANRDHYASYNATAPIEASSGPRVRHRLNPRGNRRLNHAIHVIAICQIRHPGEGRQYFDRKVAEGKTTKEALRALKRQISNAVYRQLVIDSTR

SEQ ID NO: 176839 - protein, 336 aa, unidentified
MNIASIDQIKTCVGIGIDVSKSSLSFAAITKSETYFSSFDNTLEAIDLMAKKLLKANYQGKIICESTGHYHLKLVSVLSKYPLNLVVLNPLMSSKHSKANIRKVKSDPADAETLATMCVTEKNLPKPTQLDDANILIRLKTGQLASLEKFIQRLQSSVNAYRETYESLRFEQSEIQLDLAKNLKELKSIKKRMIRELETQISKLSSDDKVISEIQAIPGVSEITAALISQFDTNVKNANSWIAYTGYDVSVRQSGTWKGRGKLTKRGNSYLRKRIFNAAWGAMMHDDNFKAYYEELRRGGRSYIAALCILAKKILRIAYQIMVNHKKYDPNIAFPA

SEQ ID NO: 176840 - protein, 320 aa, unidentified
MDIVGIDISKAKFDAALSLGERVRHAVFSNTEAGFGQFLAWLAKYRPDPAVPLHACMEATGNWGLELADFLHAQGVRVSIVNPARIKAYAQSELARNKTDKLDASLIARFCRAHVPPAWVPAAAHLRELRELVRRCDALKSARVQELNRQKSGFASSAVARSIAAHLDWLDRQIETVMSEVRHLIAADPALSRNLALVRSITGFGEVSATIVLAELPNIADFTPKALAAFVGLSPSEHSSGTSVRRPGRVSRIGTERLRSTLYMCALSAKRSNKPLAAFVARMTAAGKPPKIILIAVARKLLVYAPAILNGPGLVDSLFA

SEQ ID NO: 176841 - protein, 339 aa, unidentified
MRLYAAFDLHSSNSYLGISDEKGKRIFKKKLPNDPATIKETLKPFKADIEGIVVESTYNWYFLVDLLREEGYRVHLANVMKTQQYSGLKYSDDKNDAFWLVEMLRLGILPEGYIYPKEERPVRDLLRKRGHLVRLRTSLIVSLQNIIARNLGSRLKSNDVKILTTDRVTPLFQGNEDLALAGKVSKEAIDFMTRQIKAIETTIGGRIHLSNPYDRLLSMPGVGKILAFTIQLETGSIDRFQKVGNYVSYCRKVPSGRFSNDKKKGTGNRKNGNKYLAWAFSEASDHARLFDAESRKYYQRKLQKTNAPIAHNALAHKLARAAYYIMRDGVIFMPDKAFS

SEQ ID NO: 176842 - protein, 453 aa, unidentified
MPHRRQSSSLVPIHPNAAGIDIGSQAHWVCVPPECDSDNIRSFETFTTDLYALAEWLAACGVETVAMESTGVYWIPSFQILETRGFEVKLVNAQHVKTLPGRKSDVLDCQWLQQLHSYGLLAGSFRPTDQVCVLRSYIRHRDSLIKSACVHMQRMQKALTQMNVQLHQVVSDLSGTTGMAIIRAIVAGERSPEILAALRHHRSRRTEAEIAQALQGDYRPEHVFVLQQELELYDIYQAQIAACDQQIEQCLTQFDAKVDLSEQPLSPPKYKRHKPQDNQPAFDLRTHLYRMSGVDFTQIDGMGVLTVQTVLSEVGLDSSRFPTVKHFTSWLGLCPGSRITGGKAKSSATRRVVNRAANAFRMAAQAAGKSHSALGAFYRRLRTRLGAPKAITATAHKIARLFYHLWATGQSYVDPGEHYYEQRYRERSLKHLQKRAQALGMEIIAKPSGEVIS

SEQ ID NO: 176843 - protein, 413 aa, unidentified
MKYYTSTTQYNCGIDLHARQMYVCVMDREGKKLVHCNVKDNDFKFFLKLVEPYKHDLTVCCECMFGWYWLADACQAAGLKFVLAHALYVKAIHGGKNKNDRVDSEKLTHLLRSNLIPPSYVYPTQQRPLRALLRQRIYYVWRRAELLARIYSHQLAHNRTPAKQTRRTRDAWEERLLAAENHPQRQFALRNDLAMIRSFDRQISVIEVELQHLTKHLPLSRDYTLLQSVPGIGESLGLTILYEVGDINRFPTVKDFVSYCRLVKGTVASAGKIKGLRGAKLGNPYLRWAFGEAAVIAKRDHYLVGPLSQRLEVQMGGNKFKANTVVAIKLARAVYFMLKNQTVFDPERLVGSLQKCFRPGRSQPAGLTGGAKKAMPSSVAESVSCASSTPPCVGQASTPAPSIGSCGQVPVAN

SEQ ID NO: 176844 - protein, 368 aa, unidentified
MGKFITYVGLDVHKKTIAVAFADEGDSEVRPYGVIDSGLSSLDKIVRKLVSRGGEPRFVYEAGPCGYGIYRHLKQQNIKCMVAAPSLIPKKSGDRIKNDRRDAKKLARLYRSGELTAVHVPNSEDEAMRDLTRAREDSKTAERKARQQLNAFLLRHGLIYSGKSHWSLAHWRWISDIKMEHEAQQFTLQEYVDTVRSCSERVERVTEKVRILTGQWRFGPAVEALQTLKGVCLVVAATVIAEIGDLSRFDNPRDLMAFLGLIPAQHSTGDKIKLGRITKTGNGHARRMLIQAAWSYRLPARVSRRLRDRQENLPEKIWKIAWKAQVRLCARYRQLIARGKPTQVTTTAIARELAAFMWAIFRTVEVGA

SEQ ID NO: 176845 - protein, 339 aa, unidentified
MKRRKLKPELDDSISMFIGLDAHKNYLQSTIVDYDGVVMSQERIERSREAVEEFSNRLPKARIVIESSSAWRDVYEVLSKRHEVVLSNPVKTKAIASAKVETDKVDSLTLAQLLRVGLIPESYIPPKSVIELRDLVRYRASLVRIRATVKNKIHAYLLMNGLTIEGTPFSKPYMEKLWKIENYRIQGYLRIIETLNLEIHEASKIISTEAINNPEAKLLMNIPGISFYSALLIASEIDDITRFPDSAHLVSYAGLTPSTYSSGSVTYHGRITKAGSSYLRWGLNQCTRAHMRAEPEGDISRFYKRLARKKGDAKAIVAASSKLLKVVYWVLREKRAYRS

SEQ ID NO: 176846 - protein, 346 aa, unidentified
MKITTIGIDLAKNVFQLHGVDGHGKTALKKQLRREQMATFFANLPPCLIGMEACGGAHYWARLLQELGHTIRLMAPQFVKPYVKTNKNDAADAAAICEAVTRPDMRFVPVKTVEQQAILSVHRARAGFVKARTATANEIRGLLAEFGIVIPQGIHTICRRIPEILENGESELTHTFKQLLRTLLNHLKELDLQVEALEQDIQCWHRNSAASIRLAKIPGVGPLTASAVVATVGDAKNFSNGRQFAAWLGLVPRQHSSGGKSTLLGISKRGDSYLRTLMVHGARAVLRFATGKTDRTSTWLNGVMVRRHTNVAAVALANKNARIIWALLAHGCEFRSDAPPPAITGA

SEQ ID NO: 176847 - protein, 386 aa, unidentified
MQTPNDLSQSRIVLKQDSTLIAVIEMSLSSWLVAGIVPGVERQPLKKLGIDESALLKLLHRWREEAEKAGRKIERIAVAFEAGRDGFWLARWLRARGIEAHVIHASSVAVSREHRRAKTDRLDTELLKRAFLGWLRGERDHCKMVAIPTMEDEDAKRPNRERESLVVEQTRIVNRMRAALSRLGIRGFNPKMKKAAERLEYLRTPEDAPIPPNTLAELRRDMERRRLVSNQIRQIENARLERIEHAPSDGPHAMVRLLARVIGVGIETADMLVQEVLSRNMRDRRAVARYAGLTGSPDESGTRRREKGLARSGNARVRRGMIQLAWRFLMFQKDSALAQWFRARTENARGTRKTMIVALARKLLIALWRLVREGVVPDGIVLRPAQ

SEQ ID NO: 176848 - protein, 347 aa, unidentified
MIIIGCDLHTRSEQIAMLNTETGELEERRLEHEDGEARRFYAGLKEPALVGIESTGYTRWFTEMLAELGHELVVGEAGKIRAKETRKQKHDRRDAEHILNLLLRGDFPKIWLPSAEERDVRVLLEHRHQLVELRTRAQNGLQAIALSYGLRRRRRLWSERGQEELKKLPLREGMERRRADLLRLVRQLDTWVQELDRRIEQEAAQREEAQRLMTHPGVGPQTALATVLVLGPVERFPDDRHLTSYLGLIPQEDSSAGRQRFGHLTKQGNRLLRWLLVEAAQTASRYDPRLARAYRRLTFRKGRAIAKVAIARKLAIRLYIMLRDKIDYAEFCRRGSHAGMLEDVALV

SEQ ID NO: 176849 - protein, 427 aa, unidentified
MGYRIAGVDVHKKMLAVVMADVEVEGEWRFERRQFGTSPSQLRVLADWLVDQDVEEVVMESTAQYWRPVWEALERQWQAPQRSRTTAGPSSGALHLAQAQSNNGPRGRKKDFPDAERLVKRLVAQELPLSVVPDVTQRLWRTVTRRKYQLTCNRVQLRNRLECLLEEAHIKVSSLVSDLLGLSGRRMLRAVASGETDPATVAALGSPRLHATPEQLRDALGACTDLDPVYRRLLAMTLDELEVMDTHVRQLDEELARLLRVHQDAVERLATVPGLGVDSAQQIIAAVGPTAATFSTAKRLASWVGACPGYDESAGINHSHRSPNGNRQMRRLLNQAAHAAVKTKGSIFELVYRRMVVRLGHAQAIGAIAHRLCRLVWKLLHDRVAYEERGPAVTTARAQRRAAKMIRELRGLGYRIESVSSPASPLA

SEQ ID NO: 176850 - protein, 429 aa, unidentified
MPTKKGKRMKSWQQITHYAGFDWARDHHDVVILDQQAHIVADFQFEHTQAGWQLFREKTAPFPHLAVAIETSRGPAVDQLLQADYTVYPVNPVAAKSYRQRKAPSGTKTDQLDAWSLAEALRTEGQAWRALAPTDELSLQLRLLCQDEVVLIAQRTQLVNQLQQALVDYFPIALEAYQDWTSPACWDFIIEFPTPQALVGAGKRRWEKFLHTHRLWRPLTVAKRLELFARADQFQGSPAAIQAKSQLATSLCKLLRTLHQQLDEYRQKIEKLFADHPDHALFGSLPGAKKVLAPRLLAAIGGDPDRYGGSVTVLQAFAGTAPISYQSGKRQCVRIRWACDKFMRHTIHLWADCFRRAVPWAKVYYQNKRQSGMNHACAIRCLGQRLLKILFRMLTDKKPYDANLHARNQQKHGSWVLKLVPEASAKAGE

SEQ ID NO: 176851 - protein, 296 aa, unidentified
MEKTGQWVGIDISKANLDVYLRPLGKTFQVANKETAISGLIEELQTYSLNLIVLEATGGLEAELLIQLQAAQLPVALINPRQGRDFAKATGKLAKTDAIDAQVLAHFGEALKPQVVAMESDLARQLKELISRRRQVVEIQTAEKNRRDRSRGKALTDIEQHLEYLEQSLKKLNQEIEELTQSNQEWIDKVNLLKTIPGIGQVISTTLVSYLPELGQLTAKQISRLVGVAPINHDSGQHKGKRMINGGRAPVRASLYMGAVLAIRHNPIIKDFYERLLSRGKPKKLAITACVRKMLV

SEQ ID NO: 176852 - protein, 410 aa, unidentified
MSLVGALFFVGVDWAAKTHAVCVLDPAGRPVAAFPVAHTAAGFTGLIRRLAKLGTPGDVPVAIERPDGRLVDALLAAGHPVVPVKPNAIKTWREGEVISGAKSDPGDAHVIAEYLRLRAHRLRAATPLTEHTTALRIVSRTRSELVEARVAATNQLSALLDTHWPGAKEVFADVESPISLAFLTRYPAPAHAAALGEKRMAAFLTKHGYSGRRSATELLTRLRTAPAGTTSAVIAEALRDAVLAMVAVLTTLNTAIKDLDRSAAAHLYEHPDGEIFTSLPRAGLVNAAQIRAELAEHSAYTGPEAIAALAGLVPVTRASGKHHAVSFRWACNKRLRVAITTFADNSRHASPWAAGIYQRARASGKDHPHAVRILARSWVRVIWRCWIDQQPYDPTRHGGAAQLLDHTTAA

SEQ ID NO: 176853 - protein, 414 aa, unidentified
MNHPKMQYTYVGIDSHKDSHTAVLIDCFFEKLGEITFENLPSKFGAFLVKAEKLKVGGTTLLFGLEDVSMYGRLLAVFFRDNKQKMKHVNSLLVAKERKNQNVTQKTDSIDAECAARVLLSKFSNLPDALPDDKYWILQSLVTRREFIVKNNTSLKNHLHSLIIQHYPNYRHWFPNIDSLASLAFLMRYPSPSTLAGVTHDSLAEFIGKASGYRVGSGVTATVRAQKILDTLQDTTVPFQELRDRSVQSTLRQIDVYTQEIKQLEQDIANFMENFTCTLTSMSGIDNISAAQLLTHIGDIRRFSTPAKLARYAGIAPITYASGQSDTQHADRRGNRALNSIIYLLAVRLISSAANKIVNPLIHGYYHKKLSEGKTKRQGLKCVQRRLVNIIWRMLMHNEVYQNPPMVDKVVTDI

SEQ ID NO: 176854 - protein, 456 aa, unidentified
MKRKTPSRRKRDFAPVHPHAAAVDIGATLHVAAVSPQCDPEPVRTFGTFTGDLHRLADWFEQCGVKTVAIESTGVYWIALYEILDQRGFEVVVVNAREAKQVPGRKSDVSDAQWLQRLHEYGLVRASFRPKGEIATLRNYLRQRERLLEDAAAHIQRMQKALTEMNVQLHHVVTDVSGVTGLRIIRAIVAGERDPDTLAAYRNPCCKASAATIRAALVGNYREEHVFALSQALELYEVYQAKVAACDARIEAVLERLKAASPPATAPLPPPRSTQRQANGPAFPAREALHAILGVDLTQIHGLGPYLALKLVGECGTDLTAWPSAKHFTSWLSLAPHNKITGGKVLSSRTQRSANRAGALLRLAAASVGRTQTALGAFYRRLAARVGKVKAVTATARKIAILFYKMLRYGMDYADPGASSYEERYRQRVLSNLRRRAKSLGYVLQEANITPSPAVS

SEQ ID NO: 176855 - protein, 412 aa, unidentified
MDSIVAYIGLDWADERHSVHLQTVDGTIEHLELEQKPAVLHEWVAQLRRRFGDGKMAVALEQRKGAVIHALLMYDCFVLYPINPKALARYREAFRTSGAKDDPLDSELLLDLVVRHREKLRAWVPDTVESRKLQALCEQRRKLVNQRVALTNRLTSLLKQYFPQALEWVGDVASVQACDFLTQWPTLAAVQRARPTTIRQFYRAHNCRKADVIAARLAAIASARPLTTDGAVVEPLSLSVQTYATQLHALIVAIQTFDERIAEVFAAHADHDIFTSFPGAGDVCAPRLAAAFGTDRSRWDSATELQAHSGIAPVTERSGKTLWVHHRLACPKFVKQTFHEFADQSIRFSRWARAYYDQQRARGNDHHAALRALAYKWIRILFRCWKERRPYDEDTYVDALRRRGSPLAKHFA

SEQ ID NO: 176856 - protein, 343 aa, unidentified
MQSISTIGLDIAKSVFQVHGVDAAGQVVIRRQLRRRQVLAFFQKLPPCLIGIEACASSHHWSRELQALGHTVRLMPPAYVKPYVKRQKNDTTDAEAICEAVTRPNMRFVPTKTVEQQSCLMLHRARHLFIRQQTAVINSIRAYLAEFGIVAPVGRRGVEQLLEIVADKADHRLPEVARACLTALGSQLRALKTQILEFDRRIIAWHRSSVTSKRLDAIPGVGPALATALVASVADAKAFRSGRDFSAWVGLVPRQNSSGGKDRLGSISKQGDRYLRSLFTAGARAVIRYAKIHGTGHRPWLTGLLARRPTKVAAIALANKIARMAWAMMARGERYKEPTALAA

SEQ ID NO: 176857 - protein, 399 aa, unidentified
MDKTLAPLGVDVAKRTLDMRLLLGEAEPFGTVDNTPTGWQQLQQWLVAHGHPRVHACLEATGTYSDGIATFLQAQGHQVSVVDPLRVGAFRHSEGIRTKTDRQDALVLARLCQQKRPPLWQPPTAELANLRAVLMRIEDVQTDRQRESNRLENSRWDAASRQQILAHLQQLDGWLTDLRKRAEAVVKQSPALQAEREVLRSVPGIGLLTATRLLSVQVSRFAGADQLVAYTGIATSETRSGTSVHGKPKMSRKGDPRLRKWLYLCALTAMTRDPDFKQWAAELKARGKCHRVIRIAVCRKLLHVIFGVVHSGQPYDPRNGRGVVGKNFCLQVMSGVQIFVEDEINPFIGTGVNPAAIDDFQGDNFDHAGLGFFGGGYLYPSISGGRPIQVRAVPPGTPR

SEQ ID NO: 176858 - protein, 363 aa, unidentified
MHYVGLDVHARRSSLCILDSCGKVVKRLEVKGSWPKLMERVAAEVPRPFAVCFEASCGYGHLHERLSALAERVAVAHPGKLRLIFRAKRKNDRVDAEKQAKLLYLDQVPLVHVPGADVRAWRGLIELRRKLVGRRTAVKSQLRALLRGAGCCDAPAGKALWSKRGLKWLAAAALGEADALRRDLLLEELAQADERVGRVTRELDRRADAHPGVALLRTIPGVGPRTAEAFVAYVDDVRRFARTRQVGCYLGLVPCQDSSAGRDRLGHITGDGPPTARMLLCEAAWQAVRRSPSVKAFFERVMHGEPGRKKIALVAVAHKLARSMAAMLRAGEAWREEVQEQGRGQGQDRGQGQDRGQGQEPGA

SEQ ID NO: 176859 - protein, 380 aa, unidentified
MASMHDSSRSKTTVYAAIELSKKSWVVAIARPDRDRPSIHRIAGGNLADLIGRLRKAAGEKQRIVVCYEAGYDGFWLARSLAKIGIDCRVLDPASIQVNRRARRVKTDRIDSLALLRALIAIDRGERHVCAVVRVPTVEEEDARRSHRERQRLVRERTGHINRIKGLLFAQGIRGIEPKRRRTRIDFGKLATAEGMPLAERLRRELEREYQRLELIETQIRIVEKERDTADAQDPAVEQKRELLCALQGVGGASAAILAREVFARQFASRRQLGSYLGLTPSAYDSGSTTRCQGISKAGNSWARRVLIEVAWLWRKYQPDSPLSHWYAQKTAHQSPRIRRIMLIALARKLAISLWRYVETGLIPDGAVMAKTTPHMAAAT

SEQ ID NO: 176860 - protein, 354 aa, unidentified
MSQTPNTAIAVIGIDLGKNSFHVVGHDARGAIVLRQKWSRGQVEARLANIPPCLIGMEACVGAHHLSRKLASLGHDARLMPAKYVRPYSKGQKNDFNDAEAIAEAVQRPTMKFVATKTAEQLDLQALHRVRERLVSQRTGIINQIRAFMLERGIAVRQGIGFLRTELPTILATRTDALSPRMLRVIEELAGDWRRLDQRIDGLSGEIEALARQDQACARLMTVPGIGPIISSAMVAAIGTGDVFSKGRDFGAWLGLVPKQISTGDRTILGKISRRGNRYLRVLFVQAAWVVLVRIKNWERYGLKSWIEAAKRRLHHNVLAIALANKLARIAWAVLAKGRAFELTRTDDAGVRPA

SEQ ID NO: 176861 - protein, 412 aa, unidentified
MDAILECCCGIDLHKDSIVACILSGATDEVPSVIMREFGTQYDAITELAQWLSGHGCKDIAMESTGSYWMPLYNRLSELGANCTVVNAQRVKNVPGRKTDWNDARWIGYLFRHGLLAASYVPEREQQILRSHTRALESLTQDRTREKNRIEKLLQAEGFKLSSVLEDIFGLTGRKLLQVLYTKGCVSLSDVQKHRSIRCKCTAQEIASAMKGTLPAPLRKLLQFNMRQIEEYDRQIKELECLIHEIIAPFLQAVNLIGSIPGIAQQSAIQIIAEIGSDMDTFQSAEKIAAWAGLSPRNAQSAGKKSPHASCQAISTSSASSTNVPGAVPVPKTPLTYEVGSGLSSGAPASKRLSSLSPESSSFPSGPCSSPVSFITLTTAVRNSLNPATFSLFLSLLCATAFFSTLVPRLFS

SEQ ID NO: 176862 - protein, 487 aa, unidentified
MHPRTTNKSTQTSDVRRFSFEPAGALALDNEYSGFAVLPAHYIAFAERKRARPWRSIYHFGSYDVKPLATHQFTAYVGIDWADTKHDVCLQAPGNESREFDCIAHRVADIDQWAQSLRQRFGSPIAVALELAKGPIVYALQKYDFFVLFPINPSTLAKYREAFKPSRAKDDPTDAELALDLLMRHPQRFAALRPQSQDMRTLLSLTEHRRELVADKTRFTNRLTNTLKQYYPQALDWFDQRDTVLFCDFLTRWPTLTQVKRARPASLNAFFYAHNGRRAHVISARVDAIKAATPLTQDMGVIAPCRLQVLVLVEQLRTTLQAIDRFDREIAELAPRLPDYSLFQDLPGAGPHLAPRLLAAFGEDRRRFQHADELQKYAGIAPVTERSGKKCWVHWRWQCPTFVRQTFVEWAGQTINKSFWAGAYYRQQRDKGSSYQAAVRSLAFKWIRILYRCWQTNTPYDESRYLNALRKRGSPLLKNLESNAQNA

SEQ ID NO: 176863 - protein, 338 aa, unidentified
MHNYIGVDAHSKSCMFVVIDGRGREKLARRIKTSESEILKVVRSIQGKKYLTFEESHLSKWLHVLLKDEVDKLVVCDPRYITRRRGTKDDYPDTVHLAQQLRGNFLVSVFHEDNFFSSLRGEVSAYDDLVRELTRAKNRYKALFRSEARDTEGSSIYHDQARIAELTRESDQFVAKGLFEQVAMYEGLRAQYRKRFEAFGQRYPEIRALSTIPGISSVRACFIGAIICSPFRFADKYKFWAYCRLVKYTDKSDDVVYGKRNTPGNRLLNSIFMGAAQTILQKSLDLRVYYDEQRKNDVDHKAAKKNLARKIAAIALAIMRTKKPYNLSLAIEGKTKSA

SEQ ID NO: 176864 - protein, 405 aa, unidentified
MIYIGIDWREAKHDVVFLNEAGEQVAKLTMSHTPDGLQTLEKTRQYAGLEPEECWVALETAHNLVIDYLWNRGYRRVYVIPPSVIKSCRGRYGQSGARTDVGDGRLIADVLRTDRARLQRWRPDGALTQQLKAKVSFIRYLSQNKVRLSNRLRAVLLRYYPAAVEVFSSLETQTALHFLQTYNTPQAAVDLSWAEFEAFAHQHGYRRQDKLTEAFARLHQLQPKALPETVLAYQDEVPLLAHLLHKVLQARTQSLKDLTALFDQHPDHPIFASLPGVGQLLGPALLVKFGDDRQRFSTPQSLQALAGTCPVTAQSGKRKLVKFRHACDRTFRHYVQQWSRLSLAKSVWANAYWQRVRPHCRSDNHALRCLGNRWLAIAWKLWQTNQTYDETYHLQQRVLRAKPRA

SEQ ID NO: 176865 - protein, 341 aa, unidentified
MRLRKVTSAETKGKSLVLEDFDHYVALDWSQEIMAIAHVRRRDKEPVVFERASELKLLKQYLQTLQGTIVLTFEETTTAQWLYLELRGEVDRIVICNPYMNRLLSAGPKTDKIDAAKLCLLLRAGLLTEVFHSDNSLYELRLLVSAYRDLVQAGVRILNQRSALLRGHGDSGTHAPFILEHLDKSLELYRHAKQQYEAKFEEFCRHSKQLKLLLPVSGIGTIGAVTILATVVDARRFPRTGKYLSYCGLVKLEHSSGGRSYGRRKPQYSRSLKAVYKVAALAAIRGNNPIREYYDALLARGLAKHHARHQIARYIATVTYGILKTGTTYIPYQWRTYTKVA

SEQ ID NO: 176866 - protein, 458 aa, unidentified
MTPRKDNFPEPNRRRRARLEVKNPDAAGIDVGAEAHWVCVPADRQANPVARFGTCTADLEAIASWLQQCGVTTVAMESTGVYWVPLYELLERRGFEVLLVDARQVARAPGRPKTDVKDCQWIQRLHSYGLLSAAFRPQDQVVVLRAYLRQRDMLVTGASQHIQHMQKALEQMNVKLTEVVSDITGVTGMAILKAILRGERAPEELARLRDPRCKESAATIARALQGNWRPEHLFALQQAVALYEFYHSQITACDQAIEAHLRTFADQSGGQPLPQRRQRRRREPNEPRFDARGRLYCLCGVDLTAIEGIEETTALVLLSEIGTDMSRWPSVKHFCSWLGLCPQHKISGGKILSRRIRRGASRAKRALRLGARSLHHSKSALGAFFRRIKARYGSAAAITAAAHKLARLVYSLLKHGTAYVAQEMSEYEAKYRERKLQAVARQARELGFQLVAAPAAGG

SEQ ID NO: 176867 - protein, 354 aa, unidentified
MVVLGVDPHKDSHTVVAVDQTGRQLAQLTVSARTDGQLQLLEWARQVGVPDGAERRWAVEDGRHVAGRLVAQLLRAGEAVVWVPPKLMAKARASARTRGKSDPIDALAVARAALREPQLVPAQLQGEALAVRLVLDHREDLVAERTQMLNRLRWHLHDLDPELAPPLGTLTRLWVLDRLAGQLQELVGVRAEIAAELVARIRELTERINQLQAELDRRVKPLAGQLRQVVGVGALSAAKLIGETGGVGRFRGSAQFAMHAGVAPIPVWSGNTSRHRLNRGGNRQLNAAIHRVAVTQLRAYRPAQALMTRRIAAGNSKPEALRVLKRHLADVLYAAMCSDDQAVSTAMAGQPAAA

SEQ ID NO: 176868 - protein, 366 aa, unidentified
MGKHSEVFVAFDVAKKKHAVAIAEGGRAGEVRFLGDVDNSPLPIERTIKRLADRYDRLHVCFEAGPTGYGLYRQVQALGHECIVVAPALIPKRAGERIKTNRRDAVTLARLHRAGELTSVWAPGPAHEAVRDLARAREAAADDLRRKRQQLLSFLLRHSRIYSGGGHWTLAHRRWLAGQKFDHAAQQIVGIDAIEDALQRLRRLEKQLALIVPEWSMAPVVEAYQAMRGASFLVAVTFAAEIGDVRRFDTPRQLMSFLGLVPAESSTGDTVRRKGLTLAGNRRARRVLVEAAWTYRYPARVSETLRVRLEGLPKPVRDIAWKAQVRLCARYRRLSATGKKLPIVVAAIAREMAAFLWAIGREVAAV

SEQ ID NO: 176869 - protein, 337 aa, unidentified
MDTSKHFFQLHGVDAAEKVVLRKKLRRKEVVAFFKALAPTVIGIEACGASHHWVRLLRSFGHEVKLIAPQLVKPYVKRGKNDAADAEALCEAMSRPTMRFVPVKSTEEQAALMLVGVRDRLIRNRTQLSNAIRGYAAEFGLTAAKGIAHLTPLFERVQVDESVPALARELFAAQAEEYAELQAKINDVEAKLKAWHKADECSQRLAKIPGVGPVGAALLKMKTPAPQLFKSGRLFAAWIGLTPKDHSTGGKVRLGVITRAGDETLRSVLVAGATAVIQQVQRSGRGSPWLVELLKRKPPKLAAVALANKIARIAWKLMVTGKSYNPKLAPAAQAVTG

SEQ ID NO: 176870 - protein, 428 aa, unidentified
MADVANATPTYNLVAIDIARYWNAVLIETPAGRQHRFRMANTAADIDRLLKFLHGLQGACRVALEPTGDYHRSIAYRLLVEAFEVVGINSVAQARYREAMFNSWDKNDPKDATVILEMLRRGAFQRYVDPMLAGSHDLQELAKTYYQVSRARTKVQHSLINHGLPLYFPEMHRYWATTRNEWFVRFLLQFPTPAHVRLLTRDQFVEAAWDVVGRKVDNRAKLEEMCEMAGVTAALPHAPDSLAVETFRVTLRRYQDLNTLRAELEGRAEQALASEPDFVHLKTLPGIGSVLAMTILAEGGNLRRFGHHRQFLKYCGFDLAKTQSGTQRGREQLSKRGNARLRLAFWLAAVAAVHMRENSFRAKYERYIRAAPDDADLRRKALTAVAAKMARVAYSMIKRNQPYRQFFEQSLPSGSIPLSVAVGALATP

SEQ ID NO: 176871 - protein, 420 aa, unidentified
MAYAVAGRAAGLFKRRHRPLGHRFRWLGGWILLVLPERTQVAWMSLVMGIDQHRAQITAEWLDTETGEVSRARVRPADRAGVRRFLARFAGQQLEVALEATTGWRFLVEELRAVGAVVHLAEPAETAALRGNKRRAKSDRADARHHRELLLAERLPESWIPPDHILDVRARVRLRHTLIEQHSEWQQRIQAVLYHHGCRQRRRLMAGDGREWLASQALSETAREQITVAMAIIDALDVQLAPLTKELCAWARRQAGCKALIDAYYGIGELCAVTVIAELGDCRRFQNSRDAVRYSGLDVTVYQSDRHRAPGHLSRQGPPALRWALYEAAQVARRPGSPDRGYYEQAAERLGGNRACLALARKLLKRCYHTLRELGDDALTPPVERPQPGPGSAAARRASSGSPRSLEPTTTNQRADVLAA

SEQ ID NO: 176872 - protein, 461 aa, unidentified
MTPEGPCLEGTSMPQPILAVGVDPAKRLHRAVAVLFPDEVVLDVELPNAFDAVANLDLRLCELANQHGADLVYGLEDHRHYGRLFCQVLTERGRDVRVVNPLWTNRQRAFYGQDKDDAIDGRSIAAVVLRRHLQLPLASDFGEVAQAIREAERSLQDLSKVRTQLGNRLHLQLSDTYTAAYEEYFGKLKSPLALRFFRRFPLPQDLVGHNVEMLASLLLDLAGGKVGPHKGGNRLIAMRSKAQAILETSGAMRASPRTLALELKAELIRQLCDELLANHDRIIRLERMLREQLLPATKQTITTITGISTILAATIIGETGSITRFRSPAAFAVYNGTAPARNSTGGRDRHKARRDCNHRLKRAFYLAARAAVLHDPIAKAYHQSCKSRGLSYVEALKRVARRMSDVVYALLKSGKAYDRSIIEHAIERRREQAAHAARSHAKQSLVHSRPRKSNSPLSQRK

SEQ ID NO: 176873 - protein, 346 aa, unidentified
MTTVSRIGLDTAKNVLQVHAVEAAGQVVTSRRLRRGQVLGWFARLDRAADCVVGLEATGGSHYWARELEKLGYRVRILSPQAVKPYRQGQKNDARDAAAICEAVVRASVAEAPIKSAEQQALLAQQSCRRRLINQRTQLGNQLRGLLGEFGVVVGRGLGRLRRRLPALAEDAGNGLPDGLRRVLAEGYEELVELDERIRAWDRRFAAQARADERCRRLMQQAGIGPLTALRLVAVCGDGAAWRNGRAFGVHVGVTPRQHSSGEQVRLGPITRRGDSELRTLLIHGARAAMRHLDDTTPLGRWVNALQRRRHPNVAAVALAHKNARIAWALLAHGTDYRPATDRAMA

SEQ ID NO: 176874 - protein, 373 aa, unidentified
MNYSTVYVGMDVHKESFSLCCYTNEKEKDEYPQKVNAHYSKVINYIEAMRFHYGDDATFICGYEAGCLGFTLYHQLKDHGIKCIILAPTTMPKPQGKKKVKTDKRDAALIARCLAHHDFSAVHIPTAKDEQIKEYIRMRNDHKSDLKKTKQRILSFCLRHGYRYEYGTNYWTQKHVSWLRSLKPDGLYQETLEEYLLTYDNLTNKIERLDKRIEELASDEDYKDKVHNLTCFLGIKTHTALSVVAETGDFKRFASAQQYASYLGLTPGEDSSGDGQKRLGITKAGNSHLRTLLIEASQSFSRGKAGYKSKTLKARQQGCPPAVIAYADKANERLRRRYYKLTLSKGKKMNVAKTAIARELACYIWGMMTENIA

SEQ ID NO: 176875 - protein, 466 aa, unidentified
MAHKRKNVKSKERKRMPRSLKTIQPNAAGIDLGSREHWVAGPPREDGAPNVQRFGTTTPELFRLADWLKDQGVETVAMESTGVYWVPLYEILDGRGFEVVLANARQISNVPGRKTDMIDCQWVQLLHACGLLRGSFRPSDDICQLRALIRERNTMVEQRSDWVRRMQKCLDQMNVCVHQAVSDITGVTGMAIIRAIMDGERDPHALARLRDRRCRKSEEQIAEQLTGNWRAEHLFNLRQALKMYDQLCAVIADYESQILSYITTLQPADTCDASAPPPASKSKAKNLIKRGQEPMRQGLYRLSGVDLTTIDGIGVDTAAVIISELGMDFTVFPKENHFVSYLRLAPNLSISAGKKVPKKFKASTCTRVATALRMAALTLRNSKTALGGFYRRVAWRKGASVAVFATARKLAQLIYRLVRYGQAYVDTGVEAYEARFNQRRLKSYTKALNSMGYTVEPLKTKEATLT

SEQ ID NO: 176876 - protein, 309 aa, unidentified
MGLFAGIDVAKDKLAVALSSGQEWSCANDARGITLLVERLEAANPALVVLEATGGYEEELLAALIAAGIETRRVNPREVHHFARAAGQLAKTDRIDARMLALFAERIRPPARAVSDPEREQLKALVGRRSQLLQMITAERNRRAHAQRWLARSLQRTIRALERELKLIDREIAERLGRSTTLKPLHDLITSLPGAGPVLGATLIARVPELGRLSRRQIAALIGVAPFTRQSGQWRGRDMIFGGRAPVRATLYMAAVSAVRHNPPLAAFYRRLRRGKPAKVALTAVMRKLLTILNAMLKHHTVWSAPCPV

SEQ ID NO: 176877 - protein, 410 aa, unidentified
MELIVERPAALDVHKAQVMACVRTPDEGERTEHVEEFSTTVRGLLVLRDWLKAHKVTQVTMEATGVYWKPVWHVLEDDFELILVNARHVKQVPGRKTDVQDAQWLCRLAEAGLLRASFVPPKPIRELRQLTRYRKAQVSERQREANRLHKALEDTGIKLDCVATDILGVSGRAMLDALVCSTTDPEVLAELAKGRMRAKIPALREALEGRFEAHHALLVGAILAHLDFLDEQVELLSEAIEVKLAPFGAAAVELLLTIPGIGERTAENVIAEIGTDMAQFPSAGHLASWAGQCPGNHESAGKRRSGKTRKGSKWLNQALKEAAMAAIRTNGSYLQALYRRKKAQGGHNKALGAVKHSIVCACWHMLSTGELYRDLGPDDFARRNPERQTQRLVAQLERLGHSVTLTEVAA

SEQ ID NO: 176878 - protein, 343 aa, unidentified
MIYVGVDLHLRFCYMTVLDASGAVLRQGRVPNDEEHLRLFFTGLKIPGQEEEKIIAAVEACGFWCAFVDCVEPLVAQVVLVHPAKVKAIASAKLKNDRVDSATLAQLLRANLLPEAWKADVTTRDLRALLRMRSALGQDRTRYKNQIHATLHMHGERAPVSDLFGCAGRAWLATVALRAAARQALDTSLRMVDQLDWEVHALDRQLQQMAQQDPDVRCLMSIPGIGAFTAMVLKAEIGDIRRFRDKKSLYNYAGLVPVIRESAEHKRSGGITRAGSRQLRWVMSEAALTAARYSPAAHAWFTRLAQRKHPHVARTALARKLLGAVWALWTHGVCFDERVFAAM

SEQ ID NO: 176879 - protein, 375 aa, unidentified
MHKDSVYLCILSEFGELIEKVFGVLTFQLEEMRDLMLHHHVVEVSMESTSVYWIPIWRVLSPHFKLNLANPYFIKQLPGRKSDVKDAQWIAECTMKELIRGSFVPPETIQQLRQYDRRIFDLNEEIVRKLSKLDAVLQRCNIRLSNYVSNVDSKSYKAVVRAISQGITDPEELVKLIHGRIINHHGIDVITASLKGVVSLAEIDMISQLRDELDMAEAHKEKCQARMLEICEREFPEELKRLQTIPGIKERAATSLIAEIGTDMNKFETANHLASWSGLKPRNDESNKKIKSRSITHGNVYLRKTIIECAWAASRTKDCFFSRFSYHQTQVRKKNKMKVLVAVARKMLIAVWHVLHDNTIYIDFTTDRKTSRTKG

SEQ ID NO: 176880 - protein, 333 aa, unidentified
MLDKNTGELTEQRLSHDREGEEARKFYSGLAGPVRVGLEASGQSQWFERLLADLGHELWIGDAAKVRASTERKQKTDRRDAHLLLELLDQERFPRIWVPTPAQRDVRQLLLHRAKLVRVRTQVKNQLQALALNQGVQRKWKLWTAVGRKQLESLPLLPWARRRRDELLKLLDELDGSITALDGAVRQEADTRPAVRRLMTHPGVGPITALAFALTLGPPERFRRGKQVASYFGLIPSEHSSGGRQRLGHISKQGSSFVRGLLVEAAQSAVRHEPQMRREYQRLAHKKCRALAKVAMARKLAVRLYWMLREEVDYAQLLQGSYAGQPESSRGRG

SEQ ID NO: 176881 - protein, 437 aa, unidentified
MEETTNFKTVNPNAAGIDLGAEKIFVSVDGVKVENFRTFTADYRKCISYLKEHGIKSVAMEATGVYWIAFHEMLESSGLEVCLVNPKEVRQVKGRKSDVSDCQWIQKLHSAGLLQASSIPKGKLKELRLMVRERLDIIEMGSAYVNKMQKALELMNIKLTSVISQIQGASGLRMIEAILKGERSAEKLLSLCDERIITKKGDDVIKALEGNYNTTYLFMLNNNLQMWKLHQEALTNVDQKIESLLEELNQNRPHIPPDQTKVKPIRHHKPEINDLHQKMLDAYGANVSSISGLNDYSLLRLIGETGNDLSRFPSAKHFTSWCQLSPKHKQSGSKTKVLKIKTRSQAGQIFRDAARSILNSRYIAIGAFMRKIRSKKGASIAIKAGARKIAEAYYNLLTKGKSYVEQGILAYEMKIKQREYNLIQKLALKHNLSVVSA

SEQ ID NO: 176882 - protein, 417 aa, unidentified
MADDIQWFAGVDWASEIHQVVLVNIHGTVAGERAFPHGGEGLGSMCDWILTTTGAPAEAIGVAIEVPHGPVVETLLERGFLVHSVNPKQLDRFRDRFTVAGAKDDRLDGRVLGDSLRTDRHCFRFLRPADPIAVELREWSRMTEDLQQERTRLSNRVREQLWRYYPQMLELTDDAGADWFLALWALAPTPARAARIHKATIDRLLKTYRIRRIDGDAAIPILRQKPIQVAPGTTEAATAHIRTIAVRLKVVNRQIKEAHRQLDALCAKLADPEETEPGQSPEQRDVTILRSLPGVGRIVLATLLAEAWEPLRARDYHALRSLCGVAPVTRRSGKKCVVVMRQACHMRLRTAVYHWSRVAIQHDELSDKKYRELRKRGHAHGRALRTVADRLLAVACAMLRARTRFDPARAGKLKEAA

SEQ ID NO: 176883 - protein, 347 aa, unidentified
MQFVGLDVHKNSTQAVVLDEQGNRLMKERFESTIPDLQNFIEKLGKDIKIVMEASAVWQHLYEYLEDGGYQVKLAHPLKTRAIADARIKTDSIDAETLAHLLRANLLPESYVPDKHTRIERQITRHRASLVDIRTMIKNKIHAILRRHGIRHEFSDLFGKAGMEFLKQVDIPIYSRFQLDQYLVILRVLDFKIGETSNKIELFTKVNPAAQRLTRIPGISYYSALMIMAEIGDIRRFSSSKKLCSYAGLVPSTYQSGDVTRHGRITKQGSVWLRRILIQCANVAIKHDRTLNRFYTRIARKKGHNKAIVATARKMLRYIYAMLTLGIEYDALQVNKRARAIRTFHGL

SEQ ID NO: 176884 - protein, 397 aa, unidentified
MPAVWAGVDSGKRTHHCVVINQIGMVLLSRRVNNDETELLELIGAVVDLADGDQMCWATDLNAGGAALLITLLAAHSQRLLYIPGRVVHHAAATYQGSGKTDAKDARIIADQARMRTDLQPVRDADQISVDLRMLTARRTDLVCDRVRAINRLRATLLEYFPALERAFDYSKNKAALTLLSEYQTPDRLRRLGATRLAAWLRKRGCRNSAAVAAAAVDAAHQQFTTLPAEPIGSTLVIRLAAEISAIDRDLVELDAQLTDRFRQHEAAEILLSVPGFGPVLAATFLANIGGNLNGFDTVDRLAAVAGLAPVPYDSGRISGNLHRPRRFNRRLLRTCYLAALSSLKNSPASRAFYDRKRREGKSHKQALIALARRRLNVIWALLRDHAHYQEPALAAA

SEQ ID NO: 176885 - protein, 360 aa, unidentified
MKKKTHKGGALAAAITHSQVIKVGLDVHADSIVAVRIVDGQSPERAKRFLAEAAFFKWIKEQALGAAKVFTCYEAGPLGYSLHRQLADAGITNYVVRPRDWDEYGSKVKTDNRDAHELALCLDRYVSGNNKAFSVVRVPSPAQEQDRSVSRHRKSLQQHKQRLAAQGRGNALYFGHRLKSPHWWKGRAWKEQLEKAPAHVLKLLESLRNMILSVEEELKSYTQELEESVSSPVPYGVGKLTAEMLDREVGDWHRFKNRRQVGSYTGLCPSEDSSGSRRFQGHINKHGNRRLRPLLIECTWRLVRCQGNYRLVRKWSKQLCDPKTSKARRKQIIVAIARAFAVDWWRMRTGQAQAKDLGLV

SEQ ID NO: 176886 - protein, 360 aa, unidentified
MAKAKTLVGLDVHATKIVAAVLDAETGQLQTFGMSGDTDGAAGFCAGLPRPVRVAYEAGPTGYGLARELAKRGVECVVAAPSKIPRASGDRVKTDRRDAEHLVRLLLAGKLHAVRVPGDEEEALRDLVRARDAVRMDLMRARHRLSKLLLRHGIRFDDGQAWTERHRQWLATITLDWPAAHTTMLDARGAIDALCHRRDGLEREIVALLPACPWAVQVGRLRCLRGVDTLTAVGLCSEIGDFERFARAGQLSSYVGLVPSESTTGQQRRLGSITKTGSGHARRLLVEASWHYRPRPSIGKALSDRQADQPPEAIAIAWSAQRRLHRTWTRLEARAKRRTIIAVAAARELAGFCWAICQIE

SEQ ID NO: 176887 - protein, 391 aa, unidentified
MKSSHHIDTPAAGAKDGTLYIAFELSKSKWLIGLLVSGESKLSRHVVAGGDTTAVWQLISKKRAAAEKKLGRPVRVVSCYEAGFDGFWLDRWLGEHGIENRVLDPSSIEMPRRARQAKTDRLDLERLMRVLIRHDGGEPRVCSVVRPPSPEQEDDRRLTRERERLIGERTAHGNRIKGLLHGQGVRDVEPRRKDFGEQLARARTGDGRVLPSKLVAEIEREHARLLLIAEQLAEVEGQMKTEREAAAPDSRAVQVNRLIELKSLGAVGGETLVNEVFWRDFHNRREVGAYFGLVGTPFDSGQSAREQGISKSGNGRARTLAIQLSWLWLRHQPDSALSRWYRERVGDQKGRVKRIAIVALARKLMVALWRFLTQGLVPENAIVRAAAPAGR

SEQ ID NO: 176888 - protein, 387 aa, unidentified
MSELFNPRTPATAYDHTITLVSVLELSGKSWEMGASVPGVPRRPLRKIDIGDIGAVIKTTEHWKSEADKAGYTVSRVVLGYEAGRDGFWIARALRAQGIEVYVMHPASIAVERRGRRVKTDRIDIDLLLRTLLSWLRGEPRACTMAPIPSEMDEDMREPGREREALIAVRLKIENQIGSLLIRFGIDDFKPRLKKAAQKLETLRTVDGRPLPPKTMERLRRLMVQHRLLSDQMKEIEEARQQVMMVANPNRVERMIQVLVRLVGLGVETATTLVHEVFSRRFRDRKALASFVGLTGTPFNSGGSTREQGISKNGNPRIRRMITQLMWRWIRFQPSSALTRWFEERTGGAKGRIRKIMAIALARKLLVALWRYIENGVIPEGVRLTSA

SEQ ID NO: 176889 - protein, 354 aa, unidentified
MSQILNTAIAVIGIDIGKNSFHVVGLDARGAIVLRQKWSRGQVETRLANMPPCLIGMEACVGAHHLSRRLKLLGHDARLMPAKYVRPYSKGQKNDFRDAEAIAEAVQRPTMKFVATKTAEQLDLQALHRVRARLVSQRTGVINQIRAFLLERGVAVRQGLRFLRAELAGILATRTDVLSPRMVRVIEDLAGDWHRLDERIEGLSSEIATLAHQDTACARLMTVPGIGPIISSAMVAAIGNGDVFSKGRDFGAWLGLVPKQMSTGDRTILGKISRRGNRYLRVLFVQAAWVVLIKPKSWERYGLKPWIEAAKKRLHHNVLAIALANKLARIAWAVLNKERNFEYVRRNAMASRPA

SEQ ID NO: 176890 - protein, 342 aa, unidentified
MDHYAGIDVSLECSSVCVVDASGKIVREGRVLSEPTALISWFGSLGLELSRIGLEAGPLSQWLYAAMKQVGLVVELLETRHVRKAFEAMPVKSDRNDARGIAQLMRLGWFRPVHCKSIGAQETRAVLTARKLVQSKLQDVENHLRGILRGFWLKVGKTTKLSFARRIRELAANHASLEMIAEALLSVHAVLLREFKAFEKQVRSMARQDAKARLLMSMPAVGPIVALTYASAIDDPGRFKSSKRAGAHFGLTPKKYQSGQTDYTGRISKIGDASVRTALYEAAHIMLTKPLKDCSQLKSWAMRVARRAGMSKAKVALARRLAVIMHRMLSDGTAFNAAAAAA

SEQ ID NO: 176891 - protein, 337 aa, unidentified
MQHYCGIDLHSNNHVVVIIDEEDKRVFEKRLSNDLSETLKVLQPYQNTLCGIAVESTFNWYWLVDGLQAHGYEVKLVNTSAVVQYDGLKYSGDHHDAYHLAHLMRLGILPTGYIYPKEQRAVRDLLRRRLSLVRMASAQLIGIQSQLWRSTGIRIPSDTLRRRDFVVPLEENHTRQAIESGLVVYQAVNQHSIDTLEQSAYQAAKLSKAFEILQTVRGIGKILGLTIMLEIGDIHRFASAGDFASYCRCVDSTRTSNGKKKGNGNAKAGNKYLSWAFSEAAHFAVRFEPLAQRFYERKKAKTNGIIAIRAIARKLARACWMMLKHQQPYEAKLMFPG

SEQ ID NO: 176892 - protein, 354 aa, unidentified
MIVLGADTHKRSHTIAAIAAGTGELHGEQTIQVGERGFEALLRWARGLDGERVWALEDCRHVSGSLERFLIERGERVLRIPTHLTAKERKRARQRGKSDAIDALNVARAALQEGLDTFPAAHLDGPELDLRLLVDHRERLVRHRVELNSTLLWHLHDLWPELQLPGGALFSKKWSTRIGGRLARADQTTRVRIARDMLRRLRELTATINQLERDITELVEQIAPQLLAEPGFGPLIAAKLVGEIAGAQRFATPAKLARAAGVAPIPASSGNTQRQRLDQGGNRQINAALHRVIVTRARCHPETRAYIEPPTPRRQDHPRSDPLPQALPRPPRLAPAAAAPPRPGELPLPINSLT

SEQ ID NO: 176893 - protein, 339 aa, unidentified
MQTVTTIGLDIAKSVFQVHGVDAEGNVVIRRQLKRRYVLAFFEKLPPCLVGIEACASAHHWSRELRALGHTVRLMPSAYVKRHKNDATDAEAICEAVARPNMRFVPTKTEEQQSCLTLHRTRHLFIRQQTSVINAIRAHLAEFRIVAPIGRNGVEQLLGVVADAGDKRLPEIARACVGALGAQLQTLKTQILQFDRMITAWHRSSEVSRRLDDIPGVGPALATALVASVADPQAFRSGRDFSAWIGLVPKQNSSGGKDKLGSISKRGDRYLRSLFTTGALAVIRYAKIHGTKHRPWLTALLARRPTKVAAIALANKIARMAWAMMATGERYKEPVALAA

SEQ ID NO: 176894 - protein, 420 aa, unidentified
MINELEFFIGIDLAAEKHQACLIDRRGKVLGEVTFEHTGSGVHEFIRSIEKRSGGGSDRVGIALETPRGPIVEYVLERGYQVFSINPKQLDRFRDRHTVAGAKDDRRDAFVLADSLRTDLPLFRRLKQESATVIRLRELSRLEDDLIQDHNRLINQLREQLHRYFPQVIQLSSAAEDPWLWDLLEIAPLPTRACKLTRSRIERVLKNHRIRRLSAEQVTVALRAPALEVAPGSAEAASEHVLMLLPRLRLVREQRLDVASRMERLLCEMTESGVDATKPPEQPTDVAILRSLPGVGRVVAGTLLAEASQAIADRDYEALRSYAGVAPVTRQSGSKRIVVMRRGCNNRLRNALYHWSRVAAICDERSRTHYANLRSHGHSHGRALRTLADRWLTVLMSMLKKGESFDSARWNTCGHSVGVV

SEQ ID NO: 176895 - protein, 341 aa, unidentified
MNTVTLIGIDLGKHSFHLHGQDEDGRMVFRKKCSRQQLFTLLGNTPRSTVVMEACAGAHWMARRIETLGHQAKLISPQFVRPFVQGNKNDFADAQAICEAASRPSMRFVSVRNEAQQTVSALHRVRESLVRERTGVINQLHAFLLEFGISLPRGQAIIRRLPAVLAEHELPPRLVALLERLQTHFKYLDEQIAQIERELCQQLREDERSQRLLEIPGIGPITASVLMTELGDAQQFGSARQFAASAGLVPRQYSTGGKPTLLGISKRGDKNLRRLLVQGARAIMQRVEQRTDRLGIWVRELLARRHSNVVACALANKLARIAWAILANGTNYRSQQAVAAA

SEQ ID NO: 176896 - protein, 338 aa, unidentified
MKITTIGLDIAKSVFHAVGVDKAGKLIKKKMLRRKDLLPFVAKIEPCLIVMEACGGASYWAREFEQFGHVVKLIAPQYVVPFRQGNKNDYNDALAIAEAAQRPNMRFVKPKSVEQQDVQLLHRMRERLTKQSTALINQVRGMLAEYGIVIAKSKSAFKAQLPDILVDEANMLTIKGKAIFYQLYDEVIDIEKRLKSCDTQVLNETQNNVICQRLQTIPGVGPVTATAIYAAVGDGKDFCNGRHFSAWCGLVPKQHSSGGKDNLLGISKRGNAYLRTLFIHGARAVLRHSGSKSDKLSCWAIQLAERRGFNRACVAVANKLARMSWVIAAREEEFRLAM

SEQ ID NO: 176897 - protein, 440 aa, unidentified
MAKLKNKLQVINEHAAGIDIGSRQIFISVPNKEVKSFYTFTSSFNNAITYLKENNITSVAMESTGVYWVTLYVMLDQAGFDVCLVKSTMVKNVPGRKTDVADCQWIQQLHSYGLLRASFIPDDNTRKIRSYVRLRRTNIRLGADNIQRAQKALDLMNIKLHFVINQINGVSGMRIIKAILSGEHDPLKLVDLCDIQILRKKKDLVIESLYGNFREEQLFALKQAIDAYEFYQKQVLDCDKQIEALLNNITFNIPYPKSIKKPKPIRHNKPQIDNLHPSLMKLTNGNDPSQITGMTDSTLLQIISEVGTDMSKWPTVKHFTSWLGLAPNSHQSGITKKKKLFRHNSIAGQIFRISAQTLVLSKYNALGAFYRRLQAKKGKLTAMKATARKLAVIYYNVMTKGVEYVEYGINNYEQKIKEQRIKYLQKQAIRYGFNLTPLLE

SEQ ID NO: 176898 - protein, 396 aa, unidentified
MNGPIISFDVSKGSSHMQGFLDHGKPAGKATVIRHDLEDFAKLDALRGRIREETGSDPVAVYEFTGVYSNTLERYLDSIGMRRYGISPLESAKVRKAMIRPTKNDSLDCRTIAEVYYLRTLREGRSDDEIHAGLKDMGRFYHYLLEVKIVEKGRYYRCLDDVWPCFDKVIEPDSPKSLKIISHYGHPSKIRSKEQVKKFLMKLPRQGRVSTDELAEKIAAYAKAHVSGASPDSYQVEEAKLMSARVKGIIDESERVMDSMISKAENLPEFALLKTIPGIADVTATRLIAEIGDINAYPKADSLIAYAGLDPAVMQSGQMTGEHMHITKKGNPHLRATLYVAVINMIMSKAENMITRYVLKKKNSGLSYKAAVIAGCSKLLRLIHAMLRNGTCYSEQ

SEQ ID NO: 176899 - protein, 347 aa, unidentified
MAFIGVDLHTNSFTICRLHDDGSEAFETFTLSASALQAFCMSLDADDEIAVEATGNTAWFCDEIRPCVGRIVVVNPRQFQVIRKSVNKTDKNDARSLAFFLSKDMLPETRLKSTAEAELGSLVATRDVFVKQRTMLLNKIHAMFVRRGTKLKKEGLASKKRLRELDVSQFTALEQVELNALRNQALGLTETLAELDKAIEAAGAELPGHEGISSIKGIGSRSAAILLSGIGNIEDFESADKLAAYVGIVPKVSQSNDTDNRGRITKRGNKLMRTTLVQCTLIATRYSGYLNAFYQRIKERRGAGKAIIATARKLLSIIYDTLKNGWVFEDFTEFKIKQNQCPTGQSS

SEQ ID NO: 176900 - protein, 408 aa, unidentified
MLKIVYPICCGIDVHKTFIVACIASTNGKGVTTYQTKRFSIYTKSLNELSDWLAANNCKDVCMESTGKYWHPVWNVLERTCNPVLAHPKYLKAIRGKKTDKKDAKWIADVFKHDLVSGSFIPPEIIRQLRDLMRYRSKLTNYNTGEKNRAQNCLTTSNIQLDHVFADVFGKSATAILNHILENPGINFDVAPFVDRRCKTPIEEIQLSIDGNISPEQAEKLKIIRAHMDSLEFCKANLESAILFLAEPLLPQVNLVASVPGIKDFSAISVIAEIGTDMSVFPTAKHLCSWAGLAPQCNESGGKKKSSRVSKAGAYIKPLLIQCSNAVVKSNKHPEIKNRYLSIKKRRGHKKAIVAIARMLLTAIFHILPKSEPYNPDLYRISDVTPVDSVQRAVRFLEKQGFTVSQFG

SEQ ID NO: 176901 - protein, 349 aa, unidentified
MRFYNRQHRHYCGIDLHVKTMYLCVLDGTGQVLLHRNVATTPAAFLAAVAPYRDDLVVCVECMFTWYWLADLCAAEGIPFVLGHALAMKAIHGAKAKNDRVDSHKIAVLLRGGLIPQAYVYPAGMRATRDLLRRRLHLVRKRGQLLAHIQMTREQYNLPPFERRLAYPANRDGVSAHFPDPVVRKSVEVDLALIDEYDTLIADLEQMLVREAKCDDADAFHRLRSVPGIGPILALTILYEIHDVHRFDRVQQFASYARLVKGQHESGGKILGTGGAKMGNVHLKWAFSEAAVLFLRHTHTPRVQKQLARWEKTHGKGKALSILAHKIGRAVFYMLTRGTVFSLDKFLAA

SEQ ID NO: 176902 - protein, 372 aa, unidentified
MKVTYQTCCGVDVHKSFLVATIVKTTGGIEPSYQKKRFSTFNSSILEFKQWLLDNDCHDVCMESTGKYWVPVFNLLEDEINVVIANPKWVKAVKGNKDDTKDSKWIGDLFRLGLVKGSYIPCKIVRILREYTRYRYKLVSCRSSEKNRYQNTLTVCNVALDSVVSDIFGKSSMSIIDYLLEQSGTSINHEEIASKLLRRLKSKEDAVQFLCTIPGVKRDSAITIISEIGTDMSQFGGSKRLCCWAGLTPGSNESAGKKKSVRITRAGVYLKPALVQCAHAAVKSEKSPYYKKKYESLMKRRGKKRAIVAIARMILTAIYQMLSTGESWNPSDLYKIDIPEALLEKQKAKAIKQAMKLLQREGLYPPPEPIAS

SEQ ID NO: 176903 - protein, 375 aa, unidentified
MGHFSEAFIGIDTAKLRNAVAVAEAGRTGEVRYLGEIDTSEAAMRKLVASLSAKHRKLTFCYEAGPTGYGLQRLIESLGHTCLVVAPSLIPKKAGDRVKTNRRDAEGLARLLRAGELTAVWIPDSRHEAMRELTRARDAARQDLTRKRQQVSSMLLRLGRHYPGIKTWNARHRCWLANLKLDHREQRFALEEMLQAERQASERIGRLEQAIREAFADWSLAPIVPALMAMRGIDLVAAVTILAEIGDLSRFESPRQLMAYLGLVPSERSTGESVRRGGITKAGNGRARRVLVEAAWSYRHPPRVGYEKQAHVSAAPRAAREIAWKAQVRLTKRFRTLSRKGKKSTVVATAIARELAAFIWAIFREMSNTRTAAPA

SEQ ID NO: 176904 - protein, 370 aa, unidentified
MNNATTFVGLDVHARSIKACAFVPATGEIERKSLGYEPGELASWMKSLPQPAKCVYESGVTGFHLCRELRAVGVDCVIGAVSKMHRPAADRGRKTDRRDAHFLAVQLALGVVTEVHVPDPECEGARDLTRALADARDDAVRAKQRLSKFLLRHGYVYDERNAAGQRKGRWTRDFWAWVGRIDLGDPSAMAALDHYCERVRRADEEKAALEAKVKSLAQAPRWKPTCDALRCLKGIDAVTAASIACEADGFSRFERASGFAAWIGLVPSEHSSGEFQCRGGITKAGNKHLRKLLVEAAWHYKCASRAPKKAAAGQSVPPDARRHANAGVRRLVDRRRTMDAAGKQSSVANVAIARELACWCWAVGRMAEEA

SEQ ID NO: 176905 - protein, 331 aa, unidentified
MTTHAPQHNSKTTSDTVWVGIDVSKKELQLHSSAASLRLPAKLANDNAGIRSLVHRLASRSEVHIVFEATGGYDKPLLDALHRHGITCSRLNPRRVRDFARSKGLLAKTDAIDAAVLADFGAAYQPEPTSPVDPKLEEIHALVAYRRHLQDEMEREEMQNEHPKPGFITTLVKKRIRTLKSQIQSVEKQMAAIVRSSPFLKRAVAALVEVKGVAQLTALSLLASMPELGTLNREQAASLAGLAPFNRDSGAMRGKRSIQGGRRTIRQALYMAALTAAHRNEILSAAYRKMVERGKPKKVALTAIMRRLLIHLNSIMNKVLREEKPPEFLTP

SEQ ID NO: 176906 - protein, 443 aa, unidentified
MTQLSKQTIHNDSAPTEQRDSGHPDSPRPNDCKPRILVGIDWADEEHAYEMLDPHGELHRGTMLQTPEALGELFTQWQQQFNAEIDVCLETSRGPLVNALLEQPRVRIYPVNPNALANYRKAFAHGGGKNDPVDARLILQFLVRYRDQLRPLVPNAPQTRELAALCQDRRGLVEQRVVLAQQLKSLLKAYFPAVLAMNPAKVYADFIVRLLLKYPTLAAAQAAGRNKLRKLFFATGTKNKIEQRLDAIMDAVPLATDDVLLRTSARRAQAICGQLDSLNKSIRQYDHLIEQLVKQHTDYKVVEALPCGAKSKARILAALGDDRSRFASAEQLASATGIAPITTQSGKQRYVSSRWACSKFLRQTFHEFAGLSITKSRWAKAFYQSQLARHKSPQVARRALAYKWLRIIYRCWQTGEAYDEDRYVKRLATTKSPLAKQLAAPTT

SEQ ID NO: 176907 - protein, 375 aa, unidentified
MSNHSEAFVAFDTSKLRNAVAVAESGRSGEVRFFGEIDNTGAATAKLVKKLAAKYQRLTFCYEAGPTGYGLYRQIKDLDHECVVVAPSLIPKRPGDKVKTNRRDAVSLAKLLRADELTAVWVPDQQHEAMRDLTRARETAMMDLRCKRQQVSAFLLRQGLHYPAEKKTWTKTHMSWLASQKLDYPEQRIAFEEMMLAIRQAQERLARLEQAIRVAVPDWSLAEVVTALMAMRGIDLIAAATLLAEIGDLSRFQTPRQLMAYLGLVPSEDSTGDTIKRGPITKAGNRRARRILVECSWSYQHPPRVGRDKQPKVDATSPAVREVAWKAQCRLHARYRALIRKGKRKTVAITAVARELAGFIWAVNRAITTSQAVAS

SEQ ID NO: 176908 - protein, 336 aa, unidentified
MFYAGLDIHKKFIYATVLNEKSKIVNQGKFGTNEKELMDFLGFLPNKQVKIVIESCGIWQDIYEILEDKGYKVMLANPHKLKAIASAKIKTDKIDSEILAKLLKGNLIPEVYVPSKEIRELREIVRHRQSLVKIRTSLKNQIHAILRRNNVKYPLKDIFTIKAKAFLRGQNNVKIDSYLKILEHIEKEIKDIKIKAMSIEKFEGQARLLKTMPGIGDVAAYLILAEIGDINRFDSPSKLCSYAGLVPSISQSGEKSYSSKITKQGSKWLRWINIQCANKAVNLPCRMQTNFYKLNAKKKRNVALTAIARKMLYYQWHMLKYNQPYIDDHPSRMSEA

SEQ ID NO: 176909 - protein, 427 aa, unidentified
MPYKIAGIDVHKRMLHVVVSDVQVDGEYDFTRRVFGSLPEALRSLAAWLVEQQVQEVVMESTAQYWKPVWGALERYWKPICQTREGALAMSGTLHLAQAQSNRGRRGRKKDFRDAERLVKRLVAHELVLSFVPDVEQRLWRTVVRTKYQITRNRVQLQNRLEALLEEAHIKLSSLVSDLLGASARRMLAAVADGETNHETLAALADRGLRATQEQLRDALGVCQELNPVYRRLIRMVLDEVASIDKRIEQLNQEMANLVRPHEDQVRRLAEVPGLGVDSAQQVIAEVGATAATFPSEKHLSSWVGACPGDEESAQVNRSRRSPQGNRHMRRILNQAANAAVKYKGSIFQILYRRYVPRMGHNQTIGIIAHKLCRLVWKILHRGIRYEERGQEVSKASKQKRTRKMIQALHRLGYRIEPSLSQSAITA

SEQ ID NO: 176910 - protein, 476 aa, unidentified
MWAGRTIYGPRVRACNWPPFRLTRLSYELGRIVVVIALQPPENRRERVGRVIGLDLSKHTAEVAVLWPGAEAPQRWRFPAEPAAIRAFARQLGPEDRVALESCTNAFAFHRLLSQHSGSVVVSNPLKTRIIAEAKVKTDKIDAEVLARLLAADFLPAVWVPDSRTDHLRHLVFHRHGLVAQRTQVKNRIHAILHRNLIAPVMTDLLGTTGRAFLGKVDLPAPERELLDADLRTFDFLEGEITAAEKSFAHAALDDSEVRRLMTVPGLALASAVGLKAAIGDVRRFKRPSNLVSYFGLNPSVYQSGLKAYTGHISRRGRSHARSICVEASHQLVRAPGPFHAFFLRLQRRKGYNVALTAVARKLVVLIWHMLTRGEDYRYAPPFRTREKLSRLRYLATGQRSARGTKPDPGLDKQAATKGEAEYLQFIKERFGVKGPQGVDHPNQKPGPRAVARSRSSATGVRRSAKEKQRSLPKGS

SEQ ID NO: 176911 - protein, 354 aa, unidentified
MDSVKYVGLDVHQETISVALVDASGKLIMHSVLATRAAAILDFIHGLRGTVHVTFEEGTHSAWLYDLLVRRVARLVVCNPRKNALLKVGNKSDTIDARKLADLLRAGLLSPVYHGQTSTLTLHHLGRSYAALTEDATRVMGRLKALYRGQAVKCAGKKPYGRDRGEWLAQLPEPGMQRRAERLYEQLDAVQEPRRQARQELLVESRKHAAVKLLRTVPFLGPIRAALLVARVQTPHRFRTKRQFWPYCGLGLETRSSADYQFVDGQLVRNKRPVLIRGLNMNHNHDLKNLFKSAATTASAMEGPFRLFYEGLLAKGMLPAMARLTLARKIAAITLSIWKKGEAFDAKHLKPQTA

SEQ ID NO: 176912 - protein, 333 aa, unidentified
MLPPNCGTATPYILRNTVGLDISKLTFDATAIVGNAEYSAKFDNDSKGLNQFSDRLKSLGCQNLHICMEATGNYYEEVADYFAQYYSVYVVNPLKISKYAESRFKRTKTGKQDAKLIAQYCRSAQESELVKRQKPTDEQYRLSRMIAAYAQIKSECAAMKNRHHAAKDEEAAKAYAQIIKAMNEQLEVLKEKIKEQTEKPNCKEGVKRLETIPAIGRMTAAVLFHHLTSSKFETSNKFAAFAGLSPQQKESGTSVRGKGKLTKFGNRKLRAVLFMPAMVAYRIRAFPGFIKRLEEKKKPKKVIIAALMRKLAVIAYHVHKKGGDYDPSRYKSA

SEQ ID NO: 176913 - protein, 430 aa, unidentified
MGFIVPTDMHPERDEQPMPYEWFVGIDWGSQQQQVCVLDGARRRVGERAIDHDGASLARLADWLWTVSAGQPQRVAVAIEVPRGAIVEGRLERGFHGFAMNPKPLDRFRDRHRVAGAKDDRRDACVLADAVRTDQPSFRRLQLDAPQLLRLRELSRAEETLLEDFRRSAHRFRDQLHRLYPQMLKLCSAADEPWLWDLIDVAPTPAHVALLSAEQVQRVLKAHRIRRVTAPEVLTCFQAPALPVAPGAAEAAQAHCQFLLPCLRVLAEQLQACSQQVSALLHTLAEEPGDGEGPSDVAIGLSLPGVGRKMTAWLFAEAAQPLAERDSQMLRTHSGVAPVTKHSGKRRVVVMRRGWNPRLRHALYHMARVAMQGDTHFNSVYAALRAKGQRHGQAIRHIGGRLLRILMAMLRHRTCYDASRIRREPVVQMG

SEQ ID NO: 176914 - protein, 418 aa, unidentified
MKTDCETIPCERFLALDIHKHYVLVGGMNSLKEWVLRPRKVQMSRFPEWVQKNLKPTDALVLESTSNAWEIYDLISPLVAKAVVANPLKVGQIAGAKVKTDKLDVERLLILLIADIVPEVWVPPHHVRDLRALISHRWRIHKQIAMTKNRLHSFIHRFNLIPPAGPLFSEKNLSWWQEQEFSSMVRLQIEQDLLILEHLTAHKEAVHQELACLSNRKPWSKDVVFLMQLPGLGVVLSMTVLSAIGEITRFENSKNLVGYAGLGAGIHSSGLKHQGKGITKAGRKELRWAMVEAAWGAVRSDSHWKDQYEQLKKRGKHSNAAIVAIARKLLVSIWHMLAKGESHRHSTEEDLAYKMLIWSQRMDEEALRGMTRQQFAKYGLLRLGKGIHLTRIVRNGLPRRIASAEEVLALLPEYHLLE

SEQ ID NO: 176915 - protein, 337 aa, unidentified
MEYFAGLDVSMEETHVCVVTRQGAVVHEITVPSTPASIEAALARVPACQRVLFETGRMAPMLFHGLSQRGLPVVCVESRQAYQALKLLATHKTDRNDARGLAHLARTGFFKPVHVKSLPAHAIRSLIIARKKLVGQRVTLENQIRGLAVVFGIRLPRALSSAFIRRALQTSEGIPGLSAAMQGLVAARAAVLGAVVAIDADIRRMVRASDACRRLMSIPGVGQLTALAITAAIDDPERFRRSRDIGAYLGLVPRRYQSGEVDYTGSISKCGDRRVRTLLYEAANVLLTRYKGPLKLKDWAAAIARRSSMRKARIALARRLAIIMHAMLRHGTEFRPA

SEQ ID NO: 176916 - protein, 426 aa, unidentified
MKCTQNEKISQIKISTLVVGIDIGKETHYARAFDYRGIELAKLLIFRNTAEGFETLDRWMQDICKQQEKTEVIAGFEPTGHYWFTLGDHLKRQGHKLAIVNPFHVKRTKELDDNSPTKNDRKDPKTIAMLVKDGRYRDVYIPEDIYQELREAVAERERLQERLIAINNRVVRWLDIRFPEFTGVFKKWTGKTALLTLRNFPTPAKVLEAGEEKIMSTWRTEVKRSVGKKRAQALVKAASRSIGRATGQIASEVSLQNLLAEYELYHAQHERLEQLIRELLLQVPNAAKLLGIKGVGLITAATFVGEIGDIHRFRHPRQIQKLAGCNLVENSSGKHRGKTTISRRGRKRLRHGLFMTMISILGKNQEFRELHHRNLTREKNPLNKMQSIIALCGKLIRVFYAILKNGVDYNPEKMMGDIQQSMKAAA

SEQ ID NO: 176917 - protein, 323 aa, unidentified
MDGTTVPRWDAFVGIDIAKNTYEVAFGVGGDIVSFDYDAKGFQQLRSRLGDFGRCLMVVEASGSLQRRLVADLLDEGFAVAVVNPRQVRDFAKGHGLLAKTDRLDAAVLARFARDVQPRTVSKTSENQAELVQLLARRRQLLELQTMESNRLPMATSKLTRRSLQRVLKLLEQQIERLNHAIAELIQSHDDYRDQDQILQSVPGLGPVTSSTLLGELPELGKLNRQEISALVGVAPFNHDTGTLKGRRCIWGGRSTVRAVLYMAAFSARRCNPVIRAFADRLTKRGKPFKVVLTACMRKLLVILNTLVRNKTLWQPKIHASTP

SEQ ID NO: 176918 - protein, 409 aa, unidentified
MQVIAKRCLGLDLHKKQITGHLRVQRRSNQMPLEERVQFGTMPEDLERLREWVVKREVTLIVMESTSVYWVPVYERLEDLTRIVVANASHVKKVPGRKTDALDAEWLADLGAHGLLRPSFIPPKPIRELRAYSRYRTKLRSGQTSVRNRAIKFLEMAGIKLSSVVSDCFGVTGRAILDALAAGKAVDVAAVARRGLRKKLPELARCLGTQALSRSQQHLLRMQLNSYDAYDAQIAEVELTLDTLAAPHAALLERLDAIPGINRLSALTLIAEIGTDPKAYRSAAHLCALAGVAPGNAISAETRRRIGVRRGNRYLKRILVQIAWAATNAKESFLRARFYRLQRRIGRNKAIVAVARQILIIVYAVLSGNDYKDLGAQFYAKRNKAWNIQRHVREIEALGASVTVNYSSK

SEQ ID NO: 176919 - protein, 359 aa, unidentified
MTTTAVTNAAGPILAIDLGKYKCVACVYRSATEHTFQSIDMSRTEVARLIERTRPAVVVIEACSLAGWVHDLCLELKVPCRVANTGAEAWKYKHAKRKTDRDDALRLAQLYALGQLPEVVVPIKVTREWRALIAHRQALITQRVAAQNRIRSILVGQGLPAPRGAKAWSATGLAGIGQFARPLAECGPDDLWRGMLELALTAYRQAEELVAVAEARLDAIGKADARVRLLDSMPGLGPRTAEAVVAHLGDPKRFRSGKQVAAYGGLVPRQYQSGEDDRRGRITKRGPAVLRKLLVQCAWAMIRYNPWARAVYVRLSRGKARKKQAVVALARRILVRCWAMLRDGVPWRADPALAVVVAD

SEQ ID NO: 176920 - protein, 372 aa, unidentified
MNYNTVYVGMDVHKESFTFCAYTIDAEKGSRFQRTEADYKNVLRYLEFLRTVYGNDANFICGYEAGCLGYTLYHQLTEHDVNCVILAPTTMLEQRSKRRIKTDRRDAEIIGKCLAQHNYSPVHIPTATDEETKEFLRMRDDHKLALKKVKQQILAFCLRHNYRYDGNSHWTAAHIKWLKSLSPEALYKEILDEYLLTYTTLSDKVERLDKRIEELASKDEYRESVKKLCCFIGIKTHTALSVLVEVGDFQRFASAQNFASYLGLVPGEDSSGDGQTRLGITKAGNRHVRMLLTEASQCYARGQIGFKSKELKSRQAGNSPQVIAYADKANERLRRRYYKMVLGKSKKHNVAKTAIARELACFMWGMMTEHIA

SEQ ID NO: 176921 - protein, 500 aa, unidentified
MKTKRSKAKIRAGQKRFSVICSEPEQKLEILRPDAAGIDCGAEEHYIAVPPDRVRAGEPTVRCFSAFTEGLDAAVDWLRDCRVTTVAMESTGVYWIPLHQKLEAAGIEVYLVNARHVRHVPGRKTDVQDSQWLRQLHRFGLLNASFRPQDIICRLRSLHRHRDNLVSSSASEIQHMQKALQQMNLHLHHVVSDITGLTGLRIIDAILAGQRDPEQLVKLRDKRVYKSTPRQMQAALVGDYRAEHLFVLSQSVQAYRFYQSRIEECDREIEPVLQKLAQEVEAASAKLKLDALKPSSAKDGATTPEPLSESKPACGLKAKRKHKPRANEPKIDLAGLLERICGIDLTKVVGLHVLNVLLIVSEIGVDMSKWRSAKAFCSWLGLCPGNKISGGKVLDSRTRQVVNRVADALRLAAQSAGRTETCLGIFYRRKQAHLGAPKATTATARKLACLIYYLLKYKQPYQEPDPAIYQLRLKKSALTKLQRQAVALGYTLLPTTPAPA

SEQ ID NO: 176922 - protein, 514 aa, unidentified
MVSRRVQCGRITLWRVLVCRTARGRDWFQLSACVLFGDAVGTVFPLGRLVLPWTAGHRWAGKFSEIPMLFVMKPLPVLDPQAAAIDVGSESLHVSVAGDTPKVFGTFTVELEALREWFKGQGVRTVAMEATGVYWLYLYEVLEAAGLEVVVVNGRHVQNVPGRKTDMSDCQWLATLHAHGLLRGGFVPPADIRRLQDYQRLRADHIIGAAGQVQKMQQALERMNVKFHDVISDLTGVSGLKVVRAILRGEREPVRLLALCDGQIQRKKSAAVKESLRGCWKDEQLFALRQALELWETFQQKIADCDRELERLLHQLAGPPPSQGGPGGGELRLAPVKDAGKNAPAIERCQQLLARICGGRDATQIPGLSVYLVLQLISEVGTDMTRWPTEKHFTSWLGLAGGRKQSGKRKGSIKAHRNRAGRMFCAAARALARSMDKALGGFYRRLRGRIGGLAANVALARKLAQLFYRLLRYGMEYVEKGLKAYEVKVWETEARLLRKLAKNQGFILMPATPK

SEQ ID NO: 176923 - protein, 392 aa, unidentified
MYIVGIDIGKNHHEASIVSPEGKQIGRSLRFATTHKGADSLMRFIFKNIGNSPCVFGMEATGHYWYPIYSFLKAKGYTIYVINPIQSDSLRKMYIRQTKNDSIDSFLIAEVIRFGQFGTTSMADENILAMRQLCRYRDSVISSRTEIKLRIGTIMEQIFPEYEKQFSSLWVSTSMGILEKYLTPENIENTPIDELFEIIKDKSHNRLTRAKAISIKEAAADTFGIKIAQDAFSFQLKQLIDRMNFLDKQIEALDCQILEYYEKFDCYLHTIPGIGMIAAATILAEIGDINRFKSSSALVAFAGIDPTVRQSGEFSSTHNHMSKRGSPYLRHAIFLAATTCSFHNSPLNAYYKKKRDQGKHHLTATGAVARKLTSVIYAVLRDSKPYEPKSFC

SEQ ID NO: 176924 - protein, 398 aa, unidentified
MTAAAETAERRVSPTTPGCQKTGPYPVALTTHHERSFSGSLKEYDIQKTQGASLEYVEVAMQTGQTAQTYTLFVGVDIAATTAAVATQRPGAKASPSFIIDQTPEGYTSLLHTLQRTGHAPCQVLVVMEATGSYWISLATRLVHEGFGVSVINPAQAHHFAKALLKRAKTDVIDAQTLAQLAMVLQPEPWTPPPQIYYALQQRLAQRDDLLNLRQQVRNQLHALVQHPEVIPEVRARMDRLLETFAAQLTEVEREIAAALTQDAAWAAAATRLQSIKGVGWVTAAWTLVTTLNLTSCDTVDALTAYAGLAPMPRQSGSSVWHRPSIGHTGNGRLRTAFYMATLSAAQHNPVIKAFYTRLREVGKPEKVARCAAARKLLHIAWAVVKKDQQFDPYHARE

SEQ ID NO: 176925 - protein, 343 aa, unidentified
MKLTRVGVDLAKQVFQVHGVDRAEHPAWCKRLKRGRWIADLERDVEPGAEIGMEACGSAHHWARLLQSKGYRVKLIAPQFVKPYVKSNKTDANDAEAICEAMSRPSMRFVGVKTVEQQDLQAVHRVRSSLIRERTAKANQLRGLVYEYGLVAPREISSLRRAVPQWLEDAENGLTVRFRSLLAGLYRDLKQLDERVRELDQEVATITREHEPVRRLMQINGVGPLIASALYALVGDARQYRNGRDLAVALGLTPRQHSSGGKEKLLGISKRGDKYVRTLLIHGARSALRTAPSRTDRISRWALELAERSHPNVAVTALANKTARVAWAMLRHGANYEPERVAA

SEQ ID NO: 176926 - protein, 405 aa, unidentified
MAIIGMDIHRSFAQAAFLQDGQIKRKQRVELVRDQFIKFAKSLSIEDEVVIEATGNSAAVERILRPFVKRVVVANSRMVRAIAYARVKTDKIDAAILAKLHAGGFLPEVWVADDETQRQRRQTAERMGVLEQVVRTKGRIHAILHANLIPKYMGHLFGKAGRKWVAGLPLPDEEKAIVRRLVEELERNSDQLAKLDMTIIREALEDPRVVRLMTIPGIGPIVASTVLASIGDISRFETPEKLSCYFGLTPKVRQSGDRPARHGRISKQGNTHARKMLVEAAWSATTAPGPLRAFFQRVQRNRGAPAAAVATARKLAVMIWHILTDGTEYAYARPAFTAMKLRKAALKAGAPREYGKAGPGRDYWIKEIREREADYVRRAEQAYERMVAAWKEKPRTAPAMTAMPG

SEQ ID NO: 176927 - protein, 295 aa, unidentified
MNKFSKYVGLDTHKDTIAVAIAGAGRGKPRYFGEIANTPEAVEKLVKKLSSTGEVISFCYEAGPCGYGIYRQITSLGHECGVVAPSLIPSKPGDRVKTGRRDSEALARLHRAGDLTAVWVPGPEQEAIRDLTRAREDMKSLERKAKQPLGAYLLRYGRTYTAGKSKWTQRYFRWLETLKFESPVQQIVFQEYVDTVKQLQRRTEGLAREMGRALEGWSLAPHDQGLMALRGCNLITAMTIMAELGDITRFDSPRQLMRYLSLVPSEYSSGGRQRRGGITKSGNGHVRRVLTEAAW

SEQ ID NO: 176928 - protein, 440 aa, unidentified
MLKIIHPNAAGIDVGAEEVYVCVPEDRDERPIRRFGTYTPDIHALAQWLLACKVDTVAMESTGVYWIPIYMILTDHKIKVQVVNARHAKNVPGRKSDVQDCQWLQELHSVGFLRGSFRPDDDMVVLRSYLRHRDSLIEHRAAHINHMQKALIQMNVRLTEVLSDVTGLTGMAIMRAIAQGERDAHKLLAHRSKRCRHSPEDFIKALTANYRAEHLFALKQSLALYDAYTDQIAQCDAEIEKHFSVIKPAHDHDQDDLPPLDSSRKSNTHSKNAPVYDARGQMYRITGVDLTDIDGLHASTAQTILSEIGTDMSKWPTVKHFAAWLGLAPRNDITGGKVRRSRALFGNSRANQAFRMAAQSLTRSRSALGAYCRRMRARVGPEQAIVATAHKLARIVYHMLKHRQPFVAVSAADYDKAQQDRERKSVERRAAKLGFRLVHV

SEQ ID NO: 176929 - protein, 340 aa, unidentified
MTHATIIGIDLAKNVFHAHGATHDGTPIFRKKLSRNQVLPFLSEQPHCLVAMEACATAHDWAREIGKLGHATRLVPPQYVKPYVKRQKNDSADAEAITEAVSRRNMRFVEVKTEEQQVSAMAYRTRQMFIGHRPQTINALRSHLSEHGVIAPKRKTGIKKLIAMIEDETAVISEKVRDIARVYVDHIEQLTAKISDATEAMREAAKVSEVAKRLQTMPGIGLQTAMAIEAFAPDMACFKRGRDFSAWLGLVPKQHSTGGKSRLGKVSKMGQADIRSQLIRGAMSVITAATRFGIKKGAWLERLLGRKPKLVAAVALANRMARAVWAMLTRNEGYRNPEAA

SEQ ID NO: 176930 - protein, 344 aa, unidentified
MITIGIDPHKSSLTAVAVQPDGPTHPPIRLVVDKHTPAALLAWASQWPERQWAVEGATGLGRSIAQQLVTAGELVLDVPAKLAARARLLGSSSARKTDVADAVSVATVALHNRRLNRVHAEDHTTIMRLLTERRDDLVAEHTRWINRLHVLLRDLHPGGAEVRLDTTDASALLTKIRPVTAADHQRKQIAREIVRDLKRHEASIKELEKQLRAVVTTSGTTLTEIQGIGFLTAAKILALTGDIRRFPNQEHYASYAGTAPIDVSSGDQKTHRLSRRGNRQLNAAIHVAAVTQARDPGPGRDHYRRKIAEHKTVKEARRSLKRRITNAIYRRILADQQHLQLEAA

SEQ ID NO: 176931 - protein, 452 aa, unidentified
MATKRKKRVQDLPVLHPDGAGIDVGASEVYVAVPADRDTEPVRSFATFTRDLHTLADWLQRCGIKSIAMESTSVYWIPLHQILEERGFEVCLVNAQHVKNVPGRKTDVSDCQWLQYLHSVGLLRSSFRPSAEICAIRSLWRHRASLIQMAAEHVMHIQKALDQMNLQVHRVLSDITGLSGLRILDAILAGERDPFTLARLCHSRVKTSHDTVAKSLEGDYRSEHVFALRQSLAGYRYYQGLIADVDKEIQRHLADLKTVADTDAEPPQRTKKAAYQRRHYEPKTFDLRSELYRIFGVDLTDIPGISAVTAHTILCEIGTDVSQFRNASAFASWMGLCPDRQISGGRVLYTKSRRVRNRIALALRMGANSLHHAHNYLGEFFRRISRRLGKPQAITATAHKLARIVFHLLSVREPYNESVFHQCDQDAQRRAEIRLRKHAAQLGFQVVAATNT

SEQ ID NO: 176932 - protein, 515 aa, unidentified
MSASKTKVNKRSVQSLPILQPKVAGIDLGACEHYVCGPALISGEPNVRVFRSTTPQLIGLIAWLQEQGVKSVAMESTGIYWIPLYELLEASGIEPILVNARELCHVPGRKTDVQDCQWIQLLHSCGLLHGSFRPSEGICRCRALTRQCANLVEERSKTVNWMQKALDQMNVQVHRALTDITGKTGLAIVRGIVEGQRDPKVLARLRDSRCGKNEEEIAEHLTGTWKSEHLFNLKMALKLYDQLQAQITDYEQELHKELLAMTPQERKNKEAPEHPKAAKRKAIRNRGEQEDQKILWQFSGVDLTRIDGISAGVSQVILTEVGFNLSDFSSKKHFVSWLRLCPKMGISGGKALKKKPPRGTGSNRVAGILRMAAVSLSRSHSSLGAEYRRVARRRSGAVAVFALARKLAILIYRTLRYGQDYVDEGEKVYHLDPSVKRGISVRMLWRQKVAKKRRRTRWVRRGFFVIPFGPNGSCRKPRLTDGSRYQEHFKARRFFSMAKTAKELGYQLVELPANR

SEQ ID NO: 176933 - protein, 425 aa, unidentified
MSEKIVVGIDVSKAFSDICILSPNNDIIKRLKISNDINGMKSLIYVLEKVEDEYEDRAIIIMEATAHYHQILANFFRKHNYEVIVINPIQSGALKNINIRKIKSDKTDAYNIALLYRIKNYNETITHSDTVNSIKKLCRQHKELTDEIVEHINRLIAFLDISFPDFKKVFTDLQGKTPLSLLEKYPTIQEVLSPENKQDIIQLIKENSHKSSSYAEVKYEKLLKAANKSIEVCIVSLSSAVLIQTTVRVIFSLQEALKAIDNEIKRLSLLDEKFHKEIVLLQSIPGVGEYTACVVLSELGDISNFSKPKELVAFFGLDPGVTQSGTYNRKNNKISKRGSPHVRSILHMLAKSNVYPNRNREYLNPVMRAYFEKKIAEKPYKVVMCAIMRKMVQIIFAVLRNQKSFELRTPEEHQKLIREKSKLVA

SEQ ID NO: 176934 - protein, 365 aa, unidentified
MYSQGWLQDQSFHVAAQEITAQGGKVCLWPWISARTPSTRLCCQQEHPRRGSVEGTLKEQGKPRHKVFANTPVGHRQLLSWLIDNMDNGTATVHACLEATGTWADGVALALHEAGHQVSLVNPALIRACGQSQLKRTKTDKADAQLIAYFCQMHQPPLWSPPAPEIRHLQALVRRLESLEEMRVMAENRLTSGVTSAEVQAALEEHIAYLQAQIDKTRRQIRDHIDQHPDLQDQARLLQSIPGIGATTAALLLAELGDLTQFSRARQVAAFAGLVPRIRESGSSVRGHARLSQVGSSRLRKSLYFPAITALRFNPLIKALGLRLSAQGKSKMLIIGAAMRKLLHLAYGVLKSGRPFDPHFVAQTP

SEQ ID NO: 176935 - protein, 388 aa, unidentified
MNRIIKIGMDVHSTNYTLCAMEPTIGTEDRVFGEIQVAPDYKEIILFIESLKQKLGLSNNCSIECGYEAGCLGYTLYHQLTGAGIKCVILAPTTMLSPQGQRIKTDKRDAHLIAQCLCYGGYHPVYIPTGEDDAVKEYLRMRDDHKLAFKKVKQQINAFVLRHGYLYTGTKWTIKHLSWLRKLELGPMYRETLNEYMASYEEYETKIERYDRRIEEIASETRYQENAKKLGCFLGIRTHTALSLIVETGDFKRFAKGNIYAAFLGLTPGERSSSTKVNRLGISKAGNTHLRRLLVEASTGICKGIIGHKSKELRFRQADQSSEIVAYADKANIRLRSKYYKMIRHGKKRNVAAAAVARELACFIWGMMTGNISADRGSYSSKPAASQG

SEQ ID NO: 176936 - protein, 339 aa, unidentified
MSGIVTVYVGLDYHQDAVQVCVLGKDGGVLTNRCVANDEQAIRAVPERYGQHVVAAIEACCGAAELAERLSRSAGWSISLAHPGFVNRMKQNPDKSDFTDAQLLADLVRIGYLPKVWLAPAELRRLRRLVRYRQQLVDQRKTTKLRMRALLRENRLKPPPHVNAWTQAFFAWLETAELHDEDRWLMDQHLGQLQELKQQILQVNARLRSRLEDDAITQRLLSYYGVGLITAATMRAEIGRFDRFRSGKQLAKFCGISPRNASSGARQADAGLVKSGNPQLRRVLIELAQRLLWRGEGPHAQMAYRLLQKGKPKNVVVAAVANRWIRWMYHQMQPQSLAA

SEQ ID NO: 176937 - protein, 362 aa, unidentified
MLQQRNELDFKGQNIYVGIDVHLKSWTVTILTETQPHKTFSQPPKPEVLAGYLKKHFPNGKYHSAYEAGFSGFWAHYRLMSQGINNIVINPADVPTTQKEQYHKNDPVDSRKIAKSLRSGLLTPIHVMENESLEDRSLVRTRSTLVKDMTRFKIRIKSFLFFYGINYPENFENTRTHWSRNFMQWLKEIKLETWSGRAALDMLIQEAENQRQLLLQIDKKIRVLCRSDRYKQNIELLQTVPGIGITNAVVFITQIENVERFRTIDELASYVGLVPTSHSSGEKDNKGEMTFRGQKILKSMLVESAWVAVRIDTALSLSYNTYIKRMQPNKAIIRIARKLLNRMYYTLKNKRPYQTGIVGQNL

SEQ ID NO: 176938 - protein, 345 aa, unidentified
MKYMGIDFHKQYFVSTLMDEDGTVERKDRVSTDRAAIRDYIQGVKGDEKLKVVMEACRGWDFFYDEIEGLVDEVKMAHPLKTRAIAEARIKTDSLDSETLAHLLRGNLIAEAHISDSETRQKKNLIRYRISLVKMRTMLKNMIHYVLDRNHIEEPGFRELTDKFGKRGREYMEGFKLKGDDTRILKNYLSILDAVQKKIESAGRAIKKVFESDEICRLLETIHGIGELSAVLIRYEIGDINRFSSAKKLCSYAGLVPSVYSSGGKTYHGRITKQGNKWLRCILVELAQRATKRDMNLRQHYNKVKSRGGSRKARVAVARKLLEIIYKVWKEKRPYYENTCSGCPV

SEQ ID NO: 176939 - protein, 343 aa, unidentified
MDVQILGIDLGKNSCSIVGLDATGGVVMRRRMRRHSIVGLAAKLPGCVIAMEACCGAHHLGRLLAAQGHEVRLMSPEYVRPYVKAQKNDDRDAEAIAEAATRPTMRFVALKTEAQLDVQVLHRVRDRLVSQRTALTNQIRSILLERGIVVPQGRRRLLEALEALSSGPDGAGVGPRVRLLLDDMLDQWRTLDRRIAALDDEFADMARNDPAARRLATIPGIGVLNATALVAAIGDGRTFSRGRDLSAWLGLVPRQASTGGKPKLLGITKRGSKYLRKLIIQGARAALPSLARTATPLGSWLRGLLGRAHVNRVVVALASKLARIAWALLRNETAFAADGLVAA

SEQ ID NO: 176940 - protein, 466 aa, unidentified
MKIYVLGWLGAIKLYPYHVPGSVFIVFMEPYRKELTMYNKNYISVGIDVGSAFSFMTIVAPDGSVIQKPFKITHNKPDSLEKAVSAIKKAEELHSLESRTFLESTGIYHFPLFCYLVNCGFHVSIINPIITHSANNTSIRKVKNDKVDSIGIAKLGLSGDIPVSQFPAKLVLEIRSLTRKYYDLTDERSAHINKLKGDLHTVFPQYLDIFCDVTGKTSTMILRQYGTPDKILRGHKKTMIEKISKASRKGLSKAAERYEKLCAAATAAKTFGCQIDSIYFNISLTLDLIEKLDSALDSILQRIHQLVTFNKSEKFIQQIKWLDTIKGVGFLTAVTIMCEIGDFSAFRNPKQLFAYFGLDPEVNQSGKFVGTEMHMTKRGSRIARRAVFAVALASIRTKRNGEGINPYLREYYEKKSGQKPKMVALGAVMHKVCNIIFAVLRDEKEFELRSPEEHCRQYQRPALQAA

SEQ ID NO: 176941 - protein, 357 aa, unidentified
MKRESEVILKNENVFVGLEDSKKTWAVCVRGMGQVVHETAMPAEYEVLSNYFRNRFPGCEIKVIYEAGFGGFELHDRLVADGIECVVTPPHTVTEEKVQRKKNDRIDCRRLAKNLENDDYHVCFVPDRDLREDRQLSRVCQQADADLKRTCNRIRRTLEFHGLDKGLPAGLWTQAMYARARKHVQESPVSESLHFSFEVLFRELEQLRQLKKEVILRLRKLARSQRYKESVVLLKSAPGIGELTAIRLVLEWGDLSRFKRKEDFASFLGLVPSDYSSGEEERQGHITKQGSRVVRSWLVESSWVAIRFDPVLLDKFRRVLRSCGSKKKAIVAVARKLALRLRRVLLTGEPYVVGVLE

SEQ ID NO: 176942 - protein, 419 aa, unidentified
MSFKILKFNCCGLDVHKTWIYACIGITDSNNRTEYKQARFSSFTKGLNELCDWLAKYNCKDVCMESTGKYWIPVFNILEQHNLWVTLSHPKYTKPMKGNKTDRKDAKWICDLYMCGMVKPSFIPPADIRELRDLVRYRFKLTCMITGEKNRAQNCLTVSNLKLDDVFSDVFGKSSRSITEQILKHPGETFDVTPFVDGRCKTPIEEIQAAVDGAISKEQAVKLRQCLNHIDELEMHKAEIEREIFRLSQKYESVLDLIRTIPGFDKNPLTAIQVLSEIGADMSVFPTAKNLVSWAGCCPRNDQSSRKIKSTRISRAGSYFKPVLVQIANALIKSKKHPEFTTRYRRIKARRGHKKAIIAICRMILTAIWHILTDLKPYTPEGFLESRPVNKEKVLTISQALNLIKQRGYIIKDDVGPVT

SEQ ID NO: 176943 - protein, 368 aa, unidentified
MKNITTYVGVDAHKKDLFIAMLVGDQTTPVTWQVANEPNAVRRLVRKLERDAPGPVRMCYEAGPGGYALQRQVTTPRVSCQVIAPGLIPRKPGERVKTNRRDARKLVELLRAGLLTEVRPPTPEEEAVRDLCRARDDAREDLQRCRHRLGKLLLRRGLYYSGRNWTRAHRGWVDGLEWAQPAERIVVDDYLLAIDQLEARLTELDTRLTDVAQREPYREPVAWLRCFRGIDTLTAILILAELHDFRRFHTPRALMAYLGLVPGEDSTGEKHRRGRITRTGNALVRRLLVETAWHYQHRPSVGVALTRRRTGQPGRVIAIADKAQQRLCRRFRRLAEQHKPAPKIAVAIARELAGFLWAALQPTPSPAK

SEQ ID NO: 176944 - protein, 339 aa, unidentified
MPATSIVGLDTAKNVFRLHGADHEGRLTFKKRLRRGQVTDFFANLPRCVIGLEATQGAHHWARILETFGHTVRLVAPQFVKPYLQSQKNDPNDAAAICEAVSRPQMRFVPRKTVEQQDLQALHRIRSRLIGCRTQISNQIRGLLAEYGIVLPQHLIQVRRALPQLLDEKEKRLSDFAKRLFSTLYEELQALDQRILAMEAEVNQAFQQNPLCQRIAEVEGIGPVTATAVVAAISNGNTFHNGRQFAAWLGLVPRQNSSGEKQRLSGITKRGDRYLRTLLVHGARSVVFRAAKKDDARSKWIAEKQKKLGTAKACVAVANKNARIIWALLAHDEPYRRAA

SEQ ID NO: 176945 - protein, 400 aa, unidentified
MRFFVGIDWASRAHAVCIVDQPGRVRWQGSVPHTTEGLTELVGRLRRFRGRLRVALERPSGLLVDTLVAAGVELVPIHPNALKATRPRYSAAGSKSDPGDAFILADLLRTDGHRFPALRPPSDDTRALRALVRGRDDLVRQRLALANQLRALLERFWPGAAAIFADVDSPIALAFLARYPTPLSAARLGEKRLAQFLGQHAYCGRRPVGELLARLRTAPASQVGEAEAEASGDLVRALVAVLTPLVGQVQHLSAAVTAALAQHPDGPLVQSLPRSGAVNAAQILAELGDDRARFPSDEHFAAEGGLAPVTHASGQHHAVVFRWACNKRLRRALTTFADNSRHASRWAALVYQRARGRGCRHQHAIRILARAWARILWPCWQDRAPYDVTRHRAAQALAAA

SEQ ID NO: 176946 - protein, 315 aa, unidentified
MTSEFRKSYIGIDVSKHTLDVFVLSSKESIQFQNNLAGIRKLIKKITPLPALFVAMEATGGYEKLVAQTLANNNISLAVVNPRQVRDFAKALGKLAKTDRIDAQVIATFAEKMQPRDTIMTNENQQKLAELHSRRRQLIDMIGMEKNRLDKAGSTAKKSIKHIIGLLEKELKKIDVALTKNIQSDEHTAEKNALLTTIKGVGVVVAAGILADLPELGTLEGKKIAALAGLAPINRDSGQMRGKRTIGGGRACVRRTLYMAALVAVRHNDVLKAFYVRLCDAGKKKKVALVACMHKLLIIMNAMIKNNQPWRSVTT

SEQ ID NO: 176947 - protein, 405 aa, unidentified
MEVVYERCCGLDVHKRTIVACLLTGKQRETRTYNTMTADIKNMSEWLSENKCEAIAMESTGVYWKPIYNVLELYGWDVIVANAHHIKNVPGRKTDVKDAEWIASLLKHGLLNPSFIPDRDQRETRDISRYRKSLVEERSREINRLEKILEGANIKLSSVVSSLAGVSSRNILDKLVDDTLNKDTIAGMLHNQLRGKTDELLRSCEGVLSKTQKVLVKAVLSHVDDMTKRISDMDDYLNDKLNGYDDAMKRLQEVPGIGSRSAQVIVAELGVDMSRFPSSKHLAKWVGLCPGNNESAGRKKSSKTGQGNKTLKTTLIQSAQTASRKKDSFFKAQYDRLVVRRGANRAKVAVAHSMLIAIYHMLKYETPFLDLGESYYNQFNPGKKINYHLKKLQQLGWTSPVGVSV

SEQ ID NO: 176948 - protein, 388 aa, unidentified
MQIITDRPQPPTAIRTDLGAIFVSLELSRSTWLITSLSPGGGEKMSKHTVLSGDVAGLWARFCQLKDKVQVRTGHVVPIIVIQEAGLDGFWIHRLLQDERVESHVVDPASIATSRRRRRAKTDKIDGEALVRALLAYKRGEPRVCAMVRAPTPQEEDRRRICRERKTLTAERIEHVNRIKGLLFAQGISDYEPLLRKRRERLEELRTGDGRPLPEHLKAQIGRELDRLELTLQQIKSVEAERDAMLSPSDEGTPAPGAMLKNLKGIGPEFAGVLWSEGLFRNFSNRRQVAAYAGLAPTPWRSGSVAHEQGVSKAGNPRLRTTMIQLAWLWVRHQPRSILTLWFHQRVQLNGGRVRKVLIVALARKLLIAFWKYVTAGVVLEGAETTAA

SEQ ID NO: 176949 - protein, 427 aa, unidentified
MKNDLLTTLSIGIDVSAKTNVVCALDFRGNIIFRSSAPNSLPGAENILKDILTNLISNDFKSVTIALESTSYYSLHLTNFLSTSEDLLPFHPIVYNLNPKNIRNYKKSFTDMDKTDPNDAFVIADYVRVGRVKTKPWQGTHFLALQRLTRHRLHLVGSLSKEKTYALTNIYLKFNQLTLLNKNSRPFSNNFGATSMAVLSEFLSLDDIVYMPLEDLVDFIHLHGRNHFIDPEHTAILLKKAAQDSYRLDKTLYDPINTAITSSFCIIKTFEKEITIIDKAIKKLIKGFNTVEYQSLESIPGIGKVLAAGILAEIGSISFFESNDKLAKFAGITWRQNRSGEFHSEETKMTKTGNKYLRYYLIEAANLVRQFAPEYTAYYNMKYNESSKHKHKRALALTSRKLIRLIFALLSNNQLYSDKYVGSNVIE

SEQ ID NO: 176950 - protein, 391 aa, unidentified
MIYVGIDAAKDKHDCCILGGNGQTIREVFTFPNNHGGFDLLKTEIQRSMEAESSGQIRAGLESTGIYSGNLEAFLRSSGIELVVFNPLQVNLYRKSQTLRKTKTDKVDAKCIAQLLITAESNPVSVSYQIQELKALTRHRFRLVSQRTKLKVSISRLVVILFPELPTACNSVTQAAMKALLLELPGARQIAACRIDRLTNLLASASKGRYGREKALEIKSLAQKSIGANSPATSLELQLTLQQLDFLLQQINKLDKAIRTAVAQTQTPIMSIPGIGPTLAAIILAEIGDIHRFSSPDKLQAFAGLDPSTYQSGKFKADRTPMVKHGSTYLRWALMQAARLAAVHCETFGRYLATKQAQGKHYFVALGHTAKKLIRVIFRILSANEVFVPQT

SEQ ID NO: 176951 - protein, 338 aa, unidentified
MKLYAGIDLHSNNHVVVLSDADGKEVYRKRHPNDLKVTLNALEPHQAQIEGVAVESTYNWYWLVDGLMDNGYRVHLVNTAAVQQYQGLKYADDNTDARWLSNLLRLGILPEGYIFPREERAVRDLSRKRMQLVQMRTANILSIQNIAARNRGSSLSANRVKALAPEDIEQLFPLSEVALAVDSNRVIVQALEEQIIRLEKAMLAHAKIRPEFHHLLSAPGIGKVLALAILLETGDIGRFAGPGNYASYCRCVGSDRISNGKSKGKGNTKNGNKYLAWAYIEAANFAIRHNDRIKRYYQRKLDKTHMVVAKKTVAHKMARACYHMMRERTDFDLDRAFG

SEQ ID NO: 176952 - protein, 342 aa, unidentified
MDYFAGLDVSVKDTSVCIVDDAGKIVREVKVTSEPHALLAVLNNPAYHFKRIGLEAGPLSQWLFSSLAEAGLPVICVETRQMRAVLKAQINKTDRNDARGIAQMMRAGLYRPVHVKTLRSQKLRMLLVHRKLLQSKSIAIENDLRGTLRNFGLKVGVAGAAKFEARIKELVENLPDLAALVEPLLVVRRVLREQIAVLHHRLLAIVRNDEVCRRLMTTPGVGPVVALTYRATIDVPARFRNSRAVGAVMGLTPCKYQSGQSDRTGAISKCGDEMLRVMLYEAAQILLMRSTKWSWLKAWAMQIARRRGMKKAIVALARRLAVIMHRIWVDGTEFRWTKAAAA

SEQ ID NO: 176953 - protein, 350 aa, unidentified
MQYVGIDWAYRRAAWCAKQADGTIFGEGFVPADEDGLARLVIELGPEVRACLEMMSGAVWVRDQLAGAGWQVEVADARKVKNVAPLACKTDKVDARVLAELCRRELVPALWIPSLEERALRERLKRRLHLVRLRTSAKNRVFGLLTQWGLRIPCDRLRRPDAMELLETRGVPEVWRRSVAEALAVIELLDERIAPLDRELGPLARADRRVCLLSTIPGIGPLLGLTIAAEIGDVARFPSPRKLIGYSGLAPRVKKSGERSRTGELSKAGSRTLRFAAVEAAQGAWRETNPWHRLYSDVKARTGKANPAKSAVARKVLIACWHVLSLDEPFKPPHPPTDLVPASSLCFLAA

SEQ ID NO: 176954 - protein, 355 aa, unidentified
MKFYTKQHKYYCGVDLHSRNLYVCIIDQKGEIVKHKNIEAGPEAFLNILKGCRDDVVVAVECMFAWYWVADLCKAEAIPFVLGHALYMKAIHGGKAKNDRIDAHKIAALLRGGMIPMAYVYPSEMRATRDLLRRRNHLMRKRADLLAHIQNTNHQYNLTRFKKSICYRGNREGIAEQFSDECVRKSIEINMVLIDKYDYLLKKVAYYITKKAKVHDMDSFVRLQSVPGIGQTLALIILYEVHNIRRFPRVQDFVSYSRLVKPAKESAGKRYGHSGAKIGNAHLKWAFSEAAVLMLRESSDVKKYKAKLQRKHGKAKALTILAHKIGRAVYYMLKRKEVFNTDRFLNKQMIQTGRA

SEQ ID NO: 176955 - protein, 373 aa, unidentified
MKKVRFLGLDVHAETIAVAVAEPDGEVRSLGIIPNREESVRKLVKKLGPAEQLQACYEAGPTGYVLYWQLSGLGVKCEVVAPSLVPVKAGDRVKTDRRDATKLARSCRAGDLTAVWVPNEEHEALRDLVRARETAKQDQLRARNRLSKFLLRHGRRAPAGIKAWTQKYEQWIREQVHFEQPAQEYTLLDYLHEVEHMGERMRRLEQAIEEAVKLAPPQMQEVIQALQALRGVAQISAVTIVAELGKISRFERPRQLMGYSGVVPSEHSSGKRIQRGQITKTGNAHLRRIAIEAAWAYRHRPVIGAALRKRQEGLSEEVKEIAWKAQHRLHKRFRTLSAAGKEKQKLVTAVGRELLGFICAIGVQVERNHKRAA

SEQ ID NO: 176956 - protein, 401 aa, unidentified
MEPIYTSCCGLDVHKRSVKACVRSLDNTGRVHQEVRTFGTMTRDIVELSKWLSDEEVTHVAMESTGVYWKPIYNIMEGEFTLLLVNARHVKNVPGRKTDVKDCQWLAQLLQCGLLKGSFVPKKAQREFRDLTRHRTQLTNERSAVANRIHKVFEDANIKLGAVATDILGKSGRDMIDALIKGDMSSEAMADLARRQLRGKIPQLCLALEGNVTDHHRFVLKQLTEHLDYLESQIETFSQRIEELSRPFREAIDATAQLPGFKIHGAQNVIAEIGCDMDQFPSDGHLCSWAGISSGNNETGGKRKSGKTTKGSRWLRAALVQAAWAASNKKGSYFQARYRRLAPRRGKKRALVAIAHSLLVSIFHVLKDNVEYKDLGADFFDKLNSKCLVPYLVKRLKNIRL

SEQ ID NO: 176957 - protein, 342 aa, unidentified
METVYVGLDLGSSAFQQVAMKTDGSVKENRSFTTSEAHLRTAFSDLRGEIQVHLEAGELAPWAASVIAPLVSRVVCSHPQSNAWIAKDADKCDRVDAYKLAELLRLNRFKEVHYAPDQPRRNFKQLVQHYDELTAQQARLKTKLKARLRMQGVIVTGARLFSATGRKPVLAEVKSPDLRTAISQLYAVLDQSVEAQTQARLLMLRAAQAFPEIKLFRTAPGVGPIGACRFSAYIHTPNRFSTTRKLWKYCRLSVSHRSSNGKPLRRPRLDRCGCGRLKDVSRKAFDVAIRSRQDNGFKRAYQRALETTHDATHARLTVQRKIVSTLRAMWLTMTPYCDELSR

SEQ ID NO: 176958 - protein, 306 aa, unidentified
MYLGLDVAKDTVVLASEPAGVQGQFTTDDAGLRALVTQCQAQPVTLLVLEATGGYEAPIVAVLAAAGLPVVIVNPRPVRDFAKALGRLAKTDAIDAQVLALFGARVQPPVRPLPAAATTQLQALLLRRRQLLDMLHAERQRHGRSQGRIRANLRSHIHWLERSLAGTEDDLRQQIEASPLWRVQDALLQSVPGVGPTLASTLLGLLPELGRLDRRQIAALVGVAPLARDSGTHRGRRTCWGGRPLVRTVLYMAALVAARWNPVLRAFYARLCQAGKPRKLALTAVARKLLTILNAMLRDGRRWQYA

SEQ ID NO: 176959 - protein, 415 aa, unidentified
MALKIVYKICCGIDVHKNFVVACIAKTDKQGVTTYERHHFSTYTKGLKQLLKWLLDRNCKDVCMESTGKYWIPVYNVLEHDCSIVLAHPKYVKAIRGKKTDKKDAKWIADLFKHDLVAGSFMPPADIRQLRDLMRYRFKLTCFKSSEKNRYQNCLTVSNIQLGNVVSDTFGKSSQKIIAKILENPDDTSFDIEPLIHGSMKKKLPELELAIDGFITPEQAGKLKVIKKHFEDLESRKAELEKLILALASPYQQELDLILTAPSFKNKFTAIGIISEIGVNMEAFPSAKHLCSWAGLTPTNNESAGKKKSVRVSKAGCYIKPLLVQCANSVVKSEKHPEIRNRYLRLRKRRGHKKAIIAIARMLLTALYNMLKNKEPYNAELYRKSDVLPVNREITIEQAILMAQFQGYKIKSAAE

SEQ ID NO: 176960 - protein, 346 aa, unidentified
MDLYIGFDVSLASTAMCGLSEKGNLVKETTAPSEPDDLVTMLNALPGRVVAVGLEAGPLSQWLYQHLTEAGFPIVLMETRQVKGALKAMPIKTDRRDAEGIARLLQMGWFRPVHCKSLSAQEMRALLSSRKAIQQATLSLELSIRGVLRNFGLKMGQVAKGRFEQRVLELTEGNPMLQAAANPILYARRALRQELAGMEKLLRDHAKSDPVCRQLMTMPGVGALVALTYKAAIDDPDRFSSSRDVGPWVGLTPRREQSGERDIIGEISRAGDAGLRTALYQAATVMLHSGRPNWLSAWAWAVAKRRGKKRATVALARRIGVVLHRMWQDSTEFRFTRADTTTAAAA

SEQ ID NO: 176961 - protein, 313 aa, unidentified
MEPISVGIDVSKRELVIAVEPTGERWTSDTTVPAINAVVERLRSLRPRIIVVEATGGYERALVAALAAADVPVAVVNPRQTRAFAKAIGRTAKTDAIDATVLAAFGGRLDVEARPVADDATQALAALVARRRQLVEMIGMERARLEHAPSTGPITRELRRHIRWLERRVADVDDDIGTSIAAHPIWRVKEELLRSVPGIGPTTARTLLAELPELGRLDRRRIAALVGVAPVNCDSGQFRGQRHIWGGRASVRTALYMAALVASRYNPVLRVFYQRLRAAGKPGKVALVAVMRKLLTTLNAMIKHDTPWNPATS

SEQ ID NO: 176962 - protein, 408 aa, unidentified
MDAIVACCAGLDVPQASVVACLNRGGKRGAGKEIRSFGTTRSELAEMVAWLRDEGCTLVAMESTGIYWHPVYFALEGQFELIVGNAQHIKNVPGRKTDVKDCAWISDLARHGLIAKSFVPPQPIRELRDLTRYRRKLVQVQAGERNRLIKLLESATIKLSGLIADVFGVSGRAMLRALIEGEETPEAMAQHARGRMRRKIKDLARALDGRLEEHHRFLMRLQFARIEAAEHDREQLDARLSEKLEPYAEPLRRLMRIPGVDWITAATIIAEIGTDMSAFAGAAQLASWTGICPGNHQSGGKQRRGKIRKGNVHLKAALVTGAIAVAKTRGSYLAEKGRRLRARRGEMRAHVAIAHKILIAAYHVLSGNEYQDLGADYLDHLNKKRTVNQMTRRLEALGFNVQITPKAA

SEQ ID NO: 176963 - protein, 400 aa, unidentified
MKGPIVSIDVSNGNSHFQCFTQRGTKMGKVHRISHTVEGFNFLKSKIEELEKKTNEEVVAVYEATGVYTKPLERFLEKNEIKQYSISPLQSAKQRKTEIHNKKTDKKDPESIAEVYYIKELRENEKEADLYHELRTANRVYEDCLVHLRKYKVTFQSHLSIVFPGYMKLFQDGYSQISLQLLEMYPHPDRLKNKQPEKVAKKLNKQTDHSFEVCLKTAEKAIEFANKTYPGCDKEDAWVAVLVDDIHHLQDTMEEAEAKLDKIIELAKATPYYSIILSIDGIGPNLASRIIAEFGDISKFKTRGAMVAYVGNDPNRAESGDIEGYHLSISKKGNKRLRCILYLAVTCSIRSRKENPINAFYQKKRQQSTPLKSKAAKVACITKLIRTIHGMCKTGTVFTS

SEQ ID NO: 176964 - protein, 359 aa, unidentified
MRVQINKLSFKGQNIYVGIDVHLKSWSVTVLSEHSVLKKFRQNPDAAALYNFLSSNYPNAHYHSVYEAGFSGFWIHHQLVGFGIHNIVVNAADVPTMSKEKLRKTDAVDSSKLARELRSGTLKGIYVPDVKTLETRSLIRLRKSIVKDTTREKNRIKSLLHFHGIAIPEEFTKHSVGTWSKRFLAWLRTAELSTEYGRSALDMHIEQFVRLRGMLLQKTRLIRDLSRTAAFAEPLRLLTTVPGIGITTGISLLTELDDITRFKNAEQLASYVGLIPMCHSSGEKEGIGGITIRRHATLRCHLIEAAWVAIRKDPAMTMAYAEYRKRMNAQKSIVKIARKLVNRIYFVMKRKQEYVSCVV

SEQ ID NO: 176965 - protein, 335 aa, unidentified
MQVYGIDLSMEKFDVNFIDVTGKEKNKQVKNRLTSISKFLENVPDNSVLCAEHTGSYGDLLVYLCNLMGIIIALVPGYTIKHSLGMIKGKSDPIDARRIREYGERFFDKLEFKEYDTEEIVEIKSLYTLRAQLVKARKSLRTGAHGRSNLPMQSISVNKHVQQALCNLDVEIAEVEYEIEEVIKANEALNENYELAVSVKGIGPVIATDLLIKTGNFMDIDTARKASSYAGVCPFPNASGKMVGKAKTSPFADKKLKALLYMGAKSAVKHNKEYRLYYQKKKLEGKPHYLIMNNISNKMLRTIYSVIKNKTPYRQDYICLDPREKNINSSTNKVA

SEQ ID NO: 176966 - protein, 430 aa, unidentified
MNESVSEQPLSPAVAAFVGIDWADLKHDVVLRSVGDPAKSEHQVIKSEINALADWIAQMHERFGTKGKVLVCLEQSRGALIYQLMAYELFELYPINPSQLANYRRTFFSSGAKDDRPDADLLSELVMCHRDRLKAWKPDDQLTRELASLNEGRRNAVDQRTELANEIKSQLKLYFPVALQILENDITTALAADLLVQWPTLAELQKVSPAKLRKFFYGHNSRQEKKILERLALIKEAKPLTTDVAIIRPNALRVKLLARQLKSLLPFIAEYERRIAEIFGSHPDRFLFDNLPGAGPALAPRLLTAFGTDRDRFEVAGDLLNLSGIGPVRIASGKKTGKNASVHCRRACPKFLRQSFHEFGECSIRYCPWAQACYQAQRGRGKGHHAAVRAVTFKWIRILFACWKQRTPYDPQRYFQALQTRGSDYAQTTD

SEQ ID NO: 176967 - protein, 473 aa, unidentified
MSRVGEESDDVLLLSLTGLVSLNIQEDVVVQGNRLSRGDKRRNAKLAELRGLVRVDHAIVSIDLADKKQAVVVCDHDSRVLVRKTVKLRAWESGPVLDWARGVARQHGFADVTVGCEPTGHRWMVLNQLAAQRDMTLVCVNPMLVGRARETEDYTRDKSDDKDAMLIARLVAGLHCYAPECADETWARLRQLGRRRERLVTEASACVAQLRDLLECAWPGVLEAAAKPFEAANWCAAVAVVLERCNAHPERLARLGLARFEAAVVRELPRWGGSRRRRAIIEAVFTALVDPRGVMTQRRGALERAHWVLADWRETKTRLAQVEARMVEVLDELELTELLTSIAGVSAVGAAAMLAETGDPARFDSPRALVKHAGLCPRDNSSGTFTGRSRISRRGRPGLRLAAWRAVWGALAHNPVMAARYRYLTGRQDNRLTDGQARAAIAAALLRWIHVVVTQRVPWDPTIAGAEVMPAVA

SEQ ID NO: 176968 - protein, 448 aa, unidentified
MSDRSGVSRGDRNRNARLARLREAVPLSNAIAGIDLADSKQMVVVTDHESRVLARRTFRRRAWELGAALDWAAARGAAAGFGGVTVAVEPTGHRWRVVGQLAAERGMPFVCVQPLMSSWARRAEDLTFDKTDDKDAVLITRLTAQLRCYLPEPADATWARLRQLGIRRARLVAESVSQVQQMRDLLECAWPAVLDAARQPFKSTTWHAALTIALTRGDGDLARVTRLGRRRFDAAVRRQLARWDAVHPWRKIIDAVFAACADPAGVTELRHGALERVALLLADWRDTQARLADTEQRMVTVLGELGLTELVTSITGLSAVGAASILAETGDPARFTTGRALVKHAGLAPRQKSSGSSPGRSRMTGQGRPALRLAAWRAVWGALKSNPVYAARLAHLTGREHNKLSTGQAHAALAAALLRHLHAVITTGQRWDPAIATGGRPSQTLIAA

SEQ ID NO: 176969 - protein, 312 aa, unidentified
MNTEINIGIDTSQSQLDIFIRPLDVFFSVENTPQGVKDAVRKLHPYNPQRVLIEATGRLEMTFVCAAHKAGLPVVVCNAGQVRKFAGASGRIAKTDKIDAQCIAHFGEAVRPRLTELKPEKLQQISDLLAVRCQCLDMSTMQKNRLQRMPKSVQAPIRRILKSIQKELLGIDQRLDKLIDAVPEWRATRDLLLSAKGVGKVLAYTLMSELPELGKLNRKEIAALVGIAPMNKDSGGYKGKRQIRGGRHKVRTVLFVSMLSSIQCHPKLKPMYHRLVAAGKPKKVAIVACMRKQLIILNTMMKNGTHWDENMV

SEQ ID NO: 176970 - protein, 358 aa, unidentified
MNYIGIDLHKKFSQVTVLGEGGEIKERVKIDNREEVLNRHFNNFDEPSKAVIEATFSWGWLADYLQSRKIEVMLAHPQKVKAIASAQIKTDKVDSLILAKLLRADMIPTAYFCPKPLREVKEVLRSRASLVGLKTQVKNKIHSLLHKYNIREDEKFSDLFGKSGKEFLNSLELGEYTTPVLKRYLETLSFLEEEIKKTSVDLRQVFEKDEVAQFLERLPGIGFYTAIILSKEIGNIGRFFSAKHLCSYAGLVPSTYQSGEHTRHGKIKQGNKYIRWVLIEAVPKTIGKDKVLNAFYQKIKAKKRHNKAKVATARKMLGQIWYLLKTKQSFVDPETGSPVFFSGASSFPLKGIEVNSHR

SEQ ID NO: 176971 - protein, 305 aa, unidentified
MNVSIDVGKCFLDVCLYEKDLHWQVENNPEGVRKLLGRLGGYKVQRLVMEATGRYQLLLAEQAFKKGIPVGIVKPLFMRRYAQALGKTAKTGKIDARVIAELGARVNPTITLAKSKNLILIRDLLSRRRQLVNMRTKQLNRVKIMAKAMEVSCKRIIRTLDLEIARMEKQLDRLIENESEWADKKALLKTAPEIGDTMVYTLLADLPELGTMTNKQAAALVGVAPMNRDSGKMKGKRRIQGGRYSVKTTLYMATLSATLCNPVIKEFYQRLTSQGKHNKLALTACMRKFIVMLNAMVRDNCVWQY

SEQ ID NO: 176972 - protein, 441 aa, unidentified
MIRRSVAGIDLGSERHWVCAPTQDRSGREVASFGATTAELLRMAEWLKGRQVESVAMESTGVYWIAPHEVLEGQDLQVLLVDTRQLARVPGRDKKSDPTDCEWMQRLHSCGLLRGSFRPEEAVCMLRTLVRDKANLVAESGDWLRRMQKSLDQMNVRVHRAVSDIDGVTGMAILRAIAGGERDARKLANFRDARCSKTEQEIAEQLSGHWREDHVFSLQQALKMYDAVQERIAAYEQEILRKLDEMEREEPPEPTAPPLQNANKARMIKKRGQEAKRQALYRMSGVDMTQIDALGVETVEVVLSEYGSDLSRFPTEKEFVSHVTLAPRVPTSGGKPVKKKKRNSASTRVAAALRMATLSLRHSPTALGAYYRRMAQRRGGDIAVFATARKLATLIYRLLRWGQPYVDEGAAAFEKRYRQHRIHRLAATAKELGYQLTPATA

SEQ ID NO: 176973 - protein, 427 aa, unidentified
MKPIYRRCCGIDVHKKSVSVCVLPPEGQQGMVKRETFRTFLRDLKRLRAWLKNCKVTEVAMESTGQYWRPLWNVLEGHIANLVLLNPAHVKGLAGRKTDRRDAEWLARLQEREQLRGSFIPPVEIRELRELTRTRVHLLEDSNRMKNRIAQICETGNIKISSVATDLFGVSGRRMLEALIENKRDAGWIADYARGPLRRKRDQLEMALEGTLTDHQRGLLTRLMRQVKMLDGEVADLTREIEMRVAPWEEMIDRMTQIPGIERVSAWTILAEIGTDMRAFPDARHLASWAAVCPGNRESGGKRMSGKTRKGNSYLRRILCQAAWAATRKKGSYVGVLYRRVRSRRGHQKAIMAVAHHLLTVIYHMLHDNQPYKEPGTACYDEKRKPEITKRLVLRLQRLGYRVTLEIPMAPAEMLELASDIALSGTS

SEQ ID NO: 176974 - protein, 343 aa, unidentified
MYVGLDVHKKYCYYAMVDGRGTVVKKDRFRTTVEELEEFASALPEGDQVAIEASASGCFVYEQLDEQGIAVHLAHPTMVRPFAKKHVKTDKVDAIVLAQLLRMDYLPESYVPDEAMRDLRTVVRHRAGLVRIRTSLKNRVHALLTMEGVQPPAVSDLFGKKGREFLETVKIRESRRLVLDNYLKVLDELNERITEVEQFLEEKAESIEEVAWLRTIPGIGLHNALLILSELGEVSRFSRPQGLVCYAGLAPKVAQSGDQVRYGHINRQSNGFLRWAFVQSAWSAVLSSTPNRFQRIYQKVKARRGAKIAIVATARHLAESVYWVLTKQEAYKEPKAQRASSSP

SEQ ID NO: 176975 - protein, 393 aa, unidentified
MGVIIGMDPHKRSATIEVIDQTGRRLAIGRFGTDKAGYADLLAAGRRHPERVWAVEGCNGIGKHIAHRLVHDGEVVVDVPPKLSAQVRVFATGNGRKTDPVDARSVALAALYAPADPGLRRVAVDDQLVVMGLLVDRRDELGRARTQTINRLHRLLLELFPGGAKQFLSAPQARALIATTKPRDLAGKTRRRLAVELVTELEAIDRKIKTAEKDLAALVTERGSTLMELTGIGPTGAARLLADVGDIHRFRDKDRFASWNGTAPLDASSGAQQRHRLSRAGNRRINRTLHIMAVVQLRNPTPGREFYDARKAGGTPSMMAMRALKRRLSNVVYTRMLADQNRRDHGSATGPGGHLGNDSDSSATGSQPNAGSSDKPLPGPATSKPRTPVPAVS

SEQ ID NO: 176976 - protein, 369 aa, unidentified
MHGPLADHDEGTGLDTIADDDLEVTLGVDTHLDQHAAAVLDPLGRLLGTTSVCATTAGYEELLTWASAFGLVTRAGVEGTGCYGAGLARFLQAAGVDVVEVTRAARADRRHQGKNDPLDAQAAAMVVLAGRAAAAPKERSGIVESIRLLRIARQTAVKARSQAVIQIKAILVSAPEPLREQRSLKIRQLIDRCASARPGSGRDPVAVTRRVLRSIARRYRALDTEIAQLEAELDELVALAAPRLLAEHSVGRETAAKLVTLAGDNPDRLRSHSALAALCGASPVEASSGKTVRHRLNRGGDRQANNALYTIAMVRMQHHPETKAYVARRTQEGKTRREIRRCLMRNLARRLYPLLIADLTDARTIPLLT

SEQ ID NO: 176977 - protein, 362 aa, unidentified
MTTQEKQCTLFVGIDVHKDTHTAVGLSPFGEKIFEMTIGNEAEDFISLIKKTKVESEKEGLIPSFGLEDVHSWGERLSSFLVEEGLPVRAIAPILVDHRRSKTTHPEKSDSLDAQRVAEVMIQRIDTLPTYTLSEEAQKAKQIRELSLEREWLVKERARLKNQLHILLHRIHNTVYRIKFKDPFSKKALRYWMRGAPKDTDAILEQRMKRAVRRLLDLREEIQEIEDEIESMMEDNGQTIATASGCGTVIAAEIIGEIGDVARFHSPGALAKYAGCAPREHSSGKTIRWRKTRSGNRRLNRSFHRMALSQISRSGNDAARTYFKRKISEGKTKGQSLVCLRRQLVNVVWMMMRHKTEYRWPC

SEQ ID NO: 176978 - protein, 328 aa, unidentified
MCTLGIDVSKNKIDLCLLTAGPGGKKKHKVLTNEPAVARKVIDWLNAQKCVPESVTVVLEATGIYHENLAYGLHEAGVSVCMANPCRVREFAHGMDILNKNDAVDAFVLACYGELKSPAVWVPPSPEVRKLRALLRQRDALREDVQRTVNRLEKANSTSTPQEVIRSLERTKSWLNEELARIEKLITDHTDNDPGLKADLDLLKSIKGVKGQVGREMLALLKDGTFKSASQVAAYLGLTPVEKTSGSSVRGRPHMSKTGPSGVRAKLYVAALTASRWNKQAKAIYERLVAKGKAKKAALGAVMRKLVHLCFGVLKTRLPWDENYVATA

SEQ ID NO: 176979 - protein, 411 aa, unidentified
MDRIYDNCCGIDVHKKLIVACFRCGKKQDVREFGATTRELLSLADWLKEGGCEMVAMESTASYWKPLYNILEFSDLNAMVVNARHMKAVPGRKTDVKDAEWIADLLQHGLLQPSYIPDKDQRELRELVRYRKSLVGERTRELNRLQKMLEGANIKLSGTVSDINGKSARSILEYLLTGEPIDEAKYDEMYNQKVIAHNLKATREQIIDDLNGVMSSLQRRMMKELLIHLDELNIHIRNLDDEIDNFMKPEEKQASQAIQDVTGIGNTSAQAIISVIGTDMERFPTDKHISSWAGLCPGDNESAKKRKSGKTRKGNSLLRTTLITCAHVAVKNKKSYFHAQFMRISAHRGTRRAYVAVAHSMLIAIYHILKDGVVFKDLGADYYNQFNKERKINAYLKKLKALGWEAPVVAA

SEQ ID NO: 176980 - protein, 312 aa, unidentified
MKIICGVDVSKARLDACIEPGAIFASFDNDAAGIAELAAFCRQHQAGLAVMEATGGYERRAFLLLWEAGMPCALTNPRSVRRYAEAMGILEKTDRLDAGVIARFAHAKNLQPTPAPTPTQQRLKALVARLRQVTDDLTVQKQRRASLADNAEMLASIGEVITLLKRQSRTLEGEIASMIDDDPLWAQLAEAWRSVKGVAGRTVARLMADVPEIGTYSNKAIAKLAGLAPLADDSGKRQGKRSVRGGRAAVRSILFLVAAIAAKYDKTLAAFRDRLLAAGKPKMVVRIALAHKLLVRLNAKARDARAQYANAT

SEQ ID NO: 176981 - protein, 435 aa, unidentified
MNFIGVDLHKKSITICVMDEKRKILARKTVACTQTDEILEFFRQFRPFKVVVEATASYVWFVELVEPLAEKVVLANPKKLRVIAESTKKTDRLDAQVLTEFLVLDMIPESYQATPRLRQHRALVRHRQYLQSRITSVRSKIRHILSNYNADRKDLFSSNCGLAYLKEVRLNDVDRFVMKQLWAEWQDHLAQRLAVSKKLKAFVAKAPQREAEAREILKTAPQVGSVTAEVILSELGDISRFRNAKTVCAYAGLVPVVRQSGERKSKDMKITKEGSGLLRWALVEAAWRLVGKSPKWAALFSRLRHRSGKKRAIVAVARKLLCVLYAMLRTSTPYKIVTTQTTAARTTGKESVRTSTPDQTTPTETTAPRTTGKKLVRTSTPEQTTPTETTAPRTTGKKLVRTSTPEQTTPTETTAPRTTGKKLVRTSTPDQTITT

SEQ ID NO: 176982 - protein, 344 aa, unidentified
MRNPNILAIDLAKNVFQVCKTDSQGNVVFNREVTRLKLKALLCKQQSSLVAMEACASAHYWARYARDLGHQVKVMSARSVKAFQTKQKTDKNDALAIATAASLQHIHSVKIHTVEEQALQALERARHLALAQQVAQSNQIRGLLSEFGVVIAQGMSALRVNIPLVLEDAENGLPDSFRAVLHRLWAQLNVQIEHVDMLTKQLELSVNTDPVCQQLMKLEGVGPLGALGLALRLGKGENFTNGREASANIGLTPKQHSSGGKERIGHISKRNADKRLRCILFQGALSVISNVIKRPARTTKEQWLKTLIERRGKKVAAIALANKTVRTAYALLKSNSEYQPQLLA

SEQ ID NO: 176983 - protein, 344 aa, unidentified
MVVLGTDTHKRSHTVVAVDEAGVEIGSMTVTATPEGHLRLVKWAAKWPQRRWAIEDCRTLSRRLESDLLRAGELAVRVPPKLMAGVRRSARTRGKSDPIDALAVARAALREPDLPVARLDGPSREIRLLVDYRESLIKDRTAAQNRLRWRLHELEPGYDPPPGSLNRYKTLDHIDQLLGAHTSMVATLGRREVTRIRELTREANQLERDITHRVTQLVPSLLEIPGCGALSAAKLVGEAADMTRFKSRDAYAMWAGTAPIPVWSANNERFRLNRGGNRQTNAALHRIAITQLRIHPDAQAFIKRRLETGSTKREALRLLKRKLANVVYRTLLTDTQQPALTNAA

SEQ ID NO: 176984 - protein, 418 aa, unidentified
MNEPNAIELVACIGLDWADRRHVICLQATGCPEAESLQLEQKPDALHEWIAQQRVRFQGGKVGIAIEQTRGAVIHALMMYDFLELYPINPKALARFREAFRVSGAKDDPSDAELLMDMLRLHRNRLRAWLPDTVETRRLQILAEYRRKLVNNRIRHTNRITSLLKMYFPQALDWAGELGTMQSCDFLQKWPTLTAIQQTRPAQLRKFYLDHHSRNLALIEERLAQIRTARSLTDDPAIVETLSLAVQAEAAQLRPVIEWIPRYDHIIAQQFALHPEHELFESFPGAGPVYAPRLLIALGTDRSRWASSADLQSHSGIAPVTEQSGNSCWVHRRLACSNFIRQTFHEFAAQSIQWSSWARAYYDQMRDRGLRHPAAVRALAFKWIRIIYRCWKDRQPYQEEIHLKALRDKRSPLAGKLD

SEQ ID NO: 176985 - protein, 317 aa, unidentified
MSYTSRFVGIDISKSSFDICILPDSRSASFANTAAGVARFLAFVAPLKGIERFLLEPTGGYERRVLDALLSARMPVARVNARQVRQFAGACGQLSKTDRIDAFILADYGRRMETELVLPASPAQMNMVSLVARYRQLSHMIVQEKNRREKLASRADDKTRVWIEESLQFLLDQRQAVVEAMTACLEADKALSGKAAVMMSLKGIGLRTACFLLAGLPELGSLDKGQIAKLIGVAPLNRDSGQMRGKRMIAGGRKPVRDALYIAALPAIRFDPGIRAFFEKLKSKGKPGKVALVAVMRKMIIILNARMREHHANAIDT

SEQ ID NO: 176986 - protein, 334 aa, unidentified
MTAIVTETLLAFDVGARTHEFVHETAGKLEQGQLQNDISAVRSFLARLLKDGRRLRVIMEATGIYFLDLALVAHELGAEVVVINPKAGHHFAKGLGLRSKTDAIDARMLLEFLRRMPLTRWEPPARECLQLRQIGRYLVQLTDESTAAKNRLHALESTEETPRFLREDLRRSIRSLEGRLERIRAQAIELIGCSESLNAAFQALNSMVGMGDKSAVAVLGELCVLPRSLSGRACTSHAGLDVRHHQSGTSVNKPGRISKHGNKYLRRALYMPALSAGTHDPHAAAFKQRLQARGKKGLQINTAIMRKMLTAAWAIVRDPTPYDGARLYATIETP

SEQ ID NO: 176987 - protein, 493 aa, unidentified
MGACELESGDVALAAIPIRKMTIGIAQTLLLIIDWRIAMPKRTTSDRPELKPVNVGAAAIDIGSKMHMAAVNPASTDVPVRSFGTFTQDLHDLADWFKACSVTSVAMESTGVYWIPVYEILEQRGFEVILVNARYAKNVPGRKTDVSDAAWLRQLHSYGLLRGSFRPDAEIATLRAYLRQRERLVEYAAAHIQHMQKALMEMNLQLHHVVSDITGATGMRIIRAIVAGERNPDVLATYRDVRCHSSIETIRAALVGNDRHEHIFALTQSLELYDVYQAKMLDCDRKLEVLIAALNNKGAKPVGKLSKPRIKTKQVNTPTFDVRSALYGLLGVDLTEIHGLGPSLALKLVGECGTDLRAWPSAKHFTSWLCLAPGNKISGGKVLSSRTRRSSSRAAALLRLAATTVGRSDTALGAFYRRLSSRAGKSKAVTATARKIAVLFYNTLRHGMSYRDPGADHYEQQYRNRVLANLQRRAKSLGFVLQAIPGDADPAVS

SEQ ID NO: 176988 - protein, 380 aa, unidentified
MAQRAEETAVNEGKDIILVADYHAENIEFRWFNQASGEERTGKYPTTRSGILRQVEQAVGELEPGGRVVWIMESTTGWARVKDLLGERVTFVLANVLQMPLPPKGKRRKTDKIDTGRLLREYLNGELPRSFQPSVWWREIRRVVDCRQDLVERQTAIKNWIGSLLHHETWFDRENLWSTKGQERLRAMRFSPSDRMLVDLKVGQLEQLAEQLKRIESRMQEIYDGWPEAQWVDAVRGIGMVTAVSLLAHIGPIERFATAEELIGYAGLAPGMWQSDGTCHHGRIGGGGTDSHLRYLLIESTTWLCQIPRYRPTYERVLKKRGKKIARIVVARLLLRSLHKMLKDRIRFNAAPVLKGAARAKPHGAFIASGLPAGREKAPA

SEQ ID NO: 176989 - protein, 430 aa, unidentified
MDVEDRIRLEEFRQLKREIRGSERHLIVGIDVAKDRHHAFFGTATGKALLKRLVFENDRDGFEKLLAYVDAEKTKNVLDKEVFGLEPTGNYHKPLGEYLIERAFTVVLTAPKAVKNNREMLDGRWDKNDTKDPANVADLISQGKFMYYDHPVMPLRDLRNLLSLKSRLKKQEHGIKVRIRNHLIAQYFPEMDSYYARSGSIGLSIVKWCLAPCVMANLEFDRFVQVVAGGKRLTIGQQKRLREIWQKAPCSIGCEPGEALGFEAKLMVEGLQQVRDAIEVTDGKILQVCLNFPEYSYLLTIPGFGPDVSSKVLAAIGNPFRFDSQKQVVKMAGMDLSAKRSGKKSETVIPRLSKKGKASLRYALYQAAHIASCRNQYFVTYFTNKLRGRQKEKGITTKMKVKLAAKLLVIAWTLMKKEEPFNPDYLNLDE

SEQ ID NO: 176990 - protein, 344 aa, unidentified
MNEVITIGVDLAKNIFQVHGVDAEGGVVVRRQLRRGQMLAFFKKLPPCLVGMEACATAHHWARQLIGLGHEVRLMPPHYVKPYVKRSKNDATDAAAICEAVTRPTMRFVSVKSMDQQSVLMLHRTRELLVRQRTMLINAIRAHMAEFGIVAPTGVPRIKELLTVIADEEDLRLPSLARTCLESLVRQYLSLNDEIIAAEQRITRWHRSNEVSQRLETIPGIGQIIASALAATVTDPEVFKSGRELAAWIGLVPRQNSTGGKQRLGKISKQGDQYLRWLLVAGAMSVVLHAKRRGTTNLPWLANIIAHKPTKVAAVALANKNARIVWALLRNGGTYRNPTHVPAE

SEQ ID NO: 176991 - protein, 354 aa, unidentified
MTDAKYIGLDVHQATISVAVLDSAGKLLMEAILETKAETILQFIRGLRGSLHVTFEEGTCAAWLHDLLKPNVTQVLVCDPRKNALLKSGNKNDRIDARKLADLLRTGLLPPVYHGEAGIRTLKELARSYVAITRDLTRVMSRLKALYRSWAIPCAGEQVYAPRHRAEWLAKITEPGVRRRAEFYYQQFDALAAVRQEARRELLGESRKHSATKLLRQIPSIGPIRAALLIALIQTPHRFRTKRQLWAYCGLALKTYTSGEYRFVGGQLQRSKKILAIRGLNSNHNHDLKNIFKGAATRAATTGPFQHFYEACVARGMKPHMARLTLARKIAAITLIVWKKGARFDAEHLKQQAA

SEQ ID NO: 176992 - protein, 320 aa, unidentified
MRNAVGLDISKLTFDATAMVGNAEYSAKFDNDSKGLDQFSDRLKSLGCQNLHICMEATGNYYEEVADYFAQYYSVYVVNPLKISKYAESRFKRTKTGKQDAKLIAQYCRSAKESELVKRQKPTDEQYRLSRMTAAYAQIKSECAAMKNRHHAAKDEEAAKAYAQIIKAMNEQLEVLKEKIKEQTEKPNCKEGVKRLETIPAIGRMTAAVLFHHLTSSKFETSNKFAAFAGLSPQQKESGTSVRGKGKLTKFGNRKLRAVLFMLTMVAYRIRAFPGFIKRLEEKKKPKKVIIAALMRKLAVIAYHVHKKGGDYDPSRYKSA

SEQ ID NO: 176993 - protein, 343 aa, unidentified
MDKIATIGLDIAKQVFQVHGADAQGATLFNRKLRRSEVRPFFEKLPPCVVAMEACGSAHYWAREISALGHQVKILPAQYVKPFVMRGKTDAADAAAITEAMKRPDIRSVPVKTAAQQAATMTLRTRTFFVRQRANAVNALRGYMAEFGLVADRGIANFGKLVTALPERADARIPPAARMMIDEILAEIETLTARIQRIEEQIAANAKEDEDIRRLTAVPGIGTLTASAFQAYVPDPGSFKSARHFSAWLGLTPKQNSSGEKSRPGRISRMGNGELRSLLYIGAMGVLSAARRFGTRSAWLQRLMDRRPLRVVAVALANKTARVVWALLVKGGTYHAPAEVAGN

SEQ ID NO: 176994 - protein, 403 aa, unidentified
MNNVAGIDVSKGKSMVSVLRPFGEVVAKPFSIGHTGSELKELADYLKSLDGETRVVMEHTGRYYEPVARFLHEEGVFVSAVNPKLIKDYGNNTLRKVKTDKADARKIARYGLDNWAELRQHTPMDTIRMQLKTLNRQQSLYTKTKTMMKNNLIALLDQTYPGVNALFDSPVREDGSQKWVDFAMTFWHVDCVRNMSLTAFAERYRKWCKRHGYNFSQSKAVEVHAGAQDLIAMLPKDALTKTMVRQAIDALNAVSASLERLKAEMCTLAAQLPEYPVVMAMHGVGDSLGPQLMAELGDVTRFTHRNAITAFAGVDPGADQSGTHEAKSTRVSKSGPPELRRALFLVMDCLLKTQPQDDPVYRFMDKKRAEGKPYLVYMTAGANKFLRIYYGRVKEYLASLEGN

SEQ ID NO: 176995 - protein, 339 aa, unidentified
MIGLDISKHVFHAHGVDGRGRAMFRKRISRGKLLDFFATQPSCTVALEACGGAHHWARQLAQLGHQVRLIPPAYVKPFVKRQKNDAIDAEAICEAAQRPSMRCVAVKSEEQQAAGMVFRTRDLLVRQRTQLMNAIRGHLTEYGWVAPKGPSHVAMLAGLIDEEEMANSLPGAARMMFRVMLDLLSGLSRKIADLDKEIARRAREDEVSRRLMTVPGIGPISATAIVALAPPAESFAKGRDFAAWLGLTPLQRSTGGKQKLGAISKMGERTLRRLLIIGSSAVVKQAGKRGAPRGSWLEQMLARKPRMLVTVALANKMARIVWALLVKQETYRAPVAARA

SEQ ID NO: 176996 - protein, 337 aa, unidentified
MEYFAGLDVSMAETQVCVVTRDGAVIHKAKVPSTPADIAAELAQVPACRRIVFETGRMAPMLYHGLHQLGLPVVCVESRQAYQALKLLATHKTDHNDARGLAHLARTGFFKPVHVKSLPAHAVRSLIIARKKLVGQRVTLENQIRGLAVVFGVRLPRALSSTFIRQALQASDGIPGLSAAMQGLAAVRAAVLAAIVAIDGDIRRMVRASDACRRLMSIPGVGQLTALAFTAAVDDPGRFRRSRDIGAYLGLVPRRHQSGEIDYTGSISKCGDRRVRTLLYEAANVMLTRYKGPLKLKDWALAVARRSTMRKARIALARRLAIIMHAMLRHGTEFKPA

SEQ ID NO: 176997 - protein, 335 aa, unidentified
MNYIGMDIHKKFTVAVAKDVEGKEIAQGKMKNCKEEMAQFLAPFKPEETSIVIESSSVWEHIYTLLESLGYKTKLANPLKVKAIAHAKIKNDKVDASMLADLLRANLIPESHVPPVETRRLREFTRSRKMIVKQATQVINRIHAHFTRRGIVMPRTTFCKSVVAFVKERAIDDAVLGSYVAILESLRVQLSVIDTKMQKMAQESEDAKLLMTIPGIGTIRAMSLIAEIDNIRRFPSEKHFSSYAGLVPTVRQSGSVTHVGRVSLQANMPLKNALVQAALTAAHMKRANVLQECYCKLVPVKGKQKALIAAARKLSGILYAMLQSKQEFSYSYSSI

SEQ ID NO: 176998 - protein, 375 aa, unidentified
MKKATKSEAGQNMGRPKVNLSSHTIGIDLGDKFSHYCVLDPEAEVIEAGQLKTTREALTARFVTMPPVRVAMETGTHSAWVSQLLASFGHDVIVAHARDVPNLGKGRKKNDPGDAEKLARYARFDPALLHPIQHRSREAQLDLIVIRVRAQLVNARTLLINTARGIVKSLGSRLPECSADGFAERCQQQLPAELFSVLLPLVQQIGTMTDQIKAYDDQIQRLADQRYLDTKGLRTVPGVGALTALTFVLTLGDKARFAKSRDVGCYVGMRPRQSQSGEHDPQLGITKAGNSYLRKLLVQSAHYMLGPFGPDSAVRRWGLGLAAHGGQNAKKRALVAVARKLAVLLHTLWVRGGTYVPFPPRRHSRGYVTEGLNEA

SEQ ID NO: 176999 - protein, 337 aa, unidentified
MKYSGIDLHSNNAVVAVIDDQDRVLYCKRLTNDPGLIVAALAPYRSELQGVVVESTFNWYWLVDALMAAGFDMHLANTAAIKQYEGLKYAGDERDAVFLAHVFRLGLLPEGYIYPAQERPLRDLARKRLQLVQQRTLNILSIESLLSRQLNLRMNSEQVQRLDEAAVSALRLSSHVERALKANLAVLHTLGTEIDALETILNHEVKLRPEFQILKTTPGIGDVLAATIMLETGTITRFAGVGHFSSYCRCVESKRISNGKKKGEGNAKNGNRYLAWAFIEAAAAALRCCPQARRFYERKKAKRLPVVAMKALAHKLARAAYYMMRDGKPFEVGRCFV

SEQ ID NO: 177000 - protein, 345 aa, unidentified
MAKTIVNIKIETPIAVGIDVSKDSLMICYRYADSRNFIRSFSNNDSDIKRLIKELKLLKFSGKIVAESTGRFHMLSSVMLAEESFLIYVVNPLMSKKYNAASIRKVKSDKRDSEILAEMAAKEENLPDVFTADRKMLMIKKKISLVAALDKQAQALRSAIKEYKETAKTLKVKLTKAEKRIIEAIDDLNVEKEKLEKEIENVFKEPLTDAINSKRQKMYSSIPGVSNYVAALTTIFFSEEHCQSAKQWIAYVGYDISVRQSGKWNGKGKLTKRGNGYLRKRLFSAAWGAIMHNEQFKKYYDYLRAKKHSYVESLLIIARKIIRIMFYLSKNNCMYDPNRVVFTIN

SEQ ID NO: 177001 - protein, 344 aa, unidentified
MPHYVGLDVSQKTTAICVVDEQGRRLWRGACVTDPGAISARVLRHAGVVDVKVGVETGSMTPWLVHGLRSAGLDVECLDARRVKAALQMRLNKTDENDAEGLAQVMRTGWYRPVHVKSFDAHRARALLGARAQLVGMTTRLSNMIRGVLKTFGLLPGAGRGLRFDRRVEALLEGAPEIGLIVRPLLATWRQLREQIAVFDKAVQQRVRADPICRLLMTVPGIGALSSLVYVSTVEDPGRFSRSRAVGAHLGLTPRRYQSGETDRSGHISRCGDGLARTLMYEAAVVILHRVKRSLHLKDWAAAIEQRSGPGKARVALARKLSVILHSVWRSGEPFRWAPQTIAA

SEQ ID NO: 177002 - protein, 406 aa, unidentified
MQGPVITVDVSKGSCHYQPYVSNGHPMRKPKVLHDTVEGFQSLSDLIDTMKDRYECETIPVIFEATGVYHRCLQKYLDDHQIPYYIISPLMSASYRKTTPNSNKTDDLDCSHIAKAYYGECNLFPYDKPSKSFHNLRELNRYYECELNHLRMRKNTFRKYLDIVYPRLDKCFKGHSSLYDEIPMEVIKQYPHPSLLLKHKEETIVKKIEKKTSHNASFIQNIVHEMYECSMHCYSGADVTDVESMILPELVDDLQSQEERCDEILKQLVSEAQKTPYFTSIVSIVGIGDNLAARIIAELGDMSRFSCRRAITAYAGLNPKIRQSGDMDGIHLAISKKGNKHLRCLMYLAVSCNYRLKKCDVLYEFNQKKRQQSFSPLKPKAATIATAHKLLLIICALCTNGTVYHS

SEQ ID NO: 177003 - protein, 340 aa, unidentified
MSEITTIGLDLAKHVFQVHGIDAEGATVLRKQLRRGQVLAFFSRIPPCLVGLEACATAHYWGRELAALGHEVRLMPAQYVKAYIKRNKNDAADAEAICEAVQRPRMRFVPVKTAEQQASQLLHRGREQLVRQRTMLVNALRAHLAEFGLVAAQGLRNVGELIAIVRDDDDRRVPDMAREVLQVLANQIEQIEAAIAALERQLLAWHKTNAVSQRLASIPGIGPIIATAIATTVADPNVFRSGREFAAWLGLVPRQNSTGGKPRLGGITKRGNRYLRRLLINGASANLLRSKATKADPWVIRLRQRRPPLVVAVALANKTARIAWAVMLREREYQPRALAA

SEQ ID NO: 177004 - protein, 407 aa, unidentified
MSYEPHNVVGRDVSKGKSTIAVMRPFGEIIISPFEVKHTSSDLKVLADTLNKLDGKTRVIMEYTGKYYQPIARYLYESGLYVSVVHAKIIHDFANNSIRRIKTDKADAVKIANYGLSNWDVLPSYTKEDDTRLVLKTLNRQYNHLMNQYVVARNVLISIADQTCPGLNEVFTNPRKADGRIKWAEVYRRFWHCEYITGFSRNKFISLYNNWCVKNGFRGSDEKASELYLLAKECVPTLPKTEYTKKIVEQAASELISLSDAMASVHREMLSIAKTLPEYPAVLSINGIGETLGPQLMAEIGDVRRFSKRSNITAFAGVDAPPFQSGKFDSKSRRISKRGSCELRKQLFQVVRIIVQLNLYDDPVYQFVMRKKAEGKPYYVYMVAGCNKLLRIYYARVKEYLAAENAN

SEQ ID NO: 177005 - protein, 338 aa, unidentified
MNISNLGVDLAKHVFQLHGVDRHGQVVVKKRLRRRQMLSWFADQAPCRVGLEACGGAHYWARELGKLGHEVRLISPQFVKPYVKRGKNDANDAEAICEALSRPSMRFVAVKSTAQQALQAEHRIRARRVRARTALANEVRGLLGEFGIVVPTSLGALRRALPEILEDAENGLPADFRILLAELAEELRNLDERIKAQDARMQARAQCDERIQRLLAVEGIGPMVASALVAAVGDARQFGSGRDLAAWVGLTPREHSSGGKQRLGGITKQGDTYLRTLLIHGARSALRAATNKTDARSRWVSALAMRRNRNIAAVALANKNARIAWAILARETHYRAAA

SEQ ID NO: 177006 - protein, 414 aa, unidentified
MEVVYDHCAGLDVHKKTVVACFLGSSPEGKIERKTRTFSTMTKGLEELADWLLEQAVTHVAMESTGVYWKPVYNILEQRERFTLLVVNAAHIKAVPGRKTDVKDAEWLAQLLRHGLIRGSFIPDRQQRELRELTRYRTALLQERAREVNRLQKALEGANIKLAAVLSDITGVSGQRILDALLSGDSDPESLADLAHWRVQSKREALEQAVVGQLSVALRFVVSQQLKHLRQLDEQIEACDAEVERQMRPFAAEIDRLDGIPGVGSRTAQVILAEVGVDMARFPSAGHLAAWAGMSPGNNASGGKARPAPTRKGSPWLRAALAEAAWAASKCRSGYLPAQFRRLASRRGKKRAIVAVGHSILVIVYHLLESGKPYEELGNNYFDERDRVAVERRAVKRLESLGYRVHLEPVAQVA

SEQ ID NO: 177007 - protein, 354 aa, unidentified
MKRTTKYVALDVHQATTSASVREESGRVIARSVLPTDGAAITEFVRGMRGAVHVALEEGTQAQWLHDLLAPLVDRVVVCDRRGAPRQGNKADQVDADQLSEQLRRGGLRAVYHGSADRTTLKELTRTYRNLVEDATRVMLRLKALFRARGIPTSGKRVYHPRARAQWLAQLQNPGARLRAEALYAELDVLRTLRPRAKAAMVTEARRDPAWPVLRTIPFFGSVRVALLLATMQTPWRFRTKRNLWAYAGLAVVTRSSADYALVAGQAVRRQRPPLTRGLNRNHNRVLKDVFKGAATAATARPGPLQDFYHSVIARGTREELARLTLTRKLAALTLRLWKKGERYDPTKLTTPAR

SEQ ID NO: 177008 - protein, 357 aa, unidentified
MASRSMAQPDHGVTIGIDTHGDAHVAAAFTSDLGRPLGHLTIATTPAGYRRLLEWADGLGSEPRFGVEGTGSYGAGLARFLVAAGCTVIEVNRPNRQTRYARGKSDPVDAEAAARAVLSGEATGLAKVDTDYVGMIRALRVARRSAMKMRTQTFQQMKALIVTAPAELREQVRSLSHDRLVETAACLRPGPVTTPVAAAKLALKCLAQRHQLLTAELTILDHDLDRLVAAAAPTLCALKGVGTDVAGAVLVAAGDNPERLRSEGAFANLCGVAPLPASSGKTSGRHRLNRGGDRHANCALWRVVIVRLATHEQTRNYMARRTQEGMSKPEIIRCLKRYVAREIYRELIPPAALAAAA

SEQ ID NO: 177009 - protein, 418 aa, unidentified
MIEDVQWFVGIDWATQSHRVGLLDIEGRHVSERDFAHGGAGMTELRDWLLEKTKAAPGQIAVAIETPHGPVVETLLDHAFQVFAINPKQLDRFRDRFTVAGAKDDSRDARVLGSALRTDRQAFRRLVVDDPLVIELREWSRMADELQQERTRLANRVRQQLWRYYPQAVELTDDVADDWFLALWQQVPTPVTAAEVPEEAITRILKDHRIRRLDATTVLQTLRKTPLFVAPGTTEAACAHIRAVAARLSLVNQQIKQTHRALDGLCAKLEAATESPSGQNREQHDVMILRSWPGIGRIVLATLLTEATEPLRRRDYHALRALAGTAPVTRRSGKQCFVIRRLACNKRLQNAVHHWSRVAIQHDTAARRRYDALRRRGHGHARALRTVGDRLLYALCTTLERQMPYNPNCQTAQVTVGL

SEQ ID NO: 177010 - protein, 319 aa, unidentified
MTTSSIVVGVDVAKDRLDVAVRPSGETWSAANDEAGITALVARLRPLGPALVVCEATGGFERAAIAALAAAGFPVVVANPRQVRDFARATGQLAKTDQLDAGILALFAERVRPTPRPLPDAAAQLLDAVLTRRRQLLEMLVAEKNRLGFAPKPLHRGIQAHIRWLERQLDDVTKELAALIEASPVWRAKDDLLQSVPGVGPIVSSTLLGELPELGTLSHKQIAALVGVAPLARDSGMLRGKRMVWGGRASVRTALFMAAMCGRRWNPTLKVFYDRLKAAGKPTKVALIACARKLLTILNAMVRDNARWAVPAPSVQYSC

SEQ ID NO: 177011 - protein, 357 aa, unidentified
MRDQKRGLDFSNQDFYIGIDVHKRSWAVTIRSNNVVLKTFSMNPNPKELSDFMKKRYPNGIFNSVYEAGFSGYSMHRELENLGFNNIIVSPSEIPTTGKEKLTKTDEVDSRKLARELEKGTISGIYIPSLLQQEMRSLSRLRHQQVKKQTRIKNQIKSYLDFYGHTLPKNCEMQHWSRRFIEHLRTLEFNYDIGKEQLEIYIEELLIIRNRILQILIMMKKYYRQYELYHFIDLLRTVPGVVFVVAATLYSEIMDIERFSNNEKFASYIGLVPSTMSSGEKKKVLGLSFQFNRYLRSLLIESAWIAIRKDPALTLAYSNFLIRLSAQEAIVRIAKKLLNRIYYVLKNEKEYIYSVVQ

SEQ ID NO: 177012 - protein, 387 aa, unidentified
MPQPNDLSRSLVALDQNSTIIAVIEMSQSSWLVAGMLPGIERQPRKKLEPSPERLLALLHRWQDEAVRAGRTVTRIAVAFEAGRDGFWLARWLAARGVEAHVIHASSVAVSREHRRAKTDRLDTELLKRGFLGWLRGERGHCSMARVPTIAEEDAKRPNRERDCLVGERTRIVNRIKSTLARLGIRNFKPTLRKAAERLATVHTPEGMPLPPNTLAELQRDMARLGFVVSQIREIEDARQKRLEQQPETGPHAMVRLLARIVGVGVETADMLVHEVLSRPMRDRRAVARYAGLTGSPDESGAQRREQGLARAGNARVRRGMIQLAWRFLMFQKESALAVWYRARTADSRIGTRKTMIVALARKLIIALWRFVTIGEPLEGVVLRPAS

SEQ ID NO: 177013 - protein, 381 aa, unidentified
MLYVGIDVAKNKHDVTVIDNTGKMVLNLITITNRKQGFELLHNTLKQLNQNCLIAMEDTGHYALNLLTFLHQNNYQIYTYNPLLIKEFTKSLSLRKTKTDKKDARTIALKLLSDPNRALFMHDNRQEELKIMTRHMNRLKKHQSDWKVQYTKCLDIIFPELHQVVTKHSDYVYELLKCFPSPEKMVTAGFNKLIEIKRLTAKHALDILKLAPDSIGTTSFARELELIEIIENIQHYEKLIKQAEKKIDELMAELNSVITTVPGISNRLGSVILSEIRNINTFNNPAQLQAFAGLEPAIYQSGQLDTRGKMVKRGSSHLRWALIQAAIKVARYSPAFKVYFRTKLAQGKHYNVAISHVAKKLIRVLFHLLQNNEASEEDKLR

SEQ ID NO: 177014 - protein, 317 aa, unidentified
MSHSDLFVGIDVAKDELVIHAHPAGMLWRVPNTKTGIAALGRKLVRLANTACLRIGFEASGGYERKLAILLDRLDLTAYLLDPARVRSFARAERQLAKTDPLDAAVIARCLAALHPELTPYVHDPKAVRLAEHVRMRDLAVTQAVQFGNQLKSIADPAMRRLVVAQVARLKALVLRIEKAIASVIAASPDLAAREALLRTAPGVGPIVAACLLARMPELGRLSSRQVAALAGLAPFDRQSGKTSRPGRCSGGRPSIRRCLYLAALSIARSGKGQLAATTNRLREAGKPFKLAIVATMRKLLVTLNAMVKNNTEYRTA

SEQ ID NO: 177015 - protein, 367 aa, unidentified
MREDTTYVALDDSKRKIVAGILRPGAMDPEVREIANDPGEVGRLFRRLRRDGPVVACYEAGVSGYALHRQLTQLEVPCQVVAPSLTPRRPGERIKTDSRDAKKLVRLFRAGELTPVHVPDEAEEGVRDLVRCREAVRREVIRWRHRVLKLLFRHGRGYVGGKNWTQAHWRWIRSQRFDQAPLQRAFEATLFALEQAMARQAELERELAALAADAPYREPVGRLRCFRGIDTLSAMVLLAEIVDFRRFGRAREFMAYLGAVPSEYSSGDAHRRGALTKAGNQHARRILIEAAWHYRHRPALVGRLRRRSEGQPPEARHHAWRAQQRLHRRYRHLLRQGKRPPVAVVAVARELAGFIWAAMTAPVPAAG

SEQ ID NO: 177016 - protein, 402 aa, unidentified
MNAVGIDVSKGKSMVAIMRPFGEIVSAPFEIKHTASDIHSLVELINSVEGESRIVMEHTGRYYEVLAHQLSKANLFVSAINPKLIKDFDNDSLRKVKSDKADSVKIARYALDKWQNLKQYNVMDELRNQLKTMNRQFGFYMKHKTAMKNNLIGILDQTYPGVNTYFDSPARSDGSQKWVDFASTYWHVDCVRKMSKNAFIDHYKNWCKRKKYNFSKSKAEEIYEKAKELVPVLPKDNITKLIIKQAVDQLNSVSTTIESLRTLMNETASKLPEYPVVMAMKGVGTSLGPQLMAEIGDVSRFTHKGAITAFAGVDPGVNESGSYEQKSVPTSKRGSSVLRKTLFQVMDVLIKTHPQDDPVYQFIDKKRAQGKPYYVYMTAGANKFLRIYYGRVKEYLSSLPES

SEQ ID NO: 177017 - protein, 391 aa, unidentified
MDKRFFGLDVHKKYATICGINQGGEVVVKEDRLPLERLASWAAGILTCNDAVALEASTNTWWAYDRLAACAGRVVVVNPIKTRLIAQARISTDELSAEALARLLQSNFICQVWVPEERTREYRQVISHRIRLAQEGTRLKNRIHATLHRQQLRCPYGSLFSRAGRAWLRKLELPELEKLLLRQNLQLLESSEEALAEVDRVLARLAQDDHRVPILMQIPGISIFSALAILAEIGEIGRFASARKLSSYAGLVPSLHRSGQKHTTGPITKAGRSRLRWILVEAAHVAARHDPQFGRFYHRLRAKKGTNVAVVATARKILVVIWHLLSGDAVYRGRQVQMIARKFLEWGRKVGQEDRHGSNKEFVLTQLHQIQVNNLTHVEAGRRVHALSGPE

SEQ ID NO: 177018 - protein, 323 aa, unidentified
MTTESAHSTLQTSDQIVLYMAFELSQKQWKLGFTIGIGQKPRVRTITARDLDALQWEIRKACERFRLPENTPTFSCYEAGRDGFWLHRYLHTQGIVNLVVDSASIEVNRRMKRAKTDRLDVDKLLTMLMRYHLGEWKVWRIVTVPDAKTEDRRHLHREMAALKAERTRHINRIKGLLAGQGVSMPVKEDFLDRLGALRLWDRSALLSGLHARLVREYQRIQLINQQIHELEAHRREILRTSQRADIHQVRQLMGLRGIGINSAWLFVMEFFSWRAFRNRREVGALAGLTSTPYQSGGTSQEQGISKAGNRHVGVGSGFSLIAS

SEQ ID NO: 177019 - protein, 411 aa, unidentified
MKRVYDNCCGIDVHKKLIVACFRKGNEQELREFGATTRELLELADWLKSGNCEMIAMESTASYWKPLYNVLEASELNTIVVNAHHMKAVPGRKTDAKDAEWIADLLQHGLLKASYIPSKDQRELRELVRYRKSLVGERTRELNRLQKMLEGANIKLSGTVSDINGKSARSILEYLITGESIDSEKYDEMYEKKVIAHNLKASKEQIIDDLNGIMTPLQRRMMKELLTHLDELNIHIKNLDDEINDFMKPEEKQAAKDIQVITGIGNSSAQAIISVIGADMERFPTDRHLSSWAGLCPGDHESAKKRKYGKTRKGNALLRSTLVICAHSAVKNKKSYFYAQFMRISAHRGKKRAYVAVAHSMLIAIYHILKEGVDFKDLGAEYYNQFNRERKINAYLRKLKALGWEAQAVAA

SEQ ID NO: 177020 - protein, 464 aa, unidentified
MKTRLQNHKKKRTKINLDSLPLLEPNAAGIDIAHREHWCAVPGDRCPKPVRPFGTFTEDLEKMADWLRECGITTVAMESTGVYWIPAFQVLERRGFKVVLVNARHVKNVSGRKSDVLDCQWIQRLHSYGLLNASFRPEDPMCVLRSYLRYRDDLVCARSVQCQHMQKALQQMNVQLHQVLSDVTGLSGWRIIKAMLAGERDVQKLAALVDRRVQASQATIQKALRGDYRAEHLFVLQSAVDLYEVYERKIHLCDEQIIAQLDQLPARVNFEEKPLPPRKPGRSGLQDMVAGRDLREELYRCTGVDLTAIEGLGVLTAQVVISEIGLDMTRWRSEKHFCSWLGLCPDNRISGGKVLSSHTRPALNRVADALRIAAATLQRSKTALGAFYRRMKARLGAASAITATAHKLARIIYRLLKHGEIYVRQGMEAYENKCRERLLHNLKKNAATLGFELTPKQQLPPSVS

SEQ ID NO: 177021 - protein, 363 aa, unidentified
MQYLNDTELSSHEETRCQFNGSTGAIKLGIDVHQDFYVVVKQEGGSNPKPPQRFHKEAFLHWAAKLRKEERDVHAVYEACGFGFGLQRRLSVLGIQCYVVCPQKLDERNKRVKTDGLDAKALCLRLDRFLQGNREALALVRVPSKEEEQKRAIHRQREQLVKARKVLEAQGRSLMVNHGIEPVNTWWKRRAFAKLQVPVWMKELLCNSQPILLALEEKIRALTVQLQAAAGPNQPRGFGALTSVVIDREVGNWHRFKNRRRVGSYTGLCPGEYSSGNTRLQGCVTKHGNPRLRAALVELAWRLVRFQPHYKPVIKWREVLAKGALATGAARKKAIVAVARQLAVDLWRIRTGRLSAQKLGLIN

SEQ ID NO: 177022 - protein, 346 aa, unidentified
MKKIFIGIDFSKEKFDATLIQAEGLKECAPSVHEVFDNKTSGYRRLVKWVKAHAEGFAADAWLFCGENTGGYSIGLSNYLYASGYDMWLECAYKIKHSAGIQRVKNDKADSRAIAEYAMRNYDKMILHKPQSASLTCLREIFLYRHSLVRQKVALTVRRDEKRLTQEKSDARAFMSFTSKHLITEVNKAIAKCDQKIKEIIASDDELREIFDIITSMPGIGVQNATCLMVYTDNFQKFDLDSRKIACYYGIAPFGRQSGTSVNSRPQVSPFANRMIKSLLSQAALAAIKFDMNVHIYYQRLIERGKHPLLVHNNIKNKMLHILVAMIRDRVKYNPDYVYRTNKEIV

SEQ ID NO: 177023 - protein, 314 aa, unidentified
MDKQEHTTFIGIDVARDRLDVHVLPGGKSFSVARDEKGLAVLIRRIRKHGAPLVCLEATGGYEIEVVSAVAAAGLPFAVMNPRQVRDFAKATGRLAKTDRLDAEIIAAFAKAVRPAVRPLPSAEEQQLRVLWRRRRQVVDMATAEKKRLKRERQPDIQARIADHIAILANECDELEAEMRALVQTDTAWRQKAHLLRSVPSIGEITVFSLLAGLPELGSLERNPISALVGVAPINRDSGAMRGRRMIYGGRKHIRNALYMATISAVQFNPAIRAFRDRLRAKGKPPKVILTACMHKLLTILNAILRDQKEWKNA

SEQ ID NO: 177024 - protein, 410 aa, unidentified
MAYKAAGIDVHKKVLMVVILDVDDPQAEPQRRRFGTISSERQHLSSWLRQQGVQQAVMESTAQYWKPVWYELEPYMKLSLAQAFSNRAPRGRKHDFRDAERLIRRLLAGELTLSFVPEPQQRLWRTMTRARVQLTEDKSRLQSQLECLLEEMRIKLSSAVSDLLGVSGYRILRALAAGETDPRKLAALADDRLQCSEKQLIDALSGSSQPAHRRLLSLHLNRYQLLVEQIAEHDRLIAEALKPRQEVVARLALAPGLGVDSAQQIIAEVGVDAGTFPAAGHLSASVGTCPGQVESAEENHSSRSAKGNKYLRRILNQAAHAAVKKKGSHFQEVFRRLLPRLGYKAAIWAVAHRLCRLVWKMLHDAVPYIERGSEPDARTKHRRARQLLRRLRKLGYQVDLRALNPTPTTA

SEQ ID NO: 177025 - protein, 313 aa, unidentified
MEPAPQWIGIDVAKEQLDIAIGGGGDTWSVANDEAGIQSLLDDLRSRSCGLIVLEATGGFEVPAVSALAAAGLPVVVANPRQVRNFARATGQLAKTDRLDARILALFAERVRPEVRPLPDDAARLLDALLTRRRQVCGMIVAERNRQGFAPTPLKKSIEKHIRWLQRELDSVDGELSKAIQASPVWRAKEALYRGVPGIGPVISRTLIADLPELGRLSHREIAALVGLAPIARDSGKLKGKRMVFGGRASVRGALYMAAVGGVRHNPVIRAFYARLRERGKPPKLALIASAHKLLTILNAMARNGEPWRPQNA

SEQ ID NO: 177026 - protein, 368 aa, unidentified
MKQVTTYVGVDAHKKDLFIAMLIGNEPNPVTWQLANEPHAVRRLVRKVEREAPGPVRVFYEAGPCGYALQRQVTTSRVSCDVVAPALIPRKPGERVKTNRRDARKLAELGRAGLLTAVQPPTPEDEAVRDLARARDDAREDLQRCRHRLGKLLLRRGLHYSGRNWTRAHRQWIDSLTWPHAAERAVIDDYLLAIDHTEARLLELDARLAEIAEREPYREPVGWVRCFRGIDTLTAMLILAELHDFRRFASAPALMAYLGLVPGEDSSGEKHRRGRITRTGNALVRRLLVEVAWHYQHRPGIGVALARRRKRQPARVIAIADKAQQRLCRRFRKLASEHKPAPKIAVAIARELAGFLWAALQPVATPAR

SEQ ID NO: 177027 - protein, 399 aa, unidentified
MLAVGVDVSKGKSMVAALTGHGELLMRPKEYAHVESEMNALITQLQSYGNEIRIVLEATSHYHFAIVKKFQSAGLFVSVVNPFLMKKYLDGSIRKGKTDKKDAIKIATYCLEKWHKLRPYEALDKQYDNLRFLSRQYNQSISVKVKGKVWLSQLLDQLMPGIKGLLKSNHRNPMRNVLYDFIEKYEHYENILAFSQEEFVADYSAWAKEKGYRYAVSRAEEIYLLAQNAIPSRVTDSSTCLALMQCLLILKQSEQACNAILAQMLEIAITLPEYAVVRAMSGVGDKLAPRLIAEIGDVRRFTSAKALNAYAGNDAPPYQSGQYEGTRRHISKRGSKSLRKAGYEAMKALKTVKPTTDDAVYRFILQKEAEGKPKNVAKMAGLNKFLRTYYARVLELYSA

SEQ ID NO: 177028 - protein, 347 aa, unidentified
MHYVGMDCHITTLDFAVVDDAGRLVKSCKVDTSAKNFMEFVKNVAPPRIVYMEESVLAAWALEICNRFGEKLVITDPKQNHWIGSSNQKDDPLDALKLAQLGRGGFVKEVHHPVGERRRFRELMDSYHDTVKSTTRIKNKIKSKFRQNGIQCTGMTVYSETYREEWRQKLPQDQTLLLIVEGLWNQLKESEQTEKNLLKAARNFAKHYPEIELFEEIPGIGFISAATISAILETPHRFANKRKVWMYAGLGITTRSSGGKTYSEKLSTDYNRLLKYTLKQVAETAVQAKDNPFRQKYLAMTTLRGIAPHRAKLTISRDMLATMWAMWKKGEKYNPEIRRSPGYKQVS

SEQ ID NO: 177029 - protein, 338 aa, unidentified
MTILTVGIDLAKNVFAVHGVNEAGKPELVKPTVPRDKLAELIASLPACVIGMEACSGAHHWARQFQALGHTVRLIAPKFVTPYRMSGKRGKTDAADAAAICEAVQRPHMRFVPIKSLEQQSRLMVHRARQGFVEQRTATLNRIRGLLSEVGIVLPLKAATVRRRACECLEDLPGYANTVIGDLLSEVTRLDERIGQYDQHIRAMARDDIRAKRLMQLSGVGETTATGLLAMIGNGHDFDSGRQFAAWLGLAPGQYSSGGKTRLGRITKAGDAYLRSLLVLGARALLAAAKNKTDSISRWAVALAERRGYWKAVVAIAAKNARMAWAVLRRGEAFALPA

SEQ ID NO: 177030 - protein, 426 aa, unidentified
MTAERTTDDFAAFAGIDWADRKHDICLQPALDGKREFRVLEHRPEAIEDWANELRVRFGNRPVAVCLEQRKGPLIYALSKYEHLVLFPVNPQMLAGLRRAFAPSGAKDDPGDAELAVDILLQHREQLRPWVAEDPRTRQLQALVQARRRLVEERVRTTNRLTANLKGYFPQALECFESLDTVVACDFLGQWPSLGEAKRARAATLTAFFHQHGVRGSERIETRIAMLAKALPLTTDAGVIMPSLVATRTLVAELRALLSGIETYDAAIARVFENHPDGFIFASLPGAGPTFAPRLLAALGGDRERYASVEAMQQYLGIAPVTERSGKSKWVHWRYACPTFLRQSIVEWAGMSMRYSYWAAAYYRQQRERGKKHHVAVRTLAFKWLRILYRCWKDHEPYDEAKYLFALRQRKAPLLKYMNESLEGAN

SEQ ID NO: 177031 - protein, 343 aa, unidentified
MVHYVGLDVSLKQTSICVVNQLGSIVREGVVDSEPEAIAAFVRLNAPGAVRIGLETGPTATWLWTELKQLGLPVICIDARHAKAVLKMQINKSDRNDAAGIARIMQTGWFKEVRVKDLDSHSVRALLASRALLVKIKRDLENQIRGLLKNVGLVIGRAKFNVFTVRAEELIEDRPELMAVVRPLLKARQAIEQQTDDLDRKVLKLARYDAQVRRFMTVPGVGPITALCFKATIDDPTRFKRSRSVGAYVGLTTRRHASGEVDWTGRISKCGDAMLRSYLFEAAGVLLTRVPKWSALKAWGIRLAKRSGLRKAKVAVARKLAVILHRMWIDGTEFNWSTKKAAA

SEQ ID NO: 177032 - protein, 340 aa, unidentified
MNATTYGLDVAKRVFQMYWVDAQTGEIVNRRFGRDELIGFLAQRPAGRVALEACGSGHWWARKIKALGHEVVLLHAKFIRPFVQTNKTDAADARAIWTAVQQPEMRTVAVKTEDQQAMLSLHRMRALLVKFRTMQVNQLRGLLYEFGVTFRAGRQAGLAEIRARMAELEDALPGAMICSLQDQLKRIDGLEQDIERLEQRMGTWQKQEAACRAIAAVPGIGKLTATALVAMIGDAKTFKSGREFASFLGLVPRQSGTGGKIRLGSISKRGDPYLRTLLIHGARSVMCHAKAPTTWQKAIQARRPANVAAVALAHKMARTAWAILAHGQAYQKDYVSVKPA

SEQ ID NO: 177033 - protein, 355 aa, unidentified
MKNFFIGIDVSKKTFDAVAIKAEGLQELMERRHEKFQNNAEGFKALLAWLTPLSEGLDSERWVFCAESMGNYSQRLADFVYSQGMDIWMENPYTIKHSFGLQRVKSDKADANGIAEYAMRHCDKMKAYEPLSDSVRRLREVFLYRHKLVQHKQALDIRDGGKEELKSSDKTYKFMKKETDRIIKEFDKAIEKCDRKMKEIIEKDPELLNTFEIVTSMKGVAMQNAASLIVYTNNFRRFDFNARKIACYYGVAPFGKSSGTSINTKPRVSGFANKTIKALLTQAALCAIRFCPEIRTYAKRLKSRGKHSSIVVNNVCNKMLAMLTAMVRDNQKYNPDQQQKSREMFQKHVDMLNAC

SEQ ID NO: 177034 - protein, 346 aa, unidentified
MKQVCRIGLDIAKHKFQVHGVDKHGKDVFNKQLNRKDVLVFFANLPVCTVGLEACGGAHYWGREIQKLGHTVRLISPRHVKPFVINNKTDAADARAICEVAGRPSTRFVSVKTEEQQDMSAWHCIRERLIKSRTALANQIRGLLSERGIILPQGITHVRKRLPEIVEDSQNGLSMTARDFFSDLYTELHEADERLAELDHKMEAITKANEHCTRLMKVPGIGPVTASALVAHVGDAKQFKNGRELAAYLGLTPREHSSGGKQKLLGITKRGNTYIRKLLIQGARNVCRAWSGVVDAANDRRKAWLQGVVARRGQFVASVAQANKTARIAWAVLARGEDYQAAKATN

SEQ ID NO: 177035 - protein, 391 aa, unidentified
MIYVGIDVAKDKHDCFITNSDGEVLFQVFTIQNNREGFDALFSRIQSVSPDMSNIKVGLEATGHYSYNLLGYLIDKGLPTFVINPLHTNLYRKSLSLRKTKTDKVDARTIAMMLMSDVNLKSYSDTSYHNEELKSLTRYRFDKVQERAQLKQSVSRLVTILFPELEKLVPTLHIASVYALLSELPSAGKIASCHLTHLTKLLGNASRGRYSREKAVQIREAARVSIGSNMPAKSLELRHTIKLIGELNSEISEIESEIKRIMDQIDSPILTIPGIGYRMGAMILAEIGDFSRFDSPDKILAYAGASPSTYQSGQLESSYSHMEKRGSRYLRFALINAAKYVCHWDETFGAYLQKKISEGKHYNVAITHATKKLVRLIYAMEKSGKPYVKAE

SEQ ID NO: 177036 - protein, 319 aa, unidentified
MTNVNVFTGFDVSKDSFDFFTIDGSVKSGGEKVAYTKEGLKSLTKKVPLVSHCVLEATGPYHLKLATWLYQKGYAVSVVNPLKTKHFSRMRMIRAKTDKADAQMIAEYAQMERPPLWQPPARYIIELNHLETMIEMQTKHRTALNNQLEAFEATGMIAPSIRSSLKKSIAQLEKTTQALEQRMEEIIENEHDAMLKNLTSIPGIGKKTAIALIVATGGFTRFDSHKKLSAYLGLCPRIYESGTSVKGKARICKLGMSRIRAMLYMCTWSAINKNIACKQLYDRLVEKGKAKMLALIAVANKLLRQAFAIAKNGVQYQPI

SEQ ID NO: 177037 - protein, 357 aa, unidentified
MAQNYKKDFNGQNIFVGIDVHLKTWSISVALQGGGYLKTHTQKASAKELFEHLNKHYPGGTYHAVYESGFSGFSTCYALRELGVDCIVVHAADVPASQKDKISKSDPIDSRRLARSLMSGDLEGIYVHSKDNLDDRGLLRHRILLVKQMNATKSRIKHLLYNNGVKYPDEFASKGRHWSNRFIHWLQNEVTLLSETRVSLDLLIEELQYLRSRVLDVNRRIHQLARTERYSNLYENLISIPGIGTIVAMSLLTEIEDVWRFNNQRQFASFLGLVPVMRSSGEHEYTGEKTFRGNRTLGPQIVEASWVTIKHDTELAAKFGEFCGRGMKKNEAIIRIARKLSNIIFSVLRDNHRFVCR

SEQ ID NO: 177038 - protein, 396 aa, unidentified
MDRQKTVAGLDVHKDSIYLCVMGHDEAIIFQKTYGTLTTDLRQMCADMVSHGVTEAAMESTATYWVPVWNALCDSMSLKLVNPFFIKQLPGRKSDVKDAQWIAECLLKNLIKGSFVPDSVVQDMRKYNRRIFDLNDDMVYNTNKLDAALQRCGFRLSNYVTHVKGKSYQSCISAIISGITDPFELAKLIHGRTINKHGKDVVMAAVTADFHQADIDLIRQYKEMIDIIDRQIKECQSALTALCKEHFPTQYERLQTIPGVRERAATAIIAETGADMSHFHKSTNLVGWCGLRPRNDESNRKIKSNKITHGNKFLRKILIEIAWTASRTRNCFFSNFSYVQCTVKRKTKMKVQVAIARKILVAVWHMFSNDENFFDVYLKRLEKEAEGQRLFQESIQ

SEQ ID NO: 177039 - protein, 310 aa, unidentified
MEHIFIGIDVAKDHLDVHVRPSGEAFRIAHDEPGLAALLPRLRALTPHLIVLEATGGYEVPLAAGLASAGLPVAVVNPRQIRDFARATGRRAKTDALDAHVIALFAEAIRPTARPVPDAQAQALGELMARRRQLVDMLGAELNRRRLLRDRRLQRQLDAHIAWLEEALRRLDHDLTTLVRSTPIWREADDLLRSVPGIGPVTACTLIAELPELGHLDRRRIAALAGLAPFARDSGTFRGRRLIAGGRAPVRRVLYMATLAAIKYNPVIRLFHQRLVGAGRPAKVAITAAMRKLLTILNAMLRDRRPWQPA

SEQ ID NO: 177040 - protein, 412 aa, unidentified
MEKKKRSKIYSMEIKPQLERAGSIDIHQEKLTVCFYVKDELFEVRDYGTFTEDLYQLRDDFLHYKIPEVIMESTGVYWMSIVAILTEANIVTHVVNAKFIKNLPKEKTDRKDAKWLCKQLVNRQIRDSYIAPTEQQAFRDLCRSRKKYANHITQSSNRIVKVLEKRNIKLTNVVSNMDTKTARDIVKALSEGETDIEKLVSLARGKLKSKKEMLRKALQGILTEHDRNMLKMLLNDIAHFEQNIAIIEEEIKKHIDRINPQLVKNLDDIAGVGKESVEIILAEIGDNVNSFESPDKLAAWAGPAPGNNETSDKQKNGGRRPGKKFLLTALVQMAWAAVRIKNSYWQALYAYLKKRMIEQKAIMIIARKLVKIIYKVIKGTMIYKEYGREYFITRLQERLQQKRNHNIVVKSA

SEQ ID NO: 177041 - protein, 407 aa, unidentified
MTAVMIGVDPHKGSHTAVVIGPAEEPLGELRVRASAGQAEKLVAWAADWPERTWAVEGAAGLGRLLAQHLVAAGERVLDVQPKLASRVRLLQAGDTNKNDPNDARSVAVAALRSKTARPVMAEDYPALLKVWSKRHRDLARLRNQVACRLHAVLCDLVPGGHPKEISAAQAARILEQASPSGAVDRARAELAAQFLEDMRRLDAQLRDTRKKLAAAVRASGTTLTEVFGVGPVIAGTITGDIADVSRFPGRDHFASYNGTAPVEVSSGNRKVHRLSLRGNRRINHAIHMTAITQIRHRHSDGRAYYEKKLAEGKTHKEALRSLKRRISDAIFACLLADARRAGQRPAPRAREGNRGTTLTPARPAHTPNAGSSDKPLPDPDTTIRPGTRAATPSPSKPASKKTRPVT

SEQ ID NO: 177042 - protein, 330 aa, unidentified
MKQYTHFFGVDISKKTIDVTLLKDMQVTHRQFSNDSAGINELMQWLSELSLSYDSALFCMEATGLYCFALTQFLAVNFIDTWIEHAAQIKKANAFDRGKNDKIDSKRIALYAVKNLDRLRLWKPMSSTLEKIKNLASLRERLVETKKKLIVPIKEFEEVGNIAMARLLTKTIRKSLNAIDKDLKNVEASIIDIVNEDENLKDLYKLITSVVGIGFVTAINLMVYTNGFTVLKDTRKLACYCGVAPFEYSSGSSIRGKTKVHFMANKKLKCNLHMASLSAVKLDADLKAYYERKVAEGKNRMSVLNAVKNKLLARVIAVVNKGEEYVRKTA

SEQ ID NO: 177043 - protein, 334 aa, unidentified
MSFTNFIGIDISKNTFDLALIKENSPEKMVTAKFSNSHNGIVSLEQFIRKHDLEKQRILFCIEHTGLYCRVLSNYLVENQYAVWLEMPIQILRSLGVQRGKTDQLDAKRIATYAFTFKDKARLWQPPREEVQKIHDLMALRERLIESRKSILTPIEEFEATGLDEVAATLRKHCNKSIESLDKEIKQIEKELDEIINNDTNLKNKYKLARSVPGIGRITAMALLYYTNEFTLFRTAKKLACYCGVAPFARESGTSVRGKTRVSNFANKALKKLLHMASMAAISTDKQLRLFYERKVAEGKNKMLVLNAIRNKILHRLVAVMKRNTPFQSEYEIM

SEQ ID NO: 177044 - protein, 423 aa, unidentified
MSKQNVELAAFIGLDWADEEHAVCLQGAGESRKEISTLDQTPEGLQAWIHQLRARFGGRPVAVAVEQARGSLIYALMHVDFLHLYPVNPQTLAKLRQAFYPSGAKDDPGDAQLLLEVLLNHRDHLRVWVPDDVLTRSIQLLTEGRRKLVGERTALTNQLIAALKMYFPQALDWFGDLHTPRACAFLYRWPSLQQLKTATSSSVRKFYQNQGYRGEDKLKQLIQDIQQALPLTGDEAVLLASTMMVQALVKQIPSLTESIEEYDRKIAALFKSHDDSTLFGSFPGAGPTLAPRLLAVFGSDRSRFEYAAEVQQLSGIAPVTEKSGKACWVHWRFACSKFLRQSLHEFAGQSILKSAWARAYYQQQRGRGSSHQAALRALAFKWIRIIFRCWKDRTPYDEAKYCQSLQLRGSRLASTLKTASTEV

SEQ ID NO: 177045 - protein, 405 aa, unidentified
MRYYLGVDWADQTHAVWVVDESGTKIAARAVSHTAEGLGEWGRELDEWRAQGIDLWAAIERPDGRVVDLLLDHGVVVYPVNPKALDRARDRFRQSGAKSDPFDARVLADFLRTDQAHLRALQPSSEAAQELKLLTEDCQRHIRQQTRLVNQLTATLKAYYPRALEVAEVTSALAREFLPAYPTPEALTALTERQWQRWARAHRLPEARAGELWAVLRQPHLPVPAHVVRAKARLMQTLMEQLRPVVAAVAQYRKTIDDFFASMPAAQWARTLPIGKHGITAPTLWARLGDAPGRWESFRHLQAHAGTVPVTKRSGKQQRVVQFRFACDKALRSVVDQVAYLSLLSSAWARPYYDQQRARGHSHRQALRALGAKWLKIIFIMWQRQVPYDEQYHLATMTRQQLGRR

SEQ ID NO: 177046 - protein, 378 aa, unidentified
MHRATNPTAPADRLFCAVELSKNSWLLGIQFPDRQKASVYPIKGGDSEGLMARLVAACDRWTKVSGKKPSIILCYEAGYDAFWLARFLKAHGIDCLVVDSASMQVNRRSRRAKTDRIDLGKLLRALIAWCGGERHVWSVVRIPSVDEEDLRRSHRERSRLITERTAHINRIKGLLFAQGIRGINVKACYKTLQIDKLVTGEGRPLPPRLAQEITREIERLGLVQQQIAAIEHERDESPTTCKQTEKKRAQLLLLKGIGPTGSAVMAREVYYRQFSNRRQVAGFLGLATSPYDSGQTERSQGISRAGSGPVRATMIQMAWLWIKHQPKSAIAQWFVQRTEGQNGRIKRIMIVAVARKLAIALWRYLEQGLVPQGATLTR

SEQ ID NO: 177047 - protein, 454 aa, unidentified
MSSRKKVSAKTNTQMPTLHPHAAGIDIGAKAIQVAVPLDADKKPVRTFTTFTDDLLALRDWLKLCHVKTVAMESTSVYWIPLFQILEAAGLEVCLVNARHCKNLPGRKTDVSDCQWLQYLHSVGLLRASFRPPEHICAVRALLRHRAALVRYASDQVRHLHKALTQMNIQIHNVITDMTGVTGLLILEAILNGERDGQKLAALKDHRIKASRDTLARSLQGDWRAEHLFVLQQALATWKHYQQLMVRCDEQIEKDLATFEGKPTEHPLPPPATTHRRAQRNEPRFDARAELHRLCGVDLTQVPGVQVNTALVLFTELGPNFVTRFPTAKCFASWLGLCPDNRITGGKIISVKTRDVKSRSAEALRLAAQSLWRAKNYLGDCFRRWKGRLGTPKAITAMAHKLARILWHLLKYQEEFVLLDTSIYEAKAQEHRMRRLRKEAKSMGFNLVEIEEVA

SEQ ID NO: 177048 - protein, 343 aa, unidentified
MASIGIDTHKASLAVSAVDELGRQLAARTFGNDPRGHAALLSWVQRQPAPRRIGIEGAGSFGAALAEVLVTTGETVVEVPAQFTDRERRSLLQRGKSDPGDALAIARLTAREPRLPALRRPGIIADLKLLVGAREQFMAERTRLVNQLHADLLVLAPGYGARLPNLTADRHQAAAARLLARRDGVRAELARGRLRRLRRLRAEAERLEQRIETLLAASGSSLPRLAGIGTLTAAKLLGEAGNVDRYRGPASFAAASGTAPVPASSGQRQRHRLNRGGNRQLNRALHTMALVQTRWDPRAQAYLERRVSEGKSRLEAIRALKWYLARVVYRTMLADARRSEVDA

SEQ ID NO: 177049 - protein, 412 aa, unidentified
MSVLHDPPRPRPTAGIDWASDNHAVAGVNSDGAQLDRFNVAHTATGLGQLCRRLKRAGVTEVAIERSDGPIIDALLDTGFTVFVIPPIQVKNLRSRYGSAGNKDDRFDAYVLADTARTDRRRLRPLTPDNPATVTLRATCRARKDLVGHRVALANQLRAHLQIAFPAAVGLFADIDSKITLAFLRRFPGQDRADWLSPKRLAAWLASVGYCGRTDPSVLHARLTSAPRGLTGPDGEARVQITLALIAALEAIRTQIAALEDQIEEQLALHPDADIFTSLPRSGQIRAARLLAEIGDARGRFPTPESLVCLAGVAPSTRQTGKIKIVSFRWAANKQLRDAICDFAGDSRHASPWAAQLYNRARARGHDHPHAVRILARAWLHVIWKCWQTNTPYHPARHGAAQALNRDQHATA

SEQ ID NO: 177050 - protein, 414 aa, unidentified
MEVLYTQCCGLDVHKETVAACLRVVTDGKVVKEVRTFATTTADLINLSVWLAENKCTHIAMEATGVYWKPVWHILSDGEFALVLANAGHIKNVPGRKTDVKDADWISDLLAHGLIRPSFVPDGPTQEMRTLLRTRKQLSREKASHILRIQKTLEDANIKLDSVVTDIMGLSGRKMIEAMIAGQTDPAKLARLADPRVKASQETLRQALRGRVTRHHRFLLRLHLQQIDALDDAIVKIDREVETGIAPFRTAIEQVSTIPGVKDLSARMIISEIGTDMTRFASDAHLISWACICPRNDESAGKRRSSRIRKGAPWLKTTLVQCAWSAARTKGSYLNAQFHRIRARRGPKKAIVAVAASILTAIYHMLKDGTMYQDLGPDHFQHRDKERQKRRLLQRLADLGYAAELAPLTARVSP

SEQ ID NO: 177051 - protein, 473 aa, unidentified
MARNRKGKMSKKSIHALKVIKPDAAGIDLGSREHWVAGPPLEDDTPNVQRFGTTTPELLRLADWLKEQKVTTVAMESTGVYWIPLFEILDSRSFEVNLVNARQISHVPGRKTDMLDCQWLQLLHACGLLRGSFRPSDDICRLRALIRERNTMVDQRSDWVRRMQKSLDQMNVCVHHAVSDITGVTGMAIIRAIVAGERDPQTLAQMRDRRCQKSEQQIADELTGNWRQEHLFNLRQALKMYDQFCQTVAEYDTEILAYIKTLQPCKDDDQCAPPPISPSKTREIAKKGQAPMRQALYQLTGFDLTTIDGIGVDTASVVVSELGPDFSAFVDESHFVAYLRLAPNLSISAGKKVRSKIKGTTTSRVAAALRMAALAVRNSKTALGAFYRRISRRKGASVAVFATARKLAQIIYRLVCYGQAYIDIGAKAYEAKFDNRRLNFFTKALKDMGYEVMTAGQAGGLITPYKGIVTDTP

SEQ ID NO: 177052 - protein, 373 aa, unidentified
MIAGIDTHKDTLAVAVVDDAGRLIAGGDIPNTERGFLQLVNMFDTHQVLRVGIEGSGNFGRAVAVHLVLRWLPDWPVAVVEVPTLMTSRERRGQLGKGKTDPVDALAIARITAREQQLPPVRLTVGPAADLRALLDYREDLVRERGALVNRAHSELVGLRPGYQQQIPILTTRARVRAALELISDDTSVRATLCRRRLERVITIDTETAELKRQITGLVAAADTTLTDLYGVGPLIAARFIAEVVDIHRYPNRNAFAAANGTAPLPASSGRTVRHRFNPGGNRQLNRSLYTIAITQTRGDTEGRAYYERKRAAGKTKREALRCLKRRLSDIVFTTMRHDAANAAARTNQPPHPAWPIPAGVGAVDANETRLTA

SEQ ID NO: 177053 - protein, 395 aa, unidentified
MDVHRTFAQIAVVEDGLCRDEGRIGVTPEALREWAETLERDDEVALEATGNSDAIAMLLTPVVKRVVVANPRKTRAIAEAKVKTDKVDARILAQLLAADFLPAAWLPDDHTRMLRRQVSRRTHLVRQRTRLKNQVHAILARNLAPTCPVSDLFGKTGRHWLSRQELPADERRSVEALIRQLDFHGQELKEVDRELAIEAIDDPVVARLMTIPGIDTIVAMSIVAAVGDFSRFSTADKLVSYMGLNPKVRQSGESPANHGRISKAGRSHARGMLVEAAWTASRAPGPLRAFYRRIKRRRGFQVAVVATARKMTVLCWHLVSKDEDYAFARPGLNARKRRNLELTAGYPTQVARRGAAYDYNDKDYRRQERELVEHAERAYEVFVAHWQPKKPVPKG

SEQ ID NO: 177054 - protein, 356 aa, unidentified
MEQSNVISFKGQNIYIGIDVHLKSWSVTVLSENCHLKRLTQDPNPDVLYKYLIRMYPEAEYYSVYEAGFCGFWIHERLTELGIHNIVVNPADVPTKAGERLQKTDAVDSAKLARSLRSKELKGIYIPCREALEMRSLIRLRSLITKDMTRAKNRIKAHLRFFGYDIPQEFADRRWPKRFICWLRALDMNTEEGKKALDIMLDALEDLRKRMLDNTRALRRLSNDKRLEGQMDLITSVPGVGQVLGMTLLLEIGEFKRFKNAESLASYIGLVPMCHNSGEHIGSGDITVRKHSSLRTMLVEAAWVAIRQDPAMTLAYENLYKRMKPSKAIIIIARKMVNRIYHVMKYSEKYALNVVS

SEQ ID NO: 177055 - protein, 383 aa, unidentified
MKKNSSRSVEIKAVDERNAGAKNVPGRTGSQPPDYQAVVGLDVGDRKTHYCVLGLDGELVEEGAVATRKASLRVHFEGKVKMRIALEAGAHSPWISRLLAEMGHEVIVANPRNLRMISESDSKNDPADARLLARLAHVGPELLSPIQQRSEKTQVDLALVRARDVAVQSRTKIINAVRGIVKSTGLRLPKSSTLTFARKAKEACPEALRPALLPLLRVIEELTREIELYEKLVAKKAETEYPETKAIRTIHGVGPLTALAFVLVLNNDRHRFRRSRDVGCYIGLRPKQRESGLRAPQLGITKAGDSLLRRLATQCAQHVLGPFGKDSALRRWGMSLALRGGKNAKKRAVIAVARKLVILMHRIWITQEIYEPLRGVAEKSTAA

SEQ ID NO: 177056 - protein, 350 aa, unidentified
MNRNDISNNLTLGVDTHLDNHVAVLVNDIGQVVDTQEFTVNSTGYSQLYKWCKSFGTVNQAGLEGTGTYGAGLCKFLQEQKVTVFEVNRPNSAIRRLRGKSDPTDAESAARSVLAKESTAIPKSHDGIVEAMRFLVVARKSSVKSKTQAINQIRALLVTAPEHIRQQCYVPSSYRCITACKALEMNSVNILEETLISMLQLLAERWMMLSQELKTIDKKLKALTNSAASTLLEQYGVGSYVAATLLVAAGDNPERLKKESSFAALCGVSPLDASSGKKQRHRLNRGGARDANNALWTVALIRMRNDFRTRKYVEKRSSEGKSNKEIQRCLKRYIARELYPIIVSDLSKLT

SEQ ID NO: 177057 - protein, 346 aa, unidentified
MRKSIINLSSVTTVGLDLAKHVFQVHCVDALGRVVVAKPIRRNKLLEFFASLPRCLVGLEASGSAHHWARELMALGHEARIMPPAYVKPYIRRQKNDAADGAAICEAVTRPSMRFVGVRSLENQAALMRHKAREMLVSQRTQLLNGLRGHLTEIGVIAPQGPRHARELATLIEACDETIPFEVCEALAPLVVQLRNLDEAIVRLERTIAKLAQQDETARRLMSIPGFGPITASAMAATVQDTSGFAGPREFAAFLGLTPKQNSSGGKPKLGRISKMGNRNLRKLLVVGAHAVLFHRKPHTDPLRMWAKRLIEKKPFKLVAVALANKMARIAFAILRSKTVYREIPA

SEQ ID NO: 177058 - protein, 394 aa, unidentified
MRNWYENVACGGMDVHYRFSDVTWRDGLGHVVRRERLDHRDRSRLRAQVAAWPKTASIVMEASFGWGWLSDEIEAAGLDVHLSNCYKVERMREARGGVKTNRKDADLLSLLPQEATTWWEVWRPPPQVRDRREWMRHRAGLVAAQTTVKNRIHALCHRHGIFYEFSDLFGGEGRRFLAEMGRDGRHAGGTLAAGALETLRGNLRLLMHLRSELATVAWHLRGLLNRDDLVRRLDGIPGFGLILSHTVAAEVGRFERFRNAKALASYACLAPRADETGEARPGRAPLGRHLGSRGNLTLKWAFIEAAHAAVRHGGKWRAIWDRATKNGKKDRNRGYIKVARALATVVWVIGSHGVRYQERPPGRPGSRKAARRRQEDSRPGTGQPFHPMAQAPRA

SEQ ID NO: 177059 - protein, 402 aa, unidentified
MTYDFVIGMDVGKYFHHACVLDSQGQQALSKRVNQHEGSLRKLFAKFVANDTKVLVVVDQPNNIGRLTVAVAQDMGADVGYLPGLAMRQLSRIHAGNSKTDVRDAYVIAHAGLNLPDSLRSVDRVKEVFIQLKVLNGIDEDLTRAYTRLINQIRSALVGTYPAFEHVLRGQIIHRKWILHLLAKYGGPTKIRRVGKARLAAFARSHKARNPEPIIDAMLAAIHEQTVSIAGAEYAELGVAMSAKDALIKLEHRKEIEGQVLQLIQDIPQTEILLSMPGIGPHSAAQILMTVGDMSDFPDAAHLASYAGLSPRTHQSGTSIMSNSPNRAGNKKLKNALWQSSFASIRFHERSRQFYERKRSQGKRHNAAVVALARRRLNVLYAMMRNNELYRDLPTAQEPAAA

SEQ ID NO: 177060 - protein, 386 aa, unidentified
MKNQIKPIHDRNTSTPSPGQSNPAVAAAPAPPAPLRHVFMLGLDVDLLNVVTAIQCDRGAIALAQKFSRAQLLAWVQKQTAAGHEVHTVYEACGFGYTLHHALVAAGAHSLVTTPMRLSPERRRKNDRLDARALCVRLSRHREGHAHELKPIRIPSAAEQQRRELGRQREFFKRERGRLENHGRALRIEFEHETLPAGWAGPRKWKQIAPQCSEFVRGQLEPVVLQIRACQARMQELTARIQATVAQEKIPTGLGALTVALLEGEVCDWKRFRHRKAIGSYTGCCPSEHSTGGVQRFGHIDRHGNKHVRVLLVEAVWRLLRWQPDWHARVKYLQKLKHGASLKKKIAVALARQLAIDLWRWRTGRCTAAQLGWTVESAKDEAGTAQ

SEQ ID NO: 177061 - protein, 343 aa, unidentified
MYYIGLDVHKKTISYCVKDAAGRMHHEGKIGSTRRELDGWIRTMPQPRMIAMEATIFTGWIYDHLLPHAEKVKVAHPLMLRAIAAAKKKNDKIDAGKIADCLRCDFLPECHMASTEIRNRRRTLRYRNLLIKQMVQMKNRVSGLLMETGVSYNKQRLHKVGYFAELLSTNEEVNESIRPLLKLSREMICRSQKLDYALVSSLERDPLLKERLQRLRTVPGVGPITALTWALEIGDYTRFTSIKQAISYCGLCGDEKSSADKVMRMPISKQRNKHIQRVLIEAAKLAVRECHELAVIRARELERGNSNRATLAVARKMVCYMLAVERRHQDFVPAEKFNRTPAA

SEQ ID NO: 177062 - protein, 416 aa, unidentified
MKRNKPKKLGKVNGNTLIATIDIGKKMNYGYFRAPDGRDIKPFAFYNLRDGFEKFWAKLVEFQKGHNLEEIVVGFESTGPYVEPMLHFLKKKEITLVQTNPVHTKRLKELTGNSPNKTDEKDPRVIADVIALGHALTLVIPIGPAAELRRLNQARERAIKSRTSMSNQLQHLLFVIFPEFSWKTKSKSVLHLVESCPTPESIVRMGIEALCATLRKVSRGKLGQKRAKEIFEAAKKSVGISEGRESILKEIGHLVSNMRNQDGFIDGLEKEMKHYLEKIPYSHSILSIKGIGEVTAAGLIGEVGDFRKFSTISEITKLAGLDLYEISSGRKKGQRRISKRGRSYLRKVLFFAAINAVKSNGILHAKYQQMLCRGMAKIKALIAICRKLLRITFAIVRDNTVYVSNHQQMSDSKLAA

SEQ ID NO: 177063 - protein, 404 aa, unidentified
MSVQSAPVTVSTIVVAVDVGKTSAMLSVTDSSRKRLLGPVEFVMTRSGLAAAVHRVMVVVPLSAQVKVAVEAAGHYHRPVLDYRWPGGWEVLEFNPAHVAEQRRVAGRRRVKTDAIDLEAITELALAGRGQVITDRQVCIGELAAWANHRSRRVATRTATKNQLLGQLDRAFPGLTLALPDVLGTKIGRLVAAEFADPARLSALGVSRLIRFAAARDVQLRRPVAERLVTAARDALPTRDAVVARRVLATDVALLTDLDTQIEDAERELAALLPLSPFATLTSVPGWATVRVGNYAAALGDPSRWPGPRQIYRASGLSPMQYESAGKRRDGTISREGSVALRKALIDLGMGLWLTEPAAKTYALGLKARGKHGGIIACALAHRANRIAHALVRDHTTYDSTRWA

SEQ ID NO: 177064 - protein, 405 aa, unidentified
MFVGIDWASTEHAVCVLDQTGTTVRAFRIPHSAAGFDDLVARLRRLGAPAGLPVALERPDGRLVDRLLEAGHPVVPVRSNAIKAWREGEVVSGAKSDAGDAKVIAEYLRLRHHQLRTLTPFSDATRALRAVVRARGELVRQRVAAINQLTATLDAFWPGTKAVFPDIEREIALAFLQRYPTPESAAGLGEQCMAAFLTRHRYCGRTPAAELVARLRAAPAGLAGGAEATARRDAVLAFVGVLRALNQAIRDLDRSVIARLGEHPDSKVFASLPRSGQINAAQMLAEWGDCRDAYDGPEATAALAGIVPVTKQSGKHAAVSFRWACNKRFRNAMTTFAHNSRLASPWAAKVYADAIARGHDHPHATRVLARAWVRVIWRCWVDQVPYDPVKHAAAQRLAEEEATAA

SEQ ID NO: 177065 - protein, 338 aa, unidentified
MSKLKFFVGIDISKTWFDVAVITTDHPSGSIHNQFSQCPDGFKKMITWLRQKDVLLNTETLFCMEYTGIYNVGLVNFLVEQKAQLWVEMPLRIKKSSGFERGGDDKTSAVKIAGYAFRYQDKVQLWQPVDSSIEKIKHLIAQRDRVVNAITQLTVPVKELLQCGCNKEAKELEKLQLKSLKALQKTKEAIEQLIVKTVGQDAVITKKVQQVQSIKGIGQVTAVSLLVYTKGFTTFSNAKQLACYCGVVPFAKSSGTSIRFKSMVSPHANKKLKKLLHLCALSAIRNNIEMQTYFERKVAEGKNKMSVINAVRNKLIHRVFAVLRDDRTYEENYIRKCA

SEQ ID NO: 177066 - protein, 466 aa, unidentified
MEVLYARCAGVDVHKKTVVVCRIIPGPDGQPLQEIRTFTTMTRDLLALSDWLAEGGVTHVAMESTGVYWKPVYNLLEGTFTLLLVNAAHIKQVPGRKSDVLDCAWIADLLRHGLLKGSFVPERGLRELRELTRYRTALVRERAAEQNRVHKTLEGANIKLSAVATDLMGVSARQMLAALCTGRSDTEAIAQLAKGRLREKIPLLEQALEGDFQPHQRFLVAQQLAHIDYLEGLIDQVSEEVAQRLEPLAPPPSGPAPAPGSDALDEAAAFAAAELEARREALHLRLALDGLQEQEAVEGPLSFAAAVALLVTITGISQRTAEVIVSEIGTDMSRFPSAGHLCSWAGLVPGLNVSAGKRHGNRTRRGSPWLRSALVEAAHGASRSKGTYLSAQYQRLAARRGRKKAIVAVAHTILATAYYLLKNRTTYEELGDAYYDERDKEAIQRRLVRRLEEIGYTVTVELAQAA

SEQ ID NO: 177067 - protein, 446 aa, unidentified
MSRKKRTHLRGKRGQAFADKIRGIPLDCILCVSIDIHKYFHVVMIHNALGEIVTPTFEIDIFQTGFEQLCRVVDEAIQQTETRVVLTGMEPTSHYFENLAQHLRNRPQPVTLINSYAVKENRDQQLMHHEKDDEIDTAAIGDLLRRGEGTPFSPARGVYLEMQHLDRVRLSKVKIRSMLKNQVIGHLDRVFPGLVLIGETAKERYRPLFATDFWSCQTLQHLIRVCPNPRKLVTMSVPDLIDAFHDRGYAMGPKTARKIIVYAHKVLLPEPELIAVRCELLAHDLALLDDVQQLITKLEDRLCALLEQTPYHVWGKLKGLSAVQVASLAASIGNPTHYEYAGQVFRRSGLVSGRKDSGTRKRKGKGRRITKTGDVYLRRSLIGAVSTLMIHQPVLYRYYTELKLSKPAGVARVATARRAIGILWAIQRDQRSESLCFKKGDQHVDQ

SEQ ID NO: 177068 - protein, 409 aa, unidentified
MDLLHRCCAGLDVHKETVVACVRSAGGSEPNHDVKTFGTTTKDLLSLSDWMTSAGVTHVVMESTGVYWRPVWNILDGAFDLTLANAQHVRNVPGRKSDVNDAVWLSDLLAHGLVRKSAVPDLATYEHRELTRTRKQIVREQVRHALRIQKTLESANIKLSSVVTDVLGKSGRAILRAIVNGESDPERLASLARPNVKASREELTEALRGRITRSRRFMLGVHLDQVEHLECVIKSIDMRIEDFTRSFRDAVSRLSGIPGVSDVSGNAILAEIGLDMSHFPTAGHLLSWAGLVPRLDESAGKRRDTRIRKGSTWLKTTLVQCAWAAIRKKDTYYRAQFHRLKAKRGPKKAIVAVAASMLTAIYHMLKSGTEYRELGGNHFDQRDKTKSIESLCKRLRKLGVEIEIKQAAS

SEQ ID NO: 177069 - protein, 348 aa, unidentified
MVYAGLDLHKEFSVITIVDAQGREMLKQKKFPNNGEIVELFQGFDQPVVAMEATRAWYWLYDLLEDNGIEVKLSHPLKTKAIASARIKNGKIDSKVLAHLLRTDLLPLSYVPKRDVRMQRQILRYHASLVRIQTGIKNKIHAILAKNNITHSFSDLFGKQGKEFLRSLPLPEIYRLALDGYLSVLDELEQQTKTANKRIMGSVGGDEDAKLLMTIPGIGYYSALVIKSEIGDINRFPSAKQLCSYAGLIPSTYSSGNTTFHGHITKQGSRWLRWILAEAVGHCVSKPGHLHQFCRKLATRKGEKIAKVATERKLLEWVYHMLKERRTFQDMEKIADAWGKPVWVTGLI

SEQ ID NO: 177070 - protein, 318 aa, unidentified
MTQDLFIGIDVSKAKLDVAASPGEHSWTVSNTEEGIQELISKLRQLGTPKIILMEATGGFERRPLVLLGAARLPVTAINPRNARDFAKSIGLLAKTDRVDAKALALFAQKIQPPCRPLPDAETRALQDLIVRRRQMIDMLTAEQSRLAIVESAKVKREITQHIAWLKKRIHITDYDLDQTIKNSPAWQPKSDLLKTVPGVGPLTSSTLLALLPELGSLTNKQIAALGGVAPFNRDSGTLRGRRCIWGGRAAVRSVLYMATLAATPFNPTIRAFYQRLRNLGKLPKVALVAAMRKLLTILNAMVRDQTPWHSSNTEISS

SEQ ID NO: 177071 - protein, 342 aa, unidentified
MQITTIGLDIAKNVFQVHGIDATEKVVVRKQLRRSKVIAFFEALPPCLVGMEACASAHYWARELRKLGHEVRLMPAKDVKAYVKRNKNDAVDAEASCEAVRRPTMRFVGVKSAEQQGRLMQHRTRDLLLRQRTQVINALRAHLAELGVVAAQGREGLKELLAIIADEKDERLPVDARASLIVLAAQLQALQTLIGSIEKRLVVQHRANEASKRLETIPGIGVLGASAIAATVSDPNVFRSGRDFAAWIGLVPRQDSTGGKQKLGPISKQGDRYLRRILVVGAIAVLRYAKQNPEKYPWLTQLLARRPFKVVAVALANKMARMAWALLAKGGTYRAPALAAAA

SEQ ID NO: 177072 - protein, 340 aa, unidentified
MTITTIGIDLAKNVFAVHGVDQNGKTVLVKSRVTRAALPGLIASLPPCVIGMEACSGAYYWARLFLQYGHEPRLMAAKFVSPYRMAGKSGKNDAADAQAICEAVRRPHMRFVPVKDESQQAMQCLHRNRQGFIEEKTATYNRLRGLISEFGVIAPQSTDALRHMVSAQKSSLPLQVQQCVDDLLEHVDRIEANITEYDRILSRIAKTDHRSQRLMKLKGVGPTTACALVACIGNAHDFKNGRQLAAWLGLTPSQYSSGGKSKLGRITKAGDSYLRTLRVQGARSVLIGAEKRTDLFSRWVCSLVERRGYWRAVVAIAAKNARLCWASLHYGDDFRLYSAS

SEQ ID NO: 177073 - protein, 430 aa, unidentified
MDGVDGNRLEEFRQLRKEIRQSGEHLIVGIDIAKDGHHAFFGTATGKTLLRRIVFSNDCEGFRKLLDQTEALRVQHGLKKVVYGMEPTANYHKPLGEYLIKLGKTVVLVCGVTVARNRESLDGRWDKHDGKDSANVADLISQGKCLYYEHPLAELRGLRGLLSLKRRLKKQEHGYRVRIRNHLIAQYYPEMDRDYERLGAEGLSIVRWCLAASDIAQLDVDPFIERVTSRRITREKRGRLEEIWEKAAGSIGCDGVPGVGHEAKMMVEGLRQIREMIKETEQKIEELCKAFPEYQYLLTIPGFGPDVSSKVLGAIGDPDRFQNGKQVLKMGGLDLSADRSGKDSGRAIPEISKRGKADLRSALYQAALVASFKNRGVMIYYTNKIRGREREKGIHVKMRVKLAAKLLVIAWTLMKKREPFNPVYLKAELN

SEQ ID NO: 177074 - protein, 338 aa, unidentified
MELSAIGMDIAKNVFQLHCVDRQTGEIERIKLRRNEVLPYFARRTPAVVAMEACGGAHWWARQLQQLGHTVRLLPAKAVRPFVLRNKTEAADARAIWTAVQQPEMKTVAIKTVYQQSILALHRMRAQLLKFRHMQTNAIRGLLLEFGHPLPESYLALRKAFPTVMATLEKQLPGILIETLREQWARVQSLDNEIALIEGRLKRALAETPTCQMISDIPGVGLMTATAAVATMGDPASFKTGREFAAWLGLVPRQTGTGGRIRQLGISKRGDAYLRTLLMHGARAIIARRRYSDWVAGLIARRPYSVVIAAIANKLARTIWAVLATGKRYDGASFAAAL

SEQ ID NO: 177075 - protein, 472 aa, unidentified
MALGACLGGFAWIAARAREPYASSDWDLASMADRGSTKRGMAILREEGAQVKGSQFRVVGFDCAEEEHFAVLLDQDGEFESRMKVVNRRDQVEGALAQLMLAVAPNSNLVVVVESNRSHGRVVADVAKELGCEVWQVNTVALNHFRDVEGQPRKDDEWDAYLGARMVYLRMRGCRVMREVTQEERALSRLTRTYVRLTDDRTQQTLRLRAVLLELAPEILHRSWEGPKPNSKAMMYLLNRWPGFKGMERAQLRSIEKILYQCRYGDRATRVAKLLRDMARRIAVVAEERSAITLEIGFLMQQITVCSVSLERLSGEITRRVESHPMGVKLLEMHGIGPVIAGVLISELLPVARAATEPQCATYAGVTPIGRKSGKALDTTRLARGVNKRILHSLYTSSVVAIKHSAVDRAYYNKKLRDYAGHPKAHVAALIALSRQRHKVIYKLMTTDARYDKEVLIARHLERLEEARRAAA

SEQ ID NO: 177076 - protein, 318 aa, unidentified
MAQGSTLFVGMDVHKETIAVAYAAEDREAEVVAFGTIGTRQCDIDKLIRKLQAKGKRLPVVYEAGPCGYWLYRYLTKKNLKCWVVAPSQIAKKAGDRVKTDRRDAMQLARLLRSGDLTPIYVPAVEDEAIRDLVRAREDALKDVKAAKARLKAFLLRQDIRYEGRATWGPAHLRWLAEVVCPTPAQQVVFQEYVRAVSEHTERLQRLEAELHTQVQPWQWVPVLEAMQALRAVQFTVAVTLIAELGDLSRFDNPRQLMSYLGLIPSEHTSGERRRQGAITKTGNSQLPAVRSSREPGLTAIRPRSAAICSSAWRRCPR

SEQ ID NO: 177077 - protein, 353 aa, unidentified
MELDKYIGIDAHSSTLVVNARDAFGKVILQSTVATNAEAIVQCIGGLRGRLHVTFEEGTHAQWLYDILRRRVDDVLVCDARESRLLQDGNHADRIDASKMSHLLRLGALKPVYHERQGTAALKELVRSYDGLVEDSIRAMNRIKAIYRSRAIPTPGQSVYRPNQRESFMEQLKEAGALKRVGLLYEELDTLNLLRHQAEKFMVTEARRHPAYGLLRSIPQLGPVRVARLISIVDTPHRFPNKAAFWNYCGFAVVLHSSGEHRFIGDQLVRSPKAVTTRGLNKDHNPAMKEIFKGAAMKARQRGAFTAYYQDLVNRGLKSELATITLARKISAITLAVWKKGERFDPKKLTQTT

SEQ ID NO: 177078 - protein, 408 aa, unidentified
MNPLYVGIDVSSKSNVVYFMLPDGSKHSNFSVANSHTGSSQLVKRILSAMTSCSLDTVLIGLEATSVYGDNLVYFLREDAALARFNSKIHVLNPKQVSKFKEAYNDLPKNDLIDSFVIADCLRFGRINKEVYIGDYRYKALQNLTRARYFAVSNLIKEKQRFMNILFKKYSTMTQEKVFSDTFSTTALAVYDEFESAEALADMDLHELTAFIMEKGKNRFPNPNAVAKAIQKAARSSYRLPKTVNDSVNQVLSISITSIKALEAQIKEFDKAIATQMELLPNVLISIPGIGPVFSAGIMAEIGDINRFHNQAQLAKYAGLAWKQHQSGDFEAQTTRLINSGNRFLKYYLCEAAFSLVRCDKEYSDFYHLKYKEVNRYQHKRVFALTARKFVRLVFRLLKDNRLYTSAE

SEQ ID NO: 177079 - protein, 343 aa, unidentified
MKHYAGLDVSLKETSICILAEAGKICREIRVASHPEDLLRILQDPAWHFERIGLEAGLLSQWLFNGLAEAGLPVVCIETRHAKAFLKARVNKSDRSDAHGIAQMMRVNLFRPVHVKTLTSQKRRVLLTARKLLQEKAIAFENEIRGLLANFGLKVGVVGAVKFEERIRELIADMPDLAEIMAPLLDARRRLREHFATLHRKLLELARGDDVCRRLMSIPGVGPVVSLAFVATIDTPARFRTSKAVGPALGLTPVRNQSGDNERIGRISLCGDAMMRTLLFEAAQTMLRQTTRWSWLKAWAMKVAQRRGSGKAVVALARRLAVIMHRMWRDGTQFRWTREVPAA

SEQ ID NO: 177080 - protein, 371 aa, unidentified
MSELPAETRPARLKVEASPRPPGARKPETELGAVSTTAVPHPDSRSGPSPHLQGRVMDEQRTVFVGIDVSKDRLDVHLRPSGEAFCVPREGKGMDDLVIRLQGLSVALVVLEATGGFEATVAAALAGVGLPLCVVNPRQIRDFARAMGRLAKTDTLDAEVIALFAERVRPQARPLREPERVHLAELVGRRRQIIEMIGMETNRGRQAIDKPLARRLARHVSYLQKELDAIDHDIGDAIKHSPAWREAEALLKSVPCIGDVTARTLLAELPELGTVSRHQVAALVGVAPINRDSGLMRGRRAIAGGRTSVRAVLYMAALTAIRRRSPFRGFYDQLTAHGRPKKVALVAMMRKLLTILNAILRDHTPWRPLNA

SEQ ID NO: 177081 - protein, 338 aa, unidentified
MTVEILGVDIAKNVFQLHGVNRNGRVILKRRVMRDQLLAVLAQIDPCTVVVEACTGAFFWARKFETLGHQVKIISPQYVKPFVRRQKNDGNDAEAICTAACQPHIPFVPKKTATQQDIQALHRARQRMVNHRTAVVSQIRGLLLDRGFAIAKSITRARRAIPEIISDLENELTTMAREAITELYDLFRDLDRRIASFDKKIDCVFRGNEDCQRIARIKGVGPKTATAIVAAVGDGSEFKNGRHLAAWVGLVPRQHSSGDRKVLMGISKRGNQHLRSLLVHGARAVVRTAPNKSDPDNQWVNQLRERRGFNRATVAVANKNARIIWAMLRTGKPYCAAC

SEQ ID NO: 177082 - protein, 359 aa, unidentified
MQQATGSAVERTVGLDIGDRTSRYCILSQDGTLLEEGQLATTEAALRRHFSPMDRARVALEVGTHSPWVGRLVADCRHEVIVANPRQLRLIYENQRKSDRTDAEYLARLARVDPKLLAPITHRGEQAQADLARLRSRDMLVRARADLVNHVRGAVKSVGCRIPKCSTPAFARRAEAHVPESLEAALRPVLETITQLSEQIHQMDRQIEQVAQSSYPETAVLRQVPGVGGLTALCYVLTLEDPARFPTSRSVGAYVGLVPKRSSSGQRDPQLGITRAGDEMLRRLLVQAAHYTLGPFGPDTDLRRFGEKLAARGGKNAKKRAIVAVARKLAVLLHSLWSTGEVYEPLRHHPQATQEQEAA

SEQ ID NO: 177083 - protein, 366 aa, unidentified
MREQQNNRRERTTIGLDLGDRWHRFCVLGASGQVVEEGSVANNRVALSELSSRYPGALVVMEAGCHSPWVSRHLEQAGCEVIVSNPRKTRAIYQHERKSDRRDALMLARIARMEPALLYPVRHGSEESQQDLLRIKLRDSLVRARVGLINSLRFTLKSLGYTIANPSTERFHKVVQSALPESVVQMIAPSVQAIEELSLRIKLLDREIRTLAHTKYPETTWLEQIPGVGPITALYFVLKIGDPARFERVRDVGAFIGLCPRRDQSGENDPQLRISKRGDAYLRRLLVSSAQYILGPFAPPSALRQYGLALAAGATARAKKRAVVAVARKLAVLLLTVWKNKSPYQPFPQQREKMRINDLERLRCIA

SEQ ID NO: 177084 - protein, 381 aa, unidentified
MKKIPKRRQPSKLHRASQLSVLQANVAGIDIGSREMFVCGPADENEQREMRVFGTTTEQIRECVGWLKRQKVTSVAMESTGVYWIPVLEIMESSGWEVVLVDTRPLARVPGRKTDAEDCQWLQTLPSHGLLQGVYRPGEQISEVRRMVRQKTVLVRQQADLLRRMQQCLDQMNVRIHPAVKPLQGATGMAMLRAIVAGERDPQKLAKLGDAGCQKSASEMVKLLTGHGRSDHLFNLGQLLRQYDFLSEQIAQYEQEIERRLQELTPLERPHLTVPPLANREKRQMQKRHQEAKRQVLYRMIGADLTAIDGIGVETAEVFVSEYGPDLSKFATEGEFVKHIGLAPHRPVSGGKVLKKRRQEKGTRTAEVLRNAASALNKGEP

SEQ ID NO: 177085 - protein, 469 aa, unidentified
MPNSRAHPYPSGRAAATPPPELHRINLNAAGVDIGAASHYVAVPSGRDPEGCAVRAFGAFTADLSVLAEWLTRCGIQTVAMKSTGVYWIPLFERLSARGFEVRLVDPRQLKRVPGRKTDVLDCQWIQQLHTFGLLAAAFRPEDQICVLRSYLRQRAMLVTYAAQPIQHMQKALELMNLKLAHVVSDIAGRTGLAIIRAILDGQRDPRALATLRDPHCKADAATIARALEGSWRAEHLFELRQAVELLEFYQRQIAACDREIEAPLTRFADKPGGPPRPDAARRRKARRTALRFDARQHLHRLTGVDLTQIDGIDAPTALTVVGEIGLDMTRWPTEKHFASWLGLAPGSHVSGGKQRSGRTKPSSSRAAAALRLAASSLYHSRSALGAFHRRLKARLGAPKAITATAHKLACLIYRMLRFGTDYVDRGQDYYERRYQGRVVSHLMRRAQELGYTLTKNDGPPATSSPASP

SEQ ID NO: 177086 - protein, 338 aa, unidentified
MHYVGIDHHRQYSHITILDEKGEMVRSGRVANFRRELEKFLKGTGKIKAVIEAGRSSYTMVDVLDDMGIETSVAHPKDVKAIAKAKVKTDERDSYKLAHLLRTGYIPEVYKRSRENRSSQRVLRQRAFYVGKQTSVKNRLRALLAQQGEEIRVEVARVEDLFTAKGMKVLAGLDLPEREAKMVEALLKTYRHLQDRICETNALVDELYEKMPYARLIRSVPGFGVFLSVLVAVEIEDLKRFEDVSKLHGYAGVIPSTHSSGERSWHGKIIKEGNRWLRWAAVEAVWPALRADFDLRCYYDRMKRRKGANSAKVATARRLLTIIYRMLKEKRPYIPYKR

SEQ ID NO: 177087 - protein, 343 aa, unidentified
MDHFAGLDVSVKETSVCIVDDTGKIVREVKVASEPDALLPVLTNPTYHFKRIGLEAGPLSQWLFSALAEASLPVICVETRHMRAVLKAQINKTDRNDACGIAQMMRAGLYRPVHVKTLRSQKLRMLLTHRKLLQSKAIAVDNDLRGTLRNFGLKVGVVGKVRFEARIRELVENLPNLAVLVEPLLTVRRVLREQFCILHRRLLAIVRDDDVCRRLMTTPGVGPVVALTYRATVDVPARFRKSKSVGAVFVLTCSKYQSGESERSGRISRCGDEMMRVMLYEAAQVMLTRTNKWSWLKAWAMQIARRRGKKKAIVALARRLAVIMHRIWVDGTEFRWTRDVATA

SEQ ID NO: 177088 - protein, 377 aa, unidentified
MKKISVGIDISMDDFYACIKIRTQTGSIKIKGTRSFKNTENGFKEFLKWALKAKEDDYSVIFVMEATGVYYENLAYFLYANKQTVAVILANKVKNYIKSLNIKTKTDKTDSKSIAGFGIERELDKWQPMSPVYKNLRDLCRELLSIKKDLQRSRCQLHAMNKSHEKLESIVALKLEQIKFYEKAIDIIKEEIKNAVNKDETLKEKIRKAQTIPGLGFETVVILVCETNGFALFDNIRQLVSYAGLDVTFKESGNYKGKTRISKRGNSRIRQALFMPSMSATRANYPIKKLYERICDRNPDIKRKGIIAGMRKLLILTYTLWKKDEEYDIKYQWNKEPSSNDTAMPFFGPVTIKKKAEQNCSALDRPRFNELTEAFFC

SEQ ID NO: 177089 - protein, 319 aa, unidentified
MVIGIDVAKAELVVSVGHDGACSTVTNDDVGIRGLVAQLSALTPELIVLEATGGYELLCVAMLAAAGLPVVVVNPRQVRDFAKATGQLAKTDRIDAGILALFGERVQPALRLPPDPATQELEAHLTRRRQLLEMRQAERNRLGQIMGRAQRAVKQSLKKHIAYLDRELAITDTDLGRMIRESPAWREKDDLLQSVPGIGPIVARTLLAELPELGQLNRRAIAKLVGVAPLNCDSGTLRGRRVVQGGRASVRATVYMAALVATRRNPVIRVFYQRLVAAGKPKKLALVACMRKLLTIVNHMVRTGQRWAPSRPLQLAEQP

SEQ ID NO: 177090 - protein, 421 aa, unidentified
MNLLSTAKYTAFIGLDWADAKHDVCLQAVGSDQREFDCFAHRTEHIEEWAQALHQRFGGRIAVALELSKGPIVYALQKYDFLVLFPINPSTLAKYRQAFKPSGAKDDPTDAELALDMILCHPERFKPLKPQSVPMRQLSLLVEQRRRLVGDKTRTVNRLCNALKQYYPQPVTWFARHDTILFCDFIARWSTLTGVKRARKTTLRTFFRTHNARSGKVIEARLCAIKAAQPLTHDTAIIEAHRLHVEVLIEQLRVVLKAIDRFDEQIATTAAKLPDYELLFRPLPGAGPVMAPRLLTVFGEDRKRYAGAEEIQRYSGVAPVTERSGDKTWIHWRWQCPTFIRQTMVEWAGQTVNHSFWAGAYYRQQRAKGSSHQAAVRTLAFKWLRILYRCWQTRTPYDESKYLNALRRRGSPLLEHLGETV

SEQ ID NO: 177091 - protein, 345 aa, unidentified
MDVLIGVDPHKATNAVAAIDERGRLLEYAVFSTSRAGLRSLARWAKRFPSRRWAVEGASGLGRSVALRLVAAGEKVVDVPAKLSSRARLLATGNARKNDRVDAIHVALAALGSERLAEVGEEEHSEVLRMLSERREDLVKERTRTLNRLHVLLRDLLAGGAPKNLSAEGATLALRGVRPRSAPARTRRRLAADLLRDVRRLDRQLLDLEARIRDAVREASTGLTALFGVGPILAAKIIGRVGNIARFPTRACFASYTGTAPIEASSGEVVRHRLSRAGNRKLNHALHMIAICQARHDTEGRTYYRRKLAEGKSGKEALRCLKRRLSDAVYKQLQTDLVAVTVAAA

SEQ ID NO: 177092 - protein, 440 aa, unidentified
MAMRKREDLVFPNAAAIDVGASSHWAAVPPHSTDAPVREVGAMTDDLNALADWLLACGVDVVALESTGVYWIPVYEVLEQRGLKVWLVDARQVKYVPGRKSDVQDCQWLQKLMSYGLLRAAFRPAAEVCVIRAVARQREVLLTSQASWVQRMQKALVQMNIQLTEVISDVMGQTGQAIIRDIVAGQREPKLLAKHRHRRIKASEHDIVRALTGNWREEHLFVLKQALAMYDDIAGHLAECDTKLQALLAERSAASVDLGKAPRAGSKARAEFDVRQQLANWAGADLTRINGLGLDSVMKILSEIGTDLGRFANVKHFCSWLGLCPATKISGGKVLSTRTKRSANRVRQALKMAAMSLSHSDSALGAFYRRLSGRMDKPRANTATAHKLARMVYFMLTRGQAFVDEGQQRYEEQQRERSIAALKRRAAALGFRINPMGAAA

SEQ ID NO: 177093 - protein, 347 aa, unidentified
MDKELYIGVDVSKQTLDLAYYDGESIDWKNAHIKVSNNNAGFKKIGSWVAKVSKRFDIVLFCMEYTGLYTQNFRLWLEEKHYIYRMVEPRKMHRFEPDLDDGLRSLDRIKTDELDSFRIAIYCEQNHRKILRNPSKLPPPVYFKLKRLLAERKQTVKQSVLYKQQLHDICAYDTDLSVERKNGQLKTLNDALKGIDNEIDMYLKEDADINKNFSLLTSIPGIGRVVALETIVLTENFMAIDNPRKYACYIGVAPFKKESGTSVRKGSSVSKKGFKQAKADLSIACLVCMQHIPNIRDYWERKRKEKCSGIVFNAIKFKMILRMFAVIKRGTPYVETDNYRNGKNKQP

SEQ ID NO: 177094 - protein, 395 aa, unidentified
MSSRIVNSDRVVIAVDPHKASWTAAAVGPGLQPLATIRVPVSREGYQGLRQFARRWPGAEWAIEGAAGLGAPLITRLSTDGITATDVPAKLATRVRMLSTGHGRKSDDADAVSVGVAALTASGLRSVAVDEAITALRALVEHRDDMVKSRTQTVNRLHVLLTQLLPAGASRNLSADHAAQLLRTVRPRSTGPRTLRRLAAELVGEIRHLDRRIATTTSEISAAVTATGSTLTELRGVGDLTAGKILARVGDITRFRSSAAFASYTGTAPIEVSSGDVVRHRLSRAGDRQLNSCLHIMAITQIQRDTPGRAYYLRKRAAGKGHKEAMRCLKRRLSDLVYRLLMRDAHRQEATGPGGHTGATTESSATGSTPTTGSSEKSLPGPASTDPTTPDSRST

SEQ ID NO: 177095 - protein, 322 aa, unidentified
MNKNKHFIGIDISKKVFDVWSAELGHKQFTNNPDGFEKFMLHLDGSCWCVMEYTGSYYNQLALFLYENKIAVSVINPLVIKRYIQMKLQHNKTDKSDAKMIVRYAQEQNMSRWQPLPGYIDHCKDLHTTISLYFKQSTALKNKLHSFLDKGIKGKIITSIKRQIRQITAEIKLLEQALEDTIKEHEQQLLSNLLSIPGIGKKTAIMLIVCTNGFKTFENNRQLSAFLGLSPVIFTSGTSVRGKARISKKGNPLIRNHLFMCSFTAYTKNPQCKALFGRLVAKGKSKKLALIAVTNKLLAQALAIAKSGLKYDPNYKALLTSK

SEQ ID NO: 177096 - protein, 343 aa, unidentified
MQTVTTIGLDIAKSVFQVHGVDAAGQVVIRRQLKRRYVLAFFERLPPCLVGIEACASSHHWSRELESLGHTVRLMPPAYVKPYVKRQKNDTTDAEAICEAVMRPNMRFVPTKTIEQQSCLMLHRARHLFIRQQTAVINSIRAYLAEFGIVAPVGRRGVEQLLEVVADATDRRLPEVARVCLAALGSQLRRLKAQILEFDRRIMAWHRSNATSKRLDAIPGVGPALATALVASIADPKAFRSGRDFSAWVGLVPKQNSSGGKDKLGSISKQGDRYLRSLFTAGALAVIRYAKIHGTRHRPWLTALLARRPTKVAAIALANKLARMAWAMMARNERYKEPAALTA

SEQ ID NO: 177097 - protein, 315 aa, unidentified
MMNEQTYCGIDVAKRHFVIGLSNQKRTKTETNNPKGIAHTIEYLRSFSVDLIVLESTGGLELPLAKALHHAGFRVVIANPRQTNQFAMSQSLAKTDNKDAKMLAFYAQMLAMRDNVAQQLYIPPTPEQEQLEALVSRRNQLVEMRSAEKNRLEQVHSTQVFSVEQHIDYLSLRIDELDREIEQHLKHFDDTIKKFKDIKGLGTQTIAVLMSMLPELGQYTHKQIASLVGVAPHPKESGNTKWKSRCSGGRKAVRNALYMATFVCVRFEPKLKQFYERLRANGKAFKVAINACMRKLLTILNAIVRDGSQWDAHAL

SEQ ID NO: 177098 - protein, 410 aa, unidentified
MIKENYVYVGIDLHKETHTAVMIDCYNQKLGEITLPNRPADFPKLVTKVKKCNTDGKEVVYGLENAYGYGRALAVWLIDKGYLVKDVNTAISHRQAKHRGAMYRKSDSDDAKAIALATLNMLDKLPDACPNDAYWSLGQLVHRRDNIMKQRTRLVNQLHEQLCIVYPSYKQFFNDISRPTALYFWEHYPSRKYLKGKSVEDLRAELVPVSHNKCSTKTCEKILDAVASDKVKNNAYQDARDMVTLSIVSDLQHYDSQLTEVDKMLEQMYKMLGCTLTTIPGVNVITAAKILAEIGDIKRFSNANKLAQFAGIAPLHLSSSGKGKDVATKQGNRRLQATIYFLAIQMVQLSSKGTPRNSVVRAYYEKRKAEGKTSQQALICISRRLISIIYGMLKHGTEYRMPVVESAGEK

SEQ ID NO: 177099 - protein, 396 aa, unidentified
MFFLGIDIGKNTHVASLLNEDGKSVFRAFSFANTSEGGKSLLTKIATLGIEPPNLAIGLEATGHYWLSVYSYLHDKGFLVHVINPIQTDGWRKGVEIRRRKTDVIDSILIAELVRYGGFIETKLPSEEALSLKNLTRFRSYLVDSIADLKRKVICVLDQVFPEYQNVFSDVFGKTSKEILLQFSSPAELEHVSADTLAELLAGLSRKKLGSDVAKKLSAVASTSFGVTFCRDSFTFQLRMLIEQIKFIEAQVKDVEVEIEAIMANLQSPIMTVPGIGKILGAVILGEIGEIDRFDAPAKLVAYAGIDATVRQSGEFDGTNTRMSKRGSPYLRRALYQAALVAAVGNNPDPTLRAFYLKKRAEGKHHATSVGAVSRKLCYIVHAVLKENRPFEVRNP

SEQ ID NO: 177100 - protein, 352 aa, unidentified
MIVLGADTHKRSHTIAALSAATGELVGEQTVQVGAKGFAALLTWARTLGGERVWALEDCRHVSGSLERFLIERGERVLRVATKLMADARRGARGRGKSDRIDALAVARAALREGLDVLPAAQLEGPELDLRLLVDHRERLVRQRVALNSTLQWHLHDIWPELQLPGSSLFYGNWGPRIARRLARAEQTMRVRIARDELRRIRELTQTINALEAEIAQLVARIAPQLLSEPGFGPLTAAKLVGEIAGAGRFANDAKLARAAGVAPIPISSGNTNRHRLDRGGNRQINAAIHRIAITRTRCHPETRAYIARKRTEGKTTKEATRCLKRHLARRVWHLLQTTSPNTNQAINTSTP

SEQ ID NO: 177101 - protein, 323 aa, unidentified
MKQLFHLGIDVAKAKLDCALRLPDGKLRSKVVENNPKGFKVLTEWLAKHGATTAHVCMEATGVYWEAVAEYLATQEMTVSVLNPAQIKAFGASRMVRTKTDKVDARLIAEFCFERRPDSWQAPTPSEQALRAMVLRLEALQAMRTQESNRLEVARDAVSAGIAKHIEWLDEQIKALAKAIHDHIDGDENMKDKKAILESIPGVGERTIAILLAFYANLDRFSNARQAVAFAGLDPRQHESGSSVKGKPQLSKIGHAFLRKALYMPAMVTLYKTAWGKLFRNRLAAAGKPPKLIIGAMMRKLVHVAYGVLKSGKSFDPALHGLT

SEQ ID NO: 177102 - protein, 318 aa, unidentified
MNTNTLQNINVGVDTGKSQLDIYIRPLDIYFTVPNTDKGISDAIKTIKKHKPQRVVIEATGRLEMPFILACDKAKLPYVVANPLRIKRFAEAIGQRAKNDRLDAALIAHYAERVQPELTKLKSEDIRLMSDLVTRRNQLLTMQTMERNRLQILPKNISSTITPVLTALKNQLEKVEAKIAKLIESSPEYQAKSTILQSMPGVGKVLAASLISNVPELGFITNKQASSLIGVAPITRESGRFKGKRMIKGGRPQVRTVMYMAMMSAIQCNPVFKATYERLLAAGKPKKVAIVACMRKMVVILNSMIRDGVMWDKGSAKN

SEQ ID NO: 177103 - protein, 355 aa, unidentified
MTKDRLEVTGGVDTHGRTHHGAALDGAGRLLGEREFPATAAGYRALLAWLIGFGRVVAVGVEGTGTYGAGLARHLAGHGVRVIEVDRPDRKTRRFRGKSDPIDAIAAARAVLAGTATGVPKTRTGPVEALRALRVARRGAVKAKVAALNQLHGLLASAPEVLRAQLQDLSSAALVTTAAGFRIREDRLEDPAMAVKAALRSIARRVVDLNAEIALADRRIAPAVARLAPRTLALPGAGPQVAAQLVVTAGDNPERLRSEAALAHLCGVAPLPASSGRTDRHRLNRGGDRQANNALHTMVLTRMRHDPTTRAYVQRRTKDGLSKTEIMRCLKRYVVREVHTALMADFTAPRGLDSP

SEQ ID NO: 177104 - protein, 389 aa, unidentified
MFYVGIDVAKDKHDCCILSSDGELIYPLFTISNNSLGFEDLMEKLSSLTDDYSEIKVGLESTGHYHLNILSMLLDNGLASYVINPLHTTLFRKGQSLRKTKTDKVDAASIAMMLLTDKTLKPYTDTSYHNEELKSLTRYRFEKVQERSRLKTSVTRLVTILFPEIEKLVPQLHMHSIYMLLSEFPGASYISSAHLTRLKNLLYKESNGRYGRDMAIKTRDAASTSIGSIIPAKSMELKHTIQLIEVLSEEIDEVEASIYAIMEQIDTKITTIPGINYRMAAMIIAEVGDFSSFKSADQILAYAGLSPTTYQSGQLSTAYARMEKRGSRYLRYALFNAAKYVCNWDPTFKNYLAKKRAEGKHYFVAISHACKKLVRVIYRMQLTGEPYHP

SEQ ID NO: 177105 - protein, 372 aa, unidentified
MNYNTVYVGMDVHKESFTLCAYTIDAEKGSHFQRTEADYKNVLKYLEFLRTVYGNDANFICGYEAGCLGYTLYHQLTEHDVNCVILAPTTMLEQCSRRRIKTDRRDAEIIAKCLAQHNYSPVHIPTATDEETKEFLRMRDDHKLALKKVKQQILAFCLRHNYRYDGNSHWTAAHIKWLKSLKPEALYKEILDEYLLTYTTLSDKLERLDKRIEELASKDEYRESVKKLCCFIGIKTHTALSVLIEVGDFQRFASAQKFASYLGLVPGEDSSGDEQTRLGITKAGNRHVRMLLTEASQCYARGQIGFKSKELKSRQAGNSPQVIAYADKANERLRRRYYKMVLGKSKKHNVAKTAIARELACFMWGMMTEHIA

SEQ ID NO: 177106 - protein, 427 aa, unidentified
MSVTQNEKIRQVTDTTMVIGVDIASEFHWARAFDWRGLELGKTVKFENSAEGFNFFLRWVSELTVEQKKDSVMVGLEPTGHYWFTLAAHLQGGDFKLVLVNPYHVKRSKELDDGHPSKSDKKDPKTIAKLVLEGRYVYPYIPQGLYAELRVAMNCRWRIRKELASLQNQIQRWLKIYFPEHSKVFGRFTGAGSMALLHSAPFPSDLISLGVEGISGIWKQMKLRGIGRKRAQRIYEAAQTSVGCTTGMEAARMELQILLEDYDAKLQQYERVMQVVENLCSQIPAVAELLKIQGLGLVTVAGLFAEIGDIRRFESPRQIQKLAGLAITENSSGKHKGPTEISRRGRSRLRAILFRAAIPLLAKNREFQLLHRYYTTRQNNPLQKIQSVIAICCKLLRVFYALATKDCAYSPEKVLADIQRNQPLKAA

SEQ ID NO: 177107 - protein, 442 aa, unidentified
MVAVMIGIDPRKASHTAVAIDPAEMPLGQLQVRACAARVERLPGWAQAWPQRTWAVEGAGGLGHLLARQLPAAGERVLDVPPELAARVRLPATGDISKNDPDDARSVAVAALRPAGVREVCRDDHAAVLKVWSKRYRDLGRVRTQVACRLHQVLCELIPGGVPGEITAGQAERILASITPAEAVEAARWELAAEFTEDLRGIDARIRQTRNKLAAAVRAAGTSLTGLFGAGPVIAAAVTGDVRHVARFPDRDHFAACNGTAPIEVSSGGRKIWRLSRRGNRRLNHAIHMAAVTQIRRRHSQGHACYQKKLAEGKTGKEALRALKRQVSDAIYACLQAGARRAAAHVKSPGGQPGNGSDSSAAGSRPGHRLFGQATPGPAAYPTTPAASFPAPLPSQASRRPGPGPGAARPRQRRPQGVLDPAVREPIMPAAGRKATGPAGHR

SEQ ID NO: 177108 - protein, 338 aa, unidentified
MKAYAGIDLHSSNNYIGILNDNDQRLYGKRHPNQLAHVLLALGPFKEVLQGVVVESTYNWYWLVDGLQEHGYKVHLANPSAVKQYEGLKHTDDKWDSFWLAHMRRLGILPEGYIYPKEHRAVRDLLRRRLLFVKHRTANILSLQSMITRNLGFKMSGNAIKKLNEFDAKELFGCPNLAFMAKNNIAAIAFLGKIIKGIEKQVKPQIKLRKEFEMLLTIIGVGDILGPTIMLEVGDINRFEKVGNYSSYCRCVKSERISNGKKKGENNKKNGNKYLAWAYVEAANFAIRHSVAAQRFYNRKKAERNGIVAIKALSNKICRASYYIMRDQVPFDEGMLFK

SEQ ID NO: 177109 - protein, 343 aa, unidentified
MDHFAGLDVSVKETSLCIVDEGGRIVREVKVASEPEALLQVLTSPACHFKRIGLEAGPLSQWLFNALAEVGLPVICVETRHMRAALKAQINKTDRNDARGIAQMMRAGLYRPVHVKTLRSQKLRMLLTHRKLLQSKAIAIENDLRATLRNFGLKVGVVGTVKFEARIKGLVDNTPDLVVLVEPLLIVRRVLREQIGILHRRLLAIVRNDAVCRRLMTVPGVGPVVALTYRATVDVPYRFRNSKAVGAVFGLTPSKHQSGESNRTGGISRCGDEMMRMMLYEAAHIMLVRSAKWSWLKAWAMKIARHRGLKKAIVALARRLAVIMHRIWVDGTEFRWTREVAAA

SEQ ID NO: 177110 - protein, 421 aa, unidentified
MIDVDHQGPEGNTVDVVVERCCGLDVHKDTVVACVRTPGRGGRRHQEVRTFGTMTADLLALRDWLVALGVTLVGMESTGVYWKPVFYVLEDATECWVLNARHLRNVPGRKTDVADAEWICQLVEHGLVRPSFVPPKPIRELRDLTRYRKAQIDERSREAQRLDKVLQDAGVKLSSVASDILGKSGRDMLEALVQGSRDPEVLADLARGRLRTKIPELRRALEGRFSAHHALLVGQILSKLDFLDEAIATLSREIDRVIAPFVPELELLDTIPGVDRRVAECLVAEIGVDMTRFETSARLASWAGMCPGNHESGGKRKSGKARKGSKWLAANLTQAAESAGRSKDTYLGAQFARLRGRIGHPKARKAVEHSILVAAFHILAGGTPYHDLGADWFQKRRPEAHARRLARQIEALGYRVNIEAA

SEQ ID NO: 177111 - protein, 347 aa, unidentified
MKHYVGLDVSMKETSICIVDEARKVVKEGKVGSEPETIAAWLEQTGLGFERVGLEAGSLAPAMHDGLAAAGLPVVCLDARHLKAATSVMPVKTDRIDARNIAWALQAGWYRAVHVKSQATHKLRALLRSREMLVTSRVSLDNHLRGILKAFGLKVGKVAVGRFEQRVRELVEDDGILEQVVGAILRVRREVLERLDDLHRMVLATVKADPVCRLLMSVPGVGPVTALAFRTAVEDPTRFAKSSLVGTHFGLTPRKYASGETDRNGGISKCGDRMVRSLLCEAANVLLTRVQRWSWLKRWGVEVARRRGKLRAQVAVARRLAVIMHRMWVDGTTFRWTRDTADEAAGA

SEQ ID NO: 177112 - protein, 475 aa, unidentified
MNLKGTKKKNQVSNVNIFEQQELLKKIEVVRENLTASTWRELETKGKFDKNAKLSFICDDMLILGCDVGSETHYLRAIDTRGRELSKSAFSFSNNADGFSKAKEWAVKIAAEYDKKQIVLGLEPTGHYWFCLATWMISNGISVVQVNPYAVKQTKELEDNSQLKDDTKDPKLIANLVKDGNFGMPYLPEQLYADLRRLSMFRDQLNEDRIRSINRLHRELKIYFPEYKEALGKTEGTFSLELLKQAPFPDDLAALKEDGIRQIWHNAKLRGRGYSRAGEILEYAKASVGLREGKETGKLVVQWFVQKILELDAELALIETQINQKCLEIPHTDKVLEICGIGENTLSGMMAEMGDISRFDDVKEIQKLSGLGLVASSSGKHKGETKISHRGRKRLRYWLFQAAKSAVVHAEEFKELHVYYTTREQNPLKKMQSLIAIACKLLRIIFTILKKGIKYDPRKMLKDIRRESRQESLAA

SEQ ID NO: 177113 - protein, 392 aa, unidentified
MIYVGIDVAKDKHDCFITNSDGEVLFKSFTISNTREGFETLSQRITSISDDLTKVKVGLEATGHYTYNLLGFLLDKGMPTYIINPLHTNLYRKSLSLRKTKTDKVDAHTIASMLMSDVNLKSYSNTSYHNEELKSLTRYRFDKVKERAKLKSSVSRLVCILFPELEKLVPTLHIASVYTLLSEFPGASYVSSAHLTRLTNLLSEASKGHYDKDTANLFRETARNSIGSVMPAKSLELKHTIKLIQELTSEIDEIEAAIKQIMDKEIQSPILTIPGISYRMGAMIIAEIGDFSRFDSADKILAYAGMSPSTYQSGQLDNCYSHMEKRGSRYLRYALYNATKYVCHWDDSFGAYLEKKRSEGKHYNVALSHATKKLVRLIFAMEKSGQAYLPIA

SEQ ID NO: 177114 - protein, 418 aa, unidentified
MLVAGIDVGAEVHHVAVVDESEAVVTQPTAFAENAVGYDKLFALLGRAGARGGADLPLATASAAPPSTLVVMEATGHYWQNLLAALTAKGFAVALVNPLRTHRFAGEELARTKTDRLDCWQIARFGAQKRPAPSYLPEAAVEELRELMRLRERLVEELVARLNQLHRLVDLGFPEFTRYLKDLNTELATALLHQYPTAQAFRGVSRKRLARLSYDGRHPVGAELAQQLSAAAAVSVGSQHSSSHQLGVRYACEDLETLRKRLKRLDGAVAGTLQQHQVGQLLTTIGGIGDTTAAMIIAELGDPARFQSAGALAAYVGVCPAHKHSGKHQPKRSSLTPIGNRRLRHALWMPTLSAATHSNPWLMLFYRRLIERGKPHKVALCAAMRKLLAAIYSGAKHRRPFSMDLNLQSRLRVSYENA

SEQ ID NO: 177115 - protein, 423 aa, unidentified
MEVMHRRVAGLDVHKETVVACVRVMAGRRPTRECRTFATTTQGLLELLGWLTASRVTHVAMEATGVYWTPVWKILSEGDFTLIVANAAHIKQVPGRKTDINDAMWIADLLACELLKASFVPPEEIQELRSLMRTRKQLVREQTRHVQRLEKTLEEANIKLGTVLSDLMGASGRRMIEAMIAGECDPHRLAGLAERTIKASHKALYDALHGRLREQHHFLLQLHLQQWDAIDAAIRRIDQRVAEQIERMDAEAADGQPPFRELIPRLCAIPGVSFLSATAILAEIGRDMSRFPTAGHLIAWAGLCPGQNESAGKRKSSRLRRGAPWLKTMLVQCAWAAKRAKNSYYSAQFHRLRSRRGPQKAICAVAASILTAIYHMVKSGAPHRDLGADYFDRRAPEAKAKRLVAQLAKLGFAAQLQPLADAA

SEQ ID NO: 177116 - protein, 328 aa, unidentified
MQTILHNCCGLDVHKDSIVACILKTSNASLDSNNEEVEKEIRVFETFPNTLKELKNWLESEDCHHVAMESTGVYWYPVYEVLESAFGGDIEVLVVNARHMRNVRGKKTDIKDAEWIAKLLRAGLLAGSFIPPHEVRELRQLTRYRKSIVEDISAQKNRIEKTLQTANVKLSTFLTDVFGVSGRNLINVLVEKGYIAPEDVETETKRISQEKKDAIKRVVNVQLSTHVRDFIKVQLNLLDGLLAHKESVEESIDEFIAQFQEAIERLDTIPGIATTAATAIIAEIGTDMSKFPTAEHLCSWAGLSPGNNESAGKKKVHTLPTEAYMSKA

SEQ ID NO: 177117 - protein, 339 aa, unidentified
MNLYAGIDLHSTNSFLGIIDENDRKIYKKKLPNTLDLVLDELKPYKKHLAGVVVESTFNWYWLVDGLMDNGYLVHLANPSAIKQYEGLKYTDDQWDSFWLAHMLRLNILPEGYIYPKDERPLRDLLRRRLLFVKQRTSHILSLESMMSRNLGLRMSSNKIKQLKEEDAESIFDDPHLVMAAANNIAAIRFLDKRIKALEKEVKSQIKLRDEFKCLLTISGIGDILGFTIMLEVGDIRRFPKVGNYCSYCRCVKSERLSNEKKKGVGNKKNGNKYLAWAYVEAAQFARRYCEHAQKFYQRKMSKTNAVVATKALSNKVARASYYVMRDQVPYDPEKLFGQ

SEQ ID NO: 177118 - protein, 342 aa, unidentified
MHHVAIDLHDQYSQICVMNQTREILAEAKVPTTRAALSDFFRQRARCRVIYEAGPHALWVSELLTTLGHEPLACHPRRVRLIAESRNKNDRVDAELLARLSLSDLELIKPIQQRSRTTLEERSMVRARAALVETQKRLRTMLRGLVKPFGVRLTAGKRRLLSELATVDLPPQAAQSVEAIRVTLTTIAEQIHQLDKRIEKLSASQPPAARLQTIPGIGPLVAITYIHAIEDPARFASTDVGPYLGLTPSNRSSAGKKLSPKDKGRPGDPYLRSLLIQAAWTLMNSRSESDLAKWGRVLVERVGPKKAAVALARKLATLMHHLWLYDQDFCAHPKAHPKIATA

SEQ ID NO: 177119 - protein, 330 aa, unidentified
MNPQGGAAQGRPSPNAGIDVSKQHLDVCWESTQQRLSNDAAGWSELIAKLVAAEVDLVVVEATGGYERGLLLALQQAEIAVARVNPRQARDFAKSLGVLAKTDVLDARALRDFADVLARHPERSRFITPMVDEQRARLNALMTRRRQLVDMRVAEHQRLDQASAVAAKSIRAVLKMLDRQILQIDHDIDEQMNQHFKAQRKLLDSVKGVGAITTLTLLSALPELGTLGRKQIAKLVGVAPLADDSGKRRGVRRIWGGRADVRSALYMATLSAMRYNPVIVAHYQRLLGAGKPKKVAMVACMRKLLTILNAMMRDNALWDANRHLLATQIA

SEQ ID NO: 177120 - protein, 349 aa, unidentified
MEHLAIDLGSKKSQICVRAADGTVVEERKLETLALGPYLASRPPSRVIVETCAESFRVADIALEAGHEVRVVPATLVRTLGVGARKTKTDKRDAQILSEVSCRIDLPSVHIPTKTSRERKTICGMRETLVGARTQVINCVRGWLRTQGIRVKGGADGFAERVREAHAAQRNAPVADYVESLLTTSEHLASQIRDADKRLSKLAKADSICTRMMSVPGVGPVTSVRYAAALDDRSRFSSAHHVESYVGLVPGEKQSSERQERLAITKAGSTRLRWALVQAAWTARNTRPNDPMVRWSLEVEKRRGKRVAVVALARKLAGILYAIWRDGTAYDPRRGAKAIRVPQLPELAP

SEQ ID NO: 177121 - protein, 407 aa, unidentified
MTEFNAKEVRIETASALESVRQAQREQASRCEARYAAYVGLDVHKDTIAVAVAWSGRDEPEYWGEIKHSRKAVDKLIGRLLAACGGGVLLFCYEAGPCGYGLYRQLVARGCDCEVVAPSRIPQRAGERIKTDRRDALKLAGLLRAGELTGIWIPDEEQEAMRDLCRARGDMKSQEHKARQQLNAFVLRHGHHWPSNKARWTMTHFNWLEGLKFAHDWQQVVLQEYIDAVKAAQARVAAMTAQMMRVLPQWRLAPVVDALTALRGIDKLSAMTLLAELGDISRFQSPRQLMAYLGLVPREHSSGGRRRQGAITRTGNGHARRALVESAWSYRFPARQTPHLKRKAAAAPAQAKAIGWKAQRRLCGRYRTLIQAGKNTKQVCVAIARELVGFIWDIVCQEMAKMKPVTQ

SEQ ID NO: 177122 - protein, 340 aa, unidentified
MKRLYGAIDLHSNNNYSVISDQEDQVLCERRLGNSLEEVDAFFRPFRSELNALVLESTYNGYWLMDGLAELGYEVKLANPSQMQPYQGLKHRDDASDGLWLNRMHRLGVLPEGYIYPRPERGIRDLLRKRLFLVQHRTSLINSMKHQYQSWKAKDVSASEIKKLSSEEVSASFDDGFVRQGVEALRQSMEALSSQISGIEASLKHVLREDRLVSQLQILPGIGPLLAWTIRLEIGELARFGEDWRPYLSYCGLVESKQESNEKIKGHGNRKNRNRYLRWAYAEAAISALRYPKIRVYHDRLMRKKGKIKAKAILASKIARVSFMMMRDPGMIYAQEKLWG

SEQ ID NO: 177123 - protein, 392 aa, unidentified
MLYLGIDIGKNNHVATLIDSQAKPLFKGYSFANTTVGGENLVALLLKHLQPPSGLEIGMEATGHYWLSLYSFLVDKGYAVHVINPIQTDGWRKGIEIRKRKTDKIDSFLIADLLRYGDFVETSLSDENIMSLRGLTRFRHYLVGSIGGLKRKAVCILDQTFPEYQGVFSDIFGRTSSELLLHFQTAEDFATITSEQLETALSGVSMKSFAKNKLTRISELAANSFGLKFCKDSFSLQLKLLIEQIRFIEAQVFDVEAEIESMLAKLESPITTIPGIGVVTGATILSEIGDISRFSNPSKLVAFSGIDATVIQSGESSGTYKMSKRGSGYLRKSLFQAALVASNCDPVFKAFYQKKRGEGKHHLIALGAVARKLCYTIHAILKNNTPYQIQHT

SEQ ID NO: 177124 - protein, 338 aa, unidentified
MSIYAGLDVSDKTTHVCVVDGEGAVLRREVLASDPDVIAKWLGRYCPDLVRVVLETGPLSAFLYHGMVARDVPVECICARHAKGVLSARVNKSDVHDAEGIAQMARTGWFKRIHMKASATHFDRAAVRIRAQLIMARTAMLNQLRGLLKLFGLRLGSTRAPGKRTERLVALYAQRPDLEALFAPLLASIEAIEAQLRTSSRILEQRAASDPVCARLMTVPGVGPITALTYTMSIEDPRRFARGEDVGAYAGLVPRRSQSGERDTQGHISKAGDPMLRRSLYEAANIILTRVKRPCALQSWGRKIAEAKGPRRAKVAVARKLAALLHSVWLNETEFRWA

SEQ ID NO: 177125 - protein, 314 aa, unidentified
MGRYIGVDLHKNMFVVCFLNSSNNKHRLKQYPITAINNFRKELRSTDMVGVESTGNTRYFLSKIVDRVKEVKVINPFQFKVISQSVKKTDSNDALTIAKFLSKGMLPEIRMKDNKSAELSSLAQTRDKLVKLRTALKNKIHNILSSHGIIIKRESMSSEKGLKSVLHQPVTEIAKVELKVIVSQIRSLNDGIKALGDELSEKGKELDGHKNITSIKGIGDKSGTILLSVIGNINDFEDEKKLASYFGIVPRVSNSNETLRSGRITKRGSKLGRTTLVQYTLIAKRYSPYLESFYQRIKAKKDREKQLLQQLKNF

SEQ ID NO: 177126 - protein, 317 aa, unidentified
MTTPNDTYVGIDVGKTWLDVALWGNNAVWRVSNDDEGVAEIVARVTALGLQLIAVEATGGYEQLVVQTMLLNSLPVAVVNPTRVRALSKATGKLAKTDVIDARLIAEYAFKIQPEAIAPKEAQEIRLNALVTRREQLVEMRTAEQNRLGTAHNSMQVDIREHIEWMNARIQALEVEINGLVDSLPEWRKQAERLDSIPGVGKITAVTVLAEMPELGQLNRQKIAALAGLAPFNRDSGQKRGKRRIFGGRKGIRRVLYMACLSATKCNPVIRSLYLRLTKKGKLFKVAITACMRKMLTIMNAMTRDQVNWRPPEPIPN

SEQ ID NO: 177127 - protein, 334 aa, unidentified
MENIALIGIDLGKNSFHIHCQDRRGKAVYRKKFTRPKLIEFLATCPATTIAMEACGGSHFMARKLAELGHFPKLISPQFVRPFVKSNKNDFVDAEAICEAASRPSMRFVQPRTESQQAMRALHRVRESLVQDKVKTTNQMHAFLLEFGISVPRGSAVISRLSTILEDNNLPLYLSQLLLKLQQHYHYLVEQIKDLESQLKRKLDEDEIGQRLLSIPCVGTLTASTISTEIGDGKQYASSRDFAAATGLVPRQYSTGGRTTLLGISKRGNKKIRTLLVQCARVFIQKLEHQSGKLADWVRDLLCRKSNFVVTCALANKLARIAWALTARQQTYVA

SEQ ID NO: 177128 - protein, 409 aa, unidentified
MLFAGIDWSEEFLDFHLRTAEGKVLAEGHVKPNVEGMADLFAQLETHALAAEIGIAIETAHGAWVQAMLDRGYQVYPLNPKTVERFREALSANGVKTDTIDRKVLAMFLVTFHQNNKPLRPDDPEIVQLRILCQDRLRLVEERSAKVSELQAILKCYYPAFLGLFGGLDSDIALDFLRQYPTQKQMQKLSERRLRNWLSRHHYSFPKRVDEMVALLKQPVLPVAEHLQEAKKTLIGYLARSIQMLNAEIAQRDKQINDHLDGLPESDWVRSLPGAGKVLAPALLACLGRDPQRFASVGEARALMGTAPVTKASGKSRVVHFRWGCWKFARRTLQLFAEQSRHHCDWAQTFYEKQRHSGHKHHAALRALAHRWLKILLAMRQSGSPYNEDIFVNSQRRYVLKIPMLRSPN

SEQ ID NO: 177129 - protein, 330 aa, unidentified
MKNWNFILGVDVSKLTLDIHCAELNEHIQIANGTEGFKGFKKWVKELRIDLEKSIIVMEYTGGYEYKLIQFCESLSIPYTRIPGLAIKNSLGITRGKNDKVDSKRIAIYADEKIKSISPDKPLNKRILQLKEILAFRKRLVRTNAGLKASLKERLFMYDITSKDIIKKITEHSIKKNKADIKKLDIAMEDLVKDDPAMLTNFTIIKSIKGIGPVNALMTIAYTENFTSFSNPRTYAVYVGVIPFDHSSGTSIYGRKRVSHIANKELKQELNQAAKTAIQWDKELSAYAYRKLQSKPYPIVLNNVKFKLILRMFSLVKRGALYVENYEKAA

SEQ ID NO: 177130 - protein, 313 aa, unidentified
MHYIGIDMSKNTFHAAFDETEVVIFKNTVRGIEEFINLLTKRGCMKNNTEIGTETTGVYHLLLCEQLRSRGWNMKVVNPLITYRMFKSTLRHAKTDHNDALAIRKTMMTGAGYTYTDTSEILALKTLVQEREALCRMRAETKQRIHAHKIRAKAAGLEFHDSFSGSIKLLSYEMKEIEKQMSKYASPTQTLLRSIPGVGKVTAATLVAYIGDIHRFSSPEKLVAYIGLDCRVHESGTSIHGKGYLTKRGNRYLRYILFNAAFIAKRKNRVMKEYLEKKMSEGKHYFSALCAVERKLVHLIYAVWKRGTPFETH

SEQ ID NO: 177131 - protein, 388 aa, unidentified
MQVIASRPEAPSAIRTNLGAIFVSLELSRSTWLITSLSPGSGEKMSKHVVHGGDIAGLLERFAQLKEKAQVRTGRNFPIIVIQEAGLDGFWIDRVLKNEGIESHVVDPASVATCRRRRRAKTDKIDGEALVRTLLAYKRGEPRVCAMVKAPTPEEEDRRRLCRERKVLITERVKHVNRLKGLLFSQGVCGYEPLRRNRRRRLDELRTGDGRPLPKHLKAQISRELDRLELLLEQIKVVETERDALLAAQQIAAPAPAAMLLAIKGIGPEFAAILWSEGFFRHFDNRRQIASYAGLAPTPWKSGSIDREQGVSKAGNPRLRTTLIQLAWLWLRHQPQSALALWFKERVVRNGGRLKKATIVALARKLLVALWKYVAAGVVIEGAIMKAV

SEQ ID NO: 177132 - protein, 347 aa, unidentified
MDTIGLDLHKRESQLCTLHADGRITEQRIVTSRERLMAVFAHRPSARILLEASTESEWVAQCLEGFGHEVIVADPNYAPMYATRTRRVKTDRRDARTLAEALRLGAYRPAHRVSAARRHVRAELAVREALVRTRTRYIAIAKAFVRRDGLRVPSSESHLVAKRVAALEIPALLEAELAPLFAVLEPLNAQIVAAERRIAAVEQSDPIVALLATAPSVGPITASAVVATIDDVTRFRSAHQFEAFLGLVPGERSSGEKRRVGRITKAGNARARFLLVEAGWRILRSKSPETAALRGWARKIAVRRGNRIAVVALARRLAGVLYAMWRDNTPYNAAKLRVPQPLVSRAS

SEQ ID NO: 177133 - protein, 344 aa, unidentified
MKYMGIDHHSQYFIAVLADDNGKELRKDRVSMDRNSIRHYFKQFKDDELAVAMEASYGWSYFYDEVKAMVREVKMAHPLKTKAIAEARIKTDTLDAATLAHLLRADLIVEAYAPDRTTRGKKNLLRYRSALVKTRTMLKNRVHALLSAHHIEDRQFRDLTDKFGKQGREYMDKLLLQGHDRKILSEYLSVIDTLDEKIKTAEKLIGEEFRRDEICRLLETIPGVGKILAVTIRYEIDDIGRFLSAQKLCSYAGLVPSTYSSGGKTYQGKITKQGNRWLRWAMIEAAQQATRIDPWLSEVYERIAKKGKKKARVAVARKLLEIVYRIWKEKRPYEKRYGAVALPR

SEQ ID NO: 177134 - protein, 404 aa, unidentified
MYNAVGIDVSKGKSTIAVLQPGGTVIRKPFDVSHTSQSLIELAHYLGSLEGSTKIVMECTGRYHEPMLKALFEAGLFVSVVNPHLIKNFGNNSLRKVKSDPADARKIARYTLDNWAELRQYSGMDNTRTQLKTLNSQFSFFMKQKVAAKANLIALLDNTYPGVNKLFDSPVRSDGSEKWVDYAYSFWHVDCVRKIGLKAFTERYKAFCKKHHYNFQPLKPEELFLASKELIAVFPKEKNYKLLIQQSIQQLNLASEHVEQLRKEMDALAATLPEYGTVMGIYGVGKTYGPQLMAEIGDVSRFTHREALTAFAGVDPGVDESGQRKSKSNRASKIGSARLRKTLFQIMTTLLQNAPQDDPVYRFLDKKRSEGKPYYVYMTAGANKFLRIYYGKVKECLRNLEQPE

SEQ ID NO: 177135 - protein, 372 aa, unidentified
MKEHSELFIGLDVSKLKTSVALAEDGRNGEVRFFGDIDASPTAIAALAAKLAKRGARLHFCYEAGPTGYDLYRQIIALGHDCAVVAPSLIPQRPGDRVKTNRRDAVSLAKLHRAGELTPVWVPDVGHEAIRELVRAREGAMEALRRARQQLLSFLLRHGRIYTGRTPWSKAHSSWLCGQTFEHPAHQIVLAEYRHAIEEAEVRLKRLTAQVTETAASWSMAPVVKAYQAMRGVAFMIAVTFVAEIGDVRRFDNPRQLMAYLGLVPSESSTGERVRRGGITKAGNSRARRVLIEGAWTYRFPARMSRLIQGRQDDLPKAVREIAWKAQVRLCGRYRKLIAAGKLKAVTVTAIAREMAAFLWAIGQLVVPVLAA

SEQ ID NO: 177136 - protein, 441 aa, unidentified
MAMRKRDEEVVFPNAAGIDVGASSHWVAVPRHATAEPVREFGAMTDDLNAMADWLLGCGVDVVALESTGVYWIPIYEVLERRGLQVWLVDARQMKYVPGRKSDVQDCQWLQKLMSLGLLRAAWRPGDEVCVVRAVVRQREVLLSEQASWVQRMQKALVQMNIQLTEVLSDVMGMTGQAIIRDIVAGQRDPHALARHRSGRIKASAEEVRKALTGNWREEHLFVLTQALAMYDSLAQRIGECDAKTQALLAPLGRQDVDLGKAPKERSKQRAAFAVRQALANWAGVDLTRIDGLGVAAVMKILSEIGPDLSRFANVKHFCSWLGLCPGTKISGGKVLSANTKRSANRVRQALKMAAMSLSRSDSALGAFYRRLCGRMDKPRANTAVAHKLARMVYFMLTRGESFVDKGQQHYEQQQRQRSIAALKRRAATLGFNITPSSATA

SEQ ID NO: 177137 - protein, 312 aa, unidentified
MPLQESLQFIGVDVAKLSLAIQFPDRLWSTANTPAGHTALIAELRRLGAAHVVCEATGGYERGLVLALHAAGIPVSAINPRQIRDFARACGRLAKTDALDATIIRDFGCRLQPEPDPAPAPGEVEFAELIRSRQDLVGLITEEINRREHTTLPVLLKLSRARQRQLERQLAALDALIDEQVARQAALAAKTERLQQVSGVGRVTALTVVALMPEIGTLRDAEAAALAGVAPMNRDSGQHRGQRRIHGGRPALRRVLYMAALTATVHNPILKAFYQRLRQNGKPAKLALTAVMRKLIILLNRLLKNPHFTLVS

SEQ ID NO: 177138 - protein, 361 aa, unidentified
MGQRTSVGLDVHARSVVGRGLDVQTGEVLRARLTPAHEQIIDWLRSLPGPVKATYEAGPTGFGLARALEAAGIDCVVAAPSRLLRPSGDRVKTDAKDALHLAQLLAVGQVTAVTVPDEDTEAARDLVRARDDVRRELMSARHRVTHLLLRQGIVYTGGTTWTGVHENWLRGQRFPRPALQMAYDAALAALVAAEDRRDRLDAAIAELAADSQFTSVTDRLSCLRGISTLTGFGLAVEIGEWSRLSPATIGAYLGLVPGEDSSGESRSQTGVTKTGNSHVRRLLIEAAWHHRPPYRPSTQLRRRWQRAPAVVAAHAAKGNRRLHSRWRAFDERHKRAVVANTAIARELAGWCWALVVMSPDP

SEQ ID NO: 177139 - protein, 351 aa, unidentified
MDRYIGIDVHSKSCTVAVMNATGQRLKEQVIETSATVLIDAMRSIAGKRHVCFEEGVLSSWIYELLEPNVDELVVVQPHTRQQGSKSDSIDAWALAENLRTGSIKRRVFKNPRRFDQLRQAVRAYQIAVQDMTRAKNRLNALYRSRAIQVDAAIYDPKQRTEWLRKLPTAHRMLGEMLSQQLDALIEAHRRAEQWLHKEALQLAEVKRLMTVDGLGPIRAAQIVAVVLVPERFRTKRQFWSYCGLAIVTRSSSDYVRNPSTGQWWRQPVIQTRGLNRNRSPILKNAFKAAARTVIAMPTHPLHADYERMLEDGTKPNLATLTIARRIAAAVLAIWKHKEDYTREKHRQTAA

SEQ ID NO: 177140 - protein, 342 aa, unidentified
MEFYVGLDGSLKQTSICVVDQTGLIVREGVVDSDPEAISVFMKSKAPDAVRIGLETGPTSTWLWTELKRLGLPVICIDARHAKAVLKMQINKSDRNDAIGIARIMQTGWFKEVHVKDIDSHSVRALLGSRALLVKIKRDLENQVRGLFKNLGLVIGRGTFNVFAVRAEELIEDRPELVAAVRPLLEARNAVEQQVRELDRKVTKLARRDAQVRRFMTVPGVGPVTALAFKATIDDPARFARSRSVGAYVGLTSRRHASGEVDWSGRISKCGDAMLRSYLFEAAGVLLTRVPKWCAVKAWGRRLAKRNGLSKAKVAVARKLAVILHRMWIDGTEFNWSKEIAA

SEQ ID NO: 177141 - protein, 411 aa, unidentified
MDKIYDICCGIDVHKKLIVVCFKKGNKQEIREFGATTREILELADWLKDSGCQIAAMESTGSYWKPLYNILEASELKAIVVNAQHMKAVPGRKTDVKDAEWIADLVQHGLLKASFIPNKDQRELRELVSYRKSLVGERTRELNRLQKMLEGANIKISGTVKDINGKSARNILEFILTGEAFDEAKYDEMYKNKTISHNLKASKEQIIADLNGVMSPLQRRMMKELLAHLDELNLHIKNLDDEIDNFMKPDEKDASISLQSIPGIGSTSAQAVVSVIGTDMERFPNAAHLASWAGLCPGDNQSAAKRKSGKTRKGNSLLRTTLITCAHSAVLNKESYFYAQFMRISAHRGKKRAYVAVAHSMLIAIYHMLKYGVAFEDLGADYYNQFNKERKINAYLKKLKALGWEAPAVAV

SEQ ID NO: 177142 - protein, 392 aa, unidentified
MYIVGIDIGKNHHEASIVSPEGKQIGRSLRFATTHKGADSLMSFIFKNIGNSPCVFGMEATGHYWYPIYSFLKAKGYTICVINPIQSDSLRKMYIRQTKNDSIDSFFIAEVIRFGQFGTTSMADENILAMRQLCRYRDSVISSRTEIKLRIGTIMEQIFPEYEKQFSSLWLSTSMGILEKYLTPENIENAPIDELFEIIKDKSHNRLTKANAISIKEAAADTFGIKIAQDAFSFQLKQLIDRMNFLDKQIEALDIEIMKYYEQFDCYLHTIPGIGMIATATILAEIGDIHRFKSSSALVAFAGIDPTVRQSGEFNSTHNHMSKRGSPYLRHAIFLAATTCSFHNSPLNAYYKKKRDQGKHHLTATGAVARKLTTVIYAVLRDSKPYEPKKFC

SEQ ID NO: 177143 - protein, 446 aa, unidentified
MSDRSGLSRGDRNRNARLARLRQLLPPENAIVGIDLADDKQAAVVTDHDSRVIARRQVRARAWELGDLLDWAVARAAGAGFRSVTVACEPTGHRWRVLDQLAAGRGLALVCVQPLLVYRAREGEDLTRDKSDPKDAVLIARLASELRCYEPERADAVWARLRHLGARRNQLTTDATAQVNQIRDLLECAWPAVLGAAGSPFRSASWRAALAVVLDRCAGDLGRVRRLGAARFEAAVRRELPRWGAQRPCLRIIRAVFAALSDPAGVAAHRPGALERAHLALGDWRETRARLAATEARMVTVLDDLGLTSLITTIAGLTPVGAAAVLAETGDPARFATGRALVKHAGLCPRDNASGASQGKTSISGRGRPALRLAAWRAVWAALPNNPVMAARFTYLTTREHNRLARQQARTACAAALLRWIHVVITQRVSWDPAIAAGYTPARQAA

SEQ ID NO: 177144 - protein, 343 aa, unidentified
MQTITAIGLDIAKSVFQVHGVDADGQVVVRRQLKRRYVLAFFQKLPPCLVGIEACASAHHWARELQALGHTAKLMPPAYVKPYVKRHKNDAADAEAICEAVARANMRFVATKTPEQQSCLTLHRARHLLMRQQTSVINAIRSHLAEFGIVAPVGRNGVEQLLGVVADSNDRRLPEIARACVAALGAQLRVLKVQILEFDRMIRAWHRSSEASKRLDQVPGVGPVLATALIASVADPKAFRSGRDFSAWIGLVPKQNSSGGKERLGNISKRGDRYLRSLFTTGALAVIRYAKIHGTRHRPWLTALLARRPTKVAAIALANKLARMAWAMMAKGERYKEPAALAA

SEQ ID NO: 177145 - protein, 394 aa, unidentified
MKLVGIDVGKNSHHFCVMDKETGEFNVTPSSFPNNKEGFDFLINSLKPYSKKSILLGMEDTGHYHVALLKFLLSNGYTVALINPKTTDLTRKMEGGITKNDKLDTITICDVLDTPERKKQYRITKVDRFDLYEQRQLTRHHHNLKEELNVYCNRLQKSIDLVFPEFNTLFSSKYGIVYMNLLKTFGSAEAIASTDIRTIRKFFEIKGKGNRISLTPEKLKECAKNSIGISSEVETIQIKHLISQITLIKEQIAEIDKKIEEFSITNNSPILSIPGISHFSGTSILAELGDIGNYSKPSQIIKFAGVAPYHYESSQYNAQHTAITKKGSKYLRKTLYQIILPVINNNPVFKKYYLLKISQGKGHRCAQGHCIRKLLRIIYHLLETGQSFDPALLR

SEQ ID NO: 177146 - protein, 344 aa, unidentified
MDHYAGIDVSLECSSVCVVDASGKIVREAKVASEPEALIGWFSLLGFGLARIGLEAGPLSQWLYAAIKQVGLAVELLETRHVSDAFKAMPVKSDRNDARKIAQLMRLGWFRPVHCKSITAQEIRAMLTARKLVQSKLIDLENSLRGILRGFGLKVGKTTRTNFAGRIEELVKGHPNLQTIGEALLRARAVLLAEFSGFEKRVRAMSRLHDKARLLMSTPAVGPIVSLTFACAIDDPFRFTSSKQAGPHFGLTPKKYQSGETDYTGRISKHGDASVREALYEAAHIMLTKPIKRCSELKSWAMRIARRAGTNKAKVALARKLAVILLRMLKDNVPFNPAAKPATA

SEQ ID NO: 177147 - protein, 374 aa, unidentified
MADYSEVFVGIDTSKLRNAVAIAEGGRNGEVRYLGEIDNTEAATSKLVKKLAAQHRRLTFCYEAGPTGYGLHRLIKTLGHECVVVAPSLIPKKPGDRVKTNRRDALNLAKLLRAGELTAVWVPDARHEAMRDLVRAREAAVDDLKSKRQQVLSLLLRLGRHFTGKRTWTRAHMNWLVSQKLAHREQRIAFEEMLLAVRQADERVIRLERAIAAAVPDWSLAAVVPALMALRGLDLISATIFLAEIGDLSRFASPRQLMAYLGLVPGEASTGDRVWRGGITKAGNHRARRILVECSWSYRHPPRVGKKKLAKVEAAPPAVQEIAWKAQARLTARYRALARRGKRPTLVVTAIARELSGFIWAVSRAVGQPATPAK

SEQ ID NO: 177148 - protein, 385 aa, unidentified
MRRARVAPGWPTPSLTHRGRSVQETSRVFIGLDTSKLKISVALAEEGRQGEVRFLGDIDNTPDAMKRLVRKLSGKYLQLLFCYEAGPTGYGLHRQITAIGHDCSVIAPSLIPKRSGEHVKTNRRDSLTLARLHRAGELTTIWVPDLGHEAIRDLVRAREAAMEDLREKRQQLQSFLLRHGRLYPGLRSWTLVHARWLSSLIFEHPAQYLVLREYRQAIEDAEARLKRLTQQVADVVSTWSMAPVVEAYQAMRGVAFLTAVTFVAEIGDVRRFETPRQLMAYLGLVPSERSTGEQVRRGSITKAGNPRARRVLIEGAWTYRYPARLSRPLQVRQESLPEVRTSNCLEGPGATVCTLSQVNGGRKTPDLNHDGDRTRDGGFPMGDRP

SEQ ID NO: 177149 - protein, 450 aa, unidentified
MEILYPQCAGLDVHKKTVRVCVLIQQEHGKPHKEFRTYGTTTQDLLQLQDWLLEQRCTHVAMEATGVYWKPVYNLLEGHLEVLVVNAQHIKAVPGRKTDTKDAEWIADLLRHGLLKASFIPSTPQRELRELTRYRVRVTEERAREVNRVQKTLEGTNLKLGDVVSDIMGKASRMILWAIVDGESDPARLADRAVGRVRANQVELEAALTGTVSEHHRFLLREHLTQIDHLEQAIERVSAEIARRFPPDPDPEERTDSQQQMGSRKIEESKDCSRQVLPPSQSGLSGQEGILLLCSIPGISERAASGILAEIGLNRQQFPTASHLASWAGVCPGNHESAGKRLSGKTRKGNPWLRRLLLQAAHSAARQKHGYLPAQFRRIAARRGKKRAGMAVAHSILIIIYHLLHEGVPYEERGEAFFEERDRELTEKRLVRQLERLGHHVSLQPLAQAG

SEQ ID NO: 177150 - protein, 524 aa, unidentified
MAVKSSSKNRRKAQPHALHKPRGVIHPRVQAVGPEHFALVCVDCAKARSKMMVADFYGRVLLEPTTVEHNQSHFDTALKSVRDAMARHHIQDTIVVIERTGRYHGPVQRAFGAAGFEVRIVHPFTTKQYRLPADPGNKTDDTDLSAIHRAAVNGFGLLEHEPDPVSVQLQLLARHRRDLVRQRVALQQKMLEHLQSFMPGYSRCVEDVFGSPVVLWVARKLGSAAAIVQADLAGLSQQVRQAGIKVHRSTLEKIVAWARSAPPAEEPASLHHRIFLGLDAYQLRKAQSIQAIESELAGLLAQTPYLLLLSIVGINVVSAAEFAGEMGPIARYPKARAITGRAGLFPARYQSDQVDRRDGALVRHANHDLRYAILMIADNLIKCNDHFKVLAAGWRLKGKDARGVRVQVAGRFSRIAYQMVAGRMTFQHPCARQRDSILEKLIRFALEHSTAPDQLARALDAAVTQLPCTAYGEEAVPLVEELARVQKPRGAGPHPLAEILPAVLARLGVNLVRSPESGEADPTG

SEQ ID NO: 177151 - protein, 331 aa, unidentified
MYFNHYLGIDISKQTLDAALIIKEGEIVGQTRVTNNQQGFKELFSWAKKLGAKTTETLVCAEHTGIYGYDLQAWLDDNRISFSFIPALEIKKSLGIKRGKNDSVDALRIAEYAYIRRETIVLSHKPSNSIFTLKALLGERKQYVRTRASILARKEALDKYESQESSVRRDNIIQMLTQNIQSLEKQMMQIIEADSAIHKNYKLVTTIKGIGLVNAANTIVYTNNFTSFQTARQYACYCGIAPFEHQSGTSIKGRTMVSSLGCHQLKAELSMAARSAIINDPWLHKYYKRKMAEKGNVSGAHGVVLNAIKFKLVARMFSVIKSGTPYKVMTY

SEQ ID NO: 177152 - protein, 392 aa, unidentified
MVISVGIDVSKDKHDCFIVSSEGEVLSDVFTIPNNMDGFHCMLQRIRESTTPQDKIKVGLEATGHYSYNLLGFLLDNGLSTYVLNPLRTNLYRKSLSLRKTKTDRVDARTIASMLLSDAGLKPYTTTAYHNEELKSLTRYRFDKVNERAKLKSSVSRLVCILFPELEKLVPSLHIASVYALLEEFPGAKQVASAHLTRLKALLETASKGRYKQEMALAIRNAARNSIGSRMPAKSLELQHTIRLIRELDTEIAEIEEQIQSIMDELHSPITTIPGLSFRMASMILAEVGDFSRFDSPDKLLAYAGMSPSTYQSGLLKNCYPHMEKRGSRYLRYALYNATKYVCHWDPTFAAYLAKKRAEGKHYNVALSHAAKKLVRLLFALEKSRTPYHLAT

SEQ ID NO: 177153 - protein, 350 aa, unidentified
MNREKVTYRGNKVYIGIDVHKKTYTFSAYCDGLICKTATVPANPKQFSDNLKKWFQGAVISGVYEAGFSGFELHQALKSAGINNIVINPASLEVAPKDKVKNDKRDSKKLAVQLALGRLTGIHIPSREEEFRRLLTRTREQVMKERVRVGNRIKSRLFYFGRIPFSEDTVMSEKLLKKYESMDLPEEFRYCLELLISQWRFFNEQLKDIKIAMKAQSFEDSYCDAVYQSVPGIGDTSARLLSNELGDLSKRFKCQNALFQFVGFTPCEYSSGEGRRLGHIDRQGSARVRKTLVECAWRAIKIDTALEESFNRIAHRRGSKRAIVAIARKLIGRVRACFVSGHEYCLGTVV

SEQ ID NO: 177154 - protein, 457 aa, unidentified
MNPKRSKPKNDRTMPMIHPNAAAIDIGATMHMAAVRADRTPEPIRSFGTFTTDLHRLVDWFTECGVETVVMESTSVYWIPIFELLDARGFAVFVVNARDAKHVPGRKTDVSDAQWLQRLHSYGLLRASFRPKGQIAELRAYVRQRERLLEYAASHIQHMQKALTEMNLQLHHVVADVTGATGLRIIRAILAGERDSKVLACLRDYRCHSSAEAIEKALTGNYRAEHLFALELALALYNIYQDKASACDARIEAVLKELSISRGRDACPLPSPRRRLHGKANGPDFDVRAALFKLLGKDLTQIDGLGSYLSLRLIAECGDDLSAWPSAKHFTSWLCLAPSNKISGGKVLSSRTRRSGSRASALLRLAAVTVGRTDTALGAFYRRLSARIGKAKAITATARKIAVLFYSAVRHGMEYVDPGSSYYETRYRTRVVENLHRRAKAFGFVLLPLESKAGAVS

SEQ ID NO: 177155 - protein, 439 aa, unidentified
MGCRASSTDPLGCRRVSFGSNRFDHIEQGGELTLFVGDDWAEDHHDIHLMDADGTKLASRRLPEGLAGIRGFHELVAGYAEEPAQVVIGIETDRGLWVEALAAAGYEVFAVNPLAVARYRDRHHVSGAKSDAGDAKLLADLVRTDRHNHRSIAGDTPSVEAIKVLARAHQNLIWSRNRNTNALRSALREYYPGALEAFDSLADRDALAILGRAPTPVQAAHLSLSKIRSALKAAGRQRNLDTRALQIQEALRTEQLAAPAAVTAAFGATTRAAVAIIAELNRQIGELEGELATHFDAHPDADIYLSLPGLGVILGARVLGEFGDDPNRYTNAKSRKNYAGTSPLTVASGKKRAVLARHVRNRRLYDAIDQWAFCALTTSPGARTFYDQHRAAGDLHHQALRALGNRLVGILHGCLRHHSPYDEHKAWAHRQTTPKTDAA

SEQ ID NO: 177156 - protein, 343 aa, unidentified
MQQHLSVVGIDLAKRVFHVAGMDETGKIVLRKRLTREALLPFIARLPPVVIGMEACGGAHYWGRRFREHGHTVKLIAPQFVKPYVKSNKNDPADAEAICEAVTRPTMRFVPIKEVDQQDLQALHRARERVVKARTALVNETRGLLGEYGIVLPQSVTKFRHTFLATLEAERAKLTPLSTEFFAQLYEEFCALEKRLAYYTEKLEAISAAHPVCQRLETIPGIGPLTATALVAAVSDTSAFKNGRQFAAWLGLVPRQHSTGGKTRLLGISKRGDVYLRKLLVHGARATLRWVGLKADRRSQWLRGLLERRGKNKTAVALANKNARIAWVLLTTEQVYTREAAAA

SEQ ID NO: 177157 - protein, 321 aa, unidentified
MKHHTSIAAPVVAGIDVSKAHLDVYLYPAGKRRRFSNDKTAWRALRGWLVKAAPDHVVYEATGRYHKGFERYLGGHGLPIARLDPRRARRFAEAIGVQAKTDPGDACVLAQFGAFLKPATTALSGPALEQLKELVAARRGLIQQGTRIANKSKTAIAPLLKRQLKQTGAQVQRQIKAIDKACREIAASEPALAQRLAILLSIPSIGEITAMAILAEMPELGVLNDKQAASLLGVAPIARDSGTFQGKRHIRGGRAKLRQALYMAALVATRFNPDMKQKYQALIKNGKPPKVAITAIMRKLIILANALIKDNRNWSEIRPCQ

SEQ ID NO: 177158 - protein, 370 aa, unidentified
MKPKLSDYELATIAYHRDTLGVNPVAVDVASRVMQVCYFDSDKKLLKNFQLTRSKFFEFVDKAPEPFLFGIEACGSCNYLSRYFESKGHQCRIIPASKVKAFLKLDKNDKIDASGIFKAMLSSVESIPAKSLENQLIMNLFTIRDQLIKQHTQCLNAAHGILYEHGIVAGGAGVETSAKISLGFTDAQESFEHDPMASAHFSVIKNAVFNILDNLKEQIDTINKYIQKYGSSNKTCLNLATIPGVGIQTAVALNTALGDPERFHSARAFSAYVGVAPIITGSGGKITVMGIRKSGIRSLKRSLYMGAMVYLTFAMKNGTQSSWVKDRLKTKRKKVIICAIMNRLARIAYAVAKNGEVFDETKCNLIKNLR

SEQ ID NO: 177159 - protein, 310 aa, unidentified
MIIHPGYVGIDISKTHLDIFDASRGRQQRCANAAKDIASLIRSWKRQPPFILFEATGHYDALLRRRLAKAQIPFARVNPARARDFARAAGYLAKTDSIDAKMLAAMAQCLHPEPAQPVDIDRERLARLHKRRDQLVAMRQQERTRASECACPHTNTDISRHLTWLDREIDTIEARIETLIAASTNLAAAADLMRSVPGVGPVTAAALLALLPELGARSPKTIAALAGLAPFNVDSGQCRGLRRISGGRKRVRDALYMAAVAASRSKSRFATFYKTLRNAGKPPKLAFIALARKILTTLNAILRDQIAFQP

SEQ ID NO: 177160 - protein, 439 aa, unidentified
MFPTLNPHAAGIDAGSTQFFVAVPDGTVTCFGSFTADLHRLRDHLKAHGVTTVAIEATGVYWLALYEVLEAAGVDVCVVNGAHVKNVPGRKSDVQDCQWLQQLHACALLRKSFVPPEQIRALRSYTRLRDDHIRTGAMYVHLMQKALDQLNVKLHTVISQIQGVSGLAVVRAILQGEREAAKLASLCDESILKKKRREVERSLQGVWKDEHLFALKQALGGWEFCQAQVSECDAAITAQLTELTRDLPTPPPPDDSAPQKKNGPRHHVPQVPGLHESLLTLTGGRDAAQLPGFTISSWLKLLSEVGTDLSRWRNEKAFCSWLGLSPGKERSGKMQRRARRRPKTAAGQIFRLAAQSIARSKYLALGGFYRRLKARTCAAVANLATARKLAVLFYHAMREGLAYVERGLQAYEAAYRHSQERFLQKRAAELGFTLMPAHA

SEQ ID NO: 177161 - protein, 389 aa, unidentified
MIFLGIDVSKFKHNCFLSDGDNFDMGEHFEIKNSREGFDFLFDKLSSYDRDNIRIGLEYTGNYHLNLSRFLLDLNFNVQFFNPFQTCLFRRADSFRNTKTDKVDAFFIAKLLKTTCDSNPTLFEFYHNYDLKSLCRYKSILKKDRSRLKNSIVSFLDIVFPELCNVCNDVFSKYVLAILYEFSSAYEISRANITRLSNLIKNASRGAYSKDKALIIRNAARNSIGYFSYSVSFQLKQSIDYLYFLDRKIDEINVMIKPLLDDINSPIMSIPGIGIELGPTIISEIGDINRFDSSSKLLAYVGLDPSINQSGTFHSSFSTMSKRGSSYLRDSLFKAAFIISQIEPVFKEYYLKKKAEGKHHYVALTHVARKLVRVIFYLLKENEVYVSKV

SEQ ID NO: 177162 - protein, 347 aa, unidentified
MTTTINMLAIDLAKGSFQVCAVAADGAVLYNRVLSRTRLTTLLTEHRACVVAMEACATSHHWGRVAQEHGHEVRLVPAAYVKPFVKRQKNDRADAEAIAEAAMRPTMRFVAVKSAETQARAVAFRTHQCLVRQRTQLINALRGHLAEFGLVAPKGPASLKILENALVDQTSDLLDPVREMGAIYVEQIARLTEVINRLAAELEAASKTDEELRRLCTIPGIGPVTAGAVAAFAPDLDTFDSGRNFAAWLGLVPRQRSTGGKTRLGSVSKMGQTDIRRLLIVGASCRRHAFGVTSVIRWVVRKGGSVNRWLAALVARKPKMVAAVALANKMARMIWAMMTKKEDYRMA

SEQ ID NO: 177163 - protein, 321 aa, unidentified
MTYVGIDVSKATFVVAYSSAKSSETKTFKNTTKGIREFIRTISPEENHCVLEATGNYSMLLVYLLSKAGFTVCMENPLKIKNFARVMLSVVKTDEIDARLIALYGERMQPAPFKLRSDSLLLLKQKRTVLRQLKKQLTANRNLEGSLKVLPFIDSKCKKVLEKTIKFLEKQIEEMEEELTSLAEIEYKKQMDLLTSIKGIGATLAAALIIATGGFTYFDNAKQLTRYLGLSPTYQQSGTSVNVKGHINRNGDAYLRSQLYIGAMASLRCNAECKACFDRLRSNGKPGKLAIVAVANKLIRQAFAIVAHEKKYIDGYKSVKP

SEQ ID NO: 177164 - protein, 371 aa, unidentified
MGRLAKVESFFKNVNLTSDDEVFVGVDVHKKSYHVALYLNDMPAIDFRMSAEPKQLNKKLQPIACSIKDIVYEAGPTGYGLARDLRRNKLPANVVATSRIPRPSGGDDKTDKLDSRKLAQYAAKGMLRPITIPTRRQEADRQLYRMRHRQALQFAKVKVQIKSFLLMHGIGEPDGLGNWTIASIGELRDMRLLDTLRLSLDELLSDYDYFNNRIKALNKTLADNLDKGMLGRRMDLLKTHPGVGSVVACQFATELFHYSDFGSTRQLYKYLGLSPRVSQSGEKSSRGSLNKAANKRLTNNLIQAAWSWVRTDIEAKKCFYRICDNCGGIKQKAIIAMARKMSGHLWAMLMNDRPYDKNKAKCRHNLRKVKQ

SEQ ID NO: 177165 - protein, 350 aa, unidentified
MDRYIGLDVHTTTTTMAVVGPSGRRLKTQVLETNGKALIEALRMMPGRRHVCLEEGTQAEWLYEVLKPHADELVVAKIAESRGSKSDTRDAFGLAERLRTGDLKTTVFKDVSVFATLRELNRLYTMVLSDVVRTKNRLKNLFRSRGVATPDADVYGKKGRPAWLRKLSKGKRWAAETLYNELDTLTELHDRTNADLVREAWRHPIAQKIETCPGFGPIRTAQLMAVVVTPHRFRTERQFWAYCGLAIVTRSSSDWVRDKSGRGWIRSNIQTTRGLNRNHNHALKHVFKGAATTVIAQGTTPLSQDYARLVANGTKPNLAKLTLARRIAAIVLAIWKTNEEYNPTKHRKQS

SEQ ID NO: 177166 - protein, 360 aa, unidentified
MQVQSKKLSFKGQHVFVGLDVSKTSWKTCILIGQYEHKTFTQPPRSKDLVQYLHHNFPEAEYHCVYEAGFSGFWAHDQLMEAGVHCVVVNPADIPRTGKEMANKTDRVDARMLAQNLRDNRLKAIYVPVKDRLEDRTLVRMRQLFVRKQTRCKNQIKALLYFYGIPIPEDIGDRHWSRRFIRWIEGISTSKESGKQALDVLLEELMSLRKIISDLNRKIRTLSMEEPFREPVRLLKTIPGISTLTAMILMSELIDIRRFPSLDELTCYFGLVPGERSSGQRQIITGITHRRNVFLRYLIIESSWIAVRKDPALMQTFGELIRRMPKNRAIIRIARKLLNRVRFVLINQKPYQNLVVATRT

SEQ ID NO: 177167 - protein, 336 aa, unidentified
MVYVGVDLHRKTAHVVALDLGGTAILSRRVATRPDELLRVFGELDHQPLEVAFEATFGWGWFADLLADAGIPAHMAHPLATKAISSARVKNDSVDAKTLAHLLRTNLLPEAWIAPPGAREARRLARMRTSLVRVRSQLRCQVHAVLAEHGVHAEVSDVFGKAGRALLEDLALPPISKARLDANLRLIDAVSEEVAQAERELRALFRGDDRIKRLTAIPGVGLITAATVVTEVWDITRFPSADRLCSWAGLTPSEHSSGEHTRRGHISKQGSRWLRWVLVEAAARPQADPGLRAFADRIASRRGTKIARVALARRLLTLAFYALRDERGCRAFPVAR

SEQ ID NO: 177168 - protein, 343 aa, unidentified
MDHFTGLDVSVRETSVCIVDDTGKIVREAKVPSEPKALLKVLTNPAYRFKRIGLEAGPLSQWLLGALAEAGLPVICVETRHMRAVLQAQINKTDRNDARGIAQMMRVGLYRPVHVKTLRSQKLRMLLTHRKLLQSKAIAVDNDLRGTLRNFGLKVGIAGKAKFEARIKELVENYPDLAVLVEPLLIVRRVLREQIVILHRRLLAIVRDDEVCRRLMTVPGVGPVVALTYRATIDVPARFRKSKAVGAVFGLTCSKYQSGEINRTGAISRCGDDMMRMMLYEAAQSMLVRSTRWSWLKAWAMQIARRRGMKKAIVALARRLAVIMHRLWTDGTEFRWTREVAAA

SEQ ID NO: 177169 - protein, 337 aa, unidentified
MTAIDQFAAHIGLDWADKKHDVCVQFKNGERVFHVIEHTAEALDVWLTELHQKVKGRIAVALELKKGPVVYALQKYPFITVFPVHALSLARYRQAFSPSGAKDDPQDAELALELMLRYPQKIKAIEPDNADIRLLQQLVEQRRQLVEDKRRFVNRIINTLKQYYPQPLEWFSHRGSLLLCELIIRWPSLQQLKRARRDTIRNFLNAKGGRAMALTEQRVASIDNAIPLTTDPSVIEANALMAAALATQIKVVSEIIKTYDERIETLFDTLPDAGLFKSLPGMGPCMGPRMLAALGDNRDRFNSAEEIQNYAGIAPVTERSGQKYWVHWRWQCAKFVR

SEQ ID NO: 177170 - protein, 385 aa, unidentified
MRQVAAGQSAWDGAAVFVAMELSKSAWLLAVQGSPSGKTSSHRLEAGDIAGLLELLRRLQAREKQACHGGEVRIVLGYEAGYDGFWLQRRLVAEGIRCHVMDPGSLQVNRKARRAKTDRLDAAMLLRTLIAWWRGDRAACHMVQVPSVEREDARRTHRERQRLISERVQHVNRIKGLLATQGIYDHQPLRRDRWARLAELRTGDGRELPPRLRRQIEREFKRLELVLEQIEAVEAERDAAAMEPVAGDTDAAKVTLLAKLGGIGIELATVLVRETLYRPFANRKEVAAYAGLTPSPYASGDRHREQGISKAGNPLLRKSMIELAWLWLRYQPDSALARWFAERVGTTQGRVRKITAVALARKLLVALWRYVTTGLLPEGARLKAA

SEQ ID NO: 177171 - protein, 284 aa, unidentified
MTDGLIVGIDIAKKDFAVAYRTPRSLGKVETELGKFTNDPTGYGLLQESLVRVCEEQGLCEIQLILEATGGYEAALMAYAYEQGWGVSMPNPKQVRDWAKGVGYRTKTDRAQGAPDARILAHYGVEREPPLRPQLAVEVTELDSLLKRRQDLEKTLHQEQNRLSEIAGRPGLSPKVAESLQQVIDALTQALTEIQAAIDDLCQTHEPFQQNLVRLLALPGVGPKVVLPLLVKLCQWQNLTAGEGDASGLVAFIGLDPQPYDSGRSVHKHPGISKMGDNELRRLL

SEQ ID NO: 177172 - protein, 343 aa, unidentified
MNVFIGLDVSLASTAICVLGPQGRIVEELQAESEPEALVRAIASLSYSIDAIGLEAGPLSQWLSKGMEEAGFDVVMMETRLVKAALKAMPIKTDRRDAQGIARLLQMGWYRPVHRKSVSSQEIRALLTARKSVQQAIINLELSMRGVLRNFGMKLGHVTRIRYEARVRELVEQNEILSASTEALLRARSQLRAELADLDAKIAGLAKHDDVCRLMMTMPGVGPIVALTVKSAIDDPTRFARSKDVGPWAGLTPRRTQSGEMDIVGQITRAGDRGLRTALYQAAMILMHRGAPNWLQSWALKVAHRRGAKRAMIALARRIGVVLHRMWIDGTPFRYTQNSGATA

SEQ ID NO: 177173 - protein, 445 aa, unidentified
MLRIIYKRVAGLDVHKKTVVATRMRVTEEDRVEWETETFGTTTPDLLELHDWLCEWDLTHVSMESTGDYWKPVFNVLEDTFEVWLVNAQHVKHVSGRKTDVKDSEWLAELMLHGLLKPSFIPPKPQRALREMTRYRTTLVQERTRIVNRIQKVLEGANIKLASVATDIMGVSGRAMLAEIAAGQTDAALMADLARGRMRNKIPELEKALTGIVQEHHRFVLAQQLEHIDYLDEKIEAISAQIGKQLERMSWPDGPSQPGAEEGSEEETQSAEASKLPLTWNDAVALLDTIPGVDRRIAEKILAETGLDMSQFPTANHLASWGGLAPGNHQSGGKRYSGRTTKGNKALSSTMVQAAWGASRTKDTFLKSRFHRLAARRGKKRAIVAVAHSMLISVWHMLTYQQPYQELGGDYFDERKKESKVNYLVRRLEKLTGGSVSIELQPAAA

SEQ ID NO: 177174 - protein, 490 aa, unidentified
MEEPQEVPADEEHERVWERVAAVDIAKASGVVCTRVPDEDRPGRRKTLVWTVQATSKAIIELGDYLRARQIQVVTLESTSDYWRIWFVVLEAAGLKVQLVNARSVRNVPGRAKTDKKDAVWLAKLTEKGLLQPSFIPPYEIRRLRELTRLRTSLVHDKSRYWARLEKLLERAQIKISAVLSTLDTDTARAMIEALIAGQRNPRVLADLAIGKARAKRAELAVALEGRWEEHHSIQARILLDNIDALNRQAEQLTGTIGELNSQIPAAWGIDADGSTGPHAGTGPDAPVLPAIAQLDAITGCGIIAAQAVIAEIGLDMTVFGTPGRLVSWAKRCPQTRQSGKKTSSGKAGKGNPWLNGILGEIAASASRTDTFLGERYRRLARRRGKRKAMVAISRSILVIIFCLLSDRSARFCDLGPDFLRHPAQPRPQDPQPYPPAPGPRDQPRRPRRAPDQEPARSLTGTTPADPAARPGRGPLPPACRGLTFPVSLG

SEQ ID NO: 177175 - protein, 343 aa, unidentified
MSACYFIGLDIHKKMIAYCIKTIDGRLVDQGMVSADRVSLSAWAQRLPGPWIGAMEATIFTGWVYDFLAPHALALKVAHPEMLKAITAAKKKNDQADAEKIADLLRVDLLPECAMLPQEIRELRRILRYRNHLVRTAVNMHNKMSGLLMEVGAGYSKNRLRGKKYFHELLDRLDEIPPSVKELLMLSRAGFEMFQTFQKRLIQTLRTNPLIQERVTRLITIAGVGEVTALTWVLEIGPVSRFGSIRQAISYCGLCSAQRESAGKQQRGPISKKRNKHLQSILVEAAKLAPRWNPQLADIHQRELNRGNRNRATLAVARRLVAYMMAVDKGETNFVFREEQKAG

SEQ ID NO: 177176 - protein, 346 aa, unidentified
MEHYAGIDVSLELSSVCVVDAQGKIVKEAKVASDAEDLIAFFASLGFAMTRIGLEAGPLSQWLQSGLKCAGLEVVLLETRHVKAALSAMTVKTDRKDARGLAQLIRMGWFRPVHAKSMGSQEVRALLVARKQLLGRLIDVELSIRGILRGFGLKIGVVTRKGFEPRVRELVTGQATLEHITRAMLSARAVLRVEYEKLHKSVLAMVREDAVCRRLMTVPGVGPLVAMTYKSAIDDPSRITKSKAAGALFGLTPKKYQSGEKDITGGITRTGDEMVRTALYEAANVLLSRITRFSKLKRWGLDVAKRRGSKRAKVALARKIAVILHRMWIDGTTYRWSEAQLMATQA

SEQ ID NO: 177177 - protein, 399 aa, unidentified
MLAVGIDISKSKSVAAILNQDGSMHTSPFEFHHTQPELDAFIKYILNSKQSATILMENTGHYHYPVLKALQEAGLPVCMVNAYQIKKFGDMDLRKAKTDKKDAVRIARYALEKSYSLVPYTSMEQKYEDLKFLARQYNQRMLTLKTNKVFLLNLLDETMPGITNILPLTTRTPETSLSVLFINRFKSYDRIKKMGKSRFLDAFEKIARKSRNRQTKTYGLAIYEAALRNITTRGENEYTLAAHNQCLELVCESQKATDSIILKMQTLAETLPEYAVLRSMAGVGDRLGPLILAEIGDIRRFHSGKALNAYAGNDAPPYQSGTFESHNRHISKRGNAALRKYCFEVMQALKLTRPQDDPVYLFLLKKEQEGKPYNVAKMAGVNKFLRIYYARAMETLKQQ

SEQ ID NO: 177178 - protein, 384 aa, unidentified
MDQATPSTASANTLHCALELSKKSWLLAIQFPDREQPSLYPIAGGDAEKLMAKLTQARDRWAKTSGALPMITLCYEVGYDAFWLARCLKARGVECLVIDPGSLQVSRRGRRVKTDRVDVKTLLRTLIAWCRGERHVWSLVRIPSIDEEDLRRSHRERSRLVRERTAHINRIKGLLFAQGIRDINVKSRYKTLAVDELVTGDGHRLPLRLAGEIAREIRRLATVQEQIAEIERERDAAPTTCEATERKRDLLSQLKSIGPAISAFLSREVYYRQFANQRQVGSFLGLTPSPYDSGDEERCQGISRAGSGHARAVMIETAWLWIKHQPKSALSRWFVERTAGQSKRVRKIMIVAVARKLAIALWRYVELGLVPQGAILNPRMKARS

SEQ ID NO: 177179 - protein, 412 aa, unidentified
MSVFCGIDWAESHHDVALVDQEGQLLAKRRISNDLAGYQLLLDLLAEYGDSPETPIPVAIETSSGLLVAVLRTGKRKIFAINPLAAARYRDRHGVSRKKSDPGDALVLANILRTDMHAHRPLPDDSDLARAITVLARAQQDAVWARQQVSNQVRSLLRDYYPVALDAFLGKQGGLTRPEARAVLALAPTPTTAARLSLPRLRSALKQAGRSRGIDAEAERLKTALRAEQAHQPALVEEAMRQQLLSLLTQLDAACLAVNDLTEALEASFRQHPDAEILLSFPGMGVQLGARVLAEMGDDRARFADARALKAYAGSAPITRASGKKRFVGRRYIKNNRLTNAGHQWAFAALTASPGAAIHYRGRRERGDWHAQAQRHLFNRMIGQLYHCLQTRKVFDEQHAFTSVSADLTAAT

SEQ ID NO: 177180 - protein, 342 aa, unidentified
MEMFIGLDVHASSTTMAVVSQTGKQLRSQVMSTSAEAIIESLKALRGELHLCLEECPQSSWLFEVLSPHVAELVVIGLGEKSQGPKSDAQDAFRLANKLRLRDYKTAVFKPQSSYARLRYLSRAHRQVVSDVTRVQLRIKALLRSRGVAAKGKQLYSSEGRQPVIVALPGQARAGIEVLFQAYDALQPVRRAAERELVQELHRHAISRVLETCPGFGPIRVAEVLATVVSPQRFRTRQQFWSYCGLGIVMRSSSDWLQLPDGSWQRAAILRTRGLTRRYNRGLKAVFKGAATSVLALYGPDEPLRENYQRQLTTGVKPNSRCGSSSRSTRRSRQRRTSRARG

SEQ ID NO: 177181 - protein, 412 aa, unidentified
MDSYKIAAIDVHKSMLAVVITDAAVEGELPFERRRFGALGSDLKALTEWLAAHQVQEVVMESTAQYWKPVWRQLEGQYQLHLAQAHSNRARKGRKDDFRDAERLARRHLSGELILSFVPDPEQRLWRTLTRSKHQLTRDRVRLHNQVEALLEDARIKLSTCVTDLLGVSSRRMLEQLAQGETDPALLAALADPALRATAEKLSDALSAARDMSSMHRQILRLFLDRLELMERQMEVLDRSVAATLQLHQDAVVRLAAVPGLGVDSAQQVIAELGPQAATFPSPQELASWVGVCPGREESAEVSKSDESPKGNRTMRRVLNQAANSARKTKGSIFEALYQRWVPRLGHNKTIWAIAHRLCRVIWIILHRGEQYIEFGNSRDPKSAAKRTARLIHKLRSLGYQVTPPPTPRIAG

SEQ ID NO: 177182 - protein, 358 aa, unidentified
MMNLKYSIGIDVSKKDFHCCLSVIDSSQKVTVKSSRKLSNNPVGFKEFLAWIKQHQKEELPLRIVMEATGVYHEQLAWFLHSKGLVLSILLPNKAKKYLQADGANSKNDSIDARGLAKIGAEKNLEPWAPGSEKLYELRHYTRQHQNLKEAINVMGNQLEALTHAQFQSREVIKQLNKTIKLLEQQVLEMEKAMEKLVKTDKVLNLHYENITAIKGINLLSFCVIVAETNGFTLFKSSASLVKYSGYDVIENQSGKHIGKTKISKKGNSRIRRILFMPAFCAVRDDQPQFKSLYERVVERTGFKMKGYVAVQKKLLVMMYHLWKNEQRYNPQFNHSEKIIALEKSRATHDKIPEGSFH

SEQ ID NO: 177183 - protein, 389 aa, unidentified
MFYVGIDVASEKHDCCILNEKKKIIRSFSFLNSPVGFQSLLSALSGIQPDEIKIGLEATGIYSENLSVFLRRKGFNVTTINPLLLKKHQCATTLRKTKTDKADAKGIALFIAEEGFQPDLPVSYHIQELKSLTRARFSFVQDRSALKNKVKRLVVLLFPELLEQFSDIFGASATALLKQYPSAERLAACHTDALAALLRKSSRGRFGRAKAAYLKQLAKCSIGNHSPARVMELKMLLARIDLLSEQIKDYDKQIKIIMDELDSPVLTIPGIGYTLGATIIAEVGNISRFSSPAKLLAFAGLEPSIYQSGKFVPASGRMVKRGSPFLRWALLQAAGYVPNYSSTFALYREKKLSEGKSAAVARSHVAKKLVRTIHSLMTHSTAFSDQLTA

SEQ ID NO: 177184 - protein, 348 aa, unidentified
MQSTATLPVIGMDIAKNVFQLHVVDADTGEIERHKLKRNRVTTFFANRQRSLVALEACGGAHHWARELQALEHEVKLLPAKHVRPFVLRDKTDARDAQAIWVAAQQFHIKAVPVKSEQQQACLTLHRMRAQLMKVRIMQTNALRGLLYEFGIVLPEGHRVLLKRIQEELAKAQEQTRLPEMVVVSVQDQLRRIDSLQDDIDQLDKRMASMAKQNQHMQALQAIPGIGPLTATALVSTATDLSSLDSGRQFAAWLGLTPRQTGTGGKTRQLGISKRGDPYVRTMLMHGARAVIARSQRNGWIERLLLRRPYSVVVAALANKLARTAWAVLVKGKAFDQVRWNPVDLAAT

SEQ ID NO: 177185 - protein, 347 aa, unidentified
MRFYNNAHPYYCGIDLHARLLYVCIINDKGEVILHKKIKDDKAALMQLLEPYIGNVIVGVECMHCWYWVADWCDEHNIDFVLGHALYMKAIHGGKTKNDKIDSFKIATLLRGGNFPVAYHYTKNMRATRDLLRRRTKIVRHGAMLKSHVVNTNSQYNMPPTQVNLKNVCAREELRGRYEDPAVQRNIDLDMNILDFYAKELAQVESFVLASAQQHNPKHLIILNTFPGIGKILSLTILYELGDISRFDSVQRFASYCRLVKCKAESAGKVYGTSGNKIGNAHLKWAFSEAAVLHLRGNDKAQNYLTQLQKRMSRAKAISALAHKIGRCIYYMLKNGTKFDEERFLKG

SEQ ID NO: 177186 - protein, 363 aa, unidentified
MTVYCGVDLHTRQQLIKWCDTRDGEIKEERLSHESPDSVRSFYSRLTGEVIVGIEACGYSEWFETMLRELGHEVWVGDSTKIRYRARSRQKTDRRDAELLLDLLLKGEFPRVSRLSFESLEVLRRLRYRHRLVQMRTRMRNSLQSIAHGCGVALGPTLRSKRGRERLNALPLSPVLSQQRSGWLEMIEEVGKRIARVEEELEQAAAGDGRVRRLRTHPGIGLLTGLALVHTLCPVERFADSRKVTAYVGLEPREFSSGERKRMGHISKAGPRVLRFLLVEAGIKAVHQDADLKRLYDRVMHRREQARAKVAVARHLLVHAFIMLRDEIDYEEFKVRGADRRSAARTVHRPNVPDHLIERPASE

SEQ ID NO: 177187 - protein, 419 aa, unidentified
MGKMIERCAGIDIGKRLLLCCVLTGAAHEEPHSETRRFDTTVAALERLRTWLIEEQVTEVVMESTGSYWIPVFNLLEGHVKVVLANPEEVKNRRGHKTDRQDAEHLADLMRHNHVRPSYIPTEPVRQLRDLTRRRVQLTQDATRERNRVQKLLEQVNVKIASVLTDVFGVSGLNMLLALLEGKATPAEIAQLARGVAKRKVPQLIEAIAGNRMSDHVRFVIRSCLRHLACLEEELEEVDAEILRRMELPTFQKAFTLLQTIPGVGKLSAAAILAETGPDLDAFPKAEKLASWAGLCPGNRESAGIQKGSQTTHGNPYLRTALVQCAWAATRKRDSVFLKCFQRLAPRRGEKRAIVAVAHLMLITLYCMLKQGVVFRGAEDAPKQRRRERRAHHHLRCLRRLGLSVEIRPAAQSSEPNAV

SEQ ID NO: 177188 - protein, 334 aa, unidentified
MENIALIGIDLGKNSFHIHCQDRRGKAVYRKKFTRPKLIEFLATCPATTIAMEACGGSHFMARKLEELGHSPKLISPQFVRPFVKSNKNDFVDAEAICEAASRPSMRFVQPRKESQQAMRALHRVRESLVQDKVKTTNQMHAFLLEFGISVPRGAAVISRLSTILEDNSLPLYLSQLLLKLQQHYHYLVEQIKDLESQLKRKLDEDEVGQRLLSIPCVGTLTASTISTEIGDGKQYASSRDFAAATGLVPRQYSTGGRTTLLGISKRGNKKIRTLLVQCARVFIQKLEHQSGKLADWVRDLLCRKSNFVVTCALANKLARIAWALTARQQTYVA

SEQ ID NO: 177189 - protein, 376 aa, unidentified
MQAAQERGYEVNTTLYMAMELSNKKWKLGFGNGAKVRRKTIDARDRQRCLEEVSLAKVKLNLPADAPVVCCFEAGRDGHWIHRWLESEGFEVLEIDSSSIETPRGRKHVKTDRIDVEKLLDLLIRHHCFGLRRAFRVVRVPSAEAEADQRLHREDEYLIQQRTRIGNRIKGLLVAQGVTEVSLKGDFVSYLDRVRLWNGEGLSAELKGELKRMHAQNAVFEGQLKELSKAYTAELSADTAVAEKRRRLERLKSMGPKTSRILSAEVFGWRTFANVKQVGAFAGLTPTPSQSGDRDIEQGISKAGNRRVRRVMIELAWLWLRWQPDSELSRWFKHRFAHGSKRMRRIGIVALARKLLIALWRYTEHGEIPAGAVLKS

SEQ ID NO: 177190 - protein, 315 aa, unidentified
MSDVPCFIGIDVAKAQLDIALRPSGERWAVPNDASGVATLVDRVQTLQPSLMVLEATGGLERAVTSALATAGLPVVVVHPRQVRDCARATGQLAKTDALDARALAHCADVIRPAPRPLPDAQTQELRALLGRRQPLIGMRTAEQNRLAGVSERLTKDITAPMAWLNAGIATLDDDLETLLRASPRWRENDDLLQSATGMGPVRAHTLLLALPELGTLTRQKIAAVVGVAPLNGDSGTLRGKRTIWGGRAPVRTVWSMRTRVATRFNPQSKAFSQRLLAAGNVKKVALTACMRKFVTILNAMLKQRTPWQPQEVQS

SEQ ID NO: 177191 - protein, 311 aa, unidentified
MEDTIGIDISKDKLDAYWLAKGEHKQFGNDKKGVEALALWAAKAGVSRVVFESTGIYHRCVETSLAQHAIGFSRVNPRQARRFCEGAGQLAKTDRVDAVMLAKMGALLQLKADQPKSETLHDLKQLTTARQALIKDRTAAKARLAATTHRLLSQQIKRRLNQIDRDLSQVADLVDTIIAADQELRAKADILVSIPGIAKVTACAILTDMPELGHLSDKQAAKLAGLAPISKQSGKWQGKEHIQGGRASIRHAVYLPAVVATRFNPDMKAKYEQLVSTGKCKKLAITAVMRKLIVMANALLRDRRKWNEYPA

SEQ ID NO: 177192 - protein, 317 aa, unidentified
MPVDTFVGIDVSKARLDAAVLPTGELFTVDNNARGLAELLIRLSEAQPHLVVLEATGGLEQAAMLAIHDAGFPVAILNPRQVRHFSRALGKYAKTDQIDAVLLATFARTLQPQAQVPGDTAQRALEALLARRRQVVELLTMERNRLHSSQDPYVQGDLQEVIKYLEERRERLNETLQEAIQNNPKFQATYRVLTSTPGVGPVVALTLLAQLPELGSLSRQKIANLAGVAPLNWDSGKSRGHRRIWGGRAEVRQVLYMAAVTAVRWNPTLKTVFDRLVKNGKPKRVALVACMRKLLIYLNAMVRDQALWRIQSISTST

SEQ ID NO: 177193 - protein, 456 aa, unidentified
MAKSKQPQKMKVQVNALEQINLHAAGIDVGAAEVWVAVPPDSAEQSVRSFPTFTADLHCLVGWLEQCRIETVAMEATGVYWIALYEILEEAGFEVYLVNARHLKNVSGRKTDVLDCQWIQQLHTYGLLSASFRPPEHIVAIRSLVRHREMLVQSRSTHIQHMQKALTVMNVRLTNVLSDITGVTGMKILRAIIAGERDPKVLAQFRDERCAKSVAEIAKSLEGHYKPEQVFILQQAIELYDFYDRQLLLCDTQLEALYDEFGPPENPGTPPPAPRSQRRRKNQAFFDLAPALYRLSGGVDLTQIDGVDELILQKVLCEIGTDMSKWPTEKHFASWLRLCPNNKITGGKIIQRGVQPTTNRASTALRLAAASLHHSHSALGAYYRRIRARSGAPVAVTATAHKLARIIYAMLKEHKPYHDVGALYYEQIYRDRVLRTLNRQAARLGFRLEPAPQASG

SEQ ID NO: 177194 - protein, 358 aa, unidentified
MQSVTRVGIDLAKMFIQVHAVDAVGKLVCNKQLSRDKFIAWCNQLPAGCLVAMEACSGSHAWARKLIALGLDAKIIAANHVAPYRLEGKGGKNDANDAAAICEAASRPSMRFVPVKTLSQQGMLCVHRYREGVKEERTANINRIRGLLAEFGIIAPQSPNKLRERLAEIIEDADNDLCGIARLVIQEAFSHWDEIDKQLGWCTQRISAHVKENQQAQTAVQLMGVGPVTASAAVVTVGDFKQFKNGAQFGAWLGLTPRQNSSGGKTKLGRITKRGDVYLRMLLIQAAKAAVMTAHKRDDPISRWLLQLREKSGWQKAAVAMANKNARILWAVMTKGCDFDPRYVSVKPSGGGSIAVAI

SEQ ID NO: 177195 - protein, 346 aa, unidentified
MVETMTIGLDVAKQIFQVHGVSADGQVTIKRQLRRAELLGFFGRQAGCIVGLETCGGSHFWAREIRALGHDVRLIPPAYVKPYVKRGKTDAVDAEAICEAVSRPTMRFVPIKTAECQAALMVLKTRDLLVRQRTQAVNALRGHLAELGIVAARGLAKVETLIEIVRDEDDRRLPPAARAALKMLVDQVEVLTKRAGTLERAIVTEVRRDDTMRRLATIPGVGPITAATIQALVPDPGAFTSGRHFAAWIGLTPRLNSSGGKERIGKISKMGNPTLRSLLVVGATAVLQHTRRGATVSPWLTALLARRPAKVAAIALANKTARIVWALLTKGGTFIRKNTAAGHAAA

SEQ ID NO: 177196 - protein, 401 aa, unidentified
MPDGIRWVGLDVHARESTFAVFDQATGEVLTRRVVGRPHELLPVLREIPRPARMVYEAGPTGYGLARRGRAEGLEVAVCAPGKTDRPASDRVKTDKRDAIRLARLLAAGELVLVTVPSVEREQLRDLVRCREDIRADLMRARHRIGKFLLRREIYYEGPAVAWTLKYRSWLTSVRFADPASRATLADYLHAHDVLIARRAQVEAELAKLALTAPCAPTIARLRCLRGIDTLTAFGLCAEIGEWERFDHPDQLAAYLGIVPCEHTTGAQRRLGSITKAGSTHARRLLVEASWHYRRGPAVGQALEHRQRGHAPEIINISWKAQRRLNARWRQLRDARHKPGGIVAVAVARELAAYCWEIATWRAHPDPVPPASLPAGDPLTQAAPLPPKQKTTTRRRITNSR

SEQ ID NO: 177197 - protein, 317 aa, unidentified
MSLPTASFVGIDVSKQQLDVAVRPSGETWSVAHDEAGLSALVAQLRALAPALIVLEATGGWEVALASALAAGPLPVVVINPRQVRDFARSTGTLAKTDRLDAQILAQFAEVIRPQPRALPDAQAQELAALLQRRRQLVEMLTAEKNRLTMASRRIRPQLQAHIEWLHKQIAQFDEDLRQLIRASPLWREKDDLLRSAPGVGPVLATTLVAALPELGTLTRRQIAALVGVAPLNRDSGTLRGRRSIWGGRAQVRAVLYMSTLVAMRHNPVVAAFYQRLRAAGKAPKLALTACMRKLLTILNAMLKHHTRWAPVLAQHA

SEQ ID NO: 177198 - protein, 392 aa, unidentified
MFFVGIDVASKKHDVAITAPYGEIITEPFTINNDLEGFKKLRKELLSHTESLDEVRIGIEETGIYSKNISEFLALCGFTVHMINPVLTSNSRKSQSVRLTKTDAIDSLAICRYVEYNFKRLNSYTPTLYIYDEIKSLSRARIDIQMRLNKAKTEWARLLDITFPEFKKTYNHHSKWVYHLFSEYSTTDKISKMHNKTLIELLSIQGNRKDAAIHIKKLAKVTVGKTSKTYGFLIRNTLKDIKHHSDQMKELKIEIENIILEHFANLLTIPGVGPVTAGLIVGEIGDIKRFNSPNALVAYAGLDPIVYESGQFKAHRVNISKRGSRYLRTAIFTSTKVACINSKIRDNKFKQKYLKKISQGKHHNSAICHCSKNMINTIYSLLNSGEAFDYNI

SEQ ID NO: 177199 - protein, 420 aa, unidentified
MTSQNSIPADAVLVAIDIAKVRNEVLIEAPGHKRRRRLSVLNTRAEHDHLIAILQSYDRPVVCAFEATGNYHRPIAWRLVEAGFETRLVSSLALARTREALHNSWDKNDPKDAQVILHMLRIHSTQVYHDPLRAGINDVQELSKTHEAIANAKTEIQHRILTHYLPLYFPEIERFRGNSRSDWFFAFLDAFPTPSSITTLTKEKFVEAAWDVVGRKVSKSQILMDIYETARTSIGLPLPLDAPAIRMFRMVVAEARSLIRQRNEIEAQADELLRHSRDYQILRQIPGIGPINALTIIAEAGDLRRFHHHRQFLKFCGLDLSTQQSGQYRGQTRLSKFGNARLRRTLWIAGQVAIRQRENGFRHKFERYIARDRDNPDLRRKAMTAITAKMARVVHAVIKSGSDYRPFVEGRVPGGRTSVS

SEQ ID NO: 177200 - protein, 355 aa, unidentified
MKQCHFIGLDTHGQFCDMAAVDQQGQLVARGRCATNISALVNVLEQVPEPRRLVIEEGPLADWLWRNLRTRVDGMTVCEPRRNRLIAADGDKDDPIDAEKLAQLFRGGYVKAVHHTESLTMAIFKQHVLLYQQRVSQRVAEGHRARSLLRRHGIMVREKDFAPADQRADLLRRLPEDSTLREDVELLWESYDLAVKHEDKLRRRMIQLAKKEALLQRFVELPGLGWIRAATLYVFLDTPWRFLSKAKLWKYLGIGLERHRSGNGPERLQVPRFCNRVLKSTILGAAKSAIAQGDNPFADQHQRWIEAGLSSKLARRNVARSLAATLWGLWKNGSAYRPEWVGVAAAANPATKVSG

SEQ ID NO: 177201 - protein, 337 aa, unidentified
MNIVRMGIDLSKNSFHVHAVNEAGHPVLQKLMNRAQLRQFLALTAPCVVASESCGSAFHWARYAAQFGHRTRIIASQFVKPYVKTNKNDFNDAAAICEAASRPSMRFVPTKSIEQQDIQALHRVRTRRVAERTALGNQIRGLLLEYGIAIGLSLITLRRKVPEIIGREDNELTLRARAMFRELYEELVELEGKIAYVERKINQIFKASEPCQRLAQIMGVGPLTSTALVASVGDAQVFKNGRHMAAWIGLVPRQYSTGGKTRLLGISKRGDRYLRTLLIHGARSALRVMGPRSDRRSRWAIDIARRRGANIATVALANKTARIAWAILAHGENYRAA

SEQ ID NO: 177202 - protein, 360 aa, unidentified
MKKVSKQMRKMEATDKPEMTVGLDMGDRYSHYCLVNADGEVIEEGRMQTTEAALRRHFEGEPCLRIALECGTHSPWASRLLTALGHQTIVANARKIPAITGSESKNDRNDAEKLARFAAYDPRLLSPLEHRRPERQLDLNLIHARATLVRARTMIVNALRGLVKSAGGRLPVCSTESLPARVAQAIPLALAVVATPLAEQIALLNAQIGGMDKQVEKLAVKYPEIGLLRTAPGVGPIVAAAYVLTLDRPDAASNRSAGAFLGLRPGQSQSGDADPQRRISKAGDSCLRSLLVQSAQYILGRFGPDSELRRWGLKLAATGGKRGKKRAIVAVARKLAVVLHAMWRNGQVFQPFPQPATAAA

SEQ ID NO: 177203 - protein, 354 aa, unidentified
MDQFIIVGCDLHDRTMRLKIAVGRGEPVSRTWSNTPSSRKALIVDLHRRAGEAGGARIVMAYEASGSGFVVCDELVAAGIECHVLAPTRMEKSPKHCRGKTDDRDALDVLGRLRGHLLAGNELPSVWVPDLQTRDDRELVRVRQEAADKKTRIKTQIRWLLKRQGQEQAPAEAWTIDYYRWLNALSQGGLRFGAASALASLVRQLQSVEQEIDQLDKAVGQLSEQPRYRAAMEALRKLKGVGVLTGMVYLTEMGDPRRFVNRYQVGSFLGLTPSSNESGQAEDRKGHITRQGSGRVRKVLCQAIWNRVREGGPDHGKYQRLVARNPKHKKIAIVALMRELAVIMWHRAAEAVAA

SEQ ID NO: 177204 - protein, 365 aa, unidentified
MGDISSRLVANSSSMTPKLVCGLDLGDKKSHVCVCTPEGEILERAKIDTTEPGLARYFQNRAPMRIALETGTHSPWASRLLRRWGHEVLVANPRKVRLIGNSRRKNDRLDALSLADLASVRPRLLYPIEHVTAQAQADRGVLRSRDALVRARASLILHTRGLVKAQGGRLPSCSADSFAKKVKSSVPAALAPALLPMLSQIAELSATIRGYDKQIQELIRTRYPQAEKLQQINGVGPITSLAFVLCVGDPKRFGKSRQVGAYLGLVPAQRDSGQSTPQMRISKEGNPYVRRLLVQCAQYILGPFGEDSDLRRFGERLAALGGGKTPKKRAIVAVARKLSIVMHRLLVTQQPYQPLLHGAELQAAA

SEQ ID NO: 177205 - protein, 340 aa, unidentified
MTITTLGIDLAKSVFQLHGVNAQGAVVLQKKLRRGAVLTFLGKLEPCLIGIEACATSHYWAREIAALGHTVRLIPPSYVKPYVKRQKNDAADAEAICEAVTRPNMRFVAVKTEEQQGVLVLHRSRDLLMRQRTMILNAIRAHFAEFGIVTAQGPRKVVELVSRLRDNDSLGLPDVVRSALLALAAQLDSLAAEVRNIERRLKAWHKQNAASQRLETIPGVGILTATALAASVPDPTVFKSGRQFAAYLGLVPRQNSSGGKDRLGHISKMGNGYLRRLLVVGATSVTRRAPTTDTRTGAWVRSLLERKPTRVVTVAIANKAARTAWALLTKGETYKAAPAH

SEQ ID NO: 177206 - protein, 304 aa, unidentified
MFGIGIDVSGENLDVAVHEQAFRQFKNNKRGWASLIRWLQRWPAKQVVLEASGGYEQKALDALHEAGLPMVRINPGRGRSFASATGRQAKTDRIDAMVLAHMADALKLTRYVPPAAWQRRLGELCQRRRHLVQMRVSEHQRMRAFSEPCLISMLNQHLDVIQKSIKQLDATIAALLAEQDGWRDFAKLKGAGPVLMATLACELPELGKLSGKAISALVGVAPMNRESGTWKGRRSITGGRAVVREALYMAALTAKRYEPRLKEFFESLVNQGKPGKVALVAVMRKMLVILNARKREAEAQMASA

SEQ ID NO: 177207 - protein, 345 aa, unidentified
MQYDAGIDVSLEQSSVCVVDAAGKIVKEAKVASDPCVLVTFFKGLGFPVTRIGLEAGPLSQWLYAGLTQAGFDVVLLETRHVKAALSAMVVKTDRKDARGIAQLIRMGWFRAVHAKSASSQEIRALLTARRLLLDKLRDVELSLRGVLRGFGLKLGKVTQRGFETRVRELVANHSMLQQITGSMLQARATLQREHNMLHKALLKIVRRDKVCRQFMTAPGVGPIVAITYKTALDDPQRIKKSKGAGPLFGLTPKRYQSGETDVIGGISRIGDAMVRAMLYEAANSLLSRTMRFSALKRWGLAVAKRRGMKRAKVAVARKIAVILHRMWIDGTSFRWSKEKAAAHP

SEQ ID NO: 177208 - protein, 344 aa, unidentified
MDHFAGLDVSVKETSICIVDETGKIVREVKVASTPEALLAVLKNPAYHFKRIGLEAGPLSQWLFSALAEADLPAVCVETRHMQAVLKAQINKTDRNDARGIAQMMRVGLYRPVHVKTLRSQKLRMLLTHRKLLQSKAIAIENDLRGTLRNFGLKVGMVGKVKFEARIKELVENLPDLAVLVEPLLIVRRVLREQIIILHHRLLAIVRDDEVCQRLMTIPGVGPVVALTYRATVDVPARFRKSKAVGAVFGLTCSKYQSGEIDRSGRISRCGDEMMRVMLYEAAQGMLLRSKKWSWLKAWAMQIARRRGMKKAIVALARRLAVIMHRIWVDGTEFRWVREQAAAA

SEQ ID NO: 177209 - protein, 314 aa, unidentified
MPDSTRFVGIDVAMGKLDVYVHPSGEAFAVPNSTAGVERLVDHFGTGTVIALEASGGYERTAAEGLAAAGLSVFCLHPADVRAFARLQGKRAKTDRIDAALIARAAQVAVTSRKPYRARPAAAEVKEMAACRRLLHNQLAALKGQITRLATETMRGILTQQIATLETDIRRIDQAMAQSIAQDPALRENARRIQTAPGAGPVLAATLVAYLPELGTLTSRQAASLTGVAPHPRQSGNSRLRGRCQAGRAPVRAVLYMATLAAIRSKSSHLRAVFERLKANGKPFKLAMVAAMRKFIVMLNAMLKHQQDWKNQAT

SEQ ID NO: 177210 - protein, 317 aa, unidentified
MSRTPIGVDIAKAKFDVATFVNGKYKTKSFANTPAGIQAFQTWLAAFPEPHVCLEATSTYGEALSERLADAGVMVSVVNPARIAAFAKIELSRTKTDKGDAKLIARFCALHTPEPWQPQPRSIRELRALVRRLENLLEMYQMEANRLQTADVAVQDSLQTVMTALQRQIDHVRAQIVQHIDNDPDLRGRRDLLDTIPGLGKATIPVLLSVLADPSRFGSAKQCAAYAGLTPSERQSGKYRGQTRLSKTGDPLLRKALYLPALVAWRHNPVLRPFCERLKARGMNGKAIVCAAMRKLLHIAFGVLKSNRPFDPNINLA

SEQ ID NO: 177211 - protein, 374 aa, unidentified
MSKIARIGIDTSKGSFELHGVNEKDEVVLRRTVRRRQFLEFMAKLEPTVIGLEACGASHHWARELGRLGHRVMLIPPQAVKPYVSPGRKNDKNDAEAICEAMSRPRVRARLVPVKSVEQSASQMLMGVRDSLLKRRTQLCNTIRGHAAEFGLVAAKGLDKIEPLLVRIAGDEGLPALAREMFADLGQEHAELSKRIAQIDRKLAAFHRSNELSRRLMEIPIVGPVGAGLLITRIINPHGFRSGRLCAAWVGLTPKNHSTAGKQKLGGITRAGDESLRAVLVSGATAYIQQVRRGRIVPSPWLAALLERKPPKLAAVALANKTVRIAWKLMTSGGRYDPTHRVDREGPGASLYGGLRAEPLAPSPTAGHSHAVAA

SEQ ID NO: 177212 - protein, 316 aa, unidentified
MEDTLIFVGIDVSKAQLDVKIRPTGEKDSVANDKAGIKSLIKRLAKLQPTLIVLEATGGYERQIAQALVRAELPVVVMNPRQVRDFAKATGQLAKTDTIDADVLAHFAEVVRPQLRALPDAVTLELRALTSRRRQIIEMIVAERNRLAMASKAVGKRIGAHIRWLEQELERANQDLDQAIEQSPIWKVKEDLLQSTPSIGPVTSRTLLADLPELGSLDRKQISSLAGVAPFNRDSGTLKGRRSIWGGRAPVRCALYMAALVATRRNPVIRDFYKRLTAKGKLFKVALVACMRKLLTILNSMIKHKTRWSETFLKTA

SEQ ID NO: 177213 - protein, 391 aa, unidentified
MIYVGIDVAKDKHDCFITNSDGEVLFNVFTIANNLDGFNDLCQKIASVMEDVTKVKVGLEATGHYSYNLLGYLIDKGLPTYVINPLHTNLYRKSLSLRQTKTDKVDARTIASMLMSDVNLKSYSDTSYHNEELKSLTRYRFDKVKQRAKLKSSVSRLVCILFPELEKLVPTLHMASVYTMLSEFPDAKQVANAHLTRLTNLLSESSKGRYGKETAITFRNAARTSIGSNMPAKSLELKHTIKLIQELSSEIDEIENEIKLIMDEINSPILSIPGINYRMGSMIIAEIGDFNRFDSPDKILAYAGFSPSTYQSGQLDGAYSHMEKRGSRYLRYALYNAAKYVCNWDPTFAEYLAKKRAEGKHYNVAISHAVKKLVRVIYHLEKTNQQYIKAV

SEQ ID NO: 177214 - protein, 351 aa, unidentified
MIIIGVDYHPSFQEIAFMDEKTGECGERQLNHSDGEAEKFYRELKQRGVSVRVGMEATGHSRWFERLLAELGIEVWIGDAAKIKTMRVRKQKTDREDARLMRKLLLENRFPRIWVPSPENRDLRQLLWHRHRLVQMRARIMNQLQAVAMNEGYRWKKKLFSAQGRALLEKLSLAPWASRRRKELLELLDQLDPKIAELTAAVEQEAQQRPEVLRLMTHPGVGPITGLAYVQVIGTPDRFPCGKQIGSYTGLIPCEDSSAGKQRLGHLSKQGNALLRYLLGEAAQAAARCNPDWRRRYVHLAMRRHKNIAKAAMARKLAVRLYWMWRNGWDYSQLVEFGSHAGKLATGHGVK

SEQ ID NO: 177215 - protein, 427 aa, unidentified
MSVTQNEKIRQVTDTTMVIGVDIASELHWARAFDWRGLELGKAVKFENSAEGFNFFLRWVSELTVEQKKDSVMVGLEPTGHYWFTLAAHLQGGDFKLVLVNPYHVKRSKELDDGHPSKSDKKDPKTIAKLVLEGRYVYPYIPQGLYAELRVAMNCRWRIRKELASIQNQIQRWLKIYFPEHSKVFGRFTGAGSMALLHSAPFPSDLISLGVEGISEIWKQMKLRGIGRKRAQRIYEAAQTSIGCTTGMEAARMELQILLEDYDAELQQYERVMQVVENLCSQIPAVAELLKIQGLGLVTVAGLFAEIGDIRRFESPRQIQKLAGLAITENSSGKHKGPTEISRRGRSRLRAILFRAAIPLLAKNREFQLLHRYYTTRQNNPLQKIQSVIAICCKLLRVFYALATKDCAYSPEKMLADIQRNQPLKAA

SEQ ID NO: 177216 - protein, 377 aa, unidentified
MSKIRFVGLDVHAETIAVAVADLGEEVRSLGIIPNREDSIRRLVKKLGPAEQLRACYEAGPTGYVVYWQLTALSVKCEVVAPTLVPVKAGDRVKTDRRDAEKLARSYRSGDLTPVWVPDAAHEALRDLVRAREAAKKDQLRARHRLSKFLLRHGKRRPAGMKAWTQRHMRWVKSEVRFEQQGQEVTLLDYVNEVDHGAARVERLERAIDEAVKSAPERMLAVIEALQALRGIAQISAVTILAELGKVSRFPAPRQLMGYSGIVASEHSSGERSRRGGITKTGNAHLRRVVIEAAWAYRHRPRVGQMLHKRQEKLSEEVREIAWKAQHRLYARYRKLSARGKNKQQVITAIGRELLGFIWAIGMKVEAEICEPKGCVV

SEQ ID NO: 177217 - protein, 438 aa, unidentified
MRGCRCSMIMGFNKPIEHFNLQQKKVITTNTLYVGIDVSSKSNVIYLMLPNGDKHSNFSVANSHEGSTQLVKRILSALTSHSLDTVLIGLEATSVYGDNLVYFLREDATLAPFNRKIHILNPKQVKKFHDAYNDLPKNDYVDSFVIADCLRFGRINKEVYMGDYRYKTLQNLTRARFFAVQNLIKEKQRFMNVLFKKHSTMTQEKVFSDTFSTTALAVYDEFESAEVLANMDLHELTDFIIDKGKNRFPDPDAVAKAIQKAARSSYRLPKTVNDSVNQVLSISITSMKALESQIKEFDKAIKAQMELLPNVLISIPGIGPVYSAGIMAEIGDINRFNSQAALAKYAGLAWKQHQSGGFEAEVTRLIPSGNRFLKYYLCEAAFSLVRCDKEYSDFYHLKYKEVNRCQHKRALALTARKFVCLVFRLLKDNRLYLSLIHI

SEQ ID NO: 177218 - protein, 424 aa, unidentified
MRSIALDVHRDFCEVAIKDASGLRLAGKVKTSLADLELFAQSLAPDDQVALEATGPALQIARILQPHVGRVLIANTRKLSAIAESKVKTDKVDAKTLCELLAAGFLPAVWSPDEFTRALRRRLQRRSKLVRSRTRAKNECHAVLARNLKGRPPMTDVFGKAGREWLAGLELPADESETVECCLREVDFLDSEVDLIESELARQALGSEEIRRLMTVPGVSLVSAATFVAVVGDINRFSSPKRLVSYLGLDPRVRQSGEAPARHGRISKQGSPAARHMLCEAAWVLVRTPGPLHAFYERLRARRGAQIALVATARKLSVLFWHLLMREEDYAFERPSLTRRKLRGLELKAKDGRRSWPSGHALSTKQERAREAEFAEQIETAYRRFVQDWQPKPKSGAGATRGRASSKPTSGKQRGRASVPNSAL

SEQ ID NO: 177219 - protein, 361 aa, unidentified
MRIIGCDLHARQQTLAMLETTTGEVVNLTLMHEGKEVREFYSQLPRPVLVGIEATGSMHWFLNLMEELGIECRVGHPATIRAAEPRKQKHDRRDAELILKLLAENRFPAIWLPSKELLDLRALLLHRHQWVRIRTRIQNALQAMALANGLRRGPGLWSYDGQAKIAFLPLPPHASYRRSALQALYRKMEEEVENLTKQVAEQAEQRSRARRLMTHPGVGPVTALATEVFLGDPRRFVDGKALASYVGIIPREYSSGERQRLGGVTKQGSPLLRFLWCEAGAHAVRRDPELQRFYRRKLVQKGLGKARVAVARKLGIRLWIMLRDEIDYEEFCRRGQKQQSGAACAGMLEVGYGANRHRPVH

SEQ ID NO: 177220 - protein, 412 aa, unidentified
MHYYVGIDIAKSFHVACVVDQNDKVIKKSLKFNNDENGFSELVLLLNSIDEVSIFTIGMEATGIFFENLYLYLREKGFNVLLLNPYQTNRFREMDSMKKVKNDNIDALMIAALIKSGRYSKAYVSEDTYQSIKSLYRHKNNLLEEMKKHKRQISTLLAVVFPEMEQVIKDPFNVTGLALLEKYPTAKHYKHASVERILKTFRGIKGNNFNEQKAQNLLYLAKHSIYQGNGVDERAYVIKSHIRVIKLLQEELKELENEMLKLFNQAPQLEDSEEQEVMDIIDNLRTIPGVSDKTIFALISECGDLSRFKNNSHLIGYLGLYPTLEQSGNKLTYGPIAKRGAKLAKKALYQAAIASIRHNNELNKLFRDKVSQGRAKKEAVVIVARKLAHIILAIYKNNVAYNPQRVFQASAS

SEQ ID NO: 177221 - protein, 320 aa, unidentified
MNNSQSFVGIDVSKAELEVYVRPNGTHWTVHNDAEGHSQLVRRLSTMAPTLIVLEATGGLERKATYALTEAGLPVFVANPRRTRDFARSLGLLAKTDRLDAQALAHFADAVRPELRDLPDQETQELSALLSRRRQLVDNLTAERNRLYSASSCIEASIKAHITWLQEAIAALEQEIDHRIQANAQWQAQIKQLSAVKGVGKITAFTLTADLPELGLLNRKQIAALVGVAPLNNDSGFRRGKRYVWGGRAAVRTALYMAALSASRFNPTIKAFYERLTNAGKPKKVALTACMRKLLTILNAMVKNGTAWDPDYSQRATDVI

SEQ ID NO: 177222 - protein, 344 aa, unidentified
MRIVGLDIHRVFAEAVMLDGGVVKRLGRVGMTRDHLEAFAKTLTHDDHVVVEATGNANAVADAIAPHVGRVVIANPRQVRMIAHAKIKTDTIDATVLAKLYASNFLPEVWVADARTLALRRQVTRRNQIVRQRTRLKTIAQSILHAHLVPQCPHADLFGVKGRAWLLAQRLPDDEREAVERHVREYDRLGDDLRVVERELARDALSDADVKRLMTIPGIDMVVAVGLTAAIGTISRFKTPDQLVSYFGLNPSVHQSGEGRAHHGRITKRGRTHARPCWSRRPGRPYAAPDRCADSTSGCLPGAATTSPPWRWPASSRSSSGTCCRRARTMPASGPRCTPRSCAT

SEQ ID NO: 177223 - protein, 465 aa, unidentified
MPRHPRRAPKPRASRAVLDHINPNAAGIDCGSAEHYVAVPPDRNATAVRSFPTFTGDLNRLADWLTACEVTHVAMEATGVYWIPVFEILEARGFLVSLVNARHVKNVPGRKSDVSDCEWLRDLHTMGLLRGSFRPSDSIVALRAYLRHRAGLVESAGEQVQRMQKALVQMNVQLPLVVSDIMGATGQRILRDIVAGHREPHQLARHRDYRCHASEAEIAAALTGNYRPEHVFALTQHLALFDVYQAQLAACDAAIADHLATLVEQATPPTTPAPPPRTQSTGRDNAPTIELRQPLYQITGVDLSQIDAIGPYTALRLVAEVGTDMTRWPTEHHFTSWLTLAPRNKISGGRLLSSRTQPSANRAAALLRLTAMSVGRTQTALGAFYRRLAYRVGKAKAITATARKLAILVYRMLKGDLVYQDPGASAYEEQQRTQALRRLRNRAAHLGFGLLNLATGELISAEAVS

SEQ ID NO: 177224 - protein, 339 aa, unidentified
MRLYVGEDLHANNNFLAMVDRKGKRVEQKKLPNDLSVILEFLKPYQKEIVGIVVESTFNWYWLVDGLIDSGYKVHLANPSAIQQYSGLKHSDDKHDAFWLAQMLRLGILPEGYIYPKEERPIRDLLRKRRHLVKLRTSLILSLQNIISRNCGVQCKVNEVKRLKEDRVSPLLEGNEDLALAGQTSKEMIDQLTRQIRKIEAWIVQRIELKESYRFLLTLSGVGKILALTIMLETGPISRFAQVGDYASYCRKVPSKWTSNEKTKGQGNQKNGNKYLAWAFSEAAEFARRYDPQARAYYTRKMRKTNFMVAHSALAHKLARAAYYLMRDQVPFMPEKLFG

SEQ ID NO: 177225 - protein, 343 aa, unidentified
MGEVSTIGLDIAKSIFQIHGVDADGAVVIRKRITRAKLLEFFATLPGCLVGIEACPSAHYWSRRLQALGHTVRLLPPSYVKAYLKRSKNDANDAAAICEAVTRPSMRFVATKSEEQQSGLMLHRSRQLLVCQRTMLSNAIRGHMAELGIISAKGRNGTAELLKIIADEQDDRIPATARFSLDVLARQYAVVRTEIVAIEKRIHAWHRSCEESRRLEEIPGVGPIVATALVAEVGDWKEFTSGRSLAAWIGLVPRQHSTGGKERLGGISKQGNRHLRWLLVAGAMAVIRYARQHGTKRPWLARLMDRRPIKVAAVALANKIARMAWAMMVRGERFKEPKSLPAA

SEQ ID NO: 177226 - protein, 341 aa, unidentified
MKKILKEVVGVDVDQKKLVVSLGRLFEDLEQEIYAHKVFDNNATGFSVLLSWVGNLVDPAVETCFVMEATGVYHESFAYFLDENGKVVNIVLPNKISNYFRTLEIKTITDKSSSEAIASFGLSRKLSRWKKPDPTFKKLKQLSREREQLIVERTLVKNQLHAENAEAEPLKASLQRMERRITLLTKQEKEILQEMKLLIASNEKINAQVKLACTIPGVGILTSAIVLAETNGFEHVKNKRQLVSYAGLDVREKQSGTSVKGKPRISKRGNRYLRKAMYLPALAAIRSNEQHRDIFARLVARHGIKMKAAVAIQRKILELIYVLIKNNTVYNEHHLKLVHAA

SEQ ID NO: 177227 - protein, 387 aa, unidentified
MVQINDLSRSLAAFDPISTLVVVVEMSKASWLVSGVVPGVERQPLKKLEPDATALLQLIERWRNEAVRAGRPIRRIALAYEAGRDGFWLARWLIARGIEAHVIHSASVAVSRERKRAKTDRLDAAMLMRVFLGWLRGERGHCGMVAIPTMEEEDARRPNRERESLVNERSRIVNRMKSALARLGIRGFKPHLRKAPERLAGLRTAEGTGLPANIIEEFRRDMARLALVREQISSIEKTRAERLERAPDTGPHAMVRLLARVIGIGIETADMLVREILSRNLRDRRALARYAGLTGSPDESGLKSREKGLAKAGNARVRRGLIQLAWRFLMFQKDSALAQWYRTRTEGPSGARKTTMIVALARKLLIALWRLVTTGEVPDGVELRPAA

SEQ ID NO: 177228 - protein, 349 aa, unidentified
MRSFQPPADTRFYAGVDLHARSLYVVVLDHDGQVRFGRNLAAHPEPFLRAVTPFRDGLLVGCECVHPWYWLADTCRDHQIAFVLGHAWAMKAIHGSKTKCDRQDAEAIARLLKGGNFPPAYAYPREKRGLRDLLRARLRLVRQRAELYGHVHTARRQANLPPVSSDVKYKSKRAAITADIADPFVRRRVETDLALLEPLDTTIRRLEAEIEAAARAFYPTELAVLQTTPGVGLVLSLTILLEIDTIDRFDTRQQFCSYARLCGAVQESAGQRTGVGNRKAGNAWLKWAFSEAAVLSAQKDERIGALLQRQASRLGKPKALSALAHKLGRAFYHMLHTKQAFDVQRFVRH

SEQ ID NO: 177229 - protein, 391 aa, unidentified
MIYIGIDVAKDKHDCFITNSEGEVLFNAFTIPNNADGFHDLFQKISSLTNDFSNVKVGLEATGHYNYNLLGFLIDKGLPTFVINPLHTNLFRKSLSLRQTKTDKVDAHTIALMMMSGVNLQSYSDTSYHNEELKSLTRYRFDKVQERAKLKTSISRLVNILFPELEKLVPSLHMVSIYALLAEFPSSAQIASCHLTRLTNLLANASKGHYNKEKAIEIRNAAKHSIGSNMPAKSLELKHTIRLIQELTSEIDKIECFIKSIMDEIRSPILSIPGINYRMGAMIIAEIGDFNRFSSPDKILAYAGMSPSTYQSGQLDNCYSHMEKRGSRYLRYALYNATKYVCHWDESFGTYLAKKRAEGKHYNVALSHATKKLVRTIYAMEKTGQSYSSAS

SEQ ID NO: 177230 - protein, 391 aa, unidentified
MSMYFIGIDISKYKNDCCIISAANQKVVSKVIIKNNKAGFNELLTIIHSLANPADIRIGFESTAHYALNLELFLENSLLTFMEVNPVLISEYKKSKTLRRTKTDSVDCESIARWLMTVEYKPHSKGFYHAYSLKSLTRLRDKLIRQRSFYLVKITNVLDHTFPEFKPFFNERLSKTALYLLENYGSAEKMARMNSASYEKLRSVSRGKFSPQQFLRLKELAVNTVGVNNSIFDVELNSLLSLYKSLVKEIDTIKKEINQLIEEVHPHYMSVPGIGPLSAAVIYSEYGDISNFTNPGQMLAFAGIEPGINESGTESHGGKMVKRGSSQLRYTLINCCLPLIRFDMTFATYYAKKRGEGKPHRVAITHVAKKLIRVIYALESQDIDFNAQELR

SEQ ID NO: 177231 - protein, 416 aa, unidentified
MNAAGIDVSSRKSTVAVLRPFGEVVKLPFDIVHSAEGFASLIRQLKSIEGETRIVMEHTGRYYEPVAQILHEAGFYVSTVNPLLIREYGGNSLRRVKTDKADAMKIARYALDNWSELRDYTPMDTIRYDLKTLNRQFQLASKQKTAASNNLIALLEQSFPGVRKCFDSPVRKDGTQKWVDFVYTFWHADCVRKNSLNAFTERYRKWCKRHGYFFKQSNAAEVYELARSVITLVPKGPVAKVLVQQAASQLTSISRSVETYRAEMNRLASMLPEYPLVMGLYGVGESFGPQLMAEIGDVRRFDRKQALVAFAGIDPMPNQSGEKNVRSNKSSKRGSPYLRKTLFSIMMCLLQSAPADEPVFQFLDRKRSEGKPYYVYMTAGANKFLRRYYAKVRDYLATLDNFPPVDMDSTGLNQLN

SEQ ID NO: 177232 - protein, 465 aa, unidentified
MRLLYRRCAGIDVHKKSVTVCIRKRARGKRDPEIEEAVFGTFTQDLERLREWLRKHRVKHVAMESTGVYWIPVWNILETSRPKLNLLLVNPATVRALQGNKTDRIDARRIAEFLQYGLLRGSFIPPQPIRHLRELTRMRVHIQQDRNRVVNRIARLLETVNIKLGSVATNIVGTSGRDILRRLAEGTRQQPEELAQLARTQLRAKIPELILALDGRPDEHFRWMLTRLLRKLEWLDAEVAAVDEKLCEHMQPYEELIRRLCTIPGVDVTTARVLIAELGTDMTQFPDAAHAASWAGLCPGNAESGGKRFSGRTRKGDRYLRRILVQSAWGAARTRNCFYASLFHRIAHRRGMKKAAVAVAHRLLKIAFAIMRDGTEYRERGGDHFDRRNPEKTARKLVSRLERIGMLVEVTRPLQKPEARKIRREPAPPGECRKCWNWGLKTCIHVRGKCKTAQSTSSSPANSEV

SEQ ID NO: 177233 - protein, 460 aa, unidentified
MEKYNEKWTKSTVRSALLTVVHPETAAVDVHPNEMWGAIRPDHPSGKTVRRFGAVTYDLRQLVKWFKDSGVTTVAMEATGVYWLPLYELLEAEGIRVCLVNARHVKNVPGRPKTDVRDCQWLQKLHASGLLTASFIPDASIRQLRGLLRHRDRLTRLRSQHILRMQKALREMNVHLDAVVTDIMGVTGLRILKALMQGRRDFDVIAQECRHPLIKATPEEIAAAIDGTYTPEALFVLEQQLEAYDFTGAQVAKLDAQLEKLLQLATAERPALALPDQGLTGREKRQGDAPAFNVQQYLYQITGVDLTRIPGIGANASLVLLSEIGTDMSRWRSSDAFCSWLGLCPNLQKSAGKIHGSRPRRTCSHAKHTLRLCASSLKNHHGHLGAFFRRIRARSGSPAAITATAHKLARIIFAMLGGKKAYSELGEDYYDKRYRERILRNMKRKAQLYGFQLVPLEQAS

SEQ ID NO: 177234 - protein, 316 aa, unidentified
MEIAPIFIGIDVSKARLDVAMRPSAEKLSVSNDEAGIQALVKRLSELKPVLIMLEATGGLERSVSGTLGSAQLPVVVVNPRQVRDFAKATGQLAKTDRIDAEVMARFAEVIRPPLRPLPDEVSLELRALIARRRQLIEMMVAEKNRLSAASKTVRKRIEAHIRWLETELDRADKDLDHSIRQSPIWQEHEDLLRSAPGIGPVVSRTLLAELPELGRLNRKQIAALVGIAPLNCDSGTFRGRRGIWGGRATVRAVLYMAALVASRRNSVIRDFYKRLRDKGKAPKVALVACMRKLLIILNAMIKHKTRWSEIIPQTS

SEQ ID NO: 177235 - protein, 354 aa, unidentified
MLSVGLDLHKRYSQVEAIDEDGRRRASGRIGNEFAEVERFFRTLGEPCRVVLEAGWNWGLMHDWLERLENVVEVQLAHPYGVRAIASAQVKTDRIDARMLGQLLRVGLIPRAYIPGRETRQLREAVRQRLFLVRLRTMLKNRIHAHLDRHHVVPPPVSDLFGKRGRDYLSKVELPAPAQQLLRQQLRLLETLGLEIRETEKLLANALNGDRRVELLRTIPGLGALLATVIALEIDRVDRFARPAKLVAYAGLVPTTHSSGGKTSHGGLMKMSNKWLRWALVEAAWIAIRHDPYFRHQYALRCHHKGPKTAIIAVARRLAEVIWCVLTEDRPYQVRQPVSKGREYGLTPAALIQD

SEQ ID NO: 177236 - protein, 324 aa, unidentified
MDSVKYIGMDVHKEAISIAVLNSSGKLVMECTIETKAITILEFFKGLRGSLHVTFEEGTWAAWLYDLIKPHVTELVVCNPRRNALLKEGSKSDRIDARKLAELLRSNMVRSVYHGEHGVRTLKELARSYLAISKDVGRVMSRLKAIYRSWGIPCAGKQIYALRYRAEWLGKIAEAGVRRRAEFYFEEFDALRSLRQGARRELLVEAQKHDAWKLLRQIPFIGPIRAALLIALIQTPHRFRTKRQLWTYSGFGIETHSSAEHHCVQGELRRSKKPASIRGLNRNHNHDLKSLYKSAATVAAAKPGPFQEFYNSLVPRESVRRWHA

SEQ ID NO: 177237 - protein, 411 aa, unidentified
MRVLFVGDDWAEAHHDVEIQDETGRRLIRKRLPEGIAGIGELHELIGRFAGDDDDPGQVMVGIETDRGPWVAALLAAGYRVYAVNPLSVSRYRDRYVTSGAKSDPGDAKVLADLVRTDREAHRPIAGDSQLAEAVKVLARSHQNLCWMRGRTANTLRSTLREFHPAALVAFEELTSRDAIAVLEIASTPTAGRRLSTSKIAAALRRGGRQRNIEARAAQIQAALRSAQLEQPPVIADAYGASVRAYVSLLATAVAQISTLEGELEECFGRHPAAEIVLSQPGLGRILGARVLAEFGDDPHRYATAKARKNYAGTSPITRASGTRRVVLARYAVNDRLRDALHLQAFAALSVSPGARAYYDAHRDTGAGHNQALRALSNRLVGILHGCLRHNTCYDESTAWSHQQQNQQAAA

SEQ ID NO: 177238 - protein, 344 aa, unidentified
MTQYAALDVSQEMTAVCLVDEAGQVIGEAKLPTCPDAIATWLGKRAPNLVRVGLETGPMAVWLWNELHGQGVPIVCLDARHAHGALKVRPNKTDRNDASGLAQIVRTGWFKQVQIKTRSNYEVRALLTARDVLVRIRVKMENEIRGLLRTFGVLFGKATGGFSRRADDIVAGELDVSPTMKRLVEAIVQARAAVLDQIKGLDRQLIATAKVNPIARLFMTAPGVGVITALSVASAFDNAERFKRSSSAGAYLGLTPRRYESGEVSRNGRISKHGSTLTRKHLYEAATTLLTRTVRFSTLKAWGLRLAKVSGFKKARVAVARKLAVVLHAMWKSNTEFRWSEAAT

SEQ ID NO: 177239 - protein, 297 aa, unidentified
MDPPLKDGVIMRQHRISIFKKKRRSMKDIKILGVDIAKDVFQLCGIDEWGKVIYTRRVKRAQYVSTVASLKVGCVVMEACGGANHWYRTFMGMGISTQLISPQHVKPYVKSNKNDRNDAQAIAEAASRASMRFVRGKTVEQQDVQALLKIRDRLVKSRTALINEIRGLLQEYGLTMARGAKRFYEELPLILASEAVGLTPRMKRVLNCLYTELLNRDEAIGDYEEELKAVAKANEDCQRVQSIPGVGYLTALSVYASVGDIHQFHRSRQLSAFIGLVLDNIRGGIRRCCWGLVNAAM

SEQ ID NO: 177240 - protein, 381 aa, unidentified
MSYTGSSEDPEKEAKDMLYVGGDVHKKTVQVCVLDAEGNRVAQSRIANTPEKVIGYFGGIEQPASVAIEASHNWGVLCDVLGEMGFETHVCHSREAKLIGLARVSTDKVDAYKLATLLRVGLLPEAYVPDSDGRELRALVRGRASLVRSSTGQKNQIHAILRSNWIEHPYSDVFGKAGRKFLESLKLEGGYRAVVDAKLKILDRIKEQTAVLDEEIKHRAHIDMRAMIIDTAPGFGEFRSVMFLAEVGDINRFRSAESFVCYTGLNPREDSSGDRIRRGRITKEGSSWLRWILVEAAHDAVEQDGKIRDLYLRVLEKKGDKVAIVAAARELAVSLYWMLKRMEVYRPSGKKDSLITSEASPQTAEWSGRRHEAPECRIMQP

SEQ ID NO: 177241 - protein, 435 aa, unidentified
MELLVERAAALDVGKDEVVACVRVPGPGGRGRRQEIRTYPTFTATLETLADWLASEGVTQVVMEATGQYWKPCWYVLEQRGFALLLVNAHHVKILPGRKTDVGDAAWLCELLECGLLRGSFVPPPAIRQLRDLTRYRKRLIQAHSAECQRIQKTLEDAGIKLDSVAADILGVSGRAMLKALVAGERDPGVLAELARGRLRAKLPQLRQALKGRFSDHHGLLVGLALDHLEYLEATIATLDGRVDEVIAPFAVARDRLDTIVGVGKRAAECIIAEVGVDMGVFPTAGHLASWAGRCPGNNVTGGKRRSGRPTKGNRWLGEVLVECAWAAAHSRDTYLAAQFWRLARRIGKKKAAGAVGHSILVIAWHLLAYDCDYHDLAATSSCDATATVPASAPSPSSRPSATRSPSNPPPPNTRGFSFQPRTASSAASRRSPWL

SEQ ID NO: 177242 - protein, 339 aa, unidentified
MTQVITVGIDLAKNVVCIHGVDTHGHVVVKKRLARQKVLPFVAQLTPCLIGMEASGGAHYWAREFTKLGHRVKLMPPQFVKPYVQSQKNDPNDAAGICEAVERPRMRGVPVKSVVQQDVQALHRIRERQIKARTALINQIRGLLAEYGIVIPQRASQVRHKVPFVLEDAENGLTATAREWLHALAEELQALDLRIAATDQQIERVFAADEACQRLAQLPGIGPLTATALVAAVGDATDFKNGRQFAAWLGLVPRQHSTGGKTTLLGMTKRGNRYLRTLLIHGARAVLRAVDRKTDPRSRWLQGVKARRGKHCASVAQANKTARVAWALLAKDDHYRQAA

SEQ ID NO: 177243 - protein, 323 aa, unidentified
MTRIICGVDIASSSLEARIGRQGAFTSFANNAAGIAALATFCRAHQVELVAMEATGGYEQQAFALLAERDLPVAILNPRAVRNFAQSMGRLEKTDAIDAGMIAWYAEVKQSMPLSLAPRTQQHLRALVTRLRQLTQIRTAQLNQQRLITEPVVQASFHELLSLIASQIQELEQRIAALIEEDPLWRELDHAFRSIKGVADRTVARLMAEMPEIGTLSNKTISKLAGLAPLARDSGKHQGRRAVRGGRAPVREILFIVASVVGRYEPDFLAFRQRLAAAGKPPKVVRIALAHKLLVRLNAKAREVRQRMTTTPQLAHATDAGTA

SEQ ID NO: 177244 - protein, 349 aa, unidentified
MDYRVYCGVDFHARQQTICCLTTEDGVMSTHELKHHNQAELRAFYAQFSEPVLVGLEASGYSPWFEQMLEELGHDVWLGDATEIRRRARRRQKNDRRDAELILDLLIHNEFPRIHRPTPTSREILRMLRYRHKLVQMRTIIKNSLQALAIQSGLSVRAKLFTQAGLAQLQSVTMSPMMQYQRDQWLQSLEPLNQRIAEATNWLETRAAADERIERLRSHPGIGLLTGLGLVHTLDPVARFSNQRKVAAYVGFDPKERSSGEKKRYLGISKAGPRVLRFLLVEAAQTASQRDPELKRFYLRLLHRHGKPKAKVAVARKLLIRSYILLRDGIDYAEFTRRAVAARLAREVA

SEQ ID NO: 177245 - protein, 450 aa, unidentified
MSNGSGVSRGDRNRNARLARLRELVPVTNAVVGIDLADAKQMVVVTDHDSKVLARTTFRCRAWNLGAALDWAAERAEAKGWAGVTVACEPTGHRWRVLGQLAAERAMPFVCVQPMLTSWARRSEDLTFDKTDEKDAVLIARLTAQLRCYVPEPVDETWGRLRHLGTRREQLVIEMVSQIQQMRALLECVWPAALDTARQPFRSKTWAAAMILVCERDRGDLARTRRLGIDRFEQVVRREIIRRGGQKPSLRILRQLFTALADPTGVTAHRSGALERVAFLMQDWHDAAGKLADTETRMTDVLDELNLTKLATSIPGMSAVGAAAILAETGDPNRFATARALVKHAGLAPREKLSGTFVGRTKLTGQGRPALRLAAWRAVWGAQRGNPVYAARYEHLTTRTTNKLTATQAQTVIAAAILRQLHAVITTGHLWDPEIASHGTGSRRQVALAA

SEQ ID NO: 177246 - protein, 375 aa, unidentified
MPGRFMKEATTMVVVGTDAHKYSHTFVATDEVGRQLGEKTVKATTAGHATAIMWAREQFGLELIWGIEDCRNMSARLERDLLAAGQQVVRVPTKLMAQTRKSARSRGKSDPIDALAVARAVMRETDLPLATHDETSRELKLLTDRRDVLVAQRTSAINRLRWLVHELDPERAPAARSLDAAKHQQALRTWLDTQPGLVAELARAELTDIIRLTGEINTLAQRISARVHQVAPALLEIPGCAELTAAKIVGEAAGVTRFKSEAAFACHAAVAPIPVWSGNTAGQMRLSRSGNRQLNAALHRIALTQIRMTDSRGQAYYQRLQDAGKTKRAALRCLKRRLARTVFQALRTVHQPSSEHTQPAAACHRSYCSRSCLSG

SEQ ID NO: 177247 - protein, 369 aa, unidentified
MDNGSTVVGLDVHKATVVAAVLPPGADRTRETVTIENHPKAVERLVTRLAARGPLAFVYEAGPCGYEVQRQLTALGQPCAVVAPALTPVRPGDRVKTDRRDAEKLARLYRAGELTPIRVPTRAEEAARDVVRVREDVLADRLRARHRLAKFLLRQGRVYRETKDWGVAHRAWLHRQRFEWPASRQTFAAYVQALEEVEARLAALDQQVTDLAQQAPYRTLVQALRCLKGIDTLSAVTLAVEAQEFRRFARARGFMSYTGAVSAERSSGGTIRRGSITKVGNAHLRRILVEAAWSYRHGTGVSRALSARRQGCPAEVVRIAKKAQARLHRTFWRLTRRTKPSQVAVVAVARELAGFVWAIAHQVPEGGPA

SEQ ID NO: 177248 - protein, 338 aa, unidentified
MTIVMGLDQHRAQITAEWLDTSTGELSRTRIAPADRAGVRVFAARFRGEQLEVALEATTGWRFVVEELQATGAGVHLAEPAETAARRGTKKRAKSDRADARHLRELLMVGRLPESWIPPEHLLELRARVRLRHTLVDQRREWQQRMQAVLYHHGVPPRSWLMSAESRAWLAGLALPAAAREQITIALAMIDAHDAQLAPLDQELRDYARRQPGCRALMRHYGIGPLTSITILAELGDARRFSSSREAVRYAGMDITVHQSDARRAPGRLSRQGPPALRWALFEAAQCARRPGSPDHHYYLEAAARLGGNRACLAVARKLLKRSYHTLRELGEEALQPA

SEQ ID NO: 177249 - protein, 317 aa, unidentified
MSKHTTVSAGIDTGKCKLDIALDRCPERLQVDNTDDGHAVLWGWLRQHRVNRVGIEASGGYEQAVVSALRRKGFLVIMFQPAQVRAYAKYRLQLAKNDKIDAALIAACTAEAKKIHPPPDPRLAPFAELLTVIEQLTEDIARLKTRRETSRDEQTRRFWNEEIARLKRLQSQKLKQLVAAIREHRDLADRLELIVSVDGVGLRTAVAILVRMPEIGRITREQAAALVGVAPYDADSGSHVGLRHIEGGRERLRKSLYTAALPAAFNWNPELMAIYKRLTAAGKPHKLALVACARKMIIFVNTVVARGTPGVPRDALI

SEQ ID NO: 177250 - protein, 400 aa, unidentified
MIDVSDIGVFLGLDVGKGEHHATAVTPAGKKALDKRLPNSEPKLREVFSKLKTKHETVLVVVDQVASIGALPLAIARDTGCEVAYLPGLTMRRIADLYPGEAKTDAKDAFIIADAARAMPHTLRSVDLDDETLAELQMIAGFDDDLAAEATRLSNRLRGLFTQIHPHLERVIGPRMQHPAVLRLLDQFGSPAQIRKAGRRQLVNLIRPKAPRMAERLIEEIFTALDEQTVVVPGTNAATLIVPSLASSLQAVLDQRKLLDKRIKELLEAHPLSQVLMSMPGIGIRTGARILIDVGDGTAFPSAAHLAAYAGLAPATRNSGSSIRGEQPSRRGNKQLKRAFFLSAFAALADPASRTYYDKKISQGKHHTQALLCLARRRADVLYAMLRDGTFYQPQPAPAP

SEQ ID NO: 177251 - protein, 424 aa, unidentified
MTALTTKQKAVEIESHGLEIYAGVDTHRDTHHVALVDQVGRTLRDEQFPATGVGYRRIVDFLHHYGPVTAVGVEGTGSYGAELSRVLRLEGFGVVEVMRPNRQRRRLKGKSDPLDALQAAMTVLAGRGLATPKERDAHAESLRILLAERSLVVKTRSATMNQIHALLIASDNAVREDYRGYSREKLITIIARTRPSAGIDPEQIARQSLKRLAVRHQNLGDEIVALDLQLDTLVRQLNPALLDANGIGPVVAATLLAAVGDNPERIIGKAQFAALCGVAPIPASSGQRVRHRLSRGGDRRANHAIHRIVLVRHSHHDPRTMEYFQRRRAEGLSDRDIVRCLKRHVANEVFALLTHPAPARVIGQQLRQQRKDLNITITDLAETLHVPYQRLRRLEIGKRTDTDLEARCQQRLDNIRESRPAKTV

SEQ ID NO: 177252 - protein, 344 aa, unidentified
MQIVGCDFHPRFQQVSILDISTGEVRELKLMHVTGEAERFYRELEAPVLIGMESTGNSLWFERLMEQLGHELWIGDASQIRASYIRRQKTDKRDAGHILQLLIDRRFPRIWVPSQLERDQRQLLLHRYRLVQMRTRVKTELQHLAMNQGLQRKYHLWSARGRADLEKLPLECWTARRRADLLQVLDMLEAQVADLDEAVGKVAWANPQAQLLMTQPGVGPITALAFVVTMGDVARFKRGKQVASYLGLIPSERSSGSKRRLGAISKQGNVFLRTMLVEAAQSAVRYDEEFKKEYAHRCHQKPKGVAKVAAARKLAVRLYWMLRNQTPHCKAVRNEGSPSHSLVG

SEQ ID NO: 177253 - protein, 362 aa, unidentified
MLYLAIDQHSKQLTVNLRDEAGDVRLRRQVSIKRPGMEEFGQQLAAYHEPYVAIVEVCGFNDWLLQWLPQHGCQEIVLVQPDRRSKKKTDHRDANALGELLWINRQRLLGGQRVQGLRRVQISSARDQADRQLTALRHVAACRKTRCTNRIHHLLRRHNLEQDCPTKGMHTIKARKWLRQLSLPVLDRLELNQQLDQWDLCLLQLTDLDAQIAERHAQSRSAQRLTTVMGFGAYSALALAARIGDIGRFKRPRSLANYFGLTPGCRNSGDVKQRLGSITKEGSALARFLLGQMVVHLLRRDAWMRAWYLRIKKRRGSKIARVAVMRRMTTIIWHMLTHDEPYQPGGGGRTRARRQAQRVQPA

SEQ ID NO: 177254 - protein, 372 aa, unidentified
MKVRVGIDIACRAAHQAACADETGRIVWSGHRFHTRAEELEVLWARLPGDATEVMIVMEPTRNAWVPLAAWFRRRGATVVMVPSEQSADLRAYYAKHAKSDRLDAELLARLPLLHPDGLHPETANGPGDPLKRAVKLRSGLVRRRSACMQRLDALLEILGPDWVAALGSDMTQTTFKFLAAWANPHQVKRLGRARLARWFQRQTRKAWGERRADAVVSAAEATLALWSPTGLDYEALAADIAVEASLALELARQIAGIDERIFDLYCDADPDQILLSVPGVGKILAAQIRGRLGDPHRFTSLAAARAFSGLIPRQNSSGLTETTGGPTKQGDACLREALFLAADHARKTDPTLAARYQRLMCDTGRHHTSAL

SEQ ID NO: 177255 - protein, 356 aa, unidentified
MLNKKIIVNRSKNNSSLTETESYDQYIALDWSEKNMAIARMGKKDLEPKIIDVPPDLKGLKKYLSELTGKKILTIEETTTSQWLYVELHDYVDKIFICDPYRNRLLTDGPKTDRIDAGKLCKLLKNGMMKEVYHSTDEMYELRKLVSYYDDEVRAGVRLLNQKSALYRAENKSWKKKEELEESHVNKFILAQLDEKIESYKEKHQRYEKEFERISKKNKILRSLKSIPGLGPISSVTILSIVIDGTRFKSSNHYLSYCGLVKHEKLSGGRSYGRRIPRYSRRLKGVYVSAAVRAASTENPLREYYEYLLNDKKLPIYNAKNALARYIAKISLSIIKSGEKYKPYKWRENKKEKEVA

SEQ ID NO: 177256 - protein, 407 aa, unidentified
MSHHSEHVIIGVDPHKLSATIEVVDQHEQLLGSGRFTTDRAGYAAMRTYTKAWPERVWAVEGSNGAGRPLAQRLLEDGEQVIDVPAKLAARVRLFDTGHNRKTDAHDAHAVAAVAVRTKTLRVLRLDRELEALRMLTDRREALTRRRVQTVDRLQALLAELLPGQAKRDLTTGQAKAMLASVRPRDIAGKTRRRIAAEELAELIAVEAKIKKATAELKAIVLARGSRLMDLHGVGPVVAARTLADVGDVTRFADRSRFASWTGTAPLDASSGEQNRHRLSRAGNRRMNHMIHIAAMSQIRLDTDGRAYYRRKRAEGKKPLEAIRCLKRRISDAIYRPLLEDAQRAVAEDVGTGPGGHCRASQESSAVDLPLHIDTSDQPLPGPANQTLRPPPPPRKHSPAGALKTTH

SEQ ID NO: 177257 - protein, 321 aa, unidentified
METWVGIDISKDSFDAAWLLDGKKNHLKLENNIKGFKRLLTEVPTESHFAMEATGEYHLNCARYLSSCGKPVAVLNPFAVKMHMQSDLRRCKNDKADSYSIAKFAAEKNTDCWVCPTDDEIKLKHLDAVVDGLQKQIRQSKNMLHSLTQVSLRDDLAVSIIKKTISGLESLMERARNRLLEMIEANKKEDIALACSIPGIGLETSLKFFTHVGNINRFDSSRSLISWIGLTPRNAQSGTSIHKNGGISRMGCTRLRSQFYMCAVVAIKYNPDCRVFYNRLKELGKPSKVALIAVANKLIRQLYAVLTKKEAYVPNFCTKTS

SEQ ID NO: 177258 - protein, 418 aa, unidentified
MAMKIVRFNCCGMDVHKNLVVATIGITDRKTNVTEYFQRSFSTLNSDLYRLKDWLRSHHCSDVCMESTGKYWIPIFNILEDEINVRLTHPKYVKAIKGKKTDKKDSKWICDLFKHDLIKFSFIPPKEIRELREIARYRYKLVCMRSSERNRYQNCMTVSNVGLASVVSDPFGKTASNIMKEVMKSNVIDDDKILKLVHKNCKNKDKILDSLHGYRIESDQRFKMEKSLDHMEYLDQLIDSCEVELIKRAYPFRRSFQHITQIKGISALSAILIISEIGIDMSQFGSDKQLVSWAGLSPANNESAGKKKSVRISKAGQYLKPLLVQCALSAIKDKTSYFGRKYSNIKKRRGHKKAIIAIARMMLVSIYHMILTGEEFQPCDYESFMDPKPNANPSLTVEKALNFLKQSGIDISSIPINL

SEQ ID NO: 177259 - protein, 324 aa, unidentified
MPVIGIDVSKNKLHCALLSEAGKLKSKVFSNFPEGHILLLQWAGRLGQCQAVQLHAVVEATGVYHEAVALSLHRAGVKVSILNPAQVKHFAQGLAVKSKTDASDPVVLARYGALVKPPPWEPPPPEITELKALITRLEAIEGNMRRELNRIEKTTITGVPTAVRESLEKSVSFLKEEKVRLEKTIREHIDQHPTLKQDRHLLESIPAVGPKTAWRMLTLFRARTFTRAPQAAAYVGLVPIEHQSGTSVLKRPRLSKAGDARLRAALYMAAVVATQYNPDIRRLYQRLIARGKTKMSALGAAMRKLVHICFGVLKHQRPYQPQSI

SEQ ID NO: 177260 - protein, 482 aa, unidentified
MKKRNIYQNQSQELLSLFETAGSSAKVMCVPMDYAKNDHLVMFCNGHGDILRKPFSVKNSPEGLEYLVDQVTRSCRRRGIKKDHVFFGGEDANSFAENFVSTLRFKGWLIAGVNARDAKKQRTNLQASTDRIDLMGIATMLLNCRANCCPAQSGIYRNLRTLVRHRRKLVVMLTEVKNRVHGIVDLLFPGFLNENKSGIVPFTQSSLYLMEDRFSPKQVRRRRRQTLIEILRRFGTSKAQETALKLQQYAAQVLHTPVEYVDTLQLSLAQHVKHIRCLQEGVAQLEKEMAVNLAQTQGAFLTSVRGIGIVLAAGVTAEIGDPNEQKPLNNLVSYSGIIPRVKQTGGPDGKTYTYSVAKRCNRILKDYVVKSSLHLGLHGPEDLMIDYKRRDASGQHADFGIGRRYLRMAMSLMRTSQIYIPPRLRKTESTLEERAGYYLMSWPYLREKWKKYGALEAAFAKNRPLGLWRRIVQELYDIKLKL

SEQ ID NO: 177261 - protein, 438 aa, unidentified
MKVMHERVAGIGVHKKMIKVAIRSPGDKPWTRKAQVLTFRTFYGVLREMARELRRRGVTHVAMEASGIYTDPVYYALLEEDFTEVLVVSPAHAKALKGHKTDAKDCARLAELLGCGLLQGSYIPAPELKEVRDLTRYRIKKVQARTSEIQRLDKTLESAGIKLGSVASGITGKGPVAMIEALIDGERRGKVMADLARGRARAAGKLADLSMALEGRFTGHHALVCRLILDQIQGLDAAAGDLDQRIAGLAAAWQREIDLLKTIPGFGDVVAWTWIAEIGPAPHQWSGSQEKPASWVSLVPGNYISAGKRKHSRTGDAGTYIKPVLVQAAWAAIRARGRLQARCNRLVRRFGGPKNPAAKKKAIVAIAHTLLKIAYKVLKSGTPYQDLGEDFYTRRETPAQRQAWLERQIQKLHPGCTVTITIGPPPGHAPEAALTAGA

SEQ ID NO: 177262 - protein, 412 aa, unidentified
MSLALPEALFFTGIDWAAATHAVCVINAAGEIIAEFTIAHSADGITQLIRRLARYGDPAAIPIAIERPNGRLVDLLLEAGHPVVPVSPNAIKTWREGEVLSGAKSDAGDAAVIAEYLRLRRHRLQVAVPYSGQTQALRTVVRTRSDVVDMRVAATNQLSALLEASWPGAQAIFADVESPISLAFLTRYPTPASAARLGEKRIAAFCATHGYSGRRPAAELLARLRAAPAGTADPALTTALGAAVLAVVAVLRALNNAVKDLDRSAATHLGEHPDGEIFTSLPRSGQINAAQMLAEWGDCRQAYDGPDSVAALAGCTPVTKESGKHRAVHFRWACNKRFRQAMTTFADNSRHASPWAAQIYDSARASGKDHPHAIRILARAWIRVIWPCWLNHTPYDPARHGAAAALIKPGAA

SEQ ID NO: 177263 - protein, 409 aa, unidentified
MLFVGDDWAEDHHDVELVDDQGKVLAKKRFPEGLAGVTRLHALIAQHLPDPGVDPDPALEVLVGIETERGPWVASLVAAGYTVYALNPRSAARYRERHTISGAKSDAADAHALAKIVRLDRAGRRPLAGDSALVEGIKLAARAHQGLVWERTRHVLRLRSALREFYPAALQAFPDLDEPDALELLAKAPDPDTAAALTRRTVVAAFTKAHRRNPQARADALMGVLRAKELRQPAPVQAAFAAIVTAQVAVITTLNEQIEILGQVVGEHFGRHPAAELITSLPGLGVILGARLLGEFGDDPRRYVDAKARKSYAGTAPITKASGKKKAVLSRHVRNKHLADAAQQWAFSSMRGSPGAKAYYQQIRARSTSHQAALRQLANRWIGILHGCLKTGALYDEDTAWAHIHQRAA

SEQ ID NO: 177264 - protein, 345 aa, unidentified
MPIVGGLDIHRKQLTFDYLDTETGEVKRGQVAPADRAHLRAWLARFAGRDGVAFALEGCTGWRYVAEELAAAGVAAHVAEPADTAFARGRKRHAKTDKTDSRHLRQLLAEGRLPECWIPPGHILECRALLELYHDLRAEHTAWVQRIHAVFFHQGAPALGDGALRTGKDLAALRAAAAAHLSPVGQLQVAVSLEVLEALEARMHQVRHQMLAAARHLTGAKVLAARLYGVGPVTALAMTCWLAGKDRFSSSRKAVRFAGLDVTVWSSDRKGPPGRLSRQGPPVLRWAVYEAGKTHARSSAPDYRYYAQVKDRCNGKRAALSEARKILRQAHHILAELGDDALAAA

SEQ ID NO: 177265 - protein, 409 aa, unidentified
MEQMIQRCAGLDVHKAVVVATVRVPDGQGGRTGHTETFSTTTTSLLALHDWLQAYGVTHIAMESTGVYWKPVYYALEDDFTLLLVNARHVKNVPGRKTDVKDSEWLAQLLECGLLRASFVPPPPIRDLRDLTRYRRKQIDERGREVQRLHQTLEDAGIKLATVATDVMGVSGRAMIDALIAGTTDPATLADLARGRLRRKLPALREALRGRFRPHHAFLVGQILAKIDFLDEAMTDLTHAIDALLVPFETTLAHLDTIPGINRITATTIIAETGGDMSRFPSAGNLCSWGGVCPGQNDSAGKRRPARRRKGNPYLCHALVESALAVTRAKNTALQARYRRIVRHAGHKKAAMAVAHQILEIAYYVQRDNVDYVELGPDYFDRRRREHAVQRHVEQLKALGYRVTIEEAA

SEQ ID NO: 177266 - protein, 312 aa, unidentified
MDKIPVFVGIDVAKHRLEVHLRPSGESFTIDYSEEEVAALVERLLPLEPTLIVLEATGGLEVRLAAALAAAALPVAVVNPRQVRSFARAMGRLAKTDRLDAEAIACFAEAVRPPVRPLPDETTRHLGALVARRRQLLEMLVAERNRRQAADRALHERIDAHLRWLEEALAEIEQDLDKVVRESSIWRAKEELLRSVPGVGPVGARTLLAQLPELGSLTRRQVAALVGVAPFNRDSGKMRGRRTIWAGRAALRACLYMAAVAAARGSNPVIASFYRRLRLAGKPAKLALTACMRKLVVTLNAMLRTGTAWKQA

SEQ ID NO: 177267 - protein, 340 aa, unidentified
MTPIRIGLDIAKNVFQAHGVDANGTVVIRKRLRRPEILRFFASLPPCLIGIEACSASHHWARELIRLGHDVRLMPGRYVKPYVHRGKSDALDAEAICEAVSRPTMRFATIKTLEQQAVLTLHRSREIFVKQQTMLANLIRGCLGEFGIVAPVGIRRVAELIAVIKDDADPRILPEARIAMRAVADQLCDLQKRIKQIEQAIRAWHRGNEASRRLATIPGVGSMTASAIVATVANATEFKSARHFAAFLGLTPKQYSTGGRQRLGRISKQGDVYIRRLLVLGGTCLVRYARGAGGSLWAKQLLARRPTRIVTVALANKAARVVWALLTRGDVYRAPQPQAA

SEQ ID NO: 177268 - protein, 340 aa, unidentified
MDITTLGIDLAKSVFQLHGVDAQGVIVLQKKLRRGAVVKFLSKLEPCLIGIEACATSHYWAREIAALGHDVKMIPPAYVKPYVKRQKNDAADAEAICEAVTRPNMRFVPVKTEEQQAVLVLHRSRDLLMRQRTMILNAIRSHCAEFGIIAAQGAQKVSELVTKLRNDDTLGVPEVGVSALLSLASQLDCLEQEVRKIEHQLLAWHRQNAASQRLETIPGIGLITATALAASVPDPAVFKSGRQFAAYLGLVPRQNSSGGKDRLGRISKMGNGYLRRLLVVGATSVTRRAPTIDTRTGTWVRSLLEHKPTRVVTVAIANKTARTAWALLSKGESYKAVPAI

SEQ ID NO: 177269 - protein, 345 aa, unidentified
MPIVGGLDIHRKQLTFDYLDTVTGEVRRGQIAPADRAHLRAWLARFAGRDDVAFALEGCTGWRYVAEELAAAGVTAHVAEPADTAFARGRKRHAKTDKTDSRHLRVLLEQGRLPQCWIPPAQILECRALLEAYHDLRREHTAWIERIHAVFFHQGAPRLGEGALRTDRGLAALREAAAVHLSPAGQLQVATALDMLAAIDARMDTLRGQLLHAARHLAGARALQAQLYGVGPLAGLAMTCWLGGAGRFSSSRKAVRFAGLDVTVYSSDGKRSPGHLSRPGPEILRWVAYEAGKTHARASAPGHDYYAAVKDRQGGKIAALAQARKLIRQACHILTELGDDALTAA

SEQ ID NO: 177270 - protein, 418 aa, unidentified
MSRPFRLLVGIDWATQAHQVCIINQEREVVRELSVEATGAGLAKFADLLLDLSDGDISQTAIAIEVPRGPVVELLVERGFAVFAINPKQLDRFRDRHTVAGAKDDRRDALVLADSLRTDQHCFRRVKLDASWVIQLRELSRMDHELSVEITRLTNRLRDVLQRYYPQALSLSSDLATPWLWELLHRAPTPQQGRRLRSSTITRLLRTHRIRRLVASDVLVRLRIEPLVVAPGTVEAASNRVLLLLPRLQLLHSQRKDCAQRIDRLLELPEPSSDENRGEHRDVEILRSLPGIGRLVSAAMLSEAHEALNNGDYHTLRAQSGVAPVTRRSGKSSSVSMRYACNERLRYAMFHWARASVLRDPHCKSYYASLRGRGHSHGRALRAVGDRSLRVLMAMLKHRTLYDPSKLRRVPRGASLSP

SEQ ID NO: 177271 - protein, 451 aa, unidentified
MANQKTERTRKKKTRPTPGRTNPDAAGIDLGATVHYVAVPADRDEKPVRHYGTLTEDLTELADWLKQCRITTVAMEATGVYWIPLFQILEDRGFEVCLVNARHVKNVPGRKSDVQDCQWLRYLHSVGLLNASFRPPADICAVRSLMRHRESLMRTACQHLLRVQKSLDQMNVQLHHAVTDITGYTGLAILDAIVAGERDPEALASLRDYRCKKSEAEIAKALRGDWREEHLFTMRQSLEAWRFHQNLMADCDQQIASRMDALEDRGAEATPMTVKKGIKPHEEPMRKQLCEKFGVDLTAVEGVSIQTCLTFLSEVGTDVDKFASAEHFASWMGLCPDNRITGGRTHAAHTRKVQNRLANALRMAAQSLHRSKAGLGDWFRRLKSKLGTKAAVTAAAHKLARILWAMVKHRCPYEPTRLGNPELARARKERYLRRQAEQLGFALTPVGGEVS

SEQ ID NO: 177272 - protein, 412 aa, unidentified
MTVFCGIDWAENHHDVALVDDTGHLLAKRRITDDAAGYQLLLDLLAEHGDTVKEPIPVAIETGRGLLVAALNTGTRPIYAINPLAAARYRDRHSVSRKKSDPGDALVLANILRTDRHAHRQLPADTDLARAIAVLARAQQDAVWARQQLVNQVRSLLREFFPAALDAFLGKQHGLARPEARAVLTAAPTPARAARLTPAQLRAALKRAGRTRGIDTEADRLRTVFRTDYAHQPQAIEDAMGHQLLALIRQLDAACTAAEDLATAVEEHFRRHPDAEILLSFPGLGVQLAARVLAEIGDDRSRFADARALKAYAGSAPITRASGKKRYVGRRFIKNDRLISAGFLWAFSSLRASTGADAHYRRRRERGDWHAQAQRHLFNRMIGQLYHCLQTRQLFDEQHAFTSSAADLAVAA

SEQ ID NO: 177273 - protein, 392 aa, unidentified
MYIIGIDIGKNHHEASIVSPEGKQIGHSLRFATTHKGADSLMSFIFKNIGNSPCVFGMEATGHYWYPIYSFLKAKGYTIYVINPIQSDSLRKMYIRQTKNDSIDSFLIAEVIRFGQFGTTSMADENILAMRQLCRYRDSVFSSRTEIKLRIGTIMEQIFPEYEKQFSSLWVSTSMGILENHLTPENIQNAPIDELFEIIKDKSHNKLTMKKAVSIKEAAADTFGIKIAQDAFAFQLKHLIDRLNFLDEQMEALNHEILSYYEKFDCYLHTIPGIGMIAAATILAEIGDINRFKSSSALVAFAGIDPTVRQSGEFNSIHNHMSKRGSPYLRHAIFLAATTCSFHNSPLNAYYKKKREQGKHHLTATGAVARKLTTVIYAVLRDGKPYEPKKFC

SEQ ID NO: 177274 - protein, 460 aa, unidentified
MNPKRSKSRNGGKMPMMHPNAAAIDVGATMHMAAVRADRAPEPVRSFGTFTADLHRLVDWFTECGVETVVMESTSVYWIPIFELLDARGFTVFLVNARDAKHVPGRKTDVSDAQWLQRLHSFGLLRASFRPKGQIAELRAYVRQRERLLEYAASHIQHMQKALTEMNLQLHHVVADITGATGLRIIRAILAGERDTEALACLRHYSCHSSAETIAKALTGSYRAEHLFALEQALALYDAYHEKASACDVRIEAVLKELSIHRGHGHGSAPRASRRRNRTDQANALAFDVREALFALLGKDITTIDGLGPYLSLKLIAECGDDLSSWPSAKHFTSWLGLAPSNKVSGGKMLSSRTRRSGGRAAALLRLAAVTVGRTDTALGAFYRRLSARIGKAKAVTATARKIAVLFYNAVRYGMDYVDPGASSYETRYRTRVVNNLHRRAKAFGFVLQPLEPNVGAAVS

SEQ ID NO: 177275 - protein, 378 aa, unidentified
MPGRVRVRACAAQAERLLAWPQRTWAVEGAGGLGHLLAQQLVAAGERVLDVQPKLAARVRLLAAGDVNKNDPNDARSVAVAALRPAACLPVRADDHAAVLKVWAKRYRDLSRARNQVVCRMHAVLCQLIPGGVSTRITAGQAARILDQAEPRGAAGMARWVLAAQLLTGLRRIDVQRRDVQRKLAVAVRASGTTVTGIFGVGPAVAAAVIGDAGDISRFASRDHFAAYNGTAPVEVSSGGRVIYRLSLRGNRRMNHAIHMAAVTQIRYRHSKGRAYYDKKIAEGKTSKEALRALKRQVSDAVYQRMKADGRRAAAGPGGHPGNGSEASVAGLHPADRLFGQATPGPTPTLRPRPGRSKAAPAGRSRRTRPAVPAHTSA

SEQ ID NO: 177276 - protein, 353 aa, unidentified
MMVFGVDPHKGSHTAAGADELGRETGGKTVKADRGGCRELIAWARALAPEGRRWAVEDVRHVASGLVRELLAAGEEVVFVPTRMMAAARAGGRGRGKSDPVDALANARAALREQEFLPAARLDARVLEVRRLADHRDDLVAERTRTVNRLRWLVHDLDPAIAPPPRSLGGKAARARLAAALAALPASAGKRIAQWQLEAVTRLSAEVTALEAELRTLVEDLCPALLGICGIAVITAARILGETGDVRRFRSPAAYARHNGTAPIPASSGTGTSGPQRLNRGGNRQVNAALHRAALVQARCHPGAIALLERRAGQVRETRKAALRVLKRHLSDVIYRALNADAWRLDQPAQQAA

SEQ ID NO: 177277 - protein, 408 aa, unidentified
MNTLYVGIDVSSKSNVVYLMLPNGDKHSNFSVANSHEGSTLLVKKIYSALTSHSLDTVLIGLEATSVYGDNLVYFLREDATLAPFNRKIHVLNPKQVKKFHDTYNDLPKNDYVDSFVIADCLRFGRINKEVYMGDYRYKALQNLTRARFFAVQNLVKEKQRFMNVLFKKYSTMTQEKVFSDAFSTTALAVYDEFESAEALANMDLHELTDFIIEKGKNRFPDPDAVAKAIQKAARSSYRLPKTVNDSVNQVLSISITSMKALESQIKEFDKAIIALMELLPNVLISIPGIGPVYSAGIMAEIGDINRFDNQASLAKYAGLAWKQHQSGGFEAEVTRLIPSGNRFLKYYLCEAAFSLVRCDKEYSDFYHLKYKEVNRYQHKRVFALTARKFVRLVFRLLKDNRLYTSAE

SEQ ID NO: 177278 - protein, 345 aa, unidentified
MKHFAGLDVSVKETSVCIVDETGAVCREMKLPSHPEDLARFLKNPAWRLVRIGLEAGPLSQWLFSGLAEAGLPTICIETRHTKAFLKAQVNKTDRNDARGIAQMMRVNLFRPVHVKTRTSQQRRALLTARKLLQAKAIAIENDIRGLLRNFGLKVGVVGTIRFDARIRELVDGIPDLAEIMAPLLAARQKLREEFSRLHWKVLEIARDDIVCNRLMTIPGVGPVTSLAFTSTIDFPARFRNSRAVGPALGLTPILNQSGESHRVGRISLRGDAMMRVLLYEASQVMLTRVKKWSWLKAWAMNVAKRSGRRKAIVALARRLAVIMHRIWSDGTEFRWTRETTAVAI

SEQ ID NO: 177279 - protein, 379 aa, unidentified
MSSKTTIYVAIELSASSWLVAARLPGIQKVPVYRLESGDTMGLLKLIADLRSQVATKLGVTADLACCFEAGRDGFWLHRLLTANGITAYVLEPTSILVNRRARRAKTDRLDAEGMLRVLANWLDGDRQVCSMVAVPTPEEEDAKRPHREREHLVQDKQRIENRIEALLFTQGIRGRPSLRSWTRDVAELQTGDGRALQPGLLAELDRLRRRLVFVLELIRELETDRVRALEEAKADEAIAGKIVALQCIRGIGDNFAAVLTHEVFYRSFDNRHQLASYVGITPMPYQSGGMDRDRSISRAGNPRARTTMIQLAWLWLRYQPDSALAIWFRERVGTLQGRTRRISIVAMARKLLIALWRYVETGVVPEGVALRANKASVA

SEQ ID NO: 177280 - protein, 454 aa, unidentified
MPPVPAALPMPNAADGGADFDWYVGIDCGGATHQVCVLDAAGRRVAERAVAHSGAALAAFGAWLRELAGPSLARVAVGLETPHGGPVALCLEAGAAVFAVNPKQLERFRERRSAAGAKDDRRDAYVAAAALRTDRAAFHRVRLDDAPLVAVRELSRMGEELRAEAARLRNQLRAQLERYFPQVLALVPAADEPWLWALLDEAPTPAAAARVTEKRLTRLLREHRIRRVSAAEVRAALQAPALPAVPGLVDAVSGHVALLLPRLELVTRQVRTCAARLEAALDALAAPAAPAGPDDAGPPAGAAPNASPAPPASPGRGPDLGTVVRLLRSLPGVGVGVAGVLLAEVPAALVAADYQALRTHGGAAPVTKQSGKQRLVVMRYACNHALRTALFHWARVSIQHDAGARRYYAALRARGHSHARTLRSVADRWLRILTAMLAAGTPYDPARFATAVTP

SEQ ID NO: 177281 - protein, 509 aa, unidentified
MRRLLERCAALDVHRAAVTACARILGEDGELEELVVEFRTMAADLLALRDWLKELGVTHVTMEATGVYWKPVYYALEDDFELLLVNAQHVKNVPGRKTDTKDAQWLCQLLECGLLRASFVPPKPIRELRDLTRYRKALVKERQQEANRLHKVLEDAGIKLSCVATDVLGVSGRQMLEALIGGTRDPEVLAELARGRLRAKLPALKQALVGNFKPHHALIVSHILAHLDYLDETIAVLSEEVEHRLAPFAHKAENLCTIHGVAQRTSHVILAELGPDMSRFATDRHAASWACICPGNDESAGKRRSGKTRKGNPYLRAALIEAANGAIRTKNTYLRAQYEQIKRRQGHKKAIVAVAHSILIAAYHILKDDVPYQDLGGDYLARRADPERITRRLVAQLERLGHTVTLQTSKATEVPAAPATSSSSADDQKVATSTESAASDGQITTDVKSQLASESLSNGVKIGVTTTHGVVALTGTLTSQNAIDHVKDVAGKVKDVKSVDTSALVLASL

SEQ ID NO: 177282 - protein, 338 aa, unidentified
MKAYAGIDLHSSNNYLGVIDSKDKRLFGKRLPNCIDTITEALKPFRKNLEGVVVESTYNWYWLVDGLQAAGYKIHLANPSAMRQYEGLKHTDDKSDSFWLAHMLRLGILPEGYIYPKQQRSVRDLLRRRLLFVRQRATHMLSLKSMITRNLGITVSTNEIKKMKEQDVDPLFDDPYLALTAKSTIATITFLKTKIRDIEKAVLSHLSLKPEFEILTSMPGIGTILALTIMLEVENINRFAKAGNYASYSRCVKAERLSDEKKKGQGNRKNGNKYLAWAYVEAAHFIVRLCPEANRFYQQKKAKVNGALATKALANKLARASYYMLRDQAVFDKDKLFR

SEQ ID NO: 177283 - protein, 328 aa, unidentified
MQQKSIKSKSEYTETATHGTKYLGVDISSEHLDVYLYGKYKRFNNNHEGLKKLKALIDRQNEPVLVAYESTGWLSRILAMQLLSMGISQVCLNPSRVRNYARAIGVQAKTDKKDCEMIARFAEQTHAQANVTESPVLMRLKELQSSLNFFKRRMVHAKSSLSAQRDKFLIREIQRAITHDEKQIARIEKEMHKLIKANQEMQERYDYYLSLQGIGPNTALALISQLPELGQMNRRQVASLVGLAPYNWDSGKMTGKRMTRMGRKGIKSLLYLSVTSLLRLHDHPITKMYERLKLKGKKTIVAMVACMRKLLIWLNAETKKWLSEKNYA

SEQ ID NO: 177284 - protein, 406 aa, unidentified
MSFDRPGEETAAIRTHFGAIFVSLELSRKTWLITSLSPGGREKMSRHSVPAGDVAGLLARFAELRGKALARTGTSYPIIVIQEAGLDGFWIDRVLRREGIESHVVDAASIAVSRRRRRAKTDKIDGEALARALLAFKRGEPRVCSMAPAPTPEEEDRRRICRERQALIAERVRHVNPRRMRSIRPVIKGLLFSQGVGDYEPLRRDRRRKLASLRGGDGRALGPNLKAQIGRELDRLELLLEQIRAVEAARDALLAPAIEAEAASPPTPSSARMLLRLRSIGPEIAAVLWTEGLCRSFSNRRQVAGYAGLAPTPWRSGSIDCEQGVSKAGNPRLRTTMIQLAWLWLRHQPQSALARWRRQRLAGAKKGARKTLIVALDRKLLVALWKYVAAGTVIEGAVMKGVAANG

SEQ ID NO: 177285 - protein, 340 aa, unidentified
MNATTYGLDVAKRVFQLYWVDANTGEIVNRRFGRNELIGFLGQRPAGRVALEACGSGHWWARKIQALGHEVVLLHAKFIRPFVQTNKTDAADARAIWTAVQQPGMRTVAAKTEEQQAMLALHRMRALLVKFRTMQVNQLRGLLYEFGVTFRAGRLAGLAEMRARMAELEEAVPAMLFDGLQDQLQRIDGLEQDIDQLEKRIGAWHKQEAACRAIAEVPGIGRLTATALVAMIGDARTFKSGREFASFLGLVPRQTGTGGKTRLGSISKRGDPYLRTLLIHGARSVMHHAKVPTPWLTEIQARRPANVAAVALAHKMARTAWAILAHGRAYQKDYVSVKPA

SEQ ID NO: 177286 - protein, 374 aa, unidentified
MKNVCGLDVHKDSIFMCIIKENGDKIEEKFGVLTPELDRLRDLLVYHSVGDIAMESTSIYWIPIWRVLYSDFNIKLVNPYFIKQLPGRKSDVKDAHWIATVLQKELIKGSFIPEPIIQELRLYDRRIFYLNRSLQRAEQNIDLILQRCNIRLSNYVSDIGGKSMQKVIDAIIEGTTDPNILLLLVHKRTRNKHGDEAIMAALTGVISKTDCMMLKLSREETCMYERQIEECYVEMNSICQTHFSQEIELLQTIPGIKKDSAMRIVAEIGVDMKAFITASAMVGWAGLKPRNEESAGKIKGRKILHGNKYLRILLVQCAWAACRTKGSRFFYKYQTLSKRMNHNKALLANARKILVIIWNILSKKQPFTTTYIAA

SEQ ID NO: 177287 - protein, 408 aa, unidentified
MNPLYVGIDVSSKNNVIYLMLPNGDKHSSFSLANSHDGSTQLVKRIFTAMTSNNIDSVLIGLEATSVYGDNLVYFLKEDTTLASFDRKIHVLNPKQVNKFKESYNDLPKNDYVDAFVIADCLRFGRINKEVYMDDYRYKALQNLTRARYFAVTNLTKEKQRFINVLFKKYSTMTQEKVFSDTFSTTALAVYEKFESAETLAKMDLQELTAFIMEKGKNRFPDPDAVAKALQKAARSSYRLPKTVNDSVNQVLAISITSIRALESQIKAFDKAITKQMELLPNVLISIPGIGPVLSAGIMAEIGDINRFQNQAALAKYAGLAWQQHQSGDFEAQTTRMIHSGNRFLKYYLCEAAFSLVRCDKEYSRFYHIKYKEVNRFQHKRALALTARKFVRLVFALLKDNRLYRPAE

SEQ ID NO: 177288 - protein, 351 aa, unidentified
MSLVMLGVDPHKQSHTATALVTGTHQQLATLRVSASPSGYRQLLGWARQFPQRRWAVENARGLGCHLTQWLLARGETVQDVRTTATARVRELSRGRGRKTDALDAAAAAGIAALQGDAEQLQPENATVVLAVLEERRSNLVGQRTRSVNQLHAVLRELIPGGAPRKLRADRAAALLRGVRALTAADRARKQVAWDLVAEVRGLDRRLAMIGKRVQDTVTALGSRLPETVGVGPIIAGRLLGRTGRASRFPTAAHFASYTGAAPIEVASGERARHRLSRAGDRQLNHALHIIALVQVRSPGCAGYDYFRRKLAEGKTTREAMRCLKRRIADHVWRVMLSDEQARHHPEPQAI

SEQ ID NO: 177289 - protein, 424 aa, unidentified
MKVTYQTCCGVDVHKSFLVATIVKTNGGIEPSYQKKRFSTFNNSILEFKQWLLDNDCHDVCMESTGKYWVPAFNLLEDEINVVIANPKWVKAVKGNKDDTKDSKWIGDLFRLGLVKGSYIPCKKVRILREYTRYRYKLVSCRSSEKNRYQNALTVCNVALDSVVSDIFGKSSSSIIDYLLEQSGTSINHEEIASKLLRSLKSKEDAVIESIEGYQMTDAQKYRMRLVRAHMDYITAEINDVDKMIEKMISSNPDLENAVQFLCTIPGVKRDSAITIISEIGTDMSQFSSSKRLCCWAGLTPGSNESAGKKKSVRITRAGVYLKPALVQCAHAAVKSDKSPYYKKKYESLVKRRGKKRAIIAIARMILTAIYQMLSTGEQWNPCDLYKIDMPVALVEKQKAKAIKQAKKLLQREGLLPPDESLAS

SEQ ID NO: 177290 - protein, 368 aa, unidentified
MKKNITARQSPQRGKRVPLPITIGLDLGDKTSRCCELEGDAMRESSLATTRKAMLQKFSSMRRCRIAIEVGAHSRWVSRLLSELGHEVYVANARQVRLISESSRKDDRLDAQTLARLARVDPLLLRPIRHRSEEAQQELNVIRVRAGLVDARTKLVNTARGMTKASGERLPKCDADQMGVERSENLPAELGETLKPLLEAVETLTEKIQQCDEKIEQIARDKYPETELLKQVSGVGTLIALTFVLTLEDKQRFEKSRDVGCYVGLRPKRSESGARQPQLGISKEGDMYLRKLLVQGAHGILRRRGPDTDLKRWGLKLAERGGKNAKKRAIVAVARKLGILLHRLWVTAEVYEPLRTSLARQRLRRAAA

SEQ ID NO: 177291 - protein, 423 aa, unidentified
MKLTYPICCGVDVHKTFLVATVITSSYEAPKYKQKRFSIHYNQLLLFRQWLIDNNCRDICMESTGKYWIPVWNVLEDSFHVVIANPKWVSAVKGNKDDKKDSKWIGDLFRMGLVPSSYIPEKDIRILREFTRYRSKLVSMRSSEKNRFQNAFTVCNLTLDAVVSDMFGKSATDIENYLLSTDTFDTDRCISLLRGSLKKKSSDVIEAVSGFNMTAEQKERVRIIQGHFADIDRRIAQIDGVIANLTVGYEGAIALLCTVPGIDRRLAITIISEIGTDMSQFGSSKRLCRWAGLTPGRNESAGKKKSVKISRAGVYLKPALVEAAHAAVKSTEKQPYFRNKYERIMKRRGKKRAIIAVARMMLTAIFAMFKTGEVFNPCDLQKFDMPEELKKKQTVSQAKDAIKLLVSLGLISEGSISLDSLAS

SEQ ID NO: 177292 - protein, 361 aa, unidentified
MTGMVTYVGLDVHARSTHAAAIDVSTGELLRARFGPGVEEPVAWLAGLPGPVRACYEAGPTGFGLYRAASAAGVSVEVIAPGKTPRGPSDRVKTDRKDAELLARLLLAGSLTTVVVPPVEVEAARELMRAHDACRRDLMTARHRVSKMLLRHGRVYPESSTWTVAHRRWLASQQFQETASELVFADLIASVDGLSARKAAIAERLSRLAQDEAWWPTVARLRCFRGVDTLTAFALHLELGGDWQRFARANALSAWLGLIPSLHQSGESSHQGSITKTGSGFARRLLVESAWHYGRPPRIGVTLKNRQQGQPEHILQIANRAQHRLHRVYHRMRGRGKPHNVTVVACARELSCFLWAAATAD

SEQ ID NO: 177293 - protein, 418 aa, unidentified
MDVIVERCAGLDVHRDEVVATVRVPGQGRRRWDQQTRTFRSTLAGLAELAGWLAEVGVTLVGMEATGVYWKTVFQALEERFECWLLNAHHMRNVPGRKTDVKDSEWICQLVQHGLVRPSFVPPPEIRRLRDLTRLRRAQTNERGRSIQRLEKVLQDAGIKLSSVASHTYSKSARAMLEALLSGVTDPGQLAELSKSRMRAKIPQLREALQSRFTIEHHGVMVAQLLAHIDTLDAALENLSQRIEFVLAPHQRIVELLCTIPGVQVHAAQVLIAECGLDMTVFPTVGHFASWAGACPGHHQSAGRRKSGRTRPGPSWLTAQLTECARAAVRTKGTYLAAHFAQLRGRRGEPKAIGAIRHDLLVAYYHIVRDQVPYRDLGPDWQRKRYSPEHRARRLQRQLEALGYTVTLEQTEPSEQAA

SEQ ID NO: 177294 - protein, 422 aa, unidentified
MLGVGIDWAEEFHDVALGTPEKGVVEQFRIKHGPVGVDGLIRRCLALEPDPAEVRVVLETRHGLLVEALLDAGFTLIPINPDLVARRRGPARKKDDSEDARICCLIALDRHVALKRLVPHGEVAGELRALARDDERAARDQRRLLNRLRADLQVTFPAALTLAGDDLGAPTMLRLLQRWPTQAELATASRDELVAFARAGSHGWPARFADSVVAALAAPTLPTRDYLVRAKAATIRLAAVQLLALHEARRGWERRMAELLLGGPRTGPDRSVKEADPGQAFPGGEIYLSMPGLGDRLAARVAGEIGERFDQFDSPNALQCYAGQAPVTRRSGKSDFVVARRLAYNHYLGAAVHQWAFCSLRQSTWAREFYDGKISAGKGHHAALRALGNRWLEILWHCLRKKVRYDESAHIAHRNRALGLAA

SEQ ID NO: 177295 - protein, 343 aa, unidentified
MDHFAGLDVSVKETSLCIVDDGGRIVREVKVASEPEALLQALKKSCHHLKRIGLEAGPLSQWLFSTLAEAGLPVICVETRHMRAVLKAQINKTDRNDARGIAQMMRAGLYRPVHVKTLRSQKLRMLLTHRKLLQSKAIAIENDLRATLRNFGLKVGVVGTVKFEARIKQLVESTPDLAVLVEPLLIVRRVLREQIGILHSRLLAIVRNDAVCRRLMTIPGVGPVVALTYRATVDVPGRFRNSKAVGAAFGLTPCKHQSGESDRTGGISRCGDEMMRAMLYEAAQILLVRSTKWSWLKAWAMKIARRRGLKKAIVALARRLAVIMHRIWIDGTEFRWTREVTAL

SEQ ID NO: 177296 - protein, 363 aa, unidentified
MHLRSERSDSLPKISPAHTVSVNRNLAAPCGDRLLRQANAGVVPPRVYKRGHYIMDVKFYGVDVSKAKLDVACCGRVVEIENEKKAIRAFVKSVPLGSYVVMEATNTYHLEMADICHTRGMRAFVVNPRVTRHYREANGLRGNNDRMDARTLCRYIEREHDGLREYVPKSADQRRLKTLVRRRWKLVGMRTQVQESLGSIKELSRDLRALVARIDALIAKLELLIDKQLAGNPDRARIATIKGIGPAVSAVLIADLSSCEFASADAFVAFYGLDPMPKDSGKRKGRRKLSKQGDRLGRAMLYNAALSASRTKVWKPMYDSCLERGLTKVQALIVVARRIARTAWSVYTHKTTFEPSRLFRALT

SEQ ID NO: 177297 - protein, 343 aa, unidentified
MEYYAGIDVSLKESSVCVVDAAGKVVREVKVASEPEALVRYFDELDLAVSRIGLEAGPLSQWLHAGLMAAGRDAVLLETRHVKAALSAMTVKTDRKDARGIAQLLRMGWYRPVHAKSAPCKDTRALLAGRKLLQGKLLDVELSIRGILRGYGLKVGEVSRGRFEARIRELTAGHAILETVIGAMLAARMALWNEFTRLHREMLKIARADRVCRRLMSAPGVGALVALTYRSAVDDPSRFAKSGAIGAYFGLTPKKYQSGETDRDGGVSKVGDGMVRTALFEAAHIMLTRAVRFSSLKRWALGVAQRRGMKRAKVALARKLGVVLHRMWVEAIEFRWSNAVPAA

SEQ ID NO: 177298 - protein, 428 aa, unidentified
MEIVYPRSCGVDVHKSFIVAVICISESVKPKYIKKRFSTFNNQLIQFRDWLIENNCQNVCMESTGKYYIPVYNALEGHISNVVVANPKWVKAIKGEKDDNKDAKWIADLFKFGIVRSSYIPEKDIRILREFTRYQYKLVNMRSSEKNRFQNALTTGNCKLDIVFSDIFGKSASAIVDTILSNNPYTSEDILSKVHAGCKASHEDILSAVEGIQLNQFQKARIRIVQKHMEYLDSLLDEIQHHIDLMVANYEEYIQLLCTIPGINRKSAITIISEIGTDMSQWSSHRKLAAWAGLAPGCNESAGKKKSVKISKAGVYLKPCLVQVAHAAVKDKNCDYYADKFNKISKRRGKKRAIIAIARKILIAVYHLLKTGEVFNPTDIADVETTKKQRIEYVKTIYEMPSISSAALACLKQRFYNSSEKNLRTHLK

SEQ ID NO: 177299 - protein, 312 aa, unidentified
MAQMIVTAGIDVSKAWLDVALWPTRHKSRFERGPTGYDELEAWLTKHGVTRVGLEASGGYEVEVIDALQVRGFEVARFNAQRIRLFAKAKGRLAKNDRADAQTIAQAMAVLLDEAPPQRRRDLDPLVEHLTYRRQLRDWIVDCTNQLEHLKDQALRKKLTARRSAWQRELAAHDKRLAGLVGEHDEWHILEQRLREVPGVGAVLAQTLLALLPELGRLSRRAIASLVGVAPFDNDSGKRTGERHIKGGRAVVREVLYMAALNAKRYNPAIAAFAKRLAGKKPKVIVVACMRKLLVILNAMLRDGTSWQAKAA

SEQ ID NO: 177300 - protein, 398 aa, unidentified
MLHDHPSVGPTAIRTQFGAIFVSLELSRSKWVLTSLSPGNGEKMSQYSLTAGDIGGLLARFADLKRKARERTGLDYPIITIHEAGLDGFWVHRVLQDEGIESHVVDAASIATSRRRRRAKTDKIDGEALLRALLAFKRGEPRVCAMVVAPSPEEEDRRRLCRERQTLLDERIVHTNRIKGLLFAQGIFDYAPLRRDRRKRLEGLRTGDGRPLPVHLKTQISRELDRLELLIDQIRSVEAEQEALLAMESNAAPEAGLEKAGSEAEPRNAVAMLLAVKGIGDHSAAILWSEGLSRQFSNRRQVAAYAGLAATPWRSGAVMHEQGLSKAGNPRLRTLMVQLAWLWLRHQPQSALARWFRARGERGRKGSVVALARKLLVALWKYVTHGVVIEGAVMKPAT

SEQ ID NO: 177301 - protein, 318 aa, unidentified
MNIIGLDISKDTIDATLHKTNGSIHYIKFKNNDDGLKQFRLWIKGNRIRKAYIGMEATGIYYEKAADMLSSYYTVYVINPLKIKDYGKSRFNRTKTDKADSNLIADYIKRHQDTLIPYQIPKNKALQKLINLKNQLQQHQKQIKNRLHSTEEDFIRNIHQDLIDTIQDKMEQVKIAIFEQIKKQTDNNHYRNLQTIPSIGKDTASVLYAQLTEKHFKTANQFVSYAGLSPAIIQSGTSVRGRGRLSRYGNRRLKSTLYMPALCAYRFNAFPKLINNLKKAGKPKMVIIVAIMRKLAKLAYYIVKTGQPYDAERHRLNQ

SEQ ID NO: 177302 - protein, 412 aa, unidentified
MELVHARCAGLDVHKATVVACVRVPGAQPGVRQTQTKTFRATLRGLRELLTWLTGHGVTHVAMESTGVYWRPVFAVLEGSVHVRLVNARHVKMVPGRKTDMRDCEWLAQLLECGLLRGSFVPPAAVRDLRDLTRLRKALIRERGHHVNRIEKLLELANIKIGTVITDLMGKTGRAILQALSAGHDDPAQLVACAEGLLRKKQAALREATEGYWRPHYALLLQQHLALIDTLDGHITTLDTRIEAAMAPFAETAVLVQTMPGIKARAAQAILAETGMDMSLFPTAQHLASWARVCPGTHESAGKRRPATTGKGAAWLRATLQEVAWAAVRTKKSYYRALYHRLKGRRGPKKAIIAVQHALLVALWHILTRRVSHQDLGADYYDRRNTARIRRHHVRRLEQLGYHVTLVEEPAA

SEQ ID NO: 177303 - protein, 368 aa, unidentified
MFTERTSLGLDVHARSIKAAAIDTLTGELIERTMPSDAGEVMALVAGLRAGHGDVKVTYEAGPTGFELARALAEEGIACQVAAPSKLLRPSGERVKTDRRDAILLARLARNDDIVAVRVPTRSQEGARDLVRSRADARGDLMTARHRLSKMLLRRGIVYDGARTWTRIHDAWLRRVRRDHVIGMGPSALAAFDDAYDTVVHTTARRDRLDEAIAGLYHDGELAPTARRLACLRGVSALTAVSLAVEIGDWSRFKGSTIASYLGLVPSEHSSGTSRSQGPITKTGNTHARRLLIEAAWHHAPAYRPSKAIRARWALAPAPVADRADAGNRRLHARYQALTARGKKHAVVATAIARESAGWLWSLATMDA

SEQ ID NO: 177304 - protein, 343 aa, unidentified
MQTITTIGLDIAKSVFQVHSVDAEGKVIIRRQLKRRYVLAFFQKLPPCLVGIEACASSHHWSRELKALGHTVRLMPPAYVKPYVKRQKNDAADAEAICEAVTRANMRFVATKTPEQQSCLMLHRTRHLFIRQQTAVINAIRAHLAEFGIVAPVGRNGVEELLDVVADPSDKRVPEIARACLLALGAQLRKLKEQILEFDRMIRAWHRSSEMSMRLDEAPGIGPVLATALVATVTDPKAFRSGRNFSAWIGLVPKQHSSGGKDRLGSISKQGDRYLRSLFMAGALAVIRYAKINGTRHRPWLTALLARRPTKVAAIALANKIARMVWAMMVRGERYKQPVALAA

SEQ ID NO: 177305 - protein, 384 aa, unidentified
MEQYVGLDVSLEETSICVVDDSGEILCEGTVISEPEAIAEFVKTKAPQAKRIGLETGPTATWLWHELRKLGLPVICIDARHAKAALSMQINKNDRNDAVGLARIMQRGWYKEVQAKSVACHEIRAVLNSRAQLVKIKRDLENEIRGLLKNLGLRIGKASGNVFSRRVEELVADQSLLQEAVRPLLAVRESVRRGIADLHRKLLALARDDKDIRRSMTVPGIGPITALAFHSAIDEPARFRRSRSVGAYIGLTPRRYASGEIDWSGRISKCGDRKLRVYLYEAAGVLLTRVPQWCALKASGHLEIGLDEVLFERFSEQVVIVDNDDDRFPAPFPRLIGHRRRHGSAPGKPVPRRPRTCRPSCRKRARGKRCLRGPCRRTNRARSP

SEQ ID NO: 177306 - protein, 419 aa, unidentified
MNKIKTGKQKIVNPKALIATVDIGKVTNMGYCRCPDGSEVKPFEFSNNRTGFQKLWDRICWTKMAHHLEEVVVGFESTGAYGEPLVHYLREKPVKLVQINPMHTKRMKDLEGNSPGKTDRKDPKVIADVIVLGHALSVVIPEGAAAELRRLTHARERSIQRRTALYNQLQDLVFIIFPEFLQVMKDIKSRSAQYLLRHYPTPQELLTLGLDALGAVLRRVSRGKLGKDRAQALYEATKQTVGIEEGRSGILFEIQEILSQIAASECFIEKVEQEMSYYLQQIPYSHSMLSLKGIGEVTAAGLIGEVGDFRKFHTLSEITKLAGLDLFEISSGKHKGNHHISKRGRPLLRKLLYFAAINTIRKGGVMHACYQRYLERGMLKTKALIAIARKLLRILFALVRDHSQYVENYSQKEALKLAA

SEQ ID NO: 177307 - protein, 340 aa, unidentified
MGNITTVGLDLAKNVFQVHGVDAEGTAVVRQRLTRGRMLKFFAKLPPCLIGIEACASSHYWARELVALGHDVKLMPAQYVKPYVKRGKNDAADAEAICEAVTRPTMRFVGIKTPEQQSAMMLHRVRLILNRQRTQLSNAMRAHLAEFGVVGPIGRNGIEQLLDVIADPTDERVPADARVCLEMLATQLRMVKEQILENDRRILASARETELGRRLMEIPGVGPLLASAMVATVPDPAIFRSGRNLAAWIGLVPRQNSSGGKERLGGITKAGHQYLRQMLIVGAMAVVRYAERNGAKRPWLVQLLARRKPKVAAVALANKNARMIWAVMTSGERYREPQVA

SEQ ID NO: 177308 - protein, 371 aa, unidentified
MEHTRFVGLDIHKERISIAVAESGRSCAVEYLGEISNDPVAIDRLCDRLERPSKTLAFCYEAGPCGYGVHRQLISLGHRCDVVAPSLIPTRPGNRVKTNRRDATMLARLHRAGELTPVWVPDADHEAMRDLIRLRSVVRQIVSRARQHLQGFLLRHGRKHGRGTAWRMAYRRWLSTLAFEHPAQQIAFQDYVDAVMDAERRLQRVEEQISGLLPDWNLRPVVDALQAMRGIALITAVVLVAEVGDFTRFANPRQLMAYFGLIPGEQSSGETIRRGGITKTGNAHARRALVEGAWAYRMKARIGRHKVDRIEALPKVVRDIAWRAQLRLCTRYRRLSARGKTANVVNVAIAREMVGFIWSIACTVQSAPKTA

SEQ ID NO: 177309 - protein, 407 aa, unidentified
MNPLYVGIDVSSKDNVVYLMKPDGTKIKNFSVPNSKDGSKKLVKEVLSALTSYSLTDVIFGLEATSVYGDNLVYFLREDGSLTPYNRKIHVLNPKQVNKFKESYNDLPKNDYVDSFIIADCLRFGRINKEVYLDDYRYKALQNLTRARYVTVQNLTKEKQRFMDMLFKKYSSLAQDKVFSDKFGSTALAVYEEFDSADTLAYMDLHELTEFLQKKGKNHFSNPEEVAKAIQKAARSSYRLPKTVNDSVNQVLAISISAMRALEAQIKEFDKAIAAQMQLIPNTLTSVKGIGPVYSAGIIAEIGDINRFPNQAKLAKYAGLSWTQHQSGGFEAQNTRLIKTGNRFLKYYLGEAAMSLVRCDAEYSRFYHLKYNEVNKYQHKRALALTARKLVRLVFRLLKDNRLYVER

SEQ ID NO: 177310 - protein, 360 aa, unidentified
MTDSIALVDLTAKVVVGVDTHKHVHVAVAINMVGARVGSKSVDADRGGYAELVDWARSLGAVEAFGIEGTGSYGVGLASFVRRQAVRVVEVNHCDRRKRRNNGKSDTIDAETAARSVLSGIATAVPKTADGAAEMVRQIKIARDTAVKARSSAIITLKTLIVNAPGELREVLEPLTDRKLIDRCATLIAGELIDPTASVKHSLRALATRWLALSDEIGSHDAALDGITMTAVPTLREAFGIGPDSAAEMMIVAGDNPQRIRSEAAFAKLCGVCPIPASSGVTNRHRLFRGGHRQANAALYRIVIVRMRWHQPTIDYVERRTAQGLSKKDIIRCLKRFVAREIYTGLIADHKALTPRDLAA

SEQ ID NO: 177311 - protein, 370 aa, unidentified
MSVRRILAKTIDTDLEYEAIGIDLAKNCVSAALLTTDGEVVCIDRLDYSELEKSAQALSSTTFAMEPCTEMNYLVQKLEAWGHRCLVIGGKNVQNYVENHFSGQKTDLNDAQALAFLAQDTQLRTIKAKDVEQQKYASLTTLREQYIKQYRQTIVSLKGICQAWGLNISKGISGKARLKDLIENHAAFPEELKESLVDMVTHAQTAQKALNKITKTLEELAKNDKLCQLIRTIPGLGLICSCRLRATVGDIKRFKSPKDFPAYYGLVPRSIATGHNERKGKITHRGDRTMRSLMVQAAGSLVNMATKGKLKSKQLTKWILKKQKEKMPWGKLVCAVAAKLLRIVRAVLISNKPYNSKIAGVAKCSLPKGS

SEQ ID NO: 177312 - protein, 367 aa, unidentified
MKKVSTAAAKQSRNFSQPKLTIGLDLGDRSSWYCVLDEAGNVRLEQRVSTTAKAMREVFSGMPHSRIALETGMHSPWVSRLLSELGHEVIVAHARNVRLIGESRRKDDRLDAGTLARLARIDPQLLCPVKHRSAKAQADLTVIRARAGLVRARTALVNTARGLAKSYGERLRGCNVRNMNPEKAEGLSAELQAALGPLLAAIESLSEGIHGYNERIEALAQQSYPQVALLKQVKGVGTLIALTFLLTLEDAHRFGKSRDVGCYLGLQPGRRNSGQSEPQMHISKEGDPYLRTLLVQGAQHILGPFGPDCDLRRWGLKLAERGGKNGKKRAIIATARKLAVLLHHLWVSGEVYQPLRNSNPMMMSTAA

SEQ ID NO: 177313 - protein, 362 aa, unidentified
MIQNTFVGLDVHAESITAAILKGDSQQAEVIKLSGDLMKVRQLFRRLAENAPVRACYEASGAGFVLQRVLTNDGFHCDVIAPSLIPRKPGDHRKTDRLDAVMLARLYRSGHLTAVHVPSEHQEALRRLLRLRTSYQSYCTATKHRISGILRNHGFLFSESKSTWTKKHRLWLAKLRRTLEGPLQTALAIELEHLEYLQTQRLALDTELERFALALPYRPQGEALCCLRGVKTLTALTLLCEVDDVRRFPSPRGLMAYFGLVPSEHSSGNKERRGPITKAGNNHARRLLVEAAWNNRHRAAAELILNRRRQGQPPAVVAIAVKAQHRLYKKFWHLDQRKHRHVAVTAVARELCGFLWAILNAL

SEQ ID NO: 177314 - protein, 368 aa, unidentified
MSKITKYIGLDVHKDSISIAVAEPGRSKPQFLKRIPGDNGRLLKVLRTLGPLDSLHCAYEAGPTGYPLHRLLTEKGVRCEVVAPSEIPMKKGKRVKTDRIDAISLAHHLRAGNLVAVCVPDEEIEAMRDLVRARDDVKIVEKSAKHRLSKFLLRHGRSYPGKTNWTNMHLDWIRKQRFEREAQECVLREYLHAVVQRGEQLERLGDALARLVEGCKLEPLIKALQAMRGIKLLTASSLAFELIDLRRFATAPKLMSYLGLVPSEDSSGGRRRQGSITKAGNKRIRTLLTEAAWNCRFKPQRTAHLRKRQEGISQEVKDIAWKAQERLHQRYKSLSVRGKPHQCMITAMARELAGFIWAIGQQDKLLVV

SEQ ID NO: 177315 - protein, 325 aa, unidentified
MQSQTNYTGIDISKLFFDVAFQIEGRNYHYKFGNDLPGFKSLLKVLPTDSHVVMEASGPYYLKLACFLEANNIWVSVVNPLVIRRFCQMRMSRTKTDKKDSGMIAEYGRTEKPGLWQSPKQHVITLQQLETLLSNLNKEKTALSNQLESFNSSGMLDGKLKKTINKELEHKQALIEKLTKEMHTLAEVHYSEMLINLGSIPGMGKKTAMMLIVLSGGFNRFDDYRKLSSYIGICPRIYDSGTSVKGKARVCKMGMSKIRAMLYLCAWSAKRCNKACRELYGRLINNGKAKKQALIAVANKLLKQAFAIATQKTKYNENYSNIICF

SEQ ID NO: 177316 - protein, 353 aa, unidentified
MKIVFNFTLGVDLGDKQSVVCIIDSAGNVQESLKVASTKKAFKEFFTKYSGNLVALENGTHSPWASRLLKELGCQVLVGNARKLPSIWRSTIKTDFRDAETLARIARFDPKLLYPIFHRSVAAQADLAIIKARDMLVQTRSGLINHVRGAVKSMGQRLPASSAEAMAKRAKDHIPETLKPALIPLLTQIEQLNKTIKEYDRQIENISKEKYPETEVLRQVTGVGPITALAFVLTLEDPARFQKSREVGPALGLVPRKDQSGEMDKQLRITKCGNIYLRQLLVNCAHYILGPFGPDCELKRFGEKISQHGGKIAKKRAVIAVARKLAVLLHRLWVTGEVYDPFYNQPKAIKKAA

SEQ ID NO: 177317 - protein, 375 aa, unidentified
MIATTRPEMSVSEPTLYVAFELGKKDWKLAMTSGFGVQPWLRTVASRDWQGVERAMAQGRARFGLPAAALVVSCYEAGRDGFWIHRALIQRDIRNRVVDSASIEVNRRARRAKTDRLDALKLVTMLVRVCCGETRVWSEVRVPTVAEEAARQVSRERTALTQDQTRLINQMRGWLATWGATLPSRRRASWWTTVRDWAGAALPREVQARLARAEARLAGLEAQIAELEAQQQAAVTTAAPGSALRQLVQLKGVATTSASVLLDEGLMWRAFRNRRQIGGLLGFAPTPYNSGDSEREQGISRAGNERLQAIGLQLAWNWVRWQPQSTLTQWYLARFGTGKRARRIGIVALARKLVIALWRYVTTGVVPDGAILKTA

SEQ ID NO: 177318 - protein, 428 aa, unidentified
MTVKDCTSVKEFWQLKKEIRGSKDHLIVGIDVAKDEHKAFFGTANGKTLLKRLTFKNDIKGFDKLLARVKEMKVKHSLNELVLGVEPTANYHKPLGDFLIKCSHMVVLVSGVSVKRNRELLDGRWDKNDTKDSANVADLISQGKCLYYEYAPLVLKDLRGLLSLKRRLKKQEHGLRIRIRNSLLAQYFPELDKYYSKWEPEVLSTVRWCLNPSVIAGLEYDQFVSLVCPGRKNIRQQDRLEWIWKKAVDSIGCDAGEAAEFEAKVMVEELGHIRGIIKETDAKIKDICVRFPEYDYLLTIPGFGPDVSSKVLAAIGDPFRFNSGKQVLKMAGMDLNANRSGKSSDTAVPVISKKGSAHLRYAIYQAAFIASVRNKYFIRYYTNTLRGREREKGIKTKMRVKLAAKMLVIAWTLMKQKEPFDPGYLKID

SEQ ID NO: 177319 - protein, 497 aa, unidentified
MPSTKVAAEVTIDGAMKRKSIFKNNSQNIDAAFIEAGLPEKVLLVPLDFAKSTHYACFCDGLGRYLRQAFTVKNNKEGLDYLVERIEATRKSRAIRDKRHVIVGGEDSASYTRNFMQRLGELGYLAVRLSSCEVHRQAESVDSSTDRTALRAIAKTMLNRDARPIDGHDVYNELRALTRQRRRIVHLNTAVKNRIHTHADRLFPGFLAKDSALAPFSRASLELMSKPSFGAVSISRKNEKTLEQLLKRHGTPRSVEVASALKQQARDSIPADKDSARLSAYILAGELELFRALESNLQTLDKECARLLARTPEAFVTSIKGIGITLTSSVCAESGSLAQVTRADSLNAYAGIVPKVKQTGGPESEAKIRGRRRSFNRVLKDYTMQAGNHLYLHGPEELMQDAVRRKLVGKAVDTAMARRFLRIARALCKNHFIYLPTHLRGQNASSQERVQYILDTWPALLVKWKRLGLHEEAFASENPLGQWRLIMQEIHDIDLPL

SEQ ID NO: 177320 - protein, 461 aa, unidentified
MRKARRSGRKPGKKIIDVTAGMEVLRPHAAGIDVGNAEHYVAVPPGRSDPSVQTFGSFTADLHRMGKWLQACHIETVVMQATGVYWMALYQVLEGYGLQVYVVNAKYTKTLPGRKTDVLECQWLQKLHTFGLLNNSFLPPEQIRVLRTYLRQRENLVAAAGTCIQQMQKVLTEMNVQLANVISDLSGKTGMAILKAILGGERDPQRLAALADRRIQASRQEIAQSLEGHWREDLLFVLRQVHDLYFFHLESLTGCDRQIEDHLKTLAAKVDVAKQPLTSAPRQPQRKHIPQTNLRAELYRITGVDLTRIDGIQVQTAQVVISEVGVDMTRWPDEHQFASWLGLCPHNRITGGKVIRRGTKKVLNRAAHALRLAAQTLHRSKSYLGAKYRRLRARLDGPVAITAMAHQLARLIYRLLRFGTEYHDKGMQHYERQYRETQMKWLEKQAAQFSMQLIPTQGVLK

SEQ ID NO: 177321 - protein, 410 aa, unidentified
MQALVERGCGLDVHQATVVACLLIVRKDGKVQKQVRSFGTTTRELLSLREWLLSEGCTHMAMESTGVYWKPVYAILEGALEIVVANAQHVKKVPGRKTDVKDAEWIADLLCHGLLRSSFVPPKPIRELRDLTRYRRKLVESQAAERNRLLKLLETANIKLASVATDVFGMSGRLMLRALMEGKTTPQEMAELAKGKLRKKIPELQPALEGNVEEHHRFLLRLQLGRLEAVEKDLAVLEQRIQEKLKPYEAQLTLLDEIPGVDWTLAAGIIAEMGVDMSVFGSVSQLASWAGVCPGNNESAGKRKSSRIPKGNVYLKTALVEAANSAAKAKGTYLRDKFYRLKARRGYKRAAVAVAHKIMVVIYHMLSHRVCYNELGDAYLDKRNKQQLTRNLIHRLERLGYSVTLEQKAA

SEQ ID NO: 177322 - protein, 459 aa, unidentified
MGKAKACKGGKNQLQVIHPRAAGIDVGSKFHVVAVSAEYDPDPVRKFNSFTTDLHRLADWLKAVGVTTIAMESTGVYWIPVFEILESRGFDVILVNAREAKRVPGRKTDIKDAQWLQQLHQYGLLSASFRPGEKIASLRSYLRHRERLTEYAAAHIQHMQKALMQMNLQLQHVVSDITGDTGMRIIRAIIEGERSATKLASYRDPHCKQSEKTISAALTGNYRPEHVFSLKQAVALYDFYQNQIKECDQEIEKALAALNSDKNSPSEPLPKARRTQKQKNEPGVPIREMLYTLTGVDSTQINGIGPYTTLRLVAECGTDMAKWPTSKHFTSWLTLSPGNKISGGKVLSSRTRRTKNRATTLLRIAAVNIGKTQTALGAFYRRLAARVGKAKAVTATARKLAVLFYTLMRYGKAYVEPGADYYERQYRERVLLALSRKAAALGYRLAQKQETSPVTGNVS

SEQ ID NO: 177323 - protein, 342 aa, unidentified
MEEPPRRSSTDEFTFALGIDVGKTALELALCNGEKIVARTTVSNDADGHDTLVSWVEDRGGGPEKTCVCMEASGDFEKAIARRLYEEDYRVSVVNPRRIKGYASSQLQRTKTDSADAALIARFGRREDPRPWEPPEAAESRLQELTRARQALQKEKTRAQNRLDEAEDEAVRNAHENLLDEVKRQIEELEEEIEEHIEEDPEINDQCSLLETIPGVGLQTAAIVVSELGSPEQFQSARQAAAYAGLVPRHRESGTSVRGNPRMSKVGNGRLRRAMYFPAMTALRFNSAAGAFGDRLKERGKETMVVIGAAMRKLLHICYGVLKSGRPFDPSLHPGTLTTRQK

SEQ ID NO: 177324 - protein, 428 aa, unidentified
MARSKAQSVFATDDDTLYYERCAGIDVHKNLLVVCMRIGRKTESMEYGTTTGEIREMVRWLKESGCQMAAMESTGSYWKPLYNIFELEELPAMVVNAHHIKNVPGRKTDWNDAFWIAKCLAQGLLKPSFVKNREQRELCDMTRFRKSQIEERSRNINRLQKFLEGANIKLGSWLSDVEGKSATELLELIIGKPDFTIDEVKARMHRNMKSTPQEIFAAIDGYITPTQRKFFAHVMNIIREQTRLIELTDDMIKSSLNDEQQAAIVSLDAITGIGVVSAEQIVAETGTDMRHFRNQHAFSNWIGVAPGNNESAGKRKSGKTTHGNKTLKSTLTQCAKSAVKNKRSFFSAQYSRLVSHRGKNRATMAVAHSMAIAIYFVLSGHEFKDLGSDFYTQFNREKKIHSHFKQLQKLGVNIPDDALYKLLQLSSA

SEQ ID NO: 177325 - protein, 359 aa, unidentified
MLNVGVDVHKRICQACLKDERGSIVEEFRFPNNQEGASRLATILRKHGEAKVALESTGNLWVKLYDRLDEEPGIDVILTNPRKTRVIAEAKIKNDKLDARLLADLVRADLVARSYVPPKEIRMQRALLRERISLVESRTIIKNQIHALLDKYEIQPTYTDMFGKHGREWLRSLNLPSIDQTILEVGLQRLEELEAHIDAFTDKIAQEAVEHPQAKLLMSFTGIDYYSAMLLASEIGDVTRFPSAKKLVRYAGLAPGTRQSADKTVHGHIVKEGNKRIRWILVEAAQHASRHDPRLRGFYLRVMKRRGYQRAIVAVARKMLVSMYHVLSKNEPYHGERTELLERKLKRLEWKATHSLQAI

SEQ ID NO: 177326 - protein, 349 aa, unidentified
MATDEVGRQLGEKTVKATTAGHATAIMWAREQFGLELIWGIEDCRNMSARLERDLLAAGQQVVRVPTKLMAQTRKSARSRGKSDPIDALAVARAVLRETDLPLATHDETSRELKLLTDRRDVLVAQRTSAINRLRWLVHELDPERAPAARSLDAAKHQQALRTWLDTQPGLVAELARAELTDIIRLTGEINTLAQRISARVHQVAPALLEIPGCAELTAAKIFGEAAGVTRFKSEAAFACHAAVAPIPVWSGNTAGQMRLSRSGNRQLNAALHRIALTQIRMTDSRGQAYYQRLQDAGKTKRAALRCLKRRLARTVFQALRTVHQPSSEHTQPAAACHRSYCSRSCLSG

SEQ ID NO: 177327 - protein, 311 aa, unidentified
MYSVDWAIKKQFQIYNISGDKLISIPPTEEAFDEFFGKLCSPDSFYIEEGGGDTFKLMALNYGHRVFTILGKKVKEYQEKIKLPKSDENSAKVIGILAKSYSEEFHEFQELDILTLKISLLYREYEKLVEDRTQKKNQLFAMKRRLQLLTSEKEVRKMIKRRKDIITAMDKEVRAIQKQLSKLLEEYPLWFNYLKGIKGVGVVTAAGIVGSVGRFSKFPNRDSIKCFAGMVTKKGNPNYNRRLKKVLYYFVEEIIRKRTSHWRELYDGMKEYYRTKHPKWKPYKVDAHAKKRVQTKFLCKLWREGIKIENT

SEQ ID NO: 177328 - protein, 356 aa, unidentified
MALDWGDQEHAFALQHAGQRERGTIAATAESLHRWLEQLGERCGHQPVALAIEAGKNAVMHALVAHPWLTVYPVHPATSERFRKAFTPSGAKSDLPDAAVLLDIVAQHREQLRALVLDTPPTRALAALTEVRRSAVDHRTQLGNELRSTLKLYFPQALELCGEDLWTPLALDFLERWPELARLQRARPATLQRFYAVHNSRRQAVIAERIALIASARALTIDRAVIAPAILQVRLLLAVLRPLQQHLLEIEAQIAAAFAAHPEVELYRTLPGAGPALAPRLLVAFGTDRSRYPDASSLQKYAGVAPVTERSGRQLWIHWRWNAPKFLRQTFVEWAGQTIPKCAWAKAYYLQQKRAG

SEQ ID NO: 177329 - protein, 351 aa, unidentified
MKYYTSTTEFNCGIDLHARQMYACVMDRQGKKLLHTNIKGNNFEYFLKRVAPYRHDLTVVSECTFNWYWLADACFDADIEFVLAHALYLKHIHGGKNKNDRIDSEKLAHLLRANLIPPSYVYPSERRPVRALLRQRVSYVWERATLKTHLSMNQTAEGLVPAMKGGHNRDVWEERILEQYSNPLHKFAASCDMDMIRAYDSQIAKLEIEIIRQAKKKLGRDYHLLLTVPGVGRVLAMILLFEIDTIGRFPTVKDFLSYSRLVKGSVASAGKIKGLTGGKMGNAYLRWAFGQAALIAKRNHPLLTPYAAKLIAKHGKFKGNAILANKIARAVYFMLENGTAFDAERVIATSI

SEQ ID NO: 177330 - protein, 346 aa, unidentified
MVKIHVLGVDLGKNVCSLVGFDEAGAVVLRRRAKRETLIALAAKLPPCIIGMEACCGAHHLGRLFANLGHKVRLMSPEYVRPYIKAQKNDDRDAEGIAEAATRPTMRFVDLKSQEQLDLQTLHRSRDRLVAERTALINQVRAILMERGIIVPQSKRALEKHLAAVTDGSDDATALSPRIRMLVLDARAQWQELDRRIAAFDAEFAAFVKESEDARRLVTIPGVGVMIASALIAAIGKGESFEHGRDLAAWLGLVPRQSTTGGRPRLLGVSKRGNTYLRTLLIHGARAALPHVAERDTPLGRWAKGLLARAHHNVAVVALANKLARIAWAVLRRGDKFAAAGSPVPA

SEQ ID NO: 177331 - protein, 436 aa, unidentified
MPERQDVFVGIDVSRRHHQCSFVANDRKPVSKTLKIKEDREGFQTLIERMYDIAHEKGSVSFHIGLEATGHYHQNLVAFLESIDDLDLRVSCINPVQTKRFIQMLMLREQNDKVDSLAIAEFMCIQRPEQTSQKRSEMRPLRDLSRLRDQLVSQKTACINQMHALLDQLFPEFEQVFTDINNEPLAWAVLYRYPCPKNILTAKTSRLMTVQNRKGGRYLGKKKALQLKALAKQTIGSSKGDVYVFQIRILTQNLRSLHQQIQDTDKTIENTINSMNLPPWKTIPSIGVLTMATLLGDVGDPRLFGSAKKFSSFLGLTPRGKQSGSSVNRKGHISKCGPSHIRQKLYMCVVSALSTKKNPILLDVYNRLVSKGKPKNVAIVASMNHLARVIYGVFKSNQPFDPQYYGRETGLGRPRNGNSAIIRRVPPPRPKCKVMV

SEQ ID NO: 177332 - protein, 421 aa, unidentified
MHEERRWFVGIDWASREHVVSLCDGEGKKIGQREFIHGGTGISGMIAWLLKASGGEPGEIHVAIETPHGPIVEALLERGFNVYCINPKQLDRFRDRFTVSGAKDDSLDSYVLADSLRTDMPLYRQLSVAEPLIVELREWSRIDEELKVERIRLANRLRDQLWRYYPQMLELGELDEDWMLDLWEAAPTPQKAARASKAAIARVLKKHRIRCFDAAQVLSELRKPALSVAQGTIGAAPVHIRMAIERLRVVNRQLADAELQLDRLCKKLAEPVAADDGENVPGQRQEHRDATILDSLPGVGRVVLATMLAESPDALQRRDYHALRSLYGTAPVTRRSGKSCIVTRRRACNRRLRNAVFNWGAVAVQHDPISKAKYQALRARGHGHARALRSVVDRLLYVACTMLENGTLFDHSFAEAKKAAA

SEQ ID NO: 177333 - protein, 458 aa, unidentified
MSINHIPQEKLATFHAMNQSAIGIDVHSNLIVGVYQSSRFNSTRASIDGDTWNGDSTKKGLEDFAKWCKERKPEVLLMESTGVYWQSLYESLENVGFSNKDIVVVNARDVKNRRGNKTDLSDAIHLAEIARNGDYRASFVPKKEVRQLRCLWRSYHTLKNTRKRLLNVLHKQLCQVGCRASSVFSDIRGKIATQVIELLIGGKSGDELKEAIASVIKHSRGRLKATPDMVYEALRADMDSKVWYSIRQHLEHIKFIDKQLEAAFANLTIQSAPYEKTIQLLQTIPGIKYLTALGIVCELGDDLSAFKSVRKFSKWIGHAPGNNESAGKRYSGRTTPGNKYLKILLVECAAGIGLMKKGFLHEIHQRFKERIGTKRANVALAHKLCRIIYSILKNRTPYQERYKPILKEHRLGKAIKAVDGLRNVGLSCDDIEVTDTETGNSTIIYGANKYRRKLMKKS

SEQ ID NO: 177334 - protein, 374 aa, unidentified
MEEFSKYVGMDVHKETIAVAVAEARGGEARYLGEITNSAEALQKLVKQLRKGDAGLSFCYEAGPCGYGIHRQLTELGWDCQVVAPSLIPKKAGDRVKTDRRDSLSLARLHRAGELTAVWVPDDAQEALRDLTRAREDMKHLQRQAKQRLLAFLLRHGKRYAGKSNWTQAHDRWLEGLKFSLPVQQIVFQEYVDTVKLLSQRVAALDQQMADAAGQSVWWPVIEALMALRGVSLLTATTIVAEIGDLQRFASAPQLMAYLGLVPSEHSSGGSKARGGITKTGNGHVRRVLVEAAWTYRHPARKTACLQRRAERTSAAVQDIAWKAQKRLCARYRSMEGRGKLKVQACTAVARELAGFIWAIGQAVPKPATRAKGH

SEQ ID NO: 177335 - protein, 316 aa, unidentified
MKDTLIFVGIDVSKARLDVETRPTGEKESVANDKAGIKALVKRLAQLQPTLIVLEATGGYERQLAQALVRAELPVVVVNPRQVRDFAKATGQLAKTDSIDAGVLAHFGQAVRPEVRSLPDQVTLELRALTARRRQIIEMIVAERNRLAMTSKAVGKRIVAHIRWLEQELERANQDLDQSIRQSPIWKENQEVLLSTPSIGPVTSRTLIAELPELGTLNRKQISALVGLAPFTRDSGTLKGRRMIWGGRAPVRSALYMATLVATRRNSVIRDFYKRLIANGKLFKVAMVACMRKLITILNSMIKHKTHWSESFLKTA

SEQ ID NO: 177336 - protein, 454 aa, unidentified
MGKPIKGRRLSLECIEPNAGGIDVGATEIYVAVPPERAAEPVRCFKTFTSDLREMAAWLERCGITTVAMESTGVYWIPPYEILEDAGIRVCLVNSHYVRNVPGRKSDVSDCQWLQYLHSVGLLKPSFRPDAAICALRSLSRHRAGLVESAAVHIQHMHKALTQMNLQIHHVLSDITGISGMSIVEAIVAGQRDPAQLAGLCHAKVQADRQTVIKSLTGNYRPEHLFTLKQSLAAYQSYQRLLAECDQEIQRLTNSMSGKIDPGAPSSSTQSSPQKRRKNQFHFDMRSELHRLFGVDLTAVPGINALTAHTLLAEVGPDLSRFPSADAFANWLALCPGNKKSGGRVLSSRTRPTNSRLSHALRVAAQTLARSRSYLGNFYRSMRARLGAPQAITAAAHKLARILYHLLSTGDAYDESVFAREQQKQNLRLHKRLAKQAQSLGFQLIPLNSAGACS

SEQ ID NO: 177337 - protein, 412 aa, unidentified
MAKLEMDVINTHCAGIDIGSRSHFIAIGQGPDDVKEFGVYAEDLAAICEHLKKNNINSVAMESTGTYWQNLYVELAKNGFDVTLCNGKFTKNIKGKKTDVKDARWIQKLHSIGLLSGSFLPDDSTETLRTYCRQRTNWLQLSVEATHKMQKYLKLLNFRLDVVVKDVCGLTGLAIIADICKGNLDPQKLALHRHGNCRKSYDEIAKALQGNNRKDYLFGLKQEYDKVHKRINKNALKGIDLNQASYQYFGGIDLMKIEGVSHATILTIMSEVGPEGFKKFGTAKQFASWLRLAPNNKISGGKVLSNKIPKGSNRLKIALRNAANAIGNLKDTHLSDFFKRVAYRRGRTAAVSATARKLAVIIWNMIVKKIAYTPPTEYLFLDQIRKAKVIEKIKKNIAKLELKADDLGFVMT

SEQ ID NO: 177338 - protein, 335 aa, unidentified
MKHYAGIDLSMETSHICIVDADGFKVGALCVDSTPEAIAAALERHGPVDRAVIETGRMTPSIALGLREFGVAIVCIDARQAHQSLKAMRANKTDPHDAAGLAQLARTGFYKEVHVKSPAAHGVRSVITARGHLVEARVRLDNTIRGLCATFGIRLGIGQGERFLARLRAAAAVPGLGEAVASLLGVRERLVEQIGQLDRQLKAISATSPVCQALMSIPGVGVQTSAAFAAAIDDAARFKRSRTVGAYFGLVPRRHQSGELDWTGRITKQGDSTVRKLLYEAANSILTRTKTTFALKSWALKIARRRGLRKARVALARRLAVIMHAMLRDGTLFEV

SEQ ID NO: 177339 - protein, 391 aa, unidentified
MRMIYVGIDVAKDKHDCCILGSEADKLYPVFTIPNNKAGFDELYEKIFSVTDDKTEIKVGLEATGHYSLNLLGSLIDKGLTTCVINPLHTNLYRKGLSLRKTKTDKVDAGSIAMMLMTDKTLKPYSDTSYHSEELKSLTRYRFDKVQERAKLKTSVARLVNILFPELEKIVPSLHMASMYALLSEFPGASYIADSHLTHLKNVLETTSKGHYGRDMAVTIRDAARDSVGSVMPAKSMELKHTIHLIQVMTEEIDEVEASIKSIMDTCNSPIMTIPGISYRMGAMILAEIGDFTRFSNADQILAFAGLSPSTYQSGRLDSSYSHMEKRGSRYLRYALFNATKFVCKWDENFGAYLSKKISEGKHYNVAVGHATKKLVRTIYRMELTGETYRK

SEQ ID NO: 177340 - protein, 345 aa, unidentified
MQENQEYVGVDVSKDTLDMLVYSTSEIRSYANNDAGIAEATTWLKQLKPAITVMEATGGMEVSLYIALQEANLPVAVINPRQIRDFAKSVGILAKTDKVDAKVLARYAATIQPEARPLPDEEARRLDTLVTRRRQLVGMITAEGNRFATIRDKMMKQRIHAHIDWLKQELAAIDKDMSQMMKDNPRWRAKDKLLRSVPGVGPVLSTTLIAELSELGRLNRKRIAALVGVAPLNRDSGKHRGKRSIWGGRCSVRQPLYMATLTAVRFNPKIRSFYEHLLANGKEKKVALIACMHKLLTILNAMVKHSSYWSCTYSDLNNSVIPVPAKTVARRESNCLKSQYHDIET

SEQ ID NO: 177341 - protein, 445 aa, unidentified
MVLDGHLRRCEEGTVRFPQLKVRRVSAVVFGTPPEVGLVLVQHAVPVSPLSVVVAIDVGKNEFAVSVTTAARRRLLKPRLGCPMTAPSVREVVARISRLLPTGAVVKVGVEAAGHYHLPLLAAGLWPTGWELLELNPAHVTEQRRVLGKRTIKTDVIDLEAMTELLLAGRGLPVTATEVVLVELTAWSAHRTRRIEIRSGLKNQLLGQLDRSFPGLTLALPDVLGTKVGRLVAAEFADPTRLVALGGSRLIRFGATRGVQIRKPIADRLLAAARDALPMPDAAIARQVLAADLALACDLDRQVAQAEVELARLLPLSPYRTLTSVPGWAVVRAGNYAGALGDPARFSNPRQVYRSAGLNPIQYESAGKRHDTRISREGSVELRRALIDLGMGLWLNEPAATARAVELRARGKKGGVIACAMAHRANRIAFAMVRDQAVYDPSRWT

SEQ ID NO: 177342 - protein, 345 aa, unidentified
MSIVGGLDIHRKQLTFDYVDTATGELSRGKITPADRRYLAVWLRRFDGAADVAFAVEGCTGWRYVVQELHAAGVRAHLAEPADTAAARGRKKRAKTDRSDAKLLRELLDGDRIPQCWIPPEQVLEQRALLGLYHDLRREHTGWIQRIHAVLFHQGAQALGNGGLNTEQGRARLRQVAVEQLSAAGQVQVATAMAILEVLEVHLDDLRRRLVTTARHLRGARALTEAIYGVGPITALALCCWLGGAGRFASSRKAVRFAGLDITVYSSDTKRSPGRLSRQGPEVLRWCLYEAGKTSARTTAPAHAYYAAVKQRLDGKRAALSQARRIVRQASHILTALGDDAFTRV

SEQ ID NO: 177343 - protein, 321 aa, unidentified
MRYFQPPADARFYGGVDLHARSLYLVILDHDGQVRFGRNLPTAPEPFLRAVQPFRDGLLVACECVHPWYWLADTCRDHAIAFVLGHAWAMRAVHGSKTKCDRQDAEAIARLLKGGNFPPAYAYPRERRGLRDLLRARLRLVRQRAELYGHVHTARRQANLPPVSNDVKYKSKRGAITADIADPFVRRRVETDLALLEPLDTAIRRLEAEIEDAAREHYPAELAVLQSTPGVGAVLSLTILLEIDTIERFGTRQQFCSYARLCGAVQESAGQRVGLGNRKAGNAWLKWAFSEAAVLSAQKEERIGALLQRLSSRLGKAKVLD

SEQ ID NO: 177344 - protein, 311 aa, unidentified
MTSAGIFVGIDVAKAQLDIAIRPSGEYFTAPHDDPGVSGVVQRLCALQPTLVVLEATGGFELDGASALGAAGVPTAVVNPRQVRDFARSTGLLAKTDRLDAQVLAHFGEVLRPAARSLPDAQAQELSAVLLRRRQLVEMLVAEKNRLPMATRRIRPPLQRHIEWLQQQVADLDRDLGALIRSSPLWRAKDDLLRSVPGVGPVLATTLLASLPALGTLNRQQIAALVGVAPLNRDSGTWRGRRTVWGGRAHVRAVLYMSTLVAVRHNPRLRSFYVRLRDAGKVPKVALIACMRKLLTILNAILKHQTPWALP

SEQ ID NO: 177345 - protein, 371 aa, unidentified
MSHVTSIGLDVHARSVSAAAFNLYTGEVVERRFGPEAGPIAEWALSFESPRAVYESGPTGFALCRELRALGVDCVVGAVSKMQRPAADRRVKNDRRDAAFLARLLATNNVVVVPVPDAGVEAARDLSRALDDARENVQRARQRLSKFLLRRGYVFDERDSLGRRRCAWTAAWWSWVAKIKMPEPAAKAALDHYIEDVRHEESSKLKLEKLVAAEAARPRWAAVVAALRRIKGVDTVTAFCLAAEAGSFSRFRSAPAYAAWVGLVPSEHSSGEKVARGGITKTGNSATRRALVEAAWHFASCSPSPKPPKSGSEAVPADIERRCAKCTARLAARHRALREAGKRPCVANVAVARELACWVWEVGCRAEGTLR

SEQ ID NO: 177346 - protein, 343 aa, unidentified
MKLQVLGIDLGKTVFHLVGLDSTGRLVIRKRCSRRQLLAFTANLEVQLIGMEACSGAHFLGRALREQGHEVRLMPAQYVKPYVQTNKSDYLDAEAIAEAVQRPRMRFVPIKTEEQLDLQALHRVRERWVMRRTAVVNQIRSLLLERGLTLSKGRRHLDEQLPRILEDGELNLSGSFRVLLAQLQLELEQLAARIEEMDRVIQKMAKENEDCQRLTEIPGVGPVTATALISAVGNGSTFQKGRNLAAWMGIVPGEYSTGGKQKLLGISKRGNKYLRRLFVQGARSVLQQRHKQALGLSTWLAQLLGRTHQNVVVVALANKLVRMAWAVLCKNQRYRTPVPAASA

SEQ ID NO: 177347 - protein, 358 aa, unidentified
MVQSKGINFNGQNIYIGIDVHLKSWSVTIMTESGYKRTHSQKPSAKELFEHLKKHYPNGKYQAVYESGFSGYSTYYALKEYGIKCMIIHAADVPTSQYENVMKTDAIDSEKLAKSLKGGLLRGIYVRDKEELDDRSLIRLRKTLQKQLGGYKSRVKHLLYNNGISYPDCFENSRSHWSNRFIYWLENEVRLLSSTRLSLDLLIDQVKLFRKNLLKATRMVRDLSKKPQYSRQYENLISIPGIGLVTAMCLLTEIGDVSRFHNQREFASFLGLIPSCHSSGENIYNMEKTFRGNKHLGPLVIESAWVSIRHDRAMSMAYGAYCKRMKGQEAIIRIARKMSNRILSVLKSGKKYQYDKVR

SEQ ID NO: 177348 - protein, 356 aa, unidentified
MPRTTTVHAVTAIGIDMGKNTLHMIGLDARGAIVLREKVSRGRITSRLANLSPCLIGIEAGMATHYVARELTALGHDVKQVPPAYAKPFRQGHKNDFRDAHAVAEAVQRPTTRFVPAKTNEQLDLQALHRVRSRLVSERTAVINQIRGFLLERGIIVRQGLRFLRQALPDILAKRTDVLSPRMVRIFADLTSDWRQLDERIEVVTDEIETLAKSDGSCRRVMTVPGIGPIISSAMVAAIGSGAAFARGRDFSAWIGLVPQQMSTGDRTILGRISKRGNGYLRTLFMQAARVILLRPASWPRHSFGVWLARAAQRLHPNVLAAALANKLARIAWTVLAQERANRGFRINLNRQSSPW

SEQ ID NO: 177349 - protein, 365 aa, unidentified
MRLTRSPANVGYAGHNNGRSVNLTLMHEGDKVREFYSELPRPALVGIEATGSMQWFLNLMEELGIECRVGHPAQIRAAEPRKQKHDRRDADLILKLLAENRFPAIWLPSKELLDLRALLLHRHQWVRMRVRMQNGLQAIALANGLRRGPALWSDDGQAKIAFLPLLPHAAYRRSALQAMYKNMQSEIENLTRRVAEQAGNRCGARLLMTHPGVGPVTALATEVFLGDPQRFTDSKTLASYVGIIPREYSSGEHQRLGGVTKQGSPLLRFLWGEAGAHAARRDPELKRFYRRKLVQKGLGKARVAVARKLGIRLWIMLRDEIDYQEFCRRGQIQQKTVRPVVGMPETGNGAKSHRQSDEATRLPES

SEQ ID NO: 177350 - protein, 355 aa, unidentified
MQKYKISFKNQNIYVGIDVHLRTWHVTTLTESGCKYSFAQHADARELFDRLNRRFPDAHFKSAYEAGFCGFSVHYALTELGFENIVVHAADIPTTGKEKAMKTDAVDSEKIARALKRDELTGIHIKDRRYMDDSNLIRLRQRFISDLSRQKNRTKHLLYTQGVVFPERFRNSNTHWSRNFMKWLRDEVRLLSEQKLSLILLCEQVENTRKAVLRVTREIRRLSTTEKYRENYDLLNTVPGIGLITAMSMLTEVDNDIMRFPNERSFASFLGLIPTCHDSGEKKVSGEKTNRGNKHLGPLMVEASWVAIRRDIGLAAYYSKCCQSMKPHKAIIKVARKLACRTHTVLKTKTRYVLP

SEQ ID NO: 177351 - protein, 406 aa, unidentified
MAVMIGVDPHKGSHTAVALDDREQPLGELRVRSAANQAARLMAWAAPFTERTWAIEGAGGLGYLLAQQLVAAGERVVDVQPKLAARVRLLATGASNKNDPNDARSVAVAALRSATVPSVRVEDHAAVMKVWAKRHRDLSRQHNRVACRLHSVLCDLVPGGVAGEISPAQATRLLDELEPVGAVAAARHEVALELVADLERLRVQRREARQRIAAAVTASRTTLTELFGVGPIVAATVTGEVGDVSRFPTRDRFAAYNGTAPIEVSSGERRRKVFRLSRRGNRRLNHAIHMAAVTQIRFRHTDGRAYYDRKIAEGHSGKEAVRALKRRISDAVYTRLRHDAEQTARLAAGPGGHPGNDAVACAAGSHPEHRLFGQATPGPARSLRPVRPRAAAATSKPPLRRPRKAS

SEQ ID NO: 177352 - protein, 359 aa, unidentified
MCRVGEPVDSLLSLTVQIHIMTIHPKQIVQELKSLFAGIDVGAEELFLVIRKNGTPCKAQKFTNTPADRARLVKKLANLPGIIVCLEATGIYHFDLSIALHDAGVALMVVNPKASHNFARALMKNSKTDAVDAETLAQYAERMDFVAWARPSDEKIAIRSFARRIDALTRQKAAAKNQLHALTASKETPKGVLRDVNLSVSQLEKRIDCLTKEARVMIEKYPDLERAFKLLVSVKGIAETSAIALMGELLLLPPGLSHREWVKFAGLDPRAFDSGKSVHKQARLAKAGNRHIRSALYMPALSAKQHDPHVKAYFQHLVDNGKKPLQAVCAVMRKLLHAIHGMLKHDKPFDNTRFYAIPA

SEQ ID NO: 177353 - protein, 440 aa, unidentified
MQTLPVLDGKACGVDVGSEQLHVSIAGDTPKIFGTTTGQLHALRDWLKEQSVKSVAMEATGVYWLCAYEVLETAGLEVLVVNGKHVKNLPGRKTDLKDCQWLATLHAHGLLRSGFVPPENIRRLQDYLRLRADHVTLAASHIQHLQKALERMNVKLHDVISSVVGVSGLKIIRAILAGHRDAGELLKLCDGQIQKKKAEAVKESLRGTWKAEHLFALKQGLEAWEFYQQKIAECDREIEQVLQELAGPETKQQSRGKPGGPNTPQIGNLHGLLMRLCGDKDVTVLPGLADHALLSLIGEVGTDLSGWKSEKHFTSWCGLPPGSRQSGKRRGVTSRQRNRAGRLFCVMARSVGRTVDKALGGFYRRLKARRGGLVANQALARKLAALFWRLMVHGQDYVEQGLKKYESRVEETQKSWLRKLAKKHGLLLVSPPPSPTEVHG

SEQ ID NO: 177354 - protein, 408 aa, unidentified
MRAIGLDVHRDFCEVAVVEDGVVGSAGRVASTPAALEVLAASLVATDRVALEVTGNAWEIARILEAHVARVVVVSPADTGIAGARAKTDRLDARTLAKLLWAGELDAVWTPDERCRVMRRRLSRREQLVRSRSRAKNEIHAVLVRRLVGKPPMSDLFGVKGRAWLRGLELPIEECETVEGCMRHVEFLDAEIAAVERQIAREALCSLEIRRLMTVPGVNVIAAAEFMAAVGDIRRFGSARQLAAYLGLDPKVRQSGSEPARSGRISKQGSASARWALVEAAWSVVRQPGPLHAFYERLRARRGSQIAAVAAARKLACLFWCLLTREEDYAHAQPSLTAKKLRLLEIRAGAPTLKATNTGTWATRTKMRDAERQLAEQAEASYTRMVRDWQANKPARVKVGASVTPGRA

SEQ ID NO: 177355 - protein, 334 aa, unidentified
MDTHADVPVAAALDSVGGLLGAGEFPVTTAGYARLLGWLGGFGTVCLVGIEGTGSYGAGLARHVAAAGIRVVEVDRSDRQDRRRQGKSDPLDAVSAARAAQSGRARGAPKGRDGAVEAIRVLMVAKRSAAGEHTRTINQARALILTGPDDLRARFTRHTPAALVAGIASLRPRPGDVPGYAVRVALRELGRRAVFLDGQLERLDELIVPLVTARAPGLLALYGIGPNTAALLLIAAGDHPGRLRSEAAWAHLCAAAPIPASSGKVTRHRLNPGGDRQANHALWRIVFTRMGSDAATRAYAERRTKEGKSKAEIIRCLKRYVARQVYPHLRPDAG

SEQ ID NO: 177356 - protein, 339 aa, unidentified
MVIVGCDFHPGWQQVAVFDSGTGEIRELQLRNSEGEAERFYGSLPSPALVGFEACGNTHWFEDMLDRLGHEVWIGDAAEIRASYVRKQKTDKRDAAHILKLLMEGRFPRLWRPSKADRDLRQLLIHRDRLVGVRTRVKNGLHHLMLNKGVQLKRKLWSKAGQKILHELPLEGWAAQRRTDLLQLLRTLDPQIEELDVAVERAAYANERARLLMTQPGVGPITSLAFVITMGDVTRFPSGKQVSSYLGLIPSEHSSSKRRRLGAISKQGSPFLRMLLVESVQTVCRLDEGFRKQYNHRCHRMKKGIAKLAAARKLAVRLYWMLRTNTAYPEIAHIEGSPR

SEQ ID NO: 177357 - protein, 334 aa, unidentified
MEKVTTLGIDLAKSVFSLHGVDGAGRVVLRRTLRRDQLVQAVAVLPPCLIGMEACSGAHEWGRRFQELGHTVRLMAPKFVAPYRKSGKNDGNDAEAICEAVTRPSMRFVPVKSLEQQALLAMHRVRQGFVVERTATINRLRGLLCEFGVVLPLRSVSVRRQAAQAAENLPELARRAIGDLLEQLRSLDERIGGYDREIEAQAKLCEPAQRLMKIRGIGPTTALAIVATVGNAREFKNGRQFAAWIGLTPSQYSTGGKPRLGHISKRGDAYLRNLLVQGARSVLNSAGRHQDRMSRWILELQPRRGYYRTLVAIANKNARIAWALLAKNETLRTG

SEQ ID NO: 177358 - protein, 372 aa, unidentified
MTSIIYVGMDVHTTNYTVCCYSVTTDQIFATTTMEPDYMNIVKYLDRVNRELGEDCHFLCGYEAGSLGYSLYHQLTSKRLECVILAPTTMATTRKKKGIKNDKRDASNIAKCLAYNTYSPVYVPTGEDNAIKEYIRMRNDAKDTLKRYKQQLLALCTRHGKRFTEGGSNWTLKHIAWLKNLDFGDAILNETLQEYMSLYHQAAEKVELFDGRIAELARTERYAEKVNKLKCFIGIKDHTALATIVEIGDFIRFPKAQNFASYLGLVPGEDSSGDSLQRTGITKAGNTHVRKLLVEAAHSYGRGAVGKAKPKALKERQAGNDTKVIAYADKANDRLKRKYYKIMFRSKYNIAVTAVARELACFIWGMMTDNIA

SEQ ID NO: 177359 - protein, 404 aa, unidentified
MIFLGVDWAEAHHDLCVLDEEGRVLGRRRIDTGVTGMADLHRLVGEHAEEPGEVAVGVEVDRGLLVSAVVASGYEVYAINPLSVSRYRDRHHVSGAKSDPGDAKLLADLVRTDRHNHRLVAGDSELGEAVKILARAHQNAIWARQRQVNALRSALREYYPAALEAFGTDLDSTDALSVLRIAPTPELGRQASMSKLVSALRRGGRQRNLETRAAQIQRVLRSDQLGQPAVISGAYGRTTSSAVRLIASYNEEISELEEALSEHFEQHPDAKIIRSLPGLGIVLGARVLGEFGDDRTRYAGPKSRRNYAGTSPITKASGKSRVVLARFARNRRLADALDQWAFCSLTKSPGARRYYDELRARDKTHHQALRQLANRWVGILHGCLEHQTLYDEVLAWKRYDEIAA

SEQ ID NO: 177360 - protein, 383 aa, unidentified
MLKYSVGIDISSTSFDTAVCVIDEQQKVLVKASKSKIPNTKEGFKIFTSWIEKNHKDKAVPLVVCMEATGVYYENCALYLQRSGYRLSVILPNKAKKYMQSLGIKSKNDQIDARGLAQMGAEQCLQQWNPLAEFYHTLRSLTRHHQSLQELKTNVGNQLHAIQYSMYKQKLVEQQLAKTIKIIEKQLGELETAIHKHIKEDELVFQKVANICKIKGLGILTTAVIIAETNGFELFENAKQLVSYAGYDAVENQSGKYSGKTRISKQGNSRIRRCLHMPAFLVVKYEQKVFSNLYQRTLAKHSIKMKSYVAVQKKLLTTIYALWKKNESFDNDYQNNNINIQEKEQVLSSRLGSERAEKNSQTKQCLATQGKHPVSVHSMLPLG

SEQ ID NO: 177361 - protein, 375 aa, unidentified
MSEGSEAFVGLDTFKTKISVAVADGGRCGEVRFYGDIDSSPDAMNRLVKKLSARYQRLHFCYEAGPCGYGLYRQLTALGHQCDVVAPSMIPIRPGDRIKTNRRDAITLARLHRAGELTPVWVPDEAHEAVRDLVRAREGAMLDLRMKRQQLTAFLLRHDRIFPGRKTWSRAHVRWLCEQRFEHPAHQIVMQEYRHTIDDAETRLDRLEGQLAEVVPQWSMAPVVEAFQAMRGVGFLAAVIFVAEVGDVRRFESPAQLMGYLGLVPSERSTGDRVRRGGITKAGNRRARWVLIEGAWTYRLPARVGRTLQARLDGLPKAVRDIAWKAQTRLCGRYRRLTAAGKKPCLVTTAVAREMAAFLWAIGQQVAPRTAANAD

SEQ ID NO: 177362 - protein, 351 aa, unidentified
MNNDITGVVGMDVSDRYSHLCVLGLDGEVEEESKVPTTSQGIRRRFSEMGRVRVALEVGTHSPWMGRLLEGLGHEVILANPRKVRSISHSNDKSDRVDAEMLARLARLDPKLLCPVQIRSEERHAGLVVIRSRRILVDTRTKLINHVRGVCKSLGVRLPKCTTACFHRRAVSFIPEEILPSLEPVLRQLDGIEGSIGDCDRRIKEMASEIEGVEILASVAGVGDLTAVTYVLTLGDPSRFKRSREVGSYVGLRPKRDQSGDVDKQLRVTRAGDKYLRSLLVGSAQYILGPFGPDSALRRWGLSLAERGGKAAKKRAIVAVARKLSVIMHSMWIRGEMYQAFPGTKAEEKAA

SEQ ID NO: 177363 - protein, 357 aa, unidentified
MKVTTIGIDLAKDVFGLHGVDGQGRVAFKKRLVRSRLLEFMSQLPPCLVGLEACSSAHYWARKIERLGHRVKLMSPRFVKPYRKSDKNDANDAEAICEAVTRASMRFVPIKSEAQHEVQALHRVREQLLKSRTALVNQVRGLLAEHGIVAPLGIARARRLLLEILADPERHGLSGLFRETLQEMAERLRFFDERVGAYDDRIERRFKEDERCRRLAKIEGVGPLVATAVVAAVGNASEFKSGRELSAWLGLVPRQHSSGNRSQLLGISKRGDRYLRTILIHGARAALRRADHKSDQRSRWAMRIKLARGYNKAAVALANKNARIIWALLTRGENYRPPAIAMASPTADRISLIRVQA

SEQ ID NO: 177364 - protein, 404 aa, unidentified
MQANDIGVWLGLDVGKESHHACALDRNGDKVHDKPLGQDETEIRDLLSRLSERGRVLLVVDQPNTIGSLPLAVARDMGVAVAYLPGGAMRKAAQLLPGDAKTDERDAYVIAFTALHMPSTLRDCGSDDETLAGLKVLSGYDEDLAWETTRHVNRLRSLLLQIHPAFERALKSDRITSDTVLALLERYGGPAGMRRTGIARVSEWARSRKLRNSAAIVASLFDAIGRQTVTVAGTEAAETVIPAIARQLMELKRQRREVAGRVERLLENHPLLTVLTSMPGIAAKTGSQILLAIDGDITRFENSARLAAYAGIAPVTRRSGTSIRGEHPSRGGNKRLKNALWQSAFIAAFHDPESNAYYRRKRAEGKRHNAAIICLARRRCDVLYSMLKNGTLYQPKQTDLAKAA

SEQ ID NO: 177365 - protein, 391 aa, unidentified
MSGTSDRVVIGMDPHKRSATIEVMTSDETVVGGGRFDTGRDGYAAMRKYARQWPHRVWAIEGCQGIGRHIATRLLADDEQVVDVPPKLSARARVFATGQGRKTDATDAHSIALVGTRMAGLRPVVNDEQLALLRILVDRRRSLGEDHTRMVSQLHQLLLELIPGGAKKSLSAAQAKALLATVRPRDAVGKARRRVAAELIGDLERVYRRSKEADKELKELVASTGTTLMDLHGIGPSGAARLLVEVGDITRFPNRAHFASWNGTAPIDASSGEQVRHRLSRAGNRQINRVLHIMATVQLRNPTEGRAYFDRKKAAGKTSMEAMRALKRRLSDIVYRCMINDATAAAAGPGGQRGTTTDSSVTGSHPPAGSSEKSLPGPAETQDRTLLPAVS

SEQ ID NO: 177366 - protein, 374 aa, unidentified
MNFIGIDLHTNRFTCCYRDERSPADKPAQGRVTKTFELDAQGLAAFYRTLTCDTYVLVEATITTFSFVRLFKERVKEVIIANTYELKQVSLARCNTDKIDADKLCRIIKMQVLSGETSVSPVTLPPEEIQVLRGLFTTYRLFQKQNVQLKNRIHSLLKEQLYGFTQEEIFDQKNRKKIRAIAPDSALCFQVNLLLDRLERDEADVETLKDRILLEAAPFMAQIEILTSMKGISVFIAIAVIADIIDVNRFKNSKAFTSYLRSAPSVANSNTSVSIRGTNKKGRKLSATLLTQSLNHVLDSSLKLRRWYDRLCEYKKPGLVRTGLRRRVLAEIFQMLKKGEYHYGRNEQNHMAKMVQYRRFLEKQENNAISKKIA

SEQ ID NO: 177367 - protein, 387 aa, unidentified
MAQQLDDLSRSPTPLDQDSTIITVIEMSQATWLVAGIVPGIERHPLKKIEPNEVELLCLLMRWRAEATKKGRTITRIVVAFEAGRDGFWLARWLRVRDIESYVIHPTSVAVSREHRRAKTDRLDTGLLKRVFIGWLRGEPDHCHMAAIPTLAEEDAKRPNREREGLVRERTRLVNRMKSCLVRFGVRTFKPTLRNAPDRLATLHTPEGVPLPPNTLLELRRDMARLRFVMDQIKEVEAARAQGLKQAPQEKTHAMVNLLARILGIGIDTADMLVHEVLARNLRDRRAVARYAGLTGSPDESGSRRREKGLAKAGSARVRRGMIQLAWRFLLFQKESALAQWYRARTADARGGTRKTMIVALARKLLIALWRMVTTGEVPAGVVLRAA

SEQ ID NO: 177368 - protein, 402 aa, unidentified
MNAVGIDVSKGKSMVAIMRPFGEIVSAPFEIKHTASDINSLVELINSVEGESRIVMEHTGRYYEALAHQLSEANLFVSAINPKLIKDFDNDSLRKVKSDKADAVKIARYALDKWQNLKQYNVMDELRNQLKTMNRQFGFYMKHKTAMKNNLIGILDQTYPGVNTYFDSPARSDGSQKWVDFASTYWHVDCVRKMSLNAFIDHYQNWCKRKKYNFSQSKAEEIYGKAKELVPVLPKDAITKLIIKQAVYQLNSASTTVESLRTLMNETASKLPEYPVVMAMKGVGTSLGPQLIAEIGDVSRFTHKSAITAFAGVDPGVNESGSYEQKSVPTSKRGSSDLRKTLFQVMDVLIKTHPQDDPVYQFLDKKRAQGKPYYVYMTAGANKFLRIYYGRVKEYLSSLPES

SEQ ID NO: 177369 - protein, 343 aa, unidentified
MLYYGLDVHKKYTTYCVMSEEGAVLDEGRCSNEGLPRHPTFSLKGRKRAVMEAGGNWYYIYDLLEPVVDELLLAHPLRVRAIAAARVKTDVIDARTLAHLLRADLIPAAYVPPPAVRELRELLRYRLDLVKQRTALKNRVHALLGKEGLLSPFTDLFGRRGRQWLAALPLSQAKRQRLDGFLRVLDCLTSEIHETELAIRQKAVADPAAQLLVTIPGVGALSALTILAEIGDIRRFPDALHLVSYAGLAPRVCSSGGKTRLGHITKQGPGALRWVLIEATHIAVRKPGRLQDTYRRLRRGKNAAVATTACARQLLTAIYHMLTRGDAFRTDGSSRNPLALEVA

SEQ ID NO: 177370 - protein, 376 aa, unidentified
MNEKLRFLGLDVHAETIAVAVAEPNGEVRSLGTIANREDSIRKFIRKLGSPEHLRACYEAGPTGFVLYWQLTQLGVKCDVVAPSLVPKKPGDRVKTDRRDALKLARSHRSDDLTAVWVPDEGSEALRDLVRAREAAKQDQLRAKHRLTKFLLRTGQRPPLGVKAWTEKYVEWVQQVRYTHPAQEATLLDCLNEVQHMEERVKRLEQSIVEVIQLAPAPMQEVVRGLQALRGIAHISAVTIAVELGNITSRFENARDLMGYSGAFPSEDSTGKRIRRGGITKSGNAHLRRIVVESAWSYRHRPAIGARLRRRQEGLPAEITEIAWKAQNRLHKRYMTLMARGKEQRKTMTAIARELLGFIWAIGIKAEAACKHQLAA

SEQ ID NO: 177371 - protein, 425 aa, unidentified
MTLIIGVDVAKFFSSYTILDSNGSCVIPTFDSNNDVKGLEDVLEKIKKAANGSKDNHVLIMESTGYFSNRLRDYFTSHELNVLEINPLISNSIRNISVRKVKNDHADSYDLANLYLTGKLNKLIQKKLTECIPLSQDYMRLRVLTRARQKLSKQRTTQVMQLVADVEQVLPTYKKLFKDMACKSSLATLELICKPEMITYDSFYSTLKVITPCRGQAYFTKYYDKLIDILDDAKIIGRKVETFFITIKIHVSLILEYDKYLAQLEEQIHELSQDLDSVRLLKSIPGIGGNIAPAIASEIGDISRFKNVKALVAFCGLDPGVKQSGQYNRLHNKISKRGAPELRRALYMAAMLSITKMKNGHYRNKVLYDYYQELILKKPRKVALGAIMHKLVRIIFSVLKNQQEFIMITPEQQRKLYQNNLSIAI

SEQ ID NO: 177372 - protein, 341 aa, unidentified
MTEIIRIGVDIAKNVFEVHAVNALEQVVVRRSLRRNQVLAWFGKLPACLIGMEACGTATHWARELSRLGHTVRLIPPAYAKAYVRRNKNDPADARAICEAVGRPSMRFVPIKTVEQQGEAVTHKARQLLIKQQTMTQNSLRGLMAEFGIVVPQGPQHISKLLVILADPEDPRIPAVARTALNAMADLLAALEQQVETLDKTIRAQVRANPTARRLDTIPGFGPILSGAIAAIVADPRHFDSGRDFAASLGLVPRQDGTGGKVKLGPISKRGNGYLRRLLVNGATAVLNGKNARNDPWQAKLLDSKPKKLAAVALANKMARIAWAVMTRQETYRPRAVAAAA

SEQ ID NO: 177373 - protein, 349 aa, unidentified
MKILAIDLGKYKSVACNYVTATGTARFATIVTHANEFDRLLSQESPDLVVIETCSIAGWVHDLCCQRGVKCQVANPSSEAWKWKNVKRKTDRDDALKLAQLAALEQLPTVHVPAPETRQRRALLKYRQSLITRRVATQNHLRAIAQRQGILLDRGSRAWTAAGFEVIQQIAKPLEQCSADELWRGEAALELQALEAVTKLLREVERKLEAFAASDESVKLLRSIPGVGRCTAEVVVAYLDNPQRFENGRQVSAYAGLVPKQFQSGETDRRGRISRRGPSLLRKVLVEAGWVLLRYNPWAQRLVQRLSRGQKTRRKQAIVALARKLLVRCWAMLRDGTEWHEPPTATATA

SEQ ID NO: 177374 - protein, 345 aa, unidentified
MLYVGLDLSRKRLDWQALAAEGERFDLGAVPPDADGLAKLVRRLGETDVLAVIESMSGARFVHDRLEFLGWDVRIADAFKVRGLAPLACKTDRIDTWVLAELARRDLVPEIWLPGPGVRGERERARFRLHLVKHRSALKNRIHAILFQHGLPTSSSDLFGAGGRRLLARLRLPEPWASTVAASLELIDVLDEQITGCERELRALGADHRYIPLLITCPGIGWVLAFTIAAEIGDIRRFPSPRKLVGYTGLCPRVDQSGERDRRGPLRKNGPDQLRWALIEAAHVAVRCHPPYRALAERKRAQLGRKRGTKVASIEIGRKLSEAIWQMLTRNQPFAPAGAKAPLAA

SEQ ID NO: 177375 - protein, 351 aa, unidentified
MMIIGVDYHPSFQAIAFFVEETAECGEQELNHSDGQAEKFYRDLQQRGISVRVGMEATGYSRWFERLLAELGFEVWIGDPAEIKAKRVKKLKYDRYDARLLRRLMLENNFPRIWVPDPENRDLRQLLWHRHRLVQMRTRIMNQLQALAMNEGYRWKKKLFSEQGRAQLEKLTLAPWASRRRQELLELLDRMNPTIEELTSAVEREARKRPEVLRLMTHPGVGPLTALAYVLIIGTPTRFARGKQIGTYVGMIPSEDSSARKQRLGHISKQGNSLLRFLLVEAAQAAARNHPDWRRRYIHLAMRRHKSIAKVAMGRRLAVRLYWMWRNGCEYSQSLEFSSYAGKLGTGHGAK

SEQ ID NO: 177376 - protein, 342 aa, unidentified
MEIAVLGIDLGKTTCSVAGLDEGGGVVLRKRIQRHRLLAFLSGLSPCIVAMEACGGAHYVGHFCVEQGHEPRLMSPLYVRPYVKVHKTDDRDAEAIAEAATRPTMSFVTLKAPEQLDLQAIHRARERLVQNRTRLVNQARGFLMERGIRIGAGRHVFQRELTRLLEEDDVSLMPGMVRILSDMAAELAEINDRVAGLDAEIRAHARPDADMQRLMEIPGVGPTIATALVAAIGDGSSFNRARDLSAWLGLVPRQITTGGKARLIGISKHGNSYLRKLFIHGARTVLHLVRDRSTPLAQWVDALKERAHANVAGVAMANKLARIAWAVLTKGERYRPSALETA

SEQ ID NO: 177377 - protein, 427 aa, unidentified
MKEQSRTIVGIDWSADSHTCYDLQTDKSFKITDSVEGYEKLLKNYPEAVFVIEEANNRIGDYLLINNREVYVLPPCRSKEARKYHFSSGTKSDGLDAKAIALTFKEHPSYCLKARYSKVGVKITKLVTAYNIVSKTHSQQCNRLYSLLLRYFPEYLHIMDKQYRSDTSLRILSVCPTITELKKVSNEELRKILNKENYRMTSILKNKLDRIRSEGISWEDTSCEGKLILLLVNTLLSLRKGLEVLKKEMEKTLKNSPYRIILSIPGVKAVIGSYIVKAYLTHDFKSYQEIQKYAGTVPLLFQSGRKSIMLMRKKCDNDLKGMIHMAAFASLKTCGWARNYYRRKRKEGKTYGHALRALGNILLKIAFSMLSKMKEYDETLFLNAKGIKTTQLNDTSFSETFPYPEYSQDAQLSLAATKDVVDNLIVT

SEQ ID NO: 177378 - protein, 493 aa, unidentified
MGACELESGDVALAAIPIRKMTIGIAQTLLLIIDWRIAMPKRTTSDRPELKPVNVGAAAIDIGSKMHMAAVNPASTDMPVRSFGTFTQDLHDLADWFKACSVTSVAMESTGVYWIPVYEILEQRGFEVILVNARYAKNVPGRKTDVSDAAWLRQLHSYGLLRGSFRPDAEIATLRAYLRQRERLVEYAAAHIQHMQKALMEMNLQLHHVVSDITGATGMRIIRAIVAGERNPDVLATYRDVRCHSSIETIRAALVGNDRHEHIFALTQSLELYDVYQAKMLDCDRKLEVLIAALNNKGAKPVGKLSKPRIKTKQVNTPTFDVRSALYGLLGVDLTEIHGLGPSLALKLVGECGTDLRAWPSAKHFTSWLCLAPGNKISGGKVLSSRTRRSSSRAAALLRLAATTVGRSDTALGAFYRRLSSRAGKSKAVTATARKIAVLFYNTLRHGMSYRDPGADHYEQQYRNRVLANLQRRAKSLGFVLQAIPGDADPAVS

SEQ ID NO: 177379 - protein, 355 aa, unidentified
MSQEKYIGMDVHQATISVAVMDAGGKLIMECLLETKAATIVEFIEGLHGTLWLTFEEGTSAAWLHDLLKPHVSRLVVCDPRKNALLKDGNKSDRMDARKLAELLRTNQVKPVYHGEHGVRTLKELGRSYLTITKDVTRVMNRIKALYRSWAIPCAGTTVYAPRHRAEWLAKIAEPGVRVRAERLYQQLDLLQPVRLEARRELLVESHKHSAVKLLRQIPSIGPIRAALLVALLQTPHRFRTKRQLWAYIGFAVETHDSGEYRYVRGKLQRNRERITVRGLNDNHNNDLKNLFKGAAISASTRPGPLRDFYVARVEKGMRPTMARLTLARKIAAISLTIWKKGVEFDPQQLHRQAA

SEQ ID NO: 177380 - protein, 443 aa, unidentified
MESIACSTDYTAYVALDWADKKHAWALQEAGQKRMETGWLDNTPEAVEVWAMELARRFGERSIALAVEQPRGAVVAKLSKYAHLVIHPVPPSMLAHYRQTFCPSGAKSDPGDSRLLLELLTQHRDQLRTLRPDTPETRRLQLLSEARRKIVDDRTAGKNQLTNWLKQVFPQVLDWFDDIGMPLALGFLRRWPTLQSLGHKRKETLRRFFKQRNCRSRERIEQRLEAIATAVPATNDEMLLEAAIVVIRHLVVLVEQHNKTIADLDDRIAKAYRAHPDYPIAHSMPGIGPALGPRLIAAVGTDRDRFANATELQCYTGIAPVITRSGNQKWVHWRWACSKFLRQGFQEWAQHSIGFCGWAKEYYTRQKAKGKAHHAIVRALAFKWIRIYFRCWKDHQPYDDERYLAAITTPRPRPPDKPEGQSGALAVQWETHAGFSKVNAISC

SEQ ID NO: 177381 - protein, 329 aa, unidentified
MEDRVLKRFSQPADANTLVKTLKQQYPGVTYQASYEAGFCGLYPQRIMANLDVDCIIVNPSDIPTMDKEKHQKSDTVDCSKLARCLSVGTVNGVYVPSIQQQDDRSIVRNYLQFVKDQTRCKNRIAGALYFQGLTPKLSDSKNRHLYWSKNYIDRLKALPMATPQARRSLDLLIGSYENARNQVHLTTQELRKLVREDRYKAQSALIRSVPGIGEIGAILFLTEIGDFSRFKGTDQICSYIGLIPNTHSSGEHDSSSGLTYRGHPKLREILIEASWRAISLDPAMTLAFSNYCKRMKKNQAIIKIAKKLLARIRYVMIHQQPYVSSLIA

SEQ ID NO: 177382 - protein, 368 aa, unidentified
MSEIIRIGVDTSKSVFQLHGVDAAERPVLRKKLRRRDFLSFFAQLPPTKVGLEACGGSHYWARELMALEHEPKLLPAQHVRPYVRRNKNDKQDADAVCEAMSRPRMSFVRIKSAEEQAAQMLMTTRQRLIDYRTQLINTIRGHAAEFGLTAAKGPAHVEPLLARVAKDVTVPALAKELFAIHGQEYDRLKIELREIEAKLKAWHRGNEMSRRLAEVDAIGPIGGCLLAIKAADPQAFHCARNFAAWIGLTPKDHSTAGKIRLGVITRAGDEALRRTLVVGATSVIKQVRNGKAHPSPWLRDLVARKPPKLAAVALANKVARIAWKLMVSGERYDAARAGIVSPTASVAPCSRRQGRCAPPAAVACGQP

SEQ ID NO: 177383 - protein, 366 aa, unidentified
MTIVAHAHPFVIGVDTHAKNHALSILAAPVGEVVDDGEFPTTTAGIGRAIAWAGRRTRGGQDVLWVVECSATYGAQLANAVRAAGYEVVEAARMSARASRGVGKSDPLDARRIAAAVLPLETSRLRRLREGQGVRAALRVAITARDTMSGERTAALNTLTALARVMDLGIDARKPLTTTQVLEASRWRTRAEDVAAATARAEAVRLARRVVELEDDLTENTKTLTTLLRQSPARVLLEMPGIGPVTAAVVMAAWSHPGRLRDEAAFASLAGVNPIPASSGNTVRHRLNRGGDRRLNQALHMAVVVRMRWDTETKAYVERRTAEGRTKREFRRNLKRYLARQVYRALTTASRTPVPTLAPAAPTCGT

SEQ ID NO: 177384 - protein, 343 aa, unidentified
MHTTLFVVLKIKSMKKYAIYAGVDISKNSLDICLLCADHPKEMKHERISNDEKSIRKFLKTVIAENIILCMEDTGVYGLPLCYVLEESRLDYTVVPAIHIKRSRGLKRGKTDKADAKDIVNYVFTHIHEVRLSHLPEEDLQELRLLLSERDKLVAAIKMFESTKETLPYFPKKTCNSTRKNNDKTIRQLKKQLTDIEESLATLTRSNETMNEQMTLLQSIPGIGPQTARLLISYTRCFTSFDNWRQFACYAGIAPFEYQSGTSIKGKTKVSHFAQKRLKSAIHLAALTFKKHDAEMKKYFERKVEEGKNKMLILNAIRCKLIARAFAVINRKTPFVNTQKFAA

SEQ ID NO: 177385 - protein, 419 aa, unidentified
MQAIIERCCGLDVHQETVVACLLVGAPGAQPTKEVRTFRTVTRDLEALRDWLREAGVTHVGMESTGVYWRPVYAVLEGHFELIVGNARHMRNVPGRKTDVKDSEWIADLVRHGLIEKSYVPPQPLRELRELLRYRRKLVESQAAERNRLLRLLETANIKLASVASDVFGVSGRAMLRALIEGEASPEAMADLARGQLRRKRTDLILALDGRVEEHHRFLLAVQLRRLEAIEADIAALDRRIGERLEPYSAPHALLMQIPGVDWVVAAVLIAEIGVDMSVFLSIYHLSAWAGVCPGSYESAGRQKSGRARKGNIHLRAILVGAAMSAARTKGSYLKDKFHRLKARRGALRAALAIAHKILVCAYHMLAKNLPYRDLGEAYLDQIGQTRTVANLKRRLERLGYRVILEPNAPAQATPAPAR

SEQ ID NO: 177386 - protein, 341 aa, unidentified
MKQFIRIGVDLAKNYFQVHALASEGGPAVTRKLKRSKMLEFFSQIAPCRVGMEACGSAHYWARELKALGHEALLMPPAYTKPYVKRGKNDAADAEAICEAMSRPGMRFVPVKSVEQQATLMLHTTRELLVKQRTMSVNALRSHMAECGIIVAKGVGRVDELLELADKDAMLPDAARAAVKVLAQTLEGFDKSLDALEEEIANAHAQSEMSRLLVEAPGIGKLIATAIVATMPNPSVFKSGRNFAAWLGLTPRQYSSGGKQTLGAITKQGNRYIRKLLVLGATSLLNVVGKRKGALRDWIVALLAKKPARLVTVALANKLARIVWAMMKTGEGFRTEMFARA

SEQ ID NO: 177387 - protein, 344 aa, unidentified
MDHFGGLDVSVKETSICIVDDTGRIVKEVKVASEPAALLKVLGNPAYRFKRIGLEAGPLSQWLFSALAEAELPVVCVETRHMQAVLKAQINKTDRNDARGIAQMIRVGLYRPVHVKTLRSQKLRMLLTHRKLLQSKAIAIENDLRGTLRNFGLKVGMVGKVRFEARIQELVENIPDLAVLVEPLLIVRRVLREQIVILHRRLLAIVREDEVCRRLMTTPGVGPVVALTYRATVDVPARFRKSKSVGAVFGLTCSRYQSGEIDWSGKISRCGDEMMRTMLYEAAQSMMHSKKWSWLKAWAMQIARRRGMKKAIVALARRLAVIMHRIWVDGTEFRWTREQAAAAA

SEQ ID NO: 177388 - protein, 416 aa, unidentified
MNAAGIDVSSRKSTVAVLRPFGEVVRLPFDVAHSTEGLASLAEQLKALDGETRVVLEHTGRYYEPVAKALHEAGLYVSAVNPLLIKEYGANSLRRVKTDKADALKIARYALDNWTDLRDYTPMDTIRYDLKTLNRQFQLASKQRTACSNNLIALLEQSFPGIRKCFDSPVRSDGTQKWVDFAHTFWHVDCVRKQSYNAFSERYRKWCKRHGYFFKQSNAEEVYALAKNAVVLVPKSGVTKVLVQEAANQLTSTSRSVETYRTEMERLASMLPEYPVVMKMYGVGKSFGPQLMAEIGDVRRFERKQALVAFAGIDPMPNQSGDKNVRSNKSSKRGSPYLRKTLFNVMGIYLKCAPLDEPVFQFLDRKRSEGKPFYVYMTAASNKFLRRYYAQVRDYLAALDDLPPVDMDSTGLKTSD

SEQ ID NO: 177389 - protein, 311 aa, unidentified
MDELYVGQQVVGLDLHRRRTVMVRMTPAGEQLEAVRFVADPAVLAEQIAKAGPAPEVVAEATYGWYWVADVLEEAGARLHLAHPLGVKGFAYRRVKNDFRDAADLADLLRMGRLPEAWIAPKQVRCQRELVRHRHKLRQLCSGLKAGAHAVLAKNGLLIPRSDMFGLDGRRRLEELALPEAFRVRLNSQLRLIDTLAAEIADLDGRIRAMLRADAGYRALLRVPGIGPVFGAILRAEIGEIGRFPSPRQLTSWAGLTPRHRESDTTVHRGAITKMGCGGRRRRSMRPTASNWGGCRVSGGWNRYSSIPVDI

SEQ ID NO: 177390 - protein, 349 aa, unidentified
MVVIGADLHKRSHTLVAVDESGRKLAEKTASATPAGHLELRRWLGQWPDRTVGREDCRHLSRTFERDLLRAGERVIRVPPKLMAGARRSTREPGKSDPIDALAVARAVLREPGLPIATLDGPEREVRLLVDQREDLVVSRTQDQNRLRWHLHELMPGDEPAPRSLDRAHVLLALEARLADGPGVVARLARDLVARIRALTTTIDGLEREIGRLVEAMSPSLLALTGCGRLTAAKLVGEAAGIERFRSKAAFARHNGSAPVPVWSGNVVRHRLSRGGNRQLNLALHRIAITQMQRPGPGREYIDHRRAAGDTKTEAIRALRRRISDEVFRRMRDDEAGQAARRAPLVLAA

SEQ ID NO: 177391 - protein, 392 aa, unidentified
MIYVGIDVAKDKHDCFAMNSDGEILIENFSFQNNSDGFNLFFNSISQFNESFENIKVGLEATGHYSNNILNFLTSKGFNVFVINPLQTNLFRKGQSLRKTKTDKLDARFIATMLISNNLKPYSNLSYHISELKSLVRHRFRLIEERSKFKVSLSRLVTIIFPELEKIVWSISQNSVLYLLNELPSAKNISECNLKHLTNLLQKHSCGKYSRDKAIEIRDLAKISIGTHSPSISFELRQVIQTILFLQSQIDDIDKELKRLVVELDSPILSIPGISYVTAAFILAEIGDINNFDSPSKLQAFAGLDPSTYQSGKFNATHSVMVKRGSKYLRWALLTATRLVCMRDKNFNDYKKQKLAEGKHYFVALSHTAKKLIRVIYHLLKTNSTYELQKVT

SEQ ID NO: 177392 - protein, 407 aa, unidentified
MQVVHERCRGLDIHKRTVVVACVLTPEGSETRTFGTMTDDLETLAAWLAHRGVTQVAMESTSVYWKPIYNVLETYDFELVVANAQHIKAVPGRQTDVRDAAWLADLLRPGLVRASYLPGRAERELRELVRYRKSLIRERAAEVNRVQKVLEGANIKLGAVATDVLGKSGRAMVEALIGGATDPKAIASLARGKLQAKQGDLERALRGVVGAHQRLILAAQPRHITFLDEQIEQLSQELAERQRPCAAAVEQLQPIPGVGRRTAAVMLAEVGPDMSRFPTAGHLASWAGVCPGQNESAGQQRSGRTRKGSPGLREALTEAARAAARTRRTYLAAQYHRLAARRGGNRAAVAVAHTILIIVHRLLSTGGGYEELGANYFDERDKTATVKRAGARLARLGFEVTLTPRVA

SEQ ID NO: 177393 - protein, 352 aa, unidentified
MDIIAMDCHKRYSLANVQTSDGQCVREQRIEHRRGNIRTFLSAYPAGSPVAIETLGNWYWIVDEIEAAGMVPRLVHARKAKLMLGSINKTDKLDVRGLNMLQRIGTLPTVWIPPAVLRDRRELPRTRMVLGAWRTRLKNRLHSVLDKYGLQDQFEGISDIFGRKGREVLDEVVAQLPAYTASMTKLLIERLDQVQEAIGRIEKQMAEVFAPTPEMALLASLPGVGSILSVVIGLEVGDIRRFKWANRLASYAGTVPRIHASGGKTRYGRTRPDVNHYLKWAYAEAANSVAVNHKRFPDRHVSQLYQRVRSRRGHATAVGAVARHLAEATYWVLRRNEPYRDPGLKSVSSTER

SEQ ID NO: 177394 - protein, 423 aa, unidentified
MKLTYPICCGFDVHKTFLVATIITSEYVMPHYYQKWFSTFYNGLVAFKKWLLEYDCKDVCMESTGKYWVPVWNVLEDSCHVVIANPKWVSAVKGNKDDKKDSKWIGNLFRMGLVPSSYIPSKDIRILREFTRSRSKLVSMRSSEKNRFQNAFTVCNLTLDAVVSDMFGKSATDIENYLLDTDAVDPEHCVSLLRCSLKKKASDVVEAVSDFNMTPEQKERGRIVQEHFADIDHRIAQLDEIIGDLVAEYEGQISLLCTIPGIDRRTAITILSEIGTDMSQFGSSKRLCSWAGLAPASNQSAGKKKSVRISRAGVYLKPALVEAAHAAVKSTEKQPYYRIKFERLMKRRGKKRATIAIARMILTAIYDMLSTGEVFNPSDLKKFDMPEDLERKQTLSSAKEAIKLLVSLGLVPAGSISLDALAG

SEQ ID NO: 177395 - protein, 385 aa, unidentified
MKPDPLMSLDKYFRQCVGIDISKDKFTACLFMYDRGSDVGCCTESIDFPQSKTGFNQLVKWSRREAQKGFPMPFLMEPTSTYYEKLAYHLHKIGQTVYIVLPNKARKFCEYEGIKTKTDPMDARCLALMGCVSRKLRPWEPPKAIYHELRQLTRLRADLTKMQTQLLNHIESVDHMESVDKEVRKCYGKLLESVRKQLEKNEKDIEAKVAQDEELQERVKRIATAKGIRATTIVCVIAETEGFHLINNRKQLTSYAGLDVVAKQSGKDDPKHVISKKGNANIRAALYMPALSAARCNRQMKEAYRRICGKHPDAKMISVTAVMRRLLLLIYTLWKNGEEYDETRDKTHMPKKKEPECEYGPDDCIRPNSEPMDRDAADEDGNPIF

SEQ ID NO: 177396 - protein, 388 aa, unidentified
MNVVADKSEPLTAIHTELGAIFASLELSRSSWLVTSLSPGGGEKMSKHSVRGGDFAGLMQRFAQLQEKAKMRTGRSFRIIAVQEAGLDGFWLHRALQSEGIESHVVDAASIATSRRRRRAKTDKIDGETLVRVLLAYKRGEPRVCAIVKVPTPSEEDRRHLCRERKALTAERVRHVNRIKGFLFSQGVSGYQPLRRDRRQRLEELQTGDGRAFPPHLKALINRELDRLELLLEQIKTVEAARDALLAVEQTAKPAPAAMLLDIRGIGPEFAAILWSEGLFRHFENRRQIAAYAGLAPTPWQSGAVDREQGVSKAGNPRLRTTLIQLAWLWLRNQPRSALSVWFHERVSRNGGRLRKTTIVALARKLLVALWKYVTAGVVIEGVTMKVA

SEQ ID NO: 177397 - protein, 390 aa, unidentified
MLYLGIDVGKLSHSLCLLQEDGQRSIWQTNNNREGFNDLADRLKSIDCSKLLVGMEATGHYFLNLYQFFLEKGFQSDQIALLNPLQVKAFRNTNLRGAKTDNIDAERIAVLLRFGEFQRCNVSVNGMMDLRQLSRLRYELVASSSNLKRRIIAVLDRVFPEFGKIFQNKLGKTALALIQEYPFPENLASLSLDKLKSIVKSLSKRGIADKKIEALHQAASNSIGISFGKEAFKIELEVLLARFSMLQKQIDKIEEKIESIMEKTDTSLLTIPGLGLVTGAAILSEIGSIDNFNSAVKLIAFAGLDPKLKESGSYKGKTPISKRGSKYLRSAIWYSAMVACRIEPSFKQKYKERKDKGKSHRYCITAAANKLTKVIYHVLKNNCSFQADLL

SEQ ID NO: 177398 - protein, 345 aa, unidentified
MKDSRTIVLADHHKSVFVCTVVDRATGETRAATLESRPASLKPFLESLPRPGLVFVEACRAWEWVADLCEELGIELRLVDPSRMPEIARSHKKTDRHDVEAMLTRLLAVGRLPESYRASRAERELRSLTRRLSELRHDRRKTCYRIHALLDAAGLPAVKSSFTDTSWREEMSLALPAQRGFVLRTLLDQLDLLERLTEEIETRLEELVGERADVRRLQAIPGIGPVIAATIVAEVADITRFPSARAFAAYTGLVPRVRSSAGEAHLGHITRGGPPDLRWALGQAAMVGLRAKVSTAASRLYRRKVKKGKRKKVALCAAAHKLARIVYVILRREEVFRPAPPRRAA

SEQ ID NO: 177399 - protein, 411 aa, unidentified
MRRVIGIDVHRTFGEVVFWENGRLRHAGRIDMTRTALEGFGKTLLASDEVVLKATGNSIAVSRVLAPFVARVIIANALQVKAIAQAHVKTDKIDAGTLASLQAAGYLPQIWTPDAETERKRRLVARRYQIVRQRTRLKNEVHSILHAHLIPKCPHADLFNARGRAWLAAHQLPDDERATIDRHVRELDRLAEDLALLEREIAQDAIEDSAVNRLMTITGVNLAVAAGIVAAIGDISRFNSPQKLVSYFGLNPRVRQSELGAAHHGRISKVGRSHARAMLVEAAWAAAKAPGPLNAFFVRIRARRGRQIAAVAVARKLTVLCWHLLTKDEDYLWARPALVANKTRAMQLQAGHPQQKGSRRGPAYAYNIKALRDHEMLIAAQAEHSYERFVSQWKPRRPKTGARAPQLGKTK

SEQ ID NO: 177400 - protein, 386 aa, unidentified
MYFVGIDISKYKHDCFITTETDVIIKNLSFKNNKEGFYEFLNILKSLDSSKQIRIGFEATGHYHFNLMLFLEKNNFSFMEFNPSLVKKFISTTTLRKTKTDKTDAMAIAKYLMSVDFKPYPKQFYHKYALKSLTRRRESFVHQRAKYKVDLTNILDIIFPEFKPFFNNSFSATSMFILNNYKTVENIANMTDYESIKNISRGRFSYSKFLILKELAHNTIGIDNDIYTIQLSGVLNLISLLDEQISIIESKINEIMQTLKPKCNCIKGISTITAASIISEFGDFKRFKSADACLAFAGLEPSTIQSGCAEHNGKMVKRGSPHLRATLMSAAEYVFMHEPVFTVFYYKKRNEGKAHRVALSHVAKKLVRVIYKIESTEDDFDITKLK

SEQ ID NO: 177401 - protein, 397 aa, unidentified
MIAVGIDISKAKSTVAVIDSDGTVLASPFTMAHTQPEMEAFVTYLKGLGEPTTILMEYTGHYHYPVLKKLQGEGFPVCIVNPYQMKKYGDVEIHKAKTDKKDALRIAAYALEKSYKLVPYSPMEQKYEDLKFLSRQYSQRITYVAKLKVQLIALLDQTMPGITRILPLNSRNPEKCALLLFIRRFKSFDEIHRIGKARFLASYDVLAKKTSERSASSKGLSIYELAVDSITTRGEDPYIWLSQNQCVDLLSTTQNAADEIISQMRNIAETIPEYKVLRAMRGVGDRLGPIILAEIGDIRRFHSGKALNSYAGNDAPPYQSGQFESRNRHISKRGSSALRKACYEVMQALKLTKPQDDPVYLFMLKKEQEGKPFNVAKMAGVNKFLRIYYARAMELYK

SEQ ID NO: 177402 - protein, 315 aa, unidentified
MAQLSPKVGIDCSDGRLDVHIYPLDLGFCVANDADGWRELDHRLAELQAHVVAVEASGGCERDIARFLTAQGYSVRQLDPFRVRQFAKAAGKLAKNDRIDAEIIALFVATLPTRPLVRHKHLERLAELVTARAQLLDMVTASQNQARRREDKMLCRLDARREKALQADIKLIDTRIADCIEATPELKAKNQIMRSMKGLGPVLAHTLLALLPELGQLTRKQIAALVGVAPFDDQSGKRLGMRYIQGGRPAIRSTLFMAALVAATHNPIFKTFRERLRQAGKKPKVAIVAVMRKMIVALNAMLRDSAQWRNLTDVA

SEQ ID NO: 177403 - protein, 395 aa, unidentified
MDPVGRVVVGMDPHKRSATIEVMAADEAVCGGGRYGTDREGYAAMLGDVRQWADRVWAIEGCNGIGRHLADRLLADGEQVVDVPPKLSARARVFATGQGRKTDATDAHSVALVGTRMAGLRPVVNDEQLALLRILVDRRRALGEDHTRMVAQLHRVLLELIPGGAKKHLSAAQAKALLATVRPRDAVGKARRRVAAELISDLERVYRRSKEADKELKELVASTGTGLMDLHGIGPSGAARLLVEVGDITRFPSKGHFASWNGTAPIDASSGDQIRHRLSRAGNRQINRMLHIMATVQLRNPTEGRAYFDRKKAAGKTSMEAMRALKRRLSDIVYRCMINDAITHAISGQETGPGGHRGTTPDSSATGSHPHTGTSDKPLPGPATTHPTTASGPLH

SEQ ID NO: 177404 - protein, 311 aa, unidentified
MMNDSIGVDISKDHLDVHRLSDGVSRRFANDSRGHRTLIGWLERPELRIVYEPTGPYHRALEHRLAEAGFALVKVNPRQARRFAEATGRLAKTDRLDAAMLARMGALLELQARPARGPTLNDLKDLRMAREALVKNRTAARNRAKNLTLPILKRHNAEQLRQIERQIAALENEIMALIKVDPDLARRFDILVSIPGVSAITAFALLIDMPELGTLDQAQVASLAGLAPVARQSGQWIGRAFIRGGRANVRRALYMPALVAIRFNPDLKAKYDRLKAAGKASKLAITAVMRKLIIIANALLRDGRIWEPTRT

SEQ ID NO: 177405 - protein, 320 aa, unidentified
MEASLGIDIAKATYAVALLTADGRVRHKSCANTPAGFRDLATWLQRQHVTTVHACLEATGTYGDALATWLHDAGHVVSVVNPAIMHAYARTQLTRSKTDRIDAELIARFTATQPPPAWTPPAPEIRQLQALVRRLDALQGMRTQELNRLEAGVAVAEVRASIEAVLAQLDAQIAHVKQLIRDHLDRHPRLRAQRALLVTIPGIGETTAAVLIAELFDKPYTRARQAAAFAGLVPRIVESGTLRGRSRLSKIGPGRLRKALYLPAVAALRCNPTIRAVRARLQAAGKPPMVIIGAAMRKLIHLAFGVLKSGKAYQSTYAHS

SEQ ID NO: 177406 - protein, 403 aa, unidentified
MGPEYAVFLGLDVGKGEHHACALDPSGKKLHDKPLPNDEQRLRALFTQLGRRGRVLVVVDQPASIGALPVAVARAEGCQVAYLPGLTMRRLADVHPGNAKTDARDAYVIADAARTLPHTLRRVDTGQETLAELEVLVGFDDDLAGESTRLVNRIRGLLVTIHPALEKAIGPRLHHPAALELLITYGGPDGLRAATAEQLLATAKPLAPRMAGRLVEAVKAALDAQTVVVPGTTAAATVLPHLARSLQSVHDQRKQVAIGVEEILDAHPLAKVLISMPGLGIRTSARILLEIGDISAFATPGHLAAYAGLAPVTRRSGSSIKGEHPPKGGNKPLKRAMFLAAFASLSDPLSRAYYDRKRAEGKKHNAALICLARRRSDVIYAMLRDQQPYQPSRKITTQAAPAA

SEQ ID NO: 177407 - protein, 373 aa, unidentified
MNYTTVYVGMDVHKENFSLCCYTNEKEEAEYCQKVKAHYSKVLNYLDAMRFHYGDDAVFICGYEAGCLGFTLYHQLTQHHVKCIILAPTSMAKPAGKKKVKTDKLDAALIARCMAHHDYSPVHIPTDKDEQVKEYIRMRSDHKAALKKVKQQISAFCLRHNYRYETTRSHWTQAHLNWLRSLKPEGLYEEILSEYLSTYDQLTDKLERLDKRIEELASDTDYQEKVRKLSCFLGIKTHTALTTIVEVGDFKRFPSAQKFAGYLGLVPGEDSSGGSHNGLGITKAGNSHVRMLLVEAAQSYTRGRAGCKSQTLKARQYGNTAQVITYADKANERLRRKYYRMVLTQNKKPNVAKTAIARELSCFIWGMMTGNMG

SEQ ID NO: 177408 - protein, 314 aa, unidentified
MAENNVYVGIDVSKAWLDIAVEPQERLWRMENSPVAIAKLVKQLVELHPTMIVVEATGGYEAKLVEALCAAGLPVARVNPSRVRKFALGMNWLAKTDKIDARLLARFADKANPRLTQLPNEQEKRLAALVKRRKQVLDMLVAEQNRLENADPDVLQYILGSQTMLQDQLDELDRAIQSHIDQTPDLKKKQDLLTTVPGVGNVTASTLTAQLPELGACDRKQIAALVGIAPFPHDSGRKRGKRFIKGGRPSVRSVLYMAALSASRFNPVIRAFYNRLILSGKEFKVALVACMRKLLTILNAIIRNQQPWKPCVSS

SEQ ID NO: 177409 - protein, 398 aa, unidentified
MQPRMSAFEVFVGSPAAPSVQQTTTWKRKETKKMRRSNQDRIVGLDVHPDSFAGAILQGTDPWKARVVSTSTRVALPLLEKWALRHTREEDILVMEASGNAFCVAERLRALKRKVVILDSHRAGKVGKTYCATDRVDAIKIARIYLSALSPVVWQPDAKTRERREVFSAYQAVVKEGMRLKQQLKSMLNEHCVRLEKGFRLSHPSAIGLGARVRRQRLRHYMAQEILAEKELLRLTRLCGINLITLYGLIAAIGEIKRFATARKLSAYFGLNPTVEQSGNYEGSGALKRHGRGAIRALLVQSAKKLLQVDNPLQKWGLALAARRGRNKAAVAIARKLCVAVWHVMQGHVIGAIERMDTLHTKLHKLATELGVPTIKQLGYETKEAFVQKKLYLLRSYA

SEQ ID NO: 177410 - protein, 345 aa, unidentified
MMVIGIDAHKRSHTAVSVDDMGRQGFVKTVGTTTQDHLRLLKWAVGLAGERLWAIEDCRHLTRRLERDLVAAGESVVRVSPKLMARVRDSARSYGKSDPIDDLAVARAALREPDLPIARLDGIEREIRLLVDHREDLVAERTRIIARLRWHLHELDPSWTAPTKLERHSAFDKVKAHLSDHNDGAMVRRLALRLVEHLRLLTDEIDELTAEITVRVTRIAPSLLAIVGCGALSAAKIVGETAHAGRFRSKDAYARHNGTAPLPVWSSNKQRHRLSRTGNRQLNAALHRIALTQARCYQPARELLERRKNGGDGGREALRILKRRLSDVVYRAMLTDETGSLPRTA

SEQ ID NO: 177411 - protein, 307 aa, unidentified
MHACVGIDVSKATLDVAVHGSSEVHAFANSAVGFRRLAAWLLPQRPHQVVLEATGGYEQAALDALFAAGLPMVRANPRQVRDFAKALGQLAKTDRLDARVLAQLAAAVSLPRYQPACAWQRRLAQWHQRRSQLVQMLGCERQRLERLVEPALLTWARKHISMLQRELRRLDTQIKYQVAAQPSLDPLRSLKGVGPVLQSTLASQLPELGQLDSKAIAKLVGVAPLARDSGLLRGQRHVWGGRRQIRAALYMATLTAIRYEPKLRAFYQALRARGKLAKVAIVATMRKLLVILNARMRDARLPQLQPA

SEQ ID NO: 177412 - protein, 371 aa, unidentified
MSVYVGIDVHRKRSQVAVVDEGGAVQVNRNVPNGVESVLQVIGELPVGTPVAFEAAFGWGWLVELLEDYGYAPHLVHPLRCKAIASARLKNDKVDAAILAQLLRADLLPEAWIAPPAVRLLRALLRHRCQLVRLRTLLRNRIHAVLADHGQDRPAGCWSGPGRAWLADLSLPPASRRVIDDDLALIDALIEPVARLDAQISERAKTDPRVKILTTLPGVGELTALVILAEVGDFSRFANARKLAAWAGLTPTVRGSDLVVRHGHISKQGSAWLRWILCEAAQTAKRSPEFALTYQAIARRRGKKIATTAVARKLLTRAYHLLADADGTAGPKNPTAHSRAVPADRTRPEGREVTKPRASSQNRMSRPRAAR

SEQ ID NO: 177413 - protein, 351 aa, unidentified
MIIGVDPHKGSHTATAVSPITNAPASSLRVDATLAGYRQLLRWGKAFPERQWAIENAHGLGRHLAQWLIARGETVVDVRTTATARVRELSRGGRRKNDMLDASAAASVAAVQGDVSLVAAEDEITVFALLEERRANVAAHRVRLANQLHALLRDLVPGGARPALTAASATALLRRLRPLSAAGRTRKRLARELVLEIRATDARLAQIARRMAEALRARGTRLQQVQGVGPVLAARLLGRTGRASRFPSAAAFANYAGVAPIEVASGDRARHRLSRSGDRQLNSALHLVAVTQVRMPHSIGRSYYDRKIAEGKTRNEAMRCLKRRLADHVWRLMLVDERLHDKSAESPAAIA

SEQ ID NO: 177414 - protein, 362 aa, unidentified
MEFFCGLDVAMDETAVCVVDDHGVVHLETTAVTDPDALFAVLKPFLPRLRRVGHEAGSLSPWLHPELKKLGLPAVCLETQHVRAAMSAQRNKTDKADALGIAHIMRTGWFRQAHIKSESCYRTKLLLTHRRNLKAKFLDLENAIRHSLKSFGIRLSKVGRGAFDQAVRAAVADDPLSAELMDAMLSARAALWRQYCRLHDLVVKMVARSELCRRFMAIPGVGPVTALSFMTAIDDPSRFRRSRDVAAYFGLTSRRWQSGTSIDVQGRISKAGDADVRRSLYEAASGLMTRFKGSDKVKSWGQAIAKRSCHRKACVAVARKLAVIMHAMWSDGTFYVGDPAASQADAGRRAHDKARKLLGAHR

SEQ ID NO: 177415 - protein, 335 aa, unidentified
MQIYGIDLAKEKFDVSFFDLTSKKVSNKPSHKVVKNNFKSIGRFLETLPSDAVLVAEHTGVYGDTLLKCCMDSNVKIAFVGGYVIHRYRATPDRAKTDVLDCALLREFGERYPDKLKYKTFPEEALYELRQLARHREMLVEQRKQLMTADKSEDCRPIRSLAVKRSMDHIKEMLDMEIAETEKEMLKVINGHESIHHNYELVKSVDGVGLITAVELLVKTENFTKITTARQYAAYAGTAPYEKSSGKMDKGAHISKIGNRRSKTLLYICAESARLHNKEIKLYYERRTLIDKKPRHYVLNAIANKLLRIIFTLVEKGEYYDANFIRQDPRVVKYN

SEQ ID NO: 177416 - protein, 323 aa, unidentified
MTPQPCFVGIDVAQAHLDMAVRPTAETWQVANDEAGITTLVTQLQALAPTLIVLEATGGFQGPVTAALATAGLPVVVVNPRQVRAFAHALGVLAKTDRIDARVIAHFAEAVRPTPRPLPDAETQELRALVVRRRQLLAMLTAERNRLGTAPARIQQAIQQHIAWLESQLAALNDDLTATIERSAVWQAKADLLRSIPGVGPVLSRTMLAQVPELGTLGHKQVAALVGVAPFNRDSGTLRGRRTVYGGRAEVRAVLYMGALVATKHNPVIKAFYARLCAAGKAKKVALTACMHKLLTIMNAMVRDLKPWQPQEVAIAYSVLQMN

SEQ ID NO: 177417 - protein, 359 aa, unidentified
MTKINQLDFTGTTIFCGLDVHKVNWRVNIRDAEFELKDFTQPADPFLLYKHLIRNYPGATYKAGYEAGFCGFGIHRQLTALGIECILLNAADIPKGDKDRRQKNDKRDARSISQELIKKNIKSLYVPGIDWEHARTLVRNRQQQIIDSTRCKCRIWHLLHFSGLPLPDKTETGQHWSRRFIKTLEEMDCGGSTALKATLQIKLQDYLHKRNLLLESTRAIRHLYRQPAYQPFIQLIISIPGIGEINAAIILFELQDIFRFKTFDNLCSYAGLIPDTDDSGNIKINKGLTHRHNTFLRKALIESSWVLTKKDPAMLMKYKDYCKRMHKNKAIIKIARHLLARINYVLRKQTAYVSGIVAG

SEQ ID NO: 177418 - protein, 348 aa, unidentified
MLHAGLDLSRKRLDYCLLDERGRRVEVAAAPPDLDGLAGLARRVEQRHGRVPVRAAIESMNGARFVHDTLERLGWEVEVADAQKVKGLAPLACKTDKIDAWVLAELSRRELVPAIWLPDFELRAERERARFRLFLVRERSALKHRVHAQLLAFGHACPVSDLFGRQGRELLERLEFPEPWRSGVLAAVAMIDDLERQIAAIDRELRELGADHRYVPLLQSVPGVAWVLGYTIAAEIGDIRRFDSPAKLCGYTGLCPRVYQSGAKDRRGQLTHAGPRYLRWALVEAATHACRHPAYRERYQRNKRRLGRQRGAKVAQVDIARKLAEAIWHMLTRNRPFAPAGATPPLTA

SEQ ID NO: 177419 - protein, 387 aa, unidentified
MFSVGIDVAKRSHQACVLDDSGQMVGQSFKFSSSRSGVDLLVSTLQELGSPATIAMEASGHYWQGLYHYLTSQGFPVLVVNPLQTEAYRSTAVRKVKNDRRDAFVIADFLRIGRIQPNYVPGEAVVQLRELTRYRMDLEDQIGDAKRRILTMLDRVFPEYPGLFSDAFIVSSRAVLKEAVAAADFAAFDLQELTSILNQASRGRFGEGKAREIQERAKESLGMSFLGPVARVKVGTLLEQIVLLKRQIQEVEAAITELMEREPQYLTTIKGIGPVLAATLLAEIGDIQRFSSLESLVAYAGIDPTVFASGEFSGRRQHMSKRGSPYLRRALWLTAHSTRYWNSDLNSYFQKKLSEGKPYKVAMGALCRKVLSRVYVVLKENRPYRPC

SEQ ID NO: 177420 - protein, 344 aa, unidentified
MNIASIGIDLGKTTFHLVALGERNKILLRRKFSRTQLLAYTANLPASLIGLEACAGSHFIGAVLREQGHQVRLIPAQFVKPYRKSNKNDFIDAEAIAEAVTKQNMRFVQIKTQEQLDWQAMHRVRDRLMQRRTALINEIRGFLLERGLTFAARPIYLRKNLPTVIEDAEQNLTPRLRWLLDRLWQEWKQTEIDIKAITDEIERISNEDARCRQLRQIPGFGPLVSTATVAAIGNGAAFRRGRDFAAWVGVVPRQFSTGGKQKLYGISKRGNVYLRRMLIHGARAVLLRVKYDTGGFGQWVHRLAQRAPRNKVVVAIANKLARMAWAVLSSGKDYRHQPLQPAAA

SEQ ID NO: 177421 - protein, 461 aa, unidentified
MQRVTLGIDVACRAAHQASLADATGRFAWSGRRFRTSVQDLETLWACVPDDVEVTVVMEPTRNAWVPLASWFRRRGAQVVLVPPEQAADLRDYYSKHVKSDRLDSRMLARLPLLHPDGLRPAEGLGPAEPLRRATKLRANLVKRRSAVLARLDAYLELLGPGWHAAFGADLANNTPLRFLAAGYADPHTLRRLGQARLAKFFWRHSRGAWGHEHAQRLLAVAAETLALWSEDIDYGELADDIAVEARLALQLCAEIHELEQRTTVALHQLDPHGIMTSVPGVAQINGAQILARLGDPNRFRSLAGARAFSGLVPSLNASGLNGHHGPPTKAGDAPLREALFMAANQARRIDPTLAARYHRLMARDGKHHNSALCHIAATLLTRTIACWRANTPYVIRDLDGTPLTTSQGRDIVTQRYTVSAELRRQRRTTRGRAGETRSREALRQPARPTTNLEPQPVDSP

SEQ ID NO: 177422 - protein, 358 aa, unidentified
MKKPTKQATREVRYIGLDVGDRISHFAVKDSQGRLLEIGRVKMTLEELEKTFSVFAGDCLLMEVGTHSPWLQRALRRIGIDARVCNARAAAEVNRNGHKTDARDAENLAELLRTNSQFVRVVEHCTEDDQLMWAVIRARDALVRARTMLVNLVRGTVKSNGKRLSRCTSEGFHKTLAEVPQQLKSALSPIYKQIRELTASIRKYDKKIGSFVQNDRPEAQRLTQITGVADLTALACVLALGNVNRFRRSRDAAAYLGLVPKKRQSGDRDPQLGITKRGNSTVRRLLVCAAHYIIGPFNKTQSDLRTFGLKLAGGGNDKRRKKRAVVAVARKLAVVMTAMLQTGLAYEPVRARQERISA

SEQ ID NO: 177423 - protein, 384 aa, unidentified
MSKDTLLFIGLDTHKEFSEVAYVDDLRGSSCSHYGKIKTTKPALVKLVRQFESKYPKVTLHFVYEAGPCGYWVYRLLTSLGHCCYVVAPSLIAKKPGDRVKTDKRDAMMLATRLKQCDLTPIYVPEPEDEAIRDLSRARETAMKDLNDGRYQFKAFLLRNNIRYEGPANWSLKHLRWLTELVLPHPCQQIVLQEHLQTIMERQKRLERLDHELEHQVKGWRYYPVVKAIQAMRGVRLRVAVGVISELGDLTRFDHPRKLMSYLGLVPSEHSSGEHRRQGPITKCGNKRARRLLVEGAHSYRYSANVSTELQKRQEGIPKEIVDIAWQAQLRLCRRYGRLMHRGKHRSVVVTAIAREMIAYIWAISREIVLPKLDPKKRQSRVPA

SEQ ID NO: 177424 - protein, 412 aa, unidentified
MQTLIERGCGLDVHQATVVACLLMVRRDGKVQKQMRTFGTTTRELVGLREWLLSEGCTHVAMESTGVYWKPIYAILEGALEIVVANAQHIKKVPGRKTDVKDAEWIADLLCHGLLRSSFVPPKSIRELRDLMRYRRKLVESQAAERNRLLKVLETANIKLANVATDVFGMSGRLMLRALIAGKATPQEMAELAKGLLRKKIPELELALEGKLEQHHRFLLELQLQRLEAAEKDLAVLEQRIRQMLEPYAAQLSLLDEIPGVDWTLAAVIIAELGVDMTVFGNVSQLASWAGVCPGNNESAGKRKSSRIPSGNVYLKSGLVEAANAAARAKGTYLRDKFFRLKARRGYKRAVVAIAHKILVAIYHMLSQQVSYNDLGDLYLDKLNQNHLTRNLVHRLERLGYAVTLTLQQKAA

SEQ ID NO: 177425 - protein, 409 aa, unidentified
MEQQLERCCGLDVHKETVAACVRIGGRSGKAEQHVQTFGTTVGELLVLRDWLAAHGVTHVAMESTGVYWKPVFYTLENDFTCLLVNAAHIKQVPGRKTDVKDCVWIAQLLEHGLLRGSFVPPAPIRDLRDLTRYRKALIHDRTRVANRLHKALEEAGIKLASVASDILGVSGRAMLAALVDGTTDPTVLADLARGCLRRKLPALRQALVSRFRPHHAFVLGQLLAHLDYIDEAIATLSAEIERVMVPFAEPLRRLDTIPGINQRTAEVILAEVGADLRAFPSARHLASWAALCPGHHESAGKHKSGKTRKGNRWLRTALIEAAAGASRAKNSALQARFRRVLRHRGPKKAVVAVAHALLRIVYHVLADGTVYREAGADYYDRHHSQRVTRRALQALERQGYRVTLEPTA

SEQ ID NO: 177426 - protein, 319 aa, unidentified
MNNIILGIDISKKTFDVALLNNHKVNTKKFSNDSKGFSTLKQWLVSKSIHDAHACMEATGGYEVSLAEYLYVNHFKVSVVNPACVKGFSMSRLSRVKTDKADCELIAYFCQAIQPDLWQPVPSHVQELQQWVRRLDSLITNKHQETRRLEGACNIISANIRIHIDFLDKQIEEIEELIFSHIKKHQDLNDRNKLLASIPGIGEKTIGVILAFLNVENFNSAKQLAAFVGLNPKPRQSGSSLRGVGRISKTGDANLRKAFYMPALTAMRFNPIIKNFSERLSNTGKSKMVIVIAAMRKLLHIIYGVLKNKTPFNRDIKTI

SEQ ID NO: 177427 - protein, 339 aa, unidentified
MKATVVGVDIAKRVFQLHWVEMESGEIVSVQLKRAKFLEHFANRVPCLIGMEACGGSQHWARELHKLGHEVRLLSARMVKAFVGRNKNDAADARAIWTAVQQPGIKAVAVKSEAQQAVLALHRMRAQLVKFRTAQVNGLRGLLVEYGEVMPQGRAGVRRDVPAALGRVAERLPAVVIDTLREQYARVGELDTQIQQIEQRLQHWHRQEEASRRLAEIPGVGLLGATAAIATIGDAKVFKSGREFAAWLGLVPRQGGTGGRVRLFGISKRGDPYLRTLLIHGARAVMTHSKAPPEWATQLAERRPKNVAIVALANKMARTIWALLAHEREYQPKYLSRPA

SEQ ID NO: 177428 - protein, 375 aa, unidentified
MHGGQTVGKYSEVFVAFDVAKKKHAVAIAEGGRTGEVRFMGDVENNPSPIERAIKRLANRYARLHVCFEAGPTGYGLYRQVKALGHDCLVVAPALIPKRAGERIKTNRRDAVTLARLHRAGELTGVWAPDPAHEAVRDLVRARESAGDDLRRKRQQLLSFLLRHSRIYSGGGHWTLAHRRWLAGQKFDHVAQQIVFQEGIDAIEDSLQRLRRLEKQVALIVPDWSMAPVVEAYQAMRGASFLVAVTFAAEIGDVRRFDTPRQLASFLGLVPAESSTGDTIRRKGLTLAGNRRARRALVEAAWTYRYPARVSETLRARLEGLPKPVRDIAWKAQVRLCARYRRLSATGKKPPVVVAAIAREMAAFLWAIGREVAPA

SEQ ID NO: 177429 - protein, 436 aa, unidentified
MFVGHRFRTDPDELDTLWARLPKDAERIEVVMEPTRNAWVALAAWFRRHGATVVMVPPEQSADLRDYYNKHTKTDRIDSKVLARLPLLHPEGLHREDSLGPGDELKRAVKIRSGLVHRRTACMARLDALLEILGPAWIAALGSDMTLTALRFLARYANPVQVKRLGKARLAAFFRRSSRQAWADERADAVIEAAATTLRLWGADGGELDFDALAADIAAEARLALTLTDEINGFDKRIGALYDKADPAGIVRSVPGAGRVCAPQILGRLGDPTRFANLAAVRSFAGLVPAADSSGQADGHRGPTKAGDSCLREALFIAADHARKVDPTLAVRYQRLMLAGKHHDSAVCTLAAVLLTRIAACLRAGTHYLLRDTDGRVITEAQGRAIVAERYTVPPEVRAARRKVTPHRHPRRNERNERAKTGVATRSKASPVPQPA

SEQ ID NO: 177430 - protein, 356 aa, unidentified
MSRDIKYIGMDVHKEAIVIAVLNGSGKLVMETIVETKASSILQFIHGLRGELHVTWEEGTWAAWLYDLLQPQVEQVLVCNPRRNALLKEGSKSDQVDAQKLADLLRTGMLRPVYHGENGLRTLRELGRSYQTISKDLTRVMNRLKALYRGWGIACAGTQVYGPRYREEWLNKIPQAGVRRRAELLYQQLDGLQGLRRHLRPEFLAESRKHKAAKLLRQIPCIGPIRAARLIALIQTPHRFRSKRQLWTYSGLGIETHDSAQFRFVRGQLQRSRKPQQIRGLNRNHNHEMKEIFKSAATRASCGGGPFHDFYAGLLAKGMKPEMARLTLARKIAAITLTLWKKEERFDVEQLKTQKQ

SEQ ID NO: 177431 - protein, 362 aa, unidentified
MLQSTTIVAFDHHAATTVAAVLLPGQRTPALHSLTSDIPTILRFLERLQRRGPIQCCYEAGPCGFALQRALTAHDIPSDIIAPALIPRRPGDRVKTDRRDAGQLAVLYRAGALTAIHIPTEQEEAARDLLRCREDIRVDLLRARHRLTKFLLRHGRRFTLTKKAWTKRHAEWLQAQRWELPALEQTHRAYVRAVDDAVARLQAVDVELRDLLTIEPLRGRVERLRCFRGIDDLTALTIAAELGDARRFPSASRVMAFTGLVPSEYSSGASRVRGRITKTGNAHLRRVLVESAWHYRHHPFIGDALRHRQRGAPPAVIDHAWVAQRRLHRRYRRLAARGKPKQHIVTAIARELSGFLWAALTQ

SEQ ID NO: 177432 - protein, 351 aa, unidentified
MTTMTDSRPLVTGGVDTHRDVHVVCALDERGAELGVESFSTTAAGYRQALRFLRRFGEVARVGVEGTGSYGAGLTRYLHAQGVEVIEISCPNRQRRRSHGKSDPVDAIAAAKAVLSGEAAIEPKTRTGNVEAIRALRTADRSARHARVKALNQMRALLLTGPDELREQFKGTTPWRMVRTAARLRPGDPMNAVGATKYTLRLLARRVLELEAELKELKAILKPLVAATAPELVASYGVGVDTAGALLVAAGDNPERLRDERAFAHYCGTSPIDASSGTVVRKRLNRGGNRHANEALWRIVMVRLVSDPVTRHYMERRLKEGKSKPEAIRCLKRYVARELYPLLAKTAPCNR

SEQ ID NO: 177433 - protein, 312 aa, unidentified
MTASQDVFIGIDISKDRLDVHVRPLGVGFSVSNEAAGHAALIARLRPLRSKRIVLEATGGYERALWLALSEAGLVAAVVNPRQVREFARAAGRLAKSDRLDAAVIAHFAETFAPRPGKPDPVADRLGEHVLYRRSLQEEIVALEHQRRRLETPALRERAGRRHAALRAEVKEIEREMRAIVDGDPGKKALFACLTALKGVGLVLACTLIANMRELGSLTRHQAAALIGVAPLNHDSGVRRGYRAIAGGRRRVRNVLYVATLSAVRSNPVIREFYRRLSADGKPAKVALVACMRKMLVMLNGRVRDHLATATA

SEQ ID NO: 177434 - protein, 385 aa, unidentified
MLSRADHTEISIRTDLRAIFVSLELSRTIWLVTSLSPGTREKMSKHSVPAGDIGGLLVRLRSLQERVRARKKQLPPLVAIQEAGLEGFWIHRVLTENGIESHVVDPASVATSRRRRRAKTDKLDGDTLVRTLLAYKRGEPRVCAMVRPPTHEEEDRRRLSRERRVLLKERIQHSNRIKGLLFGQGVTGYEPLGRGRRQRLVGLQTGDGRPLPPHLKAQIDRELDRLEMVIEQIKAIEDELRHVIVAADTVTPVPRMLIELKGIGNEFATVLWTECLYRRFDNRRQVAAYAGLAPTPWQSGSIDREQGVSKAGNPRLRTMLLQLAWLWLRHQPDSVLSRWFLDRVKANGGRLKKPTIVALARKLLVALWKYVTSGVVIEGAIVRAA

SEQ ID NO: 177435 - protein, 389 aa, unidentified
MPQIPLNLDDMSRQQSALAVKLSALMNKTITGHSISQASLVNYVNRVLNLGLDVHYRQVTVAMQEDGGRIKAAGKMGYVDFLNWVGKKLAEGWEIHSCYEAGASGYWLHRELVKLGVKNLVVVPKAMGQGGKKQKTDKRDAGELCDCLDRYLRGQDKALSVVRVPTEDQEQKRALIRFHRQIMADRGRCEARGKGLLCAQGIQVHGRWWQVKAWLEVQSDPRLKDWIKEQLSGWRNKILSTDEEQGALRERIAALAPAILPKGVGAYSAAVLYYEMRGFERFSNRRQVGSMTGLCPGIHQSDGRGKEGSINRCGIGIVRWTLVEMVWRLKIWQPQYPPVRRLASGLVKGKRARKRLVVQAARRLAIDLWRLSTGQTTPEKLGLIMHCAK

SEQ ID NO: 177436 - protein, 418 aa, unidentified
MGREVGVDVMVERGCGLDVHQAMVVACLLTGPPGRGPQKEIRSFRTMTAALREMREWLQENGCTHVAMESTGIYWQPVYAVLDGAFELVVGNAHHIKNVPGRKTDVKDSEWIANLLRHGLIRSSFVPAKPVRELRDLLRYRRKLVDACAAERNRLLKLLETANIKLSSVASDVFGVSGMAMLRALIAGTVTPAEMAGLARGRLRHKLAELELALEGCVEDHHRYLLSVQLRRIEAAEYDIKELDARITAKLEPYDEQLQRLMRIPGVDWFVAAVIVAELGIDMTVFPSAAHAAAWVDICPGNYESAGKRNGGNIRKGNRHLKTALVTAAVAASRKTGSYLKDKYFRLRARRGPLRAAVAVGHKILIAAYHMLATGAPFKDLGADHLDTAYRQRATRTLVRRLNRLGYKIALIPTQARA

SEQ ID NO: 177437 - protein, 348 aa, unidentified
MSNVTLLAVDLAKNVFQLHGIDAHGKTVLKQKISRDKLLNFAANLKPCDIYMEGCGSANYWGREFKKFGHKVKLINPKYVKPFVKRNKNDKNDAEAIAVAARAPGMRFGCVKSETQQDVQGMHRVRSLLLQQRTALINQARGLLAEYGITIAKGRASFCKKIPEILGENANNLSALMLKSIITIYSNFKAIEEAIAGCDKEIAAVYKANETCRRLEKVPGIGPLGATILVAMLGNNGSEFKNGRHFAAFLGLVPKQHSSGSKNKLLGISKGGDTYVRTLLIHGARAALRWSGKKTDNQNLWLNDLKKRCKYNVVAVALANKMARTAWAIVHGDCNYDPNYKSPLFGKV

SEQ ID NO: 177438 - protein, 322 aa, unidentified
MLYAGIDVSKLSFDVAILNNGSYQNMQFANNLEGFKALSKWVKSFRKEVIFCMEATGIYGLALAKDLVQKGEKVIVANPIKTNAFAKMEMSRNKTDKADAQSIARYCKHLDDKGEITKNLFKPKGEAFEKLQFLITRLEQLDKIATQENNRLDVSLDKEAVRSIKSIISHIDKQIIKIKRVLKEIVKQDDTLKQQVDLLISIPGIGEKTAWSILAYLGDISLFSNAKQVTSYAGINPKIEQSGTSINKSRLSKIGNKRLRKALYMPALTAVKHNPLMKDLYERLQQKGKPNKVALCAVMRKLLVLAYGVLKSGQAFDPYYQK

SEQ ID NO: 177439 - protein, 415 aa, unidentified
MALKIVYKICCGIDVHKTFVVACIASTNDKGVTSYESHRFSTYTSGLKTLLQWLLDRNCKDVCMESTGKYWIPVYNILEKDCSIVLAHPKYVKAIRGKKTDKKDAKWIADLFKHDLVAGSFMPPADIRQLRDLMRYRFKLTCFKSSEKNRLQNCLTVSNIQLGNVVSDTFGKSAQAILDKILEDPADTSFDLEPLVFKSLKKKLPELRDAIDGYITPEQAGKLKVIKAHYENLEARKAELEELILALATPYQQELAILQTAPGISSDFTAIGIISEIGTNMEAFPSAKHLCSWAGLTPTNNESAGKKKSVRVSKAGCYIKPLLVQCANAVVKSNKHPEIRNRYLRIKKRRGHKKAIIAIARMLLTALYHILKNGENYNAELYRKSDLPPVNREITVEQALMIARNQGYKIKSATA

SEQ ID NO: 177440 - protein, 318 aa, unidentified
MAEKGCCIGIDVAKNWLDWAADGHGRVQRLGNDAAGIAELVSELQALRPALVVMEATGGYELAGVRALQEAGLPVTVVNPRHVRDFARASGKLAKTDAIDARVLAAFGAAFRPAPLPQSKASAAAFADLVARRRQLVEMMIGEKNRLEHAQGQVRSWIEESLAAMKSQLAQVDETIALAVKADPQFQRRFEILTSVGGIGTVTAAVLIAELPELGKIDRKKLAALVGVAPINRDSGMRSGERHIGGGRASVRCALYMATLTAIRSNPSLKAFHHRLRQNGKRPKVAIVAAMRKLLALLNALIRDDQLWTPKPLAQDGC

SEQ ID NO: 177441 - protein, 388 aa, unidentified
MKTVADRPEAATAIRTDLGAIFVSLELSRSTWLITSLSPDGGEKMSKHAVRGGDVAGLLERFAQLRKKARARTGKVFPFVVIQEAGLDGFWIDRVLRKEGIESHVADPASITTSRRRRRAKTDRIDGEALVRTLLAYKRGEPRVCAMVKAPTPEEEDRRRLCRERKVLIVERVRHVNRIKGLLFSQGISGYEPLRRDRRERLDTLQTGDGRLLPDHLKAQVRRELDRLELLLEQIKAVEAERDALLAVQQGAAPAPAAMLLSIKGVGPEFAAILWSEGLFRHFDNRRQVASYAGLAPTPWQSGSIDREQGVSKAGNPRLRTTLIQLAWLWLRHQPQSALTLWFEERVRRNGGRLKKTTIVALARKLLVALWKYVTAGVVIEGAVMNVA

SEQ ID NO: 177442 - protein, 457 aa, unidentified
MQNYYMGIDVSKGYADFVILDAKKKIVEPNFQLDDTFAGYCKLFEILDRFFNSHPESTLYAALESTGGYENNWLHSLNSFQGMLTIKSARLNPLGVHANSRAALRRVVTDKTSAQDVANYMISHPEKVSYQQEDSLSSLRRQWTFVSLLTKQKTQILNQFESLLYNANPELIAYCKSGVPTWLLKLVKRYPTANKLAKATVTSVAKIPYVSTRRATELIDGAKKSIASATDEVTGKMMMAMVENIIRMDETIRDQTRQMAEHYKIPEIDLLKTFTGISDASAIGLMLEIQTIKRFPSAKKLASFFGLHPVFKTSGDGTTRARMSKQGRKQPRKILFMVALVSLTANPHIAKIYEEHTKKGMKKMAAIGLCMHKILRIIYGMLKNNQAYDPKIDQHNKENSMSRKGANCVKTIHRRYQTFDSKAPISKRQSNKRKEWEKSQGDNVTQCGIGIPIPPAG

SEQ ID NO: 177443 - protein, 415 aa, unidentified
MEVLGPMDVVYARCCGIDIHKQTAVACVIRSDTQGPPRKQIRTFGTMPDDLLALADWLRTEGVSHVAMESTGVYWKPPYNLLEGEFEVILANAQHIKAVPGRKTDVQDAEWIADLLRHGLLKASFVPDRPQRELRELTRYRTSLVRERAAEVNRLQKTLEGANIKLGDVASDILGLSARQMLEGLVTGTDPTILAQFARGRLREKIPQLERALAGHFAAHQRFLLATQLAHIDYLDALIEQLSAEVAQRLAPFAPLIERLDAIPGIARRTAEIVLAEIGTDVHRFPTAAHLASWAGMCPGQHESAGKQTSGKTRKGSPWLRSALVEAATAAAKSKRSYLASQYSRLARRRGAKKAAVAVGHSILVIIWHLLEHDCPYVDLGSTYFDQRDHSHVKRHLVQRLEQLGYAVTLSRAAA

SEQ ID NO: 177444 - protein, 346 aa, unidentified
MLYAGLDLSRKRLDFHLLDREGATVEVGACPPDADGLRGLTERVDRHGAPIRAAIESMNGARFVHDQLELAGWQVEIADAQKVKGLAPLACKTDRIDAWVLAQLARRDLVPAIWLPDPQVRAERERARWRLHLVRHRSSLKQRVHAVLLTHGTPSPVSDLFAVRGRQLLARLGLPEPWQATIEASLRLIDDLDREIGDCERELRRLGADHRYVPLLCTVPGISWVLAYTIAAELGDINRFPTPRKLAGYTGLCPRVYQSGDRDLRGPLAKQGPRYLRWALVEAATHACTQPIYRERYQQTKARIGKQRGAKVAQIDLARRLSEAIWHMLSRNQAFAPKGATDPLAA

SEQ ID NO: 177445 - protein, 367 aa, unidentified
MKKISTVAVKQIRNISEQNLTIGQDLGDGSSWYCVLDEAGAIVVEQKLGTTPKAMKEVFGAIARCRIALETGMHSPWVSRLLNELGHEVIVAHARNVRLIGESRKKDDRLDAQTLARLARIDPKLLCPVKHRSAKAQADLTVIRARAGLVRARTALVNTARGLAKSYGERLRGCNVRNMNPEKAQGLSPELRTALDPLLAGIESLSERIRECNEGIERLARESYPQVAQLKQVKGVGTLIALTFLLTLEDAHRFRKSRDVGCYLGLQPGRRNSGQSEPQMHISKEGDPYLRTLLVQGAHHILGPFGADSDLRRWGLKLAERGGKSGKKRAIIAVARKLAVLLHHLWVSGEVYESLHNSKPTAMPAAA

SEQ ID NO: 177446 - protein, 311 aa, unidentified
MEHSCFVGIDVSKDHLDVHVRPTGDAFQVRYDDAGLATLIERVRPFMPTVLVLEATGGYEVTVAATLAGAGLPLAVVNPRQIRDFARATGQLAKTDALDARVIALFAEAVRPAARPVPDEQARALGELVARRRQLVEMLGAELNRRRLLRDRRVQRHLDAHITWLEEALRRLDHDLTTLIRSTPVWRETDDLLRSVPGIGPVTACTLIADLPELGRLDRRKIAALVGLAPFARDSGAFRGRRMIGGGRAPIRRVLYMATLTALKHNPAIRAFYQRLVAAGRPGKVALTAAMRKLLTILNAILRDRRAWLSP

SEQ ID NO: 177447 - protein, 491 aa, unidentified
MAKRKLSTFERLRRGHKLSRRERRQVDRQLQAEKPSWDIVHENVAGIDVGNESHFVAIDPKLDPHPVREFGSWTAALRETAEWLQGLGIQRVVMQTTGVYWIPLQDVLEQAGLEVAVVDARGTKNLPGRKSDVQECQWIRKLDIYGLLRNCFQLPQGMRTIRTLWRLRQRWVREAARAIQQMQKALITMNVQLANALTDITGKTGLAIIRAIVGGERNAWKLAALRDPRVQATEEEIANSLVGNWRADVLFELQQVLAAYDFVQQQISECDGQLQQYMQAQPARPPRTEATIEASLETAAPVPLKKKRRGKEKKVKRQKNQPAFDLETELKRVLGVDLMRIDGIKVMTAQTVYAELGPDLGAAFPSEDEFSSWLMLAPKRDVSGGTVIRQYSIHSRNRVAHALRMAAESLHDSNSYLGARYRSLRGRLRHGLKAVKAMARYLACLIYRMLTKGEAWVDRGAAYFEQKRQERELRHLQRRAAAMGMQVVAAK

SEQ ID NO: 177448 - protein, 344 aa, unidentified
MQVITFGIDLAKNVFQIHGVDAAGHTVVKKQLKRDQLAPYFANAAPATIGMEACSSAHYWARKLQSLGHSVKLMAPQFVKPYVKGNKNDANYAEAICEAVARKSMRFVPIKNVEQQALLSLHCVRQGFVAERTAYANRIRGLMGEFGFVIPQGIHHISERVHDLIEDASNELPGLFRVTMEWLLEHFKELHRQVRELELQIQAWHRSNDASRKLEAIPGIGPITASALIASIGDAKNFKSGRELSAWLGLVPRQHSSGGKQNLLGISKRGDMYLRMLLVQGAHAVINACCRKGVEAGWLAGLLKRRNHNVAAVAVANKNARIVWALLARERQYETGYIRDTALA

SEQ ID NO: 177449 - protein, 374 aa, unidentified
MATQPTVLPKLYIGMDIHKKSWSVHLRTDISDHKTITIPSSNDVLYHYVQTNFPEHEVSLVYEAGCCGFTASRYFLNLGWNVLVVNPADVPRTDKQSHQKTDVLDCRNLAKQLQSGHLRGIYIPDQKQDYLKSLVRQRAETTRQLRKIKCSIKALLLYHGIEIPKEFDNPNWSKAFIKWIENIPWQEPVGKLCMESKIRLLKVIYQEYLELANQLRSYCRKNHKKDYYLLKSIPGVGGYLSSVVLAEVGDLRRFNKETQFASFVGLVPNIRNSGMTENVFGVTPRCRDLLRSYIIESAWVALRLDPEMQTYYRKHQGKNPKSIIIKIARKLLNRMLSVIKKETPYQKNYSKEIKADYKTPQVIPPKKEVTKASL

SEQ ID NO: 177450 - protein, 392 aa, unidentified
MSRDVKYIGMDVHKEAIVIAVLNDGGKLTMESIVETKASSLLQFIHGLRGELHVTWEEGTWAAWLYDLLKPHVQQVLVCDPRRNALLKEGNKSDKVDARKLADLLRTGMLRPVYHGEHGLRTLRELGRSYQTISKDLNRVMNRVKALYRGWSIPCAGTQVYAARYRQEWLGKIEHAGVRRRAELLYEQLDGLQALRRTLRPELLAESRKHKASKLLRQIPCIGPIRAARLIALMQTPHRFRSKRQLWTYSGLGIETYDSAQYCYVHGQLQRSKKPQQIRGLNRNHNHEMKEIFKGAATRASCGVGPLRDFYMALLDKGMKPEMARLTLARKIAAIALTLWKKEERFDAEELKNASRLSVAQNSQGIPQVSYLTGGPIGSTTLGFQGEYPCTH

SEQ ID NO: 177451 - protein, 363 aa, unidentified
MKIMVGIDLHSNNALCGLMDESGQRLVHKKLPCDLPAILELLAPYKERIATLAVESTFNWYWLVDGLQDHGYHVVLANPAGMQPYSGKKHTDDVSDAYFLAELLRLNLLPTGHIYDRKTRPVRDLLRRRLLLVRQRTTLILSFKSLNERTLGQRVPLARVKAMKPEEVQARFTDPADQLLSAQQITLMGHLTDSIAKLEQHILGVAGKWPAYQRVQELPGIGKILGLTIALETGDAKRFADAGNFASYCRCVKSLRQSNGKKKGENNRKCGNKYLAWAFVEAAHFACRYDDQCRRFYDRKKQQTNPIIATKALACKLAKAAWHVMAEDVPYDATRVFGPAKKSNFGETGREPAKGSGHPSQAN

SEQ ID NO: 177452 - protein, 479 aa, unidentified
MRLPSLTINPEAKMTQSRRTRSSSSRRRSLPPELQHVNLNAAGIDVGAEAHFVAVPAGRDPQGQNVRQFGAFTADLYTLADWLAACGVETVAMESTGVYWIPLFEVLEERGFEVKLVNPRHVKNVPGRKTDVLDCQWLQQLHTYGLLQAAFRPEDQICVLRSYLRQREMLVRYASHHIQHMQKALEQMNLKLHHVISDLTGVTGMRILRAIFEGERDPHKLAGLRDHRCKNDEATIALALEGHWRPEHLFALRQAVELFDFYRQQITACDAQIQDCLHTFQDRSAGRPLDKPTRRRNRQKNQPAFDVRSHLFRITGVDLTAIEGIDAQTALKLIGEIGLDMSRWPTEKHFASWLALSPGSKISGGKTLSARTKPYPNRAAAAFRLAAHGLHNSHSALGAFLRRKKAHLGAPKAITATAHKLARLVYAMLKNGSQYLETGEAEYERRYRERVIHNLKRKARALGYDLFQRNVPVLPLPPP

SEQ ID NO: 177453 - protein, 422 aa, unidentified
MMDKERRWLAGIDWASQEHVVSLYDDAGKKIGQRKFSHGGTGLTDMIAWLLKASGGKPGDIHVGIETPHGPIVEALLERGFNVYSINPKQLDRFRDRFTVSGAKDDSRDADVLADSLRTDMRAFRKLSIAEPIVVELREWSRIDEELKVERGRLTNRFRHQLWRYYPQMLELADDVGATWFLDLFEAVPTPEKAANVREKTIARILKNHRIRRFDAVHVLSDLRKPALAVAPGTIEAATARIRGLIERIRMINNQLRDAGQQLDRLCKKLSEPVADKDEEPSPGQKTEQRDAAILDSLPGVARTILATLLAEASDTLQRRDYHALRALCGSAPVTRRSGKSRVVLRRFACNQRLRNATYNWAQNAVRWDAISRAKYDALRAKGHGHARALRSVVDRLLNVACAMLNSGTLFDPEFASKRTTG

SEQ ID NO: 177454 - protein, 338 aa, unidentified
MKLYGAIDLHSNNNVTVLIDEQDKVVYEKRLPNDLGVIAQQLAAYQSSLEGIVVESTYNWYWLVDGLMDKGHQIHLANTAAIQQYEGLKYTDDHSDARWLAHILRLGVLPQGYIYPKEERAVRDLLRKRGQMVRQRTANLLSLQNLITRNTGSSISSNRIKTLDAEQVDDLLPNPDLALAVKANLAMIKCANGQIEILERTVTERIKLRAAFSFLKTVPGIGQILALTIMLETAEIQRFPTVGDYASYCRCVGSQKLSNGKKKGSGNTKNGNKDLAWAFVEAANFAIRYNARIKSFYQRKKAKSHGVLALKAVAHKLCRACYYIVKDQVAFDVAKAFA

SEQ ID NO: 177455 - protein, 412 aa, unidentified
MEGETVIAGVDTHKDVHVLCLLDGLGRKIRSGSFGADPEGYDRLAEAIGDPGSCMVVGVEGTASYGAGLTRRLVELGYNVVEVLRPKRDKARPGEGKSDPLDAERAARKAASGRGCSVPKSQDGWVEAVRQLYVARRLAVATSTSCVACAKSMLTTAPSALRERFRGRERPKDLMPLLARGRKAGDALEESVLASLRSVAAVWKEARSQVESLDERIRALLEANAPALLGVEGCGTTTAAALVVAAGDNPGRLKGEAAFSMLCGVSPIPASSGKTERHRLNRGGNRQANWALYEIAIKRMAYDERTRRYVARRTSEGKSRREAVRCLKRYIAREVYRVLMDPNPDGAAPEGPELAKMRKAMRVTQKQAAAGLGMSAASLGHLEHGRRRSTKLERRYYELLCELERALPQTAS

SEQ ID NO: 177456 - protein, 429 aa, unidentified
MIQAEIERCAGIDVGKQRLAVCIMVGPLAGEPRVELREYATVTTELQRLRDWLLEEGITHAVMESTGSYWKPIFNVLEDSLKVYLANSQQVKNRKGHKTDKKDAWWLAHLLRHAMIRPSFVPPRGLRELRDLTRRRKKIIADATSERNRVEKVLQDGNVKLSSALSDIFGVSGQLMLEALLKGQASAEEIASLAQRRAKQKIPEITAALEGHRLDDHHRKMIGFSLEHLEFLEKQILRLDEEIAAKIQQLGYVQELELLQTVPGIQQTTAANVLAEVGPDMKQFGSEKRLSSWAGICPGNSRSAGKNKSSRTTRGNRWLRAALTEAAWAAQAKKRCFIKEKFWKLTTKKHHKAPALVAVAHTLLELVYQVLRSKQPYQERGAPILDEKQKERIIRHHIRRLGKLGIAVSSPRPVPTRPSRSRPIQANQG

SEQ ID NO: 177457 - protein, 319 aa, unidentified
MDSHPDTFTAALLTGRTPAEALVENTFHKIPMSQLQSWAKKHTSAEDLIVLEASGNSYQVVRTLEAIGRKARVLESAQMGRLKEAHANNDKISAVRLGKAYLAGTAKEVWVPDVLSQERRDWMHAHRKVVKRTTQLENRIQSYLSDNGVRPPQGVSADDLESLRPAKAWSARQWSVLEGLFLELGHAEQQRTHWVSVIAREVLNDPILLSLTRLCGIRDITAFALGAVIGDIHRFSEPKKLVKYFGLNPAFDDSGENNWSGGIGGHGREDVRALLIESAHAILRSGHPLAKWGKKLLARKGEIKLAVAAVARKLVVAVW

SEQ ID NO: 177458 - protein, 355 aa, unidentified
MNSIKYIGMDLHSATISTAVVNEAGKLNMEATIATEAAAVLDFIAGVQGTLHVTFEEGIHAAWLYELLLPHVAEVVVCDPRQLPRHRGENKNDKIDAQQLAQWLRLGVLKPVYHRPTGLRTLRELVRSYRTLVSDATRVMNRLKAIYRARAIAAKGARVYSPRYREGWLKQLREPGVHHRAELLYRELDLLLSLRQEAKKAMLAESRKHAAQKILLSIPTLGAVRVAVLMAVIQTPHRFRRNRKLWTYTGLGLVTRSSANYRLVEGQLTRARKPALILGLNLNHNHVLKEIFKDAAATAVSRQGPFREFYARQLATGKDPEIARVIVARKLATIVLTLWKKGERFNAEHLKPQAA

SEQ ID NO: 177459 - protein, 349 aa, unidentified
MGVVGAGVHKRTHTFVAVDEVGRELGHKTFEATTPGHRAAVRWARERFGVELLWAIEDCRHLSARLERDLLTAGQSVVRVPPKMMAEQRRTARTRGKSDPIDALAVARAAQREPDLPVATHDEVSRELKLRVDRRDDLVKQRTATINRLLWRVHELDPAMAPPARSMHLPKHQQVLAGWLGSLTGVVAELAREELAEVIELTVKIKTQAKTIERLVIEVAPTLLALPGAGALSTAKIVGEAAGVTRFKSEAAFARHAGIAPIPVWSGNTAGRVRLTRSGNRQLNAAVHRIALTQVRLQGPGRTYYDKKRAEGMTTAEALRCLKRRLARIVFNHLTTDHAASATGLAVAA

SEQ ID NO: 177460 - protein, 342 aa, unidentified
MQVSTIGLDLGKRVFQVHGVDAAGTIVVSKRLRRGEVLGFFGGLGPCVVGMEACGSAHYWARELAALGHEVRLMAPSYVKPYVKRGKNDAADAAAICEAVRRPSMRFVAIKTADQQGVLVVHRARELLVRQRTMLVNALRAHLAEFGIVTRQGRGGVEELVEALAADGDGLPAPARAGLAALIRQLRTSEAEIKTLDHEIGEWHRATPASRRLATIPGIGPITASALVATVGDGGQFESGRHLAAWLGMVPRQNSTGGKTRLGRISKQGDRYLRRLLVIGATALLRHAKRRAELGGDWVEELLARRPKRLVSVALANKMARIAWAVLTRGEPFRPRAVAGAR

SEQ ID NO: 177461 - protein, 449 aa, unidentified
MRKPVEIDSDDDGPVIARAAAIDVAKATGMICTRVPHASKPDRKVTKVWEVDATTAAIIELAGHLTALGIERVVLEATGDYWRCWHYLLSSAGLECWLVNARDVKNVPGRPKSDKLDAVWLCKLNEKNMVRRSFVPAEPMRQVRDWTRDRFDLVADRTRVRQRVEKLLEDALLKMSVVITDIFGVSGRAIMAALIDGQRDPAELAALAVPRIIKNKRGALEQALTGRFTGHHAARLEMLLAQHDQLTALIDQVTTRIDQAITALPPAPPADPASGPGTPAAGDAYLSAVERLCEIPGIGPEIARSIIGEIGLDVTGVFGTATRLCSWAKVAPRTVQSGASKRSGKTGKGNFYLKSGLGQAATGAAKTDTFLGERYRRLVKRMPKAKAKTAIARSILVIVFELLADPAKRYKDLGSGHYAKRMDTGRRTSKLTSELRALGWEVTLAPLTA

SEQ ID NO: 177462 - protein, 314 aa, unidentified
MATTGVFVGIDVAKRELVVAVRPSGERWTVATDPASVAGLVERLRAMPVALIVLEPTGGYEIAIVAALSAAQLPVAVVNARQVRKFAAAIGKLAKTDAIDAAVLAHFAEAVKPEVRPLADDLTQTLQGWLGRRRQLLEMLHAEEQRLVMATRAVRPQIQQHIEWLRAQVRDTNDQLQAQIRSSSVWREHEDLLRSVPGVGPVLATTLLADLPELGRLNRKQIAALVGVAPLNRDSGQYRGRRRTWGGRAPVRATLYMATVASVRCNPVIRAFYERLCAAGKPKKLALTACMRKLLTILNAMMHRQARWAPALVA

SEQ ID NO: 177463 - protein, 318 aa, unidentified
MSFNCMASTLLSNRSCASRCAVRKWWAIFKECPPSVIAIEACGASHHLGRLLTALGHEVELIPPQLVNPYVKRGKNDAADAEALCEAMSRPTIRFVPMKSADQQAVLMLVGMRERAVAAQTQLSKTIRGHAAELGLTAGKGTSHIPLLLERIMIDETIPALARDLFASLADEFLQLDGRRKEVEAKLMAWYRNNECCRRLAKIPGVGPIGAVLLVMKAPAPELFASGRPFAAWMGLTPEDHSTAGKVRLGVITRAGIAQNTGCGRDRGVAAPANGPTQMSERATTGVARRSTRRPSFQKRITPPARSPRPTCASCGGA

SEQ ID NO: 177464 - protein, 390 aa, unidentified
MEHPMQKLKDLSRCLTPLEPDGTLIAVIEMSRSSWLVAGIVPGVERQPLKKLAVDESVLLKLLHRWREEAEKAGYMIKRIAVAFEAGRDGFWLARWLRARDIEVHVIHTSSVAVSREHRRAKTDRLDTELLKRAFLGWLRGERDHCKMVAIPTIMDEDGKRPNRERENLVGEQSRIINRIKATLVRLGIRGFNPKLKKAAERLQGLRTPEGEPIPPNTLSELRRNMERRRLVRDQIRQIESARRDRLEHAPGEGAHAMVRLLARVMGIGIETADMLVQEVLSRNLRDRRAIARYAGLTGSPDESGRKRREKGLARCGNPRVRRGMIQLAWRFLLFQKDSALAQWFQARTQNARGTRKTMIVALARKLLIALWRLVRDGVVPDGVILRPAQ

SEQ ID NO: 177465 - protein, 364 aa, unidentified
MSSLSQRSLTHLGMDVHKDSISIGILRPDDSMDVERIFHDEDSVRRFIARMGKPRQLVACYEAGPTGYELHRLLQRLQVPCHVVAPSLIPKAPGDRVKTDRRDCRRLARLHRAGELIAIRVPSPEEEAVRDLCRARGDVVIDLDRARRRLGAFLLRHGQIWRGGSNWSLKHEQWLLGLRFEDAALASTFAHYRSIVEERRLRLQALESDLVPYCEQDPYAEGVHQLCCYRGVDTIGALTLVSEVCDWRRFAKASSFMGFVGLVASESSSGGHTHRGHITKAGNVHLRTQLVESAWAYQRGPYVGERIRRAQERCSPATRERAWAAQVRLCGRFRRLATRKNVKSVVAAAVARELAGFLWGEMTA

SEQ ID NO: 177466 - protein, 355 aa, unidentified
MKRNTKYVGLDVHQATTVASVRGTSGRMIARSVLETEARAISEFFGGMRGTIHVALEEGTQAQWLYDLLTPQVDRVVVCDRRGEKRSGNKGDRVDADELSHQLRLGALRPVYHSDRHHADLKELTRAYRSLVEDSTRVMLRIKALLRARAIRSRGASVYQASDREQWIDRLHERGARFRAEGLYAQLDLLDTLRKKAKSAMVAEARKDPAWPILDSVPFYGPVRISLLLATIGTPWRFRTKRNLWAYAGLAVVTHSSADYEIVDGRPRRRRRRPLTRGLNRNYNRVLKGVFKGAANAATGRPGPFLDFYHGLLDRGMREELARVTLARKIAALTLRIWKTGELFDPTQLTQQQLR

SEQ ID NO: 177467 - protein, 443 aa, unidentified
MARKNQKRFEIIHHHCAGIDVGSREHWLAINPDQCEVPVRQFSTFTDDLIALADWLQSLSINVVAMEATGVYWIPLFEVLDARGFEVYLVNSRATRQTSGRKSDVLDCQWIWQLMTHGLLSGAFRPADDICSMRSLVRQRANKVCDQAKSINRLQKALSQMNIQLAQVISDVTGVTGLKILRAIVHGERNPEQLAALRDGRIKADQATIARSLHGNWRAEHLHALSQELACHDFLENQIAECDQAIIRALERLPVLQPETAPPGKPLRSPHRSAEEQQALHRALNRIMGVDLTAIPTIGIDTALVLASELGPDLSRFPTSQHFCSWLGVAPPTRISGGKPLPGKTPKIINRAAQALKQAASNARQDKSFIGASHRARLTRMDTRCAIKATAHQLARLIYAMLTQGQPYVEKGIEEFEERSRNRQLRALDRKARKLGMQLVKAS

SEQ ID NO: 177468 - protein, 361 aa, unidentified
MFTERTSVGLDVHARSVVAAAIDGVTGEVFRARLTPNNEQVVGWVRSLPGASVATYEAGPTGFGLARAMAAAQIRCVVAAPSKIRRSAGDRVKTDARDAMLLARLLRMDEIVAVTVPSVEQEDARDLVRAREDVRGDLMRSRHRVSKLLLRQGIVYCGGHAWTGAHLVWLRAQHFDTPGLALAFDAEYEAVLAAEARRDRLDEAIAAMAADSQFTPVVHRLGCLRGISTLTSFGLAVEIGDWDRLTGASIGAYVGLVPTESSSGQSRSQGSITKTGNTHARRLLVEAAWHHHKAYRTPGATMRARWELAPAAARARGHAGNRRLHERWLRFTERKKRPVVANVAIARELAGWCWSLAVMDP

SEQ ID NO: 177469 - protein, 453 aa, unidentified
MAQRNRSLSVKAGNSRAALTITHPNAAGIDIGSASHFVAVPPDRDDEPVREFPSFTVDLNALADWLKACGVDTVAMESTGVYWIPLFELLESRGFTVLLVNARHVKNVSGRKSDVLDCQWLQQLMTYGLLRGAFRPADAVCVLRSLWRQRAMLLRDQGRHVQHMQKALTQMNIQLTNVISDVAGETGQKILRAIVAGERNAQVLAAMKNVRIRASQDEIAKSLQGNWRGEHLFALKQALAAFDFIGTQLVECDREIEAQLQSLQIHEGEPAKGKKRGRARNAPRFDLRTQLFKMCGVDLTRIDGLDVTTALAVISETGADMSRFASVGHFASWLGLCPGTKITGGKVMSGKTRRVANRAAQALRLAAAALRSSQSALGAYFRRLCARMDKPKAVTAAAHKLARLIYTMLTKGEEYTDQGQDYYEERYRQRVLHQLSRRAEKLGMKLVATGQPA

SEQ ID NO: 177470 - protein, 423 aa, unidentified
MHMNACTFKATIGLDWADQRHDLWIQAADATKPQHVRLEQTPEALHEWVAQLRGRFPEGQVAIGVETSRGPVISALMAYDFLVLFPINPKALKDYRAAFAVSGAKDDRTDSQLLEELVRLHPDRLYPLKPDTELTRKLAGLVENRRHLVDERTRIVNQTHAKLKTYYPLAETLLCPDLASAMGAEFLCRWPDLTSLLAASPAQIRGFFHKHGSRSAKKMEERLAAIHNAQALTTDPAIIEPARELILGLAAVLKCLNKAVARLEASIQKAMDEHPDAPIFRSFPSAGPALAPRLLVAFGTPRDRFESAAEVAQFFGIAPVVIQSGNTEVTRMRHRCPKFGRQTFHENAACAAKSEPWAGVYYKQQKQKHEDKHHQACRALAFKLIRIYFACWKNRQPYRSQTYLAALAKSGSPLYNKLNEVGE

SEQ ID NO: 177471 - protein, 450 aa, unidentified
MRREPPLRPSGANRRTMWPSAPDEIPDDCLFVGIDVSQEHFDAAVVDARGNLVRAAQRYENTGPGFDRFWTEAQSLGRALSRPVAYAMEASGVYHLGLLSSLVGRKARAWAFNPILLQGERKSRVRKTKTDPLDAELIAQFARKESARHRSVVWDEESVRLREHCRVRFRLVERASDAKRLLRRDLDVLCPQLASEFTDIAGPAALQLLKTFGQLTRPFTGTVEEIEEVLRPFYRSPEGRHLKAVAIEKHFAERRVASGFQEPLLWEVKALVHQLELFIEQIAQAEGRIERAMEGRKSLVVTVPGVGVVTAAVIESELGDAKRFENANQVRAFAGLDPSVFQTGKFEGTQMHISKRGSPQLREALYRSALWASRANPACRELYERMRAKGKAHRSALIAVSAKLLIQAWAVMRDGKSFEIPERYRHTTATPIGSNLPGKSVELTASEPVT

SEQ ID NO: 177472 - protein, 391 aa, unidentified
MVCVGIDVAKDKHDCCILDSEGTTLVDCFTIPNNMDGFKSLLQTIQDCSQKSDKIKVGLEATGHYSYNILGFLLDNDLPVYVMNPLHTNLYRKSLSLRKTKTDRVDAKTIATMLLSDVDLKSYTDTAYHNEELKSLTRYRFDKVQERAKLKQSVSRLVTILFPELEQLVSSIHGTSIYALLREYPGAKQISEAHLTRLANILVKTSRGHYRKDKATHIRDAARTSIGSVMPAKSLELKHTIKLIQELTSEINEIEDAIRKIMDELKPPILSIPGMGFHSAAMILAEVGDFSNFNSPDKVLAYAGCSPSTYQSGKLTNCYAHMEKRGSRYLRYALYTATKYVCYWNPVFTKYLTKKQAEGKHYNVALSHATKKLVRLIYALQKSGKAYLAVT

SEQ ID NO: 177473 - protein, 363 aa, unidentified
MHSITNTELSSHEETRCQFNGGRCTIKMGIDVHQDFYVVVEQVGGTNPKPPQRFHKQAFLHWAAKLKHTGAEVHAVYEACGFGFTLHRQLAALGIHCHVVCPQKLDERNKRVKTDGLDAKALCLKLDRFVQGNRDAMALVRVPTEEEERSRAIHRQREQLVGARKRLEAQGRSLMVNHGLEPVQNWWKPRTFAALPVAQWMRELLLNSQPILLALQEKIAVLTLQLQSAAASNQPRGLGKMTSVIIDREIGDWNRFNNRRQIASYTGLCPGEYSSGNTRLQSCVTKHGNPRLRAALVELAWRLVRFQPSYKPVVKWRQILAKGALATGAARKKAIVAVARQLAVDLWRIKTGRLRAEQLGLTI

SEQ ID NO: 177474 - protein, 339 aa, unidentified
MKTITIGLDIAKNVFHAVFVTSHGKVTKKKQMKRAAVLKFFANTEPAIVVMEACGSSNYWAREIQKLGHEVKLIAPQYVVAYRRKNKNDYNDAEAIAECSQRDDMSFVPIKDIEQQDAQMLLRIRERLVKQRTKLSNQIRGMLLEYGLCINKGTAALRRALPEFLEDADNSLTWTARSLFSELYEEYLLLSDKIEKVDKKIKAFTNENELCQLAQTVTGIGPITALALYAAIGNGKHFANGRHFAAWCGLVPRQHSTGGKSVLYGISKKGNIVLRALLVHGARSVLNVVDKKEDKLSVWATNLKMKKSYNVACVALANKLARVVWSVIANNRPYELKMV

SEQ ID NO: 177475 - protein, 451 aa, unidentified
MRGTTYAGVDWASEKHDVVIADEAGEEILAATFAHDEAGVRGLCRALVRHEVTLVAIERPDGLLVERLLDAGLRILPLHPNQVAATRDRFRASGGKSDRFDAFVLCELARTDHHRFRVLEPDSDATKALRALTRAREDLVGTRTALTNQLRAELARFWPGPLGLFRDLHSRISLAFLERYPSPADARGLGEARLHAFLVRQHYTGRQKPGQLLAKLRRAPEARVGELELGVRRALVVSLVATIKVLNEQIKQSERQIATAIREHPDGAIFTSLFKQPNSVICAAELLAEIGDCRARYLTRDTLAADAGHAAVAIESGKRKAASFRWACNKRLRQAFVTLADTSRHHNPWAQDLYAAAHARGHDHPRAIRTLGRAWCRIVWRCWQDRVPYDPARHRALQRHLTVTIPTSSGPVPDTAATQRMLGATVTRRAARRAEREALDGKPTSAISLGT

SEQ ID NO: 177476 - protein, 428 aa, unidentified
MNYNTQNAKIASITEETLIVGIDVGSEMHYARAFDWRNYEYSKKPLEFSNTEAGFLTLKAWMKDIAERHGKTAVIPGMEPTGHYWFALGKFLQDSGMKPVHVNPHHVKKSKELDDNNPNKNDRKDPKTIAALVNEGRFSYPYIPTGIYAEIRSLSNLRFQTQEELTRIKNRIARWFAIYFPEYKDVYGDLMAVSGRMILKEAPLPEDIRILGVNGVNQIWRNAKLRGTGMKRAKILVSAAEHSVGSKEAPEAARIELKNLLNDMDVYVSRMEELLQTIEEKLKTIPYVDKLMEIKGIGLITVSGFIAEVGDIGRFDNPKQLQKLAGYAIVANDSGKHNGESRISYRGRKRLRYVLYEAAISLVGKNAEFKEIHEYYRTRKENPLKKMQSVVAVACKIIRVFYTILTKGVDYDPMKLMSDIRRPQLQAA

SEQ ID NO: 177477 - protein, 342 aa, unidentified
MEEITRIAIDTSKHVFTLHGSDRAGRAVLRRTVRRQDLVRFFEKLEPLEVAMEACGGSHHWGRTLQALGHRVKLIPPRYVKPYVRRSKNDRNDAEAISEAASRPEMSTVPVKPAGIQAEAMLLSVRELLMRQRTQLINALRGHATEFGLTAAQGDKGLAALRAEIATAADTVLPTAAAEALHLLGGEIDRIAARLAQIDKLLMRRHRASEVSRRLGHIPGVGPVGALSFATRVDARQFRSGRHFAAWLGLVPRQNTTGGKPRLGPITRAGDERLRQLLVLGATAVIRHAKPGSPTASPWLLNLLEHKPRKLAAVALANKMARTIWAMLARGEDYRRPHRVAA

SEQ ID NO: 177478 - protein, 343 aa, unidentified
MQVVTAVGLDIAKSVFQVHGVDVEGKAVVQRKLKRRYVLAFFEKLPPCLVGIEACATSHYWGRELQALGHRVRLMPPAYVRPYVKRQKNDATDAEAICEAVTRPNMRFVEIKTVDQQSCLVLHRTRHLFIRQQTSVINAIRAHLAEFGIVAPVGRTGVEQLLSVVADASDKRLPAVARACVAALGAQLQMLKAQILEFDRKIRAWHRSNEASRRLDAIPGVGPALATALVASVADPKAFRSGRDFSAWIGLVPKQSSSGGKERLGNISKRGDRYLRSLFTAGALAVIRYAKIHGTTHRPWLTALLARRPTRVAAIALANKLARMAWAMMARGERYREPAALAA

SEQ ID NO: 177479 - protein, 409 aa, unidentified
MRLFVGLDVSSFDMKVCFLNEEGDKIDAFSVSNDLPGATTLKEKLLQCVTGKEVEMLKIGLESTSVYSFHPSMFLHHDTDLQRFGAKVFLLNPKQIANFKKSYSDMDKTDELDAFVIADYLRFGRNQMSIVKESQYVALQQLTRTRYQLVKMLTKEKQHFLQHLSFKCNTFSQEVDSSVFGNAMMELFLEKFSLEELANMPLEELAEFLQEKGKNRFGDPRCIASSIQRAVKASYRLDKVVEDSIDVILGTSITVIRTFQQQIKELEKSIKKIMAGLTQTLESIPGVGPVFAAGIIAEIGQIERFEDETKIAKYAGIYWRKHQSGRFTAEDTSLSRTGNHYLRYYLVEAANSVRRHVSDYQEYYIKKYNEVPKHQHKRALVLTARKLVRLVDALLRSHQLFTPERCVKI

SEQ ID NO: 177480 - protein, 324 aa, unidentified
MIDGVLGIDVSKNTLDASMSSCNKVRARSFANSPDGWRHLLDWLITQRVRRVHACLESTGRYSLGIAGALNEAGHVVSIVNPAQIRDFARTKLGRNKTDGVDASHIREYCELFKPHPWAPPSEAHRRLGELQTIRAGIIAGLTEWKNRKNSCMIDAVAQSLADVTISHFTSQLSAVDEAITQTIDHDSVLRRKRDLLLSISGVGETLAGVVLAELPGPDVLHSSAEVVAYVGLNPRQHQSGTSIDRVTRISKIGNAVLRAALYMPAMSAMRYNPAIVALVARLKSRGRLKPKQIVVAAMRKLLVLCFGVLKTGKPFDPAIAMGR

SEQ ID NO: 177481 - protein, 325 aa, unidentified
MIDASLSAGVDVGSTWLDLGFHPFAKPIRARNSEAGIETIIAALRERGVAKVALEAIGGYGRKLVAALIEADLNVFVVNPRRIKAFRDAEGLIAKTDKLDAGLIARFAHAMAHELRPLPDAEQAVLKALSTRRRQLTESIAIEKTRLKQAFDPLIVESCREMIAILEDKRRLIEADLDRRIDAQDRMARRRAILSSIPGVGAHISALVVVEMPELGAIDRKAAASLAGLAPIPRNPGFPAGATPSPRVDPACGRPSPWPRSWQRAAIRNSSKPISTCAPPENRPRSPSSPSRAASSPSPTPSSATTFPSTTHASLDELNTVACMS

SEQ ID NO: 177482 - protein, 339 aa, unidentified
MKYSGIDLHSNNCMVLVSDECDRVLLSRRVPNSVPLVLQALEPHREDLVGVVVEATFNWYWLVDGLQAAGYRVHLANVSAIKQYEGLKRTGDEADAAHLAHLLRLGLLPQGYICPKPLRAVRDLSRKRMQLVRSRTQHILAAENIQARESGYRMNVKQIKRLDTQGVEAAMPELLPEVQLALQANVAVIGELGKQIDKLERCLRERVRPSEEFQLLKTAPGIGETLATTIMLETGTVARFARVGNFSSYCRCVDSERVSNGKKKGEGNVRNGNAYLAWAFIEAANFARRHCPEAKRFYERKKARTNNIVATKALAHKLARACYHMLREHKPFEVKRCFA

SEQ ID NO: 177483 - protein, 438 aa, unidentified
MPTIAFVGLDVSQDDASVCFLLPDGQEPVPRFCVPNTLPGAAALASTLADLAQTHLVDQLRIGMEATGLLWWHLACALKDDAVLAPFAPRIYALNPQLIHSFRRNFGALPKSDHADAFLIAERLRFGRQLPSPFQLDARYAPIQRLTRFRCHLAQNLAREKSYFLSFLFLTFSTYGQIAPFGDPFGATSTAVLEEFTTEELAQQDLADLAAYLQAKGRGRFAEPDALAATLQRAARDSYRLDKVLQEPLRLVLGTTLATIRSLQTQLKTLDKTIALELAAIPQTLASVPGLGPVWTAGLIAELGDITRFDDEAAIAQYAGLTWTAHESGQFQAEDTELTKRGNSYLRYYLVEAANSVRLHCPEYGRYYAAKYAQTPKHAHQRALVLTARKLVRLIDALLREGKRYLAPAERALRCESTPPQQARPGRMRRNKRVGAVE

SEQ ID NO: 177484 - protein, 360 aa, unidentified
MFSERTSVGLDVHARSIVGCGLDTVSGTIARRRLTPTIEGVAAWLAELPAPVAVAYEAGPTGFGLARQLTAAGVRCVVAAPSKLQRPTGDRVKTDSRDALHLARLLRMDQIVEVRVPSVEQEAARDLVRAREDVRGDLMRSRHRVSKLLLRQGIAYYGGHPWTGPHEVWLRGQRFTAPGLQLAYDTALETVLLTAARRARLDRAITEMAANSEYTPVVRRLCCLRGVSTLTGFGLAVEIGDWQRFTGATIGAYLGLVPTESSSGAKRSQGSITKTGNTHARRLLVEAAWHHRKAYRPSLTLRARWDQAPAAARARGHEGNHRLHHRWEVFTARNKRPVIANVAIARELAGWCWSLAVLDD

SEQ ID NO: 177485 - protein, 427 aa, unidentified
MPYKIAGIDVHKRMLHVVVSDVQVDGEYDFTRRVFGSLPEALRSLAAWLVEQQVEEVVMESTAQYWKPVWGTLERYWKRICQTREGALATSGTLHLALALSNRGRRGRKKDFRDAERLVKRLVAHELVLSFVPDVEQRLWRTVVRTKYQLTRNRVQLQNRLEALLEEAHIKLSSLVSDLLGASARRMLEAIAGGETNRETLAALADRGLRATQEQLQDALGVCQELNPVYRRLIKMVLDEVASIDKRIEQLYQEMANLLRPHEDQVKRLAEVPGLGVDSAQQVIAEVGATAATFPSEKHLSSWVGACPGAEESAEVNHSRRSPQGNRHMRRILNQAANAAAKHKGSIFQILYGRYVPRLGHNQTIGIIAHKLCRLVWKILHRGIRYEERGPEVSKASKQKRTRKMIRQLSRLGYRIEPSPSQSAITA

SEQ ID NO: 177486 - protein, 445 aa, unidentified
MRGTRSGNRASRSEAPTYEHPQWYPPVGSTATANASEGGSSVVESYAGLDWAKEEHRLCVLHADGKLLSERRVIHDEGGIASLCASLVELGVRRVAIERPDGLLVERLLEAGLVVLVIHPNQLKAARPRFRSAGGKSDSFDAFCLAELARTDHHRFRALTPDSDETKALKALTRAREDLVRTRIALANRLRAELEASWPGASVIFADLDSPIALAFLERYPSPQDARGLGEKRLSGFLARHGYCGRKQASELLARLRRAPTGTAGELEAEVHRTVVLALVAALRPLIEQIKLLGSQIAHAVRAHPHGEVFLSLFRNPNSTLTAARLVAEIGDCRERYPSAEALAADAGMSPVAIESGKRKAAAFRRACDKRLRDAVATLANTTRQHHPWAKDVYRRARGRGLDHPHAIRVLGRAWLRVIWRMWQDSVPYDPAKHGGLKRLSTAGG

SEQ ID NO: 177487 - protein, 341 aa, unidentified
MQQQREYVGIDLHRRRSVIVRMNEAGEKLSTVRIANDPLELAAAIAKAGPEPEVVVEATYGWYWAADVLNMCGAHLHLAHPLGVKGFTYRRVKNDERDAADLADLLRMGRLPEAWAAPPAVRELREIVRHRDKLVRLRSGLKAQVHAVLGKEGVTVTVSDLFGVAGQAALAATPLGRPFARRVASLQRLIGVYDTEIDQLDKEIAAALRDDLGYRAIQAIPGVGPILAAVFVAEIGDVTRFSSAPKLCCWAGLTPRHRESDTTVHRGHISKQGSKLVRWAAIEAAQKAPCRTPIKEEFRRIAERRNCRPIARTAVARKILTLVFYGLRDGEIRCLSEVVEQ

SEQ ID NO: 177488 - protein, 417 aa, unidentified
MGTKDPNDVVYRRVAGMDVSKSDVKVCVRVPSTQRNRYHSEVTTWGATVPEIMKLKAFLEEAQLELVVMESTSDYWKPYFYLLEDTVPVQLVNARQARNLPGRKTDVSDAHWLAKTASWGMLAPSFVPPPPIRVLRDLTRARSTITFGRASELQRLEKYLESTGSKLSSVVSDLDGVTSTLILRALAGGERDPKALAALAKGRLKNKTDELEQALTGIRFTAHDAFMVAFHLDELNAQQARLAALDAQITEAFAPFRTDIELLSTIPGVKTTIAQVIIAETGGNMAAFPTSAQLASWAGVAPGNNESAGRHKPAATSKGDKYLKAALGQAALNIAKQKGGFLPTRYKRIANRRGKPRAIVATGHTLITDIWNMLANGVAYEEPHPRRYDQANNDRTRQHALRALKQLGYEVTLTQAA

SEQ ID NO: 177489 - protein, 364 aa, unidentified
MIVIGTDTHKRTHALSAVDEGTGRVRGHREITADEDGHLVAVKWARGLDAERVWAIEDCRGVSRRLEQTLIAAGERVVRVAPHRMGVSRRGERQPGKSDEIDSLAIARAVVKDGVERFPAAFLDEQAMEIRLLSDHRHDLVAERTRAQNRLRWHLVSLDPELEASLKRGALSDSRQLDRIDRRLRRPGQGARTRVARDQVSQIRSLTRQINTLKDELLALIKAHRPQLLAEIGCGPLTAAILIGRTAGAERFQTDASFALQSGTAPIKCSSGQRDQHRLNRGGDRQLNRALHMIAITRAQHHPETREYLARKRAEGQTSKGALRCLKRHLARRFHHLLALPSDNVNTEPALTAETAPALMPCTR

SEQ ID NO: 177490 - protein, 341 aa, unidentified
MGIIVIGIDLAKHIFAVHGVNENGHAELVKTKVSRDQLLPLIANLPPCLIGMEACSGAHYWARQFRQYGHTIKLMAPKFVTPYHMSGKRGKNDAQDAAAICEAVTRPKMRFVPIKEEHQQIILCLHRTRQGFVAERTATYNRLRGLISEFGIVLPQKVTGLRQGIGKHLDELPGYTRQCIDDLLTHADALDARITDYDKVIAQAAREDARSKRLMQRPGIGPITASALLASIGNGHDFKNGRQVAAWIGLTPGQHSSGGKARLGHITKAGDNYLRSLLVMGARSVLNSIGDKQDYFSCWARNLVTRRGYWRAVVAIAAKNARVSWAVLKYGEDFRLNKSEA

SEQ ID NO: 177491 - protein, 425 aa, unidentified
MDFIQNQKINQVTEKTLVIGIDIAKRTHYACFVDDRGRVLQISFSVSQSRDGFELFYKRILVAMKESEKTEVIVGIEPTGHYWLNLAYFLQERGIPLVMTNPMHVKRSKELDDNLPTKHDRKDALVIARLVKDGRFSYPRILKDMEAELRVGSTFRERLVEEFGAVKNMMIRWLDRYFPEFTQVFPKFGKMALAALECTPFPNDLHQKQVDELLVLFKKVEGMKSPQKPKAKRLIEVAATSIGITEGREMARFEIATLVSRYNQLEQEIESITQQLVELVKTSVEYEWLTTVPGLGDTTIVDLLAEIGSFSHYDDPRQIIKLAGLTLRENSSGLHKGQKRISKRGRRKLRALLFRVMMPMIRHNEAFRKLHEYYINRQVNPLRKKQSIVVLCGKLLKVLHGISTKHKAFDAQRMMKDIPSLAEAM

SEQ ID NO: 177492 - protein, 410 aa, unidentified
MERLIERVAGLDVHKKSVTACVRLPGAGGARQQVVHTFGTTAAALLALRDWLLAHGVTDVAMESTGVYWKPVYYVLEEQFACRLVNAAHVSKVPGRKSDVRDCEWLAQLLEHGLLRGSFVPPVAIRELRDLTRYRAVLVQDRTREANRLHKVLTDAGIQLASVATNVLGKSGRAMLTALVRGTTDAEVLADLAQGKLRRKLPALREALTGHFRQHHARLVSQLLAHLDYLDEALEVITADIEEALGPFASEAARLDTIPGVGPRTAQVLIAELGVDMRQFPTARHLASWAGLGPGTHESAGKRRAVRTGKGNRWLRGALIEAALAAINVRDSALAARYRRLRPRCGHKKAIVAVAHKLLTTAYVLLADGRTYHELGPSYYDARRKERDVRRALQALERHGYRVNLEAVAA

SEQ ID NO: 177493 - protein, 339 aa, unidentified
MKKVFIGIDFSKLKFDVAIYSVETKAIVATEVFENEQSGFEMFLKWIKENIRNKKSQILFCGEHTGYYSGNLSVFLYESGYDMWLISGLEMKLTQGIKRNKTDRVDACKIAEHAYRYQDKVVLFQPVSKELEEIRELLSYRERLVETRKILTTSAKEMKRVKDNASCDYIYQDSIEYIKKLNASVRDCEKRIETLTKQDIALKTNYELVSSVVGIGLVNAALIMVTTANFTLFDNPRKFGCYCGVVPFEHSSGSSVRGKTRVSKMANRRIKTTLTLAARNSVRFDPELKEYYERKLSEGKNSWLVLNNVKNKLIHRIFAVVRDGQMYEKQYVHPLKQAA

SEQ ID NO: 177494 - protein, 408 aa, unidentified
MNAVGIDVSKGKSMVAALRPMGEVALLPQEFLHTEVGLEQMAYAIIALGEDTRVIMEATGRYHEPVAAALHEYGIYVCVLNPLFIKQSGGGSIRKVKTDKADAMKIAKYGLDNWVDLREYTPMDTVRQQLKLCSRQYNLYMKTVVSLQNNLISLTDKTFPGVNELFSSPERADGHQKWVDFVMTFWHCDCICRVSEKAFTERYQKWCKRKGYHYSAEKALDIYAGSCGHFTTLPKNDNTKLLITTAAQQLLAGKMTLAALRAEMARLARQLPEYDTVHAMYGVGEITAAQLMAEIGDVRRFPRRSSIVGFAGVDPAVNQSGKHAAQSTPTTKRGSPHLRKTLYQIVCTYLKKSPAEEPVYQFLDKKRSEGKPYFVYMTAAQNKFLRIYYARVKECLETFDAQQNSAQS

SEQ ID NO: 177495 - protein, 311 aa, unidentified
MPNDTIGIDISKATLDIHRLSDGKMMSFSNCPAGFKEFSKFCAQTSVTRVVYEATGAYHSGLERALGALLPLVKVNPLQARRFAQAQGVRAKTDAVDAKMLAVMGNAFVLDPDKPATKLQHDLKELRAFRSGLIKDRTRIMSRQKTQTLSIICRQSKARLAQVDKHIAEIDAEVKRLIQSSDTMARSMKILRSIPGIGAVCASTILIEMPEIGRMDRKQVASLTGVAPMTRQSGQWRGKSFIQGGRKVVRNALYMPALVAMRFNPDLKAKYQAMIKAGKPPKVALTALMRKLIELANALIKADRNWEEKRA

SEQ ID NO: 177496 - protein, 491 aa, unidentified
MSIERKVFIGMDVSKGYVDVAAVNNAGSVLPWEERFDDTSDGHESFVSFIESRVGCDDSKTVIIGLESSGGLERNWYRFIRKTFPDVKLHLLNPLAVKRFGERKLHRSVTDRLSALNIAQYLRLGLSPGEISPEPHLDGALSFYRYIRNQISGETRLRNELQSIMVRVQPELVQYCRAGIPGWILRLVAKYPTARELARASVKNVEKIPYVTSERASSLIEAAKKTVASQYDYLTGVTVKKMSRSILSISLEIDKMKNTLINSLKNDPAVELWTTFPGIGLWSAVCLKLEYGNIERFYSSQAAAAYSGLDPCVLQSGDSVKRCGISRKGRRQIRAILYPVALSAIRCNPVIGEFYSRLRSSGKNHKQAITACMRKTAVILYAMAVSGKPFEPKYAEKKRSDLESNDNNSPVANHSENLQNFGSITNIDRKQIKIIAPVTRREAKKRLSLIDFANGTQIKRGGGLPHTVSLPQMRGHAATPEYNTSCKIVSQ

SEQ ID NO: 177497 - protein, 425 aa, unidentified
MNVTYKTCCGVDVHKSFLVATIIATTGGIEPSYQKKRYSTFNNSILEFKQWLLDNDCHDLCMESTGKYWIPVFNLLEDEINVTIANPKWVKAVKGNKDDTKDSKWIGDLFRLGLVKGSYIPCKKIRILREFTRYRYKLVSCRSSEKNRYQNALTVCNVALDSVVSDIFGKSSTSIIDYLLEQSGNSINHEEIASKLLKSLKSKEDAVIESIEGYQMTDSQKYRMHLVRAHMDYITAEINDVDREIEKLISSDPDFENAIQFLMTIPGVKRDSAITVISEIGIDMTQFSSSKRLCCWAGLTPGSNESGGKKKSVRVTRAGVYLKPALVQCAHAAVKSEKSPYYKKKYESLMKRRGKKRAIVAIARMILTAIYQMLSTGESWNPSDLYKIDIPEALLEKQKAKAIKQAMKLLQREGLYPLPQESKAS

SEQ ID NO: 177498 - protein, 343 aa, unidentified
MQVSTIGVDLAKNVFQVHGVDSVGKVVISRQLRRKQVIDFFSKIPPCLVGMEACGTAHHWAREVSKLGHTVRLMPPSYVKGYVKRSKNDAADAAAICEAVTRPSMRFVPIKSADQQALLMLHRTRDLLIRQRTQPINALRAHLAEFGLVAETGREGLAQLAGIITDESNREALPSAMKQALQAIVDQLAALELQIATLDRAIHAHHRANDMSCRLETVPGIGVIGATAIASTVTDPSAFKSGRDFAAWIGLVPRQHSTGGKERLGGISKQGDRYLRRLLVIGATAVVRHARQHPQKHPWVMRLLAKKPAKLVAVAVANKMARIAWAIMVKGGYYRAPELAAAA

SEQ ID NO: 177499 - protein, 399 aa, unidentified
MHKKLIVACFRKGSKQELRNFGATTRELLELANWLQNGGCEMVAMESTASYWKPLYNILESSELKAMVVNASHMKAVPGRKTDTKDAEWIAELLQHGLLKASYIPDKQQRELRELVRYRKSLVSERTRELNRLQKMLEGANIKLSGTVSDINCMSARNILEYLLTGEFFDEAKYDEMYKQKIIAHNLKASKEQLIDDLNGVMTPLQRRMMKELLSHLDELNVHINNLEDEIDNFMKPEEKKATQAIQDVTGIGKNSSQAIISVIGTDMSRFPTAGHLAAWAGLCPGNNESAQKRKTGKMRKGNALLRSTLVVCAHSATRNKNSYFYAQFMRISSHRGKKRAYVAVAHSMLIAIYHILKDGVVFKDLGADYYNQFNMERKINAYLKKLKALGWEVPVVAA

SEQ ID NO: 177500 - protein, 482 aa, unidentified
MKKRNIYQNRSQELLSLFEKAGNSAKVMCVPMDYAKKDHVVMFCNGYGDILRKPFSVKNSPEGVKYLVDQATRSCRRRGIKKDHIFFGGEDANSYAENFVNTLHSKGWLVAGVNAHDAKKQRANLQASTDRLDLMGIATMLLNCRANCCPTQSGIYRNLRTLVRHRRKLVVMSTEVKNRIHGVVDRLFPGFLDEGKTGIVPFTSSSLYLMEDRFSPKQIRRRKREKLIEILKRFGTSKAEETADRLQQYAAQVLHTPADYVDTLQLSLAQHVKHLRCLKESVNQLEKEISVSLAQTQGAFLTSVRGIGIVLAAGVTAEIGNPNEQKPLNNLVSYSGIIPRVKQSGGPEGKAYTVSVAKRCNRILKDYVVKSALHLGLHGPQDLMADYKRRDASGQHADFSMGRRYLRMAMCLMRTSQIYLPPRLRKADATLQERAGYYLKTWPKLREKWLKYGALEFAFGKNRLLGQWRQIVQELYDIRLKL

SEQ ID NO: 177501 - protein, 528 aa, unidentified
MEPESPLVNLVRTRLLEPGTVVFRSGGMNTRRNVVLPHLQASFAWRSERTVMGMRYRRCCGIDVHKKSVTVCILPPAGKPGTEVRRRKFPTFTRDLKQLRTWLKNCKVTEVAMESTGQYWRAVWNVLEGHFEKLILVNPQQIKGLSGHKTDPKDAQWIAGLLETGKLRGSLVPPRDIRELRDLTRQRVHLLEDLNRIKNRIEQLCQAGNIKVSSVATDAFGVSCRRMLKAIVEGKRDAGWMADYARGALRGKRRELEAALEGSFTDNQRWLLDQELRQLEGLEAQVQVLEQEIERRVVPFEEAIRRLITIPGIERRTAWTIVAEVGVDMSVFDDSRHLASWAGLCPGNRESGGRRMSGRTRKANRYVRRALCQAAWAASHTRNTFLSAFYRRIQVRKGAPKAVMAVAHHLITVIYVMLLRGEDYVELGADYYDRKNKSRVVSRLLSRLSKLGYFAELRPIIPAFPSSVRVADSADVAPESESASEPATARRKRGRPCKCAERGIKCKHQTLNGVNSLIQQPSSLGIFS

SEQ ID NO: 177502 - protein, 336 aa, unidentified
MFQLGIDVSKKTLDLCLLREGVKGSVKTRKLQNDINAVNAVIAWLSKQHCKPEDVHIIMEATGVYHESLAYGLHKAGGRISLANPHRAREFARGMGMLTKNDRVDAYMLACYGALKAPEPWLPPPEEVRHLSALLRRRDALVADSTREKNRLEKYLATDTPSIIAESVEAMIGQLNAEIKRLDRLIRSHLNQHPELKKDFDLLTSIKSVGYQLGLNMLVILRSHDFATAEQAAAFLDVVPVEKYSGTSVRGCPKLSKIGPPEIRAKLYLASLCGLRFNPLMKAMYERLCLRGKGKMCAIGALMRKLVHWCYGVLKTQKPFDVGYLSSYARSACKAA

SEQ ID NO: 177503 - protein, 425 aa, unidentified
MKKTDYLSTLFVGIDIGSRTNVVSAIDFNREYFIRMKPVPNAKEGAEILESLLVDVLSAHHEFKHVIIGMESTGFYGVHIANYLSASDMLSPFGAEVYCLNPKEVAKYKESFNSINKNDGIDSFVIADFARVGRITIKSWRGAQYLALQRLTRHRLHIAECIAREKTYVLNNIFLKFSEFAMLKSEDHPFSNKYGATAEAIIEQYVTNDDIIRASIDELVELIESKSHGRITDPEETAKLLQSAARGSYRLDKVVAKPITLSISSSFNCIRAFEKELKAIEKAIEQTVQGINPLEYQVLKSIPGIGPTYAAGILAEIGTIKAFPNNDALAKYCGIIWKENQSGNFRAEDTKMSKAGNRYLRYYIIEATGSVINHCPEYKAFYGKKFAETTTHQHKRALALTSRKFLRMLFGLLDKTQLYSLEKSR

SEQ ID NO: 177504 - protein, 349 aa, unidentified
MRKCSTVSFEGQVIFVGIDVHKESWAVNLRHCRRELDKFSMNPSPEMLAKYLKKNYPGAEYRSVYEAGFSGFWAHRQLCGLGIKNIVINPADVPTSGKERDRKNDAVDSRKLARELENRTLEGIYIPPEDNLELRNLVRRETKLTGNITRVKNRIKGHLNFMGLKFGSWSGSSLKMMYADAAKRYDYALQSMLRELRFLREEKLHVIRDERRCLKRLKRDKVQEHLQSIPGVGFHTAVMLQAELWDLLRFEDKDALSSYVGFAPRLVGSGEHEAVKSAGNRKKKQLHAILIQAAWRSVSYNLETRARYGALLHKGASPQRAISIIGKKLLYALRAVWLQERDYVASASE

SEQ ID NO: 177505 - protein, 372 aa, unidentified
MNYNTVYVGMDVHKESFSLCAYTIEAEKASHYQRTEADYKKVLNYLEFLRTIYGDDANFICGYEAGCLGYTLYHQLTANNVKCIILAPTTMLEQRSKKRIKTDKRDAEIIAKCLAQHNYSPVHIPTAKDEETKEFLRMRDDHKLALKKVKQQILAFCLRHNYRYDGNSHWTAAHLKWLKALTPEALYKEILDEYLLTYQTLSDKLERLDKRIGELATQDEYKEAVKKLCCFIGVKTHTALSVLVEVGDFKRFASAQHFASYLGLVPGEDSSGDNQNRLGITKAGNRHVRLLLTEASQCYARGQVGFKSKELKASQSGNTPAVIAYADKANERLRRRYYKMVLNKCKKHNVAKTAIARELACFMWGMMTDNIV

SEQ ID NO: 177506 - protein, 449 aa, unidentified
MSRPQVIDDQEHERVHDKVAAIDVAKDSGMVCTRTPHPSRPGARRSTVWTIKARRNAISGLGRQLARDGIEVVTLESTSDYWRIWFFVLEACGLAVQLVSAAQAKNLPGRPKTDKLDAQWLARLPEMGLLRPSFVPPKAIRDLRDYTRARTRLVGDRTRCWQRLEKLLEGALIKLSAVASTLATVSAQDMIKAMIAGQRDPHALAALARTRMKAKHDDLLAALDGMFDDHHGELAALLLDQITTLDAKITQLTGRIAESAAAIPQAWGTDGDGTTGPDAGMSPDAAILPAPARLAQIPGLSEDLARSIIAETGLDMTRFPTAAHLVSWAGLCPSARQSGPRTRASRKGQGNGYLRGYLGRAAVAAARTPTFLGERYHRIARRRGNAKAQVAIARSILVIIWHLLADPTARYTDLGPGYYQARTDTDRKLRNHIRQLQALGFTVTITRAD

SEQ ID NO: 177507 - protein, 417 aa, unidentified
MKCFVGLDVSSTKLDVCIMLNDTSTPVTASLSNDLSGATEIKNHILDLNHTYHFERIVIGMEATSLYSFHPAMFFHEDSQLKELHVEIMVEQPNKIKKYRDAFEENKNDTIDAFYIADYFRIERFSPSFLKEEKYMALQHLTRTRLQIIEQLTRTKQHFIENIYYKCNTLAYQFKKEELSTNLWSSTMMTLITDEMTLDELANMPLQELADWLQQLGKGHFKDSEKLAQTIQAAIRGSYRLSKLQQDSVNVILGLLAREIRNLEKMIKEIDKAIEDMVETIPEYQCLTSIPGVGKVYAAGIIAEIGQIERFKDHPQVAKFAGLNWREKQSGNSNSQHTSLVNRGNRYLRYYLVEAANSVRRYDDEYKDFYKKKYHEVPKHQHKRAIVLTARKFVRLVDVLLRNHQLYTPPRRLMEDK

SEQ ID NO: 177508 - protein, 373 aa, unidentified
MSEFNKFVGLDVHKSTIAISIASDDGAEVRYFGEIKNTKEALINFANKISQGSLKLSFCYEAGGCGYEVYRHLRNIGHDCMVVAPSLIPKKAGQRVKTDRRDSLNLARLHRAGELTGVWVPDAMNEALRDLTRAREDMKHLQRQAKQRLLAFLLRHGWTYSGKSNWTKDHFNWLETVKFQHAAQQIVFQEYVDTVKYCGKRVESVTQQIEICSRESAYWPVIESLMALKGIDLISAATIMAEIGDLTRFDSAPKLMSYLGLVPSEHSSGSSVRRGGITKTGNSHVRRVLVEAAWTYRFPARKTAHTQKRAKVTTEAVQEISWNAQKRLCQRYKELNANGKIKVQTCTAVARELAGFVWAIGQTVPLKPTANVQ

SEQ ID NO: 177509 - protein, 348 aa, unidentified
MRFYTKTHKHYCGIDLHARKKYVCILDSEGTVLVHREINCNPESFLRIVAPYREGLVVGVECMFAWYWLADLCRNEKIEFVLGHALYMKAVHGGKAKSDKIDAHKIAVLLRGGMFPLAYVYPPEMRATRDLLRRRNFFVRKRAELMAHIQNTVIQYNMAPLGCDLAVEENRHGVAQLFPDPEVRKIIEIDVAMIDAFDDVLKVLEPDIEKTARQHNQHALKLLRSIHGVGKVLGLVMLYEIHDINRFPTVQDFSSYCRLVKCAHESAGKKKGTGGAKIGNVHLKWAFSEAAVFFMRHNPPAKILMEKLAKIHGKGKAISILAHKLARAIFYMLKNNVPFDREKFLATA

SEQ ID NO: 177510 - protein, 309 aa, unidentified
MDPIAVGIDVSKEQLDVHVHPAGTVLSLSRNGAGIEELIGALAAIAPQLVAVEATGGFETVVVAALAAAGLPVVVVDPARVRAFAAALGRRAKTDPIDAQVIAQFAAATRPPVRALPDAATQALADLVARRRQIIQMIVAEGQRAKRAAPRAKRSIGRLLEALRRELSEIDADIDETVRGSPVWCEKEELLASVKGVGPVTVRTMLAELPELGSLNRRQIAALAGLAPFTRQSGRWRGKSFIGGGRASVRTALFMAAMTAMRHNPVLRAFHQRLRAAGKPKMVALIAVARKLLTILNAILRDKTKWQTA

SEQ ID NO: 177511 - protein, 466 aa, unidentified
MKEAAMKHNPKREANKGRVSISLLERIQPDAAGIDCGQNSHFVAVPPDRDPQPVREFRTFTADLHRLADWLTQCGVKTVAMESTGVYWIPLYEILEQRGFQVVLVNARDVHNVPGRKSDVKDCEWLRELHSVGLLRASFRPSAAIVPLRAYLRQRETLVQETSTRIHRMQKALTEMNVMLHVVVSDITGQTGLKIVRSILAGERDPERLAQHRDHRCRASHAEIVAALTGNYRAEHLFALKQNFAAYEFLLKQTAECDSEIEALLSTLADRQPPPTAPLPDARRKQVSKHAPAFDVRGPLHRLTGGADLSQIDSIGPHAALQLIAEIGTDMRRWPSEKHFTSWLSLAPSNQISGGRLLSSRTRPSANRAAAILHRCAMSLSRTSTALGAFYRRLAARVGKAKALTATARKLAVIVYRVLSGNLIYNDPGATAYHQLHHARELKSLRKRARLLGFQLVDQTTGEVTA

SEQ ID NO: 177512 - protein, 428 aa, unidentified
MKNNWSATTHFAGFDWADDHHDIVIIDAEGAIVTDFRIAHSQAGWEQFRERIQAYPSLAFAVETRHGLVIDQLVTSGCTVYPVHPISAASYRKRKAPSGCKTDAIDAWALAAALRTEGQDWKAIAPNDPQAEQLRLLCRDEVRLIQQRTLLVNQLEATLKEYYPAAVEAFDRLTLPAAWDFILQFPTPQQLVAAGKRRWEKFLHTHRLWRPETAGPRLEVFARADQFCGRAPVTAAKSQLALSLAHLLKTLQLQIDHYHEQIQALYRQHANYPLFESLPGAGPLLAPRLLAELSLNPERFSDPAALQAIAGTAPVSYQSGQIHRTKIRRHCDKHLRCVLHLWTNNSRRKCGWASIYYQHKRAEGKSHACALRCLAQRWLKIIWKMQSTHRPYDAELHQQNQLKHGSWVLTLQTVKVTQKKVVNKSEKN

SEQ ID NO: 177513 - protein, 317 aa, unidentified
MSAPAAQFVGIDVSKHQLDIAVRPSGETWTVAHHEAGLSALVARLRELAPTLIVLEATGGLEVPLAGALATAALPVAVVNPRQVRDFARSTGTLAKTDRLDAQILAQFADAVRPEPRPLPDAQAQELTALLQRRRQLVEMLTAEKNRLQIAPRRIRPQLQAHIEWLQQQVAQFDEDLRQLVRSSPLWREKDDLLRSAPGVGPVLATTLVAALPELGTLTRHQIAALVGVAPLNRDSGTLRGRRTVWGGRAQVRTVLYMSTLVAVRHNPVVAAFYQRLRAAGKAPKLALTACMRKLLTILNAMLKHHTRWAPVITQHP

SEQ ID NO: 177514 - protein, 411 aa, unidentified
MEVVHERCAGLDIHKKKIAACVRFNERGQIKSKVKSFGTMTDELVELSDWLHSFGVTHVAMESTGIFWRPIYAILESTFTVLLVNPAHIKAVPGRKTDIRDCEWIADLLAHGLLKGGFIPPEPIRDLRDLTRYRTSLIDERTREVNRLYKLLETTNIKLGSVVSDMRGLSAQAMLKSLLDGITDPDILAELARGRLRKKLPELRKALVGRFRPHHRVLLETILAHIDFLEETIDDLSKEVAARMAPFAKDIELLDEVTGVNLRTIESVIAEIGIDMEAFPTEKHIASWAGLCPGNNESAGKHKSGKTRKGNPYVRRALVQAAHACINTKNSYLGSQYRRIAKRRGNKKAAVAVAHSILVIIYHILKHKIPYQDLGPDYFDRINKEHIARYHRRRLEGLGFRVTIESTEQAA

SEQ ID NO: 177515 - protein, 517 aa, unidentified
MATRTRRPVRKYLIQKPNGQVTQRVQAVGPEHFGVFCFDCAKARSKFMLADFYGTVLLAPQVVPHSRGHLQSALDQLRKAVDQHGLRDMIVAIERTGEYHRPVQRACQQAGYDTRLVHPLTSKQFRVPADPNIKTDDTDLAAIFRAAVNGFGLVEPVWPPDYQQLQLLVRHRRDLVQKMTILCCQLREQLHALMPGYAECFSDLWESHLALPLARLTGSADAIRQEGGQGLLRLLLEHRLPVRRASCAKILAWAEQAPAAHPHQTLLLHILCALDEDRLRKIQEIKALEQRCAHYLARTPYMLLLVIPGINVVSTAELAGELGPITHYPHANAITGRAGLVPSRYQSDRVDRPDGPLRRRANRRLRTALVQIADNLIACNHYFSAKATGWKSHGKDARWQRIKVTKIFSRLLYAMVAGRQLFPHPCRQESHYILHKLMEFHRERGTPMSQVLDDLDAATQQLPHAACAAETKPLAERLKEVQQRRGPQPLADLIPIVLARLAARSVQSKASEASGPS

SEQ ID NO: 177516 - protein, 388 aa, unidentified
MTAVIIGMDPHKRSATIEVMAGDETILGGGRYATDALAIGEMLRFGKRFPERTWAVEGCQGIGKHIVNRLLADGELVVDVPPKLSARTRMLVAGQGRKTDETDAHTVAVVGTRMSGLRPVVNDEQLAVLRILVDRRRSLGEDHTRMVSQLHQLLLELIPGGAQKSLSAAQAKALLAKVRPRDAAGKTRRRVAAELISDLERVYARKKAANKELNELLAATDTTLTDLHGIGPSGAARLLVEVGDITRFPSKAHFASWNGTAPIDASSGDQTRHRLSRRGNRQINRVLHIMATVQLRNPTEGRAYYDRKKAEGKTSMEAMRALKRRLSDVVYRQLLTDALTTKATGPGGQAGASLQSSAADSHPDAGTSDQSLPGPATDKPRTDLAAVS

SEQ ID NO: 177517 - protein, 317 aa, unidentified
MKKRPSRFVGIDVSKDDLDLACRPEDTRWRVAHDSAGIAQCLAQLRQLKPTLIVLEATGGWQGSLVAALAVSKLPFAVMNPRQIRDFAKATGELAKTDALDAGVMAHVAEAMRPTPRPLPDEMTQQIDALLQRRRQLLAMLVAERHRVALAHPAVRDSLARHMDALQGLINATDEEVAAIIRTSPAWREKDDLLQSAPGIGPVLSATLQAALPELGVLNQREIAKLVGVAPFNDDSGKRSGTRHIRGGRAAVRAVLYMATLTATRCNPVIKAFYQRLLGRGKSQKVAITAAMRKLLTILNAMVKTHTPWNARLQNCA

SEQ ID NO: 177518 - protein, 401 aa, unidentified
MVSDFMKGRYNLMKIFVGIDIAKLNHFAAAISSDGEILIEPFKFTNDADGFQLLVSKLESFDKNSIIIGLESTAHYGDNLVRYLVAEFYQVCVLNPIKTCQMRKNNVRKTKTDKVDTFVIAKTLMMQDDLRFITFFDLDMMDLKALGRFRQKTIKQRTRLKIQLTTYVDQVFPEIQYFFKSGLHQNAVYALLKEAPSPKEIASMHMTHLANLLKVNSHGHFTKEQAKELRILAQKSVGANDSAISIQITQTIQQIELLDSQLEKIEAEMTDIMKFNDSVIMTIPGIGYINGGMILGEIGDMHRFSNPNKLLAFAGLDPSVYQSGNFQAKTTRMSKRGSRVLRYALVNAAWNVVRNNATFKAYYDAKRAEGRSHYNALGHCAGKLVRVIWKMLTDEVEFNLE

SEQ ID NO: 177519 - protein, 430 aa, unidentified
MEIVYPRSCGVDVHKSFIVAVICISESVKPKYIKKRFSTFNNQLIQFRDWLIENNCQNVCMESTGKYYIPVYNALEGHISNVVVANPKWVKAIKGEKDDNKDAKWIADLFKFGIVRSSYIPEKDIRILREFTRYQYKLVNMRSSEKNRFQNALTTGNCKLDIVFSDIFGKSASAIVDTILSNNPYTSEDILSKVHAGCKASHEDILSAVEGIQLNKFQKARIRIVQKHMEYLDSLLDEIQHHIDLMVANYEEYIQLLCTIPGINRKSAITIISEIGTDMSQWSSHRKLAAWAGLAPGCNESAGKKKSVKISKAGVYLKPCLVQVAHAAVKDKNCDYYADKFNKISKRRGKKRAIIAIARKILIAVYHLLKTGEVFNPTDMADVETTKKQRIEYVKNNLRNAFNQLSRTGLSEAEILQLIRKESKNSPQIE

SEQ ID NO: 177520 - protein, 352 aa, unidentified
MKEHSNERVVKVIGIDLAKRSFHAYGVDERGQRVISKAFNRTRLREFMANLPACLVAMEACGSAHYWARLFRTYGHEVRLIAPQVVKPFVKSNKNDAVDAEAICEAAQRPTMRFVAVKTIEQQDLQALHRMRSLAVERRTAQINQIRGLLLEYGIEIAQGRAAVGQRLPDILADADDGLSDRFRAELQELAEELRHLDARVAHYDEQIEAIARSDRRVQCLMTIPGLGAKGATALVAAVGEDPRLFKNGRGLAAWLGLVPRQQSTGGRDRLLGISKRGDVYLRQLLIHGARAVLRWVERKNDPTSRWAMELKGRRHTNVAAVALANKIARIAYAVLTTGQPYDPAMGAWVKT

SEQ ID NO: 177521 - protein, 420 aa, unidentified
MKESVIGDFAALIGIDWADKKHDVCEYDLNTQQYHYSVILSKSESLHEWAMSLKKRYPHQSVAVACELTKGPLIYALSKYDHLTLFAINPSTVAKYRKAFTHSGAKNDPSDAFIQTEILEKHMSKLDSLRPEPAHVRALAQILEYRRKVVQDKVDLTNKITATLKNYYPQALDWFKEKDTLVFCDFLTRWPSLSLVKKARKQTLLNFFNQHHSRYRDINEKRCDEIKSSIALTDDPGVIEPNQILIEVLVSQLKSILEGISRFDNEIKQRYINQKDKVIFDSFPGAGPQMSPRIFVAFGTDRERYAEASAMQKYGGIAPVIEQSGQKKWTHWRYSCPKFLRQTFVEWAGQSVRYSFWAKAYYEQQKQKGKPHNTIIRALAFKWIRIAFRCWQTSTPYDESKYLNALKKQGSPLLKFAVDS

SEQ ID NO: 177522 - protein, 411 aa, unidentified
MDTVIERCAGLDVHKDTVAACVRVPGPDGRRDQVVQTFGTTTTELLTLRDWLAAHGVTVVGMESTGVYWKPVYYVLEDAFQCWLLNARHLRNVPGRKTDVADAAWIAQLVEHGLVRPSFVPPKPIRELRNLTRYRKAQIEERTRESQRLDKVLQDAGIKLSSVASDVLGVSGRAMLHALVAGSHDPAALAELARGTLRKKLPALREALRGRFGAHHALLVGAILAKLEVLDGLISELSAEIARVIAPFAPAVERLRTIPGVDHRTAEGLVAEIGVDMSRFGAAARLASWAGICPGNNESAGKHRAGTTRKGSKWLHTYLTEAAKAAGRTKRTYLAAQYARLRGRHGAAKATVAVGHSMLVAAYHMLDRHQPYHDLGPDYFRARHSRQHHLRRLMRQIEALGYKVSVEEEAA

SEQ ID NO: 177523 - protein, 409 aa, unidentified
MRPILRSCCGIDVHKSMIKACIAKGPLNKPPKIEIRTYSTMTSDLEKLNAWLKENKVEAVAMESTGVYWKPIFNILESDFPVSIANPKYLKKVPGKKTDVSDSEWIATLLRCGLIPKSFIPTLPIRELRDLNRTRRKMVEHMASEKNRLQKVLEDANIKLTSVVSKVDGVSSMNMIQALLNQDEISREDIAAMVHGKLKTKIDQLVQALNGRLTNHHRYLLRLHLKQIAFLAEQIKELDDVIQKKMKPFKKESDLIQTVPGIGKTTAPAIIAEIGTDMSQFPDEAHLSSWAGICPGNNESAGVNKSGKIRKGNKYLKATLCEAAWSASKKKGSAYSAYYNNIAKRRGKKRALVALAHQMLMDIYRTLKTGEPYVDEGAEAVFERNSSGRQKSAIRFLEKSGYVVTKASA

SEQ ID NO: 177524 - protein, 346 aa, unidentified
MGEYVGLDVSMEETSVCVLSAAGEIVWEGKVATEPGALVRVLHRRAPTAEKVGLETGPLSTWLWHALREADVPVVCLDARHAQAALSMRINKTDRNDAAGLAQLVRMGWYREVKVKRLAAHVDGALLASRALLVQQRCELENQIRGLLKNFGLRVRATKGRAFGQSVADLSAKRPVVHQVVMALLAAWSSLRVQIAVLSRQVEQQAMGDPVCRRLMTMSGVGKLTALAFRATIDDPSRFRRSASVGAYLGLTPRRYASGEIDRMGRISRCGDALMRSYLYEAANVMLTRARGSSPLKSWGMKLAKRAGFKKARVALARKMAVILHRMWRDGSDFGMPNAGASAERS

SEQ ID NO: 177525 - protein, 405 aa, unidentified
MAHYHVGIDVSKHKHKACIRNLSQDSYSGVFSFTVNRQGFEKFLTTLEKLSPSKEDFLIGIEATGNYGVTLAYFLLAQGYKVMEINPYRANQFRKAQGKKAKTDCIDARSLATLLSLENHKPLSLPDPVLDNLRELTRFRADMVKDRSALVNQLHETLSTLFPEFASVFSRLDSSTSLALLISYPGPGYISHAGEARVSETLVNASRGRIGKVVAKALVEAAQSSVGVLQRQPALATEVSLLGERLTALTAAIERVEREIADLFHKLPYDPQDFPVGNITSLATLISEIEDIHRFPTLKQFLSHFGWCPKSFQTGSYRLEHPRMSHAGNKYVRRLIWMLSIVSVKTVPRYRAYFQRRVAEGKSKMHILVAVGRKLLSVFYAILKRGIPYDPNWEVNGSHFALARH

SEQ ID NO: 177526 - protein, 469 aa, unidentified
MSTIYVGVDVSKGYVDVVFLNDAGSVLGEPYLFDDTPKGHKAMMSVLTELVRRDKEISFMIGVESSGGLEKNWLKFFSSISVQLPVSPYYLNPFCVKKFMARELHGGKTDILSANAIALYLKRGLRLSDKPYVEENTSDRLRFNLIRSFSKHCALMTNQLHILLIQVQPYLVQYCRSGFPDWILNLLVKYPTAKKSATAKPEKIAKIPYITLSKAQDLIAQAKESVGALTDSNTARTIELLASELLRNQKLVEDEKKSLIKSNSNNMDKEILTSIPGFGEWIAIGFLTLIGDISKFQKASSLIAYIGSEPVVEISGDLKINRGISHHGSKELRALLYPATLAAISFNKVIRNFYDRLREKGKSHLVAMMACMNKLIRIAYSCLKTRMKFDASYGEKRRQEIETRAQLERKQNVRKRYKVSISLESPISARKAKERREMRKATENITRSHASKIYGVKHHKTQCLPHPSL

SEQ ID NO: 177527 - protein, 419 aa, unidentified
MSFKILKNNCCGLDVHKTWIYACIGITDSLKRTEYKEARFSSFTKGLNELCDWLSKYNCTDVCMESTGKYWIPVFNVLEKNNIWVTLSHPKYTKPQKGNKTDRKDAKWICDLYMCGMVKPSFIPPADIRELRDLVRYRFKLTCMITGEKNRAHNCLTVSNLKLDDVFSDIFGKSSRSITEQILQHPGETFDVAPFVDGRCKTPIEEIQAAVDGAISKEQAVKLRQCLNHIDELEMHKAEIEREIFRLSDKYESVLSLIRTVPGFDKTPMTAIQVLSEIGGDMSVFPTAKNLVSWAGCCPRNDQSNHKIKSTRISRAGSYFKPVLVQVANALIKSKKHPEFTTRYRRIKARRGHKKAIIAICRMILTAIWHILTDLKPYTPEGSLESRPVNESKILTTSQALNLMKQRGYIIKDDVVTVT

SEQ ID NO: 177528 - protein, 316 aa, unidentified
MSASPLFVGIDVAKAELMVALGPSRDLVAVPNDESGIRQVLEQLQAASPALIVLEATGGYETAAVAALAAAGLPVVVANPRQVRAFAKAMGILAKTDNIDAHVLALFAERVRPPIRPLPDEALRMLDALLTRRRQLIEMLVAERNRLAHALPPVEKSLKQHIRWLERRLADVDSDLDQAIQQSPVWRAKEDLLRSVPGVGPVVSRTLLADLPELGALNRKQIAALVGVAPLAKDSGTLRGKRMVWGGRAPVRAVLYMGALIASRHNPVIRDFYQRLVAAGKPKKVALTACMRKLLVILNTMVRNNTRWGERYALSA

SEQ ID NO: 177529 - protein, 334 aa, unidentified
MENIALIGIDLGKNSFHIHCQDHRGKAVYRKKFTRPKLIEFLATCPATTIAMEACGGSHFMTRKLAELGHFPKLISPQFVRPFVKSNKNDFVDAEAICEAASRPSMRFVQPRTESQQAMRALHRVRESLVQDKVKTTNQMHAFLLEFGISVPRGAAVISRLSTLLEDSSLPLYLSQLLLKLQQHYHYLVEQIKDLESQLKRKLDEDEVGQRLLSIPCVGTLTASTISTEIGDGKQYASSRDFAAATGLVPRQYSTGGRTTLLGISKRGNKKIRTLLVQCARVFIQKLEHQSGKLADWIRELLCRKSNFVVTCALANKLARIAWALTARQQTYEA

SEQ ID NO: 177530 - protein, 344 aa, unidentified
MEHYVGIDVSLELSSVCVLDGRGKVVKEAKVASEPEALVCFFKELGVPVNRIGLEAGPLSQWLHAGLKQAGFETVLLETRHVKAALSAMTVKTDRKDACGLAQLLRMGWFQQVHAKSIGSQEIRALLVARKQLLGRLRDVELSIRGILRGFGLKVGQVTRKTFEARIRELVTGHATLERIAEAMLSARASLQAEYEKLHKAVLAFVREDAVCRRLMTVPGVGPVVAVTFKSAVDDPSRIAKSKAVGALFGLTPKKYQSGEKDVTGGITRAGDEMVRTALYEAANVLLSRITRFSKLKRWGMDVAKRRGSKRAKVALARKIGIILHRMWIDGTTYRWAEAKPIAA

SEQ ID NO: 177531 - protein, 363 aa, unidentified
MNYVGVDVHKKYSVLCALDERGRKLREARVEGNRGCGFAQFFRSLEGPSKAVVEACWNWGLIHDELEELDQVEEVVLAHPAKTRLIADAQIKTDRLDAHALGTLLRGNLVARAHVPRRQTRSRKNLLRQRLYWARLRTMLRNRIHALLDRQRGLELPQCSDIFGQRGLFFLRQLQLPEPDGMLLREQLALHDLIAQQMKAQEKRIAAEFKSEVIHRQLLSMPGIGTTLAAVIGCEIDQIERFPTSEKLCAYAGVVPTTHASGGKVAHGRLLPFCNKWLRWALLEASWVAIGCSPYFGALYQQHRARGKKANTAITIVARRMCRIIWQLLSENRDFEKRPFSHRIGPFPGCSAVRLTARSVHGS

SEQ ID NO: 177532 - protein, 392 aa, unidentified
MRVPSPTGSGRRAQEVRTYSTMTRSLITMADWLGDLGVTRVVMEATSDYWKPPFYLLEAAGFAQVWLVNARDVKHLPGRPKTDKLDAVWLCKVAERGMLRASFVPPAAIRQLRDLTRYRVDLVGERNREKNRVEKLLEDAQIKLSVVASDIFGVSGRAMMDALVAGQRDPTVLAQLARSRMRTKLPALQEAFVGRFTEHHAFLLARMLAHVDAINADIATVEDRIQTLIAPFAAAVARLDDIPGVAATAAHAMIAEIGADMTRFPTAGHLASWAKFAPGVKESAGKSKGTGATGHGNPYLARVLGEAAVGAARTDTFLGERYRRIARRRGKKKAVVAVGRSILVIAWHLLADEQARFTDLGPDHYDTRAGTQRAVRNHIRGLHALGPLSFSD

SEQ ID NO: 177533 - protein, 420 aa, unidentified
MNTTWIQQPYFAALDWAKNHHDVIVVDRNGTIVADFQFAHTGPGWAQFAQQMKGFERCPIAVETSSGPAVDQLLQQEYPVYPVNPKAAERYRERKCPSGTKTDRHDCWSLADALRTDGHAWSPLLAQDEATMTLRLLCRDENALIEQRTALVNQLQAALWEYYPLALESFEDWTQPFAWSFIQSFPTPESLSQASQRRWQSFLHSHKLWRPETAPARLAAWEQGQQLKASPAVVRAKSLLALSLVSVLLSLQKQLDQYRQRIRAAFKAHPDHDIFGGLPGAKDKLAPRLLAELGSRRGVFPDAQSLSCRAGVAPVSFESGQIHKAHIRWACDHFLRHTVHLWADKSRAKCAWAQAYYRAKREQGHSHASALRCLGKRWLKVLWRLWHDRLVYDESVHLKSLQTHGSFVSKLLVADPTPSL

SEQ ID NO: 177534 - protein, 343 aa, unidentified
MEHYVGLDVSLKQTSICVVNQVGSVVREGVVDSEPEAIAAFVRSKAPGAVRIGLETGPTATWLWSVLKQLGLPVICIDARHARAVLKMQINKSDRNDAAGIARIMQTGWFKEVRVKDLDSHSVRALLTSRALLVKIKRDLENQIRGLLKNVGLVIGRAKFNVFAVRAEELIEDNPELIAVIGPLLKARQAIEQQTDDLDRKVLKLARFDAQVRRFMTVPGVGPITALCFKATIDDPTRFKRSRSVGAYVGLTTRRHASGEIDWTGHISKCGDAMLRSYLFEAAVVLLTRVPKWSALKAWGMRLAKRNGLRKATVAVARKLAVILHRMWIDGTEFNWSKKEVAA

SEQ ID NO: 177535 - protein, 413 aa, unidentified
MPPSPRGFELETADEGAVRPVLLADDASWTLEWLRHRSAQGVIDHGLHKRHRGSDMNRKAGMSAGQVIGTVDGQQVFGLDIAKSVFQVHTVDMGSGEIVNQQLKRAKVLTYFANRTPCLIGIEACGGAHHWARKLTAQGHNVRLIHAKAVRPFVGGNKTDAADARAIWLAIQQPGTKFVGMKTLEQQATLVLHRQRELLMKMKAMQSNALRGLLYEFGATFARGKNALFAEIETALEALVGDIPQYVADSLREQVKRIKDLAKDIKAIEGRLAQRLRDDEDMQRVAQIPGVGLLTATAAIATMGQASAFKSGREFCAWLGLVPRQSGTGGKVKLLEISKRGDTYLRTLLIHGARSVLTHAREPGPWLEQIKARRPVNVVIVAQAAKMARAIWAVTAKQEDYQRGYCSVKPKAA

SEQ ID NO: 177536 - protein, 371 aa, unidentified
MKHNSIFIGMDVHKNSIDIAIAESGRTGQVRHYGKINGTLAALNKAVGKLVGKGDRPHFVYEAGPCGYQIYRHLTARGFDCAVVAPSMIPKQSGNRIKNDRRDSLMLARLHRAGELTAVYVPLPEDEAIRDLSRAREDAKSDEKRSKQRLLAFLLRSGHRYSGRSPWSQAHMRWLADIKMAHPAQQIVLQEYIDTINQCTLRLQRVTEQIRQLLPQWRLFPVVQALQSLRGVSLIVAVTTVAEIGDFKRFENPEELMGFLGLVPSDKSSGEKIKHGSITKAGNSHVRRMLVEAAWAYRFRARLSRALLKRQEDLPRPICEIAWKAQLRLCARYRHFWAKGKVKPVIVTAIARELCGFIWAIAIKTDIPVAV

SEQ ID NO: 177537 - protein, 274 aa, unidentified
MSKEQKYAGVDISKDYLDIAVAESTDKWRFGNNQTGIKKAIKEFRKKSPVMVVFESTGGLEIDLWLALNEAGIDAAPINPRQIRNFAQALNQQAKTDTIDAQIIAQFGQVIKPKPQVVPDTQGLKELVARRNQIVEMISAENCRIKAARQNAIKTDIRANIDWLEKRRDEISKEILQAIEDDPELKDKAKLLQSTPGVGPIMTSTLLTELPELGTLNRREVAALVGVAPFNHESGHWKGKSFIWAGEAVSGGCFIWLPSQPLDAIRSSVFFTRD

SEQ ID NO: 177538 - protein, 425 aa, unidentified
MIELPIQRLRPDAVVPGRAYSGDAGLDLSACERVELAPGERALVPTGLAVAIPEGYAGFVQPRSGLAAKHGISIVNTPGLVDSGYRGELKVALLNTETGELWDQELSHDGDAIERFYATLPPPVTVGIESTGYSLWFHALLQRLGHTLLVGEAAKIRAMVVRKIKTDRRDARHLRDLLKDDRFPVVWIPDPATRDLRALIKHRLRLVRIRTMVKNGLHAIALNQRLALGPSLWSRAGLAQLHALVLPPHTRRRRDDSLELLQWLNGHINELDLHVATAAAADPDACRLMSHPGVGPLTALTTVLVLGPVGRFPNSKHVVSYIGLAPAVSASADKYRLGHISKQGSALLRWVLGQAAPLATRGDAALKRIYFAVLRRRGRPKAKVALARRLLIRLYVMLRDQIDYDEFCRRGRTQRPGLEPARIPV

SEQ ID NO: 177539 - protein, 415 aa, unidentified
MKIIKNKSKGIDPKALIVTADCSKGKHVGYFRSPDWEDVKPFKFDNTKPGFELFWQKVENFRQSKNLERIIFGYESTGNYSICLAAYMLKRGAIVYQVNPKHSNRLKELQGNSPNKTDQKDPRVIADILMLNHGLTFLMPKGRIADLRHMVHNRERIQEDIIRVKNRIEALLAIMFPEYPIIMRGLRSKTSLYFLRHYPTPADILTLGLEKLTEQMMNVSMKRLGKSRAQALYSAAQHTIGVTEGVSGMRKMMNMLTEQSELLEHQLVSIENQIRPLAEQIPVHRILTSIRGIGLITSVIIITEIVDFGAYQSASEVIKLAGLDLFEISSGKHKGKLRISKRGRSLLRKALYFASLNMVGKNGIFYQQYQRYRVKGNPGPKALTAIGKKLLRVIFAMVKNNTLYQPDYKQLQIAA

SEQ ID NO: 177540 - protein, 389 aa, unidentified
MPAQQVSRPCAEEAVLAVSLELATAKWKVALHDGRRDQPSVHTVTQPQAACRLQAVLSLIEHRQKWALPAELRIVVSYEAGQDAFWIYRALQARGIECYVVDPASIPVERQKRRAKTDRLDAIRLVINLRAWLHGERDRMRAIRVPSLQDEASRHLMRDRGQLQKEVLQHRDRMRKLLVTLGCWGEVDSRKFAAHLARGDVRCHDGTPLPLELQQRLLRECERLALVEQQLAALEKARLASLPESARVRIDRLTRLSGIGAVGGSRLVLELFWRQFSNRRQVGACVGLAPQPYDSGESQVDQGISKQGNRRVRALLIEMAWSWIRYQPESVLTHWFSQHTAGTGPNRRARRIAIVAVARRLAIALWRHLKDGVIPEGAWLKHAQCTAAQ

SEQ ID NO: 177541 - protein, 487 aa, unidentified
MHPRTTNKSTQTSDVRGFSSESAGALALDNEYSGFAALPAHYIAFAERKRARPWKSIYHLGGYDVKPLATRGFNAYVGIDWADTKHDVCVQAASNESREFACIAHRVADIDQWAQSLRQRFGSPIAVALELAKGPIVYALQKYDFFVLFPINPSTLAKYREAFKPSRAKDDPTDAELALDLLMRHPERFTALQAQSEGMRTLLSLTEHRRELIADKTRFTNRLTNTLKQYYPQALDWFDQRDTILFCDFLTRWPTLTEVKRARRTTLEAFFYAHNGRRAHLISARLNAIKAATPLTQDLGVIVPCRLQVLVLVKQLRTTLQAIDCFDREIAELAPRLPDYALFQDLPGAGPHLAPRLLAAFGEDRRRFLHADELQKYAGIAPVTERSGKKCWVHWRWQCPTFVRQTFVEWASQTINKSFWAAAYYRQQRDKGSSYQAAVRALAFKWIRILYRCWQTNTPYDESRYLSALRKRGSSLLQNPQLKARNA

SEQ ID NO: 177542 - protein, 343 aa, unidentified
MQVTTIGLDIAKRVFQIHGVDAAGTVVVRRKLKRSELLQFFARFAPCLIGIEACATAHHWARELTALGHQVRLVPPSYVKAYLKRGKNDAADAEAICEAVTRPNMRFVPVKSEEQQGVLVLHRGRELLVRQRTMLVNGLRAHMAEFGIVVPQGIQRLPELVALLEDEKTGIPQIAREVLAAMVAQINNLTTSIRQMEKRIVAWCRTNDAARRLATIPGVGPITASALAATITDPTLFRSGRHLAAWLGLVPRQHSTGGKARLGRITKMGDQYLRKLLIVGMTAVIRSARRTKAPAFAWVNALLERRPARLVSVALANKAARIAWAILIRGETYREPTITRAAA

SEQ ID NO: 177543 - protein, 330 aa, unidentified
MENIFPCCAGLDVHKESVEACVRRIEPNGRWHQQTRHWGTMTRDLLAMADWMAAQGVTQVAMESTGVFWKPIYNILESRFTMLLVNARHLKQVPGRKSDVRDCQWIAQLLQYGLLKGSFIPPRSQRELRDLTRHRTQLVEEKTRTANRIHKVLQDTNIKLSSVATDVLGVSGRAMLEALITGEEDPVKLAHLAQRKLRSKIPELEKALEGHLTEHHRFMLQLLWKQLAQQEELIAELDRKIEEQTRPFAAEIDRLDAVPGVDRRVAEVVLAEVGADMKPFPAHENLASWAGMCPGNEESAGKRRRRRITPGNPWLKPTLAQAACGEPHQE

SEQ ID NO: 177544 - protein, 440 aa, unidentified
MAMRKRDDEVFPNAAGIDIGASSHWVAVPRHLADDAVREFGAMTDDLNALADWLIACGVDTVALESTGVYWIPVYEVLEQRGLKVWLVDARQMKYVPGRKSDVQDCQWLQKLMSLGLLRAAWRPDGEVCVVRAVARQREVLITEQASWVQRMQKSLVQMNIQLTEVLTDVMGMTGQAIIRAIVAGERDPLVLARHRHSRVKASAQEITKALTGNWREEHLFVLRQALAMYDDIAKHLVECDAKLQALLDQRSQTQVALGKAPKAGSKSRVEFDVRQALANWAGVDLTRINGLGVTVVMKLLTAIGPDVSRFASVKHFCSWLCLCPGTKISGGKVLSSGTKRSANRARQALKMAAMNLSHSDSALGAFYRRLCGRMDKPRANTATAHKLARMVYFMLTRGEAFVDQGQQRYDEQQRQRSIAALKRRAASLGFRINPLEAVA

SEQ ID NO: 177545 - protein, 343 aa, unidentified
MTTNYQNYIGVDLHKKTAYITVMDVLGKIKKQIEISTDTDKVAKFFSRYAGNNLVAVESTMNWLPFYENLESLGCQTVLSNPLATKAIAFSRMKNDKVDSRILADLLRTKLLPLAYIQPRDIRDLKELVRQRMHYVEMQTRIKNKIHSVLFKTNSKHEYTNLYGKAGRKWLKALELRPIFRDELNRYLVTLDYLGKQIKELSDNIENTAKMDYDCKLLMTIPGISFFSALVIKSEIGDINRFSSASKLCSYAGLIPSTYASADKIRHGRITKRGSIWLRKTLINAVTSNCRHANRLASFYRKLKKNKGTGKAKVATARKLCSVIFAMLTDQVPFKEFASVKQR

SEQ ID NO: 177546 - protein, 360 aa, unidentified
MRKRLSKKESWFKENNFKAEDEIYVGVDVHKVHYHVAIWHNGRIGCVYSMSSDNNKLLRDLKRIRGSLKNIVYEAGPTGYALVRLLRSAKLPAEVVAASKTPRMTDSSAKTDRLDCQQLATYAAKGLLTFVSVPTEQQESDRQVVRLRDQLASKRKRIMQQIKSLLLQHGISWPGGGWNEALLKRLRELDIASELMFTLNQHVDEYEFLCSKIKETKAELRKIFSSERHSAAIEIFKSHPGVGNIVAWAFRAEMFDITRFKEPKHISKYTGLCPRISQSGNTCRQGPITKTGRRQLRALLVQAAWAWYRNDPHARQIYNRLLRNTGNGKKAIIGLAKRIAIHLWRMLCDGCLYDANIVKV

SEQ ID NO: 177547 - protein, 391 aa, unidentified
MVCVGIDVAKDKHDCCILDSDGTIRADCITIPNNMDGFKQLLQTIRDCTKKSDKIKVGLEATGHYSYNILGFLLDNDLAVYVMNPLHTNLYRKSLSLRKTKTDRVDARTIATMLLSDVDLKSYTDTAYHNEELKSLTRYRFEKVRERAKLKQSVSRLVTILFPELEKLVSSLHGASVYALLSEYPGAKQISEVHLTKLTNLLATASKGRYGKDKAIQIRDAARTSIGSVMPAKFLELKHTIKLIRELTSEIDEIEVSIQKIMDELNPPILSIPGVGIQSAAMILAEIGDFSNFESPDKILAYAGCSPSTYQSGKLTNCYAHMEKRGSRYLRYALYNATKYVCHWNPVFAEYLAKKRAEGKHYNVALSHATKKLVRLIYALQKSGKAYLVAA

SEQ ID NO: 177548 - protein, 411 aa, unidentified
MNVVYEKCAGLDVHKKTVVGCASILDAKGHRHKERQTFRTMMPDLLRLRQWLKELEVTHVAMESTASYWKPIFNILEGHMEVLVVNAQHIKAVPGRKTDVRDAEWIADLLQHGLLRPSFVPPTWQREVRELTRYRMSLTEERTRLINRLQKTLEDTNIKLASVASDVMGRSARDMLTALLAGEADPAVLAELARGRMRSKRELLSQALQGQLKPHHCILIGEQLADIDALEAIERMSKAIAERLRPYEHQIQRLSTIPGIKRRLAEVILAEIGVDMSRFPDARHLASWAGMCPGNKESGGKRLSGKTRKGSPWLRSALVEAAHAALHCKNSYLSAQYQRLVLRRGGKKATIAVGHTLLVVIYHILSDDKDYEELGGNYFDEWDRQAVQKRLVRRLEKLGYEVKLEPASPAA

SEQ ID NO: 177549 - protein, 345 aa, unidentified
MHNIITGVDLAKEEIQVCVCKRNKVQSNQAMTPIEFGSWLASSKPMTIVFEACSTSNYWKQKALEFGHDARLISAKLVASVRQNQKTDKNDALAVAQAAQLTDVSFINGKSKEQQELQTLVRLRELAVKHKVAVQQQIKSLLLEFNIRVSPSQGGLSGVVEAVLEDAENGFSVVFRQALNTSWQHLQQGIESIKQYDLYLEKAANEHETCKSLQALEGVGPLNAVNLYMALGCGEMGQFETGRDASACIGLTPIQHSSGGKVKLGSVGKYVKNNMLRSCLVSGAMSAVNQAMRRPAKTKKEMWIQQMVERRGKRCTAVALANKTVRTAFAMLANGTEYKAELLAA

SEQ ID NO: 177550 - protein, 389 aa, unidentified
MTPLRVMIAVDPHKGSWTAAAVDASLQPLATVRVPVSRDGYRALRRFARRWPHAQWAIEGAGGLGAPLTTRLRTDSIEVINVPAKLAARVRLLSTGHGRKSDDADAVSVGIAALTSRALNTAEINAATTALRAVVEHRDDLVKTRTQTVNRLHVVLTNLVSGGAARELTADHAAELLRGVRARNTADKTLRALVVDLIGEVRQLDRRIAKAAADIETAVIASGTTLTQLHGVGALTAGKILGHVGAITRFRSAAAFASYTGTAPIEASSGDVIRHRLSRAGDRQLNYCLHVMAITQIRQNTKGRAYYLRKRSQGKSHKEAMRCLKRRLSDVIYRQLVRDASTSQGAGPAGQAGATLMSSAAGSDPFTGTSDRSLTGPANRHHTTEEPNA

SEQ ID NO: 177551 - protein, 335 aa, unidentified
MIGLDIAKNVFEVHGRNAASQVVLRRTVRRGNVAEFFGKLPPAVIGMEACGSAHHWARVLGKLGHDVRLMPPAYVKPLVKRNKSDAIDAAACCKGVIDPDMRFVPVKTVDQQAALSLHRSRELLVRQRTQLGNALRALLSEFGIVAGQGKAGLAQLIEPLRAGTLELPEDALFSATMLADQHAATDAVAAELQKRIKAQAKADKTARMLQTAPTVGPMIAHAVRATLPDPARFKSGRDFAAFLGLAPSNSGTGGKMRTGHITKKGDPTLRRLLVLGATSWVRRVSNCLDKASPWLRGMLARKPKKVVAVALAARTARVLWAMLTHNQPYRAPAIG

SEQ ID NO: 177552 - protein, 344 aa, unidentified
MNIATIGIDLAKNVFQLHGVNSQGKVALRRQIHRGQMRGLFVNLPPCLIGMEACASAHYWARTLQSYGHTVRLIAPHFVKPYVKTHKTDATDAEAICEAVSRPNMRFVPIKSIEQQSALSLHRVRQGFVRARTAQACQIRSLLAEFGLVMPRGIANLKQVPRLLQVAGKELPAPFCRLVERLLAHLKELDRQVRELEEQIVDWHERSEPSRRLAKMPGIGPITASALVASISDVRSFKNGRELAAWMGLVPRQHSSGGKPTLLGISKRGDRYLRTLLVHGARSVIVRACQRSDDKGSWLKKLLQRRHVNIATVALAHKTVRTVWAMLAHDREYCPNYRSLPVAA

SEQ ID NO: 177553 - protein, 438 aa, unidentified
MSNNLIFNLDELFLSVGIDVGADLSWMSIALPNQQIVGKPYKILHNKMDSLSTAVTKIKEAEELYSLESRIFLESTGIYHYPLFCYLRDKGLNCSVMNPIITKNSTNMNIRKVHNDRFDSKKAALVGLKPDLKVSLMPSDLALNCRNLCREYYDLMDGRSTYINKLQGELRMAFPQYLGIFSKVTTNTSLTLLENYTSPEAFLNADQQEIVDSIRSTARFGLTYAQNKYNVIIQAAHDAKEFGYIINSNIKRIRLYVSLIRKYDEEIASMLQDLHDLVDQNEDTDFVKQVHLIETIKGAGFLSAVSLMGEIGDFSAFSKPKQLFAYFGLDPAVKQSGKFVGTKVQMSKRGSSIARRVIHVLALQSISIARNGVAKNPVLHAYYLKKCKSKPKLVAMGAVAHKVCNIIFAVLRDGKPFEIIKPEEHIRQYNAAKCDMAA

SEQ ID NO: 177554 - protein, 324 aa, unidentified
MKMAKPSIMTAGIDTSKAKLDIAVHGGSAVFCVANDEAGWKEASVKLKRAGVGRIGIEATGGYERGVTRHLQSAGFTVVVMQPMQVKAFAKLHLKRAKTDRIDALLIAACAHVLDAGNKLPPDPRFDALADHLTFIEQVEEDILRMRTRLEHIYDKRLRRIAEAEIKRLTKRCDDERERLLAAVRQHADLAARFDLVESVPSIGARTALCIVIRMPELGQVSREEIAALAGLAPFVQQSGKHTGEAHIGGGRSRVRRALYIAALPGAFRWSPELTALYKRLIARGKSHKCALTACARKLLIYANTVVERGTPWQTNMLQKSIST

SEQ ID NO: 177555 - protein, 357 aa, unidentified
MAMLPEVVDAVIGCDTHRDTNHVEIAYPSGAVIATRSFSNDSAGHAEALAWMVAHAPGSRLVLSIEGTRSYGAGLARAAAAVGILVIEAEQPTRKHRRGKGKSDPIDAHLAVLYALGLDAAKLPTPRADGDREALRILLCAREELTTTSTGQINRLRALLRDGDDTDRRLARARLSDATLASLARRRLPREASRQQAVRHAEIRRLAMALRQARRALKANRTKLAAIVHDLAPGLTDRPGIGPVTAAQVIVSFSHAGRCRNDAAFAKLAGTSPLEASSGQTTRHRLNRGGDRALNKAIHVIANTRMRIDPATQAYVLRRRAQGKSDREIRRCIKRYVTRQLFRALTTAMTPDIAASA

SEQ ID NO: 177556 - protein, 374 aa, unidentified
MDSSSPYHFGVDAPEWEVGTNHSEDEEKPNMNITRVGVDIAKSVFHVHAVDRHEKTRWQAKLGRNQWLEVLCERVSPGAEVGIEACASAHYWGRELQKRGYRVKLIAAQFVKPYVKSNKNDRVDAEAICEAMSRPGMRFVAVKSVEQQDTQAVHRIREELVGQRTAKANQIRGLVGEYGIVAPTGIQKLRAALPRWLEDAENGLTDGFRALLAGLAADLRHLDDRISGLDERIAQCVKADPVARRLLELRGVGPLTASALAGALGDGKGFRKGRDFAASLGLTPRQHSTGGKVKLLGISKRGDSYLRKLLVHGARAVLRYSKARDDGLSQWLNELTARKHVNVATVALANKTARIAWAIVHNDTAYDPALVAAQ

SEQ ID NO: 177557 - protein, 370 aa, unidentified
MDVVHPRCAGIDISKKDAKVCVRIQGRGNRRTSSTVTTWGAMTNQILALREHLLERKVTCVVMEATSNYWRPFYYLLEELLEVMLVNARDVRTVPGRKSDVSDAAWLADLGAHGLVRASFVPPEPIRVLRDLTRARTMITHERTREIQRLEKLLEDTGIKLSSVATDVTGVSGRLMLEALIDGRNDPVQLSQLAKGRLRSKIPVLTEALTGHFSAHHAFMTRLFPGRIDAHTADIDKLSARIDEAMAPFRPARDLLISIPGFSTTVAEIFIAETGGDMRVFPTAGHLASWAGAAPGSNESAGRVKSTKTRPGNRYLKGALARRRPRRLPLQGNLFLGEVSAHRRASGADEGSRGGGARDARRRLEHAHPR

SEQ ID NO: 177558 - protein, 317 aa, unidentified
MSKETLDANCARGQRKQAKIFANGPDGWKLMLSWLKAMGSKQAHVCMEATGRHSLGVALALALHDAGHVVSVVNPAQIRDFARTKLGRNKTDKVDSALIRDYAALFNPVPWTPPSPAMRRLCELQTVRAGLISNRAEWKNRLGSGLDDRTATSLAAATIEHFTSQLEAVDRAIGETIDQDVTLRGRRDLLRSVIGVGETLAASLLAEMPEPGVLRRSGEMVAYAGLNPSHHRSGTSIDRPTRISKIGNATLRSSLYMPALSAMRFNPAVAALVARLKEAGRLKPKQIVVAAMRKLLVLCFGVLKTGKPFDPAVAMPA

SEQ ID NO: 177559 - protein, 359 aa, unidentified
MTQNTIDSTQIIIGVDPHKDTHAAVALNALGARLGDRIEPANPAGYQQLLNWAKTFGQQVAFGVEGTGSYGKGLTQFLRRQGLKVVEVSRPCRRGQQRLQGKDDLLDAEDAARQVLAGLATATPKSSEGAVEMIRILKAARDTAVKAQTQVMVALKAMIVTADAALRAQLEPLSTPQLIKACQQLEVETLDMPLATMRYALAAMAKRWPQLHEEIETHIQHLTALTQAAAPELVQAFGIGPDTAAEMLITFGDNAERVHSEAAFAKMCGVCPIPASSGKTQRHRLNRGGNRQANAALFRVVIVRMRWHQPTQDYVAHRTAQGLSKREIIRCLKRYVAREIYHIIRKTRSTSEVPDSRQA

SEQ ID NO: 177560 - protein, 273 aa, unidentified
METYVGLDVSQKSTVVCVIDKDGNPVWRGTVASHPQAIDSVIRQQAPEVRRVGMETGPLAVWFYHGLRERGVPVDCIHARHVHAALATQLNKTDSNDARGIAQLTRSGWYRAVEVKSIASHEVRLLLGARGQLISMRTGLYNQIRGVLKTFGVVLPPGTRSAFEKLVEQHTPTTSLIHGVIGILLDSWRHIDRQVRETDKALERIARASDVCRRLMTVPGVGVTTAVAFAAAVDNPDRFRRVGDIGPYLGLTPRKYQWAKWTITVGYPRPAAG

SEQ ID NO: 177561 - protein, 348 aa, unidentified
MRFYTTTHQYYCGIDLHTRVMYLCIISSGGEIVLHRNMKADPESLLKAIEPYRPDIVVGVECIFTWYWIADLCAEEGIPFTLEHALYMKAIHGGKAKNDKIDSGKIAAMLRGGMFPMAYVYPAKMRALRDLLRRRNYMVRRRSDLLSHIQNTNSQYNQPGFGRCNISHKCRREEVLSHFEDPAVLAGINADYALIDQFSIQIRALEQTVLDGAKQHDPQALLLLRTIYGIGKILSLTILYEIGDISRFPRVQDFASYCRLVKCSRESAGKRYGTSGSKIGNVHLKWAFSEASVLFLRCNPEGLKYKKRLERKHGKAKSLSILAHRLGRATYYMLKRGKAFDMKKFLSA

SEQ ID NO: 177562 - protein, 339 aa, unidentified
MELYSGLDLHSTNTYIGILDTDFKRVFKKRVSNKLDLILETLQPFKDQLKGLVVESTYNWYWLVDGLMDAGYGCVHLANPSAIKQYEGLKHSDDQHDAFFLAQLLILGILPQGYIYPKEDRPVRDLARKRMFLVKHKTAHILSLQSLIARCSGQRISSNQLRTFTSSDLEHLLREDHLVLSAQANLDSISFFKQQIHRLEKVIKNKLKLSQAFNGLLTVPGIGHILAMTIMLEVGDIRRFAKVGNFTSYCRCAPTQRLSDGKSKGSGNRKNGNRYLSWAFSEAAQMSRRYNQRFRRYHDRKAAQTNTIVAARALSNKLARVCYYIMRDQVAFNEELILH

SEQ ID NO: 177563 - protein, 395 aa, unidentified
MSAEGEAIRSNDYRKDTTVKAPSTRPAAVLGLDVGKSSHWACLIDRDGEVLSSAPVRNREAELDALFASVPAGTLVVVDQFRNIGSLAVRRARAAGLGVAHLPGLAASRAAGLFAGEAKTDERDAAVIARTALGVPDSLSGVPGRGEALEAARALSSQRDHVVACATRDKNRLRAVLLESCPALEAAVDLSDRRWLELLAGFGGAWGIARSGAEGPQAEAAGEAAAASTAPPPALIEAENRQVRFLAARISEALDEAGALEAETAALLEGDETYACLLTVPGIGPRTAAQLAVSVDIGRFPDHDHLASYCGIAPRVRSSGTSVRSVRASRRGDARLKSLLIFSCNSLVRSSGRYGEYYRACRARGMGHGRALKAVARKRLRAIYAVMRDRVPYRE

SEQ ID NO: 177564 - protein, 388 aa, unidentified
MPQTPNDLSRSLTALEQTTTLVAVVEMSQASWLVAGMIPGLERQPLKKIAPNEAALLSLLQRWQEEAIKICQTIRRITVAYEAGRDGFWLARWLCSRGIEAHVIHPTSVAVSREHKRAKTDRLDTAMLIRVFLGWLRGERGHCGMVAVPTLEEEDAKRPSRERENLVGERTRIINWMKSALVRLGIRGFKPELRRAPQHLEKLRTPEDVPIPLRTLEELRRDMARLAMVRAQIEAIEQIRLQRLEQAPQDGAHAMVRMLANIIGVGVETADMLVREILAKELRDRRALARYAGLTGSPNESGSKRREKGLAKSGNARVRRGLIQLAWRFLRFQKDSALAQWYRTRTEGAKGARKTSLIVALARKLLIALWRLVTIGEVPQGIVLRQAT

SEQ ID NO: 177565 - protein, 334 aa, unidentified
MTTNISMLAIDLAKGSFQVCAIGPEGAVLYNRSMSRTRLASLLAEQPACIVAMEACATSHHWGRVAQLHGHEARLVPAAYVKPFVKRQKNDRADAEAIAEAALRSTMRFVAVKSAETQARAVAFRTHQCLVRQRTQLINGLRGHLAEFGLVAPKGPASLNALDDEATDLPSPVREMGAIYLDQIARLTAVIEQLADELQAASKADAQLRRLCTIPGIGPVTAGAVSAFAPDLDTFDSGRNFAAWLGLVPRQRSTGGKTRLGSVSKMGQTDIRRLLIVGAMSVIRWVVRKGGSANRWLAALVARKPRMVAAVALANKMARIIWAMTTKKEDYRMP

SEQ ID NO: 177566 - protein, 318 aa, unidentified
MPPAAPAFVGIDVAKAELVVAIRPSGDRWTVANDEAGIQTLLKRLRRHAPALIVLEATGGYERAAVAALGAARLPVVVANPRQVRDFARATGQLAKTDRIDADTLALFPERVRPDPRALPDEAANALDALLTRRRQVLEMLIAERNRLEHALPAVRRGITQHIRWLERQLHDVDRDLDNSIQGSPVWRAKENLLRSAPGVGPILSRTLIGELPELGTLPRKQIAALVGVAPLARDSGTLKGKRLVWGGRAPVRAALYMAALVGTRCNPVIRAFYCRLLAAGKPKKVALTACMRKLLTILNAMMRTNTTWRPIAQPETT

SEQ ID NO: 177567 - protein, 368 aa, unidentified
MGTLYIGLDVHKLRIAVSIAEEGRDGAVRFLGEIPNTPTDVGKLARRLAKDGSRLEFCYEAGGCGYVIYRQLTDLGHGCMVVAPSLIPKKPGDRVKTDRRDSQKLAILHRSGDLTRVWVPDPVHEAMRDLVRARLAAVGALMRARQQLLSFLLRHGRIYPKGKPWTQRHRVWLAEQVFEQPVHQIVFQDYIEAIFTAQDRRDHLVARIEALLPTWSMGPVVQALRGLRGLEMISAVTFVAGIGDLGRFESPSQLMAYLGLVPSERSSGDHVHRGGITKTGNSEARRMLVEAAWSYRYPPRVAGEKVEVLVRLPKPVRDIAWKCQVRLCERFRKLTRSGKRPTVVVTAIARELAGFVWAIGQQVKPAAP

SEQ ID NO: 177568 - protein, 461 aa, unidentified
MRNNRKSGDHPGSTRPIAGLPIVRAKVAGIDIGSERHWVCAPGLEGSGREVADFGATTPELVRMAEWLKERKVESVAMESTGVYWIAPHEVLDKDFEVLLVDTRQLARVPGRNKKTDPSDCEWIQRLHSCGLLNGSFRPQEQVCMLRTLVRDKAILVAESADWVRRMQKSLDQMNVRVHRAVSDLNGVTGMAIVRAIAAGERDAQKLAQFRDRRCRQSKEEIAEQLSGHWREDHLFSLRQSLQMYDAIAERITAYEQEILQKLATMEIEESPGGVVPPVKNLEKAKAIKKRGQEPMRQALYRMSGVDVTQIDAIGVETVEVVLSEYGPDLSRFPTEKQFVSHATLAPRVPKSGGKPLKRKKRNSASTRVAAALRMAALSLRHSETALGAYYRRLARRIGGDVAVFATARKLATLIYRLLRWGQPYVDEGAEAFEKRYQQQHIKALAARAKELGYQLMPTTT

SEQ ID NO: 177569 - protein, 345 aa, unidentified
MCQGGHPGVRRSDVPCGVGIDVAKAQGAIALRPAGERWAVPNDTGGVVMLVERLPALHPPLMVLAATGGLERAATAALATADLPVVVGNPGQARACARATGPLAQTEAVDARALAHCAAVLRPTPRPLPDAQTQERRALLGRRQPLIGMRTAEQHRLAGTNARLTKDSAAHMTWRNAAIATLDDDLETILRASPLWRDNDDLLQRAQGIGPVCARTLRRERPALGMCTRQQLAAVVGVAPRHGDSGTLRGRRMIWGGRAPVRPVFSMGTLVATRFTPQINVFDERLLAAGKVKKVALTACRHTLLTMLNAMLKPRTPWQPQEVQREKNIPGPLDNQDSCFARPSH

SEQ ID NO: 177570 - protein, 457 aa, unidentified
MPQAKRPRGRQELSPVHPNAAAIDIGATMHVAAVGPDCDEQPVRTFQTFTADLHRLADWFAQCGVKTVVMESTGVYWIPIYEILEQRGFKAVLVNARDAKHVPGRKTDVSDAEWLQRLHEYGLLRPSFRPQAEMAGLRAYLRQRERLLDYAAAHIQHMQKALTQMNLQLHHVVSDITGVTGMRIIRAIVEGERDPAILASYRDVRCHASVETVRQALVGNDREEHIFALTQALELYDVYQAKVAACDKQIEAVLERLKQSAVPPTEKLPAARNKAHSSNAPAFEVREALHAILGVDLTQIHGLGPYLALKLVGECGTNLSAWPTAKHFTSWLGLAPHNKISGGKVLSSKTRRTSNRAATLLRLAAITVGRTDTALGAFFRRLSGRVGKAKAVTATARKIAVLFYNTLRHGMSYADPGASYYEDRYRQRVLSNLQRRAKSMGFVLQQVEPAGAQAGVS

SEQ ID NO: 177571 - protein, 358 aa, unidentified
MEKVIRQCVGIDVSKDTLDAALGYLHEDFKVEVYATSQFENNVKGFKQLMGWMKKLKHRDFPCQVVVEATGVYHERLVYTLAKGCFEIAVVLPNKIRNYCRSTNIRTVTDKISARQIAEFGLVKRLENWVPPDNEILYLKGLCRERIQLLQEKTIATNRKHSHDYSILATKGTTQRSKKRISFIEKQISEIEQEVKETINNNPWLKKKIENICTLKGVGMITAVTIIAETNGFNLIRNARQLVCYAGYDVVVKESGTSVRSKSKISHKGNKYIRRALHFPAISAVGCDHSFSAFYTRLFERQKIKMKTYVAVQRKLLILIYTLWKTDQAYDPLYQHNSQIFLEQPNEAALTELVLDRS

SEQ ID NO: 177572 - protein, 405 aa, unidentified
MPMNMQYERAFGLDLSKKTFHGCILDGPDLGSRHFFTGEMGQQGKAKLAGRLCKGDLVLMEAGTASFSLARFLLENTESEVVVLNPTKLYNIFNSTLKTDKSDSEKIAKIARTMPRDEWPTVSIPTREEQAERSAVSLEVFLAKEITMLVNRLYALFNAMGHPFVKKSDLKTEESRLILANRLLCEDGLAIEQAIMLSDQIGHVTNQLEQCKQRLRDICLSHPKEALSLLSIPGVGLMTAASQIAFLGDGSRFNSPDSYVNYVGLSERRFDSGNKISKGHISHMGNKCIRRNIIQAAWVAVTKLKGNPLSRKYEALRLRGKSKPVAAVAVAKKMTQLSYILVKGNGIYEFTKQQGLAAFQRKLRYHKLAALLNYLPEPIRIEMEEIDRNKRKEAAATTSRPKKLV

SEQ ID NO: 177573 - protein, 350 aa, unidentified
MLAELVDHVVGVDPDRDWITLAVIDARSAGVVAEARFPATKDGYDDVVAFVDAHSVETERAWVIEGSAGYGRGLAVALERHGEWVIEFDRPTRKSKDGAKSDALDAIRAAREMLGRKRLSVPRAHDGVREAIRVHSVTRAAAVRARTGAINELKALIVTADESLRAQLRGLRTTGQVTACARFRDRPCRSVHERATRSAMRSLARRIQLLDTEIDEHDGALKQLLDQAAPQLVAERGIGYITAAQFYIAWSHPGRCHSEAAFARLGGTSPVPATSGQNQTRHRLNRGGDRQLNRALYLVAVTKQRCDPATKAYIAGRVAQGKTEREAIRCVKRFLARRVWRLLEHPPTSP

SEQ ID NO: 177574 - protein, 397 aa, unidentified
MYIVGIDIAKRKHEAAVIDGEGTVIIKPFSFTNNCSGYNRLLAMLTKAKLPLDEVSFAMEATGHYWLALFTRLQKEGFRVQVINPVQTNSIRSFYIRQAKTDPRDALLIAEVIRFGHFSESTLHPENIYELRELCRGRHAIVSMQADVKRKVVALLDQVFPEYETAFTNLFGDTSMAILQTCPTPKELSEMRLEELCHLIEVSSHKRFRMAKAQELQELARNSFGFAMAGDVFSTMIRLYAKHLVFLKQQVQEMDRKIAEIMDTLDTPITTITGIGPTLGAYILSEIGDISRFSSAAKLAAYAGIDPTMRQSGEYNGVRNRMSKRGSPYLRHAIWLAASSAVLHDPALKLYFQKKRDEGKPYMASVGHACRKMVSIIYAVMRDNKAYTPYIPNEISA

SEQ ID NO: 177575 - protein, 421 aa, unidentified
MQVLYERCAGIDVHKDQVTVAVRTPGSGPGRRDTQVRKFGAFYGVLREMARWLASQGVTHVAMEATGVYTMPVYHALLEPGSFEQVLVCNAAHVKNVPGRKTDAVDASWLGELLECGLLRGSFIPPEDIKAVRDVVRYRRKIVQERSSETQRLGGVLQDAGIKLDSVASSIDTVSGLAMIRALIDGERRGDVLAELARGRMRSKIGDLSHALEGRFDDHHALMCQLHLDHIAHLNEMIAKLDAQVEAMMVPFARQRDLLTTIPGIGQVAAAAIISEIGAGPGEFFATAAHLASWAGLCPGNHESAGKRKHGKPRKGSQHLQPLLVECAWSAVRTSGRLKARYHRLVLRFGGYRNPAAKKRAIVAIAHTLAVITWHVLTTGTTYTDLGPDFYATRSDPAKETQRLIAKLEALGHTVTLAPAA

SEQ ID NO: 177576 - protein, 413 aa, unidentified
MLDILYAICCGLDVHKKQVTACLRRREADGRVTQVLKTFGTTTAELLALLDWLLDAGCTHVAMESTGSYWKPVFNLLEGSFDQVLVVNAHHVKALPGRKKDTLDAEWLAQLLQHGLLRGSFIPPAPIRELRAATRYRKQLIRTRADEANRIQQLLEEANVKLAAVATDILGVSGRAMLAALVRGESDATALASLAKGRLRRKQAQLVPALTGRITAPQRQLLGHQLAHVEFLDRAIAQLDAHIARLMVPYQAEADRLRTVTGIEQRVAEAVIAELGVDMAVFPSDRHCASWAALCPGHHESAGKRRSGKTRKGNKWLRAALLEAAWAASRTQTYLGAQYHRLARRRGKKKAAVAVAHSILVIAYHILKEGTTYRELGANFFDKRDAQATQRRLLARLEALGLRVTVEPLPQAA

SEQ ID NO: 177577 - protein, 418 aa, unidentified
MVENVHWYVGIDWATQSHCVCLLDAEGRSVGEREFAHGGTGLTELRDWLLTKTKAAPGQIAVAIEMPHGPVVEMLLEHGFAVFALNPKQLDRFRDRFTVAGAKDDSRDAYVLGGSLRTDRKAFRRLATDNPVVIELREWSRIADELQQERTRLANRLRQQLWRYYPQATELTDDVADDWFLALWQKVPTPAAATKVSEKTIARILKDYRIRRLDAATALQTLRKTALFVAPGTTEAACAHIRSLAARMRLANQQIKEAHGALDSLCVRLEAQDEERPSGQSREQCDVTILRSWPGIGRIVLATLLTEAAQPLQARDYHALRALAGVAPVTRSSGKQRFVIRRLACNKRLQTAVHHWSRVAIQHDAAARRRYDALRQRGHGHARALRSVGDRLLCALCTTLKRQTLYNSDRSTQIAAKR

SEQ ID NO: 177578 - protein, 384 aa, unidentified
MTKHNILFIGLDTHKTFTEVAYIEDQRGAKPTHLGKILSNKAAFKKLARQLQSKYPDATLHFVYEAGPCGYWIYRLLTSLHHCCYVIAPSLIPKKPGERIKTDKRDALKLAKLLKSEDLTPIYVPEPEDEAVRDLSRARETAMKDLKDAKYQLKALLLRNNINSKVKDNWSLQHLRWLAELVLPHPCQQIVLQEAVSTITERLKRLKRLDNELTHQVKNWRYYPVVKAVQALRGVRLLVATGVIAELGDLTRFDHPRKLMSYLGLVPSEHSSGGKRRLGAITKCGNSRARRLLVEGAHSYKHNANISKEMQLRQEGLSKEIIDIAWQAQLRLCRRYSRLMHKGKHRNVVVTAIAREMIAYIWVISREVVLPVVDVKLRLARMPA

SEQ ID NO: 177579 - protein, 334 aa, unidentified
MQNITLIGIDLGKHSFHIHCQDKSGKVLLRKKFTRTKLIEFLAGCASSTVVMEACAGAHFMARRIADLGHEAKLISPQFVRPFVKSNKNDFVDAEAICEAASRPSMRFVQPRTEAQQAMRALHRVRESLVSDKVKTTNQMHAFLLEFGISMPTGVAVVKRLSTVLAENELPPYLAQLQMRLHAHYIYLVGQITELEIALEQELSRDEVGQRLQTIPGIGPITASVLSSQLGDGKQYSCSRDFAASTGLVPRQYSTGGKNTLLGISKRGDKNLRRLLVQCARSFIQRIENQSGRLADWVRALLARKHSSVVCCALANKLARIAWAITTQQTVFER

SEQ ID NO: 177580 - protein, 315 aa, unidentified
MQAITTIGLDIAKSVFQVHGVDAEGNVILRRQLKRRYVLAFFQKLPPCLVGIEACASSHHWSRELRALGHTVRLMPPAYVKPYVKRHKNDAVDAEAICEAVTRANMRFVATKTPEQQSCLTLHRTRHLFIRQQTSVINAIRAHLAEFGIVAPVGRNGVEQLLGVAADSNDKRLPEVARACVAALGAQLQTLKTQILEFDRMIRAWHRSSDASRRLDDIPGVGPTLATALVASVADPKIFRSGRDFSAWIGLVPKQNSSGGKDRLGNISKRGDRYLRSLFTTGALAVIRYAKIHGTRHRRACQQDRKDGVGDHGQG

SEQ ID NO: 177581 - protein, 344 aa, unidentified
MDHFAGLDVSVKETSVCIVDDTGKIVREVKVASEPEALLALLKNPAYHFKRIGLEAGPLSQWLFSALAEAELPVVCVETRHMQAVLKAQINKTDRNDARGIAQMMRVGLYRPVHVKTLRSQKLRMLLTHRKLLQSKAIAIENDLRGTLRNFGLKVGMVGKVKFETRIKELLENLPDLAELVEPLLIVRRTLSEQIVILHRRLLAIVRDDEVCRRLMTIPGVGPVVALTYRATVDVPARFRKSKSVGAVFGLTCSKYQSGEIDRSGRISRCGDEMMRVMLYEAAQSMLRSKKWCWLKAWAMQIARRRGMKKAIVALARRLAVIMHRIWVDGTEFRWTREQAAAAA

SEQ ID NO: 177582 - protein, 367 aa, unidentified
MKKISTVGARQSKNFREQKLTIGLDLGDRSSWYCVLDEAGEVLLEQKLGTTPKAMREVFGKMPRSRIALETGMHSPWVSRVLSELGHEVIVAHARNVRLIGESRRKDDRFDARTLARLARIDPQLLSPVQHRSAQAQAHLMVIRARAGLVRVRTSLINTARGLTKSYGERLRGCNPRNLNAETARQLSPELQAALEPLLGAIESLSQRIYEYNQQIAKIAKESYPQAARLEQVKGVGTLIALTYILTLEDPQRFRKSRDVGCYVGLQPGRRNSGQSEPQLHISKEGDPYLRTLLVQGAHHILGPFGADSDLRRWGLKLAERGGKNGKKRAVIATARKLAVLLHRLWVSGEAYEPLRNSRAMRLPAAA

SEQ ID NO: 177583 - protein, 347 aa, unidentified
MVTLGGDCHKRTHTLVAVDDNGRELARKTVSAVSAGHQDARRWATQWAERRWALENCRHVSRGLERDLLMAGEMVVQVSPKLMAGARRTGRERGKSDPIDALAVARAALRDGDLPIAHLKVSGRDVKMLLDHREDLVGERTRVQNRLRWHLHELDPSFEVPDRSLARKAVLNQVEKALQTYPGVAADIAIELLERVRQLTVRIKELERQLANLVTELAPNLLELDGCAALGAAKLIGETAGIARFKTPARFAMHNGSAPIPVWSGSHERHRLNRGGNRQINAALHRIAVTQIRLAGRGYDYVQRRRAAGDTKKEAIRALRRRISDEVFRRMWQDHLMTVRTASNVAA

SEQ ID NO: 177584 - protein, 386 aa, unidentified
MACAITPEGKEIHTFKTMTSDLLELADWIDAKKITHVAMESTGVYWHPIYNILEGLGLTLLVMNAQHIKAVPGRKTDVKDAEWIADLLRHGLVVGSFIPNRAQRDLRELVRYRRGIIRQRANVVNRIQKVLEGANIKLSSVASSVVGTSGRAMLEAITNGIEDPQVLAGYAVGKLKKKHVELVEALTGVVGPHQRAMLKSQLRVITFLDEEISRMDAEIAERMHPFEEAVKRIDGIPGMGRRTAEEVLAEIGGDVSRFPTAAQLASWAKLCPGNNESAGKRKATSTGHGNPWLRDSLVEAAWGAAHTRDTYLSAQYHRLASRRGSKRAVMAVAHSILVIVYWLLRKGVEYRELGGNYFDERNRAATVRKAVRRIESLGYQVELQPA

SEQ ID NO: 177585 - protein, 332 aa, unidentified
MSVVSTVGIDLAKNVFSVHGVDARGTVVVHRAVSRAKLTELIAQLPPCLIGMEACSGAHEWARRFSAFGHIVKLMAPKFVIPYRKSGKNDGNDAEAICEAVGRPNMRFVPIKSIEQQSDLSLHRVRQGFIDERTATLNRLRGLLAEFGHVVPLRAIEVRRRVPELLDQLPTRIAGCLRDLLEHAARLEAKALEYEREIKAHVRSNALARRAQTRSGIGPITASALAATIGNGHDFKNGRQFCAWLGLVPRQYSTGGKTRLGHITKRGDSYLRMLLVMGARSVLQNANRLNDPLSRWALAVQQRRGYHRACIAIAAKNARVAWALLAKEPVAA

SEQ ID NO: 177586 - protein, 360 aa, unidentified
MAKAKSLVGLDVHATKIVAAVLDAETGQLQTFSMSGDADGAAGFCAGLARPVRVAYEAGPTGYDLARELAKRGVECVVAAPSKIPRASGDRVKTDRRDAEHLVRLLLAGKLHAVRVPGDEEEALRDLVRARDAVRMDLMRSRHRLSKLLLRHGIRFDDGQAWTDRHRQWLATITLDWPAAQATLLDARGAIDALCHRRDGLEREIVALLPACPWAVQVGRLRCLRGVDTLTALGLCAEIGDFERFARAEQLMSYVGLVPSESTTGQQRRLGSITKTGSGHARRLLVEASWHYRPRPSIGKALTDRQADQPPETIAIAWSAQRRLHRTWTRLEARAKRRTIIAVAAARELAGFAWAITQIE

SEQ ID NO: 177587 - protein, 418 aa, unidentified
MTKKLDTTFIQIIHPVCCGLDVHKKKISACLITVAENGEEHYEIKEFGTFTNDLLTMKKWLTENCCPILAMESTGVYWRPVHNILEGHMEIILVNARHIKNVPGRKTDIGDSKWLAGLLRHGLLRGSFIPSKDIRQWRELTRLRRTYTESLADYKRRIHKLFETANIKIDSVVSDLFGMTGRNLISLLCKGSELSLATIKENAKGGLKEKSKELHQSIQGFFEDHHRFQLVGMMEMITIFEKRITEITERMDTLTAGHQDLLNRLDEIPGIDKKSAQSIVSEIGVTLDEFICMGALASWAGLCPGNNESAGKRKSGRTSVRSHPFKTILIEVAWAAVKKKGSYYRAKYFKLKSRRGAKKAIVAIAHRISKAIYNIIKHGETFMDLGEDYLSKQTRQRVINNIKKRAEQLGFELVPCMD

SEQ ID NO: 177588 - protein, 413 aa, unidentified
MAQETFAWFVGVDWGSERHQACILDVQGTIAGERAFPHSGAGLTELGDWLLSIAGAVSVVAVAIEVPHGPVVDSLIDRGFVVHAINPKQLDRLRDRFSVAGAKDDRRDAYVLADGVRTDRPLFRRLHVADPRLIELRAWSRLAEELQEERRRLSNRVHQQLWRYYPQMQKLTDDLAAPWFLELWTIAPTPAKARQIRKSTVEQLLKRHRIRRVDAETVLLTLREPAINVAEGVAEAASIHMRSLVARLRVVNPELREAEGKLDKLCMAIGETEAASGECLQRQDIMILKSMPGIGRINLAALLCEGSGPLSSRDYQALRTLCGAAPVTKRSGKSHIVIMRYAAHVRLRNTVYHWARVATQHDPKSRSRYAALRQRGHSHGRALRGVADRLLGLACVLLQRQTLFDPHFAQPTT

SEQ ID NO: 177589 - protein, 343 aa, unidentified
MQVVRIGLDLAKYVFEVHGVDKHGKVIVRKRLRRDAVARFFANLPACLVGMEASNGAHYWARMFTELGHQVRLISPQFVTPYVKSNKNDRNDAEAICEAVGRPSMRFVPQKSTDQLAVQAVHRIRRRLVADRVRLVNQIRGLLSEHGIVIARDIAQLRRGLAVIVGNINDGLSEMVRALMRELQAELAEVDARITAYDRRIKEIFRASEQCQRLGKIEGIGPVTATALIAAVGDRSCFKNGRQFAAWLGLVPKQRSSGGRTRLFGISKRGDRYLRTLMIHGARAALSRAGGKQDPRSLWLGKMRQRRHPNVAAVALANKNARIVWAMLTGDTAYEPALSVKAA

SEQ ID NO: 177590 - protein, 287 aa, unidentified
MNEFYEGQQFVGMDLHRRRSVLVRMTETGEHLETVRIVNTRDRLAEVMTRAGESPEVVLEATYGWYWAVDALTELGASVHLAHPLGVKAFSYRRVKNDQRDAADLADLLRMGRLPQAWIAPPETRELRELVRHRAKLVAMRSRCKAEVHAVLAKGGVWVPMTDLFGIEGNLLLDKVTMPAPYLARIASLRRFVEAFDAEIDLFTGLAQRRLTHDAGYTAVQQIPGIGPVLAAVFVAEIGDVHRFDGPAQLTCWAGLTPRHHESDTTVHRGHITKQGCVWCGGRRSNR

SEQ ID NO: 177591 - protein, 367 aa, unidentified
MKKISTAAVKQNRNFSEQKLTIGFDLGDRSSWYCVLDGAGSVLLEQRVSTTPKAMKEVFGGMPRSRIALETGMHSPWVSRLLSELGHEVIVAHARNVRLIGESRKKDDRLDAQTLARLARIDPQLLSPVKHRSAKAQADLTVIRARAGLVRARTALVNTARGLAKSYGERLRGCNVRNMNPEKAEGLSPELQTALEPLLAGIESLSERIVECNERIEKLAQESYPQVALLKQVKGVGTLIALTFLLTLEDAHRFRKSRDVGSYLGLQPGRRNSGQSEPQMHISKEGDPYLRTLLVQGAHHILGPFGIDSDLRRWGLKLAERGGKSGKKRAVIATARKLAILLHRLWVSGEAYEPLRNSNHRAMRAAA

SEQ ID NO: 177592 - protein, 371 aa, unidentified
MESIIYVGMDVHKDSYSICCYKADEDRFYYEKKVNAESKRVLKYLESVNKEFGEDCLLMCGYEAGPTGFGLYRDLIKAGYICVVIAPTSLKHSSNHKIKNDKVDARFLAKTLFTKDYSSVHVTTEHEEAIKEYCRMRLSLKKELTRAKLVLQSFLLRHDKKFTEGNTWTLKYRDWLNKIHFEEDYLNEALNEYMISVNTYEARIKAIENRLKQISLDPAVKDKVDKLVCFCGIETVSAVTIVSKVGDFNRFEKAYHFSNYLGLTCGEKSSGQKEKHLGITKSGDRELRCLLSECAKSIKKTSIKGKKSKRLLDRQKEKDPKVIAYADKCRYRLRSKIAYLELRGKSANVATTAAARELACFIWGMMTDHIA

SEQ ID NO: 177593 - protein, 377 aa, unidentified
MQTELYVGLDVHKDSIATAVAEEGRNGEVRDSGAISNDLHAIEKFITRLRKAHGPDVIIRVCYEAGPCGFGIARRLKQLGIDCVVVAPSMTPTRSGDRIKTDKRDARKLARLLRSGELTAVYIPESTDEAIRDLCRARTDAVDDRRRTRHRLKAFLLRHGYRYHGKSAWSAAHQRYLRELVLPHPAMKVILEEYLLAMDAAQARIKGCEEAMRELLTGWRLEPAVKALMAFKGFQIVAAMILISELGEIHRFAHPRQVMAYLGLVPTENTSDKKRRQGAITKCGNAHARWLLIESAQHYITPPKVSKELSKRQEAQPREVRAISWKAQKRLHSRFMRLAARRLQRNKALVAIARELCGFVWELLRTQPCYQLQPSCF

SEQ ID NO: 177594 - protein, 323 aa, unidentified
MVDGSIAYNKKISRSKLLDCVRHFEPGTLIAMEACSTSHFWGRTFRTMGYNVRLIPAQHVKAFVRSQKNDANDALAICETALRPGIHFVPVKTAEQQDIKALRNTRQLMVEQRTALANQLRSLLAEYGLIIPVGIQCLQQHLPELMEDASNELTFTVRRLLSTLREDMQALNERVTGLDKEIAALSSQQAAYRHLLTIPGVGPLIAAAFISEVDAGQFSSGRELSAWCGLVPRQHSSGGKQRLSSVTKNGNRSLRTLIIHGARSVMRCMKKRDDSLGLWLQRLEARQGFLKTTVALANKLTRIIWRVLTDGVDFNMQKAVAMN

SEQ ID NO: 177595 - protein, 414 aa, unidentified
MSKAKVAEEEILYERCCGLDVHKELIVACFRNGSKREVRSFGAMSKDLRELAEWLIAGDCEMTAMESTGPYWKPVYNVLELLGLDLMVVNAQHMKNVPGRKTDVNDAVWIAKLLAQGLLKPSFVPDREQRELREVTRYRKSLTDERAREINRVGKVLEGANIKLTSTVKDVMGMSAKRLMYAALDGVMLDEDTIGQLIHSSMLEKKSMLADAMDGIISKTQNFLLRSILEHIDDMARRIKALDDFIEKEMSKYDEAIKKLDKVDGIGITSAQTILAEIGLDMSRFPTSGHLAVWSGVSPGNNISAGKRKSGKCPPGNKILRATLIQCAQAAVLKKNTFLRAQYDRLLIRKGKNKAKVAVAHSMIVAIWHMLKEDVEYKELGGDYYNKFNPEKKIARHLKQLAALGWTPPVPVAS

SEQ ID NO: 177596 - protein, 371 aa, unidentified
MKENSTFIGMDVHKNSIDIAIAPKGRKAQVRHYGKIDGTLAALDKVVRKLVSQGDRPHFVYEAGPCGYQIYRHLTAKGFECSVVAPSMVPKQSGNRIKNDRRDSLMLARLHRAGELTAVYVPVAEDEAMRDLSRAREDAKGDEKKSKQRLLAFLLRSGHRYSGRSPWSQAHMRWLADIKMVHPSQQIVLQEYIDTLSHCSLRLQRLTEQIRQLLPQWRLFPVVQALQSLRGVSLIVAATTVAEIGDFKRFQNPEELMNYLGLVPSEHSSGEKTRRGSITKAGNSHVRRMLVEAAWAYRFRARVSRALLKRQEGLPQEIRDIAWKAQVRLCARYRHLWAKGKVKQVVTTAIARELCGFIWAIANETDVPMTT

SEQ ID NO: 177597 - protein, 357 aa, unidentified
MRKYITEWTVGLDLGDRKSMICMLDRDGKVVERVSIETRQEALKKFFARFHDPVRVCVAIETGTHSPWVSHLLMSDGFEVLVGNARKLRAVWDTVNKSDVRDAELLARIARFDAELLCPIHHRGREAHMDLAVIKARDALVRSRTDLINFVRGTVKAAGTRLPGCSAEAFHRRVAEHVPEALRPALNQVLATVATLTAEIRRYDARIDSMCEERYAETVRLRGIDGVGPITSLAFVLSLESPGRFRKSRDVGPFLGLTPRRDQSGETDRQLHISKAGNGYLRRLLVNASNYIMGPFGPDCDLRRYGERIAARGGKIARRKAKVAVARKLAVLLHHLWSHPEEEYEPFSRKHRRKHVA

SEQ ID NO: 177598 - protein, 341 aa, unidentified
MKLIRVGVDLAKNVFQVHGVDRSEKAVWRRKLVRGDWIKALLAQVEPGCEIGMEACSGAHHWARLLQAQGYTVKLIAPQFVKPYVKSNKNDANDAEAICEAMSRPHMRFVAVKTVEQQDIQAVHRVRASLVDQRKAKGNQIRGLTSEYGLVAPKELLYLRATIPRWLEDQENGLSQRFRRLLRGLWEDLLAIDRRVEELDREIEQIARQDPVAVRLQQLRGIGPVTATALLATVGDASQFANGRQMAASLGLTPKQNSSGGRERLLGISKRGDVYLRSLLVHGARAVIRTARTKSDRLSTWVMRISTTRHPNIAAVALANKTARIAWAMMSKGTDYQPIPG

SEQ ID NO: 177599 - protein, 425 aa, unidentified
MDRRQRLEAFRQLKSEVRGSEMYLLVGIDVAKDRHHAFFGTPNGKTISKRLTFDNNKNGFENMRNKARDFLGQNGLSKAVYGIEPTSRYHKPLAEYLICQGEDVVYVSNVAVKRNRELLDGRWDKNDKKDAANVADLVGQGKCLYYEMPDDNVTQLRSLLALRMQMRRQEHALRMRIRNNIVAQYFPEMDRHYKATDDLILSIVKDCLDPKEIAQMEFGTFMQRIASRRCGRLQQKKAHAIWEAAKDSVGCDVTASVQWEAQSLVAQLKGVRETISETDKRIKQISEQIPEYKYLLSLPGFGPTVSAIFLAAIGNACHFEDRRQVLRLAGFDLCAARSGKKSEKVKPVISKQGKAALRYALVQAAIVSSVKNPTIRAYFGRLIKGRESERGIKMKMKIKLAAKLAVIAWTLMKRKEFFDPDRFSK

SEQ ID NO: 177600 - protein, 344 aa, unidentified
MEHFAGLDVSVKETSVCIVDEAGRITREVKVASTPEALMQVLRAPAYHLKRVGLEAGPLSQWLFGALAEANVPVICVETRHMRAVLKAQINKTDRNDARGIAQMMRAGLYRPVHVKTLRSQKLRMLLTHRKLLQSKAIAIENDLRATLRNFGLKVGMVGTAKFEARIKELVGDDSDLVLMVEPMLIVRRVLREQLAILHRHLLALARDDGVCRRLMTVPGVGPVVALTFRATVDVPARFQNSRAVGAVFGLTPCKHQSGESDYTGGISKCGDEMMRMMLYEAAQIVLIRATKWSWLKSWAMQIAKRRGVKKAIVALARRLAVIMHRIWIDGTEFCWIRQQAVAA

SEQ ID NO: 177601 - protein, 341 aa, unidentified
MGQAHTIGLDIAKRVFQAHGADASGRVVFRKRLVRAKVLAFFAAQPPCTVAMEACAGAHHWARELGKLGHIVRLIPPAYVKPYVKRHKNDMADAEAICEAAQRPSMRFVPVKTEEQQANGVVFRARDLLVRQRTQCINALRGHLSEYGYIFPQGITHADAVIAHVEDPDSAVPESARAVLTVLIGTFQALEAQIQALDAEITQRAKADPVARRLMTIPGIGPIAATAITALVPAPEGFRAGRDFAAWLGLTPLQTSTGGKQKLGAISKMGERTIRRLLILGASAVVRWAGQRGTPAGSWLARMLARKPKMLVTVALANKTARIVWALLVKGGGYRAPAPAA

SEQ ID NO: 177602 - protein, 425 aa, unidentified
MTNCLFIGVDVALKGNQFCVMNFDQYIYFNLKFPNTPEGNEMVINKIKDIEDKFFFEKIILVMESTGMYSFHPACYFSSNEYLNNFHTEVYQINAFDFDKYKKSFHDLEKEDGIDAYVLADFARVGRTKGLYPFKGAQYIALQRLTRQRYHICRELIREKTYILTNLYLSFSGLISANKSDLPFSDLFGATSSAFLEEFASPDQIAESSVEELIKFISNKSKNHYSNIDDKITSLHKAIRASYRLDQTAYEPINMAIACSLNTIKFYQAQLKNIDKAITTTALGLDSNTYNILLSIRGIGKVYAAGIMAEIGNIDRFSHNSKLAKYSGLYWKRNQSGEYDSQDKKSSKKSNKYLRYYLVEATSSCVIHKFPFIKDFYDIKYNEVSKHQHKRALVLSARKLERLIFGLLRKNQYYIPINSVQNSKN

SEQ ID NO: 177603 - protein, 322 aa, unidentified
MIEDAICVGVDVAKSTLDVAVTDSGEARQFVNDDEGIRQAVRYIAGVKPVGIILEATGNLEIPLAAALQAGRLPVAIINPRQVRDFARATGALAKTDRIDARILALFGARVKPEIRPLPDKKAREMGSLLTRRRQLVEMLTAEHNRLFQAGDDIHPSIETHIQWLEEALSDINDDLDRRIRLSPSWLEKDNLLKSVPGVGKVVSSSLLIELPELGMLNRRKIAALVGVAPLNRDSGTMRGRRTVWGGRAKLRAVLYMAALVASRRNPIIAAFYQRLLDAGKMKKVALVACMRKLLTILNAMMRTMTVWQPESILRCVSTKAS

SEQ ID NO: 177604 - protein, 351 aa, unidentified
MHYIGVDYHKKYSYIVVKDREGKVERRGKVNNTKEEFRQLLKPYYSGKAVLEATRNWGLVYDWLEEILDDVALAHPLKVRAIAEARIKTDKISADILCDLLRSNLLPEAYVPNKETREAKNILRQRMFFVRVQTMVKNRIYTILDRHPKIVTQAPDVSDLFGASGMEWLRQAVLPGQDNQLLASELELLEVLKRKISESNGIVKELARGDKKVKLLRSIPGLGPFFSVLVAKEIDDISRFRDEKKLCAYAGLVPSTYASGGKVFHGRITKTGNKWLRWAFIEAVSPAILSDADLYAYYERLRIRKDANAAKVATARRLLTIVYRVLSQERLYERRNRRAMRRLAPAALVTS

SEQ ID NO: 177605 - protein, 340 aa, unidentified
MSLVLQSILPYPDSCLGTSPHQQGWDTKMAELSFGGIDVSKDRLDVLLLPEGLCFSVCNNAPGWAELIVRLRPLAVSAIGLEPSGGYERGIIRALLAAGLSVRRINPNKLRQFARARGVLAKNDRLDARLIAEYVAIMPTRVLQRDDAIERLAEIVTMRRQLCDEHVAAMNQATHLEDAMLRRISKRRLLRIEADILLLDKRLAELVAADPRLAHRYQLLISMPGVGPTLAYTLLATLPELGQIDRKQIAALVGLAPYDFDSGKLKGHRCIYGGRMPVRNVLYMAALSARRYNPALKEFSNRLAAASKKSKVIIVAVMRKMIITLNAMLRDNTEWRPSSV

SEQ ID NO: 177606 - protein, 420 aa, unidentified
MEGAPMLDTTTFIGLDVHARSIKAVSLDVMTGEVRAATFGYDAGAVAEWVRSVDPRARCVYESGVTGFDLQKRLSGLGVDCVVGAVSKMIKPSADRRRKNDRNDAEFLARMLSVGNVVEVWVPDDECEAARDLTRALEDARDDLSRSKQRLSKFLLRHGLAFDERTPTGRRKGNWTRAHWSWIESIGFAERADNDVLAYYVDAVRRAAEEKARLEGLVEAEARKPRWRKRVDSLRCLKGVDTASAADLVFEAGEFSRFRNARSFAAWVGLTPSEHSSGESDRRGAITKAGNKHLRKTLVEAAWHYLTCSGRPKDLARGQAPDRGRPEACRQGRAEAGREAGGAARARGPRQQGERGHGARARLLGMGGRPHGRGGVGGRSPAHKPVTPEAVRSEAVEANLRSLFCERPGRHTRAQTVGST

SEQ ID NO: 177607 - protein, 531 aa, unidentified
MVRGMITGFSRGREALRNVDVAIGAVGRPGKYGRRLHVIDTSNIGAFLGLDVRKGKHRATAVTPTGKKAFDKRLPNSEPKLREIFAKLQVEHGTLLVVVDQPASIGALPIVVACGMGCQVAYLPGLTMRRIADLYPGEAKTNARDAFVIADAARSMPRTLRSIELTDETVAELEMIVGFDNDLAGEATRVSNRLRGLLTQIHPYLERVLGPRIQHPAALKLLDQFGSPALIRKAGRRRLINLIRPKAPRMADRLVEDIFIALDEQTVVVPGTDAAALIVPSLVNLLQAVLGQRKLLATRIEELLETHPLSKVLTSMPGIGVRTGARILIDVGGGSSFPSAAHLAAYAGLAPATRSSGSSIRSEQPSRRGNKQLKRAFFLSAFAAMADPVPRTYCDKKIAQGKHHTAWVPCTSSTVISLNLTNSSKWLAQRRSIAKLLETVGARCPFAGRQSDDRLRPGRRSPACPARRLRPCRQRSGLPTAHHASARDVPAPPGPVPAPEQPQPLITDSTDPELRKHLGTGTGDHRKRATR

SEQ ID NO: 177608 - protein, 391 aa, unidentified
MIYIGIDAAKDKHDCHFVNSDGEVLLDNLRILNNLDGFNKLKQAIEQFSTGDNTQIRVGLESTGSYSANIISFLKQLNLSVTVLNPYNVANLRPATTLRKTKTDKSDARLIATATALCSPNQAYLDISYHIQTLKSLCRTRYRLIKTIQPIKNRFRRILHVIFPEFETLFNVSINSSYKLLKRFPGPKAILKARKTTLEEFLKGISMGRLTKKVDALIEIAKNSIGSYNEGDAFELQDTCDNILFLENKLANLESKIKDIMQIINSPITSIPGIGDIMGASILAEIGDIQRFDSPEKLHAFAGLAPMLYESGKYIAKDTPMDKKGSVYLRNALYQVTKAAYVNSPFLRSYVDKKRSQGKHFYTAISHGMKKMVRVIFAVLKKNSNFVEPII

SEQ ID NO: 177609 - protein, 339 aa, unidentified
MNITTVGLDLAKKVFHVVCFNDRDKEVKKRMLRRNQVLEFFTQLPPCRIGMEACASAHYWGRQLNDIGHDVKLISPQHVRPYVRGNKNDYNDARAIAEAANRPSMPFVGIKTVEEQDMQAIHRIRSQCLRDRTALSNSTRGLLGEYGIVFAKGVPTLRKKIPEILEDAENGLSLDFRNLLARRYEQLVEIDEHISFYTKKLERVSQEDDTCQRLQTVPGFGPIVASAFRSDIGDGRAYARGRDAAASIGLVPRQYSSGGKNVLLGISKRGNKYLRKQLVHGARSVVLQAANKDDPLSRWINRIREERGWNKAVVALANKMARIGWAILRHNTIYQPSTT

SEQ ID NO: 177610 - protein, 389 aa, unidentified
MKIYVGIDIAKLNHFAAAISSDGEIIIEPFKFTNDADGFQLLVSKLESFDKNSLIIGLESTAHYGDNLVRYLVTELYQVCVLNPIKTCQMRKNNVRKTKTDKVDTYVIAKTLMMQDNLRFVSFFDLDMMDLKALGRFRQKTIKQRTRLKIQLTTYVDQVFPEIQYFFKSGLHQNAVYALLKEAPSPKEIASMHMTHLANLLKVNSHGHFTKEQAKELRVLAQKSVGANDSAISIQITQTIQQIELLDSQLEKIEAEMTDIMKFNDSVIMTIPGIGYINGGMILGEIGDIHRFSNPNKLLAFAGLDPSVYQSGNFQAKTTRMSKRGSRVLRYALVNAAWNVVRNNATFKAYYDAKRAEGRSHYNALGHCSGKLVRVIWKMLTDEVEFNLE

SEQ ID NO: 177611 - protein, 353 aa, unidentified
MRVYIGVDLHVRTQTVCWCDTTTGEQQERLLDHERDDVRSFYAQFAAPAVVGVEGSGYSLWFHRLMEETGHQLVVGDAQAIRQFARRRQKNDRRDAQLLLDLLLHGDFPVVHVPSPASRDVLALLRYRHRLVRIRTMLRNGLQAVALSHQLRLGPRLFTARGRQQLAVLPLQGAYAAQRQHSLALLESLEERVQAIEEELEMRAQQDARVMRLRTHPGVGLLTGLAVVHALDPVQRFDRARRVAAYCGLDPKEHSSGDSQRFGHISKQGNRLLRFLLVEAAHTAIGKDEPLRRFYFRIESRKNSAVALVAVARKLVLRLYCMLREEIDYDEFRRRGRDARRARVSPSSVARRD

SEQ ID NO: 177612 - protein, 351 aa, unidentified
MDATTVAVDLAKNVFQLAVADAQWRIVHKARLSRDQFQRWFDNRAVALVVMEACGSAHYWARRLQGRGMEVRLLPARYVRAYVKRNKTDAADAAALLEAVRCADIVPVKIKSIEQQCLQGLHRVRSAWMATRTARINTLRGLCREFGVAVAEGASTGLKQIATTLAGQDIPWSLRQALQEMLEEVRELEQRIGQVEQQLTELADRSEPCQRLRSVPGIGLLSATAMVAATGGSVSHFKSARHFAAWFGLTPKEYSSGGSRHLGRISKRGDRYLRMLLTHGARSVLNAASMARRGKRPLDPLRLWALGLAQRSHHNKATCALANKLARICFAVLRDQEPYAATTPIANTAAA

SEQ ID NO: 177613 - protein, 324 aa, unidentified
MLPTLGIDISKASFHVELSLNEKLRHRKFSNRKEGFSELGNWLVKHKVKQVHACLEATGPYGEELASYLYQQGHTVSIVNPLQIKAFGQSELLRNKDDRPDAGLIRRFCEKQRPPAWTPPPAHLRELQALTRHLENLLETRQQQLNRLEGPKPKGVVKSLRKLVAYLDAEIKRTEKQIEDHLDRHPDLKQQCHLLESIPGIGKRTAAKLLAEIEDISHYKSARQVAAYAGLTPKNNRSGTWRGKTRLSKTGNARVRKALFLPAMVAKQHNPIVRTFCQRLARNGKNKMEVIGAAMRKLLHIAFGVLKSGKMFDPDHELLLSSVS

SEQ ID NO: 177614 - protein, 388 aa, unidentified
MIYVGIDIAKLNHFASTMSSDGEELIRPFKFTNDNDGFQLLISKLDPLDKDSLIIGLESTAHYGDNLVRYLVAKNYKVCVLNPIKTSTMRKNNIRKTKTDKVDSYIICKTLMMQESLRFVTFYDLDLMDLKALGRFRQKTIKQRTRLKIQLTSYVDEIFPELQYFFKSGLHQKSVYALLKEAPTPEAIASMHMTHLAHLLKVNSHGRFNKEMAQQLRVLAQKSVGASDSSLSIQVTHTIQQIELLDSQLERVEAEMTEIMKFNDSVIMTIPGIGYINGGMILGEIGDIHRFSSPNKLLAYAGLDPSVYQSGNFQAKKTRMSKRGSKVLRYALVNAALNVVKNNATFKAYYEAKMAEGRTHYNALGHCAGKLVRIIWKMMTDNVKFNLG

SEQ ID NO: 177615 - protein, 344 aa, unidentified
MGEVSTIGLDIAKSVFQVHGVDADGAVVIRKRISRAKVLEFFAAVSPCLVGIEACPSAHHWSRKLQALGHTVRLMPPSYVKAYLKRSKNDANDAAAICEAVTRPSMRFVPTKSEQQQSGLMLHRGRQLLVRQRTMLSNAIRGHMAELGIISAKGRNGTVELLEIITNADDNRVPAVARLSLGALARQYANTTAEIRAFEKHIHAWHRSCEESRRLEEIPGVGPIVATALVAEVGDWKAFSSGRNLAAWIGLVPKQHSTGGKERLGGISKQGNRYLRWLLIAGAMAVIRYARQHGTKRLWLARIMERRPIKVAAVALANKIARMAWAMMVHGERFKEPRLLSQAA

SEQ ID NO: 177616 - protein, 370 aa, unidentified
MEHRSMFVGLDVHKETIDVSIAEGQRDGEVRHYGVIASDLEPLDKVVRALRAPDRQLHFVYEAGPCGFGIYRHLTKRGEACVVVSPSMIPKRSGDRVKTDRRDSQMLARLHRAGELRAIYVPDDTDEAMRDLVRAREDAVVVGTQAKYRLKAFLLRQGRRYPGREGWTLPYRRWLADLSFPSAAQHIALQEYRDAIDETETRIDRLTAQLRQLAPAWRWAPVVAALQALRGVSFVTAVALVAELGDLTRFGHPRELMAYLGLVPSEYSSGPSVRRGGITKAGNPHVRRLLAEAAWAYQGVPRIGRQHAYRQEALPKVVCAIAWKAQLRLTARFKRLVARGKAKPKVATAIARELTGFIWAIAREVSPTPR

SEQ ID NO: 177617 - protein, 335 aa, unidentified
MQVTTVGLDLAKNIFQVHGVTENGEVAFNQALRRAQLFAFFEKLPPCLVGMEACGSSHYWARQLSKLGHDVRLIPAMYVKRGKSDAVDAAAICEAVTRPTMRFVAIKSEEQQGVLFLHRARDLIVRQRTQLSNILRGLLGEFGIVIAQGIGSAIKFAKAVLDGDRPSIPEVAIDVLANLCNQLVALHLRVRWYKMRMQLQAKQDPRVMLLRTIPGVGPVTASAIVATAGDASQFKNGREFAAWLGLTPLNRSSGGKEKLGRITKMGDRYIRRLLVTGMTSRLRQMKTHPERADPWAQTLLERKPVRLATVAMANKTARIIWAVLTKNEYYRPHTA

SEQ ID NO: 177618 - protein, 337 aa, unidentified
MKRFIGVDLHRKSFTVCIREEGKESIEEWKVKNVELFAKMLSKEDWLAVEATGNTAFFVKEIEKQSGKIVVVNPYQFKVISNSAKKTDENDAKILALFLEKDMLPEVRIKRDEQAKLSSVAHTRDKLVKLRTVLKNKVNNIFARNALVLSKEFLSSEKGLKEVEKADFDTVTNREIKVVVDQIRSLNRSITELEEVMIESSKTMDGHKNLTSIKGIGDKGAAVMLSAIGNINDFSDSGKLASYFGIVPRVQNSGETVSHGRITKKGNKLARTTLVQCSLIAKRYSPYLDAYYQRIKSRRGTPKAIIALARKFLDIIYKTLKNNWVFEDFTTFKLLES

SEQ ID NO: 177619 - protein, 416 aa, unidentified
MSTYFNQVYDDNRWWISRYQTLEREVNLMIYVGIDIAKLNHFASALSSDGEILIEPFKFTNDNDGFHLLLSKLSSFEKSNIIIGLESTAHYGDNLVRYLVAENYKVCVLNPIKTSVMRKNNIRKTKTDKVDTFIICKTLMMQDSLRFVTYYDLDLMNLRTLGRFRQKTIKQRTRLKIQLTSYVDEVFPELQYFFKSGLHQKSVYALLKEAPTPKEIASMHMTHLAHLLKVTSHGHFDKETAQQLRVLAQKSVGASDSALSIQITHTIGQIELLDSQLERVEAEMTDIMKFNDSVIMTIPGIGYINGGMILGEIGDIHRFSNPSKLLAYAGLDPSVYQSGNFQARKTRMSKRGSKVLRYALVNAAHNVVKNNATFKAYYDAKMAEGRTHYNALGHCAGKLVRIIWKMLTDEVEFNLD

SEQ ID NO: 177620 - protein, 428 aa, unidentified
MDHSASLTNPIVAWIGLDWADQKHDVCLQATGSKEVEHVVVEQNPEALHAWVVELRRRFPHGPLAIALEQSRGSLFYALMNYDFLRLYPIPPKALADYRKALYPSGGKDDPVDAQLLLEFLRKHPERFRPWVAEDVETRRLALLNEHRRRLVDDRTALTNRLTILLKGYFPEALRWAEDLRAPLAWDFLAQFPSLERAQQASRLEVLKVYRAHTRRPPEQLEALCDEIRTARPLTTDRAIIASSVLMVEILVEQLRALGAGIERVEQQLGELFAAHPDRLIFQSFPGAGKALAPRLLAAWGSDRQRFPTAANMQCFAGPAPVTVRSGKTKWVHRRYAGPTFLGQTFHEFAAQSRLQSPWAKAYYQQMRDKGVDHHPAVRALAFKWIRIMFRCWQERTPYDEARYQQALKRRGSPLATTLNRLATSARL

SEQ ID NO: 177621 - protein, 342 aa, unidentified
MTFVGCDLHTRMQQVAVLDTGTGEVSERQLPHDGLAVEEFYAGLPRPVTVGIESTGYAVWFHALMQRLGPTLLVGDAAKIRAMVVRKTKTDRRDALPILDLLRHDRFPAIWIPDPATRDLRALLMHRLRLVRIRPMVKNGLHAIALNYRLTRGSALLRQAGLAQLHALALPPHTAQRRDQSLELLAGLTTQIRALDDAITAATLAHPDAPRLITHPGVGALTALATVVILGPVARFHDRKHVVSYVGLAPAVNASAGTYHLGRITKQGSPLLRFALGQAAAHAARMDPDLKRTYGALVHRRGRPKAKVAVARKLLVRLFIILRDQIDSDEFCRRGRTAPASA

SEQ ID NO: 177622 - protein, 376 aa, unidentified
MGHHSEAFVGIDTSKLKNAIAIAEGGRDGEVRYLGEIDTTDAATRRLIRKLAAKYAKLTFCYEAGPTGYGLYRLITSLGHACSVVAPSLIPRKAGDHVKTNRRDAQGLARNLRAGELTAVWVPDERHEAMRDLSRARESAVDDLKSKRQQILSLLLRLGLHYPGKKTWGKSHRNWLASQTIGQREQRIVIEELLGAERQAQDRVGRLEQAIREAVPEWSLAAVVTALMSVRGIDLVAAVTILAELGDLSRFASARELMAYLGLVPSERSTGDNVKRGGITKAGNRRARRILVEASWSYRYPPRIGRDKQAKVDATPEPVRAIAWKAQTRLSSRFRMLSKKGKRPTIVATAVARELCGFIWAIHRVVTSPGATTASR

SEQ ID NO: 177623 - protein, 320 aa, unidentified
MKQAIFVGVDVSKKQLDVAIRPLGQVFGVSNDRRGIAQLVKRLKKLQPVCIAIDATGGLEKELAYALAAENLPVAVVNPRQVSNFAKSTGQRAKTDAIDAAVLAHFAEVMKPEVRPLPDAASRELSALVTRHRQLVEMMTAESNRRDLASKAVRKLINSLLRSLKDQLAVVDREIRKAISASETWRRKAELLSSVPGVGKVTTATLLAGLPELGELDRRQIAALVGVAPFNRESGTWKGKRMIAGGRGWIRSVLYMSTVVAVRRNPILKEFYERLRARGKPAKQALTACMRKLLVILNAMLRRQTHWSAPNPLLSLRVAG

SEQ ID NO: 177624 - protein, 332 aa, unidentified
MTYRIAGIDVHKKMLAVGVADIASEGEYQFVRRTFSTTPDQLNALGQWLLEQEVQEVVMESTAQYWKPVWEALERRWKPVCEKQRGANPMSGTLHLAQAKSNRARGGRKNDFVDAERLIKRYVAQELVLSFVPCPEQRLWRTVTRRKQQCVRDRVRWQNQLEAFLEEAHIKLSSLVSDLLGQSSRRMLQALAEGETNAAVLAAMADRGLRATPAQLCDALGAASELNPVYRQLLKMSLQELKLIEEQIRDLDQAISGLLAQHRDAVQRLAEVPGLGPDSAQQIIAEIGPAAAAFPSAKDLASWVGVCPGDEISAGRPMGASRRKGIATCGGF

SEQ ID NO: 177625 - protein, 337 aa, unidentified
MDRQYVGIDFHRRRSVIVRLDSGGARLGLHRIVNDPSELVSVMALCGEGPEVVIEATYGWYWAVDLLQDLGATVHLANPNALNWGDRRVKNDERDAHDLADMLRLNRLGEAWIAPPAIRELRELVRYRAKLVKLRSGLKAQVHAVMAKEGVLPKVTDMFGSAGTRQLDAMELAAPFAHRVRSLRELIALYDREVGYLEREIHQHLKHDRGYQAVQAVNGIGKVSAAVLVAEIGDVSRFPTPAHLCCWCGLTPRHRESDLKTHRGRISKQGSRLVRATLIEGVSRYHGGSVLDAKYRTIAKRRGRNKARVALARMVLTLVYYGLRDGEIRCLAKAEAA

SEQ ID NO: 177626 - protein, 342 aa, unidentified
MYYIGLDVHKKTISYCIKDASGQVHREGTIGATGNELDRWMKTLPQPWTVAMEATIFTGWIYDHLLPHAAQVKVAHPLMLRAIAAAKKKNDRIDAGKIADCLRCDFLPECHMASTEIRDRRRTLRYRHLLVRQMAQMKNRVSGLLLETGVSHNKQRLHKVGYFRDLLSTNEDISESIRPLLRLSRETIVRLQKTDYGLVSSLQRDPLLAERIKRLRTIPGVGPITALTWALEIGDVSRFRSIKQAISYCGLCGDEKSSAEKVMRTPISKQRNKHIQRTLVEAAKLAPSQNHELAVVYEKEKQKGHANRATLAVARKMVAWLLAVDRRQRDFVPSEDRKNAAA

SEQ ID NO: 177627 - protein, 371 aa, unidentified
MDQSSKTLYVGLDVHKESIAVAYAPEDRGAEVVSLGPIGTRQCDIAKLIRRLESKAATPVFVYEAGPCGYGLYRYLTGKSLACHVVAPSLIPRKAGDRVKTDRRDAMTLARLMRSGDLSSIYVPGVEDEALRDLSRGRDDAMQDLKRSKRRLKSFLLRQDIRYEGRATWNAAHLRWLAEVVCPTPPQQIVFQEYLRAVSEQQERRQRVEHELHEAVKGWRLYPVVEAIQALRGVELTGAIIVMTELGDLTRFENPRQLMSYLGLTPSEYSSGERRRQGGITKAGNSHARRALVEGAWAYRYPAKVSRHLQLRLEKLPTEVQAISWKAQVRLCTRYRQLTARGKHVNQVVVAIAREMAAFAWAIARIVPLAA

SEQ ID NO: 177628 - protein, 520 aa, unidentified
MATSRTRKRSSTRRPAPTLGKPRGVLHPRVQQVGPEHFGIVCFDCAKARSKFLLADFYGRVLIPPTTVAHLRPDLDAAVAQVRQAFADHQLRDGLVAIERTGRYHRIVQRAFAAAGFETRILHPFVTKQYRQPVDPGNKTDDTDLAALHRATVTGCALREATRDEAWTSLLLLIRHRRDLVRKGSALNCQIRDHLEAALPGFAACFDKLFDSPVPWHLLRHFPTAAQLRQAGVTPRCQSLRQAGSRFQQRTVQAVLDWADQAAPGDIAADQHRRIALAWYDDRLRKSQEIQALERDIASRLVQTPYVLLLSFPGLHVVSAADCAGEAGPMEHYVNAKAITGRAGLRPSRYQSDQVDQAHGPLVRHCNRSLRAVLLGIADHLIVCNHHFQALATQWAAQGKDPRHTRVKIALRFCRIAFQMVAGRQVFRHPSIQGRHYLLDKLTAFHRAHDTGMTEVLRDLQAAIGQLPGREHAAEARPLAEQLQKIQDGHRRGPQLLGDILPIVLARLGVGAVQSTESGE

SEQ ID NO: 177629 - protein, 340 aa, unidentified
MYPFYLGIDLHLKRTYVVLMDVKGEVIDERRLPNAEMRGYLEEHVPQETYAVLEATRNWPFMYDMLSDHVERVELAHPKEVKAIANAAVKTDQIDASVLAHLARMNYLPTAYAAPKEVRDLRLYTRHRSWLIGHRTQAKNRLQAVLASYNLASPVSDLFGVKGRVFLEEVMEELRSAAQRVIMDNLTLIDRLDQQIKELEQEIPLTKEQAHTIKLLMSMPGVGKVTALTILAEIGHISRFNSSKALCNWAGLTPRVRKSDAIVRHGKISKQGSAYLRSAMGQASIVASRFSPRWYRVYERLAKRCGKRGARVAVARRLLTVIYYMLKRDQPYQEDYHRGA

SEQ ID NO: 177630 - protein, 423 aa, unidentified
MKSPNTQTFTAFVGIDWADTKHDICLQGSGSDRREFGCIEHQVQCIDEWAQSLHQRFGGPIAIALELAKGPIVYALQKYDFLVLFPINPLTLAKYREAFKPSRAKDDPSDAELALDLLVRHPERFAPLKPQSVAMRTLISLTERRRELVNDKTRLTNRLTNTLKQYYPQVLEWFDQHDTVLFCDFLTRWPTLLQAKRAHQASLKAFFHAHNAHRPKLIAGRLAAIKGAVPLTQDPGVIVPCRLHAMVLIEQLRVALQAIEQFDRHIAELAPTLPDYRLFAGLPGAGPHLAPRLLVAFGEDRQRFQRAEELQKYAGIAPVTQRSGKKSWVHWRWQCPTFLRQTFVEWAGQTINKSFWAGAFYYQQRAKGSTYQAAVRALAFKWIRILYRCWMARTPYDETKYLNALKRRQSSLLNNLVPNPQNA

SEQ ID NO: 177631 - protein, 328 aa, unidentified
MAKEKFDVSFFDLTSKKVSNQPSHKVVKNNFKSIGRFLETLPSDAVLVAEHTGVYGDTLLKCCMDSNVKIAFVGGYVIHRYRATPDRAKTDVLDCALLRDFGERYPDKLKYKTFPEEALYELRQLARHREMLVEQRKQLITADKSEDCRPIRSLAVKRSMDRIKEMLDTEIGETEKEMLKVINGHDSIHHNYELVKSVDGVGLITAVELLVKTENFTKITTARQYAAYAGTAPYEKSSGKMDKGAHISKIGNRRSKTLLYICAESARLHNKEIKLYYERRTLIDKKPRHYVLNAIANKLLRIIFTLVEKGEYYDANFIRQDPRVVKYN

SEQ ID NO: 177632 - protein, 326 aa, unidentified
MEQEKNPAIVGVDVSKEKLDLALLREAGKFRDKVLANSRKGFEEVLAWLVKQGVTQAHICMEATGAYWEELAEFLVDAGFEVSVVNPLLIRKYSESLGERSKTDRIDARVIARFCAERHPERWQAPSKAVRGLRALVRRREALIELRTEELNRRDSASEPRVLESIDKVIAHLDEQIALIDTQIHQHIDDDPTLKQQRELLQSVPGIGKVVSAMLLSYYGGELRFDSSKQAVAFAGLDTSRFESGTSVRSKPRMSKRGHSNIRGTLYMPAVVTMSKTAWGKAFAARLAQAGKPSLVIIGAVMRKLVAIAYGVLKSGQPFNPALHVA

SEQ ID NO: 177633 - protein, 312 aa, unidentified
MTKIICGVDVSGDHLDARVGQTGPYQRFARTPDGIAQLASFCRQHQVTLVAMEATGGYEKLPFALLWQEGLPCTILNPRQVRRYAESMGTIEKTDRIDTGMIAAFAKAKKTKPQTPAQAGQKALSALTTRLRQLTDCKTAQTNQGRLCDDPIVVADIASLVADLDRRINSLLAAMLELIEQDPLWSILSDCFRSIKGVADHTVATVLAFLPEIGTISNKSASKLTGLAPIAHDSGKRSGKRPVRGGREPVRSILVVIATGVIQHNPDIRAFHQRLIDAGKPKLLAKVAVAHKILVRLNAKARDARKNLAIAT

SEQ ID NO: 177634 - protein, 405 aa, unidentified
MKLYIGIDWSQSKHDICFVNTKGVIQSQLVIPHSQTGFWEFEQRRKRLGVPSEDCLVGLETSHSILVDFLWDRWYANLFVLPPTLVKGSRTRMRSSAAKDDPGDAYLIADILRTDHGRLQAWQPDSGLTRQLRTKVRFISFLTRNIVRMTNRQRAVLLRYYPVATELFSSLSTLISQHFILAYPTPQAAAALELDSFRIFARQHGYTHKSKLANILAKLDQDDPQADMDIIDACQDEAQGLAHVLLDMIRLKRDNLKQLQQLLDLHPDQNIFASLPGTGVHLQAALISKFGDDRGRFPAPDRVQAIAGTSPVTIRSGKSKYVRFRKSCDYEFRHIVQQWAKQSLRSSVWANAYYARVRPNCESESHAFRCVANRWLAILWRLWQDHNPYDETHHLKQRGLRSQPR

SEQ ID NO: 177635 - protein, 341 aa, unidentified
MSTLFVGLDLGSSRCQQTVLNADGTVRLSRVVPTGEQQLRAAFAALGADVRVHLEAGELAAWTRSILAPLVSEVVVSHPLTLSWIAKDSNKTDAVDARKLADLLRLKLVHPVYCENSDDRRTFKHLVTHYEQLSREQARLKAKIKARLRTLGIIRKDARVFSSSGNTELLELITAPAIKQMLAQSFAVLKQMLDSLAQAKQAMVAAAAEFPEVRLLQTAPGVGIVTACRFVAYVQTPRRFSNKRKLWRYARLGITRRESNGKRLGHPRLDAAGVGSLKDVSRKVFEAARRTKTDNSFKRCYEHSLATTKNAVHARLTTQRKVLATLRAMWLSMQPYRDIGG

SEQ ID NO: 177636 - protein, 334 aa, unidentified
MENIALIGIDLGKNSFHIHCQDRRGKAVYRKKFTRSKLIEFLATCPATTIAMEACGGSHFMARKLEELGHFPKLISPQFVRPFVKSNKNDFVDAEAICEAASRPSMRFVQPRTESQQAMRALHRVRESLVQDKVKTTNQMHAFLLEFGISVPRGAAVISRLSTLLEDSSLPLYLSQLLLKLQQHYHYLVEQIKDLESQLKRKLDEDEVGQRLLSIPCVGTLTASTISTEIGDGKQYASSRDFAAATGLVPRQYSTGGRTTLLGISKRGNKKIRTLLVQCARVFIQKLEHQSGKLADWVRELLCRKSNFVVTCALANKLARIAWALTARQQTYEA

SEQ ID NO: 177637 - protein, 331 aa, unidentified
MFPVGIDVSKNTLDLCMLYDGIKGRIKTRNIQNNRHSVENILRWLRLQHCSPEDVHVVMEATGVYHERLATELHDAGFRVSLANPRRTREFARGMGIMTKTDKVDAYMLACYAFLKKPHRWEPPAPEIRYLGALLRRRDVLLGDALREENRLEKYLSTDTPADIISSCRRMAQLMREEVSNIERQIKAHIKASPALRRDYTLLTSIKSVGPQLGMHMLVVLRSHNFASAEQAAAFLGVVPIEKRSGTSVRSRPRMSKIGPPQLRAKLYMSALCGKIYNKRMRNIYDEMCLRGKPKMVATGALMRKLVHWSYGVLKTGTVFNDESLKPVLST

SEQ ID NO: 177638 - protein, 388 aa, unidentified
MTSQKTVSTFDPRHYDVFAGMDVDKRSIVVTFTDWEQSEKSIRMPYSSEHLLGYVRKHFPKKRIAFVYEAGPTGFGLFDDLGAKGHPCLVVAPSMVPRAPGQRVKTNRLDSKNLAKKLRGGDLQSIHVPSTTYRELRHLVQLRDTQVNQLAATKCRIKSLLTFEGIEFPAENERWSAEVVRKLQELNCSGAVRFKLNILIQTLQFHFQSAAATHKELRRFCNNNSELQKTIALLTSIPGIGLTVATHLAARLGDPSEITKLTQIAGFLGLAQSEHSTGNSQNRGPITRVGDSRLRSKLVQSAWVAIHKDPELLAFYQRIHGRNPKDAAAKKAIVAVARKLTTRIYAVLKQQRPYVLRPHSSNISLTKVETGGPKGKTRRRTEGPTTKG

SEQ ID NO: 177639 - protein, 345 aa, unidentified
MKITTVGLDLAKSVFQVHGVDEAGKVVVRKTLRRAELMKFFTKLVPCLIGMEACGSAHFWARQLAKLGHTVKLMAPQFVKPYVKTNKNDYIDAEACSEAVTRPTMRFVPIKTDDQLDLQSLHRVRERWVVRRTAVINQMRGMLLERGITIRKGRHYIEESLPAILEDPDNKLSGALRVLLTQLRMEMQYLHGQIEETDNLIERICGELEQCRRLVAIPGIGPITATATVAAIGNGAAFKKGRGFSAWLGVVPGEHSTGGKQKLTGTSRRGNKYLRKLFVQGAHTVLLQKTKQSSGLSTWLVSLTSRKRKQVATVALANKMARMAWAVLFRGEAYRPPTAPQVIAA

SEQ ID NO: 177640 - protein, 413 aa, unidentified
METLVERCAGLDVHKDSVTACVRVPDDQGGRRVETRRFTTTTAGLVLLAQWLASFGVTRVGMESTGCYWKPVWQLLEGQVECWLLNAAHLHNVPGRKTDVADAAWIAQLVEHGLVRPSFVPPRPIRELRELTRYRKTQIQERTREVQRLDKVLQDAGIKLSSVATDVLGVSGRAMLEALVAGTHDPQVLAGLAKGRLRAKLPALREALAGRFRTEHHGLLVAQILAHIDYLDEAIALLSGRIEQVIAPFAEQVALLDTIPGIDRRAAEVIVAEIGPDMGQFPTAAHLASWAGVCPGNNESAGKHRSGRTRKGSKWLGGCLSEVAKAASRTKGTYLNAQYHRLRGRRGPGKATLAVAHSVLVIAYHVLDQGVAYQELGDDHFQRRHSAEHYQRQLVRQLERLGHKVTLEPIEVA

SEQ ID NO: 177641 - protein, 339 aa, unidentified
MGLYCGIDLHSNNHVVTVIDEADRRLYEKRHANELAGTIGVLDRFRDELVGVAVESTFNWYWLVDGLMDAGFPVRLVNTTAVQQYSGLKHSDDWHDAFWLAHLMRLGILPTGYIYPKEQRGIRDLARQRMRLVQHRSSHIVSVQNQIWRSSAVRLDAATIRGQRSSVEWPTLPDDYVTMSVEATRAVIDTLGEQIEALERELLSLMKPTPMYRLLNTVVGIGPVLALVIALEIGDISRFPTAGDFASYCRLVDSKRTSNSKKKGEGNRKNGNPYLAWAFMEAAQFAQRYLPEAKRFYERKRRQRHSVLAKKALAHKIARACYRMLREEVPFERERLFAA

SEQ ID NO: 177642 - protein, 433 aa, unidentified
MTRYVGIDLHKHLIVGHVLDAAGTKVDTFRYESVDAATLEHIGRKRLRPEDEVVLEATTNCWAVVRALEPFVARVAVSNPMAIKAIAKAKVKTDKVDAAVLAHLLRLGYLPEVWQPDLATRGLREWTIRRSRIVGQRTTAINRLRSTLAQRLLHCPYDMTAPAARDWIAGQKLNEDTRWLLESDLRLMDSMQAELDAMDQLLAQRGYVDPRVKLLMTLPGISQHSAQSLLAAIGDITRFRDADSLASYLGLVPSTRQSASHCYHGPITKQGRSHTRWMLIQAAQAVRLHPGPLGHFFRRLKRRKPYNVAVVAVAHKLVLLAWHVLTKQEPYRYAVPQATENKLRRLRIQATGQKRPTGSAPGTKKSPARFPGGSQRIKPLAEVYANEQVPAARPAPAGELRHLDELELKDFTDSLQHEQIVPRRRRKNAASSG

SEQ ID NO: 177643 - protein, 424 aa, unidentified
MDLLIERCAGIDIGKAEVVACVRTPGPGGRGRRKETRTFPSFAGDLEAMADWFSAEGVTEVAMEATGSYWKPVWYVLEARGFDQKLVNAQHLRILPGRKSDVLDAEWIAELLEHGLLRGSFVPPATIRELRDLTRYRKRLTQARTAELQRIEKTLEDAGIKLDVVASDILGVSGRLMLKALVAGERDPERLAGLAKGVLRNKIPQLRQALRGRFRDHHALLVGMALEHAEYLDAAIARLDDQIDALFASSTSEAGVPFVEARDRLATIPGVATRAAQTIIAEIGVDMARFPTAGHLASWAGLAPGNNITGGKRRSGKTTPGDRWLGEILNQCAWAAAPSRDTYLSAQFWRLARRIGKKKAAVAVSHSILVTCWHLLTERADYHDLGGDYFTRRNNPDRRRDHHIQGLHNLGYRVTLDKITDTAA

SEQ ID NO: 177644 - protein, 454 aa, unidentified
MADAKRPRPRQALPPVHAHAAAIDIGATIHVAAVGPDHDPEPVRTFGTFTDEIRRMADWLAACGIETIVMESTGIYWIPAYEILDERGFDVQLVNARDAKHVPGRKTDVSDAQWLQRLHEHGLLRASFLPKGEIKALRAYLRQRERLLDYAASHIQHMQKALMQMNLQLQHVVADITGVTGMRIIRAIAAGERDPRILASYRNYRCHASAETIRQALVGNYREEHVFALTQALELYDLYQAKVEACDARIEAVLERLRAAVPPPTEPLSPARDRTRQPNAPSFDVRAALHALLGVDLTRIHGLGPYLALKLVGECGTDLSAWPSAKHFTSWLCLSPSNKISGGKVLSARTRRSGSRAASLLRLAARTVGRTPTALGAFYRRLSARIGKAKAITATARKIAVLFYNTLRHGMHYADPGASYYEERYRQRVLATLKRRARALGYALQEIPAEPAVS

SEQ ID NO: 177645 - protein, 346 aa, unidentified
MQATIIGFDIAKSVFQIHGEEPCGKKVLSKRLKRAAAEQYLASLPPTMIGIEACGSSHHWGRLLTEMGHEVRLVSAAYVRPFVKRNKTDARDAEAICEAIQRPSMRFVPVKSVAQQSGRALINARTMLVSQCTQLINAIRGMLAEVGVIAATGQKGFGQLAALLDRADASVPASLLPALRPLLQQWRTAGAAADAIETQIIADAKAHPTMRLLMSIPGIGALTAHAIVMAIGDGKRFKSGRDFAAWLGLTPLMYASGNRTRVGHISCKGDSGLRRLLVLGASALTRPAKSRDASSAQEHWLHGVLARRPAKVATVAQAAKNARIAWAVLTSGRPYQAKRCATTVAA

SEQ ID NO: 177646 - protein, 346 aa, unidentified
MDHGAIDAHKKESQICIAEEGGRLVEKRIASSRERLRAEFGKRPRMRILIEASTESEWVAQTLEELGHEVIVADPNYAPMYATRSRKVKTDRRDARALAEACRLGAYQPAHRTSAEQRHMRDLLAVRDALMKSRSQYIVLIRSLLRIRGLRVRTGSAENFLTRLPWSEMPVRLQESIRPLVQVLEEINRQLACNEKVVLQASKPNPVIRLLGTAPGVGVVTAVQFVATLDQVERFDNAHQVQAYVGLVPREMSSGEKQRRGGITKTGHRRTRAVLVQAAWSLWRSKDPASKPLRQWMERIAARRGKKIAAVAMARRLAGILYAMWRDGTEYQVELLGKRAKLQQAA

SEQ ID NO: 177647 - protein, 333 aa, unidentified
MPEVVVGLDLHLKKTEGTVMSMEGKILKQEKFATSKEDLRAFLKGLPRGTKVALESVGFCWPWIDFIEELGHVPLLVNPIRLKQRAEDVKTDKVDSELLAHLTRMDWLPTCYVPDKEMRWLRNLLRHRAFRKKISTAIKNRIRSELRKRDVKIEGSLDTRKWREKARQLGIYEVSQNLQILELLEGQVKQIEAELQKRYGNLKPVKLLESIPGIGFIIALTLYAEICDIKRFQSPEKLAHYSGLVPRVRQSSEHTMYGREAKANRWRKWAFIEAAWSHINWCPEGRLAKVFENAYRRKRDKKKAIKIVARKLVDIVWAVLTHEEEFKVIPDEA

SEQ ID NO: 177648 - protein, 402 aa, unidentified
MNAVGIDVSKGKSMVAIMRPFGEIVSTPFEIKHTASDIHSLVELINSVEGESRIVMEHTGRYYEVLAHQLSEANLFVSAINPKLIKDFDNDSLRKVKSDKADAVKIARYALDKWQNLKQYNVMDELRNQLKTMNRQFGFYMKHKTAMKNNLIGILDQTYPGVNTYFDSPARSDGSQKWVDFASTYWHVDCVRKMSLNAFVDHYQNWCKRKKYNFSKSKAEEIYGKAKELVPVLPKDEITKLIIKQAIDQLNSSSTTVESLRTLMNETATKLPEYPIVMAMKGVGPSLGPQLMAEIGDVSRFTHKGAITAFAGVDPGVNESGSYEQKSVPTSKRGSSDLRKTLFQVMDVLIKTHPQDDPVYQFLDKKRAQGKPYYVYMTAGANKFLRIYYGRVKEYLSSLPES

SEQ ID NO: 177649 - protein, 342 aa, unidentified
MSISYVGLDLGSSNFLQVALNHRGTPTLNREFTTSAANLVKAFSDLHGEIHVHLEAGELAPWASEIIRPLVTRVVCSHPQTNAWIARDRDKCDRIDAYKLASLLRLNEFKEVHYPREQLRRDFKTLVQHYDELTQQQARLKTKLKARLRMQGVIVRGEEVFSARGRQAVLEQVKSPVVRTAIKQLYAVLDQSIASQTEAQMLMLRAAQALPEIRIMRTAPGVGPIGACRFSAYVHTPQRFSSTRKLWKYCRLSVSHRSSNGKPLRRPRLDRMGCGRLKDVSRKTCEAALRRRDNNGFKRAYQRALETTHDKTHARLTVQRKIVSTLRAMWINQTPYCDELMR

SEQ ID NO: 177650 - protein, 338 aa, unidentified
MLYSGIDLHKHSLVVHTVAEDGTLVREAEFATARPALTAYFATLPGPHRAVVECLGSWYWVRDLVVPQGIDLRLGHAKYLKAISYAKVKTDRVDARTLAQLLRVGLIPEAHMVSAELRDVRDLLRARLKLVTRATRARHAIAGLFTQYNVRAAAELPELVRLQVKLLEDEHTLLTAQVKRCEQELRPRLLPRADVQRLVWIPGIGAVIAYTLVLEIDDVHRFPTARHFHSYCRLVPGADNSGGTTRHKRSRDGNRYLKLAFHHAAVRAIQYVPEIKQEYQRWRRRKGKGIARALVAKELATIVYAVLKKGEPFNGIFHGHVLTTTKRQQWPRLASPPA

SEQ ID NO: 177651 - protein, 457 aa, unidentified
MPRNPKNPRIGGASSVHTIDPNAAGIDIGATEIYIAVPVDRDPHPVRCFSTFTEDLMAAADWLQRCRVATVAMESTGVYWIPLFQILEARGLKVCLVNARHVKNVPGRKSDVCDCQWLQHLHSAGLLRPSFRPSSQVCAVRSLVRYRDSLVQLSAVHLQHMQKALDQMNLQLHHVISDLGGKTGMAIIEAILAGERDPHQLAKLRDPRTHASEETIAKSLVGDYRREHLFTLRQSLTGFRQNSQLIADCDGEIESLLKEFSSGAGPGAGAVSEPQTELKRKPRRNELNFDLRAQLHRIFAVDLTEIPGIHTLTAHVLFTEVGRDLSAFRNVAAFTSWMGLCPDNRVSGGKILRAQTRRVNNRVARALRMAAQSLSRSYGWLGQYYRRMRAKLGGPKAVTATAHKLARIIYHLLTTGQAYDETVFAQQETQNKQRNENRLRHQARKLGFELTQIPMEG

SEQ ID NO: 177652 - protein, 344 aa, unidentified
MSEVSMIGLDIAKHVFHAHGADERGRAILSKRISRGKLLDFFAAQPRCTVALEACGGAHHWARQLTQLGHEVRLIPPAYVRPFVKRQKSDSIDAEAICEAAQRPSMRFVAVKSEQQQAAGLVFRTRDLLVRQRTQLINAIRGHLTEYGWIAPKGPSHVAMLADLIEEDEMANSLPEAAHVMFRLMLDLLAGLNSKIADLDKEIARRAREDEVSRRLMTIPGLGPISATAIVALAPPIETFARGRDFAAWLGLTPLQRSTGGKQKLGATSKMGERTLRRLLIIGSSAVVQQASKRGALKGSWLEQMLARKPRMLVTVALANKMARIVWALLIKRENYRAPVAAKA

SEQ ID NO: 177653 - protein, 347 aa, unidentified
MVSKRSDQSDDAVCTREITEMNVSIGIDVSKEKLDLGWLRDPATNKKKSKVFKNDPKHFEALVLWITKNTKVEPQEILITLEPTGIYHEPLIYFLHDRGFNIYLANPAQANNYAKSQGQVHKTDKLDAILLARFGLQQENRTLWQPEASEIRGLKAMIRRLEALEKDRQRECNRLEASEFSDVSPRVQQSVKDMIVVLEEEIKRLQQDIDDHIDRYPPLKKNRELLETIKGVGPVISREMVCLLASKCFKTAKQLACYLGLIPQIKESGKYKGHSSLSKQGPSRLRAKLYMAAVVSAQHNPLIKGQYERLLSAGKKKMQALGAAMRKLAQICFGVVKNQQEFQPQMP

SEQ ID NO: 177654 - protein, 420 aa, unidentified
MLAESEDEEQIIERVAALDIGKAEVVCCVRIPGPGKKRLQEVSTHSTMTRSLSELANHLVTLGIERVVMEATSDYWKPVFYLLEAHGLAPWLVNARDVKHLPGRPKTDVLDAVWLCKVAERQMLRASFVPPHPIRQLRDLTRYRIDVIGERGAEKNRVEKLLEDACIKLSVVASDIFGVSGRQMMAALIAGERDPKVLAQMARSRMRTKISQLEEAFTGHFDNHHRFLLTRMLARIDAIDADIAAIDAEIEAHLAPFASAAARLDDIPGIGPVAAAIIIAEIGTDMTRFPTAGHLCSWAKFSPGINSSAGKTKGNGSTGHGNRYLARVLGEAAVGAARTDTFLGARYRRIAKRRGKKRAIVAIRRSTLTIIWHLLNDDTATYADLGADHYTRHANPDTKKRNHVRELQALGYKVTLEPAA

SEQ ID NO: 177655 - protein, 365 aa, unidentified
MQQFIGIDLHTNKFTCSYRDETTPADQKKGKRTETFELTAPGLADFYRTLTPDTHVLVEATTPTFAFVRLVRPLVKEIIVANTYELKQISLARVNTDKIDANILSRIIKMQVMSGEQAVSPVAVPPGEIQELRGLFQTYRLYRKQTTQMKNRIHSLLKEKLYGFTQEEIFDKRSREKIRSLESGTALSFQINDLLELLDVLEAHLESVKDEIQFRAEPYMKEIRILTSMKGVSVFIAAAVVADIISVDRFKNSKMFTSYLRSAPRVSNSNTSVSIRGTNKKGRKLAATLLTQSLRHVLAGSPKLNRWYTRLAEYKKAGLVRTGLRRKVLAEMYQMLKKGEYHYGRDPLKHEAKLRLYKKFLDNGL

SEQ ID NO: 177656 - protein, 423 aa, unidentified
MTKLTSTPAGAVLVAIDMSKSRQEVLIERPEGGRRRRMTVMATRQDYDGFAEQLAAIGRPIIVGFEATGNYHRTLAHRLLTAGFELRLISSVALARTREALHNGWDKNDSKDAQVILHMLRIGATQRYVDPLVAGINDLQELSKTHETISRMKTQTWHRILTHYLPLYFPEIARFAGNSRSDWFLALIERFPTPATITALDREAFSAAAWPLIGRKVSKARLINDIYETASASTALPVPESSAAITMFRMVIAQGRSLIHQRDEIERLAHARLADDVDYQLLRNIPGIGPINALTILAEAGDLRRFNHHRQFLKFCGLDLATCQSGTFRGRTKLSKYGNARLRRTFWMAAQVAARQRDNSFRNKLGRYVAGHADDADRRRKAMTALTAKMARVAHAVIKTGTEYRPFLERSDARWKDPSLQVP

SEQ ID NO: 177657 - protein, 349 aa, unidentified
MKIVGCDLHARQQSIAMVDTETGEFTEKTLCHEGNAVRAFYASLEGPVVVGIEATGAMQWFLELLDELGIEGRVGHPAKIRAQETRKQKHDRRDARLLLQLLSEDRFPEIWMPSTEQRDLRTLLRDRDQWVRMRTRVQHRLQAIALNHALRQGRALWSATGQTALEALPLPPYTRQRRDELLALYAQLQKRIQELNKEVEAQARQRPQARRLLTHPGVGPVTALATDVFLGDPSRFATGNQVASYIGMIPSERTSGKRQRLGKMSKQGNALLRYLWTEAAMSTVRKDPELQRFYRRKLIQKGMGKARIAAARKLGIRLWIMMRDQSDYQEFCRRGKLRQTGETHAGMPA

SEQ ID NO: 177658 - protein, 378 aa, unidentified
MSSLIYVGMDVHKDSFSLCCFDLNSGSYFGETKIDAKANLISNYLDAQTKFLIEQGYEDIKFITAYEAGCLGFSLHDQLTKLGIENKIIAPTTLLKGTGQGKKKTDRKDAKMLAQNLAYGTCSFVHIPDEEDKRTREFVRMVSHERKLLRKEKQYILAFCLRNGFDYKDGKAWTEGHINYLKTVQIENFLRETLDELLDSYNKILEKIERLNNRLEKIANTEKYAEGTKKMACLKGITQTSALTIISEVSDFNRFATAQEFSSYLGLVPGESSSGQKTNRLGITKMGNSIVRTLLIEASQSIVRGQPGYKSKRLKARQVGTDVSVISYADRATQRLMRKFLRLIAKGTNRNKAIGAIARELSCFIWGIMTNHLEERKA

SEQ ID NO: 177659 - protein, 320 aa, unidentified
MRNAVGLDISKTTFDATAIIGGIEKSAKFDNDSKGFEQFKDWLEKLNCPDAHICMEATGNYYEGIADYIGSLYKVSVVNPLKISKYAESRFTRTKTDKQDAKLIAEYCQTAKAQDLVIRKPVIDDGYKLKRLSALYAQLTADSTAQKNRLEAAKDTFVVKICQSNIKHLQRQIKAVKKELEKLTKKTALKDQTDRLATIPAIGRLTAVMLLNYLSGTDFPTSNKFAAFAGLTPQIKDSGTSVRGKPSLTRYGNRRLRAMLFMPAMVAYRIKAFPDFIARLEAKNKPKKVIIAAIMRKLAVIAYHVHKKGEDYDPTRYKAA

SEQ ID NO: 177660 - protein, 341 aa, unidentified
MFIIGCDYHPSVQQIAWVDTENGDCGELRLSHCEAAEQFYRELRKKGVSVRVGIEATGHSRWFERLLGELNYELWVGDPAQIRAKRVRKQRNDRFDAQHILKLMLENNFPHIWVPTPENRDVRQLVLHRHRLVGMRTRVMNQLQAIAMNEGIRRKRGLWTEKGRAQLESLRLPPWTTRRRQELLELLDGFDPSIDQLSQAIEQEAERMPEVQRLQTHPGVGPITALAFVLVLGTADRFRCGKQVASYLGLIPCEDSSADSWRLGHISKQGNALLRYLLGQAAQVVARCDPEWRGQYAHIAMRRNKSIAKVAMARKLAVRLYWMWRRQWDYQQLKQFGSYVG

SEQ ID NO: 177661 - protein, 412 aa, unidentified
MEVLYRCCCGIDVHAKMLVACLLKQGRKEVRTFSTMTADVLHLLDWLNQEGCTHVAIESTGVYWRAVFNILEGAMEVILTNARDAKGYKARKTDVIDAEWLADLLRHGLLKASFIPPLPIRELRELTRYREGLVREQTTLANRIQKLIESANIKLGQVASDALGASGKLMLRALAAGETDAAQMSHLAQGLLKRKQPQLQSALEGRFTEAQRWILTELLDQYDHVEAARQRAEARIKQEVENSADPFVPEALPLLDTIPGVGETVAQIIVAEIGVDMERFPTANPLASWAGMCPGNQESAGKRKSGKTTKGSRYLRAALVQAAWAASHQKGTYLAAQYKRLVKRMGKKKALIAVGHSILGIAYHVLQTHTPYQELGGDYFERRNRDKQRHRLIRQLESLGVKVTVEEIKEAA

SEQ ID NO: 177662 - protein, 327 aa, unidentified
MLGIDVSKDTLSCALLDHTTRKLIWQKEVKNTPAGWKQLLRLTAPDVTWVLEPTGRYGQEVVRAAQAAQRDVRLAQPKRAQYFLKSVQDRAKTDTLDARGLALYGLAFNLPTYPLKSDMHEEIDQLLAARRGLSQSLMELQARQRDLPRAASTLKPAVDALKEQLRVVDKQIAVLVEAPEMKMVQELLKVPGIGPVTASTVVSCLTSRGFTHSDQFVAYCGLDVRVRQSGRKSGHLGLSKQGESELRRLLYLAAQSSIRAKESPFKAQYDHERDKGLPSTAAICAIARKMARLCWSIVHHESSYDAQRIYRPAEPTPKKLTENQKND

SEQ ID NO: 177663 - protein, 391 aa, unidentified
MILVGVDVAKDKHDCYIMTSEGEVLFKSFTIANNMEGFNQLYEKILSVIDNFDNVKIGLEATGHYSYNILGYLLDKGLTPYVINPLHSNLYRKSLSLRKTKTDKVDSRIIASMLMSDVSLKPYSNTLYHNEELKSLTRYRFTKVQERAKLKISISRLVTILFPELEKLVPTLQMNSIYALLYEFPSAHAISKAHLTRLTNLLNTTSKGHYTKDKAVLIREAAKNSIGLNMPAKSLELKHTIKLIKELTSEINEIEEEIKIIMNKINSPILTIPGIGLSTGAQILAEIGDFKNFSSPDKLLAFAGLSPSTYQSGNMYSSNAKMEKRGSKYLRFALFNAAIYVSYWEPTFSQYLKKKRVEGKHYYVAISHVVKKLVRVIFHLEKTNERYSTVV

SEQ ID NO: 177664 - protein, 344 aa, unidentified
MQHYVGLDVSVKETSVCIVDKAGKVIREVKVATEPVAILAVLTEEALAIERIGLEAGPLSQWLYSALAEAGLPVICVETRHMKAALSAQINKSDRNDARGIAQMMRVGLYRPVHVKTLASQKRRMLLTSRQLLQAKALDIENDLRGTLRNFGLKVGMVGTVKFEARIRELVADHPDLAAIVEPLLIARRVLREQLGVLHRQLLEIVRHDEVCCRLMTTPGVGPVVALTFRATVDVPSRFTSSKAVGAAFGLTPRRQQSGEIDRMGGISKCGDALMRETLFEAALVLMTHRGKWSWLKAWGMKIARHRGMKGAIVAVARRLAVIMHRMWVDGTEFRWTREEAAAT

SEQ ID NO: 177665 - protein, 410 aa, unidentified
MEVLHPHCAGLDIHKDSVVACVRHMVEGKVTSQVKTFKTTTQELMALSDWLSAEGVTHIAMEATGVYWKPVWHILSDGEFELVLANAAHVKNVPGRKTDVNDATWLADLMAHGLIRPSFVPDEPTQQMRDLLRTRKQFVRERTGHTQRIQKTLEDANIKLDSVISDIVGISGRRMIEALIAGRTDPQALAALADGRLKATPAELEASLRGRVTAHHRFMLRLHLDQLDALDAAIGRIDKEVDSNVEPFRVAIEMLKTIPGVSRLSAEVIVSEIGIDMSRFPTEGDLISWAGLCPKNDESAGKRRSTRMKKGAPWLKTTLVQCAWAATRTKETYLHAQYLRIRSRRGAKKAIGAVAASILTAAYHMLKNGTLYEDLGANHFDKRAKGRHVLKLVNRLKNLGFAVQITPMAA

SEQ ID NO: 177666 - protein, 442 aa, unidentified
MTTDKETRLERRSDRRLLVMPRVVTTQTRGRWEQVLLVGIDWADKEHVYCLMDDAGTTLATGTVEHTAEGLERFMNAVRARVQTPHDILIALETPHGPLVGALLDQGFTVYAINPKAVERHRERFRVAGAKSDLRDAWVLAALLRTDRALYHPLTPDSDVAQELRALTRDRADLVRTRTMLSNQLTACVKAYFPEFLTLFSDPDRPVALALLQAFPTREHLQAAPRAELETFLRRHRCPHSRKRAAAIHERMQAPGFHIASPIVRAKARLAATLVAQLQTLGEYLDAYEREIQRVLRLHPDGELYLSLPGAADVLAARMVGELGDNRDRYRDPNIAQCEAGTAPVTKKSGSTRTVHFRRACIHPLRETLWQFAFSSLRRCGWAQAYYNQARKRGKKHAEAIRMLGNVWLRIIIAIRRNRRPYDEEVLQKARLRHGTPGLCFA

SEQ ID NO: 177667 - protein, 347 aa, unidentified
MRYVGVDVGKRKCRAAVVDGDGVLIKEFSFVNDFSGIEGFVRELSEGDAVVMESTGNLWLNLYEAVEGQGVKAVLANPLKMKAIASARIKNDKVDARVLASLLRGGLVAECYVPPRDIRELRALVRHRVHLARSATIVKNRVHSLLDKYGLRHGFSDVFGKAGMEWLRRVELKPLDRLLLDSYIEQIECLERLIKNVEVEIERRASVDEDVRLLLSLTGVGVYSALLIKSEIGDVRRFPNYKKLVAWAGLAPSLYQSGSVERRGRITKQGSKLLRWVMVECARVAVVHDARLCEFYERVKRRRGEQKALVAVACKMLKIIWFMLTRREPYQSMNARLYGDKLYRLSR

SEQ ID NO: 177668 - protein, 387 aa, unidentified
MPQPNDLSRSLVALDQNSTIIAVVELSQSSWLVGGVVPGIERQPRKKLEPNPERLLALLHRWQDEAVRAGHTITRIAVAFEAGRDGFWLARWLAARGVEAHVIHASSVAVSREHRRAKTDRLDTELLKRGFLGWLRGERGHCSMARVPTIAEEDAKRPNRERDCLVGERTRIVNRIKSTLARLGIRSFKPTLRKAAERLATVHTPEGVPLPPNTLAELQRDMARLGLVVSQIRQIEDARQKRLEQQHEAGPHAMVRLLARIVGVGVETADMLVHEVLSRPMRDRRAVARYAGLTGSPDESGARRREQGLARAGNARVRRGMIQLAWRFLMFQKESALTLWYRGRTADSRRGTRKTMIVALARKLIIALWRFVTTGEPLEGVVLRPAT

SEQ ID NO: 177669 - protein, 313 aa, unidentified
MPVSLSKPIVGVDVAKNELVIYQSDGDFLEEIPNTRTSIKQWLKALSGTVAIAIEATNIYHLDFADLAYEAGCTIYMVGGYELKHYREGVKIRAKTDALDAKLLARYLKNEAEELRPWTPPSPLYRQLLSLFRRRAALVQARVGLVQSWSNEPLLKAAFAEQVKSMQQLETLIEKTINDQLKEAGLLGQLKRCLKVEGIGFLTGARLITAFQRGDFRNADAFIAFLGMDLRVAKSGQKDARRSLTKRGDPEARRLLHNAAMSASRTKAWKGYYEEQRTRGFSTTQALVMLARKLARVVFALLKGQSEYQPKTS

SEQ ID NO: 177670 - protein, 427 aa, unidentified
MSYRIAGIDVHKKMLAVVVADVEVESEYTFERRKFSSTPEQLRSLSTWLLEQEVEEVVMESTAQYWKPVWGALERYWKPPCEKREGARRKSGTLHLAQALSNRGRQGRKRDFPDAERLVKRLVAGELTLSFVPDAEQRLWRTVSRKKYQLRCDRIRLQNQLESLLEEAHIKLSSLVSDLLGLSARRMLEAIAKGETDPTTLAALADQRLRATPEQLRDALGACTELNSVYRRLVKMALEELRLIDKQIGRLDQEMAGLLSKHQDAVQRLVPGLGVDSAQQIIAEVGPTAASFPSEKCLSSWVGACPGDDESAGVNHSHRSPKGNRHMRRLLNQSANAAARTKGSIFEVVYHRSVPRLGHNQAIGAIAHRQCRLIWLILHQGVRYEERGTEVSKRSKQLRTWKMLRQLRKLGYRIEPPNPQPSQAPAQ

SEQ ID NO: 177671 - protein, 343 aa, unidentified
MQTITTIGLDIAKSVFQVHGVDAGGQVIVRRQLKRRHVLTFFQKLSPCLVGIEACASSHHWSRELQALGHTVRLIPPAYVKPYIKRQKNDATDAEAICEAVTRANMRFVPTKTPEQQSGLVLHRARHLFIRQQTSVINAIRAHLAEFGIVAPVGRHGVEELLNVVADPSDKRVPEMARACLLAFGAQLRRIKEQVLEFDRLIRAWHRSNEVSMRLDEAPGIGPVLATAVVATVADPTSFRSGRNFSAWIGIVPKQHSSGGKNRLGNISKQGDRYLRGLFVAGALAVIRYAKIHGAKHRPWLTALLERRPTKVAAIALANKLARMVWAMMVKGERYKEPVALAR

SEQ ID NO: 177672 - protein, 310 aa, unidentified
MDAIFVGIDVSKDRLDVHVRPSGEAFVVTRDGKGLEELVERLRALVPRLIAVEATGGFETIVAAAVGGAGLPLVVVNPAQVRHFANAIGRRAKTDPIDAAVIALFTEAVKPELRPLPDEAQRLLAELVGRRRQIIEMLVAERQREKRAANVPVRKSILRHIKVLEKELPEIDGDIGTLVRGSPVWREKQDLLVSFPGVGDKLARTVLAELPELGDLTRREIASLVGVAPYTRQSGHWKGRSMIGGGRAAARAAVFLAALVASRHNPVLKVFHQRLRAAGKPKMVALIAVARKLLTILNAMLRDKKKWQPA

SEQ ID NO: 177673 - protein, 370 aa, unidentified
MANRSMFVGMDVHKETIDIAVAEGGRQGEVRHYGVIATDLEALDKVVRALQAPSRVVHFVYDAGPCGFGIHRHLTGHGLDCVVVSPSMVPKRSGDRVKTDRRDSVTLARLHRAGELRAIHIPDALDEAMRDLVRAREDAVVVATQAKYRLKAFLLRQGRRYPGRAGWTIPYRRWLADLSFSSAAQHIALQEYRDAIDETERRIERLTEQVRQLAPTWRWAPLVAALQALRGVSFITAMGVVAELGDLTRFGHARELMAFLGLVPSEYSSGPSVRRGGITKAGNPHVRRLLAEAAWAYQGLPRIGRQQLYRQEGLPKVVCDIAWKAQLRLTGRFRRLVARGKSKPKVATAIARELSGFIWAIAREVRPASA

SEQ ID NO: 177674 - protein, 353 aa, unidentified
MRTYYVGMDVHKATIVIAVLDAFGKVVSQTIIETSTQAVRDFFKSMRGEIYVTFEEGNHAAWLFDVVQPLVKHLVVCNPKHNHLLKKGSKYDRIDARKLAELLRLNALKPVYHGGHGTRTLKELVRCYECMVKDLCRVQNRLKSLYNSQAISNRRGELYHLSKRESWIKKQDNVGRKMRAELLFRQMDELKVLKRAARKAMIVESRQHQAYGILSQVPELGPVRVAQIIATVDTPFRFRTKRPFWAYLGLAVESRSSADHEVMNGRVGRRKVKIETRGLNEDYNRRLKSVFKSAATHACSCGVYKEYYTRLVEGGMRPEMARLSVARKLAAAVLAVWKKGEVFDEAMILSKAA

SEQ ID NO: 177675 - protein, 338 aa, unidentified
MKTYAGIDLHSSNNYIGVIDAKDKRLYSKRHDNRIEDVLKVMGKFKASLQGVVIESTYNWYWLVDGLMDQGYTVHLANPNAIQTYDGLKHTDDKWDSFWLAHLLRLGILPEGYIYPKHQRPIRDLLRRRLMFVRQRTSQILSLQSMITRNRGLNFSGAQIKRFRDEFIEKLFSDRHLVFTAKRNIETIRFLDRIVGEIEQEVASQIKIKKEFIKLLTTPGIGNILGLTITLEVGNIGRFPKAGNYSSYCRCVESKRTSNGKKKGKNNRKNGNRYLAWAYVEAANHAIRCCPKAQKFFQRKMAKSERVLATKALANKLTKATYYIMRDQVAFDEDKLFG

SEQ ID NO: 177676 - protein, 316 aa, unidentified
MDIASKSLEARIGQQGAAGSFANDAEGIAALGDFCRTHQAELVAMEATGGYEQQAFAQLSGQGLAVAILNPRSVRQFAQSMGSLEKTDRIDAGMIAWYAEVKKSQPVCLAPENQQHLRALVTRLRQLTEMRAVQLNQQRLVTDRKVQASFKKLLALLARQIGELEQSIAVLLEKDPLWRELDQAFRTIKGVADRTVARLMAEMPEIGTLSNKTISKLAGVAPLANDSGKHQGKRAVRGGRAAVREILFIVASVVGRHEPDFIAFRERLRAAGKPPKVVRIALAHKLLVRLNAKAREVRQQLAVIQPNSAVLLAESR

SEQ ID NO: 177677 - protein, 337 aa, unidentified
MKVTLIGVDLAKTIFQVCGVNQAGQQVFNRQIKRDKLIIFLAQYPGVTIAMEACSGSNYWGRELEARDHKVMLIPPQHVKPFVKGNKNDRNDAFAICEAARRPHIRCVQPRSLSQTDTMLAHRILERRINERTALINQLRGLLNEYGIVVARGKEQLRRELPFILEAADNGLTAIGRQYLCRQLEEWQAADEAIALLEKAIRQHVRHSEHATRLMGIKGVGEKISSAAEAFVGNGSGYKSGRHFAANLGLVPKEHSSGGKQRLGRITKRGNLYLRRLLIQGAWSVIRYADRGDDRLSCWARQIIARRGKHKAAIAVANKLARIIWAISYHQTDYKAA

SEQ ID NO: 177678 - protein, 320 aa, unidentified
MLSVCGIDVSKERLDVMVLPEQQCSSISNDPAGWAELIEQLRGFSVGAIGLEASGGHERGIMRALLAAAMPVRRINPFRLRQFANASGVLAKTDRLDARMIAAFVAIIPTRPVERPAPVVERLAEALRVRRQLSHEKVAAENAAGMMENAVLQRLSRRRIARLAADIDMLDQHLVEIVSTDPALAHRYQLLTSMPGVGPVLASTLIALLPELGQIGRKQIAALVGVAPYAFESARLKGKRCIWGGRAPVRHVLYMAAMSACNWNPVLKAFHDRLAAAGKLPKVVIVAVMRKMLTMLNAMVRDDVVWADRHSGRHSMPTAR

SEQ ID NO: 177679 - protein, 369 aa, unidentified
MGQKSSKLYVGLDVHKESIDITIAEEGGDVRHHGQIGGDANALWRAVRKLESSGRKLVFVYEAGPCGFGIYRGLMKRGHVCWVVAPSNTPRRVRDRIKTDRRDSAKLAGLARAGELTPIYVPDVSDEAMRDLVRGREDAVVMQRQARQRLAALLLRNDVRYGGKTAWTAAHRRWIADVRLVQPAQRLAFEEYVQAVEEARVRVERLTGYIVQEVAQWRWLPVVNALQACRGIQLLHAVRIVAELGDLSRFGHPRQLMSYLGLIPSEDSSGERRRQGSITKAGNTHARHALVAGAWAYRYPATVSRHMQLRLEQLPKPSQDLSWKAQVRLCKRYRRLMARGKHANQVVVAIARELVGFRWAIAKEGPIAP

SEQ ID NO: 177680 - protein, 401 aa, unidentified
MKRLSGGIDIGSASHHITILDEEDHILYNQKVSHQLIEFTQTIKQFKKIEKKEKGKISFALEGKNGYSAPFDRILLNQGFTLYNVDNFKLKKFREAFAGEWKDDKRDALMLSKMLKLKEHINSPREKVFIKIEKPSPVTESLKLLSRHQQTLIDERVRLTNRLSKKLLEVCPEILKLGKVKYKKIVTILVKYPDFSKYKRITLCSLLKIKGIGKKGVPFLLKRLNHIEYVPGLTNIYKTIILSYAQRILELREEIEDIDKKLDEIGNQSKEVNHLKTIPGVATKLASRFIGEIGDINRFPSEKQLAIYCGIACIDNNSGKVTKAKVVHKANKICKQTLINMAGCSIRFSPQCKTYYLKKRTEGKNHNHALRCLARQLIKVIYRMLTEDREYIVTKELSKAA

SEQ ID NO: 177681 - protein, 303 aa, unidentified
MTQTNNSLSFVGIDVSKQKIDVARRPNGKHCEFTYNADDIQALIDTLKTWGPVFVVLEATGGLERPIVAELASAGIEVAVVNPRQVRDFARGVGKLAKTDPIDADVLAGLPRSCGPLPVKKFRKNSGNCRNWSTRRQQLIAIRTAETKPQREPPRPRSLVALGKKCSKPSTRKSPNSTKPSPSLSGKTTMTGDARPSCYKSVPGVGQSLSCNLLATLPELGNLNREQIAALAGLAPYNHDSGKLKGKRSIWGGRANARQALYMAALTARNLQSDHQGFRKRLEATGKLFKVVITACMRNCSSS

SEQ ID NO: 177682 - protein, 338 aa, unidentified
MSIFAGLDVSDKTTHVCVVDADGAVLKRDFVASDPDLLAKWLGKHFPGLIRIVLETGPLSTFLYHGLVERGIPIECICARHAKGVLAARVNKSDVHDAEGLAQLARTGWFKRVHMKASATHIDRAALRIRAQLITTRVAMGNQLRGLLKLFGLRLGAARTPGKRRERLIALYQQRPDLEPLFSPLIASMEVIEEQLRASNRLLESRATEDIVCRRLMTVPGVGPITALTFAASVEDPHRFTRSEDVGAYAGLVPRRSQSGERDVRGNIFKAGDPMLRRTLYEAANIMLCRVQRPFALQQWGQRIAESKGNKRARIAVARKLAVLLHSPWVNETEFRWA

SEQ ID NO: 177683 - protein, 419 aa, unidentified
MSFKILKFNCCGLDVHKTWIYACIGITDSNNRTEYKQARFSSFTKGLNELCDWLAKYNCTDVCMESTGKYWIPVFNILEQHNLWVTLSHPKYTKPMKGNKTDRKDAKWICDLYMCGMVKPSFIPPADIRELRDLVRYRYKLTCMITGEKNRAQNCLTVSNLKLDDVFSDVFGKSSRSITEQILQHPGEKFDVAPFVHGLCKTPIEEIQAAVDGAISKEQAVKLRQCLDHIDELNKHISEVEQEILRLSDKYEAALNLIRTVPGFNKNPMTAIQVLSEIGCDMSVFPTDKHLVSWAGCCPRNDKSDRKIKSTRISRAGSYFKPVLVQVANALIKSKKHPEFITRYKRIKARRGHKKAIIAICRMILTAIWHILSDLKPYTPEGFLESRPVKEEKILTISQALNLLKLRGYVIKDAPLPTS

SEQ ID NO: 177684 - protein, 387 aa, unidentified
MQSATSATAVATTARANDTTLFASLELSKSKWVVTINSPGSEKFSKHLVEGGDGAGLIDLVSRSRAKAEQRCGMQVKAIVIQEAGLDGFWIHRLLLAHGIESHVVDAASIAVDRRHRRAKTDSIDGEMLLRALMAWARGERRVCSMVRAPSLEEEDRRRLTRERGTLLKERIQHTNRIKGLLSGQGVRDYNPLRRDCFERLEAFRTGDGRELPPMLKAEIRRELDRIAVVTTQLATVERARDALIGTDAEERNNPAALLLKLKGLGPEFASLLWLESLFRNFGNRRQVAAYGGLAPSPWQSGGVERDQGISKSGNRRLRKTMIELAWFWLRHQPDTALSRWFHTRVGAAKGRVRRIAIVALARKLLVALWRYVTQGVVPEGAVFKAA

SEQ ID NO: 177685 - protein, 410 aa, unidentified
MINVILERCAGIDVGKKFVVVCLMVGQAAETPRVEKRKYGVTVDALEDLRAWLEQEQVTHVVLESTGSYWKPIFNVLEKSFPVVLANPVHVKNLRGHKTDMKDSEWLAHLLRHGLIRASFIPPPQIRELRSLTRQRRDWIAGGARERNRVQRLLEEANIKLGNVLSDLFGVSGQRMLEALVDGKASPAEIADLAIGKARQKIPELRQAIEGHRLTPTLRFLIGQNLRHMEFIESEIAILDEQIGVMLQPLTPEMKLLESIPGIDTVSAATILGEIGTDMKQFPTAAHLASWAGLCPGNNESAGIAKSSRTRRGNHTLRAIINQCAWAAAHTKNTVFQTRYQHLVPKRGNKRAVIAVAHHLLVVIHTLLSRATPYHDDGWTPKLRRRLYTRRARYHIHCLRRLRERISATE

SEQ ID NO: 177686 - protein, 340 aa, unidentified
MPLYGGIDLHANNSVIVLLNEQDEVIYRKRLSNNLPVILGQLAPYHAELKGLVVESTYNWYWLVDGLMEAEYRVHLANPAAMQQYSGLKYTDDHSDARWLAHLLRLGVLPEGYIYPKAERAVRDLLRKRAHLVRQHTANVLSVQNIMARNTGARFSVKRIHALTKQELQSLLAEEPQVLAVTSSLAVLDCLKHQIKTLEQTVHKRLHHTPPYEQLLTVAGIGTILAQTIALETGEIRRFSTVGNYASYCRCVDSTKLSNGKRKGTGNVKNGNPYLAWAYMEAAQFALRFQPAAQRFYQRKLAKSRNNTVLARKAVAHKLSRACYYMMRDLVPYEVTKAFG

SEQ ID NO: 177687 - protein, 347 aa, unidentified
MNYCGIDLAGVSSYAFVTDEKGTKLWSGPIATEKVAFERLVKKFAGGGLSIAIEAGNQTAWVHEELVKLGAEVTVVHPTKVKLIAESRRKTDKIDAKILCELLRLNALPHPVHMPGPEARELRGLLVARRQLVSARSKLSNVARGMLRQTGVRLPAGGLSSLAGWKRLLAGGFDQEHLLIIVSAYYDSFRALTKSIRELDRQLAQREKSEPRAQRLKTIPKVGRIASLTFLAAVDDVKRFSSSRKLVGYSGLAPTVRQSGERTEYGAISREGRSELRAVWVQIAHLVARDKTKATQPLRSWFNRVAKKRGKKTALVALARRLLVIAYQLLKTEQDFDVGRLKKKRAA

SEQ ID NO: 177688 - protein, 361 aa, unidentified
MVYIGVDLHRKTTQVAAVNGGGELLVNRKVPTSGPDILRVFGEVVAEAPPTAVAFEATFGWGWFADLLRDAGIEVHMAHPLATKAIANARVKNDAVDAKTLAHLLRAGMLPEAWAAPLEVREARRLVRMRTSLVRMRSRIRAQVHAVLAEHGVATPMSDLFGKEGRRLLEELRLPELSQGRLEACLRLIDDLGKEIEIADTEILARFETDPRTRRLLPIPGIGPTIAAILLAEVWDVSRFPSAEHLCAWAGLTPTERSSADHTRRGHISKQGSRWLRWVMVEAAVRALGNPQLGVFYTSIEKRRGSKIARVALARRLLTLAYYALRDEGGCRAFPVPTEIPRGRARSLIDMASRGTAAIAD

SEQ ID NO: 177689 - protein, 419 aa, unidentified
MKHIQTKKVKVVNDKTLIVTVDVSKDKHMGYTRCPDRTETKPFEFFNNGRGFNEFWNRISMVKKANNLEEAIVGFESTGPYAEPLIQFPKRRDVKLVQVNPMHTKRLKELQGNSPNKTDNKDPKVIADIIELGHALTVVVPEGVAAELRRLTQARERSMQRRTALLNQLQGLVFIIFPEFLQIMKDIKTKSAQYLIKHYCTPYGIEECGVESLTHTLRKISRGKVGKGRAEELFNAAKTSVGITEGQRSIVFEIKEILSHIEACERFSDELEKEMTQNLEQIPYSRFILSIKGIGDVTAAGIIGEVGDFSKFNTIAEIEKLAGLDLFEISSGKHKGTRRISKRGRSLLRKFLYFAAVNVIRKNGILHKEYQAFVDRGKPKLKALIAIARRLLRIIFALVRNHSEYTVNYSKPSQLKMAA

SEQ ID NO: 177690 - protein, 400 aa, unidentified
MFVGWDWASTTHDVTVIDDAGNIVDRWAPEHTELGLDATMARLTRHGPPEQLPVAIERPSGLVVDRLLAAGHPVIPIHPNAFHAARPRWGAAAAKSDPGDSFKLADYLRTDGHRLRRLRPLDAATRELQALSRLRDDHVAAKTAASNQLGALLEAHWPGAKQVFSRLGSQIALAFLDAYPTPESAARLGEARLTGFCRRHSYRGGRRPAELLGRLRSAPAAPVGLAPEVLAELVAAQVRLLRTLLGTIAELDRALGAGLLGHAKAGLLAPLPRIGEVSLAQVVAEVGPILDRASTVEHATAECGAAPVTKASGKSKAVTFRWAANTNARNALATFASNSRHSSPWAAKVYADARRRGKHHPHAVRILARAWLRVMWACWHNDTIYDPARHGAERRLAART

SEQ ID NO: 177691 - protein, 341 aa, unidentified
MICVGIDVAKDKHDCFILSSEGVSLADVFTIPNNLEGFNTLLDKLHACSTPQDSIKVGLEATGHYSYNILGFLLDNGLATYVLNPLRTNLYRKSLSLRKTKTDRVDARTIAAMLLSDAGLKPYTDTAYHNEELKSLTRYRFDKVNERAQLKQSVSRLVCILFPELEKLVSSLHTASVYALLEEFPDARQIAAAHLTRLKTLLAEASRGRCGRDMAVEIRNAARCSVGSRMPAKSLELQHTIRLIRELDAEIEEIETAIQAIMEELHSPITTIPGIGYRMGAMILAEVGDFSRFDSPDKLLAYAGMSPSTYQSGQLKNCYPHMEKRGSRYLRYALYNAAKYR

SEQ ID NO: 177692 - protein, 359 aa, unidentified
MNQEKYIGMDVHQATISVAVMDNSGKLIMECILETKAATILEFLDGLRGSLSVTFEEGTSAAWLHDLLKPHVTRLVVCDPRKNALLKDGSKSDRIDARKLAELLRGNQLHAVYHGEHGVQTLKELGRSYQTLTQDVSRVMTRIKALYRSWAIPCSGATVYAPRYRAEWLAKILQPGVRLRAERFYQQLDLLQPVRQEARRDLLSESRKHPAVKLLRQIPAIGPIRAAMLVALLQTPHRFRTKRQLWAYSGFAIATHDSGEYRYVRGKLQRNRERITVRGLNGNHNHDLKNLFKGAALSASTRPGPLHDFYVALLEKGMRPTMARLTLARKIAAITLTIWKKGVSFDAQQCIGKPLERFW

SEQ ID NO: 177693 - protein, 352 aa, unidentified
MDDINTAAIVIGVDTHKATHVAVAINTQGARLAALSIPATAKGYQELESWSRALGKIEAFGIEGTGSYGAGLSRSLLLLGHKVIEVTRPNRQLRYRHGKTDSLDAEGAARSVLNGQAMAKPKTQTGPVEMIRHLKIARDTAVKCRTQAMVTLKTLIINAPTELRGVLDSIKGKITLIRYVAAFRPGKITSTTASAKAAMRALARRWLMLHEEIQTHDKELERLVIAKMPSLMASHGIGTMTVAEMLILVGDDPSRIKSEAALAKLCGVCPIPASSGKTNRFRLNRGGNRQANAALYRVAIVRMRNHEPTIAYVRKRTQDGKTKSEIIRCLKRYIVREIYRHICTPKMAPAIT

SEQ ID NO: 177694 - protein, 345 aa, unidentified
MLYVGLDLSRKRLDWQALDQAGELVAVGAAPPDRDGLAQLARRLGDCEIVAVIESMSGARFVHDELERWGWDVRVADASKARGIAPLACKTDRIDCWVLAELARRDLVPEVWLPDAAVRAERERARFRLYLVRHRVSLKNRVHAILFQHGIPVAHSDLFGAAGRRTLERLRLPEPWQSTVCCSLELIDTLNTEIRDCERELKRLGADHPYVSRLVTCPGIGPVLAYTIASEIGDIARFQSPRKLVGYTGLCPRVDQSGERDRRGALRKNGPTYLRWALIEAAHVAVRCYPPYRELAETMRDRHGRARGGNIAAVETGRRLSEAIWHMLTNDQPFAPAGARYRLAA

SEQ ID NO: 177695 - protein, 338 aa, unidentified
MFIIGIDPHRGSHTATVLDGAEEVLDQLRVNADGRQRDRLLDWAAPFAPRLWAVEGATGTGSLLAQQLVAVGERVVDVPPTLSARVRLLDSGRSDKTDSHDARSAAVVALRHQSLRQVQAQDHLAVLRLLAKRHHDLIAARTRAVCRLHSTLCYLAEGHFPRRMTTSQGAAILAGIRPRDAVSIERKALARDLLAEMRRADRDIAELRARIKTAVAASGSKVTEIHGVGPVVAAYLLGHTGEIGRFPSAGHYARYNGTAPIEASSGPTKRHRLNPRGNRQLNHALHMAAVTQVRNDTPGRDYYLRKQAEGHSRKEAMRALKRRISDAVYRHLLTDTGR

SEQ ID NO: 177696 - protein, 394 aa, unidentified
MQRDTKEVLAELVGKLKEKLDPKVGAARAGKKNQRGELRPNLDRLRVGVDLGDQWSHYCILGLEGETLAEGQLRTTAQDVAEFFEALNAARVVVEVGTHSAWVREVICGYGHEVLVANPRLMEGSKRRKRKSDRIDANKLARLGRVDPQSLYPIRHRSREVRQDLVVLRARDGLVAARTELINATRGLVKSMGNRLPKCSSPSFAQKVEEAVPAEIREALLPLLPMTAALSDCIQGYDEKMEKLASEKYGHTALLRQVKGVGPITALAYVLTLENPERFATSRDVGPYLGLVPKQEDSGESQPQLGISKTGDTMLRKLLVGSAHYILGPFGPDTDLRRYGLRLCERGGKNVKKRAAVAVARKLAVLLPCLWVSGEVYEPLRQGMSARIAPAVAA

SEQ ID NO: 177697 - protein, 341 aa, unidentified
MNKHNVIAVDLAKRVFQICVLDKANKVISNKEIRATRFHQFLARQPTSLLAFEACARAHHWARIAENYGHQVMIIPAQVTANYRQGQKTDHNDALAIAVASRQPSLKTVGVKSLDQQSLQTNLRLMQHVSDQRTATGNSLRGLIAEFGIEIPQGISALKRHMPTILEDAENGLPLSCRDALYEVWQLWLKLERTLSQIEGKLVELVIALPVSKRLLALEGVGPKNAAALYAELGNGSHFNNGRNAAACIGLTPKQHSSGGQVTLGGIGRHCGNQRLRSTLITGAHSMIQALSRRSAKTVKEQWIVDLVARRGKGRAAVALANKNVRTAWAMLKNNESYQAV

SEQ ID NO: 177698 - protein, 386 aa, unidentified
MQYPNDSRRCLIVLDQDSTLIAVIEMSLSSWLVAGIVPGIERQPLKKLEADKHALVKLLHRWRDEAVKAGRKITRIAVAFEAGRDGFWLARWLRAHGIEAHVIHASSVAVPREHRRAKTDRLDTEMLKRAFLGWLRGERDHCKVVAIPSLAEEDAKRPNRERESLVGECSRLVNRMKAAFVRLGIRGFNPKLKEAPERLGALRTPEGEPIPPNTVAALRRDMERLRLVREQIRQIELTRLERLQKAPEVGAHAMVRLLARVMGIGIETADMLVQEVLSRELRDRRAVARYSGLTGSPDESGRKHREKGLARAGNARVRRGMIQLAWRFLMFQKNSALAQWFRQRTENAPRTRKTMIVALARKLLIALWRFVREGVVPEGIVLRPAP

SEQ ID NO: 177699 - protein, 318 aa, unidentified
MSAPDVFVGVDVSKTRLDVALRPTGEDWAFSNETSGIATVVSRLVALRPVLVVLEATGGFEGPLAAALATATLPVVVINPRQVRDFARATGKLAKTDTLDAQVLAQFAEAVRPVPRPLPDAQTQALSALLTRRRQLIEMLTAERNRLGSVSPHIHREIQDHITWLEHRLARIDQDLDQAIRESPLWREKDDLLQTTPGVGPVLSRTLLADLPELGTLNRKQIAALVGVAPLNRDSGSLRGKRTVWGGRSHVRATLYMGTLAGVRYNPVLKAFFQRLRAAGKAPKVALTACMRKLLTILNAMMKHLTPWQVDYTATPLA

SEQ ID NO: 177700 - protein, 319 aa, unidentified
MAQNDLVVVGIDVAKDKVDACIRSFTLRQTFPNTAQGHRKLVAWLRKYQVGKAVMEASGGYEREWRNVMHNAGIGVRIVDPRRVRSFAQSAGRLAKSDPIDAEMIAWFAETFSQAPGQIPDAAREELAALTKARAALVDVKIRLQAQDEHAAPESARKAYTRVLKSLAAEIDKLEATVSAKVKATPEFAERAEIIESVPGLAQVTSAILIAGMPELGQVSDKVAAALIGVAPYDDDSGKRRGERYIKGGRRWVRNGIYMPCLGAATQCNPVLKAFYQRLLTKGKEPKVALVACMRKLIIILNTMLARRQRWNPSAHAIA

SEQ ID NO: 177701 - protein, 346 aa, unidentified
MRFYNRQHTYYCGIDWHVKTMYVCILDGAGQVLVHRNVPSTPAAFLEEVAPYREGLVVAAECMFTWYWLADVCAAEGITFVLGHALAMQAIHGGKAKNDKIDSHKIAVLLRGGMLPQAYVYPAAMRSTRDLIRRRLHLVRKRGQLLAHIQNTRAQYNLPVFGRKLAYRTNREGVVEHFADPSVQKSLAVDLALIDQYDALVIDLELTIVREAKRHNADAFHRLRSVPGIGKVLALTILYEIHDITRFDRVQEFASYARLVKCKKQSGGKTLGTGGAKMGNVQLKWAFSEAAVLFLRHTEGKKLIARIEKPHGKGKALSILAHKIGRAVFYRLSRATVFSMEKFLAA

SEQ ID NO: 177702 - protein, 409 aa, unidentified
MMKQNIIFGIDVSSKSSTVCVVIDRIKQGETFKITNDSFGYQDLLDRLNQYLITPLVVFEATGVYSLSLQAFLEDYHIKYLKLNPLKAKKLMDNNLRHNKTDKVDAYRLALIQFNAPQKLRAPQPKEYHELQNASRYYEELTQALIINKNQLHRNLQSTFPQIESILSTSSGRVYWTIVSLFPHAQYVLNHNENQVFQSLLAISGIGRQRAHYLTTRLYALARQAYPYDNESSITIRAIQRNIANLLSLSAERDNVINYMEKLAMQTNARSLNIYESIPGIAKTTAVRLVAELGDLRRFDTSAQIDAFVGIDPGRYQSGEKDSHLGITKHGNHLARKILYRTITQMETVKATQPCHITDYYDKKKRSSNSRGYKKIAIASVHKLIRTMFALIKHDQLYDYNVATHNQRL

SEQ ID NO: 177703 - protein, 358 aa, unidentified
MAQALYPVVGVDIGKDTMHVVALDQSGAIAHKQRCTRATVLTRLLQLDADLIAMEACPGAHHLGRCLSEQGRAVHLLVAADVRAFVRGHKNDYNDAQAIAEAAVRPTVRTVCIKSIEQQDVQMLHRLRARLVRQRTALINQARALLLEAGIPIAQGRKTIARKLPELLARDDVALSSCRREMLTQCLNGWRQAQAEAEQIEAQLSQVARSDERCQRLLAVPGVGPLTATALVAAVGNASEFRSGRDLAAWLGLVPRQHSTGGVPRLLGISKRGNTYVRWLLCHGGRSVREHLKRDQHPWGPWITALEARMHPNKATVAVAAKLARVCWTILRKGQTYQPRAGQANNSTNNRFCGAHAG

SEQ ID NO: 177704 - protein, 332 aa, unidentified
MSHCIGIDVSKATINVHISKNSQDLVLVNSIKGFKSLFSKLKKIYKKEIENIVFIFEPTGSYSEALRKYCSQQNIKCFIINPKQFSNYAKALGVEVKNDVEDARVLSKAIHLAKDGQVQVPVFVQDVEHIKELMSFYKFTKKQTTQQKNHLESLTSKDGDKFSIKELVSSIKESKKKELRIIDEVQTLIDSNDEYKAAYDNIISIKGIGQIGGIVLFHLFLKYPDANQRQITSLAGLNPVYRQSGTSVQSKSRISKTGSVLYRGVLFMAVFSAVQHDKNFKAFYERLKEKGKHSTVAQIAVMRKMILTAHSLYKNNKKYDENFNSKENLIVK

SEQ ID NO: 177705 - protein, 326 aa, unidentified
MEHELHYIGIDTAKKKLDVDVLRPDGRHRTKKFANTTKGHDELVSWLKGHKIDHAHICIEATGTYMEPVAECLYDAGYIVSVINPALGKAFAQSEGLRNKTDTVDARMLAEFCRQKRPAAWEAPHPLERALRALVVRHQALTDMHTQELNRTETAREVQRPSIDAHLLWLEAELKRLEKQIKDLTDDDPDMKHRRKLLESIPGIGEKTSAVLLAYIGLKDRFAHARQFAAFAGLTPRRYESGSSVRGASRMSKAGHVSLRRALYMPAMVATSKTEWGRAFRDRLAANGKKGKVILGAMMRKLAQVAYGVLKSGVPFDASRHNPVAA

SEQ ID NO: 177706 - protein, 371 aa, unidentified
MTETVKYVGLDVHKETIAVAVADEERGGEVRFVGTVANEDDAVRKLVKRLTAPGVRLSVCYEAGPCGYGLHRLLTKLGQACIVIAPSMMPRRPGDHVKTDRRDAMTLARLLRAGELTAIWVPDEAHEAVRDLIRARRSAQEDATGAKQTVRSFLLRHDRRFGGKAAWTKMYWRWLSEQRFDFPHQQLAFEEMQKRVLEAQARVGRLEAALGEAVDAWRFAPLVRNLQVLRGIRLVSAATLVAEVGDLTRFDNPKQLMAYVGLVPSEHSSGARTKRGRITRAGNAQARTMLIEAGWSYRLPAREERRYRERVIDLPEEIQAIGWKAQVRLCQRYRRLAAAGKPQPKVTTAIARELVGYAWDIARRVPPAVAA

SEQ ID NO: 177707 - protein, 360 aa, unidentified
MECSEFKLELRAMDKILKQSLGFDVSQEKFDVALFVCGEDLAPREVASETFDNTKNGFKKLSQWYDKLIDKQLPIFACMEATGVYHEHLCRHMYTDPRVKVSVVLPNKSRKFIDSLDWSSKTDKLDAKALSLMGLNRKLRLWVPPKELYRKLRRLTREREHLSIAHSAQINFLHAMETEFGSCEENLMRVKQLKELIHQQIKAIDKQIENIVNSDDELKQEVALLKTIPGVGQQTAVVVLAETNNFQEVERSKQLVSYAGLDIRQKESGKWKGKTKISKKGNRHIRAVLYMPALTIIRGNSRLAQYYKCQIEKGKHKMTAITAISRKLLVLMYGVWKTKTVYQDDFNLHLSQMASGNARD

SEQ ID NO: 177708 - protein, 417 aa, unidentified
MELTAIYRCVAALDVHQSKLTVCILYENESGEIITELKEFGGFKRDRRAMADWVASFQPELVVMESTGIYWKSPYAALEKQGLTIWVVNARHVKQVPGRKTDFADAQWLAILARNGLLRGGFVPPAVFRELRLIARQMQKLTGILSGEKNRLHKILSDGGIRLGVVVSDIHGKSAKAMIKGLLAGESPEQVLKYASNRLKASEEELLDALAGDLSPSHQFVLTELMAHIDELEARIETFRQALLQGLAPYQAILRSLQTIPGLDETGAALLLVEIGDDMSAFGTPERLASWAGVCPGNNESAGKKKTGKTRKGNPYVRRILCEASNAASRTQCRLQDMFKGLLIRRGRKRAIFALAHKILKIVFLLIERGDYYRDATVDYEKLSVQRNAPRWIKKKIRLYCRINGFYNPKPIFLKAY

SEQ ID NO: 177709 - protein, 417 aa, unidentified
MEEMPFRIFVGVDWGDREHQVCSLIEGKPQQKRFEHSGKGIAALISWLMELCERQPGTVAVAIETPHGVLVDALLEHGFAVFAINPKQLDRFRDRFTVAGAKDDRRDALVLSSSLRTDPQAFRRLEPEDPLILQLREFTRANRDLEREHRRLCNQLRAQLNRFFPQVLQLSNAADEPWVWSLLERFPSPDKVRHAHGSSVERILREHRISRLTAAQTLEILKSPPLPVTEGVVEASTQHVALLLPRLRLVRDQRRQCEQHMARLIKEVAEAEDAQPGAKREHRDVEILLSQPGVGNIVAATVLAEAYQPLVQRNYHVLRACGGIAPVTRQSGNTRTVSMRYACNQRLRQAFHWWGNSVCHHEPRDHALYMAHRDKGHTHARAVRAVMDRRLNILVACLEHGRLYQADYTPQKTLDKT

SEQ ID NO: 177710 - protein, 488 aa, unidentified
MSRASKQPGKKDPTLKARAPKRKARGSHSPQGKGSRRGSKLTITNPDAAGIDIGSQIHYVAVPEGRAEISVRSFGAYTAQLDELVQWLKDCRIKTVAMESTGVYWIPLYQKLEEAGFEVLLVDAHQAKHVPGRKSDVQDCQWLQQLHSYGLLRAAFRPEDSVCRLRTLQRHRKNLVESGAMWVQHIQKALNEMNLHLHHVLSDISGLSGLRILDAILAGERDPAKLASLAHHRVQKSQAQIEAALTGDYRPEQLFVLSQSLQNYRQVQQQITQCDLGIEKQLAKMTDCQNPSQAAKPMPQSLDLGAEKPRKRKPPVALEISLAGHLKRILGVDLTTIPGLNVLTILTLVSEIGTNMTKWRNEKAFVSWLGLSPNNKISGQRVLSSRTRKVVNRAATILRLAAMILGKTNTPLGSFYRRKRAQVGGPKAVTATARKLAGLVYRLIKNGQGYNEPDLHTYELKYKDQILNSLRKRAITLGFDLVELPKAA

SEQ ID NO: 177711 - protein, 346 aa, unidentified
MKITTIGIDLAKEVFQIHGEDARGKVVLRKQLKRKDMAQFFAKLEPCLIGMEACGSAHHWARKLGGYGHTVKLMAPQFVKPYVKTNKNDAADACAICEAAGRPNMRYVPMKTIEQQAILSVHRARQGFVKARTAQGNQIRGLLSEFGIVIPKGIDAIAKRVPEILEDGENGLPGTMRRLLERLSDNLKEMDRQVNELEKQIRLWHQENEASRKLEAIPGIGPITASAIVASVGDAREFKNGRQMAAWMGLVPRQHSSGGKQTLLGISKRGDTYLRTLLIHGARAVTRFAEKKSEPDSWLRKLIGRRNKNVAAVALANKNARIVWALLAKDRMFRPDYTPAAVVTGA

SEQ ID NO: 177712 - protein, 316 aa, unidentified
MNDKQMVYGVDVSKAMLVVGQYESEALREIGNAPEPIAAWLASVPAGSVIAMEATGVYHRLLAHLAHAAGMVIYVLNPQTLKHYARAIGQRGKTDGCDARMITRYVVHERSKLRVWQPPAVSTDTLSRLLVRRRALVNARQMLCQSLSGMPALKGPRQTLLASFKRMIGSVDLLIRAELARVPEMAALHRRLMSIVGIGEVVAAQLVAALTALHFTRADSFIAYTGLDPRPDDSGQHRGKRRLSKHGPALLRCLLYNAGMAAANSKLFKPLYTQLRARGFQSTEAIVILARKLARIAFALYKSGQTFDAQRHLKTA

SEQ ID NO: 177713 - protein, 364 aa, unidentified
MTASATRSVIVGVDTHKHVHVAVPITEHGERLGQLLIAADRGGYEQLLAWARDLGRVRCFGIEGTGSYGQGLTSYLRRQDQSVVEAGRPDRRDRRLNGKSDTLDAENAARAVLAGKATATPRRAEGTSEVLRQTKVAKDTAVKARTQAIITLKTLIVTAPDELRAELDALSKAALRDRCAALRPGPVTTPLAAAKHAVRSLARRWIALEAEIKDHEQIIDQFTTAAAPRMRAAFGIGPDIAAEMLIIAGDRPAERLRSEAAFAKLCGAAPIPASSGMTQRYRLNPGGHRQANSALYRAVIVRMRFHPATIAYLTRRTAEGKSKREIIRCLKRYLSREIYHYLTSPDAPADAPPRSSIQIKTSTT

SEQ ID NO: 177714 - protein, 408 aa, unidentified
MNAVGIDVSKGKSMVAALRPMGEVALLPQEFLHTGVGLEQMAYAILALGEDTRVVMEATGRYHEPVAAALHEYGIYVCVLNPLYIKQSGGGSIRKVKTDKADAMKIAKYGLDNWVDLREYTPMDTVRQQLKLCSRQYNLYMKTVVSLQNNLISLTDKTFPGVNELFSSPERADGHQKWVDFVMTFWHCDCICRVSEKAFTERYQKWCKRKGYHFSEEKALDIYAESCGHFTTLPKNDNTKLLITTAAQQLLAGKTTLAALRAEMTRLALQLPEYETVRAMYGVGETTAAQLMAEIGDVRRFPRRSSIVGFAGVDPAVDQSGKHETQSTSTTKRGSPHLRKTLYQIVCTYLRKAPADEPMYQFLDKKRAEGKPYFVYMTAAQNKFLRIYYARVKECLEAFDAQQDTSQR

SEQ ID NO: 177715 - protein, 381 aa, unidentified
MSEMIVGLDPHKASNTIAVLDRDETLEMRRRFDNTAEGMVAMLDAVAGFTTRVWAVEGANGIGRSIAQRLVAAGETVLDVPAKLAARVRVYSTGHGNKTDRTDAVAIARAALHSKHLRMVRPDDENVALKLLSDRRHQLIASRTQSVCRLHRLIRELVPGGTPRALTAERAEALVNALDVADAAGLMRIELALDHIDDIKRFDRRIDQVTLKIHAAVNDSGTTLTRIYGVGPVGAGLILGEVGDVSRFPTRNHFASYTGTAPIAVSSGDHNRHRLSRSGNRQLNHAIHIASIAQIRYDTPGRAYYRRKLGEGKSRREALRCLKRRISDAVWRQLQLDRALDQQQDQTWPRWPSSRGGHPSYRSPDTLRHDGQPRKPRIAGV

SEQ ID NO: 177716 - protein, 407 aa, unidentified
MDLLKTVFGIDVSSRKSNVCIMVNGQKVNDYAISNDMVGFNRLLGDLKQVTKPQIIFEATGVYSRRLQAFLDMHELRYVMMNPLEAKRKTKDDLHQNKTDKLDALYLAKLQSEHPQRLAYVQNKEYQELMANNRIYEQASHDLITNKNRLHKAVQLTFPEIEHLLANPRGKNYWSIALRFPHPDIVLETKKANIIDFLKGLSGIGKKRANDITQSLIRLAKVACPAVKKNSAHIRGLKMAINNILSAEEECQTALQEMAKLAPKRDLEILTSIPGIGKNTALRIISELGDIRRFNNPSQLNAFVGVDPQVYESGNLTAHLSISKRGTAIGRKVLYLAINQIQSAKKAGNPCHIADYYEKRKRSSETASHKKAAIASIHKLLRTIFALIKNDQLYSYDVAKHNQRLLS

SEQ ID NO: 177717 - protein, 338 aa, unidentified
MFAESVDVVIGVDTHRDSHALALVDAGLGVLIVEERIEANREGYRRALKVASGCGQRRLWAVEGTGSYGACLARYLQQRGERVLELERPARSGSRGRAKSDALDALRAARAALTGEPLAELRSGGRREALRVLLVSREASVAVRRRGLNQLRALVLTAPAELRERLLGLPKGELVKRCIALRPRPGQQPQLRGTLLALRSCGRQVKLASREAATLERELAALVQQLSPQLLSHYGVGPITAAQLLVSWSHPGRLRSEAAFARLAGAAPIPCSSGKTIRHRLDRGGDRQLNRALHTIVLARRRGDQRTIAYVQRRISEGKTEREAIRSLSATTPAASTD

SEQ ID NO: 177718 - protein, 332 aa, unidentified
MYLGIDVHKRYAQVAVMDEAGEIVEEVRVENTNLDDLAQRYAGAEAAIETTSNYYHIHDTLSEHLDVTVAHPKELNQIADTDKKTDRVDAKELARMIRLNSVPESYVPTDEIREARALVRGRQKLVENRTEYANKIHGLLSDHGITEDVKPLSVEGREFLRELSLPAPWDILLESYLNVIETLTDEIEHVETTIEEHAGSLKETQLLMTIPGVSYYSALTFYAELGEIDRFDGHKEVVSYVGLNPVIRESGDSRIEGCISKRGSGRMRWILVQSAYVAVHTCNDEYLSRFYNRIASRKNSKKAIVATARKLLVSIYYMLDRGEVYNPPGVST

SEQ ID NO: 177719 - protein, 387 aa, unidentified
MQKPHDNSKASPAAFMQDNTLIAVIELSLSNWLVAGLIPGVSREPLKKLEPNPEDLLKLLHGWRDEAIKAGRSITRIAVAYETGRDSFWLARWLRERGIDAHVIHATSVTVSREHRRAKTDRLDTAMLKRGFLGWLRGERGHCTVAIVPTMEEEDAKRPHREREGLVHEQTRAVNRMKSALIQFGVRNFNPKLRKASVKLETVRTPEGKSLPPNTIAALRRDMERLKIIKEQIKAIEQARLQQFEQKPEALANRMVYLLVRIYGLGLETADLLAHELLSRTLRDRKAVARYAGLTGSPDESGSKRREKGLSRSGNARVRKIMIQLAWRMVKFQPDSALAQWFKQRTENAKGSRKPMIVALARKLIIALWRYANDGVIPEGFRLHSAA

SEQ ID NO: 177720 - protein, 320 aa, unidentified
MSKIESFVGIDVSKSELQMAIRPKGKPMSFANTEDGIALLIDCLKPLCPRLVVLEATGGLEISVVNALAVKELPVVVVNARQIRDFAKATGRLAKTDRIDAEVIAQFAEALRPPLRPLKDEQTQRLHALNTRRQQLVAMTRSEENRLSSAPKWTQKEIQTHLKWLKKALEKMDRDISDLIKGSPIWREKNAILRSFKGIGPVTSATLLAALPELGTIGSKPLSALIGVAPLNRDSGQLRGKRTVWGGRDNVRSVLYMASMVAIRFNPVISSFYTRLRESGKPHKVAITACMHKIIIILNSMIKNQRYWHAPLSEKCLKDS

SEQ ID NO: 177721 - protein, 416 aa, unidentified
MRDDARWFVGIDWASETHQVCLVDADGKIVGERGFPHGGSGLAEMCIWLLVTTRAEPTVIAVAIEVPHGPIVETLLERGFLVYAINPKQLDRFRDRFTVAGAKDDRRDAHVLGDSLRTDRHCFRHLAAEDAVIVALREWSRMAEDLQQERNRLANRVREQLWRYYPQALKISDDLGADWFLELWAAVPTPAKAARVHESSIDRVLKTHRIRRIAAAEAAQILRQQPLTVAAGTAEAASAHIRVVAARLKLVNRQIKQAHRCLDTLCGKLAADEEKTASGQEPEQRDVTILRSLPGVGRIVLATLLAEAAEPLRRRDYHALRTLCGVAPVTKRSGKRCIVIMRQACHMRLRSAVYHWARVAIQHDPLSRCRYAELRKRGHSHGRVLRSVADRLLAVACAMLDRQTMFDPSRAEKQAT

SEQ ID NO: 177722 - protein, 429 aa, unidentified
MRIETSVSQIGLDSHRKFSKVTARNSDGTVAWRQRLDHVDRIEMREQLESWPKGTPVVLEGTFGWGWLSDELRAAGLQPQLASSRKVAAWRKARGLAKSDRSDADLLSELPSEGERWWEVWLAPPEVRDQREWLRYRLALVRMQTSLKNRIHAILHRHGILCEQSDLFGRDGRRFLNLLAAPQKKDTQANASERPADQGTQVDTHAKDGGDIDAHAKDGSVVEAYRRLPDSGRATLTGYLKLLDHLRRQIAAATRAFRKQVQASPAAMRLKTIPGIAWILSYTILAEVGHIERFRSAKHLASYSLLAPRAYDSGNEDDETPLGRHVGHVGRRMLKWAFIEAAHGAICRGGRFREIYDRRTNGGKRDKNRGCIVVAHELCRLSYVCWKKQVDYMVDPPPRPGIRRRRRHKLVSRSELGQPAAAMVAAAGC

SEQ ID NO: 177723 - protein, 361 aa, unidentified
MPGTMTYVGFDVHARSTHAAAVDVMTGELSRMRFGAGVETPVDWLRTLAGPVRACYEAGPTGYGLYRAALAAGVGIEVVAPGKTPRGRGDRVKSDRKDAELLARCLMAGSLRAIAVPSPAVEAARELTRAHDACRRDLMNARHRVSKMLLRHGRVYPKTSTWTQQHRRWLAAQRFPEPVSELVWADLVACVDGLTARKTALAERIGELTTDPAWWPTVARLRAFRGVDTLTAFAIHLELGADWARFEKAHRVGSWLGLTPSREQSGEHDRHGAITKTGSTLARRLLVESAWHAAREPRVGATLANRQQGQPDHVLQIANRASERLHRVYTGMRARGKPHNVTVVAVARELACFLWAAATAP

SEQ ID NO: 177724 - protein, 333 aa, unidentified
MNATRSIIAPSNALFFLGLDVAKAKADVCLLRSDGQALQESFASTRLGYESLLAWLEKHAQGAVRAALESTGPYARVWCELLHAAGHAVFLLNPARPKAFAQACGLRNKTDRVDARLLARFVAEQKAPRWSPPKPEQEELKELTRRREDLAALRQAEKNRLASSLVKSVRASLERSIKSLDREIKQVEAELDGLMARHAGLRRNEQLLRTIKSVGKVTARKILAELPPVEEFQSARQAAAYAGLSPRLHESGKSVRKKARLSKIGNPVLRKALYMPALVAIKHNPILKAFAQRLREKGKAKKVIVGAVMRKLLHIIFGVLKHQKPFDPNYGSH

SEQ ID NO: 177725 - protein, 357 aa, unidentified
MDYGVYCGVDFHARQQTICCLTTEDGVIATYELKHDDKNAVRDFYAQWPGPVLVGLEAGGYSLWFEQLLEELGHEIWLGDASEIRRCARRRQKNDRRDAALILELLLRGEFPRIHRQTALSREILRMLRYRHRLVKIRTIIKNCLQALAIQSGLALKSQLFTEAGRRQLASLAMSPAMQCQREQWLQLLATLDQRISACEKWLSDQALADQRVRRLRTHPGLGLLTALAVVHTLDPVSRFPNQRKVAAYGGFDPCEDSSAERKRYLGISKAGSKLLRFLLIEAGQAAVKEDAELKRFYWRLQPRRNKPKAKVAVARKLLIRSYILLRDEIDYAEFLRRAVAARLARENARLPCLSSD

SEQ ID NO: 177726 - protein, 375 aa, unidentified
MAEHTKGGDLLTVGVDLGDEWSRYCRLDTSGEVAEEGRVRTTEDALQKMFARLPRSVVAMETGTHSPWVERVVKTCGHEAIVANPRRLRLIYQSTNKTDRLDAQALARLARTDRRLLYPIRHRGEEAQADLSVLRARGALVEARTKLVNAVRGMLKSFGKRVKKCDTGVFAEKAAEAVPKAMKPAIDPLLETIKTLSEKIAAYDNTVETAGHSKYPETMVLRQVAGVGPVTALTYVLTLEDPSRFRTSRSVGAFLGLTARRAQSSGEDPQLRITKAGDPTLRRLLVGSAQYILGPFGPDTDLRRWGLKLAERGAKNQKKRAVVAVARKLAVLLHRLWMTHEDYEPLRNAARTKTPKKEDTAKETTRSETYVLKEG

SEQ ID NO: 177727 - protein, 350 aa, unidentified
MPRKSNAAVVSIGIDPGKNTLHLIGLDARGEIVLREKVARSKIVSRLANVPPCLIGIEVGMGTHYVTRELRALDHDVRQVPPVYAKPFRQTHKNDFRDAHAVAEAVQRPTTRCVPPKTDEQLDLQALHRVRYRLVGQRTATINQIRCFLLEHGITVRQRLHWLRHALPDILAQRTDVLSPRMVRILEDLAQDWRRLDDRIEAVSGEIDALSRDTETCRNLMTIPGIGPIISSAVVAAIGNGTAFACGRDFAAWLGLVPKQISTGDRTILGRITKRGNRYLRMLFLQAARVVLLRPRNWMKHGFGPWLTAAAQRLHHNVLATALANKLARIAWSVLVQHREYEARLSGAAI

SEQ ID NO: 177728 - protein, 343 aa, unidentified
MEECNIVGIDLAKNVFQVHASDEVGRRLFSKKVSRGQLLKLMSTIGPCVVALEACASAHHWGRQIAKLGHEVKLIPPIYVKPFVKRQKNDAADAEAIVEAASRPTMRFVAVKSADQQAAGMAFKTRDLFVRQRTQLINALRGHLAEHGVVAPQGVAHLKRLRAALADETTGLPTAVVLHAGMILDQISVLQSRIEELEKEILAVSRKEELAVRLMTIPGIGPITAAALLAFAPDPATFRRGRDFSAWMGLTPRQHSSGGKERMGRTSKMGHRDLRRLLITGAMAVVRWAARKGAQAGSWLARMLDRKPKMLIAVALANRTGRIIWALMANGGTYNSHRDTAQA

SEQ ID NO: 177729 - protein, 461 aa, unidentified
MHHDVPPPKGSSTNVSTLNSAEEQKPVYAARIGLDWADQKHFWTMLTAEGKRTRGELKHTPEAIEIWAVELARAFDGRPIALALEQKRGALVAILSKYAHVHLFPLHPTNLSHYRSSVCASGAKSDPSDADLILDYLVKHPEWLRSLMPDTVETRSLQFLVEERRKLVNQHTSQLQILIYWLKQIFPQMLVWFDDMSTPLVGDLLLRWPQLPALKKASKKTLDKFFRQHNCRSEGRIQERLDEIGKAVPATTDAALLNTADLCIRLAVQVLAAQRAGIAEFDRQIEAIYETHPDRFIMASLPGAGPALEPRLIAALGTNRERFESASGMACCFGIAPVTESSGKSRWVHWRWACSKFVRQTLHEWANCSIRSCEWAREHYDKQRGRGKGHHAGVRSVAFKWIRILFRCWRDRVAYCEERYLKALRKHSGAVAAVVGKPMPVPPAVQWESCAGFSKIVELSS

SEQ ID NO: 177730 - protein, 315 aa, unidentified
MAKQLPLVNVGVDVSKDQLDVYLLERDLLFSIPNDEQPIAALIKRLARYRLERIVIEATGRLEHAFVSAAIAKGLPIVVVAPLKVRRFAQAAGQLAKTDAIDARLIARFAAALKPTTRPPIDTNSQIIKDLVVRRRQLTSLRTTEKNRRSVMPEALTPSIDRIIESLDREIASLEQLIQNAVEQHVAWRHKRDLLTSMPGIGPSVASSLIGDLPELGSLSRRQIASLTGVAPFNRDSGNFHGKRRIRGGRAHSRTALFLSAMVAIRYNPDIKRFYQRLLQTGKHKKVALTACIRKIVTALNAMLRDNKPWQSSFA

SEQ ID NO: 177731 - protein, 418 aa, unidentified
MADRITYVGLDVHKDSIVVAVAAGGLRGEVREYGRIANTPTALDRLLRKLGGDGMTLRFCYEAGPCGYGIQRRLSTGGHECVVVAPSLIPKRAGDRVKTDRRDAASLAKLHRAGELTAVWVPDARHEAKRDLVRARLDAVRSLRRARQQLSGFLLRHGCHYGRPAWTRLHRRWLAGLKFAQAVHHIVLEDYIAAVEAAEARRNRLTAQIEAMLSDWTLAPVVAALQTMRGMALVNAASLIAELGDLSRFANPRQLMAYLGLVPSEHSSGGSVKRGGITKAGNAAARRLLIEAAWSYRFPARLSRQLLLRQERQPRLIRDIAWKGQLRLCARYRKLARTGKPANIVTTAIARELSGFVWAIARQVAVTTDGSHKTNDPSQRRRQRTTQHRTSGQGRGRGRGQENPREHYLPNDHSDAGF

SEQ ID NO: 177732 - protein, 346 aa, unidentified
MFEPVFAMKDQDVSDVIKTKNRTAMRYIGIDVSKATFVVAYSSDKGGGIRTFNNTTAGIRQFIGTLPKDGSIHCVMEATGNYSALLLYMLNVAGITVSMENPLKVKNFAKAMLSTVKTDKSDARLITLYGEKMNPRPFKVQGEAILRLRQKRTVIRQLTKQITAMSNLRGSLVCLPVPDKGATHTVDETIKFLEKRRDRLQSELTELVEVEFSRQLALLTTIKGIGITLATALIITTGGFTYFQNAKQVSRYLGICPTYEQSGTSVNIRGHINRNGDAYTRGLIYVAAWNASRFNAKCGETYTRLRQNGKPGKLAMIAVANKLVRQAFAVVAHDKEYVDGFVSNRH

SEQ ID NO: 177733 - protein, 320 aa, unidentified
MNCIGVDVSKQELVTYDGTNQGKFPNNGQLCKFTKYVDSMEEVLIVFEPTSTYSHRLRAFCATRNIPTCKLNPRVIPNLRKATQKRSKTDKTDAELLYRYGVDRGDDQAKQPQPVDRLACALSTQLALYRVTQKARVAYQGLLEAFSNDPFTPRRLLASLNTEIRSMKQKEEKRLAYAQAMINKEKKASLSLAVLQSVVGIGPVSSITLLTFFRRYHHANREQVVALAGLDPVSYQSGTSVHRKGRISKQGDKVLRKCLYQATLSAARYNISVRAIYKRLNEAGKPKKVARIAAARKLLLIAHAVYKSGQPYRRPVEEAT

SEQ ID NO: 177734 - protein, 413 aa, unidentified
MEVVVACCAGLDVHQASVVACINRTGQGGRSRKEVRSFGAMRDDLIALRDWLMESGVTLVAMESTGVYWKPVYEMLEDQFDVMVANARHIKTVPGRKTDVKDCEWISDLARHGLISPGFVPPRAIRDLRELNRYRRKVAQVQTGERNRLIKVLETAGIKLAGVVSDVLGVSGRAIIRALIEGEDTPAAMAGLALGKLRKKRPDLARALDAPLKLHQRFMLRTQLARIQQAEADLERIDIELNEMVVPYQRYIELLMSIPGVNWINAVTIIAEIGIDMSVFLSAAHLASWAGLCPGNNESAGKKRSGKLRKGNVVLKTTLVNAAIAGSGSRGRKGTFLAEKFRRLAARRGKMKAAVAVAHKILVSVWHMLSDGTYYQDLGAGFLDKIDRTRNARHLVRRLAHMGFDVQLTEKAA

SEQ ID NO: 177735 - protein, 366 aa, unidentified
MEVKERSRTRYVGIDLGKRTYEMAIVGENGKVAMSNGKTIVAGRQALYKKLRPQDKVAVEAGNMAFIIAKEIEKAVPGCKVYVLNASNLALIYGSMKKTDKEDALKLAHILEDFQEERLPVVPVPSEKEMHRRKLLSSYQRAQQSRNRNINQIHALFVSQGITTKVRSDLATAEARKEAIAELTGTEREEAEYLCASIELNEKRIMVLEKQMAEEAAGDKEIELLKTIPGVGPKTSFAFLAHVGVERFENASQVSNHLGLVPRVYMSGDTVNYGPITKRGNGYVRALLVQAAWSLVLSKDGGKLKERFKYMTEEKSKSKKKTIVAIARRLAEEMYTLLKYGRRHETRPFTPEKGKVKKLAEAALSA

SEQ ID NO: 177736 - protein, 346 aa, unidentified
MEIKRVGVDLAKNVFQLHGVDRRGKAVWKRKLSRGKWLSVLFETIKPGTEIGMEACAGAHHWARLLTHRGYAVKIIPPQFVTPFVKSNKNDANDAQAICEAMGRPNMHPVRVKTVAQQDIQAIHRVREEIKGHRIAKANQIRGLVAEYGLVAPQQLSSLRRAIPEWLEDADNGLTLLFRQLLQGLWGDSYALDQRMVELDKQIRIIAQENPTAKRLQQLRGVGPLIATALVATVGDGKQYRKGRDMAAAIGLTPRQHSSGGKDRLLGISKRGDAYLRCLLIHGARSAVRTAKDKEDRLSRWIISLQSRRHSNVVAVALANKMARMAWVMMTSDVDYDPDLAASSVN

SEQ ID NO: 177737 - protein, 410 aa, unidentified
MEVLHAHCAGLDIHKDSVVACVRHMVEGKVTSQVKTFKTTTQELMALSDWLSAEGVTHVAMEATGVYWKPVWHILSDGEFELVLANAAHVKNVPGRKTDVNDATWLADLMAHGLIRPSFVPDEPTQQMRDLLRTRKQFVRERTGHTQCIQKTLEDANIKLDSVISNVVGISGRRMIEALTAGRTDPQALAALADGRLKATPAELEASLRGRVTAHHRFMLRLHLDHLDALDAAIARIDKEVDGNVEPFRVAIEMLITIPGVSHLSAEVIVSEIGIDMSRFPTEGHLISWAGLCPKNDESAGKRRSTRMKKGAPWLKTTLVQCAWAATRTKGTYLHAQYLRLRSRRGAKKAIGAVAASILTAAYHMLKNGTLYQDLGADHFDKRAQGKHVLQLVNRLKNLGFAVQITPMAA

SEQ ID NO: 177738 - protein, 370 aa, unidentified
MDKTTPLYVGLDVHKDSIAVAHAAGGIDAPATFVGTIGTRQADIDKLIRRLRAKGCPLVFAYEAGPSGYGLHRFLRGKELDCRVVAPSLIPKRPGDKVKTDRRDAVEIARLLRSGDLTAVYVPSIEDEAIRDLCRARDATRVTLRAAKQRLKSFLLRLGIHYVGRADWNEAHKRYLSKVVCPSSAQQIVFQEYLHAVDEQVERLERLEHELLQAAASWRLFPVVQSLQALRGVQTIVALTVIAELGDLTRFDNPRQLAAFVGLIPSEHSSGDKRRQGGITKTGNGRARRALTEAAWAYRYNAKVSPIIQKRIEGLPTRVRAIGWKAQVRLCKRYRRLRARGKHANIVITAIARELIAFMWAISKEVAINS

SEQ ID NO: 177739 - protein, 447 aa, unidentified
MGCNGSGLSRGDRRRNERLAGLRAVVSPQRAVVAIDLADDKQVVVVTDHDSRVLARRRVRARAWQLGPTLEWARAQALAAGFEAAVVACEPTGHRWRVLDQLAAGLGMPLVCVQPLLVGRAREGEDFTRDKTDDKDAVLIARLVTELRCYVPERPDETWARLRHLGARRARLITESTACVQQLRDLLECAWPAVLDAAAQPFRSRSWQASLAVILDRAEGDLDRVRRMGWERFARAVRRELPRWDTTRWFSPIVRAAFDALTDPTGVASQRPGALERALLVLEDWHDCRRHLADVEARMTRILDELDLTDLVMSIPGLSAVGAAQILAECGEPSRFSNPRALVKHAGLCPRENTSGNHHGNSRLSGRGRPGLRLAAWRAVWGAMHANPVYAARFAHLTTRADNPLSAGQARAAIAAALLRQLHVVVTRRVRWDPALAAPPASHTTAA

SEQ ID NO: 177740 - protein, 664 aa, unidentified
MSRSCQNRRRAAARTATNQDAGGAVHAAAMPTEGPVPSTTDPKTSRSRAALGDTPAATPVAIGVGIDTSRYGHHAIFLDADLQPAAPELKFVESAQGYQQLQSRLAALRHKHGPVHFHFRLDVAGSYADNLLAFLHGLPEPRTISCGDPQRNKNYRAAIFGHKKSDATEANATARYALTEKPKPMPVVAPAVQQLCQIASRLESQARHCTRVVNQLHNLLGRTFPELALLVKDLSAGWVLTLLDRYPTAAKLAAARSSSLEKIPYLPHEHIARLREQARTSIAALTGPVTEELVRELVGQLQDAHVRHQALEKLLVSAYRQLPEPNHLDSIIGFGEVTAAILTAKMVTTGRFVEPAKLTGYFGIYPVEASSGIDRDGQSRLPLRMVMSRRGNDLVRRYLWMAALSAAQHNPAVRPLYQRVRAKHPDQPGIAIGHAMRKLLHLALAVWQTGKPFDPEHYPWDQAAHLPGSQQPATAEPVAPSPTHERTGPNAQAAGHKNPVTTPVRSVVTAACVPTSVTEAASAGNDSARSVASEHPEATACDMPMSQDAQAEATALAWIDFAHLKTQLPLQRVLEHLNLLTDLRGRSRQRKGPCPVHAASGKSRTFSVNLDKNLFQCFDPHCGSKGDVIDLWAALHKLSLRDAAADLLQTFNLEPASRTEKRHG

SEQ ID NO: 177741 - protein, 367 aa, unidentified
MKKVSTAAVKLTKNFSQAKLTIGLDLGDRSSWYCVLDEVGEVLLEQKLGTTPKAMRETFGSIPRCRMALETGMHSPWVSRLLSELGHEVIVAHARNVRLIGESRKKDDRLDARTLARLARIDPQLLCPVRHRSARAQADLTVIRARAGLVRARTALINTARGLAKSYGERLRGCNPRNVNTEKAQGLSPELQAALEPLLAAVESLSERIRECNERIESLAQTNYPQVALLKQVKGVGTLIALTFLLTLEDAHRFRKSRDVGCYVGLQPGRRNSGQSEPQMHISKEGDPYLRTLLVQGAHHILGPFGADSDLRRWGLKLAERGGKNGKKRAVIATARKLAVLLHRLWVSGEVYEPLRNSHQAVMQAAA

SEQ ID NO: 177742 - protein, 382 aa, unidentified
MQASTVDTPTAVHCGTIFVSIELSQKTWLVTLHSPDRDRISRRNLEGGDHAGLLGLLEDIRARAALKLGAVPKVVSCYEAGYDGFWLHRLLTAAGITNCVFDPASIAVDQRARRAKTDRIDGELLLRTLMAHLRGEPRVVRIVRIPSVEQEDARRASRERDRLVKEQTAHTNRIKALLRLLGMAVGHPRRGDWLGWLEQQRDRQQRPVPPHLLAEVKREHARLMLVREQLAALEAAQAAQAPAVPAPMAERRDALQRLKALGPAFTATLVNELFYKDFRNRREVASYCGLTPSPWRSGGIDREQGISKSGNRRARQKAVELAWLWLRHQPDSALSCWFRARTASAGKRAKRIAIVALARKLIVALWRYLTTGLVPEQATMKA

SEQ ID NO: 177743 - protein, 391 aa, unidentified
MIYVGIDVAKDKHDCFITNSDGEVLFKSFTIPNNREGFETLFQKVQSVSDDLTKVKVGLEATGHYSYNLLGFLLDKGLPTYVINPLHTNLYRKSLSLRKTKTDKVDAHTIASMIMSDVNLKSYSDTSYHNEELKSLTRYRFDKVQERAKLKTSVSRLICILFPELEKLVPTIHMASVYAMLSEFPSAHAVASAHLTRLTNLLSESSHGRYGKDTAVMFREAARNSIGSNMPAKSLELKHTIKLIQELTSEIDEIETEIKSIMDEVNSPILSIPGINYRMGAMILAEIGDFSRFDSPDKIIAYAGMSPSTYQSGQLDNCYSHMEKRGSRYLRYALYNATKYVCHWDESFGTYLAKKRAEGKHYNVALSHATKKLVRTIYAMEKTGQSYSSAS

SEQ ID NO: 177744 - protein, 398 aa, unidentified
MNPLSIRVAVDVGSTRHRVAIGLPDGKLLDEFDIDHDAVGFSEFFNHIETVENRHHLPVAVAMEGFNGWARPLDGQILRHGYSLYSVNNLKLARYKEIFPAPAKTDAIDARRILELFRLSEHLPLARDALHEVAPTPVANDQLKRLTRRRKQLVWERVRVINRLQSDLQAVCPGLLAITGEAGNLWFLNFLTCRDKLPKLAKLRQSCLLAIRSVGKLYASRIQAWQLQAQFAPEVEWVGEMIQQDARRILALGKEIKAIEQQIAGIAVQSELAQIIGSIPGFGKTTMAEIAGEIGTLERFETEAGLAIYTGMAPLDKSSGKKNSTKAPRQVNTRAKTAMMVAVARHIECVPASRAYYDRKRAEGKKHNQAIRALGRQLVRVIWSLVKQGRKYEIREEK

SEQ ID NO: 177745 - protein, 402 aa, unidentified
MNCVGIDVSKGKSMIAVMRPFGEVVVSPFEVRHTASELSELARLLKNLDGETRVVMESTGNYHAPVAWLLHGAGFYVSVVNAMLVHDYGNNSLRRGKTDKKDAVKLANYGLDHWLTLPRYVPEEDTRLMLKTCYRQYQQYSKVQTMLKNNLISLLDTAFPDANRLFTSPPRADGSEKWVDFVATFWHCECVCGLSKKAFTAKYQKWCRKHGYNFSQDKALDIYASACGRFGVMPKTNTAKLLVEQAISQLQTTSAALAALKQEMQSLAASLPEYPVVMEMFGVGPTLGPQLIAEIGDVRRFHSKKALVAFAGIDAPPYQSGQIDVRSRSISKRGSASLRRTLFLVMGVLLQCAPIDEPVYQFMNKKRSEGKPYRVYMMASANKFLRIYYASVKAYLDSLEHD

SEQ ID NO: 177746 - protein, 340 aa, unidentified
MDHIAIDLGGRKSQICVRSGDGAVIEERRVPTAELSLYLAKRGPAPRRVILETCAESFAVADAAKQLGCEVRVVPATLARALGVGARRTKTDERDARCLSEASCRMDLPSVHIPSLVSRQRKTQCGMRDALVASRTQLINTVRGWMRGQGIRVRSGATETLPARVRHAVPTPPSYVERQLEMIDELTSSIREADKELEREARADLATRRLMTVPGVGPVTAIRFVSAIDQVERFADVHSLQSYLGLTPGEHSSGERRHRTGINKAGCTQTRRVLVQAAWVHKTRRPNEPASIWATKVEKRRGKLIAIVALARKLAGILYALWRDGTTYDPARGALPAMPA

SEQ ID NO: 177747 - protein, 354 aa, unidentified
MKYFTSTTEFNCGIDLHARQMYICVMDRQGNKLVHCNIVGNDFAYFLKRVAAYRHDLTVVCECTFNWYWLADACFEAKIGFVLAHALYLKHIHGGKNKNDRVDSEKLAHLLRANLIPPAYVYPSERRPIRSLLRQRMSYVCQRAELMTRLSMSQSAQGLVPAAKSGHNRDVWQERILAQYTHPLHQMGATCNLDMIRVYDEQIEKLEKEITRQARLLEARDYYLLLTVPGIGPILAMTILFEVDSIERFATVKDFVSYCRLVKGSVASAGKIKGLTGGKMGNGYLRWAFGEAALMAKRNHPLLTPYAEQLVARRGKFKANAILANQIARAVYYMLCKGTAFDPQRVVRPMSEAA

SEQ ID NO: 177748 - protein, 472 aa, unidentified
MAMKEPEEIPDEAHEQMFERACAIDVAKNAGKVCVRLPAASGTGRRVSRVWDVAARSRAVADLADELVELGVVKVTVESTSDYWRIWFYLLEARGLDVQLVNARDVKNVPGRPKTDKLDAVWLAKLTEKGLLRPSFVPPRPIRVLRDYTRLRTDLTAERARHWQRLEKLLEDALIKVTSVASRIDTLSVRDMVEALIAGERDPRRLADLARAQMRTKRADLVEALTGQFDDHHGELARVLLDQIDALNRQIDKLSSRIDALLADMPVPPRPDGAAGAAHGGAGGDPAAAQEAVIAGSGTGAGPSREMTARDLVEILDDIPGIGRQVAEVIIAEVGLDMTKWPTAGHMVSWAKLSPKTIQSGNKNTSGRTGKGNRYLKAVLGDAAAGAGKTKTFLGERHRRILRRRGKLKAVVATARSTLVIVYNLLADPGTRYHDLGEDYFNNRLDQGRRIRNHVRQLEALGYEVTLCIPAA

SEQ ID NO: 177749 - protein, 436 aa, unidentified
MIAAEIERCAGIDVGKKWLAVCILVGPLNAEPRREIRRFGTNVADLEALRDWFRQEGITHAVMESTGSYWKPVFNILEEALTVYLANPQQVRPRKGHKTDNKDGHWLAHLLRHAMIQPSFIPPRPIRELRDLTRRRRKLIGAATSEKNRVQKVLEDANVKLGNVLSDVFGVSGQLMLEALLEGQARPEEIAQFAQRRARKKIPALIAALGQHRMSDHHRQVIRLSVEHMGFLEKQIAELDEAILQKIQDSGLVQEGELLQSIPGVQPTSAAAILAETGADMKQFGDEQHVSSWGGLCPGNNRSAGKSKSSRTNKGNPWLRGTLTECAQGAAKKKACFLKDKFWRITTKHGGKRSPAVIAVAHQLLRMVFQVLSTGQPYRERTASVLAPPQRERMIRHHIRRLGKLGVAVRGPRAAPVRPYKCRTTVKRTTTTKPST

SEQ ID NO: 177750 - protein, 399 aa, unidentified
MKVTYQKKRFSTFNNSILEFKQWLLDNHCRDVCMESTDKYWVPVFNLLEDEINVVIANPKWVKAVNGNKDDTKDSKWIGDLFRLGLVKGSYIPCKKVRILREYTRYRYKLVSCRSSEKNRYQNALTVCNVALDSVVSDIFGKSSTSIIDYLLEQSGTSINHEEIASKLLRSLKSKEDAVIESIEGYQMADVQKYRMRLVRAHMDYITAEINDVDKMIENMISSNPDFENAVRFLCTIPGVKRDSAITIISEIGTDMSQFSSSKRLCCWAGFTPGSNESAGKKKSVRITRAGIYLKPALVQCAHAAVRSDKSPYYKKKYESLVKRRGKKRAIIAIACMILTAIYKMLSTGEQWNPSDLYKIDMPEALVEKQKAKAIKQAKKLLRREGLLPPDEPLAPCML

SEQ ID NO: 177751 - protein, 385 aa, unidentified
MNRELCLKTDSSPYLDTLAFLNGDLYKKLTFLLLRFLGDVQYPFPLQIAKHKDMENFYFIGVDVSKKKLDFCVLLNGTIVLEEVVNNNIPSIRRFLETFLVDFKTSIDNLLVCAEHTGQYTFPLSIACQSLSCGLWLENPAQIKYSSGFSRGKNDKVDAHRIARYASRFSDNARYYQRPREEIERLKQLRNEQDLYKSDLAKYKGQLSDQREFMLARVYQEKAQRLERLIEELEKLIKDIDLLVETIIRSCRVLWRQRELLLSVEGVGPSVALCLIIETEAFTRFDDPRKFACHAGVAPFRYTSGSSQHSRNKVSQRANKQIKTLLHMAALSITGRKSGELKAYYERKVKEGKNKMTVINAIRAKLIARMFAVIKKDQFYTPVYS

SEQ ID NO: 177752 - protein, 591 aa, unidentified
MRGGLRDGGNEPRECHGEALRAVAIQLDHHAWRSQARDDKHVFISSPDLSAAPAPDRKETGLARVESGILVLQVFCPARQAIHRRIIGALSSPFSSLVLEAVHPSVVASPRKRFRPRSRRILIFVHPPGRRGQTTHQTMSKINRPASNKKKDAAKRIRPVTRPDAAGIDLAALVHYVAVPPDRDPQPVQSFGTQTADLHKLADWLVACRIKTVAMEATGVYWVPLYQILEDRGLEVCLVNARHAKNVPGRKTDVLDCEWLQYLHSVGLLNASFRPPAPICAVRALVRHRDSLVQTGCEHLLRIQKALDQMNVQVHHAVSDITGMTGLAILEAILNGERDPQKLAQLRDPRCKKTQSEIAAALHGDWRPEHLFTLRQSLAAWRYHQTLITECEAELKKQMDTLADQTKDAVPAKAKPDQRCDETLRHHLFRKFGVDLTTADGMNTQTALVLLSEVGTDLRKFATADHFASWLCLSPDNRVSGGRRLSVATRTGANRLATALRLAARSLHRSQTALGDWYRRMKAKLGSAGAITATAHKLARILWAMIKHRRPFDRARLGNPELRQQRRENALRRAAKELGYLLQPIHPVPVS

SEQ ID NO: 177753 - protein, 336 aa, unidentified
MSHYCGIDLHSNNHFVVVIDENDKRVLEKRLDNNLSLTLETLSPFRESLHGIAVESTFNWYWLVDGLQEQGYDLHLVNTLAVKQYDGLKYSGDRHDAFHLAHLMRLGILPTGYIYPKEQRAIRDLLRRRLFLVHCASAQLISVQSQIWRTTGRRIRSTDLRKPGFVAPDVEGYTLQAVDAGLAVFQAVQREIDTLEQSVQQAVSLSNNFKILQTVTGIGKILGLTIMLETGTIERFAGPGNYASYCRCVDSRRESNGKKKGEGNAKAGNKYLSWAFSEAAHFAVRYEPLAQRFYERKKARTNGIIAIRAVARKLARATWMMLKHQVPYDARLMFPG

SEQ ID NO: 177754 - protein, 403 aa, unidentified
MDIEDIEVFIGIDVGKSEHWATALSRDGQKVLDKALPNDEDRLREVYQRLQAKGQVLVVVDQPATIGALAVAVAQDMGITVGYLPGLSMRRIADLTPGSAKTDAKDAAVIAQAARTMPHTLRAVSASEEEAAALSMLTGFDLDLARQVNQTANRIRGLYTQIHPALEAVVGPWLEHDAVLEVIAAWPTPADLKRAGKARIDARLKKHGCRRHATWAGQIVSALEHQTVVVAGTDAAAVVLPHLARQLISLHAQRADVAAQVETLVQAHPLYQVLTSMPGIRGPGRRRPCWPRRWARPPVTGAQLASYAGLAPVTRRSGSSIRGEHVSHGGNKRLKRAMFLSAFASLRSDPVSRAYYQRKRDQGKRHNQAVLALAHRRILTLHAMIRNGALYDPQPATKLPAAA

SEQ ID NO: 177755 - protein, 411 aa, unidentified
MKFIGIDWKDKGYTVRIIDEEGNDVSGVFEINKKQEGFSELIEKIRKCSEDDREVLIGIETERNAIVDYLLSLGYKVFLVCPNMVDSLRKRHTGSGQYTDNLDSYVIADAVRTDRRRLTLIEPKSNKIRKIEFLFRHRNKAVNDKTRLTNRLTSYLKEYFPIFLNFFKDISCTTALSFLKEYPSYKEVKELRKEEIRVFLRKHNYYLESGVLKIWRAIRGGQVKVDPIVIEARSKAAVSLTKRIEIINEEIKEYEEGLEEIIECDEDAEIFSSLAGVGDVLTPGLMIIFGEDRDRYKDAQDINTLSGMVPVTKSSGNWESHLFRFGCNHFYRNILTRWAFTSLKESEWARDYYNSKKDEGKSHHHALRCVGRAWIRVAFALWKKREKYNEDKHMAAVQRHQIRNKLAKKSA

SEQ ID NO: 177756 - protein, 416 aa, unidentified
MNAVGIDVSSRKSTVAVLRPLGEVVCLPFDVTHDIAGLASLAEKLKAIDGETRVVMEHTGRYYEAVAKALHEAGFFVCAVNPLLIKEYGANSLRRVKTDKADAIKIARYALDNWADLRDFTPMDAIRYDLKTLNRQFQLASKQRTASANNLIALLEQSFPGIRKCFDSPVRSDGTQKWVDFAHSFWHVDCVRKQPFPAFCERYRKWCKRHAYLFKLSNAEEVYALAKRAVVLTPKSKVVKVLVQEAANQLISISRSVEVYRAEMDRLAAMLPEYPVVMAMYGVGKSYGPQLMAEIGDVRRFERKQALVAFAGIDPMPNQSGDKNVRSNKSSKRGSPYLRKTLFNVIRTYLQCAPQDEPVFQFLNRKRAEGKPFYVYMLAAANKFLRRYYAKLRDYFASLDTLQPVAPIPTTLKATL

SEQ ID NO: 177757 - protein, 400 aa, unidentified
MRVIFGIDVSKASSEVAILVNGEKIHGYTIPNDAIGFNRLLGDLRTVYQPEIVFEATGVYSRRLQAFFEDNSYAYIRLNPLESKKQLDSLRVRKTDKIDAEKLATSQFILNRKPSYVQEALYQELRDLSRFYQNLTEDIVCSKNRLHKVLQVTFPELENILSSPTGKQYWNLVMAFPCNSFVLELDDAALRAIIRQSTSKRISEKRVTYLVDKLTKLANHSYCAVKKTSPMMEEVKYYAGELLRLSEYRQSVLEEMITLAQPLPEYEILLSIPGIAETTATSIIGELGDIRRFHSANQINAFIGIDLRHYESGDFLAKEHITKRGNPYARKILFKCIHNIASASHTNPSHIADFYEKRKRQSQVTSTKPHTIASIHRLIRTMYYLITHNKLYDYTSTQNR

SEQ ID NO: 177758 - protein, 346 aa, unidentified
MKRYLGIDMHRESCTVVVLSAGGKETDQRVVPTEAAALVQYVRSLSGELHICVEEGEWSEWLVELLSPRVHRVVSCTARGRRGPRSDAKDARELAERLRTRQTGPPVYKPLAAQWGRLREAVRLESKLLGDEVRAKQRLKSLYRRRGVACVNAEVYSPRLRGEWEAKLPPSLRPSAELLGQELDQLAELQQIAEQQMCDAAGKFPMWRKLQTVPGIGQKRAAQLLAIVVTPHRFRTKRRFWSYCGLGVVTRSTSDWVRQADGQMLRVPVIQTRGLNKASNRQLKGIFVGAARTALSCRPPNPLLEAYERIVESGTKPNLARLTIARKIAAVVLAMWKTESEYRIMN

SEQ ID NO: 177759 - protein, 359 aa, unidentified
MDQPQENSSTVVGGVDTHKDLHVAAVVDHHDRLLGTASFPTTRHGYKTLLSWVRSFGTVSRVGVECTGTYGAGLLRYLQQSDIPTLEVTAPDKTVRRKRGKVDTIDAENAAHAAYAGIRTVTPKTRDGMIEALRVLRVCRKTAVAASRIALQMIQMQIISAPDELRDQLRNMTRMQLVRTLAAWRPDLSRYRNVTTAYRIAFKSLARRYVELHDEIADLDVMIKAIVDELAPELVSRLGVGYESASQLLITAGDNPERVHSEAGFAALCGVSPVPASSGKTQRHRLNRGGDRAPNSALHIIAIGRLRLDPSTQDYVAKRTEQGLSKLEAIRCLKRYIARELFYVLQRRNHTISQTQIAA

SEQ ID NO: 177760 - protein, 328 aa, unidentified
MCKGILYVGVDVGQEDLWVAIEGRKPCSFKHTIAGVRGLYNLVHKIYTETTLHFCMEATGVYSLKLATSLSVYPEVQVSIVNPAQIASFAKAQLRRSKTDKIDAQVILAFAQSQHPQPWAAEPKPLRQLYELVVQADALLETQRRWVNRTHTQTYIPELPTVVSKTTSALKKHLERQIAKVEKAILKLCETDPVLKTQMELLCTIPGVAQRSASRLLAYGKIALTGYSARALVAHAGLAPKHRQSGTSLLAKSHLAKEGNKRLRHALYMPALVGIVHNPLLKKYYKRLVAKGKPKMLALVACMKKLLIMIRAILTQKIPFNPAIQSLT

SEQ ID NO: 177761 - protein, 343 aa, unidentified
MPHYVGLDVSQKTTAICVVDAQGKRLWRGVCATDPGPISARISQHAGVDAKVGIETGSMTPWLVHGLRAAGLDVACLDARRVKAALQMQLNKTDENDAEGLAQIMRTGWYRAVHVKSLDAHRARALLGARAQLVGMTTRLSNMIRGVLKTFGLLPGAGRGLRFDRKVEALLEGAPEIALVVRPLLATWRQLRQQIAVFDKAVLQQVRADPICRLLMTVPGIGALSSLMYVSTVENPSRFSRSRAVGAHLGLTPRRYQSGETDRSGHISRCGDGLARTLMYEAATVILHRVKRSLHLKDWAEAIERRSGSGKARVALARKLSVILHSVWRSGEPFRWAAPAMTA

SEQ ID NO: 177762 - protein, 416 aa, unidentified
MELIPIFRRVIGLDIHQAKVSACAIIENDDGSVTVELREFGGFKRDRRALAQWAKSIAPDVVVMESTGIYWKSPYAALESVGIIAWVVNARHVKNVPGRKTDVADAQWLATLARSGLLHGSFIPPSTIRYLRLIARQRQKLGGILSSEKNRLHKILSDAGIRLGVVVSDIHGQAARAMIKAIIAGKAISEVLDLAGRLHASREELFEALQPEELSDAHLFVLTEIMAHIEELEARMGRFEQALLQGLSAWQPQLTLLQTIPGIDAMGAAMLLVEIGTEMQTFGSAERLASWVGICPGNNESAGKRKSGKIRKGNAWVRRLLCEFAQAASRSRSALKGKFAALSIRKGHKKSIVALAHKMLRIIFALLKDGKPYRDKTIDYEALSVQKNAPRWLKMLKKHGFLPSDSTVAVSAAVAA

SEQ ID NO: 177763 - protein, 408 aa, unidentified
METLHRRCAGLDVHQKEIVACRRIASGRKARSELARFATTTQGLLALSAWLAEAKVTHVAMEATGVYWKPVWHVLRHDFELILANASHIRNVPGRKSDANDAAWIADLLAHGLIRASFVPPQPIQELRDLTRTRRELTREIVRHTQRIQAALEEANIKLASVISDILGLSGRRILKTIVAGESDPRRLAELGHPKLACTREELAAALKGRLRDHHRFLIGQHLKMIEQVEATIGEFDARIEAALAPFRDAAGRLKDIPGVSDNVAQTVIAEIGADMNAFPTADHLVSWAGMCPRLDESAGRKRSRRLRKGAPWLKPVLVKAALAAVKVKNSSLRARYFSLKPRLGHKKAIIAVAAAMLRIVYHMLKDGTFYQDLGPDYRRPRNPQRAARNLANRIRSLGYVVDIKKAA

SEQ ID NO: 177764 - protein, 337 aa, unidentified
MKSQQPDTSVKENQNEKCYSLKIPAQPDNMLHFFQKRFPGKRLVYAYEAGPTGYALYDHVTAQGYDCMMVHPGNIEKAPKDRVKTNRLDSLKVLRQLHGGNLKGIRVPSESYRQLRHLTTLRQQYAADQRRAKQRIEALLTFENIQLPFVTERRWSLRHIQAIKELKLETIRRFRLDSLLDDLAYARQQLLRIHRQLREFCKQNDAIQKNIQLLRSIPGFGFVIPTYLLGRIGDPAYLRTARELGAFAGVVPSERSTGDTVRKGPITHMGDPILRGLLVEGAWIAIRKDAELRQFYDRIRSRNSGDHGARIAIVAVARKLAARAHRVLKDQKPYVIH

SEQ ID NO: 177765 - protein, 432 aa, unidentified
MRSIGLDVHTRFAEVAISGPGGKVRPGQRVAATPAELRAFAETLGPDDQVVLEATVNTWPIADLLRAHAGRVVVSNPMRTRAIAEAKVKTDKVDAAVLAQLLAADFIPEVWAPDPATRVLRRQVAHHASLVSQRTALRNRIHGILHRNLVEAPGTDIFGKAGRRYLEQAPLPGDELDEAPGTDIFGKAGRRYLEQAPLPGDELDQVRSALRLMDALELEVQAVEQRLASLALEDDRVRRLMTIPGVGVTTAVALIAVIGDVTRFPRPQQLVGYLGLDPKVRQSGGRPAYTGHISRQGQAHARGLLVEAAWAATRSPGPLRAFYERLRARKARTVALVAVARKLTVLAWHLLSKQTDYHWTQPRLLADKMRRLELQAGYPRLPRGTRTRSALTHAVQRDQERRLLAQAEEAYRTLVAARQLKRDAVATKGGAS

SEQ ID NO: 177766 - protein, 338 aa, unidentified
MTIVMGLDQHRAQITAEWLDTTTGEISRRRVAPADRGGVRRFATCFRGQELEVALEATTGWRFVVEEFQAIGAEVHLAEPAETAARRGTKKRAKSDRADARHLRELLMVGRLPESWIPPGHLLELRARVRLRHTLVDQRREWQQRIQAVLYHHGVPSRSWLLGTESRAWLAALQLEPAAREQITVALAVIDALDAQLAPLDRELRDYARRQAGCQALMRHYGIGPLTSITILAELGDTRRFNSSREAVRYSGLDITVHQSDARRAPGRLSRQGPPALRWALFEAAQCARRPGSPDHTYYVDTAARLGGNRACLAVARKLLKRSYHTLRELGEEALQPA

SEQ ID NO: 177767 - protein, 391 aa, unidentified
MSCYDKKEVIARVKKRGCATVKALTSIRRVMQQLTIGKETSAMKKCNTVSFEGQVIYCGIDVHKGSWVVNLRHCHRELAKFSMNPNPEMLAKYLKKNYPGAEYQSTYEAGFSGFWAHRKLCDLGIKNIVINPADVPTSGKERDRKNDTIDSRKLARELENRTLEPLYIPSEENLELRNLVRRETQLTGNITRIKNRIKSHLDFVGLKFKSWSGSSLKIMHADAEKRYDYTLQSMLRELRFLREEKLRVIRDEQKCLKRLKREKIQKHLQSIPGIGFRTGVILQAELWDLLRFKDKNALSSYTGLAPRLVGSGENEVIRSAGNRKKKELHYVLIEAAWRSVSYNVEMRARYGSLLHKGFKPQRAISIIAKRLLYTIRAVWLQEREFVKPVNE

SEQ ID NO: 177768 - protein, 418 aa, unidentified
MKIVHRICCGIDVHKRSVAATIASTDADLVTTYTTRSFPTLGPGLAELRAWLAQNGCRDVCMESTGKYWIPVYNALEEDCEVVLTHPKYVRAIKGKKTDAKDSKWIADLFKHDLVRSSFIPPRDIRACRELSRYRFKLIGMRTAEKNRYQNSMTVSGIGLANVLSDPFGRTAQDIMAHILSPGAIDLEACAKMVRGRAKRNTRLILDSISGCEVPPDQAFKMREAGAHMGYLDAMIARTEAELAARLVPYETQIRLLTSIPGIDELAAALVICEIGVDMGVFEDADHLCSWGGLAPASNESAGKKKPARVSRAGVYLKPLLVQCASAAVKSKEDPYFAAKFERIKRRRGHKKAIIAVARMMLVCIYHMLATGECFNPSDRDRPEAAEPRAPRITEEAAIGFLAGLGYDVTSLHKGATA

SEQ ID NO: 177769 - protein, 355 aa, unidentified
MNSSTQTNKLSFKGQLFFIGIDVHKKSWTVTIRVNGMHLKSFTMEPSALKLAKFLNKNYPGGIYYSVYEAGFSGYWLHYQLLDLNIKNIVINPGDVPISNKEKSYKDDVIDSRKLARELENNSLKAIYVPTLKQSATRQLSRLYALQSEQCRRTKMRIKSFLNYLGISIPVEVGERWTNRLIKWLERLEFKEEGLCYYLKQLTKDLKRKRKEMAKTIQKIKDHYAEEEIIKLLRTIPGVGLITAFTFFAEIMDITRFSNQDKLASWVGLIPSLKSSGERVRVRGLNNRQNKILKWRLIESAWVAIKHDPALTACYLEYVKRMSRQEAIIKIARKLLNRMRSIWLNREAYQKGRTL

SEQ ID NO: 177770 - protein, 394 aa, unidentified
MRFVGIDIASETHVVAVVDETDAVLVRPTKFTEDAPGYDRLFGLLGTPADTLVALEATGHYWKNLFAVLVTRGFAVALLNPLRTRRFADEELARTKTDAIDALGIARFAAQKRPAPTRLPDRATEELRELVRLRDRLVQDFGDRLRQLHRLVDLGFPEFTRHVKSLDSELATAILHDYPTAAAFRNVSARRLAGLRYDGRHKVGDDLARALLAAATRSVGQHHGAAYRLQVRYACEDLDLLRRRLRTLERDIERTLDDHEIGPLLTTIEGIGPQTAARLIAELGNPAEFRSAAALASYVGVIPAIRQSGTWTSSRAGLHPLGHAALRAALWMPVLTAVRKNPWLRAYYQRLTARGKLPKVALIAAMRKLLIAVYTVAKTRRPFVSQRAPQEARA

SEQ ID NO: 177771 - protein, 366 aa, unidentified
MFSERTSVGLDVHARSVAAAAIDGVTGELFQAKLTPSHEHVRGWIAGLPGPVAVTYEAGPTGFGLARALAADGIRCVVAAPSKLQRPSGDRVKTDARDAVHLARLLRLDGVTAVVVPSVGQEAARDLVRAREDCRGDLMRARHRLSKLLLRHGIVYSGGQAWTGTHDVWLRRQRFDAPAVQLAFESDYDTVLATSARRDRLDAAITTMATSSEFTPVVRALSCLRGVSTLTSFALAVEIGDWHRFTGNTIGAFVGLVPSEYSSGASRVQGSITKTGNTHARRLLIEAAWHHRARYRVGATMLARWDLASPAARARGDEGNRRLHARWVRFDDRHKRAVIANVAIARELAGWCWSLATLEENPTMTG

SEQ ID NO: 177772 - protein, 400 aa, unidentified
MLSIGIDVSKGKSTVCGMKPGGEIVYTPFEVQHTREGMSELVSLLHNSGEEVRAVLESTGSYHCPVVAALLENGIFVSVVNSLRMKRFCSQSIRKVKTDRIDAMQIALYGLAYWQELQPARLPEDTYRELQLLARQYYQMTSMLIKAKVDFNAICDQVLPGMQELMNDHAGRHKLSDFVLRYRHTTHILEMGETRFRKDYCKWAEKKGYRNCERMAAHIFATAQNGIPVLPNAPSTQIVITEAIRVLHTVEASRDAILTQMQALAKTLPEYSLVREMPCIGDTLAPRLIAEIGDVRRFHSKRALIAYAGIDAPPYQSGKFCANNRHISKRGNRYLRKTGYEVMQSYVMHKPANDPIFTFIEKKRSEGKYGKLAMVAGLNKFLRVYYGKVTELYRSSSAIE

SEQ ID NO: 177773 - protein, 318 aa, unidentified
MAMTVRTTFVGIDVSKEYLDISSDPQGPTLRVPNQPRDIQRWLKSLPPGPVAIALEATSTYHLELAMRAHQAGHAVYLIDGYRLSRYRDSIAQRAKTDAADARLLRRYLVHEHAALRPWDPPARPYARLQTLLRRRAVLVKTRTALRQSFDAVPELRQAGQTLVKQITALDRHIVRQLVRTLSEAGWFHHFQRCRAIEGFGEVISAAAVTAFHRGPFKNSDAFIAFIGLDVRVRDSGKTRGQRRLSKKGDPEMRRLLYLAAMQAVKSNTWKPVYQRYLDRGFAKTQALVIIARKLARIAFALMKNQSEYRPATAHAGC

SEQ ID NO: 177774 - protein, 348 aa, unidentified
MKNKSFVGIDISKNVIDVSIFREDTNIKMFPHEVFNNTRKGFGDMCSWLKKSRVVLSQALFGMEFTGCYSLDLEKFLTSKNYSFCMLSTRIVKHHPMGTIDKRDKNDSAKIADFLYRYDGTECAKPYKLPSKAMQQLKQLVNERKFLVEQRTNFMNRMQMFETKEDSAMYESYIKKLNYDIEKIDQEECELMSKEEDVFDTFQNLLTIPGIGFVNATNIIAITRNFTAFDTARQYARYVGVAPCSHTSGTSVKWRARPSAHCNGQVKADLSMAALRAVEYDVEMQMFYNRKLGGRKDSDTKRKALNAVKFKLIRRMFAIGKQKRKWEVLNTSDDRKNLHIEKSKASEL

SEQ ID NO: 177775 - protein, 338 aa, unidentified
MTIVMGLDQHRAQITAEWIDTATGEVSRGRVAPADRAAVRRFAARFGGRDLEVTLEATTGWRFVVEEFGAVGARVHLAEPAETAARRETKKPAKSDRADGRRLRELVMVGRLPESWIPPAHLLDLRARVRLRHTLVDQRREWQQRMQAVLYHHGAPARGGLLTAESRAWLAGLSLPAAAREQITVALAMIDAHDAQLAPLDRELRTYARRQAGCRALMRHYGIGPLTAGTILAELGDTGRFSSSREAVRYAGLDVTVHQSDARRAPGRLSRQGPSALRWALFEAAQCARRPASPDHDYYTETAARLGGNRACLAIARKLLKRSFHTLRELGEEALQPA

SEQ ID NO: 177776 - protein, 428 aa, unidentified
MEASASNLEIVAWVGLDWADQRHEICLQAVGSDRLESFTVEQKPEALHAWITQLRTRFPQGRIALALEQSRGAVIYALMNYDFLLLYPVPPKGLARYREAFTTSGAKSDPTDAGLLLELVRTHRDRLRAWQPDDALTRQLRLLVEHRRRTVADRTRLTNRLTALLKTYFPQALDWAGDLRSGAACEFLRTWPTLEAVQQARRSQLRRFYHDHRRLAAENLKELLQQIDRAQPLTRDRALVEASALMTQTLAAQLEAVIAALEKLDQALAELFGQHPDQELFSRLPGAGEALAPRLAAAFGTDRHRFQSAEELQQFSGVAPVTEASGKMHWVHWRMACPKFLRQTFHEFAAASTRRSLWARAYYDRQRQRGASHHAAVRALAYKWIRILYRCWQTHTPYDEKRYLEALRRRRSPLWLAAAATSTQQARS

SEQ ID NO: 177777 - protein, 318 aa, unidentified
MNIIGLDISKDTIDATLHKTNGSIHYIKFKNNDDGLKQFRLWIKGNRIRKVYIGMEATGIYYEKAADMLSSYYTVYVINPLKIKDYGKSRFNRTKTDKADSNLIADYIKRHQDTLIPYQIPKNKALQKLINLKNQLQQHQKQIKNRLHSTEEDFIRNIHQDLIDTIQDKMEQVKIAISEQIKKQTDNNHYRNLQTIPSIGKDTASVLYAQLTEKHFKTANQFVSYAGLSPAIIQSGTSVRGRGRLSRYGNRRLKSTLYMPALCAYRFNAFPKLINNLKKAGKPKMVIIVAIMRKLAKLAYYIVKTGQPYDAERHRLNQ

SEQ ID NO: 177778 - protein, 351 aa, unidentified
MRYYVGVDHHKRFSYMSVMDEKGDVVKEGKVVNTKESVSRFLGEEYSKDTSAVLEAGRNWTVMYDWLEDELDEVKLAHPMKVKAIAEAKIKTDKIDAKTLAHLLRCDLVPEAYVPDKDTRVVKNILRQRMFFVKLSTMVKNRIHIIIDRHPEVKNQIDPSDLFGKQGMEWLKQLALPKDEKRILDEEIELLGHITDKITASNHWIVQLGKSDPRVQHLMTIPGIGKFFALLIMAEIGDISRFSDKNKFASYAGLIPSVFSSGGKTFHGRIIKHGNKYLRWALIEAVWPAIRKDLSLREYYESLKIRKGANQAKVAVARRISIIVYSVLSQNRTYKINYSGCPHIILAEATR

SEQ ID NO: 177779 - protein, 376 aa, unidentified
MEHDSTLYVGLDVHKDSITVAYALGAGEVELPGKIGTTKTDIDRLCKRLQSKARHIRVVYEAGPCGYGLYRQLVQKGFECMVCAPSLIPRKPGERVKTDRRDAVKLVRSLRAGDLSAVYVPSVEDEAFRDLARAWVSAKDDLKRARQRLKAFLLSHGVRYTGRADWGPTHRRWLSTYAFDSPWQQLAFEELRRTIEDRLAQCERLEAALREAVLNWRFYPAVLGLQTMRGVQFTTAVGMLAELGDLSRFTHPRQLMAWLGVTPSEHSSGDKRRQGSITKNGNSYARKLLVEAAWSYQYPARVSPEIQRRHEGIPKPIVDRAWDAQLRLCRRYRKLVARGKQKNIAVVAIARELAGFIWDISRQSMSLATRREGLTA

SEQ ID NO: 177780 - protein, 347 aa, unidentified
MKEQNNRSEFTIGLDLGERRHRFCALNGKGEVVEEGSVLNDRASLARLTARYGGALAVMEAGAHSPWVSRYLEGLGWEVIVSNPRKVRAIYQHERKSDRRDALMLARIGRMDRALLYPVRHGSEEAQQDLLRIKLRDSLVRARVALINSVRFSLKSLGYGVSNPSSERFHKVAMESLPEAVREMIAPSVQALAELSARIAVLEREISLLARTKYPQTLWLQQVPGVGAITALYFVLKIEDPKRFKNVRAVGAYTGLCPRRDQSGESDLQLRISKRGDAYLRRLLVSAAQYILGPFGPHSALREYGLRLAADGTTRAKKRAVVAVARKLCVLLLSLWKNQTPYQPYPA

SEQ ID NO: 177781 - protein, 406 aa, unidentified
MMTLVDRRVTGGVGTHADVHVAAVCDTDTGRELDTASFPTTTAGYVALADWMTSHGSLDRVGIESTGSYGAGLTRHLTGGGVEVIEVDRPDRKARRRDGKTDTLDAVAAARAVISGRATGIPKARDGSVEAIRQLEVVYHAASKDRTRAINQFKAIIVAAPAGLRHRLRDGLSFLNQLGRARRFSDNHPDLVEQQTRFALREIARRIEFLDAHLARLQGRLNDLVTVHCPALIGLSCVGVHSAAQLLAAAGDNPQRIRSEAAFAKLCGVCPMPASSGKTNRHRLNRGGDRRANNALFTIVLNRMQRDPNTRAYVERRTAEGMSKKEIMRCLKRYVAREIYNVLVNPPAELVTGAEVRELRNQRGLSLAVVAEQFSTCAIQISRLERGLLRDTRRLEKIRDWLQQTP

SEQ ID NO: 177782 - protein, 345 aa, unidentified
MDHFAGLDVSVKETSVCIVDDTGKIVREVKVTSEPEDLLQILSNPSYHFKRIGLEAGPLSQWLYSALAEAGLPAICVETRHMRAVLKAQINKTDRNDARGMAQMMRVGLYRPVHVKTLRSQKLRMLLTHRKLLQSKAIAIDNDLRGTLRNFGLKVGMVGTVKFEARIKELVENLPDLAELIEPLLVVRRVLREQFCIQHRRLLAIVRDDEVCRRLMTTPGVGPVVALTYRATVDVPARFRKSKSVGAVFGLTCAKHQSGESERSGRISRCGDEMMRVMLYEAAQSMLLHSKRWSWLKAWAMQIARRRGMKKAIVALARRLAVIMHRIWVDGTEFRWTREQAAAAA

SEQ ID NO: 177783 - protein, 453 aa, unidentified
MSTQLSRGIRTSRSDERDLIGALNKHRVCPVRRPDWWCTPITRKEDNYIMTKNDLVVIGGVDTHKNVHVAAVIDDRGKILDTSQFVTTSVGYRQLLKWLRSFGELAKVGVEGTGSYGAGLHSFLASEGVEVLEVNRPNRQMRRRRGKSDTVDAEAAARAALNGEATVVPKSHDRIIESIRALRVAFTSARNSRTRVALQIRDLIVTAPAQLRAEIEPLCTAQRVTRCARYRPGDPADPREATKLALRSLSRRYEALSEEMDELSVVLDQLTYKANPALRSARGVGVDVAAILLVAAGDNPERLRNESAFAALCGVSPVQASSGMVVRHRLNRSGNRQANNALWRIAVVRITHDEETKIYAAGRLAEGKTKREIIRCLKRHIAREMFAHLTKPAVVPVGTELRTARNAAKISLTTASTELGTYALRISRLERGLDHDREFAEQYQAWLAQKQAA

SEQ ID NO: 177784 - protein, 367 aa, unidentified
MKEQENKRNKITIGLDLGDRRHRFCVLGEKGEVLEEGSVGNNRAALSELGGRYPEALVVMEAGCHSPWVSRHLEQAGCEVVVSNPRKTRAIYQHERKSDRRDALMLARIARMEPALLYPVRHGSEEAQQELLRIKLRDSLVRARVALINSLRFTLKSLGYSIANPSTERFHKVIQSALPQSVAQVIAPSVQALEELTLRIKLLEREISDQARSKYPDTAWLEQIPGVGPITALYFVLKIEDPARFKRARDVGAFLGLCPRRDQSGENDPQLRISKRGDAYLRRLLVSSAQYILGPFAPPSALRQYGLALASGATARAKKRAVVAVARKLAVLLLTLWKNKSSYEAFPQRSSREKMRTNDLERLRCIA

SEQ ID NO: 177785 - protein, 338 aa, unidentified
MKHVAIDLGGRESQICVRTADGSIVEERRYQTRLLPNLLKQWEASRVIVETSAEAFAIADAAIEAGHQVRVVPATLVKTLGVGERGVKTDRKDARKLSEVSCRIDLPSVHIPSDLSRRLKSVCGNREELVECRTKLINNVRGWMRTQLWRVRTGGAPTFALRVREHSSTTGQQLPAHAERTLTLIETLTIEIRKADQEVGEIAKNHAICQKLMTVPGIGPVTAVRFIAAIDEVKRFPNAHALQSYIGLTPGERSSSESEHRMSITKAGSTKLRRTLVQAAWCCLRLHPEDPMVIWARRLAERKHKFIAVVALARKLAGVLFAIWRDGSTYRPTAERTS

SEQ ID NO: 177786 - protein, 423 aa, unidentified
MEVGRVEVAQDEQEIIARVAALDIGKAEVVCCVRVPGKGGSRLQEVRTFNTMTRSLLVLSDWLAGLGVTRVVMEATSDYWKPPFYLLENTFQTWLVNAKDVKHLPGRPKTDRLDAVWLSKVAERQMLRASFVPPAPFRELRDLTRYRVDLITARTAEKQRVEKLLEDALIKVTVVVSDVFGVSGRDMMAALVAGQRDPKVLAQLARGSMRGKTGRLEEAFTGRFTEHHAFLLRTMLARVDAITADIDMVQARIDEQIAPFAEAVTRLDEIPGIGITAAHTIIAEIGLDMSRFPTPAHLASWAKFAPGIAESAGRKKGNSGTGHGNRYLARALGEAAVGASRTHTFLGERYRRIARRRGSKRAIVAVGRSILMIVWHLLTDPEKRFVDLGPGYYESRINRNRSTRNHVRELQALGYNVILEPAA

SEQ ID NO: 177787 - protein, 420 aa, unidentified
MKVVYQTCCGVDVHKSFLVATIIKTSSGVLPSYQKKRFSTFNNSILEFKKWLLDNSCRDVCMESTGKYWIPVFNLLEDEINVTIANPKWVKAVKGNKDDTKDSKWIGDLFRLGLVPGSYIPCKPIRILREFTRYRYKLTSCRSSEKNRFQNALTVCNVALDSVVSDIFGKSATSVIDYLLKQSDNSINREEISSRLLRSLKKKSESVMESIEGYQMTDAQKYRMRLVHAHMNYITSTLADIDSMIDSLVEPYENAVQLLCTIPGVDRSSAITIISEIGTDMTQFSNSKRLCCWAGLTPGNNESAGKKKSVRITRAGVYLKPALVQVAHAAVKSNKSPYYKAKYERIMKRRGKKRAIIAVARMILTAVYHMLSTGEAWNPTDLYKIDMPEPLKNKQKEKAVKQAMKLLIAEGLIKESQLAS

SEQ ID NO: 177788 - protein, 427 aa, unidentified
MNLTQDAKICQVTEDTIIIGVDIASETHYARAFDWRGKELGNVYIFGNSAEGFYGFTSWMSELARKANKDHTIIGAEPTGHYWFSLGMYLRDNGIKMVLVSPYHVKRSQELDDNHPSKTDRKDPKTIAKLVIDGRYIEPYIPEGIYAELRVAMNCRWRIIREQTVIQNQIQRWLKIYFPEHKNVYGSFEGISSLMILRIAPLPTDVIALGVDGINAVWRKAKLRAVGIKKATRLCEAAAESIGCTDGSIAARMEITLLLDDYESKLQQYNAVMTTVEELCSQVPEVTELVKIKGIGLVTVAGILAEIGDLRRFDSPRQIQKLAGLAIRENSSGKHKGRTSISKRGRAKLRCILFRAAISLASQNKEFREIHRYFTTRAENPLKKKQSIIAMSCKLIRVFHTIIVKGYEYDPTKLLADIHRNKMPSAA

SEQ ID NO: 177789 - protein, 358 aa, unidentified
MDGSKEHPLMTAGLDLGDKYSYLCLIDQHSGEVIEEGRLRTTPEAFKRRFASEQPMRIAIEAGTHSPWASRVLEECGHEVLVANARKTRLIYANKRKTDEIDAENLARLARLDPKLLYPLKHRGEESQAHMAIIRSREALVSCRTQLVNHVRGAVKSFGARLPKCPAVSFHNKAAEHIPEALMPALGPILEQIGALTQRIRDYDRQLETISKERYPETELLRQVEGVGPLTALTLVLTLEDPYRFEKSRSVGAYLGLVPARDQSGDRDPQRRISKEGDELLRRLLVSGAHYILGPFGSDSDLRRHGQKIATRGAKNSKKRAVVAVARKLAVLLHSLWISAEVYEPLRNTQRSSGGQAA

SEQ ID NO: 177790 - protein, 322 aa, unidentified
MNKEQTYVGIDISKDNLDMAVFGSNQKRQFPNSLVGIEKAVAVLRGMGSIFVVFEATGGYELAFWAALTEAGINAAPINPRQIRDFAKAKGKLAKTDNIDAQVIAHYGQAMQPNPHPFPETQEQDVKELIARRSQLVEMITAEKNRLKLARRNRIKEDIKAHIGWLEGKLDDTDKDLRQAIKTNPVWREKDELLQSAPGVGPTLSATLLTQLPELGTLTRHEAAALVGVAPLNRDSGTMRGQRSVWGGRPRVRGALYMAALVATRYNPVIKVFYQRLCARGKAKKVALIACMRKLLVVLNSMLKYHAPWTQRTAPVLIGPCH

SEQ ID NO: 177791 - protein, 363 aa, unidentified
MQSKQISFKGQKVFVGIDVHKTTWSVTVLLEVGVPKTHPQKASAKELFDFLNRHYPDGEYHAVYEAGFSGYATYYALTEYGIHCIVVNAADVPTTQYENVMKSDPIDSVKLAKALRAGQLKGIYIRNRENLDDRAAVRYRGAIAREVNRYKTRVKHLLYSNGVDVPERFDKSGHWSRAYLNWLRTDVELLSSTRLSLDLLLDQAEIARQGLLKATLAIRHLSQSPKYADRYDLIHSIPGIGPICGMTILTEVEDVTRFRNEKQFASYLGLIPTCHSSGDKVIHGEKTFRGNKQIGPMLVEASWRAIYIDDALACAFFQYKHRGFNAQEAIIRVARKLSNIILSVLKNGKPYEPFMGNRHTTTE

SEQ ID NO: 177792 - protein, 317 aa, unidentified
MTKTSTWTAGIDTSKAKLDVAVHGLDQRWQIDNDKAGWRRLSRLLSQALVARVGIEATGGYERGVVEYLRAAGFVVFLLQPMQVRTFARLHLRRAKNDALDAVLIAAFAATIDRPNPEPDARLAQLARTLIFVEQIEEDIARLKTRLEQIDEARLRRLVEADIARLKARRKAEMARIVSTLRRHDDLAERLDLVLSIPGIGERTALALLIRMPELGRVSREEAAALAGLAPFDNDSGTHKGQRHIAGGRGRLRRSLFAAALPAAFRWNKALIELYARLLARGKAHNAALVACARKLLIYANTVVQRGTPWVEKAAAT

SEQ ID NO: 177793 - protein, 424 aa, unidentified
MKVTYKTCCGVDVHKSFLVATIITTTGGIEPSYQKKRYSTFNNSILEFKQWLLDNDCHELCMESTGKYWIPVFNLLEDEINVTIANPKWVKAVKGNKDDTKDSKWIGDLFRLGLVKGSYIPCKKIRILREFTRYRYKLVSCRSSEKNRYQNALTVCNVALDSVVSDIFGKSSTSIIDYLLEQSGNSINHEEIASKLLKSLKSKEDAVIESIEGYQMTDSQKYRMHLVRAHMDYITAEINDVDREIEKLISSDPDFENALQFLMTIPGVKRDSAITVISEIGIDMTQFSSSKRLCCWAGLTPGSNESGGKKKSVRVTRAGVYLKPALVQCAHAAVKSEKSPYYKKKYESLMKRRGKKRAIVAIARMILTAIYQMLSTGESWNPSDLYKIDIPEALLEKQKAKAIKQAMKLLQREGLYPPPEPIAS

SEQ ID NO: 177794 - protein, 348 aa, unidentified
MAHFVGLDVSVKETSVCVVDDAGKVIWEQKVPTEPADIIALLTSLGVTFGRIGIEAGPLSQWLVNALTVADLPVICVETRHMKALLTAQQINKTDRNDARGIAQMMRVGLFKPVHVKTLVAQEQRMLLTSRKLLQRKVLDLESDLRGTLRNFGLKVGIVGRSRYEARVRELVEGFPRLAAITEPLLAVRRVMRQQLAVLHKMLLDTVRDDPVCRRLMTAPGVGAVVALTYRATVDQPQRFVHSRAVGAHVGLTPKRYQSGETDYDGGVSKCGDALLRTVLYEAAHSLLTHSGKWSWLKAWGVRVAQRRGMRRAIVAVARRLAVVLHRMWVDGSEFRWSKDSAAVPAGA

SEQ ID NO: 177795 - protein, 393 aa, unidentified
MRNPYERVACGGMDVHYKFSNVTWRGVMGDVVFRERLDHRDRQGLRKQVAAWPKGVPIVMEASFGWGWLSDEMAAAGLDVHLSNCFKVERMREARGDVKTNKKDADLLSLLPMEVTAWWEVWRSPPVVRDHREWMRYRAGLVAAQTETKNRIHAVCHRHGIFYEFTDLFGGKGRRFLKAVCQEGRHAGGTLAEGALEALRGLMRLLEHLRAELATVAWHLRRELSRDELTRRLDGIPGFGLILSHTVESEVGRIDRFRGAKALASYACLAPRADETGEAKPGRSPQGRHLGSRGNLVLKWTFIEAAHGAVRHGGKWRAMWDRATDGGKKDKNRGYIKVARELVTVVDVVWRKGVKYREQSPARPGSRKAGRRRQGDSRPGTGQPSAAMVHAKA

SEQ ID NO: 177796 - protein, 461 aa, unidentified
MRIIGLDLALTAEHKALIADARGQPLAPIVSLRTTASDLARLFQRAREGASPDEPVWLIMEPTAMAWFPVAVFAQQHHVIPYLINSQQVADLRRYYKKHAKSDRIDVRVLVKLPVISPEKLHPLTLPSATLFACQRGCKELDHLMTLTTALQNRIHAIDVFAWPGLDAVLSEPFSPLARWFRQQWYQPPQVIAAGAAGLEQAWHAEPTAAEFAAPTDWAAALVRLAHQTLALYGTDAPYLDYSYLQAEVTREQTLLAVVELQHHTLQLKTVRPLYRQLHPSRNLETLKGVGQDGAAVYLSFIGDPQRFEDHSHFRSWTGMIPDSKQSGEREAKGLHISQAGPDLIKKFAYLGAETARQWDPQIAAIYYDQMVEHGKHHTQAVCACATHLLDRIWTILKEDRPYELRDVDGTPVTVERAREIIAACYTVPKAVRQRNNQRTRRERRERRSERKVERESRAGE

SEQ ID NO: 177797 - protein, 337 aa, unidentified
MQVTIIGLDISKNVFQVHGANKTGELVIRRQLRRREVRLFFANLEPCIVGIEACHSSHYWGRELIALGHDVRLIPTQYVRPFRRGGKNDANDAEAICDAASRPAIHGVAVKSAEQQAIQSLHRTRERLIHERTGKANQIRSLVAEEGVICPRGLAQLRRCPHGLIADDTQITPLPRSLAGLFLEQLAALDGWISELDKKILALAKASIVCCRLSRLPGVGPVTATAIVGSVGNAHAFKNGRQFAASLGLVPGQHSTGGRTLLLGITKKGDTYLRKLLIQGARAVLRVISRHDDRQSQWGRQLLARRHKHVVAVALANKLARTIWALLVKGEGFVMAR

SEQ ID NO: 177798 - protein, 417 aa, unidentified
MEDNASASPCRYIALDIHKYYSVVAGVDREGEEILSACRVEHLDLESWSIKHLLPTDRVVIESTTNAWHVYDLLEPLAGEVLVANPIKVKQIACARVKTDKKDTFILARLLAANLVPTVWVPPKHVRELRQLISHRRRMASMHTQVVNRMHSVAHRHHLNHPKGKDFQAKNTGWQRDESLSRLEKMQLELDMETREHLEKQMERMTRELARMSHEESWASEMLYLMQIPGCGVVTGMTILAAIGDITRFETPKALASYSGLVPGLEQSGVKLRGKGITKEGRRELRWVMVEVAWRAVKADPHWKKYFEELQRRMHKNQAIVAIARHLLTMVWYVLTRHEPYSHYSPERIAYKYLTWAWALQAEERQGMTRPQFARYYLMRLGIGRDLKRVALNPEFPYRLASEDEILALRPELRPPE

SEQ ID NO: 177799 - protein, 385 aa, unidentified
MSRSKFDPRRSLVALNQHKCWLAAVELSLSTWLVGGIVPGLACDPLKKLTPPDPETLLRILYRWRDEAVKAGCSITRIVVGYEAGRDGFWLARWLQAHGIEAYVMHPTSIAVSREHRRAKTDRLDVSLLKRSLLGWLRGEEKHCSMVAIPTVEEEDAKRPHREREQLVGKCTGTVNRIKALCIRHGIRGFKPKLRNAAQRVCTLRTPAGEALPPNTLAELQRELEHLRFIKQQIKQIEQARLQQLEQTPQQALNATRRDLLRVRSVGIETADLLTSEVFTREYRDQRAIARYVGLTGSPDESGSRRREKGLAKAGNARVRRGMIQLAWRFLIHQKDSSLVQWFEACIAAGKKRKTMIVALARKLLIALWRCVTLGEVPEGVILVD

SEQ ID NO: 177800 - protein, 417 aa, unidentified
MACDMITTNIHHEVGAALAVSGNMYQSTPSVIKLGVDVHQGSYTVVAQEDHATPQPAQRFAPAAFVPWVARLVARGHRVFVVYEACGFGFGLQRALVAVGAECYVVAPCRLDERGQRVKTDDRDATALCQRLSRFVDGNRKELAIIRVPTEEEERLRAEHRQRETIVRARTRLAAQGRALVVNHSGESHRTAPIPARWWRAAGWKALAGTLPAWLRERLEMLRPVLAILDTQIAALTGTLEDAAPEGLPAGQGKMTSVILTREVCDWHRFNNRRQVSSYTGLCPGEYSSGGKRVTGSVTKHGNPRLRAALVELGWRMVRFQPGYPPVAKRIHILGKGAKATGAARKKAIVAVARQLAVDLWRLNTGRCTAAQLGLRVTGGEPTQAPEEVVDSGGTVPREAALPPRGFTPPPAPEAAP

SEQ ID NO: 177801 - protein, 348 aa, unidentified
MSESEARPIIGLDIAKNVFQFHQVDSQTGEIRRRQIRRAKVIEFFSKLAPTLVAMEACGGAHHWARELIRLGHDVKLLPAQHVKAFLLRDKTDALDAQAIWIAAQQKHLKEVAVKTELQQACMTLHSMRQQLMKVRIMQTNALRGLLYEFGIALSAGHARLATAALEEISRAQLEGRLPEVVVFSMQEQLKRIDLIQEDIDQLGRRIAEMLRQNQQMLAIAEIPGIGPLTATALVASVGDISSFRTARQFASWLGLTPRQTGTGGKTQQHGISKRGDSYVRTLLVAGARAVIARSARSSWVEKLLQRRHINVVVVALANKMARAAWAVLAKGHAFDPCRWSPVEPSTV

SEQ ID NO: 177802 - protein, 343 aa, unidentified
MYYIGLDVHKKTISFCVKDAAGCVHREGKIGSTRHELDAWIRTLPQPRMIAMEATIFTGWIYDHLLPHAEKVKVAHPLMLRAIAAAKRKNDRIDAVKIADCLRCDFLPECHMASTEIRNRRRILRYRGLVLRQAVQMKNRVSGLLMETGVSYNKLRLHRMGYFAELMTTNEEVSESIRPLLKLCREHIDRSIRLDTTLLRSLEQDPLLADRLRRLRTIPGVGPITALTWALEVGDTSRFRSIKQAIGYCGLCSAEKSSADKVMRTPISKQRNKHIRQVLVEAARLAPRYSDELALLYEKERQRGNGNRATLAVARKMVALMLAVERRNTDFVPADEFRRTAAA

SEQ ID NO: 177803 - protein, 373 aa, unidentified
MAYQHYWVGLDAGHLETAVCLIDAEGGILFEAICETKSGPIRDILRRFGVEAAQCLTIEAGNGTQMVRELRSYGFPVQVVDVRKSSKFLAIRRQKTDVHDARGLAELGRLARSMGSQVFVKPMEHQNIRTLINVRRTMLKNRARTDALIQSIFRLYGGNVKLLNGRGALAAEVSDQVRKMRQHGLEIGVNLQPLVEISEALREQISALDRQMRDIASNNPTCRNFQTIPGVGAVIALSFYSAIGDPHRFERSRDVGAYLGLTPTLYQSGATSRRGRISRHGNKLTRMHLITAATVLLCRIEIESRLRTWGLELAQRVGFLKARVAVARKLAVIMLGMWKSGSPFRADDEPSLFLQQEEAGLDPVLISGTQISL

SEQ ID NO: 177804 - protein, 341 aa, unidentified
MQITTIGLDIAKNVFQVHGIDAAEKVIVRKQLRRGQVTAFFEALAPCLVGMEACATSHHWARELTKLGHEVRLMPAKDVKAYVKRNKNDAADAEAICEAVRRPTMRFVRIKSAEQQGQLMLHRARDLLMRQRTQVINALRAHSAEFGITAAQGREGIKELLAMVAHEEGSRLPSDAHASLTVLATQLQAVQTMIGSLEKRIVAQHRSNEASKRLETIPGIGVIGATTIAAVVPDPRVFRSGRDFAAWIGIVPRQDSTGGKQKLGPISKQGDQYLRRILIVGAHAVLRRARQQPETYPWLTQLLARRPFKVVAVALANKMARIAWALLAKGGTYRAPQLVAA

SEQ ID NO: 177805 - protein, 332 aa, unidentified
MMYVGLDYHKRYSVATKMGEGGEVLEQVKLLNHAPCLMEFLNDLPQDAKIALEATGSWYWLYELLEDRGTEVHLAHPLRTRAIAEARIKTDRIDSRILAHLLRTDLLPTAYIPPRAVRDVREILRYRASLISMRTQVKNKVHAILSKNGIRPRYTDLFGKGSLRQLQALDLRPAYALELRGYLRLAEALQQLIAEVDARVEEIATDDPRAILLTTIPGIGYYSALLIISEIGDIARFPNARKLCSYAGLVPRVHSSGGRTRYGPITKQGSKYLRWIMVELSPHFCRGSSRMERLYRRVCLRHGKNAARVAVAREMLKVIYYMLRDERPFFKD

SEQ ID NO: 177806 - protein, 400 aa, unidentified
MDKDRIVAGLDVHKDTIYLCVMDNTEAVIFAKVYGTLTPDLELMCSEMVSYGVTEAAMESTSTYWAPVWNALCESISLKLVNPYFIKQLPGRKSDVKDAQWIAECLLKNLIRGSFVPDKTVQDMRKYNRRIFDLNEDLTYNSNKQDAALQRCGFRLSNYVSRVNGKSYQKCVRAIITGITDPEELVKLIHGKTLRKYGRNIIKDAVTGDFHQADICLLKQYAELIGVIERQIEECRNALISMCQEHFPKQFKRLQSIPGVKERAASAIIAETGADMKPFEKATNLVGWCGLKPRNDISNNKVKSNRTTHGNRFLRQILIEISWVASRTRNCFFSNFSYVQCTQRHKNKMKIQVAIARKLLVAVWHMLTKDEDFIDVYLKRLEKQAEWQNDIQALESLLVE

SEQ ID NO: 177807 - protein, 344 aa, unidentified
MGHYVGVDVGLRSSSLCIIDEQGKVCLEREVASEIDEIADAIRSFSEHVDGVALETGNLTPWLTAGLRAEGFRVVVMEARQVKTTLSSLRNKTDRNDARGIAQILRTGWYREVHVKSLESQRLKTLLAARKALLRRRIDLENEVRGLLKVYGFKLPAQIYHARFDDMARQAVIADPALAEALGPLLDARSHLYRVFLEIDKRVRSIAHDDPICQLLMSAPGVGFVAALTFKAAVDDPKRFRRSKTVAAHFGLTPRRYQSGEKDNPGHISKAGDVEVRSALFMAANTIMNGRGQPSSLRSFGARLARRKGRKRAMVAVARKLAVLLHAMWTDGTLFCNVEKEALA

SEQ ID NO: 177808 - protein, 405 aa, unidentified
MDIHKNFLVACIATTDERSNTKHQVRRFSTFTGDLRKLADWLTANNCKDVCMESTGKYWIPVFNILEKTCTVFLTHPKYVKAIKGKKTDKRDAKWISELFKCDLIRASFIPPADIRQLRDLCRYYVKLTYMNTSEKNRAQNCLTMCNLKLDAVFSDVFGASATRVREAFFEHNSTDFDIAPLLHKGCKASVEGVKEALEGELSDVQVEKLKFIQQHQECIRNLQDALESLILRLAAKYQPQIDLLLTVPGISSPLTAIRIMAEIGVDMSVFETAKKLCSWAGLTPQNNESAGKKKTTRIGRAGVYLKPLLVQIALAVGVSNKHPELRDKYQALKKRRGGKKAVIAISRKLLTAIWHILSKNEPYNAELYRKSDAPPVNRVLNHEQAFALLRSRGYLICDAEGVVT

SEQ ID NO: 177809 - protein, 337 aa, unidentified
MYYMGMDVHAKVSMICVLDEGGKPVREVKVRGDLGHLVGAVAVLKNALGRLKVCYEASCGYGWLHDQLRSLGCQVQVAHPGKVRLIFRTKRKNDRIDAQKLALLLYLDQVPLAHVPPAERRQWRSLIEYRQRLVSRRGAAKNRLRALVRRNGASAPRGLWTRRGRAYLADVAFSECEAIQRDQLLEELQTVADQIRRVERILKTQADREPAVSLLTTIPGVGVRTAEAVAAYIDDPNRFRRNKSVGCYFGLVPCENTSVKARFGHITKEGPATVRKLLVEATWQAIRRDAHVRAYFDRVQRGDPNRKKIAVVATAHHLLRVMHAMFRTGEVWRSAAA

SEQ ID NO: 177810 - protein, 412 aa, unidentified
MDVFCGIDWAEDHHDIALAGRDGQLLARRRISDDAAGLTVLLSLLAEHGDSAEDPVPVAIETPRGLLTACLRATGRNVYPINPMAVARYRDRHSIAGRKSDHGDAVVLANVLRTDAYAHRPLPTDSELAQAIAVLARAQQDAIWARTSAHNKLRSHLREYFPAFPAAFASQRDDIIRPEARVILAAAPDPAAAAALTITQLRALLRKAGRSRGIDPEAARLRDAFRAPQMRQLPLVEQAMGRQALALLRQLDAACASAADLEHAATESFNQHPDAGIITSFPGLGPLTGARVLAETGDDRSRFADAKGLKAYAGAAPVTRASGETLAVLHRRVKNQRLAAAGYIWAFSALTASPGARAHYDRRKADGDRHAAAQRNLFGRLLSCLHHCLATGTEYDETTAFPAAAKKIPQAA

SEQ ID NO: 177811 - protein, 387 aa, unidentified
MIYVGIDIAKETHVAAAVDSDGVIVIEPFSFSNNHEGFKLLKSKLDSLDKSNLLIGLESTAHYAENVIFFLHGCGYELAVINPVQTAAMRKTGIRKTKTDKVDSLLICKTLMVNSFRRYTENDIKTLKLKSLCRFRQNLKKSKARLKIQLTSYVDVIFPKLQYFFKSGLHIKSCYELLKVYSSPDDIAALHLTKLSNILTKASRGRFGKQDAESLKSLAKSSVGVKNTYISIQITQTIAQIELIESQLNELETVIETAMDELDSVIMTVPGIGKLNGAMILGEIGDIKRFSDSSKLLAYAGLDPVINQSGKFNAKRTRMSKRGSKILRYALINAAWNVSLNNDTFKRYYDSKVAQGNSHYSALGHTAHKLVRVIFKLLNDNITFALV

SEQ ID NO: 177812 - protein, 367 aa, unidentified
MKKISTAATKQSKNVSEQKLTIGLDLGDRWSWYCVLDEAGAIVLEQKLGPTPKAMKEVFGAMPRSRIALETGMHSPWVSRVLSELGHEVIVAHARNVRLIGESRKKDDRLDAQTLARLARIDPQLLSPVKHRSAKAQADLTVIRARAGLVRARTALVNTARGLAKSYGERLRGCNVRNMNPEKAQGLSPELRTALQPLLAGIESLSERIRECNEGIERLARESYPQVAQLKQVKGVGTLIALTFLLTLEDAHRFRQSRDVGCYLGLQPGRRNSGQSEPQMHISKEGDPYLRTLLVQGAHYILGPFGADCDLRRWGLKLAERGGKSGKKRAIIAVARKLAVLLHHLWVSREVYEPLRHRQPTAMPAAA

SEQ ID NO: 177813 - protein, 360 aa, unidentified
MFTERRSVGLDVHARSVVAHALDTITGEVLRARLCPDPVEVTRWVKGLPGPAAVIYEAGPTGFGLARVLGSEQIRTVVAAPSKLQRPAGDRVKTDAHDAEHLATLFRLDAFTPVTVPDEATEAARDLVRAREDCRADLMRARHRLSKLLLRHGIVYSGGKAWTGTHQAWLRRQRFGSVLTQAAFDEAYDTVASITARRDRLEQRINVLAGDSQYTAVVRRLGCLRGISTLTGLGLAVEIGDWTRFSGNSIGAYLGLIPSESSSGQSRSQGPITKTGNSHVRRLLVEAAWHHRVRYVPGKTMKDRFDLASPAARARGDLGNRRLHQRWEQFQARKKRPTVANTAIARELAGWCWSLAVLDP

SEQ ID NO: 177814 - protein, 336 aa, unidentified
MEKKWFVGIDVSKKTLDCAILRLGSKEREAVCFQVENDDSGFQTLCTRLRSRKISKNQLVMVMENTGMYCFELCCFLESSAIDYCVFNALNVKLSFGLVRGKNDKIDAVRLACYARLHREDLEYSHLASPVLLHLRGLMAERKHYTAALAGIKNFEQAPKTKDCTSTDERVLECRKFLEEKIRAVEQEMHDLIRQDTDFLKSYTLLVSIKGISLVNAVNTIVYTNNFTLFKNARKYACYIGIAPFEYTSGTSVRGKTRVSKAGAKNLKSDLSMAARCAITYDNEIKEYYQRKRNEGKVFGVVLNAVKFKLVERMFAVVRRGTPFVDVYKYKSQTAC

SEQ ID NO: 177815 - protein, 407 aa, unidentified
MNAVGIDVSKEKSMVAALRPMGEVAFLPREFLHTEVGLEQMAYAILALGEDTRVIMEATGRYHEPVAAALHEYGIYVCVLNPLFIKQSGGGSIRKVKTDKADAIKIAKYGLDNWVDLREYTPMDTVRQQLKLCSRQYNLYMKTVISLQNNLISLTDKTFPGVNELFSSPERADGHQKWVDFVITFWHCDCICRVSEKAFTERYQKWCKRKGYHFSVEKALEVYAGSCGHFTTLPKNDNTKLLIISAAQQLLAGKMTLAALRAEMTRLARQLPEYDTVRAMYGVGDKTAPALMAEIGDVRRFPRRSSIVGFAGIDPGVDESGKHSAKSVPTTKRGSPHLRKTLYQIVCTYLKKSPADEPVYQFLDKKRSEGKPYFVYMTAAQNKFLRIYYARVKECLEAFDAQTTEQK

SEQ ID NO: 177816 - protein, 337 aa, unidentified
MNNRNVIALDLAKNIIQVAKVSKHGEIVFNKAQSPSKVRQILANSSPSIVAMEGCGSFHYWGRVAQSYGHEVRGMSPKHVKPYISKQKTDANDAIGIAIAAIQPNMSFSPVKNIEQQILQTLTVSRKFLDKQLTQLGNHIRALFYEYGITIPRSKKALKRVLTERNDLPEVLLPLLSVLKAQYQHIEQSLNDVTKNLELLVSQNEQCQRVIALEGVGVLGAAGLIASLSQTKHFKNGRCASVYLGVTPKQFSSGGKTVMLGIDKCAGDKQLKSCLFLGVLSYISNLPEKPKTLKQQWLLRLVARSGVKRACIALVNKNIRTAWAMLKQGTNYQPAMI

SEQ ID NO: 177817 - protein, 522 aa, unidentified
MASFDNNTMRGFRKEGKYTSSELSSSTLDDGTKVVTAPITNIKRRICGGIDVHKSVLMACACVTDKETLSAVFYVRQFTSSNSEIRRMAEWFAEYGVKDVCMESTGKYWIPVYDILEQNGMKPVLTHPKYVKQAKGRKTDFRDAIHIANLFRMDLVVASFIPPADIRDLRELCRYRLKLTYIRTSEKNRFQNSMTISKIRLDSVFTDPFGKSASRIMEYLINTPEDKIQDEKILSLVDRRVKASSEEILDSIHGYEFIGVQRDKLEIISKHIDDVNKCIDLIDKKLDYYRFKYASIINHLCTIPGVSTESALYILGEIGADMSVWNDSKSLASWAGLSPANNESAGKKKSTKIGKGGHYLKPLLVQCALASIKSTKKQPYFFRKYQTLKKRRGHKKAVIAIARKMLVSIYHMIKEDKDFLPIDYEQVMEQKQNDRELNLKNVILFLGERGVDDKVIRMIESQCSKEELSEGKAAETKPKKTAKEKQPESNTTAKPVKKRGSRKSSTRTKKETPSVQSSAATA

SEQ ID NO: 177818 - protein, 349 aa, unidentified
MILVGCDLHTRKQQVALLNTDTGELWDQQLTHAGDDVERFYAALAPPVTVGIESTGYSLWFHALLQRLGHTLLVGEAAKIRAMVVRKTKTDRRDAQHLRELLKDDRFPLVWIPDPTTRDLRALIKHRLRLVRIRTMVKNGLHAIALNQRLALGPSLWSRQGLAQLQALVLLPHTRRRRDDSLDLLQWLNRHIAELDLHVATAAAADPDARRLMTHPGVGPLTALATVLVLGPVGRFPGSKHVVSYIGLAPTVNASADKCRLGHISKQGSALLRWVLGQAAPLATRGDADLKRVYFAVLRRRDRPKAKVALARRLLVRLYVMRRDQIDYDEFCRRGRARRGGLELARTPV

SEQ ID NO: 177819 - protein, 401 aa, unidentified
MQATQQRDAVDVFVGVDVGKGHHHAVALDRNGKRLYNKALPNDEAKLRALIAELKTHGRLLFVVDQPSTIGALPVAVARAEGVLVAYLPGLAMRRIADLHAGEAKTDARDAAIIAEAARSMPHTLRSLRLADEQLAELTMLCGFDDDLAAQVTQTSNRIRGLLTQIHPALERVLGPRLDHPAVLDLLERYPSPAALAGTSEKTLANRLTKLAPRMGKGFAAEIVQALSEQAVTVPGTQAATIVMPRLAQQLAALRKQRDEIAAEVERLVLAHPLWPVLTSMPGVGVRTAARLLTEVAHKAFASAAHLAAYAGLAPVTRRSGSSIRGEHPSRRGNKVLKRALFLSAFAALRDPVSRAYYSRKIQQGKRHNQALIALARRRCDVLFAMLRDGTIYQPKSAPNA

SEQ ID NO: 177820 - protein, 382 aa, unidentified
MDVLHGCCAGLDVHKKTVVACARRVDPAGKVSKNIKTFATMTHDLLNLSDWLAARGVKVVAMESTGTYWKPVFNLLEGRFSVVLVNAHHIKQVPGRKTDVKDSEWIAQLLQHGLLRAGFIPPRPTRELRDLTRQRTQLTGERTSVANRIQKTLEDANIKLGSVASDVLGVSGRDMIEAIIGGEYDPVKLAELARRRLRGKIQQLQLTLRGSVTEHHRFLLRTQMDHLNHLERLIRGYDERIEEALRPFEAELGRLRTIPGVAARVAEVILAEIGSEMDRFPTAGHLSSWAGLACGNNESAGKRFSGRTTPGNRWLKTALVQSAWATYRAKGTHLSAKFRRIAGSRGKKRAAIAVAHTILVIAYHLLKEGTSYQEIFDPREAA

SEQ ID NO: 177821 - protein, 341 aa, unidentified
MRQYVGLDVSQRETAVCVVNETGQAIFEGKAKSHPGDLSKLLRKHAPLAERIGFETGAMASWLWHELRRVELPVVCIDARHAHAALSVRMNKSDQNDARGLAELVRVGWYREVKIKSEESQRVRAILVARFRLVSMRRDIENQVRSLIKECGLLFPRAIGQQFRNLVRELLNAGHQLLAVIEPLLSIHEHICQQQSKFDDEVRRLAKSDETTRRLMTVPGVGVITALTFRHTIDDPSRFRSASTVGAYLGLTPRRNQSGETDTTGKISRWGDRLLRTYLYEAATVLLYRTKKWSSLKAWGMKLAKRVGMKKAKVAIARKIAVILHCIWVDGTSFDWSHAPA

SEQ ID NO: 177822 - protein, 370 aa, unidentified
MSKKSSKLYVGMDVHKGSIDLAIGEATGDVRHYGRTGGDRGSLDRVVRKLESLGHPLVFVYEAGPCGFVIQRALSARGHECWVVAPSNTPRRNSDRIKTDRRDCLKLAGLARAGEITPIYVPDAADEAMRDLVRAREDAVAVQRQVRHRLAALLLRNDLRYAGRTPWSAAHERWIARLIIPSAAQRIAFEEYVQGVREASERISRLNQAIEEQLAQWRWQPVVVALQACRGIQLIHGVRIVAELGDLSRFTHPRQLMAYLGMIPTENSSGARRRQGAITKAGNSSARRAMIEAAWAYQYHAAVSPVIARRQAGLPKAAIDIAWKAQLRLCARFRKLRARGLNKNKIVVAVARELAGFVWAIARQIQPRTR

SEQ ID NO: 177823 - protein, 264 aa, unidentified
MGVDIGKNVFQIHYIAPNGGEIINKSLKRANFLEYFANLEPCMIGMEACGGSQHWARSLSKLGHQVRLMPPRFAKAFNIGNKNDAADARAIWLAVQQPGNKVAVKSEVQQAVLALQRLRQQLVKFRTSQINCIRGLLGEYGEVMPASRRAFDANIASVLDRVGDHVAAPLIDTLREQWAALANVDDQIAHIEQRLKQWMSIDLSAQAIGSIPGVGLLTATAAAATIGDAKAFKSGREFAASIGLVPRQVGSGGRTTLLGISKSV

SEQ ID NO: 177824 - protein, 400 aa, unidentified
MRVVFGIDVSKVSSEVAILVNGEKVHNYTMSNDAIGFSRLLGDLKTVHKPEIIFEATGVYSRRLQTFLEDNGYAYTRLNPLEAKKQLDSLRVRKTDQIDAEKLAQSQFVLNRKPTYVQEEVYQNLRDLSRFYQNLTEDIVRAKNRLHKVLQVTFPELETILSTPTGEQYWNLVIAFPCKDFVLELSKDKLSESIRQSTSKRISDKRVAYLAEKLIALANQSYCAIKKTSPMLEEVRYYTKELLRISEQRQTVLDEMVELAQPLPEYDILLSIPGIAETTATSIIGELGDIRRFQSANQINAFIGIDLRHYESGNFLAKEHITKRGNPYARKILFKCIHNIASASHTNPCHIADFYEKRKRQSQTTSTKPHTIASIHRLIRTMYYLITHNKLYDYTSTQNR

SEQ ID NO: 177825 - protein, 361 aa, unidentified
MAETMTVAGLDVHARSTHAAAVHVPTGELVQIRFGAGVEGPIEWLRSLPGPVRACYEAGPTGFGLYRAAVLAGIDMRVVAPGKTPRGRSDRVKTDRKDAELLARLLLAGSLTEVVVPPAAVEAARELTRAHDAIRRDLMTARHRVSKLLLRHGRVYPRPSTWTNEHRRWLACQQFEYPASELAFADQLAAVDGLSARKAALAERLSRLAEDPQWWPTVARLRCFRGLDTLTALAVHLELGANWQRFSRATAVGSWLGLIPSLQQSGESSHQGPITKTGSRLARRLLVEAAWHNTRPPRIGVTLSNRQQGQPDHILLIANRAQQRLHRVHQRMRARGKPGNVIVVAMARELACFLWAAATAE

SEQ ID NO: 177826 - protein, 414 aa, unidentified
MAKVFIGVDPHKLSATIEVVDHRERILATGRFDTDKAGYAMMRKHVAAWPERVWAVEGSNGAGRPLAQRLLANGEQVVDVPAKLAARARLFDTGHNRKTDAHDAHAVAVVAVRTQNLRVLCYDVELEALRMLVDRREELTRTRVQTVNRLQRLLSELTPGKAKKDITALQAKAILASVRPRDLAGKTRRRLAVEQLAELVAVDKKIKALTKELKAMVLARRSTLMDLPGVGPVVAARILADVGDVARFADRNRFASWTGTAPLDASSGEQIRHRLSRAGNRKMNHMLHIAAATQARLDTEGRRYYRRKIAEGKTRMEAMRCLKRRISDAVYRQLLADAQAAAIAAEIEEADQTATEVGTGPGGHCGASHESSAVDLPPHIDTSDQPLPGPAQPTLQPARRPRKTTTEKSLKRAG

SEQ ID NO: 177827 - protein, 455 aa, unidentified
MPRKSAKASFDLTRHIQGAAAIDIGSRMHMAAVSPEAAKDPIRSFGTFTSDLHALAEWFKDCKVTSVAMESTGVYWIPVYEILEQHGFDVILVNARYAKNVPGRKTDVSDAGWLQQLHSYGLLRGSFRPQADIAALRAYLRQRERLVEYAAGHIQHMQKALMEMNLQLHHVVSDITGVTGMQIIRAIVGGERDPETLAAKRDVRCRSSAEVISAALMGNYRDEHVFALTQALELYDIYQERIMACDRRMEGLLLLLSHGSAKPAADLPKPRIKTKQVSVPSFDVRGILYRLLGVDLTQIHGIGVSLALKLVAECGTDLRVWPSAKHFTSWLCLAPGNKISGGKLLSSRTRRSSSRAAALLRLAATTLGRSDTALGAFYRRLSARVGKAKAVTATARKIAVLFYNTLRHGMIYADPGAGHDDEIHRKRVVSNLHRRAQSLGFVLHPIPVATEPGVS

SEQ ID NO: 177828 - protein, 387 aa, unidentified
MSRNARVPIPVTTLDQDSTLVVVLELSARSWLVGARVPGIGRMSRYALAPSAEALAAWLGTAKARAGAAGRTVVRVVLAYEAGRDGFWLARYLEARGVEVYVIQPSSVLVDRRARRAKTDALDVEMLMRTLLAWLRGEPGVCSMVPIPEVAEEDGRRPVRERQGLIGERLALLNEIDGLLATLGITGYRPLRRDRRAQLAALRTPEGDPLATNAAARIGRILDRLELVMQQIAELEQVRDAVLAKEVASGEAETMIRGLARLKGIGAELATVLVWEAYVRSFPNRKALGAYAGLTGTPFASGSTTREQGISKAGNRRLRSSLVELAWLWLRYQPDSKLAAWFRSRTGSVGSRMRKVMIVALARKLLVALWRFCRDGVLPEGAALKAT

SEQ ID NO: 177829 - protein, 401 aa, unidentified
MPTIESNAIRVKRFRELKATLRTNRNRLLVGLDVAQAAHVSQVRHAHTRIVVPTLTVPNSTRGFTQLWTRIQQAQRATGCREVVCGLEPTGTYHQAVAAFLEGQGATVVFVSSSVAYWNRRTQDGTWDKNDRKDAANCADLLEQGKVLFYSQPDGPLAELRRLVRCLRRARGELASCKGRWRTTLRPALGPTGEPLPNRLRAELPAVLQRWEPAAAGRPAVAKGRLPLGLATACADLGAQVTAVQARIRAIEEALTPLAERLPAYALLRTIPGVGPTVGALLLAEIGDIGWFTQFSQLRKLAGLDIVRVQSGQQAGQWRISKCGRGLLRWALYQAAVGLARTRTGRARLAALKAKRQGDRYAGFKAIVELAAKVLRIVWGVWRSGTPYDPRRTGGLQRQPR

SEQ ID NO: 177830 - protein, 342 aa, unidentified
MKITTVGIDLAKNVIQVHGINEQGKKVFNKQLQRKHVLTHFAQLPPCLIGMEACSSAHFWARKLQSQGHTVKLMAPQFVKPYVKTNKNDAADAEAICEAVTRPTMRFVPIKNGEQQAVLSLHRARQGFVKARTAQANQIRGLLMEYGITIPQGISHITKRIPELLEDGENELPGVFRQLLQRLGNHLKALDRQATELEEQIQTWHRESEASKTLARIPGIGPLTASALVASIGDASSFKNGRQLAAWLGLVPRQHSSGGKPRLQGISKRGDTYLRTLLIHGARSVIRVATGKTTPIHCWAANLVERRNKNVAAVALANKNARIVWALMTQNREYQSDFVQTV

SEQ ID NO: 177831 - protein, 423 aa, unidentified
MMKLKYSICCGLDVHKNVIVATIVTTNKDGISEYLQKSFSTINSDIQRFHNWLIENNCYHVCMESTGKYWIPIFNYLENDIDVCLTHPKYVKAIKGKKTDKKDSKWIADLYKFNLVRCSFIPPKDFRQLRELSRYRFKLVCMKSSEKNRIQNCMTISNVGIASVLSDPFGKTATEIISYLLEHTADSMDEKAVRKLIKKGAKAKSDEIIEAIKGYNIETDQAKKLELAQGHLEYLDDMITQTEVELYVRIKPYYEFVEFVSTMPGMTELSSTIVLAETGVDMDIFDDAKHLCSWCGLSPANNESAGKKKSVRIAKAGDYLKPMMVQCALAAIKSKKQPYFAIKYGRIKKRRGHKKAIIAIARMMMVCIYHMVSEKKPFTPTDYEELMNPQNHVERVVLNENNVFAYLESLGYDSSKLVKRNDN

SEQ ID NO: 177832 - protein, 431 aa, unidentified
MKPIVKQNTEPDPAEDFVAFLALDWADEKHAFRLQVVGQSKIETGTLEQKPEVLGPWLAQLRERFGGRPIAVGLEQSRGALIHALMAYDFLVLYPIHPTTVAKYREAFKSSGAKNDPLDAGQILEILTKHQDRLHRLNPDTVETRLLGRLVEDRRKAVDLRTTHIQALGANLKEYYPQALELTNDNLKSRLACDLLIKWPTFEDFQQAKPSTLKRFYYGHNVRRPEVLERVLTLAQKSQALTTDPALVESGRRLTQMYARLIQALNPAIEDYEQRIQRVFDAHPEVKLFSDLPGAGAARAPRLLAFFGTDRSRYAAALNVQSFTGIAPVTKSSGKSKVVYARAACPKFDRQTFHEFARLSVSQSQWACNYVQYYTDKGKKYHTIIRALAYKWIRILFKCWQERTPYNEDKYMATLKIRGSIFATWHLQKQS

SEQ ID NO: 177833 - protein, 344 aa, unidentified
MEHLGIDVHKVESQICILTESGEVVERRIRTQRERFAAVLGERPRAKVLIEASTESEWVARCLEELGHEVVVADPNFAAMYATRSRKVKTDLRDARTLAEACKLGAYRAAHRTSDRQRHVRTQLSVREALVQTRARYISLIGAVLGREGLRVASGSAASFVRRVAKLALPGQLKSEIAPLLAVFVSVDRQLVWIDTRLEHLARTDETVERLCTAPSVGPVTAAAFSSTVDDPRRFKSAHQVEAYLGLTPSEWSSGEKQSKGHITKAGNTRMRKLLVQVAVSILRLRSPRTEALRKWATGIAVRRGKKIAIVALARRMAGVLFAMMRDRTCYLQPALLAPAAQVA

SEQ ID NO: 177834 - protein, 395 aa, unidentified
MFIVGIDVAKRSHEVCMITSDGQTVQRPFSIRNNCTGYNLMLEKIRKHTNIKSQIVFAMESTAHYWLALFTRLRKDGYHVILLNPIQTSAMRDMFIRKIKTDAKDSLIIAELIRFGRYAESNVAQDRLLALKELCRNRFYLVDMAGDLKRKLIALIDRVFPEYEAQFDTIFCKSSVAVLKKYPTPQKLSNAHLDKLTELLWNSSNGHFGEWKARELKELARNSFGVEDCDGAYSTLILLMLDQIQSLSGKADALEKEISRLFQSFDTTVTTIPGVGPIIGAVILSEVGDISRFSSADKLAAYIGVDPSVNQSGEFQAAHAHMSKRGSPYLRRCIWMASQVAVQRDPMFRAYYEKKAAEGLKYMTIIGHVTRKMTAVVFAILRDHKVYEPVLPTAA

SEQ ID NO: 177835 - protein, 408 aa, unidentified
MNPLYVGIDVSSKNNVIYLMLPNGDKHSSFSLANSHDGSTQLVKRIFAAMTSNNIDSVLIGLEATSVYGDNLVYFLKEDATLASFDRKIHVLNPKQVNKFKESYNDLPKNDYIDAFVIADCLRFGRINKEVYMDDYRYKALQNLTRARYFAVTNLTKEKQRFINVLFKKYSTMTQEKIFSDTFSTTALAVYEKFESAETLAKMDLQELTAFIMEKGKNRFPDPDAVAKALQKAARSSYRLPKTVNDSVNQVLAISITSIRALESQIKAFDKAITKQMELLPNVLISIPGIGPVLSAGIMAEIGDINRFQNQAALAKYAGLAWQQHQSGDFEAQTTRMIHSGNRFLKYYLCEAAFSLVRCDKEYSRFYRLKYKEVNRFQHKRALALTARKFVRLVFALLKDNRLYRPAE

SEQ ID NO: 177836 - protein, 341 aa, unidentified
MEHFSGLDISVKETSVCIVDDKGRIVRELKVASEPDALLAVLTNHHFKRIGLEAGPLSQWLFSALAEAGLPVICVETRHMRAVLKAQINKTDRNDARGIAQMMRAGLYRPVHVKTLRSQKLRMLLTHRKLLQSKAIAIENDLRATLRNFGLKVGVAGKVKFEARIKELVEDLPDLAVLVEPLLIVRRVLREQLGILHRRLLTIVRNDDVCRRLMTVPGVGPVVALTYRATIDVPARFRSSKAVGAVLGLTPSKYQSGEINRTGGISRCGDEMMRAMLYEGAQIMLVRSTKWSWLKAWAMQIARRRGVKKAIVALARRLAVIMHRIWVDGTEFRWTREVAAA

SEQ ID NO: 177837 - protein, 340 aa, unidentified
MQAVTTIGLDIAKSVFQVHGVDAEGKVIIRRKLKRRYVAAFFQKLPPCLVGVEACASSHHWSRELKALGHTVRLMPPAYVKPYVKRQKNDAADAEAICEAVTRANMRFVETKTPEQQSCLMLHRTRHLFIRQQTAVINAIRAHLAEFGVVAPVGRNGVEALLDVVADSSDKRVPEIARACLVALGAHLRVLKTQILEFDRLIMAWHRSNETSKRIPGVGPALATALVASVGDARAFRSGRDFSAWIGLVPKQNSSGGKEKLGSISKRGDRYLRSLFTAGALAVIRYAKLHGTEHRPWLTALLARRPTKVAAIALANKIARMAWAMMAKGERYKEPVALAR

SEQ ID NO: 177838 - protein, 352 aa, unidentified
MNSPFTIGIDLAKEVFAICVLDERGAVLERRVLRRAAFERWAVQAPAGTIAMESCSSAHHWGRWFSARGHAVRLIAPEFVTPFRKGGKNDAADAEAIAVAARQPTMRFVTIKTVEQQAILSWHRARQGWVDERTALINRLRGLLAEFGIVLGRARSTLRTALPRLTEDARLPVQVRALLLEAREQFTALDVRVARCDAEIAAHLVDNAPAQRLRALLGIGPLTASALVATVSNASTFKNGRQFGAWLGLTPLQHSSGGKSRLGKVTRHGDGYLRGLLVQGARSALQSALRCLPERLSRLGRWIVELFHRKGYHKTLVAIANKHARMLWAMLAHDETYDPLAWQRYRAPAATV

SEQ ID NO: 177839 - protein, 336 aa, unidentified
MSKISTIGLDLAKNVFQVHGVDASGAVVVRRQLRRAAVEKFFRQLPPSLVGMEACGSAHHWARVISRCGHEVRLMPPVYVKPYVKRNKNDGRDAEGVCEAVTRPTMRFVPVKSIAQQATLAVHSARAVLVRQRTMVANALRAALSELGIVAAQGYEGLCQLMARLEEPSEEIPQMMRGALLMLARHWQALNADERVLERQIAKAARCDRDAKRLMDVPGVGPIIASTVMAKVADAKVFRSGRDFAAWIGLTGKHRPGRISKQGDRMLRALLISGASAHLRQQKARGITDPWLRDLLARRPYKVAMVAFAAKVARIIWAMLVKGEAYRSRASATAAA

SEQ ID NO: 177840 - protein, 412 aa, unidentified
MEVVYECCAGLDVHKKSITACVLWALPKGKKKQEKRRFATFTQNLLELADWLRECGVTQVAMESTGVYWKPVWNILEGQFEILLVNAQHIKAVPGRKTDQKDSEWIADLLQHGLLRGSFVPPTPVREFRDLTRYRVSLAQECNRIANRVQKVLEDANIKLASVATDALGASGRAMLDAIIEGQSDSHALAEMSKGLLRNKRAELRMALQGRVTEHHRFLLKQLMDHLRFTEARMGDVEREIERRMRPYQDDVERLCTIPGVERVTAWGLLSEIGFNMNQFPSAAHLASWAGLCPGSFESAGKRLSGKTRKGSATLRRCLSQAGWAVSTKKDNYLTAFYRRVAARRGSKRAIIAVAHQLLVIAYHLLKRKEEYRELGANHFDNINADRVRRSLVRRLERLGHQVTLQPLVQPA

SEQ ID NO: 177841 - protein, 324 aa, unidentified
MTDAVLGIDVSKNTFDTNLGAGTKARSKSFANSPAGWHHLIAWLGEHKIGQVHACLEATGRHGLGIALALHEAGHVVSIVNPAQIRDFARTKLGRNKTDQVDAVHIREYAELFKPRPWTPPSPAMRRLCELQTIRAGTVAGLTEWKNRRGSGMADDLALSLAETTIQHFTSQLKAVDQAIAETIDNDLELSAKRDLLVSINGVGEALAGIVLAELPGSDILGCSAAVAAYAGLNPQQHQSGISVNRPVRISKIGNAVLRTALYMPALSAMRYNPAVVALVDRLKAQGRLKGKQIVIAAMRKLLVLCFGVLKTGKEFDPAMAMGK

SEQ ID NO: 177842 - protein, 341 aa, unidentified
MDTVSLIGIDLGKHCFHLHAQDGAGRMVLRKKLTRNQMFTLLSNFPSCTVVMEACAGAHWIARRLQTLGHEAKLISPHFVKPFRQGNKNDFADAQAICEAASRPSMRFVSPRNEAQQVVSALHRVREALVRNRTGTINQIHAFLLEFGISLPRGMAVMRRLPAVLEAQALPPRLVAVLERLQAHFKYLDEQIGQLEHELLTQLHEDERSERLLEIPGIGPITASVLMSELGDARQYGSARQFAASIGLVPRQYSTGGKPTLLGISKRGDKGLRRLLVQCARVIMLRIERRTDSLGVWVRSLLARRHSNVVACALANKLARIAWAILAKGTHYRSAPAALPA

SEQ ID NO: 177843 - protein, 388 aa, unidentified
MTQAPVPNSVPTAPDYDRTLVLAIELSNKSWVLAAQVPGLPRVKAKRTIEPTAEALLAAIQGYRERAQAAGRQVERVVATYEAGWSGFWLARWLATHEIETHVVQPSSVPVDRRARRAKSDGIDAELLLRTLLAWLRGEPRVCSMVPVPAEADEDARRCVREREELVAERVALVNRIGAVLATLGVGEYNPLLRNRRERLDVLRTALGTPLPPHAYAKISRTLDRLDLVRAQIANLEQERDAVLENEAPDRAGEMIQQLATLRGIGVQSATVLVREAFVREFANGKALGSYAGLCATPYSSGGTEREQGISKAGNRRLRTVMVELAWLWQRYQPGSAPVSWFRERVGGTGARMRKVMVVALARKLLIALWRFATQGVVPEGAVMKPAT

SEQ ID NO: 177844 - protein, 337 aa, unidentified
MNNSVIGLDIAKNIFHMYTIVEGKAIKKKLKRTELLAFFANYPVSLIGIEACGSAHHWAREFIKLGHDVVLLNTRYVKSFVIGNKNDFNDAAGIFDAVTRPNKRSVQIKTIAQQDVQLIHKVRQGLIGKRTALANQIRGLLGERGIIIPKSIHQIRKHLPLILEDADNNLSPCSREIFAEQYEQLIALDKELKRQDRRMSQLCNNDALSQRFLQVPGVGPMTASIVASDIGDATGYQRSRDYAASLGIVPRQHSSGDKQHYLGISKRGNRYIRTLLIHGARSVLMNCGSKKDKLSLWLQALIERRGFNKAAVALANKNARILWAIASQDKEYNALLV

SEQ ID NO: 177845 - protein, 411 aa, unidentified
MRRVIGMDIHRTFAEVVFWEDGRLRPAGRVTMTRSGLESFGRTLGKEDEVVIEATGNAMAVVRMLSPYVARVIVANPLQVKAIAHAHVKTDKIDAGVLASPRAADFLPEVWLPDSDTERLRRLVARRNQVVRHRTRIKNEVHAILHTHLIPPCPHADLFGRLGRIWLSRQAMPDDECAAIERHLRELDRLNEDLGVLDTQIAQAGNNDPAVKRLLTITGVNLIVAAGLAAAIGDVGRFPNPQKLVSYVGLNPRVRQSGLGLAQHGRISKRGRSHARAMLVEAAWAAAKAPGPLRAFFLRIRARRGHQIAAVAVARKLAVLCWHLLTKCADYQWARPALVASKLRAMELQAGQPARKGNKRGTAYAYNVKALRNAEIELARYAEDAYERFVSQWQRRGSRNRARAPQNEERR

SEQ ID NO: 177846 - protein, 423 aa, unidentified
MPQLWAGIDAGKTEHHCVVIDTNGTKLLSQRFKNRETAILTLMGDVASLPGGTDVAWATDLNHGGTGLLQTLLNSHAQPLFYISGRVVHHASGAYRGEAKTDAKDAVIIADQARIRRDMTLMRQADEVTAELRLLSARREDLVHDRTRAVNRLRAILVHYFPSLEGAFNYATTRGPLVLLTRYATPGAIRRMGESRLASWLKGQGCWKSAAVAKTAIDAAREQTSVVVGEGAAARLVSRSARDLLRIRDEVAELDAEIEAVLQDSRSADLLVSIPGFGRRLAADFLAATGTDLTAFETPDRLASFAGLAPVPRDSGKISGNRHRPRRYDRRLLNACFQAAFIASRNCPVSRSFYERKRGEGKSHKQALIALARRRINVIWAIFRDQTTYTPTPTRPNDPVTPLLQHGPESPSRSGPAIALAAA

SEQ ID NO: 177847 - protein, 430 aa, unidentified
MDYNTQNKKIEAVTEKTLVIGIDVGSETHFARAFDHRGIEYSKKPFKFSNDEAGFAEFKAWILEHMKAHDKDKVMPGMEPTGHYWFNLGKFLQDNDMKPVLVNPHHVKKSKELDDNTQNKNDRKDPKVIAGLVREGRYMIPYLPDGVYADLRTASNMRFQVQSELTRTLNRISRWFSIYFPEYKTVYGNLDAASGMLVLKKAPLPEDILTLGVDGINKIWRDAKMRAVGKKRAQTLVDAAEHSIGSKEGAISARMEMRMLIEDYESRKARLQEIMILIEELVAKIPMAEKLMEIKGVGLKTVSGFLAEVGDISRFKNPKELQKLAGLALVENSSGKHKGETTISRRGRKRLRYLLFEVAMSLVAKNYEFAELHHYYTTRKQNPLKKMQSLMVVAEKLIRVFYVILTKGVDYDPKKMTEDIKRPQDRSQAA

SEQ ID NO: 177848 - protein, 423 aa, unidentified
MELLHERAAGLDVHKDSVVACVRVMSGGKVKRECRTFDTTTTGLEALRDWLISFGCTVVAMEATGVYWMPVFKILDDEDAYELIVANARHVKGLRGRKTDMNDATWLADLAAHGLIRASFVPHEDFHELRTLMRSRKQFVREQTGHVQRIQKTLTEANIRLDSVMSDIMGFSGRRMIEAMIEGVSDPDKLAALGTRGLKATKEELRAALHGRLTDHHRFMLQLHLKQYDAFEETILLVDREAEARVARMDKDVKDKEAALSALIVLLATIPGVSRLSAMTILSEIGRDMSRFPTAEHLIAWAGLCPGQNESAGKRRNGRLRKGAPWLKTMLVQCAWAAKRSKNSYYKAQYYRLKARRGSQKAICAVAASILTAIYHILKDGVPHEDLGVDYFDKRKPEAKVKRLVGQIAKLGFEVTLPIAKAA

SEQ ID NO: 177849 - protein, 408 aa, unidentified
METVYSVCCGLDVHQASVSACLRRVATDGTIGTESHQFATTVQGLTQLSQWLTEAGCPIVAMESTGVYWKPVFHILSATVEVWVVNARDVKQRRGKKTDRADAQWIAELLAYGLIEPSFIPPPQIVALRDLIRMRTALVETRTQVKNRVLAILEDTNVKLASVVSDPFGVSGREIMDALVRGHRDPEVLSQLARGVLRRKIRELSIALEGAFTDHHALLVRLNLELIDQTNAQICQLDERIEQLTEPLQKEIQQAKSIPGVHHTAARIIISEIGTDMSRFGSGPRLCSWAGMCPGNNESAGKRKSGKTRKGNRYLRRVLTECAWAAGKTDSFLGRTFRRLQARIGGKKAAVAVGHKILLIVYHLFNEGTVYDDGRYNRLNRKQENRQLKRALSALKQLGYQVQLSPAA

SEQ ID NO: 177850 - protein, 438 aa, unidentified
MSMTFARLLDPCFEDEDDPFRHYDYRGEPLEDRLYLPCGIDPHKKVCHAAFVHPLPHRQEILSHREIQNQHLSEALWLVEEGRRLAEPFQATPIYIFESSGPYWRPYRLFLHQLGLPTATVSGRQTKRAGGTGTRKTRNDLQSAFLVAKVFKQGESHATRIPPAPLAALREYTRLHLFFVEQSVAIQNRMFDLRYQIHPGFDDLFSKAIMPTTLALAKEELVHPRKLLQADPDRLTEVIYQASNGKLGAPRAETILRSARHTFYMPYAPQAQSFNLKLMAHAHEYIVDHLLPPLRARIEHGLEEIAFPQYLTEIPYFGPIVTATFLAELGSPFWFPTVDSVVAWFGLDPSVSESADHPTGISHLTKRGTKYGRRIMWLVARNWSRYVSQGNRLFRKERDENKLSYDGAICLIAAKLVRIAFAMARDGSHFDMSKAFPS

SEQ ID NO: 177851 - protein, 363 aa, unidentified
MKSTTLWVGLDVHKESISVAVFEGARAEGRPVVTIPNEPPLIRKLFSRLHKEGEVRACYEAGSCGYEVYRQLAALGIACDVVAPGLIPVRVGDRVKTDRRDAEKLARLFRAGELTSIRVPTESEEALRDLIRCREDAREDVLRQRQHVLKFLLRHGRIFHDGKHWTLRHWTWLRAQHFDEPLAQVVFTQYVSTLEKTLARVTVLNQEIAMQADKDPYKALVGRLRCLRGIDTLSAMALIAEICDFARFEHPRELMAYLGLVPSERSSGGKQRHGSITKTGNSHARRIFVEAAWHYRHPAARSPTMMARWKDQPSTVVDHAYKAQERLHRRYRRLTSRGKPSQVAVVAVARELCGFVWAVARAA

SEQ ID NO: 177852 - protein, 340 aa, unidentified
MRLIGCDLHASQQSIAMLDRDTGAVIEKTLKHEGEAVREFYASIPPPVVVGIEATGSMGWFLQLMEELAIECRVGHPVAIRKAEARRQKHDRRDAALLLRLLAEDRFPTIWMPSTELRDLRALLLHRHQWVRMRTRVQNALHAIAMAHGVRRGHTLWNREGQALLASLPLAPHTAHRRSELQALYQHLDAHVDRLGERVKQVAEERPRAALLMTHPGVGSVTALATEVFVGDPARFLDGKALASYVGMIPSEYSSGKRQRLGALTKQGNPFLRFLWCEAAAHAVRRDPDLQRFYRRKVAQKGFAKANVAAARKLGIRLWIMLRDQIDYAEFCRRGLARQL

SEQ ID NO: 177853 - protein, 416 aa, unidentified
MPEEGEPMHYYLGVDWADQTHAVWVVDERGTKITARTVPHTAEGLSEWGRELDEWRAQGLELWAAIERPEGRVVDFLLDHGVVVYPVNPKALDRARDRFRQSGAKSDPFDARVLADFLRTDHASFRALQPSSEAAQELKLLTEDCQRQIRQQTRLVNQLTATLKAYYPRGLEVAELTTALAREFLQAYPTPAAVAGLTERQWQRWARAHRLSEARTQELWAVLQRPQLPVPAHVVRAKARLLQTLLTELEPVVAAVGAYRQAVEDFFAALPAAQWIRTLPIGEHGITAPTLWARLGDAPGRWESFQHLQAHAGAVPVTVKSGKQHVVHFRFACDKMLRHVVDQVAFLSLRSSEWARAYYDQQRARGHSHRETLRALGAKWLKIIFVLWDRQVPYDEQYHLATMARQQLRQRSKKIA

SEQ ID NO: 177854 - protein, 351 aa, unidentified
MSEYIAFDSHKHYTWVDREDHSGGKNRCHRLEHAPGAVREYLSGSEPGTPVAVEATGNWYWIIDEIEQAGLQPRLVHPRKAKLMMGLTNKTDKLDAQGLNRLQRNGTLPTVWIPPGPLRDLRELTRTRLVLVAQRTRLKNRLSATLAKYGTPASECSDPYGKRGRAELDKHLEGLPEQTRWVSGQLVAQLDFVSAQVKQLEQRLAELVEVTPEMQWLQTLPGVGVILASTIALEIGEVQRFPSAMHLASYSGTTPRVHASGGKVRYGSLRADVNRYLKWAFAEAANSVAVNHRRCPERHVSQLYRRLRQKKGHPKAIGAVARHLAEAAFHVLRGQQMYQDPSFGRGRTSQV

SEQ ID NO: 177855 - protein, 314 aa, unidentified
MKKDSIAKLQMTKSQIRRMAAKQRLTVGLDLGDRSSRYCILNEAGGKASEDQLLTTKAGLDSLFAKMAVCRIALEVGTHSPWVSRHLAAMGHEVIVANPRKVRLITQSVKKNDRMDVEQLARLARVDPQLLGPIRHRGAEAQGDLAVIRARGELVDCRTALINTARGLAKPMGERLKSCDADYVKESLAEGLSEATQNAIRPLLKSVEEISRQIGAYDKKIQEMEKRYPETKVLKQVHGVGTLIALTFMLTLEDAERFAHSRDVGPYLGLTRKLRDSGESSRSWGSARRETCCCDGCWYKQRTASCAMGRRIAI

SEQ ID NO: 177856 - protein, 343 aa, unidentified
MQIRSVGIDLGKTTFHLVALGASGKVLVKRKFTQKQLLVFTANMQTSLIGLEVCSGAHFLGRALRQQVHDVRLIAAQFVKSFVKTNKNDFVDAEAIAEAVERKNMRFVPIKTDDQLDLQAMHRIRDRLVSRRTAVINQIRAFLLERGMVFAQKPAKLKAAMAVVLENADNALTPMMRNLIALLYEEWKTVEGQIDELTDRLEQIAESDAGCCRIRQIPGIGPIVATAIVAAIGNGAAFRKGRDFAAWLGLVPRQYSTGGKAKLLGISKRGNIYLRKVLIHGARAAAMRIKRDRFPIGAWMNALEARAPRNVLVVAMANKLARIAWAVLSSGEDYRATMSIATA

SEQ ID NO: 177857 - protein, 356 aa, unidentified
MNTHKVQDFVVKGKEVFVGLEDSKTTWKIAVRCDKMLAHQVAMEAAYPVLKSYLDHKFPACTIHLMYEAGFKGFNLYDRLTEDGIACVVIPPHLVTEPKVNRVKTDKRDARRLALMLENHDYKDPCHVPDKERREDRQVSRTLIGVQKDIVRTRNRVRKLLQFHGIEVPFPDRWGRGEFRALKKLELSEPLRISLAILLTQLEQLWEHQTSLRGSLRQLCRKERYRRAFEIARSLPGIGWYSAIRLVLDLGEDLTYFTSGKKIAGFVGLGCSEHSTGETERKGRITGMGSGFIRATLIENSWVSIRKDPVLLAKFMRIWRGSGSKKRAIVAVARMLIVRLRACMISDTLYVTGVVR

SEQ ID NO: 177858 - protein, 403 aa, unidentified
MNNVAGIDVSKGKSMVSVLRPFGEVVAKPFSIGHTGSELKELADYLKSLDGETRVVMEHTGRYYEPVARFLHEEGVFVSAVNPKLIKDYGNNTLRKVKTDKADARKIARYGLDNWAELRQHTPMDTIRMQLKTLNRQQSLYAKTKTMMKNNLIALLDQSYPGANDLFDSPARSDGSQKWVDFATAFWHVDCVRNMSLTAFAERYRKWCKRHGYNFSQSKAVEVHTGAQDLIAMLPKDALTKTMVRQAIDALNAVSASLERLKAEMQALAAQLPEYPVVMAMHGVGDSLGPQLMAELGDVARFTHRNAITAFAGVDPGADQSGTHEAKSTRVSKSGPPELRRALFLVMDCLLKTQPQDDPVYRFMDKKRAEGKPYLVYMTAGANKFLRIYYGRVKEYLASLEEN

SEQ ID NO: 177859 - protein, 433 aa, unidentified
MTSSIAGIDVHKRVVMVVLTSGAQAEGQFSQRCRFGATMAELRRLAAWLEERGVEEAVMESTAQYWKPVWLALEGRFRLHLAQAWSNRAARGKKTDFKDAERLGRRYLAGELTMSFVPDPGQRQMRTLTRRRTQLVRDRVRIQNQVESLLEETRIKLCCVVADLFGASGLRILAALAEGQTDPARLAALADARVQHSREELAEALAGTMGDVHRLLLKQHLLHLELITAQMEELSQAVGRLMQPHSQAIVRLAGIPGIRTLSAQQIVAEAGPQAHAFDSAAQFSAWIGVAPGREESAGENHSSRSTRGNPYLRCMLCQAAQAAVRTKNSIFEQKFRRLMPRLGYAKAVWAIARHLSVVIWNVLHQGAQYVEYGRVTTAQAAQRRLQRLKKELRALGYSDELKPLLTSANPAMTFNGAATLNNVKTYTLFPKLP

SEQ ID NO: 177860 - protein, 356 aa, unidentified
MISTSHPEVSRIIIGVDTHKDEHVAVAIDSLGVRLGQHALPTTSTGYMGLEHWANSLGEIDVFGVEGTGSYGAGLSRFLRMQGHMVIEVNRPDRSTRRRLGKNDPTDAEMAARAVLAGVARDRPKSGVGEVEMIRMLKGIKNSAMKARTQAVNQMKALIVTAPAELRAGLRHMNTSQLVARCARWHNGCLETPTAAARYALRSLARRHAQLTQEIETIDAELTRLTATFAPKLMESVGIGPDTAAALLVTAGSNPERLKSEASFAALCGVSPIPASSGKTNRHRLNRGGDRQANAAIHRVVIVRLRYDGRTRAYLQRRMKEGKTKTEVIRCLKRYVAREVFGTLNDIGKLRIAQNI

SEQ ID NO: 177861 - protein, 333 aa, unidentified
MSSDGSIAEETKYNNTLHEAEIFAYSIVKKYGECVAVCESTANLWLKTYQAFEKYNIGVKLANPLKTKAIAEAKIKTDTLDARTLAHLLRSDLVAECYIASREIREDRLLLRLRTNLVQDRTRVMNRVHSLLDKYDVRCDCDNIFGVKGTRWLKSLKLSDNDQILLHEYVMQIEFLNTEIKNIESKITCEASKNESVKILMSMTGIDYFSAMLIASEIGDITRFSTPEKLVSWSGLCPSIHQSGNSLYMGRMKDGNKKVRWILIQAANTAARKDYRLRKFYLRIAKRHGHHVAITHVANKMITIIWHMLVNKKLYNERKQSLYETKLKRIQKT

SEQ ID NO: 177862 - protein, 355 aa, unidentified
MSQEKYIGMDVHQATVSVAVVDSGGKLIMECILETKAATILEFIQGLRGTLSVTFEEGTCAAWLHDLLKPHVSQLVVCDPRKNALLKDGSKSDRIDARKLAELLRGNQLTPVYHGDHGLRTLKELGRSYLTITGDLTRVMNRIKALYRSWAIPCSGTTVYAARHRSEWLAKIPQAGVRLRAERFYQQLDLLRPLHQQARCDFVVESHKHPAVKLLRQIPFIGPIRAALLVALLQTPHRFRTKRQLWAYSGFAVETHDSGEYRYVRGKLLRNRERISVRGLNDNYNHDLKNLFKSTAISASTRPGPFRDFYLALLAKGMRPTMARLTLARKIAAITLTMWKKGVDFDAKQLDQQAV

SEQ ID NO: 177863 - protein, 340 aa, unidentified
MEKASMIGLDIAKNVFEVHGRNAAGEVVLRRSLKRSQVEKFFAKLAPAVIGLEACGSAHYWARVLGKLGHEVRLMPPAYVKPFVKRNKSDTIDAAACCTAMRQPDMRFVPVKTVEQQAALSLHRSRDLLVSQRTQLGNALRALLSEFGIVAGKGKAGLARLMDELRAGTLDLPVDAVAAAMALAGQRAALDAAADALERRITAQAKADEKACMLKTAPGVGPLSAHATLATMPDPSLFKSGRDFAAWLGLAPRLHGTGGKTRTGRITKQGNQPLRRLLVLGATAWLRQVRARPEKASPWLRGMLARRPAKVVAVAQAARTARILWAMLSHNQPYRAPAIG

SEQ ID NO: 177864 - protein, 464 aa, unidentified
METSRKKNTQPDNEVGGEGLAVVRPNVAGIDLGSKVHWVCAPKKDGTGRDVEQFGATTPELERMAVWLKERKVESVAMESTGVYWIPPHEVLERHGLEVVLVETRHLGRVPGRKKTDRVDCKWTQRLHSCGLLMGSFRPNEQVCRLRTLVRDKGTLVAEAGDWMRRMQKSLDQMNVRVHRAVADIDGVTGMAIVRAIAAGERDARRLAKLRDRRCQKSEEEIAEQLSGHWRADHLFTLQQALKMYDAIQERIGEYEREIIQKLAEMERKECRGQQPPPVNNRQKAKAIQQRGEEPMRQALYRISGVDLTAIDAIGVETVQVVISEYGPDLSQFPTEKQFVSHVMLAPHKPMSGGKTLKKKKRLDGASTRVAAALRMAALSMRHSLTALGAYYRHIARRKDGDVAVFATARKLATLIYRLLRWGQPYVDEGAEAYEKRYKEVRVKSLTAAAKDLGYQLTPAATQL

SEQ ID NO: 177865 - protein, 457 aa, unidentified
MQGKQKQARGRSAGQLLTLNEHAAGLDVGSTFHVVAVRSDQDEEPVRTFRSFSGDLHRMADWLGSVGIKTVAMESTGVYWIPVFEILEARGFEVLLVNARDVKNVPGRKTDVNDAQWLQQLHQHGLLRGSFRPRDEVVRLRAYLRHRERIVEYAASHVQHMQKALMQMNVQLHHVVSDITGVTGMRIIRAIVAGTRAPEELAQHRDVRCAASEETIRQALTGNYRPEHVFALKQALELWDVHQAKIAECDIEIETVLKSLNEKRAAPEAPLPPVRHAKARNEPKFDVRPALYTLLGADLSQIHGFGPYTVLKLVAECGDDMTKWPTAKHFTSWLTLAPGNKISGGRVLSSHTRRSSNRAAVLLRIAAVNIGKTQTALGAFYRRLAARTGKAKAVTATARKLAVLFYRALRFGMTYADPGAEYYEERYKRRVIDSLQRRAHGLGFKLVANVAATEGVS

SEQ ID NO: 177866 - protein, 401 aa, unidentified
MNAVGIDVSKGKSMVCVMRPFGEVVLEPFEVLHTAQNLHDLAEKLKALDGETRVVLEATGNYHKPVAFVLHDAGLFVSVVNPVLIHDYDNNSLRRVKTDRKDAVKIANYTLDKWTRLRQYLPEDDTRLALKNCYRQYQQAVAIRTMLKNNLISSLDLTFPDANKLFSSPVKNNGCEKWVDFIGDFWHSECVSSLSANAFAKKYLKWCQKHGYVFTRSKSDEIYACAVNSASLPKSPTSKLLIQQQVAQLKAVSQSVAAFRQEMLRLSQQLPEFDTVMEMYGVGPSLGPQLMAEIGDVRRFSSKKSLIAFAGIEPQPNDSGKVVGNDKGISKVGSAVLRRTLFLIMTVILQTQPQDEPVFQFMNKKRSEGKPYKVYMMASANKFLRIYYAKVKAVMDSERSQ

SEQ ID NO: 177867 - protein, 339 aa, unidentified
MTAFYGGIDLHCNNSVVVVMDEGGEVVYRRRLANDLRRIQEALAPYREGLSGVVVESTYNWYWLVDGLMAAGYRMQLAHPTAMQPYSGLKHTNDESDAQWLAEMLRLGILPTGYIYPQAERGVRDLLRKRAQLVRQRTANVLSIQNLVQRNTGGRMAAAAIKALAPEEATELVAHPEVALAIAASVRVRHCLDAEIRALEKAVRARVKLRPEFLKLQSMPGVGNILALTIMLETGAIGRFPSVGEFASYCRCVGSTKLTNCKRKGGGNVKNGNAYLAWAFVEAANFAIRYSVPIHRWYQRKKARTNGIVAIKAVAHKLARAAYYMLRDQVAFEVSKAFA

SEQ ID NO: 177868 - protein, 452 aa, unidentified
MATKRKKRVQDLAVLHPDAAGIDVGASEIFVAVPADRDAESVRSFATFTRDLHSLADWLQTCGIRSAAMESTSVYWIPLHQILEARGIQVYLVNAQHVKNVPGRKTDVSDCQWIQYLHSVGLLRASFRPPAVICAIRSLWRHRDSLIQMAAEHVMHMQKALDQMNLQVHRVLSDITGLSGLRIMDAILAGERDPVALAQLCHSRVKSSREIVAKSLEGDYRAEHVFALRQSLAGYRYYQTLITEVDQEIERQLADLKTTAEVDSKPPKRTKKTPYQRNRHEPAGFDLRGELYRIIGVDLTDVPGISALTAHTILCEVGTDVFHFRNASAFASWLGLCPERQISGGKVLYTKSRRVRNRVALALRLGAYSLHHANNYLGEFFRRITRKLGKAQAITATAHKLARIVFHLLSTKQPYDESVFQRCEQDALQRAELRLRRYAERLGFQLIPVTSN

SEQ ID NO: 177869 - protein, 412 aa, unidentified
MDVLYPRCCGIDIHKKSITVCDLIREAGRKEQKQIGEFGTTTAAILSCGDWLRDLGVSHVAMESTGVYWRPVWNLLEGQFELLLANATHVKNVPGRKTDVKDSEWIAQLMQHGLLKPSFVPNTVLRDLRELSRDRTSLVAERSRLKNRIQKILEDANIKLGWVASDILGKSGRAMLTAMVKGKENPEELADLAQGQLRLKIPQLVEALRGRVRAVHRFRLQQQLERIDFIDGQIAELEAEIEKQNAPMEEAVCLLAEIPGFDRTTAWSVIAEIGVDMNQFPSADDLASWAGVCPGNNESAGKRLSGKTRKGSRWLRQKLCQSAWCASRCKTSYFASYFQRVAAHRGKKRAIVAVSHSLLVVCYYLLQRKCHFQDLGVNYFDQLNHEKLTHYFVKRLTRLGHRVTLEPCSAAA

SEQ ID NO: 177870 - protein, 314 aa, unidentified
MKTSETKPVYVGVDISKECLEVAVAGQPVQRLGNDPAGIAALVAGLRQVPGTPHVVCEPSGGYERALLAALWQADLAVSLAPAGRVRHFAQARGLLAKTDTIDAAVLREFGEVFVPAPLAAPMPARQQLAELVLRREQLVGLLASEEQRLSQASAAPVRKLTAKLVRELKRQILALEALIKKQIDDDDTLRGQSERLQQVKGVGPITAATLLAELPELGQVSNQQIGALAGVVPYNHDSGQYRGRRMIRGGRLKVRRVLYMAATVAARFNPVLKVFYDRLVAHGKPKKVALTAVMRKLVVLLNRLIKRPDFVLA

SEQ ID NO: 177871 - protein, 381 aa, unidentified
MEISIAHSSSVSSSNVTLLVALELSKATWVVALSAPFSDRISHHSIAGGDAGALLKLIGQARSRAEAALGQPVRVVCCYEAGYDGFWLHRVLSANGIDNHVLDAASLLVNRRARRVKTDRIDVDGLIRALAALMRGEHHACRAVHVPSIEDEDRRRQTRERERLIGERTAHVNRIKGLLMAQGIRDFLPMRPNAAERLTELRTGDGRPLPPCLVAEIRRELRRLKLVEEMIGEVETERDSVEAGTVADQRIALLRQVKGIGPVAATVLGREVFHREFTNRRELASYLGLTPSPWASGSVQLDQGISKAGNSRARTILIEIAWLWTRYQPGSRLAGWFRERVGQSKGRLRRILVVALARKLVVALWRYLSTGVIPEGVELRA

SEQ ID NO: 177872 - protein, 386 aa, unidentified
MQKLNDLSRSLTALEPNGTLIAVIEMSLSSWLVAGIVPGVERQPLKKLAVDESALLKLLHRWREEAEKAGRRIERIAVAFEAGRDGFWLARWLKARGIEAYVIHASSVAVSREHRRAKTDRLDTELLKRSFLGWLRGERDHCKMVEIPTMKDEDAKRPNREHDSLIGERSRIVNRMKAALVRLGIRGFNPKLKRATTRLDGLHTPEGEPIPPNALAELRRDMERRRLVNNQIRQIEEERLERIEQAPCDGPHVMVRLLARVMGVGIETADMLVHEVLSRNMRDRRAVARYAGLTGSPDESGRKRREKGLARSGNARVRRGMIQLAWRFLLHQKNSALTKWFRSRTENARGTRKPMIVALARKLLIALWRLVREGIVPDGVVLRAAQ

SEQ ID NO: 177873 - protein, 338 aa, unidentified
MPLYGGIDLHANNSVVVLLNEQDQVIYQRRLTNHLPEILEPLAPYQADITGVVVESTYHWYWLVDGLMEAGYRVHLANPAAMQPYSGLKYTNDHSDARWLAHLLRLGVLPEGYIYPKAERAVRDLLRKRAHLVRQHTANVLSVQNLMVRNTGARFGAKRIDEFTPAELAGILPEAEQVLAVTSSLAVMHCLGQQIKTREKTVQKHLKHPPAYVQLQTVDGIGTILAQTIVLETGDIGRFPSVGHYASYCRCVGSTKISNGKRKGQGNVKNGNPYLEWASMEAAQFAIRFSPTVQRFYQRKQVKSHLMIARKAVAHKLARACYYIMRDLVPFEVHKAFG

SEQ ID NO: 177874 - protein, 343 aa, unidentified
MQDVATVGLDIAKQVFQAHGADASGETLFNTKIKRENVLEFFSKLKPCLIGMESCATSYHWARQLLEFGHDVRLIHTSYVKPFVKRGKTDANDAEAINVALTQKTMRFVPVKTLNQQAAITIFRTRSLFVSQRTQLVNALRGHLAEAGLIAAKGIQNYSKLVKLMESAADTALPTVMKKALTDICDQIHRLNDLVTKLDKEIERRVQHDENACRLLTIPGVGPKTAMCVIATIPDIHRFPSGRHFSSWLGLTPRTHSSGGRSVLSRITKMGNSELRTMLYLGGTVIMMRDKKTPIGRWASRLRARRPYKVAVIAVANRIARIIWALLTNGGVYDPTYGREASA

SEQ ID NO: 177875 - protein, 345 aa, unidentified
MKHFAGLDVSLDETTVCVVDEAGGIVREARVPSEPEALVAFFRGLGLAMERIGLEACSLAAWLHEGLTAAGLPAVCLETRRAKAAMGAMPNKTDRNDARGIAQIVRTGWFRAVHVKSPACRSWRALLAARRLVLNKMRDLENGVRALLREAGLKLGRPARKELAARVRELVGADAVLSASVEPLLAIVATMAHELAQLTRRVLAIVRDEPVCRRLMGVPGVGPLTALAFRATIDRPERFRRSRDVGAHLGLTPKRYQSGETDVQGGISRCGDELARTALYEAAHSLLIRSRKWSTLRAWGMQVAKRRGMARARIAVARKLAAILHRMWADGTEFRWGEADAAVAT

SEQ ID NO: 177876 - protein, 496 aa, unidentified
MSAFLRRSGQNPHRWATKGMKSKKELLAKKKHIKRKSAKAKHNRVLGIHNPHAAGADIGATEIYIAVPPDRLEMNVRCFGTFTQDLRAIVQWLREYKVTSVAMESTGVYWIPLYELLEQEGFEIYLVNARHVKNVPGRKSDVQDCQWLQYLHSVGLLRGSYRPAQDICAMRAISRYRDNLLHFGAQHLQHMQAALDQMNLRLHHVIADLSGLTGMAIIEAILAGERDPRQLAKLRDPRIKASQETIAKALEGNWRVEHLFVLGQALQSWKQVQQQLGQCDQKLEELSSQLEGKIDLANSPLPPSAKYCGREPRSKNQPNGPWREELYRHFGVDLTEVPGLSLGVVQTLFVELGADLSAFPTPRHFAAWMGLCPDNAITGGKVIRRGTRRNRQRIRLALRLAATSLHHNKTQLGECFRRLRARLGAPKAITAMAHKLARIIWHLVTHRVGYDESIFAEREEQLLRRKQRQLRNLAHSLGFTLVPNPRPAATSNAEVS

SEQ ID NO: 177877 - protein, 340 aa, unidentified
MTIQSKKVVPEESKYLHAGIDVGAEELILLVRKNGVSQKSQKFTNTPADRARLVKKMVGMPGIIVCLEATGVYHFDLAIALHDAGVALMVVNPKSSHNFAKVLMKNSKTDCVDADTLAQYAERMDFVAWTRPSDEKIGLRSFARRINALTRQKAAAKNHFHALSASQETPKSVLRDVKLAISQLEKRIEHLGKDALALIEQHADLMRVFQLLIGIKGIAQTSAIALMGELLLLPPGLSHREWVKFAGLDPRTFDSGKSVHKQARLSKAGNRHIRSALYMPALSAKQHDPYVKAYFQHLVDNGKKPLQALCAVMRKLLHAIHGMLKHDMPFDNTRFYAIPA

SEQ ID NO: 177878 - protein, 370 aa, unidentified
MQKSLFVGLDVHKRSISVAVAEDERGGEVRFLGDIENTPDAVSGIVRKLSKHKVSLDFCYEAGPCGYGLYRQLVDMGHRCTVVAPSRIPVAHGDRVKTDRRDAQRLAVLHRAGDLTSVWVPDKTHEAMRDLTRARTDAMMQLMRARQQLLAFLLRHGRVFEAGRKYWTLRHRRWLSAQNFDEPAQHIVFQDYVEAVWTATERRDALIARIGELVPAWSLGSQVQALRGIRGLDLVSAATFLASVGDLSRFDTPRQLMSYLGLTPSEYSSGSKVCRGGITKTGNKEARRMLVEASWSYRYPARVTQNKSDILVKQPKSIRDITWRAQERLCGRYRKLTVRGKKPTVVVTAIARELSGFIWAIGQELQPSRS

SEQ ID NO: 177879 - protein, 346 aa, unidentified
MKINRVGVDLAKNVFQLHGVDRNGKALWNRRLTRGKWLSVLCDTVEPGTEIGMEACAGAHHWARQLMQRGYPVKVIPPQFVKPFIKSNKNDANDAAAICEAMGRPDMYPVKVKTVEQQDLQAMHRIRDEIKGHRIAKANQIRGLVTEYGLVAPQQLSALRSAIPDWLEDADNGLTFLFRQLLQGLWGDLYALDQRMTELDKQVAVVAQEDPTAKRLQQLRGVGPLIATALVATIGDGKQYRKGRDMAAALGLTPRQHSSGGKDRLLGISKRGDAYLRCLLVHGARSAMRTAKDKDDRLSRWIINLQARRHANVVAVAMANKMARMAWVIMTKDVDYDPDLAAASVN

SEQ ID NO: 177880 - protein, 346 aa, unidentified
MEQIIRIGMDTSKHIFQLHGVDAAERPVLRKRLGRKQMVEFFAKLPPTVIGIEACGASHYWARVLEQLGHEVKLIAPHLVKPYVTRNKNDGRDADGVCEAMSRPRMRFVPVKTAEQQAALMLAGVREQLIARRTQLSNTIRGYAAEFGVTAAKGLDKIEPLLAQIAQDESVPALARGLFAMQGREYAQLQVELKAIEVKLRAWHRAHADSRRLAQIPGVGPIGATALVMKTPDPRAFPSGRQFAAWLGLTPKDHSTAGKTRLGKITRAGDERLRSVLVAGATAVIQQARYGRGHPSPWLIALLKRKPPKLAAVALANKIARIAWKLMVTGERYDGARMLAASAAAA

SEQ ID NO: 177881 - protein, 339 aa, unidentified
MRLYVGVDLHANNIFVAVIDKKGKRLEQKRLPNDLAVIMEYLKPHQKEIVGIVVESTYNWYWLVDGLMGTGYKVHLANPSAIQQYSGLKHVDDKRDAFWLAQMLRLEILPEGYIYPKEERPIRDLLRKRRHLVKLRTSLLISLQNIISRNCGVQFPVNEMKRLKEGRVSPLLEGNEDLALAGKTSKEAIDPLTRQIHKIEAAIVQRVELKESYQVLLTLPGVGKILALTIMLETGPIARFAQVGDYASYCRKVPSRWTSNEKTKGKGNLKNGNKYLAWAFSEAAEFARRYDAQARAYYTRKMRKTNFMVAHGALAHKLARAAYYLMKDQVPFMPEKLFC

SEQ ID NO: 177882 - protein, 326 aa, unidentified
MQGKELSEQTTAAKSNVGIDACKSWLDTHVLPSAQTLRVPNTGEGIRKLKRWLDRFEVSLVVVEATGKWHRQVHRSLIAGGIAVAVTDPFRVRAFAKAKGILAKTDRIDARVLALFAALMSPDIRPPASQALEELAELVTARNSAVAEQTALKNQLAAACGTFLKRQLERRCTRIAKDIEVIEREIARHIAADEGLARRYVILTSIPSFGPTVAATLIACMAELGACSRKQIALLAGVAPIADQSGKREGVRVVWGGRPAVRRALYLAALSAATHNPGMKVFYQRLIAKGKAAKQALIAVARKLIVLANTLIAEDRTWQPSPPKLA

SEQ ID NO: 177883 - protein, 419 aa, unidentified
MTTNYQVAAGLDVHKRFIQATILWINETKKQRQFPRTHEGLLGLKDWIIEHKCDVVACESTSDFWVCIYDILISHVLVIVGNAHDIKVMAHKKTDKIDAEKIALLALKGMIAPSRVMPRYHRDFRKLVRLRHFLVGKRTDIKNRIHSILDGELFQLSLIFSDMFGVSGQRIMEGIQRGSSVEQILQSIPPWVLAKKENELRALIEQNVSPNAMIQLGHCLRVVRQLDEEIEMLTDEALTYVLQKYPREYTILKSVPGIGNIAAITLIAEIGNFRDFISGNKLASWIGIVPKVYQSANHIVKCSITKRGSRIARWIMTEVAHAAIRQRKNVFREWYEEKKAVIGSGKAIIAVARKMTTIIWHLIVNDEEFINKYNEPEQPKSKKVHTIHIPVSKNYTVEQVLALVADAINFLNKSDPDPI

SEQ ID NO: 177884 - protein, 355 aa, unidentified
MSQEKYIGMDVHQATISVAVMDAGGKLIMECLLETKAATIVEFIRGLHGTLSLTFEEGTSAAWLHDLLKPHVSRLVVCDPRKNALLKDGNKSDRIDARKLAELLRGNQLHPVYHGEHGVRTLKELGRSYLTITQDVTRVMNRIKALYRSWAIPCAGTTVYAPRHRAEWLAKIGEPGVRVRAERLYQQLDLLQPVRLQARRELLAESHRHSAVKLLRQIPAIGPIRSALLVALLQTPHRFRTKRQLCAYSGFAVETHDSGEYRSVRGKLQRNRERMTVRGLNDNHNRDLKNLFKSAAISASTRPGPLRDFYVARVEKGMRPTMARLTLARKMAAISLTIWKKGVDFDAKQLDQQTA

SEQ ID NO: 177885 - protein, 338 aa, unidentified
MNYVGIDHHRQYSHMTLMDQEGQTIRSGRVPNLRAEIEKFLEGSEAVEAVIETGRSSYTMVDVLEEMGVAVKIAHPNEVKAIARAKIKTDKRDSEVLAHLLRMNMVPEVYRRSTENRQAQRVLRQRSFYVSARTALKNRVHAFLAQQREEIREVVARETNIFSEKGQKVLLGLDLAPGEKRLLEALLKTYRHLETRIEESTALVEKLYEESREAQLVRTIPGFGKFLSVLVTVEIADLTRFADPAHLHAYAGVIPSTHSSGDRTHHGKIVRAGNRWLRWAAVEAVWPAIRADFDLRCFYERLARGKGANKAKVATARRLLTIIYKVWKEQRNYIPYRR

SEQ ID NO: 177886 - protein, 376 aa, unidentified
MEHDSTVYVGLDVHKESITVAYALGSGEVEVLGKIGTTKAEIDRLCKRLQSKARHIRIVYEAGPCGYGLYRQLVQKGFDCMVCAPSLIPKKPGERVKTDRRDAVKLVRSLRAGDLSRVYVPTVDDEAFRDLARAWVSTKDDLKRARQRLKGFLLLHGVGYTGRADWGPSHRRWLSEFTFESAWQQLAFEEHRRTIEDRLAQCERLEAALREAVVNWRFYPVVLALQTMRGVQFTTAVGLLAELGDLSRFDHPRQLMGWLGVTPSEHSSGEKRRQGSITKNGNAYARKLLVEAAWSYQHPARVSPEIQRRHQGIPKPIVDRAWDAQVRLCRRYRKLVARGKQKNIAVIAVARELSGFIWDIGRLAMSLAVSQEALTT

SEQ ID NO: 177887 - protein, 338 aa, unidentified
MEAYAGIDLHSSNSYIGIIDEQDQRHFGKRLPNSLPQILMALEPFKKDIEAVVVESTYNWYWLVDGLQEEGYKVHLANPSAIKQYEGLKHTDDKWDAFWLAHMKRLNILPEGYIYPKEERPVRDILRRRLLFVRQRTDQILSLQSTIVRNLSFRMSGNAIKKLKEEDIEDLFDSPFLVLTAKSNIAVIDFLTKRIKAIEHAIKSEVKLRKEFQLLKTIPGIGDILAFTIMLEVGDIGRFPKVGNYSSYCRCVKSEKLTNKKKKGENNRKNGNKYLSWAYVEAANFTIRFSPEAQKFYQRKMAKTGKIVAIKALGNKLARASYYIMRDQVAYDPSKLFG

SEQ ID NO: 177888 - protein, 336 aa, unidentified
MEPQRYVGIDFHRRRSVIVHKDSAGNLLETVHLDNDREAFATEIAKAGEHPEVVLEACYGWYWLADLLDELGATLHLAHPLGNNWGHRRVKNDERDAEDLVDLLRLGRLAEAYIAPPELRELRELVRYRAKLVALRSGLKSQVHSVLAKEGIAVPMTDLFGLAGRHLLDTAPLGRSYGIRTESLRDLIEAHSAQIEMLDGEIDHWIAGDVGFHAIQAIPGVGPVLGAVFLAEIGDVTRFSSADKLACWAGLTPRHRESDLHVVRGPITKQGSRIVRWAAIEAAQRRKGFQNERFSAIAERRGSNKIARVALARHLITLVYYGLRDGEIRCLAEKTG

SEQ ID NO: 177889 - protein, 332 aa, unidentified
MLNCIGIDVSKSTLNVHISKNSQDLQINNTIQSVKKLYSKLKKIYKKEIEEIIFIFEPTGSYSELLRKFCFEQKIRCFIINPKQFANYAKALGEEVKNDEVDARVLAQAIVLAKENQITVPHYDATVEQIKELMSFYKFTTKQTSQLKNHLESLVSKNGDKFAIKELKKSIKLSKEKEKRIIAEVQNIIDSNPTYKEDFKNITSITGVGQIGGIALLHLFIKYPEANQRQIVSLVGLNPIYRKSGSSIQSLHKISKSGSILYRGSLFMGVMTAIRYDDNFKAFFERLKANGKHTTQAQIAVMRKIIIVTHSLYKNKQQYVKRIVESEVIVMK

SEQ ID NO: 177890 - protein, 387 aa, unidentified
MYFVGIDISKFKHDCAVIDEIGDTIQPSWSFGNDREGFSLLKERLDSLPGDKKIGLEATGHYGQNLKLFLEANGFAFMEFNSLLVSRFVQGKSLRNTKTDPIDARNVAQYLMTVEYKPYPPSFYHLDQLKSLTRFRSSLVRQRSRQLVHLTNVLDKMFPEFKPFFKGKFSATALYILDHYQSPERIANMNARSYESLRKISRGHFSLNDFVNLKALAKNTVGCTTDFLLQEMSILLELYTQLDAKVEELDAQIEECVRGIDPPMLSIPGVGASSTAVILSEYGDFSKFKNPAKMLAFAGLEPGYFQSGQSESTGHMVKHGSPHLRCAILNCCLPLVSNEPVFAEFYAKKRAEGKTHQVAMTHVAKKLLRVIYTLQTKNIPYDPTLIR

SEQ ID NO: 177891 - protein, 306 aa, unidentified
MSEIHVVGLDLAKQIFQVHAITSEGAVVVRRQLRRSQVLTFFSKLPSCLVGMEACGGAHFWAREIARLGHQVRLMPPNYVKPYVKRGKTDAGDAEAICEAVSRPTMRFVPVKTAEQQAAAMVLKTRDLLVRQRNQAINALRAHLSELGIVSGTGVSRVAGLIGIVRDPDDARLPVIARQVLVDLSDHIEALTERLHRLDREIVARSREDADLRRLTAVPGIGPISAASLKALVPDPSRFISGRHFAAWLGLTPRAHSSGGKERLGRISKMGNPTLRTLLILGATTVLRHARNGGKASPWLLFDPRV

SEQ ID NO: 177892 - protein, 404 aa, unidentified
MKGPIVSIDVSKGKSDYQAFKEMNVKYTGSRSIKHNKEGFDEIVNLVREMEKKLETEVCVVYEATGVYHRVLKKVLEDNNIKQFIINPLLSAKTRKNDSLRSPKTDKLDPKSIAKTYYSHSLHNSHKPETIYHELRELSRYYEDILVHLRKDKVAFRAQLDVVFPGYDTLYDDLYGPVALAIIEKYPHPEMLQKKKINTVSKVIQNKTCHRQAMSDTMADKAIEYSKTIYSGCDKDDIEVLILQRFIKKLKEDMAEAERTIGEMIKLAQELPDFSIIKSIPGIGDNLAARIIAELGDMTRFKKKNELVAFAGLDPRISESGQNDGDHMHITKKGNKRLRCLLYLAVTCSIRLKRDDNSIKDFYIKKKQQSNPMCSKAAKTACASKLVRIIYSMCKTGELYQYNK

SEQ ID NO: 177893 - protein, 345 aa, unidentified
MQNYTVLAIDLAKHVFQVVKTTGYGKAVFNKKMNRGELKELLRREPKAMVLMEACGGSHYWCRLAESFGHQVKALPARQVKPFRQGQKTDANDAVAIAIAARQPHLKPARVLSEEEQGLQCIEKMRELQIAHKTALSNQLRGLLFEFGIVMSKSDAALKKALPEILEDAENGLPGGFRTVLAQMWALYLTISSELEKLSQFQHQLTLQDEQGRALSALEGVGPVGALGLKLAIGNGVHFKNGRQAAACIGVTPVQHSSGGKENIGSISKLSGHKKLRSVLIQGAMAVLRHLATREARNTKEQWLKALVQRRGTRIAAVALANKTVRTAWAMLSRQQEYQAPGLLA

SEQ ID NO: 177894 - protein, 338 aa, unidentified
MTIVMGLDQHRAQITAEWLDTDTGEVMRTRITPAHRAGVRRFCERFDGQEFEVALEATTGWRFVADEFQRVGVSVHLAEPAETAAMRGNKKRAKSDRADARHIRELLGGGRLPESWIPPEHILDLRARVRLRHTLSHQRGEWQQRIQAVLYHHGCPQHGNLITCEGRSWLAAQHLSAGAREQITIALGVIDALEVQIAPLDKELRCFARRQAGCKALMTQFGVGELTAVTILAELGDARRFSSSRDAVRFAGLDITVHQSDQRRAPGHLSRQGPPALRWALFEATMCAARPSSPDYEYYSQAAERLGSNRARLSVARKILKRSFHLLRELGDEALAPA

SEQ ID NO: 177895 - protein, 419 aa, unidentified
MKKHSKSSQRSEPTLKRTKAHGPVQRDAKEVLAEVLGKLTGKLDGRRAVSTSAKENRRGNTVGPNRDRLTVGVDLGDRWSQYCILGLEGETLAEGQLRTTQEDVGAFFQALTPARVVIEVGTHSPWVQDVITELGHEVLVANPRLMEGSKRRKRKSDRIDANKLARLGRVDPQSLYPIRHRSREVRQDLVVLRARDALVSVRTELINTTRGRVKSMGTRLPRCSSPSFAEKVKDAIPVEAREALLPLVQLVETVNDCIEKYDQRIEELGRKKYGHTSLLRQVKGVGPITSLAYVLTLEDPQRFSSSREVGPYLGLVPKQEDSGDSQPQLGISKTGDRMLRRLLVGSSQYMLGAFGPDTDLRRYGLRLCERGGKNAKKRAVVAVARKLAVLLHHLWVSGDVYEPLRHPGAGSRTAEAVAA

SEQ ID NO: 177896 - protein, 433 aa, unidentified
MSIFLSPSFAAWPNERKDTLEKKNERRCCGMDIHKETVVVCVLPPDGREGKPIKKVYGTFHADLGRMRGWLKQLKVTDIAMESTGVYWRPVWNVLEGHGFELLLANPKQVKALHGRKSDKRDCERVAQFLQDRRLDPSFVPPPEIQRLRDLLRYRLNLLEQRNETHNKIRDLFETANIKLSSVASDLLGVTGQNIIQAMIAGEDSAERLSWKVRGSLRQKEKEVKRSLVGCFDEFHRRLLEWLWTQYQFLSTQIAEVEECARRHMEPHRELIELLDQVPGINETVSWTVIAELGTDMGVFPTAAHVASWAGMCPGTNESAGKQKSGKTRKGNRYLRRILLQAAWAATRQKDSYLRAFFYRLQRRRGWGKAIIALGHKLLRIIYEIMKTHTPYSELGADYYDQLNPQKTISRLVVRLEHLGVAVQLKPQNLSNA

SEQ ID NO: 177897 - protein, 365 aa, unidentified
MSGASSSRRRPSVVNTRASEGNTNDKGGPNVERQYVGIDLHRRRSVIVRRTPAGETLETVRIDNDPVALALELAKAGPDPEVVLEATYGWYWASDVLQANGANVHLAHPLGNNWGHRRVKNDERDATDLVDLLRMGRLAEAWIAPPELRELRELVRYRAKLVALRSGLKAQVHAVLAKEGVAVPMSDLFGVAGRAMLDTCALGRAYTTRVESLRDLIELFDREVGMLEGLVYRQLAGHPGYRAVQAICGVGPVLGAIFVAEIGDVHRFPAAPQLCSWAGLTPSHHESDTTVRRGHITKQGSRLVRWAAVEAVQRQRGGTFLQVHHHRVADRRGKGIGKVATARKLLTLVYYGLRDGEIRCLAKAG

SEQ ID NO: 177898 - protein, 410 aa, unidentified
MEAIIERCCGLDVHQATVVACLLVGRADQKPRKQIRTFRTVTKELLELQSWLLEEGCTHVAMESTGVYWKPIYALLENSFDLTVGNAAHIRNVPGRKTDVKDSEWIADLLRHGLIAKSFVPPKPIRILRDLTRYRVKLVESRSTERNRLLKLLETCNIKLSTFVSNVFGVSGMAMLRALVANSSTPEQMAVLAKGRLKSKIPDLELALEGRLDDDHRFLLEMHLDRLDRVEEDLDSLERRIEQHLEPMRDAQTLLRTVPGIERTNAARIIAEIGVDMSAFPSANHLASWAGVCPGNHESAGRRQRGTKRLGNVHLTTTLVEAAQAAIRKKNSYFRDKFHRIKARRGYKRALMAIAHKILVAIYHMLRDGKPFLDLGTHYLDRVDEKRTTRKLIRRLEALGFDVALSRKAA

SEQ ID NO: 177899 - protein, 314 aa, unidentified
MATPLYVGIDVSKHRLDVATEPAGEGRSFTNDQGGIDQLLDWVAKLAPTLVVLEATGGYQMPLASALGAAGQPTAVVNPRQVRDYAKARGILAKTDAIDAAVLAGFAAAMQTQARPVPDREAQRLKALVARRRDLVAMIGAEKNRLDTALPVVARQITKHIKWLQKQLQALEDDIDHTIRTSPVWREKDDLLQSMPGIGPVTSFVLIAELSELGTLSHKQIAALVGVAPFNCDSGRQRGQRTCWGGRAEVRKALYMSALSATRHNPVIIAFYQHLIAQGKPFRVALIACMHKLLTHLNAMLRDNAAWQPAAPST

SEQ ID NO: 177900 - protein, 421 aa, unidentified
MRAVALDVHRDFCEVAIVAEGRLASAGRIKTRPDVLQLFAQSLDARDWVALEVTGNAWAIAGILEPHVARVIVVSPTDTGIRQARAKTDRLDARTLAKLLWAGELDGVWTPDERIRAMRRRLSRRAQLVRARSRVKNEIHAVLMRCLKDRPPAADLFGNKGRRWLADQQLPVCERETVDAGLRQVDFLDAEIAQVEQLIAADALGWPEVKRLMTVPGVNVTVAATFMAAIGDIGRFPDRRKLTAYLGLDPRVRQSGAGPASHGHISKQGSNSARHALVEACWSTVRQPGPIAAFYARVRARRGHSIAIVAAARKLACLFWCLLTRGEDYAFAQPSLTKKKMRRLELAAGAPRWQGGRDVWSTNLAMRQAERDLALQAQRAYERTVKDRAQDSGASATPGRASRGSSKEQVARQTSRPMSAL

SEQ ID NO: 177901 - protein, 395 aa, unidentified
MPKRSKKRKSQSFKVPSLPPHLQHINLNAAGIDIGSERHMVAVPEGRDTVSVREFGAFTSDLEALAAWLKQCGVTTVAMESTGVYWIPLFELLERRGFEVKLVDARHVKNVSGRKSDVLDCQWIQQLHTYGLLAGAFRPPDEVCVLRSYLRQREMLIQTASMHIQHMQKALQQMNLLLHNVVSDITGVTGMKIIKAILAGERDPRVLARNRDERCQNTTATIAKSLVGNYREEHLFALRQAVDLYETYQAKIADCDQAIIKQVEQQPDISDDGPPAPEKPIPSKARIRDGVDVRHLLFKKSGVDLFAIPGLAADTLLTLASEVGFDMTPWKTEKNFGSWLGLCPGTKISGGNGLPKRFAWLPLACTAARQRWARSTAVSNHAPVANKPSLPRRTK
